United States Patent Application Publication US 2018/0305689 A1 - sequence listing, part 15

SEQ ID NO: 172768 - RNA, 19 nt, Artificial Sequence
  Description of Artificial Sequence: Synthetic oligonucleotide
  Sense strand starting at position 914 of SEQ ID NO: 2225
cugccaguucuagaucaca

SEQ ID NO: 172769 - RNA, 19 nt, Artificial Sequence
  Description of Artificial Sequence: Synthetic oligonucleotide
  Antisense strand to SEQ ID NO: 172768
ugugaucuagaacuggcag

SEQ ID NO: 172770 - RNA, 19 nt, Artificial Sequence
  Description of Artificial Sequence: Synthetic oligonucleotide
  Sense strand starting at position 857 of SEQ ID NO: 2225
uccugagaccucugacuuc

SEQ ID NO: 172771 - RNA, 19 nt, Artificial Sequence
  Description of Artificial Sequence: Synthetic oligonucleotide
  Antisense strand to SEQ ID NO: 172770
gaagucagaggucucagga

SEQ ID NO: 172772 - RNA, 19 nt, Artificial Sequence
  Description of Artificial Sequence: Synthetic oligonucleotide
  Sense strand starting at position 528 of SEQ ID NO: 2225
acacuuuauggaugauacu

SEQ ID NO: 172773 - RNA, 19 nt, Artificial Sequence
  Description of Artificial Sequence: Synthetic oligonucleotide
  Antisense strand to SEQ ID NO: 172772
aguaucauccauaaagugu

SEQ ID NO: 172774 - RNA, 19 nt, Artificial Sequence
  Description of Artificial Sequence: Synthetic oligonucleotide
  Sense strand starting at position 437 of SEQ ID NO: 2225
uggugaagaauauguuaag

SEQ ID NO: 172775 - RNA, 19 nt, Artificial Sequence
  Description of Artificial Sequence: Synthetic oligonucleotide
  Antisense strand to SEQ ID NO: 172774
cuuaacauauucuucacca

SEQ ID NO: 172776 - RNA, 19 nt, Artificial Sequence
  Description of Artificial Sequence: Synthetic oligonucleotide
  Sense strand starting at position 435 of SEQ ID NO: 2225
guuggugaagaauauguua

SEQ ID NO: 172777 - RNA, 19 nt, Artificial Sequence
  Description of Artificial Sequence: Synthetic oligonucleotide
  Antisense strand to SEQ ID NO: 172776
uaacauauucuucaccaac

SEQ ID NO: 172778 - RNA, 19 nt, Artificial Sequence
  Description of Artificial Sequence: Synthetic oligonucleotide
  Sense strand starting at position 429 of SEQ ID NO: 2225
gcaacuguuggugaagaau

SEQ ID NO: 172779 - RNA, 19 nt, Artificial Sequence
  Description of Artificial Sequence: Synthetic oligonucleotide
  Antisense strand to SEQ ID NO: 172778
auucuucaccaacaguugc

SEQ ID NO: 172780 - RNA, 19 nt, Artificial Sequence
  Description of Artificial Sequence: Synthetic oligonucleotide
  Sense strand starting at position 307 of SEQ ID NO: 2225
uuggcaauagauugagaca

SEQ ID NO: 172781 - RNA, 19 nt, Artificial Sequence
  Description of Artificial Sequence: Synthetic oligonucleotide
  Antisense strand to SEQ ID NO: 172780
ugucucaaucuauugccaa

SEQ ID NO: 172782 - RNA, 19 nt, Artificial Sequence
  Description of Artificial Sequence: Synthetic oligonucleotide
  Sense strand starting at position 302 of SEQ ID NO: 2225
uaguguuggcaauagauug

SEQ ID NO: 172783 - RNA, 19 nt, Artificial Sequence
  Description of Artificial Sequence: Synthetic oligonucleotide
  Antisense strand to SEQ ID NO: 172782
caaucuauugccaacacua

SEQ ID NO: 172784 - RNA, 19 nt, Artificial Sequence
  Description of Artificial Sequence: Synthetic oligonucleotide
  Sense strand starting at position 282 of SEQ ID NO: 2225
auuagcaucccaggaauga

SEQ ID NO: 172785 - RNA, 19 nt, Artificial Sequence
  Description of Artificial Sequence: Synthetic oligonucleotide
  Antisense strand to SEQ ID NO: 172784
ucauuccugggaugcuaau

SEQ ID NO: 172786 - RNA, 19 nt, Artificial Sequence
  Description of Artificial Sequence: Synthetic oligonucleotide
  Sense strand starting at position 263 of SEQ ID NO: 2225
guagaaauccugggcagaa

SEQ ID NO: 172787 - RNA, 19 nt, Artificial Sequence
  Description of Artificial Sequence: Synthetic oligonucleotide
  Antisense strand to SEQ ID NO: 172786
uucugcccaggauuucuac

SEQ ID NO: 172788 - RNA, 19 nt, Artificial Sequence
  Description of Artificial Sequence: Synthetic oligonucleotide
  Sense strand starting at position 262 of SEQ ID NO: 2225
aguagaaauccugggcaga

SEQ ID NO: 172789 - RNA, 19 nt, Artificial Sequence
  Description of Artificial Sequence: Synthetic oligonucleotide
  Antisense strand to SEQ ID NO: 172788
ucugcccaggauuucuacu

SEQ ID NO: 172790 - RNA, 19 nt, Artificial Sequence
  Description of Artificial Sequence: Synthetic oligonucleotide
  Sense strand starting at position 48 of SEQ ID NO: 2225
cugggacuaacacgauuau

SEQ ID NO: 172791 - RNA, 19 nt, Artificial Sequence
  Description of Artificial Sequence: Synthetic oligonucleotide
  Antisense strand to SEQ ID NO: 172790
auaaucguguuagucccag

SEQ ID NO: 172792 - RNA, 19 nt, Artificial Sequence
  Description of Artificial Sequence: Synthetic oligonucleotide
  Sense strand starting at position 3905 of SEQ ID NO: 2226
uuaagagcuuuauugcuca

SEQ ID NO: 172793 - RNA, 19 nt, Artificial Sequence
  Description of Artificial Sequence: Synthetic oligonucleotide
  Antisense strand to SEQ ID NO: 172792
ugagcaauaaagcucuuaa

SEQ ID NO: 172794 - RNA, 19 nt, Artificial Sequence
  Description of Artificial Sequence: Synthetic oligonucleotide
  Sense strand starting at position 3687 of SEQ ID NO: 2226
guccuuccuuaagugauga

SEQ ID NO: 172795 - RNA, 19 nt, Artificial Sequence
  Description of Artificial Sequence: Synthetic oligonucleotide
  Antisense strand to SEQ ID NO: 172794
ucaucacuuaaggaaggac

SEQ ID NO: 172796 - RNA, 19 nt, Artificial Sequence
  Description of Artificial Sequence: Synthetic oligonucleotide
  Sense strand starting at position 3684 of SEQ ID NO: 2226
ccaguccuuccuuaaguga

SEQ ID NO: 172797 - RNA, 19 nt, Artificial Sequence
  Description of Artificial Sequence: Synthetic oligonucleotide
  Antisense strand to SEQ ID NO: 172796
ucacuuaaggaaggacugg

SEQ ID NO: 172798 - RNA, 19 nt, Artificial Sequence
  Description of Artificial Sequence: Synthetic oligonucleotide
  Sense strand starting at position 3475 of SEQ ID NO: 2226
cgagucacugagugaagau

SEQ ID NO: 172799 - RNA, 19 nt, Artificial Sequence
  Description of Artificial Sequence: Synthetic oligonucleotide
  Antisense strand to SEQ ID NO: 172798
aucuucacucagugacucg

SEQ ID NO: 172800 - RNA, 19 nt, Artificial Sequence
  Description of Artificial Sequence: Synthetic oligonucleotide
  Sense strand starting at position 3474 of SEQ ID NO: 2226
gcgagucacugagugaaga

SEQ ID NO: 172801 - RNA, 19 nt, Artificial Sequence
  Description of Artificial Sequence: Synthetic oligonucleotide
  Antisense strand to SEQ ID NO: 172800
ucuucacucagugacucgc

SEQ ID NO: 172802 - RNA, 19 nt, Artificial Sequence
  Description of Artificial Sequence: Synthetic oligonucleotide
  Sense strand starting at position 3472 of SEQ ID NO: 2226
aagcgagucacugagugaa

SEQ ID NO: 172803 - RNA, 19 nt, Artificial Sequence
  Description of Artificial Sequence: Synthetic oligonucleotide
  Antisense strand to SEQ ID NO: 172802
uucacucagugacucgcuu

SEQ ID NO: 172804 - RNA, 19 nt, Artificial Sequence
  Description of Artificial Sequence: Synthetic oligonucleotide
  Sense strand starting at position 3218 of SEQ ID NO: 2226
ggaagugucggcaguacca

SEQ ID NO: 172805 - RNA, 19 nt, Artificial Sequence
  Description of Artificial Sequence: Synthetic oligonucleotide
  Antisense strand to SEQ ID NO: 172804
ugguacugccgacacuucc

SEQ ID NO: 172806 - RNA, 19 nt, Artificial Sequence
  Description of Artificial Sequence: Synthetic oligonucleotide
  Sense strand starting at position 3058 of SEQ ID NO: 2226
cgguccggaugauuuguaa

SEQ ID NO: 172807 - RNA, 19 nt, Artificial Sequence
  Description of Artificial Sequence: Synthetic oligonucleotide
  Antisense strand to SEQ ID NO: 172806
uuacaaaucauccggaccg

SEQ ID NO: 172808 - RNA, 19 nt, Artificial Sequence
  Description of Artificial Sequence: Synthetic oligonucleotide
  Sense strand starting at position 2997 of SEQ ID NO: 2226
acguuuauuacaggagggu

SEQ ID NO: 172809 - RNA, 19 nt, Artificial Sequence
  Description of Artificial Sequence: Synthetic oligonucleotide
  Antisense strand to SEQ ID NO: 172808
acccuccuguaauaaacgu

SEQ ID NO: 172810 - RNA, 19 nt, Artificial Sequence
  Description of Artificial Sequence: Synthetic oligonucleotide
  Sense strand starting at position 2402 of SEQ ID NO: 2226
aacauaggucuguaagagu

SEQ ID NO: 172811 - RNA, 19 nt, Artificial Sequence
  Description of Artificial Sequence: Synthetic oligonucleotide
  Antisense strand to SEQ ID NO: 172810
acucuuacagaccuauguu

SEQ ID NO: 172812 - RNA, 19 nt, Artificial Sequence
  Description of Artificial Sequence: Synthetic oligonucleotide
  Sense strand starting at position 2401 of SEQ ID NO: 2226
uaacauaggucuguaagag

SEQ ID NO: 172813 - RNA, 19 nt, Artificial Sequence
  Description of Artificial Sequence: Synthetic oligonucleotide
  Antisense strand to SEQ ID NO: 172812
cucuuacagaccuauguua

SEQ ID NO: 172814 - RNA, 19 nt, Artificial Sequence
  Description of Artificial Sequence: Synthetic oligonucleotide
  Sense strand starting at position 2400 of SEQ ID NO: 2226
cuaacauaggucuguaaga

SEQ ID NO: 172815 - RNA, 19 nt, Artificial Sequence
  Description of Artificial Sequence: Synthetic oligonucleotide
  Antisense strand to SEQ ID NO: 172814
ucuuacagaccuauguuag

SEQ ID NO: 172816 - RNA, 19 nt, Artificial Sequence
  Description of Artificial Sequence: Synthetic oligonucleotide
  Sense strand starting at position 2397 of SEQ ID NO: 2226
agucuaacauaggucugua

SEQ ID NO: 172817 - RNA, 19 nt, Artificial Sequence
  Description of Artificial Sequence: Synthetic oligonucleotide
  Antisense strand to SEQ ID NO: 172816
uacagaccuauguuagacu

SEQ ID NO: 172818 - RNA, 19 nt, Artificial Sequence
  Description of Artificial Sequence: Synthetic oligonucleotide
  Sense strand starting at position 2388 of SEQ ID NO: 2226
gcgccugcuagucuaacau

SEQ ID NO: 172819 - RNA, 19 nt, Artificial Sequence
  Description of Artificial Sequence: Synthetic oligonucleotide
  Antisense strand to SEQ ID NO: 172818
auguuagacuagcaggcgc

SEQ ID NO: 172820 - RNA, 19 nt, Artificial Sequence
  Description of Artificial Sequence: Synthetic oligonucleotide
  Sense strand starting at position 2284 of SEQ ID NO: 2226
ggauucuucuuaguaacuc

SEQ ID NO: 172821 - RNA, 19 nt, Artificial Sequence
  Description of Artificial Sequence: Synthetic oligonucleotide
  Antisense strand to SEQ ID NO: 172820
gaguuacuaagaagaaucc

SEQ ID NO: 172822 - RNA, 19 nt, Artificial Sequence
  Description of Artificial Sequence: Synthetic oligonucleotide
  Sense strand starting at position 2281 of SEQ ID NO: 2226
ccgggauucuucuuaguaa

SEQ ID NO: 172823 - RNA, 19 nt, Artificial Sequence
  Description of Artificial Sequence: Synthetic oligonucleotide
  Antisense strand to SEQ ID NO: 172822
uuacuaagaagaaucccgg

SEQ ID NO: 172824 - RNA, 19 nt, Artificial Sequence
  Description of Artificial Sequence: Synthetic oligonucleotide
  Sense strand starting at position 2273 of SEQ ID NO: 2226
ccuggucuccgggauucuu

SEQ ID NO: 172825 - RNA, 19 nt, Artificial Sequence
  Description of Artificial Sequence: Synthetic oligonucleotide
  Antisense strand to SEQ ID NO: 172824
aagaaucccggagaccagg

SEQ ID NO: 172826 - RNA, 19 nt, Artificial Sequence
  Description of Artificial Sequence: Synthetic oligonucleotide
  Sense strand starting at position 2248 of SEQ ID NO: 2226
guugauuagaauugagagu

SEQ ID NO: 172827 - RNA, 19 nt, Artificial Sequence
  Description of Artificial Sequence: Synthetic oligonucleotide
  Antisense strand to SEQ ID NO: 172826
acucucaauucuaaucaac

SEQ ID NO: 172828 - RNA, 19 nt, Artificial Sequence
  Description of Artificial Sequence: Synthetic oligonucleotide
  Sense strand starting at position 2242 of SEQ ID NO: 2226
accuguguugauuagaauu

SEQ ID NO: 172829 - RNA, 19 nt, Artificial Sequence
  Description of Artificial Sequence: Synthetic oligonucleotide
  Antisense strand to SEQ ID NO: 172828
aauucuaaucaacacaggu

SEQ ID NO: 172830 - RNA, 19 nt, Artificial Sequence
  Description of Artificial Sequence: Synthetic oligonucleotide
  Sense strand starting at position 2239 of SEQ ID NO: 2226
cacaccuguguugauuaga

SEQ ID NO: 172831 - RNA, 19 nt, Artificial Sequence
  Description of Artificial Sequence: Synthetic oligonucleotide
  Antisense strand to SEQ ID NO: 172830
ucuaaucaacacaggugug

SEQ ID NO: 172832 - RNA, 19 nt, Artificial Sequence
  Description of Artificial Sequence: Synthetic oligonucleotide
  Sense strand starting at position 2212 of SEQ ID NO: 2226
gaugaauggugucucagaa

SEQ ID NO: 172833 - RNA, 19 nt, Artificial Sequence
  Description of Artificial Sequence: Synthetic oligonucleotide
  Antisense strand to SEQ ID NO: 172832
uucugagacaccauucauc

SEQ ID NO: 172834 - RNA, 19 nt, Artificial Sequence
  Description of Artificial Sequence: Synthetic oligonucleotide
  Sense strand starting at position 2196 of SEQ ID NO: 2226
gccguaccucgugugagau

SEQ ID NO: 172835 - RNA, 19 nt, Artificial Sequence
  Description of Artificial Sequence: Synthetic oligonucleotide
  Antisense strand to SEQ ID NO: 172834
aucucacacgagguacggc

SEQ ID NO: 172836 - RNA, 19 nt, Artificial Sequence
  Description of Artificial Sequence: Synthetic oligonucleotide
  Sense strand starting at position 2021 of SEQ ID NO: 2226
uaacucucgcgagaacaua

SEQ ID NO: 172837 - RNA, 19 nt, Artificial Sequence
  Description of Artificial Sequence: Synthetic oligonucleotide
  Antisense strand to SEQ ID NO: 172836
uauguucucgcgagaguua

SEQ ID NO: 172838 - RNA, 19 nt, Artificial Sequence
  Description of Artificial Sequence: Synthetic oligonucleotide
  Sense strand starting at position 2019 of SEQ ID NO: 2226
gcuaacucucgcgagaaca

SEQ ID NO: 172839 - RNA, 19 nt, Artificial Sequence
  Description of Artificial Sequence: Synthetic oligonucleotide
  Antisense strand to SEQ ID NO: 172838
uguucucgcgagaguuagc

SEQ ID NO: 172840 - RNA, 19 nt, Artificial Sequence
  Description of Artificial Sequence: Synthetic oligonucleotide
  Sense strand starting at position 2017 of SEQ ID NO: 2226
ccgcuaacucucgcgagaa

SEQ ID NO: 172841 - RNA, 19 nt, Artificial Sequence
  Description of Artificial Sequence: Synthetic oligonucleotide
  Antisense strand to SEQ ID NO: 172840
uucucgcgagaguuagcgg

SEQ ID NO: 172842 - RNA, 19 nt, Artificial Sequence
  Description of Artificial Sequence: Synthetic oligonucleotide
  Sense strand starting at position 1509 of SEQ ID NO: 2226
cggcaugagucuuuaaagg

SEQ ID NO: 172843 - RNA, 19 nt, Artificial Sequence
  Description of Artificial Sequence: Synthetic oligonucleotide
  Antisense strand to SEQ ID NO: 172842
ccuuuaaagacucaugccg

SEQ ID NO: 172844 - RNA, 19 nt, Artificial Sequence
  Description of Artificial Sequence: Synthetic oligonucleotide
  Sense strand starting at position 1416 of SEQ ID NO: 2226
guaaguuaacacuaacgaa

SEQ ID NO: 172845 - RNA, 19 nt, Artificial Sequence
  Description of Artificial Sequence: Synthetic oligonucleotide
  Antisense strand to SEQ ID NO: 172844
uucguuaguguuaacuuac

SEQ ID NO: 172846 - RNA, 19 nt, Artificial Sequence
  Description of Artificial Sequence: Synthetic oligonucleotide
  Sense strand starting at position 1232 of SEQ ID NO: 2226
guuauuaaacaaggaagca

SEQ ID NO: 172847 - RNA, 19 nt, Artificial Sequence
  Description of Artificial Sequence: Synthetic oligonucleotide
  Antisense strand to SEQ ID NO: 172846
ugcuuccuuguuuaauaac

SEQ ID NO: 172848 - RNA, 19 nt, Artificial Sequence
  Description of Artificial Sequence: Synthetic oligonucleotide
  Sense strand starting at position 1219 of SEQ ID NO: 2226
agaacacuccaagguuauu

SEQ ID NO: 172849 - RNA, 19 nt, Artificial Sequence
  Description of Artificial Sequence: Synthetic oligonucleotide
  Antisense strand to SEQ ID NO: 172848
aauaaccuuggaguguucu

SEQ ID NO: 172850 - RNA, 19 nt, Artificial Sequence
  Description of Artificial Sequence: Synthetic oligonucleotide
  Sense strand starting at position 1164 of SEQ ID NO: 2226
gucucagacccaugaguaa

SEQ ID NO: 172851 - RNA, 19 nt, Artificial Sequence
  Description of Artificial Sequence: Synthetic oligonucleotide
  Antisense strand to SEQ ID NO: 172850
uuacucaugggucugagac

SEQ ID NO: 172852 - RNA, 19 nt, Artificial Sequence
  Description of Artificial Sequence: Synthetic oligonucleotide
  Sense strand starting at position 1137 of SEQ ID NO: 2226
ggaggcaguaggugucaua

SEQ ID NO: 172853 - RNA, 19 nt, Artificial Sequence
  Description of Artificial Sequence: Synthetic oligonucleotide
  Antisense strand to SEQ ID NO: 172852
uaugacaccuacugccucc

SEQ ID NO: 172854 - RNA, 19 nt, Artificial Sequence
  Description of Artificial Sequence: Synthetic oligonucleotide
  Sense strand starting at position 1087 of SEQ ID NO: 2226
agagaaauguuugagacaa

SEQ ID NO: 172855 - RNA, 19 nt, Artificial Sequence
  Description of Artificial Sequence: Synthetic oligonucleotide
  Antisense strand to SEQ ID NO: 172854
uugucucaaacauuucucu

SEQ ID NO: 172856 - RNA, 19 nt, Artificial Sequence
  Description of Artificial Sequence: Synthetic oligonucleotide
  Sense strand starting at position 1060 of SEQ ID NO: 2226
gcugauuuguauucucaua

SEQ ID NO: 172857 - RNA, 19 nt, Artificial Sequence
  Description of Artificial Sequence: Synthetic oligonucleotide
  Antisense strand to SEQ ID NO: 172856
uaugagaauacaaaucagc

SEQ ID NO: 172858 - RNA, 19 nt, Artificial Sequence
  Description of Artificial Sequence: Synthetic oligonucleotide
  Sense strand starting at position 966 of SEQ ID NO: 2226
gcaaacugacuccaaaguu

SEQ ID NO: 172859 - RNA, 19 nt, Artificial Sequence
  Description of Artificial Sequence: Synthetic oligonucleotide
  Antisense strand to SEQ ID NO: 172858
aacuuuggagucaguuugc

SEQ ID NO: 172860 - RNA, 19 nt, Artificial Sequence
  Description of Artificial Sequence: Synthetic oligonucleotide
  Sense strand starting at position 886 of SEQ ID NO: 2226
aggugagaaucugucacca

SEQ ID NO: 172861 - RNA, 19 nt, Artificial Sequence
  Description of Artificial Sequence: Synthetic oligonucleotide
  Antisense strand to SEQ ID NO: 172860
uggugacagauucucaccu

SEQ ID NO: 172862 - RNA, 19 nt, Artificial Sequence
  Description of Artificial Sequence: Synthetic oligonucleotide
  Sense strand starting at position 421 of SEQ ID NO: 2226
aaagcccagguguauuaaa

SEQ ID NO: 172863 - RNA, 19 nt, Artificial Sequence
  Description of Artificial Sequence: Synthetic oligonucleotide
  Antisense strand to SEQ ID NO: 172862
uuuaauacaccugggcuuu

SEQ ID NO: 172864 - RNA, 19 nt, Artificial Sequence
  Description of Artificial Sequence: Synthetic oligonucleotide
  Sense strand starting at position 165 of SEQ ID NO: 2226
uauguuuguguguaacaaa

SEQ ID NO: 172865 - RNA, 19 nt, Artificial Sequence
  Description of Artificial Sequence: Synthetic oligonucleotide
  Antisense strand to SEQ ID NO: 172864
uuuguuacacacaaacaua

SEQ ID NO: 172866 - RNA, 19 nt, Artificial Sequence
  Description of Artificial Sequence: Synthetic oligonucleotide
  Sense strand starting at position 153 of SEQ ID NO: 2226
cacgauaaugucuauguuu

SEQ ID NO: 172867 - RNA, 19 nt, Artificial Sequence
  Description of Artificial Sequence: Synthetic oligonucleotide
  Antisense strand to SEQ ID NO: 172866
aaacauagacauuaucgug

SEQ ID NO: 172868 - RNA, 19 nt, Artificial Sequence
  Description of Artificial Sequence: Synthetic oligonucleotide
  Sense strand starting at position 126 of SEQ ID NO: 2226
uuacuaauugcagagcacu

SEQ ID NO: 172869 - RNA, 19 nt, Artificial Sequence
  Description of Artificial Sequence: Synthetic oligonucleotide
  Antisense strand to SEQ ID NO: 172868
agugcucugcaauuaguaa

SEQ ID NO: 172870 - RNA, 19 nt, Artificial Sequence
  Description of Artificial Sequence: Synthetic oligonucleotide
  Sense strand starting at position 121 of SEQ ID NO: 2226
agacauuacuaauugcaga

SEQ ID NO: 172871 - RNA, 19 nt, Artificial Sequence
  Description of Artificial Sequence: Synthetic oligonucleotide
  Antisense strand to SEQ ID NO: 172870
ucugcaauuaguaaugucu

SEQ ID NO: 172872 - RNA, 19 nt, Artificial Sequence
  Description of Artificial Sequence: Synthetic oligonucleotide
  Sense strand starting at position 271 of SEQ ID NO: 2227
ggucuugggccucgggaaa

SEQ ID NO: 172873 - RNA, 19 nt, Artificial Sequence
  Description of Artificial Sequence: Synthetic oligonucleotide
  Antisense strand to SEQ ID NO: 172872
uuucccgaggcccaagacc

SEQ ID NO: 172874 - RNA, 19 nt, Artificial Sequence
  Description of Artificial Sequence: Synthetic oligonucleotide
  Sense strand starting at position 308 of SEQ ID NO: 2227
cgcgucuccaggguaagua

SEQ ID NO: 172875 - RNA, 19 nt, Artificial Sequence
  Description of Artificial Sequence: Synthetic oligonucleotide
  Antisense strand to SEQ ID NO: 172874
uacuuacccuggagacgcg

SEQ ID NO: 172876 - RNA, 19 nt, Artificial Sequence
  Description of Artificial Sequence: Synthetic oligonucleotide
  Sense strand starting at position 545 of SEQ ID NO: 2227
gcaggagcgacuugagcua

SEQ ID NO: 172877 - RNA, 19 nt, Artificial Sequence
  Description of Artificial Sequence: Synthetic oligonucleotide
  Antisense strand to SEQ ID NO: 172876
uagcucaagucgcuccugc

SEQ ID NO: 172878 - RNA, 19 nt, Artificial Sequence
  Description of Artificial Sequence: Synthetic oligonucleotide
  Sense strand starting at position 618 of SEQ ID NO: 2227
cgccgacuucgcccaagau

SEQ ID NO: 172879 - RNA, 19 nt, Artificial Sequence
  Description of Artificial Sequence: Synthetic oligonucleotide
  Antisense strand to SEQ ID NO: 172878
aucuugggcgaagucggcg

SEQ ID NO: 172880 - RNA, 19 nt, Artificial Sequence
  Description of Artificial Sequence: Synthetic oligonucleotide
  Sense strand starting at position 619 of SEQ ID NO: 2227
gccgacuucgcccaagauu

SEQ ID NO: 172881 - RNA, 19 nt, Artificial Sequence
  Description of Artificial Sequence: Synthetic oligonucleotide
  Antisense strand to SEQ ID NO: 172880
aaucuugggcgaagucggc

SEQ ID NO: 172882 - RNA, 19 nt, Artificial Sequence
  Description of Artificial Sequence: Synthetic oligonucleotide
  Sense strand starting at position 628 of SEQ ID NO: 2227
gcccaagauuuccaucaag

SEQ ID NO: 172883 - RNA, 19 nt, Artificial Sequence
  Description of Artificial Sequence: Synthetic oligonucleotide
  Antisense strand to SEQ ID NO: 172882
cuugauggaaaucuugggc

SEQ ID NO: 172884 - RNA, 19 nt, Artificial Sequence
  Description of Artificial Sequence: Synthetic oligonucleotide
  Sense strand starting at position 788 of SEQ ID NO: 2227
gguugcgacguuuccaauu

SEQ ID NO: 172885 - RNA, 19 nt, Artificial Sequence
  Description of Artificial Sequence: Synthetic oligonucleotide
  Antisense strand to SEQ ID NO: 172884
aauuggaaacgucgcaacc

SEQ ID NO: 172886 - RNA, 19 nt, Artificial Sequence
  Description of Artificial Sequence: Synthetic oligonucleotide
  Sense strand starting at position 807 of SEQ ID NO: 2227
cgggcuccuccggaugaau

SEQ ID NO: 172887 - RNA, 19 nt, Artificial Sequence
  Description of Artificial Sequence: Synthetic oligonucleotide
  Antisense strand to SEQ ID NO: 172886
auucauccggaggagcccg

SEQ ID NO: 172888 - RNA, 19 nt, Artificial Sequence
  Description of Artificial Sequence: Synthetic oligonucleotide
  Sense strand starting at position 809 of SEQ ID NO: 2227
ggcuccuccggaugaauca

SEQ ID NO: 172889 - RNA, 19 nt, Artificial Sequence
  Description of Artificial Sequence: Synthetic oligonucleotide
  Antisense strand to SEQ ID NO: 172888
ugauucauccggaggagcc

SEQ ID NO: 172890 - RNA, 19 nt, Artificial Sequence
  Description of Artificial Sequence: Synthetic oligonucleotide
  Sense strand starting at position 1143 of SEQ ID NO: 2227
gcguccgcuuccuaaagaa

SEQ ID NO: 172891 - RNA, 19 nt, Artificial Sequence
  Description of Artificial Sequence: Synthetic oligonucleotide
  Antisense strand to SEQ ID NO: 172890
uucuuuaggaagcggacgc

SEQ ID NO: 172892 - RNA, 19 nt, Artificial Sequence
  Description of Artificial Sequence: Synthetic oligonucleotide
  Sense strand starting at position 1492 of SEQ ID NO: 2227
ccuccuugucccugaguuu

SEQ ID NO: 172893 - RNA, 19 nt, Artificial Sequence
  Description of Artificial Sequence: Synthetic oligonucleotide
  Antisense strand to SEQ ID NO: 172892
aaacucagggacaaggagg

SEQ ID NO: 172894 - RNA, 19 nt, Artificial Sequence
  Description of Artificial Sequence: Synthetic oligonucleotide
  Sense strand starting at position 2547 of SEQ ID NO: 2227
ggccuuguagcugaaagga

SEQ ID NO: 172895 - RNA, 19 nt, Artificial Sequence
  Description of Artificial Sequence: Synthetic oligonucleotide
  Antisense strand to SEQ ID NO: 172894
uccuuucagcuacaaggcc

SEQ ID NO: 172896 - RNA, 19 nt, Artificial Sequence
  Description of Artificial Sequence: Synthetic oligonucleotide
  Sense strand starting at position 2631 of SEQ ID NO: 2227
gcgggcuuguucccaauaa

SEQ ID NO: 172897 - RNA, 19 nt, Artificial Sequence
  Description of Artificial Sequence: Synthetic oligonucleotide
  Antisense strand to SEQ ID NO: 172896
uuauugggaacaagcccgc

SEQ ID NO: 172898 - RNA, 19 nt, Artificial Sequence
  Description of Artificial Sequence: Synthetic oligonucleotide
  Sense strand starting at position 2632 of SEQ ID NO: 2227
cgggcuuguucccaauaac

SEQ ID NO: 172899 - RNA, 19 nt, Artificial Sequence
  Description of Artificial Sequence: Synthetic oligonucleotide
  Antisense strand to SEQ ID NO: 172898
guuauugggaacaagcccg

SEQ ID NO: 172900 - RNA, 19 nt, Artificial Sequence
  Description of Artificial Sequence: Synthetic oligonucleotide
  Sense strand starting at position 2854 of SEQ ID NO: 2227
ggaggaauuuccggccuag

SEQ ID NO: 172901 - RNA, 19 nt, Artificial Sequence
  Description of Artificial Sequence: Synthetic oligonucleotide
  Antisense strand to SEQ ID NO: 172900
cuaggccggaaauuccucc

SEQ ID NO: 172902 - RNA, 19 nt, Artificial Sequence
  Description of Artificial Sequence: Synthetic oligonucleotide
  Sense strand starting at position 2864 of SEQ ID NO: 2227
ccggccuaggauugauuaa

SEQ ID NO: 172903 - RNA, 19 nt, Artificial Sequence
  Description of Artificial Sequence: Synthetic oligonucleotide
  Antisense strand to SEQ ID NO: 172902
uuaaucaauccuaggccgg

SEQ ID NO: 172904 - RNA, 19 nt, Artificial Sequence
  Description of Artificial Sequence: Synthetic oligonucleotide
  Sense strand starting at position 3244 of SEQ ID NO: 2227
ggccgugugcgagaucgaa

SEQ ID NO: 172905 - RNA, 19 nt, Artificial Sequence
  Description of Artificial Sequence: Synthetic oligonucleotide
  Antisense strand to SEQ ID NO: 172904
uucgaucucgcacacggcc

SEQ ID NO: 172906 - RNA, 19 nt, Artificial Sequence
  Description of Artificial Sequence: Synthetic oligonucleotide
  Sense strand starting at position 3789 of SEQ ID NO: 2227
ggguuuccacucugaaucu

SEQ ID NO: 172907 - RNA, 19 nt, Artificial Sequence
  Description of Artificial Sequence: Synthetic oligonucleotide
  Antisense strand to SEQ ID NO: 172906
agauucagaguggaaaccc

SEQ ID NO: 172908 - RNA, 19 nt, Artificial Sequence
  Description of Artificial Sequence: Synthetic oligonucleotide
  Sense strand starting at position 3845 of SEQ ID NO: 2227
cccaaaucgaguuggaaau

SEQ ID NO: 172909 - RNA, 19 nt, Artificial Sequence
  Description of Artificial Sequence: Synthetic oligonucleotide
  Antisense strand to SEQ ID NO: 172908
auuuccaacucgauuuggg

SEQ ID NO: 172910 - RNA, 19 nt, Artificial Sequence
  Description of Artificial Sequence: Synthetic oligonucleotide
  Sense strand starting at position 3856 of SEQ ID NO: 2227
uuggaaaucucuucuuguc

SEQ ID NO: 172911 - RNA, 19 nt, Artificial Sequence
  Description of Artificial Sequence: Synthetic oligonucleotide
  Antisense strand to SEQ ID NO: 172910
gacaagaagagauuuccaa

SEQ ID NO: 172912 - RNA, 19 nt, Artificial Sequence
  Description of Artificial Sequence: Synthetic oligonucleotide
  Sense strand starting at position 3864 of SEQ ID NO: 2227
cucuucuugucuccacgaa

SEQ ID NO: 172913 - RNA, 19 nt, Artificial Sequence
  Description of Artificial Sequence: Synthetic oligonucleotide
  Antisense strand to SEQ ID NO: 172912
uucguggagacaagaagag

SEQ ID NO: 172914 - RNA, 19 nt, Artificial Sequence
  Description of Artificial Sequence: Synthetic oligonucleotide
  Sense strand starting at position 153 of SEQ ID NO: 2228
agaaauuccugaggcgagu

SEQ ID NO: 172915 - RNA, 19 nt, Artificial Sequence
  Description of Artificial Sequence: Synthetic oligonucleotide
  Antisense strand to SEQ ID NO: 172914
acucgccucaggaauuucu

SEQ ID NO: 172916 - RNA, 19 nt, Artificial Sequence
  Description of Artificial Sequence: Synthetic oligonucleotide
  Sense strand starting at position 312 of SEQ ID NO: 2228
ugaaacaucuauuagacgu

SEQ ID NO: 172917 - RNA, 19 nt, Artificial Sequence
  Description of Artificial Sequence: Synthetic oligonucleotide
  Antisense strand to SEQ ID NO: 172916
acgucuaauagauguuuca

SEQ ID NO: 172918 - RNA, 19 nt, Artificial Sequence
  Description of Artificial Sequence: Synthetic oligonucleotide
  Sense strand starting at position 319 of SEQ ID NO: 2228
ucuauuagacguugggacu

SEQ ID NO: 172919 - RNA, 19 nt, Artificial Sequence
  Description of Artificial Sequence: Synthetic oligonucleotide
  Antisense strand to SEQ ID NO: 172918
agucccaacgucuaauaga

SEQ ID NO: 172920 - RNA, 19 nt, Artificial Sequence
  Description of Artificial Sequence: Synthetic oligonucleotide
  Sense strand starting at position 350 of SEQ ID NO: 2228
guccuauuagcauggucca

SEQ ID NO: 172921 - RNA, 19 nt, Artificial Sequence
  Description of Artificial Sequence: Synthetic oligonucleotide
  Antisense strand to SEQ ID NO: 172920
uggaccaugcuaauaggac

SEQ ID NO: 172922 - RNA, 19 nt, Artificial Sequence
  Description of Artificial Sequence: Synthetic oligonucleotide
  Sense strand starting at position 543 of SEQ ID NO: 2228
uccagagacuuggaauguu

SEQ ID NO: 172923 - RNA, 19 nt, Artificial Sequence
  Description of Artificial Sequence: Synthetic oligonucleotide
  Antisense strand to SEQ ID NO: 172922
aacauuccaagucucugga

SEQ ID NO: 172924 - RNA, 19 nt, Artificial Sequence
  Description of Artificial Sequence: Synthetic oligonucleotide
  Sense strand starting at position 652 of SEQ ID NO: 2228
gcggguagcuguugagcaa

SEQ ID NO: 172925 - RNA, 19 nt, Artificial Sequence
  Description of Artificial Sequence: Synthetic oligonucleotide
  Antisense strand to SEQ ID NO: 172924
uugcucaacagcuacccgc

SEQ ID NO: 172926 - RNA, 19 nt, Artificial Sequence
  Description of Artificial Sequence: Synthetic oligonucleotide
  Sense strand starting at position 903 of SEQ ID NO: 2228
aagucucgguucucauaca

SEQ ID NO: 172927 - RNA, 19 nt, Artificial Sequence
  Description of Artificial Sequence: Synthetic oligonucleotide
  Antisense strand to SEQ ID NO: 172926
uguaugagaaccgagacuu

SEQ ID NO: 172928 - RNA, 19 nt, Artificial Sequence
  Description of Artificial Sequence: Synthetic oligonucleotide
  Sense strand starting at position 922 of SEQ ID NO: 2228
gcaguguguuggcgcagau

SEQ ID NO: 172929 - RNA, 19 nt, Artificial Sequence
  Description of Artificial Sequence: Synthetic oligonucleotide
  Antisense strand to SEQ ID NO: 172928
aucugcgccaacacacugc

SEQ ID NO: 172930 - RNA, 19 nt, Artificial Sequence
  Description of Artificial Sequence: Synthetic oligonucleotide
  Sense strand starting at position 924 of SEQ ID NO: 2228
aguguguuggcgcagauga

SEQ ID NO: 172931 - RNA, 19 nt, Artificial Sequence
  Description of Artificial Sequence: Synthetic oligonucleotide
  Antisense strand to SEQ ID NO: 172930
ucaucugcgccaacacacu

SEQ ID NO: 172932 - RNA, 19 nt, Artificial Sequence
  Description of Artificial Sequence: Synthetic oligonucleotide
  Sense strand starting at position 925 of SEQ ID NO: 2228
guguguuggcgcagaugaa

SEQ ID NO: 172933 - RNA, 19 nt, Artificial Sequence
  Description of Artificial Sequence: Synthetic oligonucleotide
  Antisense strand to SEQ ID NO: 172932
uucaucugcgccaacacac

SEQ ID NO: 172934 - RNA, 19 nt, Artificial Sequence
  Description of Artificial Sequence: Synthetic oligonucleotide
  Sense strand starting at position 1679 of SEQ ID NO: 2228
ggucuugggccucgggaaa

SEQ ID NO: 172935 - RNA, 19 nt, Artificial Sequence
  Description of Artificial Sequence: Synthetic oligonucleotide
  Antisense strand to SEQ ID NO: 172934
uuucccgaggcccaagacc

SEQ ID NO: 172936 - RNA, 19 nt, Artificial Sequence
  Description of Artificial Sequence: Synthetic oligonucleotide
  Sense strand starting at position 1716 of SEQ ID NO: 2228
cgcgucuccaggguaagua

SEQ ID NO: 172937 - RNA, 19 nt, Artificial Sequence
  Description of Artificial Sequence: Synthetic oligonucleotide
  Antisense strand to SEQ ID NO: 172936
uacuuacccuggagacgcg

SEQ ID NO: 172938 - RNA, 19 nt, Artificial Sequence
  Description of Artificial Sequence: Synthetic oligonucleotide
  Sense strand starting at position 1953 of SEQ ID NO: 2228
gcaggagcgacuugagcua

SEQ ID NO: 172939 - RNA, 19 nt, Artificial Sequence
  Description of Artificial Sequence: Synthetic oligonucleotide
  Antisense strand to SEQ ID NO: 172938
uagcucaagucgcuccugc

SEQ ID NO: 172940 - RNA, 19 nt, Artificial Sequence
  Description of Artificial Sequence: Synthetic oligonucleotide
  Sense strand starting at position 2026 of SEQ ID NO: 2228
cgccgacuucgcccaagau

SEQ ID NO: 172941 - RNA, 19 nt, Artificial Sequence
  Description of Artificial Sequence: Synthetic oligonucleotide
  Antisense strand to SEQ ID NO: 172940
aucuugggcgaagucggcg

SEQ ID NO: 172942 - RNA, 19 nt, Artificial Sequence
  Description of Artificial Sequence: Synthetic oligonucleotide
  Sense strand starting at position 2027 of SEQ ID NO: 2228
gccgacuucgcccaagauu

SEQ ID NO: 172943 - RNA, 19 nt, Artificial Sequence
  Description of Artificial Sequence: Synthetic oligonucleotide
  Antisense strand to SEQ ID NO: 172942
aaucuugggcgaagucggc

SEQ ID NO: 172944 - RNA, 19 nt, Artificial Sequence
  Description of Artificial Sequence: Synthetic oligonucleotide
  Sense strand starting at position 2036 of SEQ ID NO: 2228
gcccaagauuuccaucaag

SEQ ID NO: 172945 - RNA, 19 nt, Artificial Sequence
  Description of Artificial Sequence: Synthetic oligonucleotide
  Antisense strand to SEQ ID NO: 172944
cuugauggaaaucuugggc

SEQ ID NO: 172946 - RNA, 19 nt, Artificial Sequence
  Description of Artificial Sequence: Synthetic oligonucleotide
  Sense strand starting at position 2196 of SEQ ID NO: 2228
gguugcgacguuuccaauu

SEQ ID NO: 172947 - RNA, 19 nt, Artificial Sequence
  Description of Artificial Sequence: Synthetic oligonucleotide
  Antisense strand to SEQ ID NO: 172946
aauuggaaacgucgcaacc

SEQ ID NO: 172948 - RNA, 19 nt, Artificial Sequence
  Description of Artificial Sequence: Synthetic oligonucleotide
  Sense strand starting at position 2215 of SEQ ID NO: 2228
cgggcuccuccggaugaau

SEQ ID NO: 172949 - RNA, 19 nt, Artificial Sequence
  Description of Artificial Sequence: Synthetic oligonucleotide
  Antisense strand to SEQ ID NO: 172948
auucauccggaggagcccg

SEQ ID NO: 172950 - RNA, 19 nt, Artificial Sequence
  Description of Artificial Sequence: Synthetic oligonucleotide
  Sense strand starting at position 2217 of SEQ ID NO: 2228
ggcuccuccggaugaauca

SEQ ID NO: 172951 - RNA, 19 nt, Artificial Sequence
  Description of Artificial Sequence: Synthetic oligonucleotide
  Antisense strand to SEQ ID NO: 172950
ugauucauccggaggagcc

SEQ ID NO: 172952 - RNA, 19 nt, Artificial Sequence
  Description of Artificial Sequence: Synthetic oligonucleotide
  Sense strand starting at position 2551 of SEQ ID NO: 2228
gcguccgcuuccuaaagaa

SEQ ID NO: 172953 - RNA, 19 nt, Artificial Sequence
  Description of Artificial Sequence: Synthetic oligonucleotide
  Antisense strand to SEQ ID NO: 172952
uucuuuaggaagcggacgc

SEQ ID NO: 172954 - RNA, 19 nt, Artificial Sequence
  Description of Artificial Sequence: Synthetic oligonucleotide
  Sense strand starting at position 2900 of SEQ ID NO: 2228
ccuccuugucccugaguuu

SEQ ID NO: 172955 - RNA, 19 nt, Artificial Sequence
  Description of Artificial Sequence: Synthetic oligonucleotide
  Antisense strand to SEQ ID NO: 172954
aaacucagggacaaggagg

SEQ ID NO: 172956 - RNA, 19 nt, Artificial Sequence
  Description of Artificial Sequence: Synthetic oligonucleotide
  Sense strand starting at position 3955 of SEQ ID NO: 2228
ggccuuguagcugaaagga

SEQ ID NO: 172957 - RNA, 19 nt, Artificial Sequence
  Description of Artificial Sequence: Synthetic oligonucleotide
  Antisense strand to SEQ ID NO: 172956
uccuuucagcuacaaggcc

SEQ ID NO: 172958 - RNA, 19 nt, Artificial Sequence
  Description of Artificial Sequence: Synthetic oligonucleotide
  Sense strand starting at position 3980 of SEQ ID NO: 2229
guggguagugauggauuga

SEQ ID NO: 172959 - RNA, 19 nt, Artificial Sequence
  Description of Artificial Sequence: Synthetic oligonucleotide
  Antisense strand to SEQ ID NO: 172958
ucaauccaucacuacccac

SEQ ID NO: 172960 - RNA, 19 nt, Artificial Sequence
  Description of Artificial Sequence: Synthetic oligonucleotide
  Sense strand starting at position 3973 of SEQ ID NO: 2229
acucuuuguggguagugau

SEQ ID NO: 172961 - RNA, 19 nt, Artificial Sequence
  Description of Artificial Sequence: Synthetic oligonucleotide
  Antisense strand to SEQ ID NO: 172960
aucacuacccacaaagagu

SEQ ID NO: 172962 - RNA, 19 nt, Artificial Sequence
  Description of Artificial Sequence: Synthetic oligonucleotide
  Sense strand starting at position 3972 of SEQ ID NO: 2229
aacucuuuguggguaguga

SEQ ID NO: 172963 - RNA, 19 nt, Artificial Sequence
  Description of Artificial Sequence: Synthetic oligonucleotide
  Antisense strand to SEQ ID NO: 172962
ucacuacccacaaagaguu

SEQ ID NO: 172964 - RNA, 19 nt, Artificial Sequence
  Description of Artificial Sequence: Synthetic oligonucleotide
  Sense strand starting at position 3968 of SEQ ID NO: 2229
uguaaacucuuugugggua

SEQ ID NO: 172965 - RNA, 19 nt, Artificial Sequence
  Description of Artificial Sequence: Synthetic oligonucleotide
  Antisense strand to SEQ ID NO: 172964
uacccacaaagaguuuaca

SEQ ID NO: 172966 - RNA, 19 nt, Artificial Sequence
  Description of Artificial Sequence: Synthetic oligonucleotide
  Sense strand starting at position 3967 of SEQ ID NO: 2229
uuguaaacucuuugugggu

SEQ ID NO: 172967 - RNA, 19 nt, Artificial Sequence
  Description of Artificial Sequence: Synthetic oligonucleotide
  Antisense strand to SEQ ID NO: 172966
acccacaaagaguuuacaa

SEQ ID NO: 172968 - RNA, 19 nt, Artificial Sequence
  Description of Artificial Sequence: Synthetic oligonucleotide
  Sense strand starting at position 3956 of SEQ ID NO: 2229
ugagguuaacauuguaaac

SEQ ID NO: 172969 - RNA, 19 nt, Artificial Sequence
  Description of Artificial Sequence: Synthetic oligonucleotide
  Antisense strand to SEQ ID NO: 172968
guuuacaauguuaaccuca

SEQ ID NO: 172970 - RNA, 19 nt, Artificial Sequence
  Description of Artificial Sequence: Synthetic oligonucleotide
  Sense strand starting at position 3754 of SEQ ID NO: 2229
gccuuaugugcuuguggga

SEQ ID NO: 172971 - RNA, 19 nt, Artificial Sequence
  Description of Artificial Sequence: Synthetic oligonucleotide
  Antisense strand to SEQ ID NO: 172970
ucccacaagcacauaaggc

SEQ ID NO: 172972 - RNA, 19 nt, Artificial Sequence
  Description of Artificial Sequence: Synthetic oligonucleotide
  Sense strand starting at position 3297 of SEQ ID NO: 2229
guugcaacgagucaagauu

SEQ ID NO: 172973 - RNA, 19 nt, Artificial Sequence
  Description of Artificial Sequence: Synthetic oligonucleotide
  Antisense strand to SEQ ID NO: 172972
aaucuugacucguugcaac

SEQ ID NO: 172974 - RNA, 19 nt, Artificial Sequence
  Description of Artificial Sequence: Synthetic oligonucleotide
  Sense strand starting at position 3031 of SEQ ID NO: 2229
guuauuggcauagauggau

SEQ ID NO: 172975 - RNA, 19 nt, Artificial Sequence
  Description of Artificial Sequence: Synthetic oligonucleotide
  Antisense strand to SEQ ID NO: 172974
auccaucuaugccaauaac

SEQ ID NO: 172976 - RNA, 19 nt, Artificial Sequence
  Description of Artificial Sequence: Synthetic oligonucleotide
  Sense strand starting at position 3029 of SEQ ID NO: 2229
gaguuauuggcauagaugg

SEQ ID NO: 172977 - RNA, 19 nt, Artificial Sequence
  Description of Artificial Sequence: Synthetic oligonucleotide
  Antisense strand to SEQ ID NO: 172976
ccaucuaugccaauaacuc

SEQ ID NO: 172978 - RNA, 19 nt, Artificial Sequence
  Description of Artificial Sequence: Synthetic oligonucleotide
  Sense strand starting at position 3027 of SEQ ID NO: 2229
uggaguuauuggcauagau

SEQ ID NO: 172979 - RNA, 19 nt, Artificial Sequence
  Description of Artificial Sequence: Synthetic oligonucleotide
  Antisense strand to SEQ ID NO: 172978
aucuaugccaauaacucca

SEQ ID NO: 172980 - RNA, 19 nt, Artificial Sequence
  Description of Artificial Sequence: Synthetic oligonucleotide
  Sense strand starting at position 3017 of SEQ ID NO: 2229
aagccagaucuggaguuau

SEQ ID NO: 172981 - RNA, 19 nt, Artificial Sequence
  Description of Artificial Sequence: Synthetic oligonucleotide
  Antisense strand to SEQ ID NO: 172980
auaacuccagaucuggcuu

SEQ ID NO: 172982 - RNA, 19 nt, Artificial Sequence
  Description of Artificial Sequence: Synthetic oligonucleotide
  Sense strand starting at position 3016 of SEQ ID NO: 2229
aaagccagaucuggaguua

SEQ ID NO: 172983 - RNA, 19 nt, Artificial Sequence
  Description of Artificial Sequence: Synthetic oligonucleotide
  Antisense strand to SEQ ID NO: 172982
uaacuccagaucuggcuuu

SEQ ID NO: 172984 - RNA, 19 nt, Artificial Sequence
  Description of Artificial Sequence: Synthetic oligonucleotide
  Sense strand starting at position 2577 of SEQ ID NO: 2229
agccauaguucggaacaua

SEQ ID NO: 172985 - RNA, 19 nt, Artificial Sequence
  Description of Artificial Sequence: Synthetic oligonucleotide
  Antisense strand to SEQ ID NO: 172984
uauguuccgaacuauggcu

SEQ ID NO: 172986 - RNA, 19 nt, Artificial Sequence
  Description of Artificial Sequence: Synthetic oligonucleotide
  Sense strand starting at position 2559 of SEQ ID NO: 2229
uugaauaaaucauaggaca

SEQ ID NO: 172987 - RNA, 19 nt, Artificial Sequence
  Description of Artificial Sequence: Synthetic oligonucleotide
  Antisense strand to SEQ ID NO: 172986
uguccuaugauuuauucaa

SEQ ID NO: 172988 - RNA, 19 nt, Artificial Sequence
  Description of Artificial Sequence: Synthetic oligonucleotide
  Sense strand starting at position 2437 of SEQ ID NO: 2229
gcuaauccugucuagucaa

SEQ ID NO: 172989 - RNA, 19 nt, Artificial Sequence
  Description of Artificial Sequence: Synthetic oligonucleotide
  Antisense strand to SEQ ID NO: 172988
uugacuagacaggauuagc

SEQ ID NO: 172990 - RNA, 19 nt, Artificial Sequence
  Description of Artificial Sequence: Synthetic oligonucleotide
  Sense strand starting at position 2436 of SEQ ID NO: 2229
cgcuaauccugucuaguca

SEQ ID NO: 172991 - RNA, 19 nt, Artificial Sequence
  Description of Artificial Sequence: Synthetic oligonucleotide
  Antisense strand to SEQ ID NO: 172990
ugacuagacaggauuagcg

SEQ ID NO: 172992 - RNA, 19 nt, Artificial Sequence
  Description of Artificial Sequence: Synthetic oligonucleotide
  Sense strand starting at position 2402 of SEQ ID NO: 2229
uacgcaacugcuuguaauu

SEQ ID NO: 172993 - RNA, 19 nt, Artificial Sequence
  Description of Artificial Sequence: Synthetic oligonucleotide
  Antisense strand to SEQ ID NO: 172992
aauuacaagcaguugcgua

SEQ ID NO: 172994 - RNA, 19 nt, Artificial Sequence
  Description of Artificial Sequence: Synthetic oligonucleotide
  Sense strand starting at position 2401 of SEQ ID NO: 2229
guacgcaacugcuuguaau

SEQ ID NO: 172995 - RNA, 19 nt, Artificial Sequence
  Description of Artificial Sequence: Synthetic oligonucleotide
  Antisense strand to SEQ ID NO: 172994
auuacaagcaguugcguac

SEQ ID NO: 172996 - RNA, 19 nt, Artificial Sequence
  Description of Artificial Sequence: Synthetic oligonucleotide
  Sense strand starting at position 2290 of SEQ ID NO: 2229
cacggagcccuguaggaaa

SEQ ID NO: 172997 - RNA, 19 nt, Artificial Sequence
  Description of Artificial Sequence: Synthetic oligonucleotide
  Antisense strand to SEQ ID NO: 172996
uuuccuacagggcuccgug

SEQ ID NO: 172998 - RNA, 19 nt, Artificial Sequence
  Description of Artificial Sequence: Synthetic oligonucleotide
  Sense strand starting at position 1311 of SEQ ID NO: 2229
gcagauuccaucggcucaa

SEQ ID NO: 172999 - RNA, 19 nt, Artificial Sequence
  Description of Artificial Sequence: Synthetic oligonucleotide
  Antisense strand to SEQ ID NO: 172998
uugagccgauggaaucugc

SEQ ID NO: 173000 - RNA, 19 nt, Artificial Sequence
  Description of Artificial Sequence: Synthetic oligonucleotide
  Sense strand starting at position 1310 of SEQ ID NO: 2229
ugcagauuccaucggcuca

SEQ ID NO: 173001 - RNA, 19 nt, Artificial Sequence
  Description of Artificial Sequence: Synthetic oligonucleotide
  Antisense strand to SEQ ID NO: 173000
ugagccgauggaaucugca

SEQ ID NO: 173002 - RNA, 19 nt, Artificial Sequence
  Description of Artificial Sequence: Synthetic oligonucleotide
  Sense strand starting at position 1021 of SEQ ID NO: 2229
ccacucuuucuaggauguu

SEQ ID NO: 173003 - RNA, 19 nt, Artificial Sequence
  Description of Artificial Sequence: Synthetic oligonucleotide
  Antisense strand to SEQ ID NO: 173002
aacauccuagaaagagugg

SEQ ID NO: 173004 - RNA, 19 nt, Artificial Sequence
  Description of Artificial Sequence: Synthetic oligonucleotide
  Sense strand starting at position 872 of SEQ ID NO: 2229
guauguguuaaggaagaac

SEQ ID NO: 173005 - RNA, 19 nt, Artificial Sequence
  Description of Artificial Sequence: Synthetic oligonucleotide
  Antisense strand to SEQ ID NO: 173004
guucuuccuuaacacauac

SEQ ID NO: 173006 - RNA, 19 nt, Artificial Sequence
  Description of Artificial Sequence: Synthetic oligonucleotide
  Sense strand starting at position 870 of SEQ ID NO: 2229
cgguauguguuaaggaaga

SEQ ID NO: 173007 - RNA, 19 nt, Artificial Sequence
  Description of Artificial Sequence: Synthetic oligonucleotide
  Antisense strand to SEQ ID NO: 173006
ucuuccuuaacacauaccg

SEQ ID NO: 173008 - RNA, 19 nt, Artificial Sequence
  Description of Artificial Sequence: Synthetic oligonucleotide
  Sense strand starting at position 797 of SEQ ID NO: 2229
cugggaagccucugugacu

SEQ ID NO: 173009 - RNA, 19 nt, Artificial Sequence
  Description of Artificial Sequence: Synthetic oligonucleotide
  Antisense strand to SEQ ID NO: 173008
agucacagaggcuucccag

SEQ ID NO: 173010 - RNA, 19 nt, Artificial Sequence
  Description of Artificial Sequence: Synthetic oligonucleotide
  Sense strand starting at position 641 of SEQ ID NO: 2229
augcucaacuuccaggaau

SEQ ID NO: 173011 - RNA, 19 nt, Artificial Sequence
  Description of Artificial Sequence: Synthetic oligonucleotide
  Antisense strand to SEQ ID NO: 173010
auuccuggaaguugagcau

SEQ ID NO: 173012 - RNA, 19 nt, Artificial Sequence
  Description of Artificial Sequence: Synthetic oligonucleotide
  Sense strand starting at position 546 of SEQ ID NO: 2229
caacaugcucugggaaugu

SEQ ID NO: 173013 - RNA, 19 nt, Artificial Sequence
  Description of Artificial Sequence: Synthetic oligonucleotide
  Antisense strand to SEQ ID NO: 173012
acauucccagagcauguug

SEQ ID NO: 173014 - RNA, 19 nt, Artificial Sequence
  Description of Artificial Sequence: Synthetic oligonucleotide
  Sense strand starting at position 544 of SEQ ID NO: 2229
ggcaacaugcucugggaau

SEQ ID NO: 173015 - RNA, 19 nt, Artificial Sequence
  Description of Artificial Sequence: Synthetic oligonucleotide
  Antisense strand to SEQ ID NO: 173014
auucccagagcauguugcc

SEQ ID NO: 173016 - RNA, 19 nt, Artificial Sequence
  Description of Artificial Sequence: Synthetic oligonucleotide
  Sense strand starting at position 501 of SEQ ID NO: 2229
ggcuucguccaggaagaac

SEQ ID NO: 173017 - RNA, 19 nt, Artificial Sequence
  Description of Artificial Sequence: Synthetic oligonucleotide
  Antisense strand to SEQ ID NO: 173016
guucuuccuggacgaagcc

SEQ ID NO: 173018 - RNA, 19 nt, Artificial Sequence
  Description of Artificial Sequence: Synthetic oligonucleotide
  Sense strand starting at position 500 of SEQ ID NO: 2229
cggcuucguccaggaagaa

SEQ ID NO: 173019 - RNA, 19 nt, Artificial Sequence
  Description of Artificial Sequence: Synthetic oligonucleotide
  Antisense strand to SEQ ID NO: 173018
uucuuccuggacgaagccg

SEQ ID NO: 173020 - RNA, 19 nt, Artificial Sequence
  Description of Artificial Sequence: Synthetic oligonucleotide
  Sense strand starting at position 499 of SEQ ID NO: 2229
gcggcuucguccaggaaga

SEQ ID NO: 173021 - RNA, 19 nt, Artificial Sequence
  Description of Artificial Sequence: Synthetic oligonucleotide
  Antisense strand to SEQ ID NO: 173020
ucuuccuggacgaagccgc

SEQ ID NO: 173022 - RNA, 19 nt, Artificial Sequence
  Description of Artificial Sequence: Synthetic oligonucleotide
  Sense strand starting at position 453 of SEQ ID NO: 2229
gcucucauccuugaggcaa

SEQ ID NO: 173023 - RNA, 19 nt, Artificial Sequence
  Description of Artificial Sequence: Synthetic oligonucleotide
  Antisense strand to SEQ ID NO: 173022
uugccucaaggaugagagc

SEQ ID NO: 173024 - RNA, 19 nt, Artificial Sequence
  Description of Artificial Sequence: Synthetic oligonucleotide
  Sense strand starting at position 452 of SEQ ID NO: 2229
ggcucucauccuugaggca

SEQ ID NO: 173025 - RNA, 19 nt, Artificial Sequence
  Description of Artificial Sequence: Synthetic oligonucleotide
  Antisense strand to SEQ ID NO: 173024
ugccucaaggaugagagcc

SEQ ID NO: 173026 - RNA, 19 nt, Artificial Sequence
  Description of Artificial Sequence: Synthetic oligonucleotide
  Sense strand starting at position 285 of SEQ ID NO: 2229
gacucuuguuuccaggaga

SEQ ID NO: 173027 - RNA, 19 nt, Artificial Sequence
  Description of Artificial Sequence: Synthetic oligonucleotide
  Antisense strand to SEQ ID NO: 173026
ucuccuggaaacaagaguc

SEQ ID NO: 173028 - RNA, 19 nt, Artificial Sequence
  Description of Artificial Sequence: Synthetic oligonucleotide
  Sense strand starting at position 107 of SEQ ID NO: 2229
gcucuaugaggacaucuua

SEQ ID NO: 173029 - RNA, 19 nt, Artificial Sequence
  Description of Artificial Sequence: Synthetic oligonucleotide
  Antisense strand to SEQ ID NO: 173028
uaagauguccucauagagc

SEQ ID NO: 173030 - RNA, 19 nt, Artificial Sequence
  Description of Artificial Sequence: Synthetic oligonucleotide
  Sense strand starting at position 97 of SEQ ID NO: 2229
gaaacccagugcucuauga

SEQ ID NO: 173031 - RNA, 19 nt, Artificial Sequence
  Description of Artificial Sequence: Synthetic oligonucleotide
  Antisense strand to SEQ ID NO: 173030
ucauagagcacuggguuuc

SEQ ID NO: 173032 - RNA, 19 nt, Artificial Sequence
  Description of Artificial Sequence: Synthetic oligonucleotide
  Sense strand starting at position 94 of SEQ ID NO: 2229
ggugaaacccagugcucua

SEQ ID NO: 173033 - RNA, 19 nt, Artificial Sequence
  Description of Artificial Sequence: Synthetic oligonucleotide
  Antisense strand to SEQ ID NO: 173032
uagagcacuggguuucacc

SEQ ID NO: 173034 - RNA, 19 nt, Artificial Sequence
  Description of Artificial Sequence: Synthetic oligonucleotide
  Sense strand starting at position 82 of SEQ ID NO: 2229
uuaugaccuccaggugaaa

SEQ ID NO: 173035 - RNA, 19 nt, Artificial Sequence
  Description of Artificial Sequence: Synthetic oligonucleotide
  Antisense strand to SEQ ID NO: 173034
uuucaccuggaggucauaa

SEQ ID NO: 173036 - RNA, 19 nt, Artificial Sequence
  Description of Artificial Sequence: Synthetic oligonucleotide
  Sense strand starting at position 54 of SEQ ID NO: 2229
uggcuucugaaucgugaca

SEQ ID NO: 173037 - RNA, 19 nt, Artificial Sequence
  Description of Artificial Sequence: Synthetic oligonucleotide
  Antisense strand to SEQ ID NO: 173036
ugucacgauucagaagcca

SEQ ID NO: 173038 - RNA, 19 nt, Artificial Sequence
  Description of Artificial Sequence: Synthetic oligonucleotide
  Sense strand starting at position 485 of SEQ ID NO: 2231
gggagauauguacagcagu

SEQ ID NO: 173039 - RNA, 19 nt, Artificial Sequence
  Description of Artificial Sequence: Synthetic oligonucleotide
  Antisense strand to SEQ ID NO: 173038
acugcuguacauaucuccc

SEQ ID NO: 173040 - RNA, 19 nt, Artificial Sequence
  Description of Artificial Sequence: Synthetic oligonucleotide
  Sense strand starting at position 505 of SEQ ID NO: 2231
acuauugacuaagacagaa

SEQ ID NO: 173041 - RNA, 19 nt, Artificial Sequence
  Description of Artificial Sequence: Synthetic oligonucleotide
  Antisense strand to SEQ ID NO: 173040
uucugucuuagucaauagu

SEQ ID NO: 173042 - RNA, 19 nt, Artificial Sequence
  Description of Artificial Sequence: Synthetic oligonucleotide
  Sense strand starting at position 713 of SEQ ID NO: 2231
gaguuuccacugugccaga

SEQ ID NO: 173043 - RNA, 19 nt, Artificial Sequence
  Description of Artificial Sequence: Synthetic oligonucleotide
  Antisense strand to SEQ ID NO: 173042
ucuggcacaguggaaacuc

SEQ ID NO: 173044 - RNA, 19 nt, Artificial Sequence
  Description of Artificial Sequence: Synthetic oligonucleotide
  Sense strand starting at position 773 of SEQ ID NO: 2231
ggcugcugugcuguucaga

SEQ ID NO: 173045 - RNA, 19 nt, Artificial Sequence
  Description of Artificial Sequence: Synthetic oligonucleotide
  Antisense strand to SEQ ID NO: 173044
ucugaacagcacagcagcc

SEQ ID NO: 173046 - RNA, 19 nt, Artificial Sequence
  Description of Artificial Sequence: Synthetic oligonucleotide
  Sense strand starting at position 818 of SEQ ID NO: 2231
gacuguucugggcagacga

SEQ ID NO: 173047 - RNA, 19 nt, Artificial Sequence
  Description of Artificial Sequence: Synthetic oligonucleotide
  Antisense strand to SEQ ID NO: 173046
ucgucugcccagaacaguc

SEQ ID NO: 173048 - RNA, 19 nt, Artificial Sequence
  Description of Artificial Sequence: Synthetic oligonucleotide
  Sense strand starting at position 841 of SEQ ID NO: 2231
cagcgucaggucugagaaa

SEQ ID NO: 173049 - RNA, 19 nt, Artificial Sequence
  Description of Artificial Sequence: Synthetic oligonucleotide
  Antisense strand to SEQ ID NO: 173048
uuucucagaccugacgcug

SEQ ID NO: 173050 - RNA, 19 nt, Artificial Sequence
  Description of Artificial Sequence: Synthetic oligonucleotide
  Sense strand starting at position 1005 of SEQ ID NO: 2231
gccugacuuuggccaauga

SEQ ID NO: 173051 - RNA, 19 nt, Artificial Sequence
  Description of Artificial Sequence: Synthetic oligonucleotide
  Antisense strand to SEQ ID NO: 173050
ucauuggccaaagucaggc

SEQ ID NO: 173052 - RNA, 19 nt, Artificial Sequence
  Description of Artificial Sequence: Synthetic oligonucleotide
  Sense strand starting at position 1145 of SEQ ID NO: 2231
cagggcuugcuugaaggaa

SEQ ID NO: 173053 - RNA, 19 nt, Artificial Sequence
  Description of Artificial Sequence: Synthetic oligonucleotide
  Antisense strand to SEQ ID NO: 173052
uuccuucaagcaagcccug

SEQ ID NO: 173054 - RNA, 19 nt, Artificial Sequence
  Description of Artificial Sequence: Synthetic oligonucleotide
  Sense strand starting at position 1216 of SEQ ID NO: 2231
aagugauaaagucguggga

SEQ ID NO: 173055 - RNA, 19 nt, Artificial Sequence
  Description of Artificial Sequence: Synthetic oligonucleotide
  Antisense strand to SEQ ID NO: 173054
ucccacgacuuuaucacuu

SEQ ID NO: 173056 - RNA, 19 nt, Artificial Sequence
  Description of Artificial Sequence: Synthetic oligonucleotide
  Sense strand starting at position 1219 of SEQ ID NO: 2231
ugauaaagucgugggagga

SEQ ID NO: 173057 - RNA, 19 nt, Artificial Sequence
  Description of Artificial Sequence: Synthetic oligonucleotide
  Antisense strand to SEQ ID NO: 173056
uccucccacgacuuuauca

SEQ ID NO: 173058 - RNA, 19 nt, Artificial Sequence
  Description of Artificial Sequence: Synthetic oligonucleotide
  Sense strand starting at position 1302 of SEQ ID NO: 2231
aaaguuagguggucaccaa

SEQ ID NO: 173059 - RNA, 19 nt, Artificial Sequence
  Description of Artificial Sequence: Synthetic oligonucleotide
  Antisense strand to SEQ ID NO: 173058
uuggugaccaccuaacuuu

SEQ ID NO: 173060 - RNA, 19 nt, Artificial Sequence
  Description of Artificial Sequence: Synthetic oligonucleotide
  Sense strand starting at position 1303 of SEQ ID NO: 2231
aaguuagguggucaccaaa

SEQ ID NO: 173061 - RNA, 19 nt, Artificial Sequence
  Description of Artificial Sequence: Synthetic oligonucleotide
  Antisense strand to SEQ ID NO: 173060
uuuggugaccaccuaacuu

SEQ ID NO: 173062 - RNA, 19 nt, Artificial Sequence
  Description of Artificial Sequence: Synthetic oligonucleotide
  Sense strand starting at position 2030 of SEQ ID NO: 2231
ccaggagucgcgaaagugu

SEQ ID NO: 173063 - RNA, 19 nt, Artificial Sequence
  Description of Artificial Sequence: Synthetic oligonucleotide
  Antisense strand to SEQ ID NO: 173062
acacuuucgcgacuccugg

SEQ ID NO: 173064 - RNA, 19 nt, Artificial Sequence
  Description of Artificial Sequence: Synthetic oligonucleotide
  Sense strand starting at position 2038 of SEQ ID NO: 2231
cgcgaaaguguugauggga

SEQ ID NO: 173065 - RNA, 19 nt, Artificial Sequence
  Description of Artificial Sequence: Synthetic oligonucleotide
  Antisense strand to SEQ ID NO: 173064
ucccaucaacacuuucgcg

SEQ ID NO: 173066 - RNA, 19 nt, Artificial Sequence
  Description of Artificial Sequence: Synthetic oligonucleotide
  Sense strand starting at position 2041 of SEQ ID NO: 2231
gaaaguguugaugggaaau

SEQ ID NO: 173067 - RNA, 19 nt, Artificial Sequence
  Description of Artificial Sequence: Synthetic oligonucleotide
  Antisense strand to SEQ ID NO: 173066
auuucccaucaacacuuuc

SEQ ID NO: 173068 - RNA, 19 nt, Artificial Sequence
  Description of Artificial Sequence: Synthetic oligonucleotide
  Sense strand starting at position 2047 of SEQ ID NO: 2231
guugaugggaaauguaguu

SEQ ID NO: 173069 - RNA, 19 nt, Artificial Sequence
  Description of Artificial Sequence: Synthetic oligonucleotide
  Antisense strand to SEQ ID NO: 173068
aacuacauuucccaucaac

SEQ ID NO: 173070 - RNA, 19 nt, Artificial Sequence
  Description of Artificial Sequence: Synthetic oligonucleotide
  Sense strand starting at position 2294 of SEQ ID NO: 2231
gguaauaaaugucuggaga

SEQ ID NO: 173071 - RNA, 19 nt, Artificial Sequence
  Description of Artificial Sequence: Synthetic oligonucleotide
  Antisense strand to SEQ ID NO: 173070
ucuccagacauuuauuacc

SEQ ID NO: 173072 - RNA, 19 nt, Artificial Sequence
  Description of Artificial Sequence: Synthetic oligonucleotide
  Sense strand starting at position 2307 of SEQ ID NO: 2231
uggagagcacuuuguaugu

SEQ ID NO: 173073 - RNA, 19 nt, Artificial Sequence
  Description of Artificial Sequence: Synthetic oligonucleotide
  Antisense strand to SEQ ID NO: 173072
acauacaaagugcucucca

SEQ ID NO: 173074 - RNA, 19 nt, Artificial Sequence
  Description of Artificial Sequence: Synthetic oligonucleotide
  Sense strand starting at position 2316 of SEQ ID NO: 2231
cuuuguauguuaguuacaa

SEQ ID NO: 173075 - RNA, 19 nt, Artificial Sequence
  Description of Artificial Sequence: Synthetic oligonucleotide
  Antisense strand to SEQ ID NO: 173074
uuguaacuaacauacaaag

SEQ ID NO: 173076 - RNA, 19 nt, Artificial Sequence
  Description of Artificial Sequence: Synthetic oligonucleotide
  Sense strand starting at position 2318 of SEQ ID NO: 2231
uuguauguuaguuacaaag

SEQ ID NO: 173077 - RNA, 19 nt, Artificial Sequence
  Description of Artificial Sequence: Synthetic oligonucleotide
  Antisense strand to SEQ ID NO: 173076
cuuuguaacuaacauacaa

SEQ ID NO: 173078 - RNA, 19 nt, Artificial Sequence
  Description of Artificial Sequence: Synthetic oligonucleotide
  Sense strand starting at position 2447 of SEQ ID NO: 2231
cggguggagcgguaaucaa

SEQ ID NO: 173079 - RNA, 19 nt, Artificial Sequence
  Description of Artificial Sequence: Synthetic oligonucleotide
  Antisense strand to SEQ ID NO: 173078
uugauuaccgcuccacccg

SEQ ID NO: 173080 - RNA, 19 nt, Artificial Sequence
  Description of Artificial Sequence: Synthetic oligonucleotide
  Sense strand starting at position 2455 of SEQ ID NO: 2231
gcgguaaucaaaugaagau

SEQ ID NO: 173081 - RNA, 19 nt, Artificial Sequence
  Description of Artificial Sequence: Synthetic oligonucleotide
  Antisense strand to SEQ ID NO: 173080
aucuucauuugauuaccgc

SEQ ID NO: 173082 - RNA, 19 nt, Artificial Sequence
  Description of Artificial Sequence: Synthetic oligonucleotide
  Sense strand starting at position 2721 of SEQ ID NO: 2231
gcgcuagauguggcgucaa

SEQ ID NO: 173083 - RNA, 19 nt, Artificial Sequence
  Description of Artificial Sequence: Synthetic oligonucleotide
  Antisense strand to SEQ ID NO: 173082
uugacgccacaucuagcgc

SEQ ID NO: 173084 - RNA, 19 nt, Artificial Sequence
  Description of Artificial Sequence: Synthetic oligonucleotide
  Sense strand starting at position 2860 of SEQ ID NO: 2231
gcuuguugugccuugguga

SEQ ID NO: 173085 - RNA, 19 nt, Artificial Sequence
  Description of Artificial Sequence: Synthetic oligonucleotide
  Antisense strand to SEQ ID NO: 173084
ucaccaaggcacaacaagc

SEQ ID NO: 173086 - RNA, 19 nt, Artificial Sequence
  Description of Artificial Sequence: Synthetic oligonucleotide
  Sense strand starting at position 2940 of SEQ ID NO: 2231
ccucuucucuccucaguga

SEQ ID NO: 173087 - RNA, 19 nt, Artificial Sequence
  Description of Artificial Sequence: Synthetic oligonucleotide
  Antisense strand to SEQ ID NO: 173086
ucacugaggagagaagagg

SEQ ID NO: 173088 - RNA, 19 nt, Artificial Sequence
  Description of Artificial Sequence: Synthetic oligonucleotide
  Sense strand starting at position 2941 of SEQ ID NO: 2231
cucuucucuccucagugau

SEQ ID NO: 173089 - RNA, 19 nt, Artificial Sequence
  Description of Artificial Sequence: Synthetic oligonucleotide
  Antisense strand to SEQ ID NO: 173088
aucacugaggagagaagag

SEQ ID NO: 173090 - RNA, 19 nt, Artificial Sequence
  Description of Artificial Sequence: Synthetic oligonucleotide
  Sense strand starting at position 2944 of SEQ ID NO: 2231
uucucuccucagugauaag

SEQ ID NO: 173091 - RNA, 19 nt, Artificial Sequence
  Description of Artificial Sequence: Synthetic oligonucleotide
  Antisense strand to SEQ ID NO: 173090
cuuaucacugaggagagaa

SEQ ID NO: 173092 - RNA, 19 nt, Artificial Sequence
  Description of Artificial Sequence: Synthetic oligonucleotide
  Sense strand starting at position 2953 of SEQ ID NO: 2231
cagugauaagcagaauagu

SEQ ID NO: 173093 - RNA, 19 nt, Artificial Sequence
  Description of Artificial Sequence: Synthetic oligonucleotide
  Antisense strand to SEQ ID NO: 173092
acuauucugcuuaucacug

SEQ ID NO: 173094 - RNA, 19 nt, Artificial Sequence
  Description of Artificial Sequence: Synthetic oligonucleotide
  Sense strand starting at position 3113 of SEQ ID NO: 2231
auuguaggcacucgacaaa

SEQ ID NO: 173095 - RNA, 19 nt, Artificial Sequence
  Description of Artificial Sequence: Synthetic oligonucleotide
  Antisense strand to SEQ ID NO: 173094
uuugucgagugccuacaau

SEQ ID NO: 173096 - RNA, 19 nt, Artificial Sequence
  Description of Artificial Sequence: Synthetic oligonucleotide
  Sense strand starting at position 3116 of SEQ ID NO: 2231
guaggcacucgacaaaugu

SEQ ID NO: 173097 - RNA, 19 nt, Artificial Sequence
  Description of Artificial Sequence: Synthetic oligonucleotide
  Antisense strand to SEQ ID NO: 173096
acauuugucgagugccuac

SEQ ID NO: 173098 - RNA, 19 nt, Artificial Sequence
  Description of Artificial Sequence: Synthetic oligonucleotide
  Sense strand starting at position 3226 of SEQ ID NO: 2231
auuccuuacuguguuaaua

SEQ ID NO: 173099 - RNA, 19 nt, Artificial Sequence
  Description of Artificial Sequence: Synthetic oligonucleotide
  Antisense strand to SEQ ID NO: 173098
uauuaacacaguaaggaau

SEQ ID NO: 173100 - RNA, 19 nt, Artificial Sequence
  Description of Artificial Sequence: Synthetic oligonucleotide
  Sense strand starting at position 3236 of SEQ ID NO: 2231
guguuaauacaaugguacu

SEQ ID NO: 173101 - RNA, 19 nt, Artificial Sequence
  Description of Artificial Sequence: Synthetic oligonucleotide
  Antisense strand to SEQ ID NO: 173100
aguaccauuguauuaacac

SEQ ID NO: 173102 - RNA, 19 nt, Artificial Sequence
  Description of Artificial Sequence: Synthetic oligonucleotide
  Sense strand starting at position 3325 of SEQ ID NO: 2231
gucauuccucucuagucuu

SEQ ID NO: 173103 - RNA, 19 nt, Artificial Sequence
  Description of Artificial Sequence: Synthetic oligonucleotide
  Antisense strand to SEQ ID NO: 173102
aagacuagagaggaaugac

SEQ ID NO: 173104 - RNA, 19 nt, Artificial Sequence
  Description of Artificial Sequence: Synthetic oligonucleotide
  Sense strand starting at position 3513 of SEQ ID NO: 2231
agagacagaucauaaacau

SEQ ID NO: 173105 - RNA, 19 nt, Artificial Sequence
  Description of Artificial Sequence: Synthetic oligonucleotide
  Antisense strand to SEQ ID NO: 173104
auguuuaugaucugucucu

SEQ ID NO: 173106 - RNA, 19 nt, Artificial Sequence
  Description of Artificial Sequence: Synthetic oligonucleotide
  Sense strand starting at position 3623 of SEQ ID NO: 2231
cuggaacagugcuugucaa

SEQ ID NO: 173107 - RNA, 19 nt, Artificial Sequence
  Description of Artificial Sequence: Synthetic oligonucleotide
  Antisense strand to SEQ ID NO: 173106
uugacaagcacuguuccag

SEQ ID NO: 173108 - RNA, 19 nt, Artificial Sequence
  Description of Artificial Sequence: Synthetic oligonucleotide
  Sense strand starting at position 3653 of SEQ ID NO: 2231
accucaguguugucacauc

SEQ ID NO: 173109 - RNA, 19 nt, Artificial Sequence
  Description of Artificial Sequence: Synthetic oligonucleotide
  Antisense strand to SEQ ID NO: 173108
gaugugacaacacugaggu

SEQ ID NO: 173110 - RNA, 19 nt, Artificial Sequence
  Description of Artificial Sequence: Synthetic oligonucleotide
  Sense strand starting at position 3831 of SEQ ID NO: 2231
acacgaauucugcacagaa

SEQ ID NO: 173111 - RNA, 19 nt, Artificial Sequence
  Description of Artificial Sequence: Synthetic oligonucleotide
  Antisense strand to SEQ ID NO: 173110
uucugugcagaauucgugu

SEQ ID NO: 173112 - RNA, 19 nt, Artificial Sequence
  Description of Artificial Sequence: Synthetic oligonucleotide
  Sense strand starting at position 3833 of SEQ ID NO: 2231
acgaauucugcacagaaau

SEQ ID NO: 173113 - RNA, 19 nt, Artificial Sequence
  Description of Artificial Sequence: Synthetic oligonucleotide
  Antisense strand to SEQ ID NO: 173112
auuucugugcagaauucgu

SEQ ID NO: 173114 - RNA, 19 nt, Artificial Sequence
  Description of Artificial Sequence: Synthetic oligonucleotide
  Sense strand starting at position 3877 of SEQ ID NO: 2231
gcuguaauuugacccacuu

SEQ ID NO: 173115 - RNA, 19 nt, Artificial Sequence
  Description of Artificial Sequence: Synthetic oligonucleotide
  Antisense strand to SEQ ID NO: 173114
aagugggucaaauuacagc

SEQ ID NO: 173116 - RNA, 19 nt, Artificial Sequence
  Description of Artificial Sequence: Synthetic oligonucleotide
  Sense strand starting at position 3960 of SEQ ID NO: 2231
uaggauuucugacauugga

SEQ ID NO: 173117 - RNA, 19 nt, Artificial Sequence
  Description of Artificial Sequence: Synthetic oligonucleotide
  Antisense strand to SEQ ID NO: 173116
uccaaugucagaaauccua

SEQ ID NO: 173118 - RNA, 19 nt, Artificial Sequence
  Description of Artificial Sequence: Synthetic oligonucleotide
  Sense strand starting at position 461 of SEQ ID NO: 2230
gggagauauguacagcagu

SEQ ID NO: 173119 - RNA, 19 nt, Artificial Sequence
  Description of Artificial Sequence: Synthetic oligonucleotide
  Antisense strand to SEQ ID NO: 173118
acugcuguacauaucuccc

SEQ ID NO: 173120 - RNA, 19 nt, Artificial Sequence
  Description of Artificial Sequence: Synthetic oligonucleotide
  Sense strand starting at position 481 of SEQ ID NO: 2230
acuauugacuaagacagaa

SEQ ID NO: 173121 - RNA, 19 nt, Artificial Sequence
  Description of Artificial Sequence: Synthetic oligonucleotide
  Antisense strand to SEQ ID NO: 173120
uucugucuuagucaauagu

SEQ ID NO: 173122 - RNA, 19 nt, Artificial Sequence
  Description of Artificial Sequence: Synthetic oligonucleotide
  Sense strand starting at position 689 of SEQ ID NO: 2230
gaguuuccacugugccaga

SEQ ID NO: 173123 - RNA, 19 nt, Artificial Sequence
  Description of Artificial Sequence: Synthetic oligonucleotide
  Antisense strand to SEQ ID NO: 173122
ucuggcacaguggaaacuc

SEQ ID NO: 173124 - RNA, 19 nt, Artificial Sequence
  Description of Artificial Sequence: Synthetic oligonucleotide
  Sense strand starting at position 749 of SEQ ID NO: 2230
ggcugcugugcuguucaga

SEQ ID NO: 173125 - RNA, 19 nt, Artificial Sequence
  Description of Artificial Sequence: Synthetic oligonucleotide
  Antisense strand to SEQ ID NO: 173124
ucugaacagcacagcagcc

SEQ ID NO: 173126 - RNA, 19 nt, Artificial Sequence
  Description of Artificial Sequence: Synthetic oligonucleotide
  Sense strand starting at position 794 of SEQ ID NO: 2230
gacuguucugggcagacga

SEQ ID NO: 173127 - RNA, 19 nt, Artificial Sequence
  Description of Artificial Sequence: Synthetic oligonucleotide
  Antisense strand to SEQ ID NO: 173126
ucgucugcccagaacaguc

SEQ ID NO: 173128 - RNA, 19 nt, Artificial Sequence
  Description of Artificial Sequence: Synthetic oligonucleotide
  Sense strand starting at position 817 of SEQ ID NO: 2230
cagcgucaggucugagaaa

SEQ ID NO: 173129 - RNA, 19 nt, Artificial Sequence
  Description of Artificial Sequence: Synthetic oligonucleotide
  Antisense strand to SEQ ID NO: 173128
uuucucagaccugacgcug

SEQ ID NO: 173130 - RNA, 19 nt, Artificial Sequence
  Description of Artificial Sequence: Synthetic oligonucleotide
  Sense strand starting at position 981 of SEQ ID NO: 2230
gccugacuuuggccaauga

SEQ ID NO: 173131 - RNA, 19 nt, Artificial Sequence
  Description of Artificial Sequence: Synthetic oligonucleotide
  Antisense strand to SEQ ID NO: 173130
ucauuggccaaagucaggc

SEQ ID NO: 173132 - RNA, 19 nt, Artificial Sequence
  Description of Artificial Sequence: Synthetic oligonucleotide
  Sense strand starting at position 1121 of SEQ ID NO: 2230
cagggcuugcuugaaggaa

SEQ ID NO: 173133 - RNA, 19 nt, Artificial Sequence
  Description of Artificial Sequence: Synthetic oligonucleotide
  Antisense strand to SEQ ID NO: 173132
uuccuucaagcaagcccug

SEQ ID NO: 173134 - RNA, 19 nt, Artificial Sequence
  Description of Artificial Sequence: Synthetic oligonucleotide
  Sense strand starting at position 1192 of SEQ ID NO: 2230
aagugauaaagucguggga

SEQ ID NO: 173135 - RNA, 19 nt, Artificial Sequence
  Description of Artificial Sequence: Synthetic oligonucleotide
  Antisense strand to SEQ ID NO: 173134
ucccacgacuuuaucacuu

SEQ ID NO: 173136 - RNA, 19 nt, Artificial Sequence
  Description of Artificial Sequence: Synthetic oligonucleotide
  Sense strand starting at position 1195 of SEQ ID NO: 2230
ugauaaagucgugggagga

SEQ ID NO: 173137 - RNA, 19 nt, Artificial Sequence
  Description of Artificial Sequence: Synthetic oligonucleotide
  Antisense strand to SEQ ID NO: 173136
uccucccacgacuuuauca

SEQ ID NO: 173138 - RNA, 19 nt, Artificial Sequence
  Description of Artificial Sequence: Synthetic oligonucleotide
  Sense strand starting at position 1278 of SEQ ID NO: 2230
aaaguuagguggucaccaa

SEQ ID NO: 173139 - RNA, 19 nt, Artificial Sequence
  Description of Artificial Sequence: Synthetic oligonucleotide
  Antisense strand to SEQ ID NO: 173138
uuggugaccaccuaacuuu

SEQ ID NO: 173140 - RNA, 19 nt, Artificial Sequence
  Description of Artificial Sequence: Synthetic oligonucleotide
  Sense strand starting at position 1279 of SEQ ID NO: 2230
aaguuagguggucaccaaa

SEQ ID NO: 173141 - RNA, 19 nt, Artificial Sequence
  Description of Artificial Sequence: Synthetic oligonucleotide
  Antisense strand to SEQ ID NO: 173140
uuuggugaccaccuaacuu

SEQ ID NO: 173142 - RNA, 19 nt, Artificial Sequence
  Description of Artificial Sequence: Synthetic oligonucleotide
  Sense strand starting at position 2006 of SEQ ID NO: 2230
ccaggagucgcgaaagugu

SEQ ID NO: 173143 - RNA, 19 nt, Artificial Sequence
  Description of Artificial Sequence: Synthetic oligonucleotide
  Antisense strand to SEQ ID NO: 173142
acacuuucgcgacuccugg

SEQ ID NO: 173144 - RNA, 19 nt, Artificial Sequence
  Description of Artificial Sequence: Synthetic oligonucleotide
  Sense strand starting at position 2014 of SEQ ID NO: 2230
cgcgaaaguguugauggga

SEQ ID NO: 173145 - RNA, 19 nt, Artificial Sequence
  Description of Artificial Sequence: Synthetic oligonucleotide
  Antisense strand to SEQ ID NO: 173144
ucccaucaacacuuucgcg

SEQ ID NO: 173146 - RNA, 19 nt, Artificial Sequence
  Description of Artificial Sequence: Synthetic oligonucleotide
  Sense strand starting at position 2017 of SEQ ID NO: 2230
gaaaguguugaugggaaau

SEQ ID NO: 173147 - RNA, 19 nt, Artificial Sequence
  Description of Artificial Sequence: Synthetic oligonucleotide
  Antisense strand to SEQ ID NO: 173146
auuucccaucaacacuuuc

SEQ ID NO: 173148 - RNA, 19 nt, Artificial Sequence
  Description of Artificial Sequence: Synthetic oligonucleotide
  Sense strand starting at position 2023 of SEQ ID NO: 2230
guugaugggaaauguaguu

SEQ ID NO: 173149 - RNA, 19 nt, Artificial Sequence
  Description of Artificial Sequence: Synthetic oligonucleotide
  Antisense strand to SEQ ID NO: 173148
aacuacauuucccaucaac

SEQ ID NO: 173150 - RNA, 19 nt, Artificial Sequence
  Description of Artificial Sequence: Synthetic oligonucleotide
  Sense strand starting at position 2270 of SEQ ID NO: 2230
gguaauaaaugucuggaga

SEQ ID NO: 173151 - RNA, 19 nt, Artificial Sequence
  Description of Artificial Sequence: Synthetic oligonucleotide
  Antisense strand to SEQ ID NO: 173150
ucuccagacauuuauuacc

SEQ ID NO: 173152 - RNA, 19 nt, Artificial Sequence
  Description of Artificial Sequence: Synthetic oligonucleotide
  Sense strand starting at position 2283 of SEQ ID NO: 2230
uggagagcacuuuguaugu

SEQ ID NO: 173153 - RNA, 19 nt, Artificial Sequence
  Description of Artificial Sequence: Synthetic oligonucleotide
  Antisense strand to SEQ ID NO: 173152
acauacaaagugcucucca

SEQ ID NO: 173154 - RNA, 19 nt, Artificial Sequence
  Description of Artificial Sequence: Synthetic oligonucleotide
  Sense strand starting at position 2292 of SEQ ID NO: 2230
cuuuguauguuaguuacaa

SEQ ID NO: 173155 - RNA, 19 nt, Artificial Sequence
  Description of Artificial Sequence: Synthetic oligonucleotide
  Antisense strand to SEQ ID NO: 173154
uuguaacuaacauacaaag

SEQ ID NO: 173156 - RNA, 19 nt, Artificial Sequence
  Description of Artificial Sequence: Synthetic oligonucleotide
  Sense strand starting at position 2294 of SEQ ID NO: 2230
uuguauguuaguuacaaag

SEQ ID NO: 173157 - RNA, 19 nt, Artificial Sequence
  Description of Artificial Sequence: Synthetic oligonucleotide
  Antisense strand to SEQ ID NO: 173156
cuuuguaacuaacauacaa

SEQ ID NO: 173158 - RNA, 19 nt, Artificial Sequence
  Description of Artificial Sequence: Synthetic oligonucleotide
  Sense strand starting at position 2423 of SEQ ID NO: 2230
cggguggagcgguaaucaa

SEQ ID NO: 173159 - RNA, 19 nt, Artificial Sequence
  Description of Artificial Sequence: Synthetic oligonucleotide
  Antisense strand to SEQ ID NO: 173158
uugauuaccgcuccacccg

SEQ ID NO: 173160 - RNA, 19 nt, Artificial Sequence
  Description of Artificial Sequence: Synthetic oligonucleotide
  Sense strand starting at position 2431 of SEQ ID NO: 2230
gcgguaaucaaaugaagau

SEQ ID NO: 173161 - RNA, 19 nt, Artificial Sequence
  Description of Artificial Sequence: Synthetic oligonucleotide
  Antisense strand to SEQ ID NO: 173160
aucuucauuugauuaccgc

SEQ ID NO: 173162 - RNA, 19 nt, Artificial Sequence
  Description of Artificial Sequence: Synthetic oligonucleotide
  Sense strand starting at position 2697 of SEQ ID NO: 2230
gcgcuagauguggcgucaa

SEQ ID NO: 173163 - RNA, 19 nt, Artificial Sequence
  Description of Artificial Sequence: Synthetic oligonucleotide
  Antisense strand to SEQ ID NO: 173162
uugacgccacaucuagcgc

SEQ ID NO: 173164 - RNA, 19 nt, Artificial Sequence
  Description of Artificial Sequence: Synthetic oligonucleotide
  Sense strand starting at position 2836 of SEQ ID NO: 2230
gcuuguugugccuugguga

SEQ ID NO: 173165 - RNA, 19 nt, Artificial Sequence
  Description of Artificial Sequence: Synthetic oligonucleotide
  Antisense strand to SEQ ID NO: 173164
ucaccaaggcacaacaagc

SEQ ID NO: 173166 - RNA, 19 nt, Artificial Sequence
  Description of Artificial Sequence: Synthetic oligonucleotide
  Sense strand starting at position 2916 of SEQ ID NO: 2230
ccucuucucuccucaguga

SEQ ID NO: 173167 - RNA, 19 nt, Artificial Sequence
  Description of Artificial Sequence: Synthetic oligonucleotide
  Antisense strand to SEQ ID NO: 173166
ucacugaggagagaagagg

SEQ ID NO: 173168 - RNA, 19 nt, Artificial Sequence
  Description of Artificial Sequence: Synthetic oligonucleotide
  Sense strand starting at position 2917 of SEQ ID NO: 2230
cucuucucuccucagugau

SEQ ID NO: 173169 - RNA, 19 nt, Artificial Sequence
  Description of Artificial Sequence: Synthetic oligonucleotide
  Antisense strand to SEQ ID NO: 173168
aucacugaggagagaagag

SEQ ID NO: 173170 - RNA, 19 nt, Artificial Sequence
  Description of Artificial Sequence: Synthetic oligonucleotide
  Sense strand starting at position 2920 of SEQ ID NO: 2230
uucucuccucagugauaag

SEQ ID NO: 173171 - RNA, 19 nt, Artificial Sequence
  Description of Artificial Sequence: Synthetic oligonucleotide
  Antisense strand to SEQ ID NO: 173170
cuuaucacugaggagagaa

SEQ ID NO: 173172 - RNA, 19 nt, Artificial Sequence
  Description of Artificial Sequence: Synthetic oligonucleotide
  Sense strand starting at position 2929 of SEQ ID NO: 2230
cagugauaagcagaauagu

SEQ ID NO: 173173 - RNA, 19 nt, Artificial Sequence
  Description of Artificial Sequence: Synthetic oligonucleotide
  Antisense strand to SEQ ID NO: 173172
acuauucugcuuaucacug

SEQ ID NO: 173174 - RNA, 19 nt, Artificial Sequence
  Description of Artificial Sequence: Synthetic oligonucleotide
  Sense strand starting at position 3089 of SEQ ID NO: 2230
auuguaggcacucgacaaa

SEQ ID NO: 173175 - RNA, 19 nt, Artificial Sequence
  Description of Artificial Sequence: Synthetic oligonucleotide
  Antisense strand to SEQ ID NO: 173174
uuugucgagugccuacaau

SEQ ID NO: 173176 - RNA, 19 nt, Artificial Sequence
  Description of Artificial Sequence: Synthetic oligonucleotide
  Sense strand starting at position 3092 of SEQ ID NO: 2230
guaggcacucgacaaaugu

SEQ ID NO: 173177 - RNA, 19 nt, Artificial Sequence
  Description of Artificial Sequence: Synthetic oligonucleotide
  Antisense strand to SEQ ID NO: 173176
acauuugucgagugccuac

SEQ ID NO: 173178 - RNA, 19 nt, Artificial Sequence
  Description of Artificial Sequence: Synthetic oligonucleotide
  Sense strand starting at position 3202 of SEQ ID NO: 2230
auuccuuacuguguuaaua

SEQ ID NO: 173179 - RNA, 19 nt, Artificial Sequence
  Description of Artificial Sequence: Synthetic oligonucleotide
  Antisense strand to SEQ ID NO: 173178
uauuaacacaguaaggaau

SEQ ID NO: 173180 - RNA, 19 nt, Artificial Sequence
  Description of Artificial Sequence: Synthetic oligonucleotide
  Sense strand starting at position 3212 of SEQ ID NO: 2230
guguuaauacaaugguacu

SEQ ID NO: 173181 - RNA, 19 nt, Artificial Sequence
  Description of Artificial Sequence: Synthetic oligonucleotide
  Antisense strand to SEQ ID NO: 173180
aguaccauuguauuaacac

SEQ ID NO: 173182 - RNA, 19 nt, Artificial Sequence
  Description of Artificial Sequence: Synthetic oligonucleotide
  Sense strand starting at position 3301 of SEQ ID NO: 2230
gucauuccucucuagucuu

SEQ ID NO: 173183 - RNA, 19 nt, Artificial Sequence
  Description of Artificial Sequence: Synthetic oligonucleotide
  Antisense strand to SEQ ID NO: 173182
aagacuagagaggaaugac

SEQ ID NO: 173184 - RNA, 19 nt, Artificial Sequence
  Description of Artificial Sequence: Synthetic oligonucleotide
  Sense strand starting at position 3489 of SEQ ID NO: 2230
agagacagaucauaaacau

SEQ ID NO: 173185 - RNA, 19 nt, Artificial Sequence
  Description of Artificial Sequence: Synthetic oligonucleotide
  Antisense strand to SEQ ID NO: 173184
auguuuaugaucugucucu

SEQ ID NO: 173186 - RNA, 19 nt, Artificial Sequence
  Description of Artificial Sequence: Synthetic oligonucleotide
  Sense strand starting at position 3599 of SEQ ID NO: 2230
cuggaacagugcuugucaa

SEQ ID NO: 173187 - RNA, 19 nt, Artificial Sequence
  Description of Artificial Sequence: Synthetic oligonucleotide
  Antisense strand to SEQ ID NO: 173186
uugacaagcacuguuccag

SEQ ID NO: 173188 - RNA, 19 nt, Artificial Sequence
  Description of Artificial Sequence: Synthetic oligonucleotide
  Sense strand starting at position 3807 of SEQ ID NO: 2230
acacgaauucugcacagaa

SEQ ID NO: 173189 - RNA, 19 nt, Artificial Sequence
  Description of Artificial Sequence: Synthetic oligonucleotide
  Antisense strand to SEQ ID NO: 173188
uucugugcagaauucgugu

SEQ ID NO: 173190 - RNA, 19 nt, Artificial Sequence
  Description of Artificial Sequence: Synthetic oligonucleotide
  Sense strand starting at position 3809 of SEQ ID NO: 2230
acgaauucugcacagaaau

SEQ ID NO: 173191 - RNA, 19 nt, Artificial Sequence
  Description of Artificial Sequence: Synthetic oligonucleotide
  Antisense strand to SEQ ID NO: 173190
auuucugugcagaauucgu

SEQ ID NO: 173192 - RNA, 19 nt, Artificial Sequence
  Description of Artificial Sequence: Synthetic oligonucleotide
  Sense strand starting at position 3853 of SEQ ID NO: 2230
gcuguaauuugacccacuu

SEQ ID NO: 173193 - RNA, 19 nt, Artificial Sequence
  Description of Artificial Sequence: Synthetic oligonucleotide
  Antisense strand to SEQ ID NO: 173192
aagugggucaaauuacagc

SEQ ID NO: 173194 - RNA, 19 nt, Artificial Sequence
  Description of Artificial Sequence: Synthetic oligonucleotide
  Sense strand starting at position 3936 of SEQ ID NO: 2230
uaggauuucugacauugga

SEQ ID NO: 173195 - RNA, 19 nt, Artificial Sequence
  Description of Artificial Sequence: Synthetic oligonucleotide
  Antisense strand to SEQ ID NO: 173194
uccaaugucagaaauccua

SEQ ID NO: 173196 - RNA, 19 nt, Artificial Sequence
  Description of Artificial Sequence: Synthetic oligonucleotide
  Sense strand starting at position 3969 of SEQ ID NO: 2230
gcuuaagaauuguuuaagg

SEQ ID NO: 173197 - RNA, 19 nt, Artificial Sequence
  Description of Artificial Sequence: Synthetic oligonucleotide
  Antisense strand to SEQ ID NO: 173196
ccuuaaacaauucuuaagc

SEQ ID NO: 173198 - RNA, 19 nt, Artificial Sequence
  Description of Artificial Sequence: Synthetic oligonucleotide
  Sense strand starting at position 3871 of SEQ ID NO: 2232
cuggguacccuuuaaacau

SEQ ID NO: 173199 - RNA, 19 nt, Artificial Sequence
  Description of Artificial Sequence: Synthetic oligonucleotide
  Antisense strand to SEQ ID NO: 173198
auguuuaaaggguacccag

SEQ ID NO: 173200 - RNA, 19 nt, Artificial Sequence
  Description of Artificial Sequence: Synthetic oligonucleotide
  Sense strand starting at position 3809 of SEQ ID NO: 2232
aggucugugccuuagacau

SEQ ID NO: 173201 - RNA, 19 nt, Artificial Sequence
  Description of Artificial Sequence: Synthetic oligonucleotide
  Antisense strand to SEQ ID NO: 173200
augucuaaggcacagaccu

SEQ ID NO: 173202 - RNA, 19 nt, Artificial Sequence
  Description of Artificial Sequence: Synthetic oligonucleotide
  Sense strand starting at position 3723 of SEQ ID NO: 2232
uuuacaguuguugagaaua

SEQ ID NO: 173203 - RNA, 19 nt, Artificial Sequence
  Description of Artificial Sequence: Synthetic oligonucleotide
  Antisense strand to SEQ ID NO: 173202
uauucucaacaacuguaaa

SEQ ID NO: 173204 - RNA, 19 nt, Artificial Sequence
  Description of Artificial Sequence: Synthetic oligonucleotide
  Sense strand starting at position 3708 of SEQ ID NO: 2232
agauuagguguguaguuua

SEQ ID NO: 173205 - RNA, 19 nt, Artificial Sequence
  Description of Artificial Sequence: Synthetic oligonucleotide
  Antisense strand to SEQ ID NO: 173204
uaaacuacacaccuaaucu

SEQ ID NO: 173206 - RNA, 19 nt, Artificial Sequence
  Description of Artificial Sequence: Synthetic oligonucleotide
  Sense strand starting at position 3703 of SEQ ID NO: 2232
ggaauagauuaggugugua

SEQ ID NO: 173207 - RNA, 19 nt, Artificial Sequence
  Description of Artificial Sequence: Synthetic oligonucleotide
  Antisense strand to SEQ ID NO: 173206
uacacaccuaaucuauucc

SEQ ID NO: 173208 - RNA, 19 nt, Artificial Sequence
  Description of Artificial Sequence: Synthetic oligonucleotide
  Sense strand starting at position 3576 of SEQ ID NO: 2232
ugauuacaguggguuagaa

SEQ ID NO: 173209 - RNA, 19 nt, Artificial Sequence
  Description of Artificial Sequence: Synthetic oligonucleotide
  Antisense strand to SEQ ID NO: 173208
uucuaacccacuguaauca

SEQ ID NO: 173210 - RNA, 19 nt, Artificial Sequence
  Description of Artificial Sequence: Synthetic oligonucleotide
  Sense strand starting at position 3575 of SEQ ID NO: 2232
augauuacaguggguuaga

SEQ ID NO: 173211 - RNA, 19 nt, Artificial Sequence
  Description of Artificial Sequence: Synthetic oligonucleotide
  Antisense strand to SEQ ID NO: 173210
ucuaacccacuguaaucau

SEQ ID NO: 173212 - RNA, 19 nt, Artificial Sequence
  Description of Artificial Sequence: Synthetic oligonucleotide
  Sense strand starting at position 3573 of SEQ ID NO: 2232
uaaugauuacaguggguua

SEQ ID NO: 173213 - RNA, 19 nt, Artificial Sequence
  Description of Artificial Sequence: Synthetic oligonucleotide
  Antisense strand to SEQ ID NO: 173212
uaacccacuguaaucauua

SEQ ID NO: 173214 - RNA, 19 nt, Artificial Sequence
  Description of Artificial Sequence: Synthetic oligonucleotide
  Sense strand starting at position 3567 of SEQ ID NO: 2232
gcaugauaaugauuacagu

SEQ ID NO: 173215 - RNA, 19 nt, Artificial Sequence
  Description of Artificial Sequence: Synthetic oligonucleotide
  Antisense strand to SEQ ID NO: 173214
acuguaaucauuaucaugc

SEQ ID NO: 173216 - RNA, 19 nt, Artificial Sequence
  Description of Artificial Sequence: Synthetic oligonucleotide
  Sense strand starting at position 3556 of SEQ ID NO: 2232
gagauucgcaggcaugaua

SEQ ID NO: 173217 - RNA, 19 nt, Artificial Sequence
  Description of Artificial Sequence: Synthetic oligonucleotide
  Antisense strand to SEQ ID NO: 173216
uaucaugccugcgaaucuc

SEQ ID NO: 173218 - RNA, 19 nt, Artificial Sequence
  Description of Artificial Sequence: Synthetic oligonucleotide
  Sense strand starting at position 3495 of SEQ ID NO: 2232
ccacuagauguuuacugau

SEQ ID NO: 173219 - RNA, 19 nt, Artificial Sequence
  Description of Artificial Sequence: Synthetic oligonucleotide
  Antisense strand to SEQ ID NO: 173218
aucaguaaacaucuagugg

SEQ ID NO: 173220 - RNA, 19 nt, Artificial Sequence
  Description of Artificial Sequence: Synthetic oligonucleotide
  Sense strand starting at position 3494 of SEQ ID NO: 2232
cccacuagauguuuacuga

SEQ ID NO: 173221 - RNA, 19 nt, Artificial Sequence
  Description of Artificial Sequence: Synthetic oligonucleotide
  Antisense strand to SEQ ID NO: 173220
ucaguaaacaucuaguggg

SEQ ID NO: 173222 - RNA, 19 nt, Artificial Sequence
  Description of Artificial Sequence: Synthetic oligonucleotide
  Sense strand starting at position 3440 of SEQ ID NO: 2232
acucuaagguccuugacuu

SEQ ID NO: 173223 - RNA, 19 nt, Artificial Sequence
  Description of Artificial Sequence: Synthetic oligonucleotide
  Antisense strand to SEQ ID NO: 173222
aagucaaggaccuuagagu

SEQ ID NO: 173224 - RNA, 19 nt, Artificial Sequence
  Description of Artificial Sequence: Synthetic oligonucleotide
  Sense strand starting at position 3432 of SEQ ID NO: 2232
gcuauagaacucuaagguc

SEQ ID NO: 173225 - RNA, 19 nt, Artificial Sequence
  Description of Artificial Sequence: Synthetic oligonucleotide
  Antisense strand to SEQ ID NO: 173224
gaccuuagaguucuauagc

SEQ ID NO: 173226 - RNA, 19 nt, Artificial Sequence
  Description of Artificial Sequence: Synthetic oligonucleotide
  Sense strand starting at position 3424 of SEQ ID NO: 2232
cugucucugcuauagaacu

SEQ ID NO: 173227 - RNA, 19 nt, Artificial Sequence
  Description of Artificial Sequence: Synthetic oligonucleotide
  Antisense strand to SEQ ID NO: 173226
aguucuauagcagagacag

SEQ ID NO: 173228 - RNA, 19 nt, Artificial Sequence
  Description of Artificial Sequence: Synthetic oligonucleotide
  Sense strand starting at position 3369 of SEQ ID NO: 2232
gcuugcuguccuguuugua

SEQ ID NO: 173229 - RNA, 19 nt, Artificial Sequence
  Description of Artificial Sequence: Synthetic oligonucleotide
  Antisense strand to SEQ ID NO: 173228
uacaaacaggacagcaagc

SEQ ID NO: 173230 - RNA, 19 nt, Artificial Sequence
  Description of Artificial Sequence: Synthetic oligonucleotide
  Sense strand starting at position 3353 of SEQ ID NO: 2232
ugcugaucuauggagagcu

SEQ ID NO: 173231 - RNA, 19 nt, Artificial Sequence
  Description of Artificial Sequence: Synthetic oligonucleotide
  Antisense strand to SEQ ID NO: 173230
agcucuccauagaucagca

SEQ ID NO: 173232 - RNA, 19 nt, Artificial Sequence
  Description of Artificial Sequence: Synthetic oligonucleotide
  Sense strand starting at position 3088 of SEQ ID NO: 2232
ggcucaaauguuggagacu

SEQ ID NO: 173233 - RNA, 19 nt, Artificial Sequence
  Description of Artificial Sequence: Synthetic oligonucleotide
  Antisense strand to SEQ ID NO: 173232
agucuccaacauuugagcc

SEQ ID NO: 173234 - RNA, 19 nt, Artificial Sequence
  Description of Artificial Sequence: Synthetic oligonucleotide
  Sense strand starting at position 3041 of SEQ ID NO: 2232
aaguuaauuguuugagauc

SEQ ID NO: 173235 - RNA, 19 nt, Artificial Sequence
  Description of Artificial Sequence: Synthetic oligonucleotide
  Antisense strand to SEQ ID NO: 173234
gaucucaaacaauuaacuu

SEQ ID NO: 173236 - RNA, 19 nt, Artificial Sequence
  Description of Artificial Sequence: Synthetic oligonucleotide
  Sense strand starting at position 3040 of SEQ ID NO: 2232
gaaguuaauuguuugagau

SEQ ID NO: 173237 - RNA, 19 nt, Artificial Sequence
  Description of Artificial Sequence: Synthetic oligonucleotide
  Antisense strand to SEQ ID NO: 173236
aucucaaacaauuaacuuc

SEQ ID NO: 173238 - RNA, 19 nt, Artificial Sequence
  Description of Artificial Sequence: Synthetic oligonucleotide
  Sense strand starting at position 3037 of SEQ ID NO: 2232
agggaaguuaauuguuuga

SEQ ID NO: 173239 - RNA, 19 nt, Artificial Sequence
  Description of Artificial Sequence: Synthetic oligonucleotide
  Antisense strand to SEQ ID NO: 173238
ucaaacaauuaacuucccu

SEQ ID NO: 173240 - RNA, 19 nt, Artificial Sequence
  Description of Artificial Sequence: Synthetic oligonucleotide
  Sense strand starting at position 2959 of SEQ ID NO: 2232
ugugaauacuuacuggagu

SEQ ID NO: 173241 - RNA, 19 nt, Artificial Sequence
  Description of Artificial Sequence: Synthetic oligonucleotide
  Antisense strand to SEQ ID NO: 173240
acuccaguaaguauucaca

SEQ ID NO: 173242 - RNA, 19 nt, Artificial Sequence
  Description of Artificial Sequence: Synthetic oligonucleotide
  Sense strand starting at position 2852 of SEQ ID NO: 2232
ggauauuauugaguugagu

SEQ ID NO: 173243 - RNA, 19 nt, Artificial Sequence
  Description of Artificial Sequence: Synthetic oligonucleotide
  Antisense strand to SEQ ID NO: 173242
acucaacucaauaauaucc

SEQ ID NO: 173244 - RNA, 19 nt, Artificial Sequence
  Description of Artificial Sequence: Synthetic oligonucleotide
  Sense strand starting at position 2832 of SEQ ID NO: 2232
ggaagacuugcuggaagau

SEQ ID NO: 173245 - RNA, 19 nt, Artificial Sequence
  Description of Artificial Sequence: Synthetic oligonucleotide
  Antisense strand to SEQ ID NO: 173244
aucuuccagcaagucuucc

SEQ ID NO: 173246 - RNA, 19 nt, Artificial Sequence
  Description of Artificial Sequence: Synthetic oligonucleotide
  Sense strand starting at position 2279 of SEQ ID NO: 2232
ugacaugaauuguuucuaa

SEQ ID NO: 173247 - RNA, 19 nt, Artificial Sequence
  Description of Artificial Sequence: Synthetic oligonucleotide
  Antisense strand to SEQ ID NO: 173246
uuagaaacaauucauguca

SEQ ID NO: 173248 - RNA, 19 nt, Artificial Sequence
  Description of Artificial Sequence: Synthetic oligonucleotide
  Sense strand starting at position 2237 of SEQ ID NO: 2232
uacagucgcuauuuauuga

SEQ ID NO: 173249 - RNA, 19 nt, Artificial Sequence
  Description of Artificial Sequence: Synthetic oligonucleotide
  Antisense strand to SEQ ID NO: 173248
ucaauaaauagcgacugua

SEQ ID NO: 173250 - RNA, 19 nt, Artificial Sequence
  Description of Artificial Sequence: Synthetic oligonucleotide
  Sense strand starting at position 2234 of SEQ ID NO: 2232
ugguacagucgcuauuuau

SEQ ID NO: 173251 - RNA, 19 nt, Artificial Sequence
  Description of Artificial Sequence: Synthetic oligonucleotide
  Antisense strand to SEQ ID NO: 173250
auaaauagcgacuguacca

SEQ ID NO: 173252 - RNA, 19 nt, Artificial Sequence
  Description of Artificial Sequence: Synthetic oligonucleotide
  Sense strand starting at position 2233 of SEQ ID NO: 2232
gugguacagucgcuauuua

SEQ ID NO: 173253 - RNA, 19 nt, Artificial Sequence
  Description of Artificial Sequence: Synthetic oligonucleotide
  Antisense strand to SEQ ID NO: 173252
uaaauagcgacuguaccac

SEQ ID NO: 173254 - RNA, 19 nt, Artificial Sequence
  Description of Artificial Sequence: Synthetic oligonucleotide
  Sense strand starting at position 1396 of SEQ ID NO: 2232
guaagcauuugcucaauga

SEQ ID NO: 173255 - RNA, 19 nt, Artificial Sequence
  Description of Artificial Sequence: Synthetic oligonucleotide
  Antisense strand to SEQ ID NO: 173254
ucauugagcaaaugcuuac

SEQ ID NO: 173256 - RNA, 19 nt, Artificial Sequence
  Description of Artificial Sequence: Synthetic oligonucleotide
  Sense strand starting at position 1369 of SEQ ID NO: 2232
guaugucuggaauauggua

SEQ ID NO: 173257 - RNA, 19 nt, Artificial Sequence
  Description of Artificial Sequence: Synthetic oligonucleotide
  Antisense strand to SEQ ID NO: 173256
uaccauauuccagacauac

SEQ ID NO: 173258 - RNA, 19 nt, Artificial Sequence
  Description of Artificial Sequence: Synthetic oligonucleotide
  Sense strand starting at position 1366 of SEQ ID NO: 2232
gcaguaugucuggaauaug

SEQ ID NO: 173259 - RNA, 19 nt, Artificial Sequence
  Description of Artificial Sequence: Synthetic oligonucleotide
  Antisense strand to SEQ ID NO: 173258
cauauuccagacauacugc

SEQ ID NO: 173260 - RNA, 19 nt, Artificial Sequence
  Description of Artificial Sequence: Synthetic oligonucleotide
  Sense strand starting at position 1249 of SEQ ID NO: 2232
ugagauggcacgugagaca

SEQ ID NO: 173261 - RNA, 19 nt, Artificial Sequence
  Description of Artificial Sequence: Synthetic oligonucleotide
  Antisense strand to SEQ ID NO: 173260
ugucucacgugccaucuca

SEQ ID NO: 173262 - RNA, 19 nt, Artificial Sequence
  Description of Artificial Sequence: Synthetic oligonucleotide
  Sense strand starting at position 1237 of SEQ ID NO: 2232
ccaguuugcaacugagaug

SEQ ID NO: 173263 - RNA, 19 nt, Artificial Sequence
  Description of Artificial Sequence: Synthetic oligonucleotide
  Antisense strand to SEQ ID NO: 173262
caucucaguugcaaacugg

SEQ ID NO: 173264 - RNA, 19 nt, Artificial Sequence
  Description of Artificial Sequence: Synthetic oligonucleotide
  Sense strand starting at position 1215 of SEQ ID NO: 2232
gcagacaaccugggaucua

SEQ ID NO: 173265 - RNA, 19 nt, Artificial Sequence
  Description of Artificial Sequence: Synthetic oligonucleotide
  Antisense strand to SEQ ID NO: 173264
uagaucccagguugucugc

SEQ ID NO: 173266 - RNA, 19 nt, Artificial Sequence
  Description of Artificial Sequence: Synthetic oligonucleotide
  Sense strand starting at position 1173 of SEQ ID NO: 2232
cugacaaaggcugauguua

SEQ ID NO: 173267 - RNA, 19 nt, Artificial Sequence
  Description of Artificial Sequence: Synthetic oligonucleotide
  Antisense strand to SEQ ID NO: 173266
uaacaucagccuuugucag

SEQ ID NO: 173268 - RNA, 19 nt, Artificial Sequence
  Description of Artificial Sequence: Synthetic oligonucleotide
  Sense strand starting at position 997 of SEQ ID NO: 2232
auggauguuuaauucugau

SEQ ID NO: 173269 - RNA, 19 nt, Artificial Sequence
  Description of Artificial Sequence: Synthetic oligonucleotide
  Antisense strand to SEQ ID NO: 173268
aucagaauuaaacauccau

SEQ ID NO: 173270 - RNA, 19 nt, Artificial Sequence
  Description of Artificial Sequence: Synthetic oligonucleotide
  Sense strand starting at position 830 of SEQ ID NO: 2232
aagcuaucccaucagguga

SEQ ID NO: 173271 - RNA, 19 nt, Artificial Sequence
  Description of Artificial Sequence: Synthetic oligonucleotide
  Antisense strand to SEQ ID NO: 173270
ucaccugaugggauagcuu

SEQ ID NO: 173272 - RNA, 19 nt, Artificial Sequence
  Description of Artificial Sequence: Synthetic oligonucleotide
  Sense strand starting at position 813 of SEQ ID NO: 2232
guuauugauagcggaacaa

SEQ ID NO: 173273 - RNA, 19 nt, Artificial Sequence
  Description of Artificial Sequence: Synthetic oligonucleotide
  Antisense strand to SEQ ID NO: 173272
uuguuccgcuaucaauaac

SEQ ID NO: 173274 - RNA, 19 nt, Artificial Sequence
  Description of Artificial Sequence: Synthetic oligonucleotide
  Sense strand starting at position 325 of SEQ ID NO: 2232
augaauuaaugugcacauu

SEQ ID NO: 173275 - RNA, 19 nt, Artificial Sequence
  Description of Artificial Sequence: Synthetic oligonucleotide
  Antisense strand to SEQ ID NO: 173274
aaugugcacauuaauucau

SEQ ID NO: 173276 - RNA, 19 nt, Artificial Sequence
  Description of Artificial Sequence: Synthetic oligonucleotide
  Sense strand starting at position 260 of SEQ ID NO: 2232
ucgcaucaccuagaacuau

SEQ ID NO: 173277 - RNA, 19 nt, Artificial Sequence
  Description of Artificial Sequence: Synthetic oligonucleotide
  Antisense strand to SEQ ID NO: 173276
auaguucuaggugaugcga

SEQ ID NO: 173278 - RNA, 19 nt, Artificial Sequence
  Description of Artificial Sequence: Synthetic oligonucleotide
  Sense strand starting at position 191 of SEQ ID NO: 2233
acugacauccugugggacu

SEQ ID NO: 173279 - RNA, 19 nt, Artificial Sequence
  Description of Artificial Sequence: Synthetic oligonucleotide
  Antisense strand to SEQ ID NO: 173278
agucccacaggaugucagu

SEQ ID NO: 173280 - RNA, 19 nt, Artificial Sequence
  Description of Artificial Sequence: Synthetic oligonucleotide
  Sense strand starting at position 215 of SEQ ID NO: 2233
ggugaaauugcacaaaguu

SEQ ID NO: 173281 - RNA, 19 nt, Artificial Sequence
  Description of Artificial Sequence: Synthetic oligonucleotide
  Antisense strand to SEQ ID NO: 173280
aacuuugugcaauuucacc

SEQ ID NO: 173282 - RNA, 19 nt, Artificial Sequence
  Description of Artificial Sequence: Synthetic oligonucleotide
  Sense strand starting at position 272 of SEQ ID NO: 2233
cagagucaugauuggaauu

SEQ ID NO: 173283 - RNA, 19 nt, Artificial Sequence
  Description of Artificial Sequence: Synthetic oligonucleotide
  Antisense strand to SEQ ID NO: 173282
aauuccaaucaugacucug

SEQ ID NO: 173284 - RNA, 19 nt, Artificial Sequence
  Description of Artificial Sequence: Synthetic oligonucleotide
  Sense strand starting at position 274 of SEQ ID NO: 2233
gagucaugauuggaauuaa

SEQ ID NO: 173285 - RNA, 19 nt, Artificial Sequence
  Description of Artificial Sequence: Synthetic oligonucleotide
  Antisense strand to SEQ ID NO: 173284
uuaauuccaaucaugacuc

SEQ ID NO: 173286 - RNA, 19 nt, Artificial Sequence
  Description of Artificial Sequence: Synthetic oligonucleotide
  Sense strand starting at position 303 of SEQ ID NO: 2233
agacuagugcaguaucuga

SEQ ID NO: 173287 - RNA, 19 nt, Artificial Sequence
  Description of Artificial Sequence: Synthetic oligonucleotide
  Antisense strand to SEQ ID NO: 173286
ucagauacugcacuagucu

SEQ ID NO: 173288 - RNA, 19 nt, Artificial Sequence
  Description of Artificial Sequence: Synthetic oligonucleotide
  Sense strand starting at position 312 of SEQ ID NO: 2233
caguaucugacguaguaga

SEQ ID NO: 173289 - RNA, 19 nt, Artificial Sequence
  Description of Artificial Sequence: Synthetic oligonucleotide
  Antisense strand to SEQ ID NO: 173288
ucuacuacgucagauacug

SEQ ID NO: 173290 - RNA, 19 nt, Artificial Sequence
  Description of Artificial Sequence: Synthetic oligonucleotide
  Sense strand starting at position 335 of SEQ ID NO: 2233
agucacaaaugucaagaga

SEQ ID NO: 173291 - RNA, 19 nt, Artificial Sequence
  Description of Artificial Sequence: Synthetic oligonucleotide
  Antisense strand to SEQ ID NO: 173290
ucucuugacauuugugacu

SEQ ID NO: 173292 - RNA, 19 nt, Artificial Sequence
  Description of Artificial Sequence: Synthetic oligonucleotide
  Sense strand starting at position 392 of SEQ ID NO: 2233
ggcacucuccuagauguuu

SEQ ID NO: 173293 - RNA, 19 nt, Artificial Sequence
  Description of Artificial Sequence: Synthetic oligonucleotide
  Antisense strand to SEQ ID NO: 173292
aaacaucuaggagagugcc

SEQ ID NO: 173294 - RNA, 19 nt, Artificial Sequence
  Description of Artificial Sequence: Synthetic oligonucleotide
  Sense strand starting at position 943 of SEQ ID NO: 2233
gcgaaugucuuuccuugga

SEQ ID NO: 173295 - RNA, 19 nt, Artificial Sequence
  Description of Artificial Sequence: Synthetic oligonucleotide
  Antisense strand to SEQ ID NO: 173294
uccaaggaaagacauucgc

SEQ ID NO: 173296 - RNA, 19 nt, Artificial Sequence
  Description of Artificial Sequence: Synthetic oligonucleotide
  Sense strand starting at position 947 of SEQ ID NO: 2233
augucuuuccuuggaggga

SEQ ID NO: 173297 - RNA, 19 nt, Artificial Sequence
  Description of Artificial Sequence: Synthetic oligonucleotide
  Antisense strand to SEQ ID NO: 173296
ucccuccaaggaaagacau

SEQ ID NO: 173298 - RNA, 19 nt, Artificial Sequence
  Description of Artificial Sequence: Synthetic oligonucleotide
  Sense strand starting at position 959 of SEQ ID NO: 2233
ggagggaggcaggguuaua

SEQ ID NO: 173299 - RNA, 19 nt, Artificial Sequence
  Description of Artificial Sequence: Synthetic oligonucleotide
  Antisense strand to SEQ ID NO: 173298
uauaacccugccucccucc

SEQ ID NO: 173300 - RNA, 19 nt, Artificial Sequence
  Description of Artificial Sequence: Synthetic oligonucleotide
  Sense strand starting at position 1008 of SEQ ID NO: 2233
aggauccuuccagggcaaa

SEQ ID NO: 173301 - RNA, 19 nt, Artificial Sequence
  Description of Artificial Sequence: Synthetic oligonucleotide
  Antisense strand to SEQ ID NO: 173300
uuugcccuggaaggauccu

SEQ ID NO: 173302 - RNA, 19 nt, Artificial Sequence
  Description of Artificial Sequence: Synthetic oligonucleotide
  Sense strand starting at position 1037 of SEQ ID NO: 2233
gacugaagucugugccuuu

SEQ ID NO: 173303 - RNA, 19 nt, Artificial Sequence
  Description of Artificial Sequence: Synthetic oligonucleotide
  Antisense strand to SEQ ID NO: 173302
aaaggcacagacuucaguc

SEQ ID NO: 173304 - RNA, 19 nt, Artificial Sequence
  Description of Artificial Sequence: Synthetic oligonucleotide
  Sense strand starting at position 1047 of SEQ ID NO: 2233
ugugccuuugcucaaacua

SEQ ID NO: 173305 - RNA, 19 nt, Artificial Sequence
  Description of Artificial Sequence: Synthetic oligonucleotide
  Antisense strand to SEQ ID NO: 173304
uaguuugagcaaaggcaca

SEQ ID NO: 173306 - RNA, 19 nt, Artificial Sequence
  Description of Artificial Sequence: Synthetic oligonucleotide
  Sense strand starting at position 1237 of SEQ ID NO: 2233
gccuuauguaacugaagga

SEQ ID NO: 173307 - RNA, 19 nt, Artificial Sequence
  Description of Artificial Sequence: Synthetic oligonucleotide
  Antisense strand to SEQ ID NO: 173306
uccuucaguuacauaaggc

SEQ ID NO: 173308 - RNA, 19 nt, Artificial Sequence
  Description of Artificial Sequence: Synthetic oligonucleotide
  Sense strand starting at position 1282 of SEQ ID NO: 2233
gccauagauugagcacuua

SEQ ID NO: 173309 - RNA, 19 nt, Artificial Sequence
  Description of Artificial Sequence: Synthetic oligonucleotide
  Antisense strand to SEQ ID NO: 173308
uaagugcucaaucuauggc

SEQ ID NO: 173310 - RNA, 19 nt, Artificial Sequence
  Description of Artificial Sequence: Synthetic oligonucleotide
  Sense strand starting at position 1317 of SEQ ID NO: 2233
augcuaagugcucuacgua

SEQ ID NO: 173311 - RNA, 19 nt, Artificial Sequence
  Description of Artificial Sequence: Synthetic oligonucleotide
  Antisense strand to SEQ ID NO: 173310
uacguagagcacuuagcau

SEQ ID NO: 173312 - RNA, 19 nt, Artificial Sequence
  Description of Artificial Sequence: Synthetic oligonucleotide
  Sense strand starting at position 1357 of SEQ ID NO: 2233
gaccuaucagaugguuauu

SEQ ID NO: 173313 - RNA, 19 nt, Artificial Sequence
  Description of Artificial Sequence: Synthetic oligonucleotide
  Antisense strand to SEQ ID NO: 173312
aauaaccaucugauagguc

SEQ ID NO: 173314 - RNA, 19 nt, Artificial Sequence
  Description of Artificial Sequence: Synthetic oligonucleotide
  Sense strand starting at position 1359 of SEQ ID NO: 2233
ccuaucagaugguuauuau

SEQ ID NO: 173315 - RNA, 19 nt, Artificial Sequence
  Description of Artificial Sequence: Synthetic oligonucleotide
  Antisense strand to SEQ ID NO: 173314
auaauaaccaucugauagg

SEQ ID NO: 173316 - RNA, 19 nt, Artificial Sequence
  Description of Artificial Sequence: Synthetic oligonucleotide
  Sense strand starting at position 1360 of SEQ ID NO: 2233
cuaucagaugguuauuauu

SEQ ID NO: 173317 - RNA, 19 nt, Artificial Sequence
  Description of Artificial Sequence: Synthetic oligonucleotide
  Antisense strand to SEQ ID NO: 173316
aauaauaaccaucugauag

SEQ ID NO: 173318 - RNA, 19 nt, Artificial Sequence
  Description of Artificial Sequence: Synthetic oligonucleotide
  Sense strand starting at position 1433 of SEQ ID NO: 2233
gagaauuucuagugaguaa

SEQ ID NO: 173319 - RNA, 19 nt, Artificial Sequence
  Description of Artificial Sequence: Synthetic oligonucleotide
  Antisense strand to SEQ ID NO: 173318
uuacucacuagaaauucuc

SEQ ID NO: 173320 - RNA, 19 nt, Artificial Sequence
  Description of Artificial Sequence: Synthetic oligonucleotide
  Sense strand starting at position 1471 of SEQ ID NO: 2233
ccuguuugacuccaaagac

SEQ ID NO: 173321 - RNA, 19 nt, Artificial Sequence
  Description of Artificial Sequence: Synthetic oligonucleotide
  Antisense strand to SEQ ID NO: 173320
gucuuuggagucaaacagg

SEQ ID NO: 173322 - RNA, 19 nt, Artificial Sequence
  Description of Artificial Sequence: Synthetic oligonucleotide
  Sense strand starting at position 1488 of SEQ ID NO: 2233
accaaauucuuggcggcaa

SEQ ID NO: 173323 - RNA, 19 nt, Artificial Sequence
  Description of Artificial Sequence: Synthetic oligonucleotide
  Antisense strand to SEQ ID NO: 173322
uugccgccaagaauuuggu

SEQ ID NO: 173324 - RNA, 19 nt, Artificial Sequence
  Description of Artificial Sequence: Synthetic oligonucleotide
  Sense strand starting at position 1532 of SEQ ID NO: 2233
agagacgcaccucaguauu

SEQ ID NO: 173325 - RNA, 19 nt, Artificial Sequence
  Description of Artificial Sequence: Synthetic oligonucleotide
  Antisense strand to SEQ ID NO: 173324
aauacugaggugcgucucu

SEQ ID NO: 173326 - RNA, 19 nt, Artificial Sequence
  Description of Artificial Sequence: Synthetic oligonucleotide
  Sense strand starting at position 2012 of SEQ ID NO: 2233
cuucuacuuccgggaacga

SEQ ID NO: 173327 - RNA, 19 nt, Artificial Sequence
  Description of Artificial Sequence: Synthetic oligonucleotide
  Antisense strand to SEQ ID NO: 173326
ucguucccggaaguagaag

SEQ ID NO: 173328 - RNA, 19 nt, Artificial Sequence
  Description of Artificial Sequence: Synthetic oligonucleotide
  Sense strand starting at position 2013 of SEQ ID NO: 2233
uucuacuuccgggaacgaa

SEQ ID NO: 173329 - RNA, 19 nt, Artificial Sequence
  Description of Artificial Sequence: Synthetic oligonucleotide
  Antisense strand to SEQ ID NO: 173328
uucguucccggaaguagaa

SEQ ID NO: 173330 - RNA, 19 nt, Artificial Sequence
  Description of Artificial Sequence: Synthetic oligonucleotide
  Sense strand starting at position 2439 of SEQ ID NO: 2233
ggguagguuggcgaaagua

SEQ ID NO: 173331 - RNA, 19 nt, Artificial Sequence
  Description of Artificial Sequence: Synthetic oligonucleotide
  Antisense strand to SEQ ID NO: 173330
uacuuucgccaaccuaccc

SEQ ID NO: 173332 - RNA, 19 nt, Artificial Sequence
  Description of Artificial Sequence: Synthetic oligonucleotide
  Sense strand starting at position 2455 of SEQ ID NO: 2233
guauucuaccgggaaaggu

SEQ ID NO: 173333 - RNA, 19 nt, Artificial Sequence
  Description of Artificial Sequence: Synthetic oligonucleotide
  Antisense strand to SEQ ID NO: 173332
accuuucccgguagaauac

SEQ ID NO: 173334 - RNA, 19 nt, Artificial Sequence
  Description of Artificial Sequence: Synthetic oligonucleotide
  Sense strand starting at position 2730 of SEQ ID NO: 2233
gcaagagaccacuguggaa

SEQ ID NO: 173335 - RNA, 19 nt, Artificial Sequence
  Description of Artificial Sequence: Synthetic oligonucleotide
  Antisense strand to SEQ ID NO: 173334
uuccacaguggucucuugc

SEQ ID NO: 173336 - RNA, 19 nt, Artificial Sequence
  Description of Artificial Sequence: Synthetic oligonucleotide
  Sense strand starting at position 2786 of SEQ ID NO: 2233
ggaugcgaccuuuagggau

SEQ ID NO: 173337 - RNA, 19 nt, Artificial Sequence
  Description of Artificial Sequence: Synthetic oligonucleotide
  Antisense strand to SEQ ID NO: 173336
aucccuaaaggucgcaucc

SEQ ID NO: 173338 - RNA, 19 nt, Artificial Sequence
  Description of Artificial Sequence: Synthetic oligonucleotide
  Sense strand starting at position 2790 of SEQ ID NO: 2233
gcgaccuuuagggauaauc

SEQ ID NO: 173339 - RNA, 19 nt, Artificial Sequence
  Description of Artificial Sequence: Synthetic oligonucleotide
  Antisense strand to SEQ ID NO: 173338
gauuaucccuaaaggucgc

SEQ ID NO: 173340 - RNA, 19 nt, Artificial Sequence
  Description of Artificial Sequence: Synthetic oligonucleotide
  Sense strand starting at position 2800 of SEQ ID NO: 2233
gggauaaucuaaucuuucu

SEQ ID NO: 173341 - RNA, 19 nt, Artificial Sequence
  Description of Artificial Sequence: Synthetic oligonucleotide
  Antisense strand to SEQ ID NO: 173340
agaaagauuagauuauccc

SEQ ID NO: 173342 - RNA, 19 nt, Artificial Sequence
  Description of Artificial Sequence: Synthetic oligonucleotide
  Sense strand starting at position 2867 of SEQ ID NO: 2233
gggugucucuagucucauu

SEQ ID NO: 173343 - RNA, 19 nt, Artificial Sequence
  Description of Artificial Sequence: Synthetic oligonucleotide
  Antisense strand to SEQ ID NO: 173342
aaugagacuagagacaccc

SEQ ID NO: 173344 - RNA, 19 nt, Artificial Sequence
  Description of Artificial Sequence: Synthetic oligonucleotide
  Sense strand starting at position 3302 of SEQ ID NO: 2233
agcacuguauuugagauca

SEQ ID NO: 173345 - RNA, 19 nt, Artificial Sequence
  Description of Artificial Sequence: Synthetic oligonucleotide
  Antisense strand to SEQ ID NO: 173344
ugaucucaaauacagugcu

SEQ ID NO: 173346 - RNA, 19 nt, Artificial Sequence
  Description of Artificial Sequence: Synthetic oligonucleotide
  Sense strand starting at position 3539 of SEQ ID NO: 2233
ggaggagaauccaggaguu

SEQ ID NO: 173347 - RNA, 19 nt, Artificial Sequence
  Description of Artificial Sequence: Synthetic oligonucleotide
  Antisense strand to SEQ ID NO: 173346
aacuccuggauucuccucc

SEQ ID NO: 173348 - RNA, 19 nt, Artificial Sequence
  Description of Artificial Sequence: Synthetic oligonucleotide
  Sense strand starting at position 3578 of SEQ ID NO: 2233
gcuguuucccaagaaauaa

SEQ ID NO: 173349 - RNA, 19 nt, Artificial Sequence
  Description of Artificial Sequence: Synthetic oligonucleotide
  Antisense strand to SEQ ID NO: 173348
uuauuucuugggaaacagc

SEQ ID NO: 173350 - RNA, 19 nt, Artificial Sequence
  Description of Artificial Sequence: Synthetic oligonucleotide
  Sense strand starting at position 3668 of SEQ ID NO: 2233
cuuacugggauguguacua

SEQ ID NO: 173351 - RNA, 19 nt, Artificial Sequence
  Description of Artificial Sequence: Synthetic oligonucleotide
  Antisense strand to SEQ ID NO: 173350
uaguacacaucccaguaag

SEQ ID NO: 173352 - RNA, 19 nt, Artificial Sequence
  Description of Artificial Sequence: Synthetic oligonucleotide
  Sense strand starting at position 3702 of SEQ ID NO: 2233
uuuccagaucgucaaugua

SEQ ID NO: 173353 - RNA, 19 nt, Artificial Sequence
  Description of Artificial Sequence: Synthetic oligonucleotide
  Antisense strand to SEQ ID NO: 173352
uacauugacgaucuggaaa

SEQ ID NO: 173354 - RNA, 19 nt, Artificial Sequence
  Description of Artificial Sequence: Synthetic oligonucleotide
  Sense strand starting at position 3789 of SEQ ID NO: 2233
cgcugacuguauccuuauu

SEQ ID NO: 173355 - RNA, 19 nt, Artificial Sequence
  Description of Artificial Sequence: Synthetic oligonucleotide
  Antisense strand to SEQ ID NO: 173354
aauaaggauacagucagcg

SEQ ID NO: 173356 - RNA, 19 nt, Artificial Sequence
  Description of Artificial Sequence: Synthetic oligonucleotide
  Sense strand starting at position 3812 of SEQ ID NO: 2233
gucugaguccguguugcua

SEQ ID NO: 173357 - RNA, 19 nt, Artificial Sequence
  Description of Artificial Sequence: Synthetic oligonucleotide
  Antisense strand to SEQ ID NO: 173356
uagcaacacggacucagac

SEQ ID NO: 173358 - RNA, 19 nt, Artificial Sequence
  Description of Artificial Sequence: Synthetic oligonucleotide
  Sense strand starting at position 21 of SEQ ID NO: 2234
cuacaugcccugugcaaau

SEQ ID NO: 173359 - RNA, 19 nt, Artificial Sequence
  Description of Artificial Sequence: Synthetic oligonucleotide
  Antisense strand to SEQ ID NO: 173358
auuugcacagggcauguag

SEQ ID NO: 173360 - RNA, 19 nt, Artificial Sequence
  Description of Artificial Sequence: Synthetic oligonucleotide
  Sense strand starting at position 331 of SEQ ID NO: 2234
cucuaacacccguguucuu

SEQ ID NO: 173361 - RNA, 19 nt, Artificial Sequence
  Description of Artificial Sequence: Synthetic oligonucleotide
  Antisense strand to SEQ ID NO: 173360
aagaacacggguguuagag

SEQ ID NO: 173362 - RNA, 19 nt, Artificial Sequence
  Description of Artificial Sequence: Synthetic oligonucleotide
  Sense strand starting at position 400 of SEQ ID NO: 2234
ugcagcuguccugaacaca

SEQ ID NO: 173363 - RNA, 19 nt, Artificial Sequence
  Description of Artificial Sequence: Synthetic oligonucleotide
  Antisense strand to SEQ ID NO: 173362
uguguucaggacagcugca

SEQ ID NO: 173364 - RNA, 19 nt, Artificial Sequence
  Description of Artificial Sequence: Synthetic oligonucleotide
  Sense strand starting at position 653 of SEQ ID NO: 2234
uguguacgcacauguauau

SEQ ID NO: 173365 - RNA, 19 nt, Artificial Sequence
  Description of Artificial Sequence: Synthetic oligonucleotide
  Antisense strand to SEQ ID NO: 173364
auauacaugugcguacaca

SEQ ID NO: 173366 - RNA, 19 nt, Artificial Sequence
  Description of Artificial Sequence: Synthetic oligonucleotide
  Sense strand starting at position 689 of SEQ ID NO: 2234
augcgcgucucaugagaag

SEQ ID NO: 173367 - RNA, 19 nt, Artificial Sequence
  Description of Artificial Sequence: Synthetic oligonucleotide
  Antisense strand to SEQ ID NO: 173366
cuucucaugagacgcgcau

SEQ ID NO: 173368 - RNA, 19 nt, Artificial Sequence
  Description of Artificial Sequence: Synthetic oligonucleotide
  Sense strand starting at position 695 of SEQ ID NO: 2234
gucucaugagaagauguuu

SEQ ID NO: 173369 - RNA, 19 nt, Artificial Sequence
  Description of Artificial Sequence: Synthetic oligonucleotide
  Antisense strand to SEQ ID NO: 173368
aaacaucuucucaugagac

SEQ ID NO: 173370 - RNA, 19 nt, Artificial Sequence
  Description of Artificial Sequence: Synthetic oligonucleotide
  Sense strand starting at position 706 of SEQ ID NO: 2234
agauguuuauuucguacau

SEQ ID NO: 173371 - RNA, 19 nt, Artificial Sequence
  Description of Artificial Sequence: Synthetic oligonucleotide
  Antisense strand to SEQ ID NO: 173370
auguacgaaauaaacaucu

SEQ ID NO: 173372 - RNA, 19 nt, Artificial Sequence
  Description of Artificial Sequence: Synthetic oligonucleotide
  Sense strand starting at position 707 of SEQ ID NO: 2234
gauguuuauuucguacaug

SEQ ID NO: 173373 - RNA, 19 nt, Artificial Sequence
  Description of Artificial Sequence: Synthetic oligonucleotide
  Antisense strand to SEQ ID NO: 173372
cauguacgaaauaaacauc

SEQ ID NO: 173374 - RNA, 19 nt, Artificial Sequence
  Description of Artificial Sequence: Synthetic oligonucleotide
  Sense strand starting at position 748 of SEQ ID NO: 2234
agaggaucccaucgcuaca

SEQ ID NO: 173375 - RNA, 19 nt, Artificial Sequence
  Description of Artificial Sequence: Synthetic oligonucleotide
  Antisense strand to SEQ ID NO: 173374
uguagcgaugggauccucu

SEQ ID NO: 173376 - RNA, 19 nt, Artificial Sequence
  Description of Artificial Sequence: Synthetic oligonucleotide
  Sense strand starting at position 1370 of SEQ ID NO: 2234
ggaggauguaguuguggaa

SEQ ID NO: 173377 - RNA, 19 nt, Artificial Sequence
  Description of Artificial Sequence: Synthetic oligonucleotide
  Antisense strand to SEQ ID NO: 173376
uuccacaacuacauccucc

SEQ ID NO: 173378 - RNA, 19 nt, Artificial Sequence
  Description of Artificial Sequence: Synthetic oligonucleotide
  Sense strand starting at position 1400 of SEQ ID NO: 2234
gcgcguucauguccaucaa

SEQ ID NO: 173379 - RNA, 19 nt, Artificial Sequence
  Description of Artificial Sequence: Synthetic oligonucleotide
  Antisense strand to SEQ ID NO: 173378
uugauggacaugaacgcgc

SEQ ID NO: 173380 - RNA, 19 nt, Artificial Sequence
  Description of Artificial Sequence: Synthetic oligonucleotide
  Sense strand starting at position 1965 of SEQ ID NO: 2234
ugguguucgcgcucaugga

SEQ ID NO: 173381 - RNA, 19 nt, Artificial Sequence
  Description of Artificial Sequence: Synthetic oligonucleotide
  Antisense strand to SEQ ID NO: 173380
uccaugagcgcgaacacca

SEQ ID NO: 173382 - RNA, 19 nt, Artificial Sequence
  Description of Artificial Sequence: Synthetic oligonucleotide
  Sense strand starting at position 3315 of SEQ ID NO: 2234
acagcagcaucuguuuauu

SEQ ID NO: 173383 - RNA, 19 nt, Artificial Sequence
  Description of Artificial Sequence: Synthetic oligonucleotide
  Antisense strand to SEQ ID NO: 173382
aauaaacagaugcugcugu

SEQ ID NO: 173384 - RNA, 19 nt, Artificial Sequence
  Description of Artificial Sequence: Synthetic oligonucleotide
  Sense strand starting at position 3317 of SEQ ID NO: 2234
agcagcaucuguuuauuga

SEQ ID NO: 173385 - RNA, 19 nt, Artificial Sequence
  Description of Artificial Sequence: Synthetic oligonucleotide
  Antisense strand to SEQ ID NO: 173384
ucaauaaacagaugcugcu

SEQ ID NO: 173386 - RNA, 19 nt, Artificial Sequence
  Description of Artificial Sequence: Synthetic oligonucleotide
  Sense strand starting at position 3320 of SEQ ID NO: 2234
agcaucuguuuauugacaa

SEQ ID NO: 173387 - RNA, 19 nt, Artificial Sequence
  Description of Artificial Sequence: Synthetic oligonucleotide
  Antisense strand to SEQ ID NO: 173386
uugucaauaaacagaugcu

SEQ ID NO: 173388 - RNA, 19 nt, Artificial Sequence
  Description of Artificial Sequence: Synthetic oligonucleotide
  Sense strand starting at position 3321 of SEQ ID NO: 2234
gcaucuguuuauugacaau

SEQ ID NO: 173389 - RNA, 19 nt, Artificial Sequence
  Description of Artificial Sequence: Synthetic oligonucleotide
  Antisense strand to SEQ ID NO: 173388
auugucaauaaacagaugc

SEQ ID NO: 173390 - RNA, 19 nt, Artificial Sequence
  Description of Artificial Sequence: Synthetic oligonucleotide
  Sense strand starting at position 3332 of SEQ ID NO: 2234
uugacaauuccaggucauu

SEQ ID NO: 173391 - RNA, 19 nt, Artificial Sequence
  Description of Artificial Sequence: Synthetic oligonucleotide
  Antisense strand to SEQ ID NO: 173390
aaugaccuggaauugucaa

SEQ ID NO: 173392 - RNA, 19 nt, Artificial Sequence
  Description of Artificial Sequence: Synthetic oligonucleotide
  Sense strand starting at position 3426 of SEQ ID NO: 2234
acagguaugucgggaagug

SEQ ID NO: 173393 - RNA, 19 nt, Artificial Sequence
  Description of Artificial Sequence: Synthetic oligonucleotide
  Antisense strand to SEQ ID NO: 173392
cacuucccgacauaccugu

SEQ ID NO: 173394 - RNA, 19 nt, Artificial Sequence
  Description of Artificial Sequence: Synthetic oligonucleotide
  Sense strand starting at position 3584 of SEQ ID NO: 2234
cacaguuuauuuggguaau

SEQ ID NO: 173395 - RNA, 19 nt, Artificial Sequence
  Description of Artificial Sequence: Synthetic oligonucleotide
  Antisense strand to SEQ ID NO: 173394
auuacccaaauaaacugug

SEQ ID NO: 173396 - RNA, 19 nt, Artificial Sequence
  Description of Artificial Sequence: Synthetic oligonucleotide
  Sense strand starting at position 3585 of SEQ ID NO: 2234
acaguuuauuuggguaaug

SEQ ID NO: 173397 - RNA, 19 nt, Artificial Sequence
  Description of Artificial Sequence: Synthetic oligonucleotide
  Antisense strand to SEQ ID NO: 173396
cauuacccaaauaaacugu

SEQ ID NO: 173398 - RNA, 19 nt, Artificial Sequence
  Description of Artificial Sequence: Synthetic oligonucleotide
  Sense strand starting at position 3616 of SEQ ID NO: 2234
gcagaacaccuguaaguaa

SEQ ID NO: 173399 - RNA, 19 nt, Artificial Sequence
  Description of Artificial Sequence: Synthetic oligonucleotide
  Antisense strand to SEQ ID NO: 173398
uuacuuacagguguucugc

SEQ ID NO: 173400 - RNA, 19 nt, Artificial Sequence
  Description of Artificial Sequence: Synthetic oligonucleotide
  Sense strand starting at position 3635 of SEQ ID NO: 2234
aaacaaaugucaggaagga

SEQ ID NO: 173401 - RNA, 19 nt, Artificial Sequence
  Description of Artificial Sequence: Synthetic oligonucleotide
  Antisense strand to SEQ ID NO: 173400
uccuuccugacauuuguuu

SEQ ID NO: 173402 - RNA, 19 nt, Artificial Sequence
  Description of Artificial Sequence: Synthetic oligonucleotide
  Sense strand starting at position 3696 of SEQ ID NO: 2234
ggcgcugggcucaguagaa

SEQ ID NO: 173403 - RNA, 19 nt, Artificial Sequence
  Description of Artificial Sequence: Synthetic oligonucleotide
  Antisense strand to SEQ ID NO: 173402
uucuacugagcccagcgcc

SEQ ID NO: 173404 - RNA, 19 nt, Artificial Sequence
  Description of Artificial Sequence: Synthetic oligonucleotide
  Sense strand starting at position 3771 of SEQ ID NO: 2234
cgucgaucucguucuccau

SEQ ID NO: 173405 - RNA, 19 nt, Artificial Sequence
  Description of Artificial Sequence: Synthetic oligonucleotide
  Antisense strand to SEQ ID NO: 173404
auggagaacgagaucgacg

SEQ ID NO: 173406 - RNA, 19 nt, Artificial Sequence
  Description of Artificial Sequence: Synthetic oligonucleotide
  Sense strand starting at position 3795 of SEQ ID NO: 2234
ccgugugcuggaucugcaa

SEQ ID NO: 173407 - RNA, 19 nt, Artificial Sequence
  Description of Artificial Sequence: Synthetic oligonucleotide
  Antisense strand to SEQ ID NO: 173406
uugcagauccagcacacgg

SEQ ID NO: 173408 - RNA, 19 nt, Artificial Sequence
  Description of Artificial Sequence: Synthetic oligonucleotide
  Sense strand starting at position 2985 of SEQ ID NO: 2235
ggugcagauuucuggagaa

SEQ ID NO: 173409 - RNA, 19 nt, Artificial Sequence
  Description of Artificial Sequence: Synthetic oligonucleotide
  Antisense strand to SEQ ID NO: 173408
uucuccagaaaucugcacc

SEQ ID NO: 173410 - RNA, 19 nt, Artificial Sequence
  Description of Artificial Sequence: Synthetic oligonucleotide
  Sense strand starting at position 2866 of SEQ ID NO: 2235
ugggaauggugugaaggaa

SEQ ID NO: 173411 - RNA, 19 nt, Artificial Sequence
  Description of Artificial Sequence: Synthetic oligonucleotide
  Antisense strand to SEQ ID NO: 173410
uuccuucacaccauuccca

SEQ ID NO: 173412 - RNA, 19 nt, Artificial Sequence
  Description of Artificial Sequence: Synthetic oligonucleotide
  Sense strand starting at position 2854 of SEQ ID NO: 2235
uaguauguuagaugggaau

SEQ ID NO: 173413 - RNA, 19 nt, Artificial Sequence
  Description of Artificial Sequence: Synthetic oligonucleotide
  Antisense strand to SEQ ID NO: 173412
auucccaucuaacauacua

SEQ ID NO: 173414 - RNA, 19 nt, Artificial Sequence
  Description of Artificial Sequence: Synthetic oligonucleotide
  Sense strand starting at position 2847 of SEQ ID NO: 2235
aauucuguaguauguuaga

SEQ ID NO: 173415 - RNA, 19 nt, Artificial Sequence
  Description of Artificial Sequence: Synthetic oligonucleotide
  Antisense strand to SEQ ID NO: 173414
ucuaacauacuacagaauu

SEQ ID NO: 173416 - RNA, 19 nt, Artificial Sequence
  Description of Artificial Sequence: Synthetic oligonucleotide
  Sense strand starting at position 2842 of SEQ ID NO: 2235
ugguaaauucuguaguaug

SEQ ID NO: 173417 - RNA, 19 nt, Artificial Sequence
  Description of Artificial Sequence: Synthetic oligonucleotide
  Antisense strand to SEQ ID NO: 173416
cauacuacagaauuuacca

SEQ ID NO: 173418 - RNA, 19 nt, Artificial Sequence
  Description of Artificial Sequence: Synthetic oligonucleotide
  Sense strand starting at position 2841 of SEQ ID NO: 2235
uugguaaauucuguaguau

SEQ ID NO: 173419 - RNA, 19 nt, Artificial Sequence
  Description of Artificial Sequence: Synthetic oligonucleotide
  Antisense strand to SEQ ID NO: 173418
auacuacagaauuuaccaa

SEQ ID NO: 173420 - RNA, 19 nt, Artificial Sequence
  Description of Artificial Sequence: Synthetic oligonucleotide
  Sense strand starting at position 2616 of SEQ ID NO: 2235
caucacgauguuuggagaa

SEQ ID NO: 173421 - RNA, 19 nt, Artificial Sequence
  Description of Artificial Sequence: Synthetic oligonucleotide
  Antisense strand to SEQ ID NO: 173420
uucuccaaacaucgugaug

SEQ ID NO: 173422 - RNA, 19 nt, Artificial Sequence
  Description of Artificial Sequence: Synthetic oligonucleotide
  Sense strand starting at position 2615 of SEQ ID NO: 2235
ccaucacgauguuuggaga

SEQ ID NO: 173423 - RNA, 19 nt, Artificial Sequence
  Description of Artificial Sequence: Synthetic oligonucleotide
  Antisense strand to SEQ ID NO: 173422
ucuccaaacaucgugaugg

SEQ ID NO: 173424 - RNA, 19 nt, Artificial Sequence
  Description of Artificial Sequence: Synthetic oligonucleotide
  Sense strand starting at position 2607 of SEQ ID NO: 2235
aguauuagccaucacgaug

SEQ ID NO: 173425 - RNA, 19 nt, Artificial Sequence
  Description of Artificial Sequence: Synthetic oligonucleotide
  Antisense strand to SEQ ID NO: 173424
caucgugauggcuaauacu

SEQ ID NO: 173426 - RNA, 19 nt, Artificial Sequence
  Description of Artificial Sequence: Synthetic oligonucleotide
  Sense strand starting at position 2575 of SEQ ID NO: 2235
ugaaauagagcaugcagaa

SEQ ID NO: 173427 - RNA, 19 nt, Artificial Sequence
  Description of Artificial Sequence: Synthetic oligonucleotide
  Antisense strand to SEQ ID NO: 173426
uucugcaugcucuauuuca

SEQ ID NO: 173428 - RNA, 19 nt, Artificial Sequence
  Description of Artificial Sequence: Synthetic oligonucleotide
  Sense strand starting at position 2561 of SEQ ID NO: 2235
cggugaggguuaaaugaaa

SEQ ID NO: 173429 - RNA, 19 nt, Artificial Sequence
  Description of Artificial Sequence: Synthetic oligonucleotide
  Antisense strand to SEQ ID NO: 173428
uuucauuuaacccucaccg

SEQ ID NO: 173430 - RNA, 19 nt, Artificial Sequence
  Description of Artificial Sequence: Synthetic oligonucleotide
  Sense strand starting at position 2559 of SEQ ID NO: 2235
uucggugaggguuaaauga

SEQ ID NO: 173431 - RNA, 19 nt, Artificial Sequence
  Description of Artificial Sequence: Synthetic oligonucleotide
  Antisense strand to SEQ ID NO: 173430
ucauuuaacccucaccgaa

SEQ ID NO: 173432 - RNA, 19 nt, Artificial Sequence
  Description of Artificial Sequence: Synthetic oligonucleotide
  Sense strand starting at position 2556 of SEQ ID NO: 2235
gguuucggugaggguuaaa

SEQ ID NO: 173433 - RNA, 19 nt, Artificial Sequence
  Description of Artificial Sequence: Synthetic oligonucleotide
  Antisense strand to SEQ ID NO: 173432
uuuaacccucaccgaaacc

SEQ ID NO: 173434 - RNA, 19 nt, Artificial Sequence
  Description of Artificial Sequence: Synthetic oligonucleotide
  Sense strand starting at position 2553 of SEQ ID NO: 2235
guagguuucggugaggguu

SEQ ID NO: 173435 - RNA, 19 nt, Artificial Sequence
  Description of Artificial Sequence: Synthetic oligonucleotide
  Antisense strand to SEQ ID NO: 173434
aacccucaccgaaaccuac

SEQ ID NO: 173436 - RNA, 19 nt, Artificial Sequence
  Description of Artificial Sequence: Synthetic oligonucleotide
  Sense strand starting at position 2552 of SEQ ID NO: 2235
uguagguuucggugagggu

SEQ ID NO: 173437 - RNA, 19 nt, Artificial Sequence
  Description of Artificial Sequence: Synthetic oligonucleotide
  Antisense strand to SEQ ID NO: 173436
acccucaccgaaaccuaca

SEQ ID NO: 173438 - RNA, 19 nt, Artificial Sequence
  Description of Artificial Sequence: Synthetic oligonucleotide
  Sense strand starting at position 2399 of SEQ ID NO: 2235
uagucuuugugagccuaag

SEQ ID NO: 173439 - RNA, 19 nt, Artificial Sequence
  Description of Artificial Sequence: Synthetic oligonucleotide
  Antisense strand to SEQ ID NO: 173438
cuuaggcucacaaagacua

SEQ ID NO: 173440 - RNA, 19 nt, Artificial Sequence
  Description of Artificial Sequence: Synthetic oligonucleotide
  Sense strand starting at position 2387 of SEQ ID NO: 2235
cgaucuuugccuuagucuu

SEQ ID NO: 173441 - RNA, 19 nt, Artificial Sequence
  Description of Artificial Sequence: Synthetic oligonucleotide
  Antisense strand to SEQ ID NO: 173440
aagacuaaggcaaagaucg

SEQ ID NO: 173442 - RNA, 19 nt, Artificial Sequence
  Description of Artificial Sequence: Synthetic oligonucleotide
  Sense strand starting at position 2384 of SEQ ID NO: 2235
auccgaucuuugccuuagu

SEQ ID NO: 173443 - RNA, 19 nt, Artificial Sequence
  Description of Artificial Sequence: Synthetic oligonucleotide
  Antisense strand to SEQ ID NO: 173442
acuaaggcaaagaucggau

SEQ ID NO: 173444 - RNA, 19 nt, Artificial Sequence
  Description of Artificial Sequence: Synthetic oligonucleotide
  Sense strand starting at position 2162 of SEQ ID NO: 2235
gcgugucuucucucagcau

SEQ ID NO: 173445 - RNA, 19 nt, Artificial Sequence
  Description of Artificial Sequence: Synthetic oligonucleotide
  Antisense strand to SEQ ID NO: 173444
augcugagagaagacacgc

SEQ ID NO: 173446 - RNA, 19 nt, Artificial Sequence
  Description of Artificial Sequence: Synthetic oligonucleotide
  Sense strand starting at position 1985 of SEQ ID NO: 2235
ccgcuacauuugcauacaa

SEQ ID NO: 173447 - RNA, 19 nt, Artificial Sequence
  Description of Artificial Sequence: Synthetic oligonucleotide
  Antisense strand to SEQ ID NO: 173446
uuguaugcaaauguagcgg

SEQ ID NO: 173448 - RNA, 19 nt, Artificial Sequence
  Description of Artificial Sequence: Synthetic oligonucleotide
  Sense strand starting at position 1596 of SEQ ID NO: 2235
cgagcugguccucacgaaa

SEQ ID NO: 173449 - RNA, 19 nt, Artificial Sequence
  Description of Artificial Sequence: Synthetic oligonucleotide
  Antisense strand to SEQ ID NO: 173448
uuucgugaggaccagcucg

SEQ ID NO: 173450 - RNA, 19 nt, Artificial Sequence
  Description of Artificial Sequence: Synthetic oligonucleotide
  Sense strand starting at position 1233 of SEQ ID NO: 2235
uguuauacuuggcuuagaa

SEQ ID NO: 173451 - RNA, 19 nt, Artificial Sequence
  Description of Artificial Sequence: Synthetic oligonucleotide
  Antisense strand to SEQ ID NO: 173450
uucuaagccaaguauaaca

SEQ ID NO: 173452 - RNA, 19 nt, Artificial Sequence
  Description of Artificial Sequence: Synthetic oligonucleotide
  Sense strand starting at position 1232 of SEQ ID NO: 2235
cuguuauacuuggcuuaga

SEQ ID NO: 173453 - RNA, 19 nt, Artificial Sequence
  Description of Artificial Sequence: Synthetic oligonucleotide
  Antisense strand to SEQ ID NO: 173452
ucuaagccaaguauaacag

SEQ ID NO: 173454 - RNA, 19 nt, Artificial Sequence
  Description of Artificial Sequence: Synthetic oligonucleotide
  Sense strand starting at position 725 of SEQ ID NO: 2235
gggagaauccuguggcugu

SEQ ID NO: 173455 - RNA, 19 nt, Artificial Sequence
  Description of Artificial Sequence: Synthetic oligonucleotide
  Antisense strand to SEQ ID NO: 173454
acagccacaggauucuccc

SEQ ID NO: 173456 - RNA, 19 nt, Artificial Sequence
  Description of Artificial Sequence: Synthetic oligonucleotide
  Sense strand starting at position 715 of SEQ ID NO: 2235
ggauauggcugggagaauc

SEQ ID NO: 173457 - RNA, 19 nt, Artificial Sequence
  Description of Artificial Sequence: Synthetic oligonucleotide
  Antisense strand to SEQ ID NO: 173456
gauucucccagccauaucc

SEQ ID NO: 173458 - RNA, 19 nt, Artificial Sequence
  Description of Artificial Sequence: Synthetic oligonucleotide
  Sense strand starting at position 603 of SEQ ID NO: 2235
cuauaacucuggguaacuu

SEQ ID NO: 173459 - RNA, 19 nt, Artificial Sequence
  Description of Artificial Sequence: Synthetic oligonucleotide
  Antisense strand to SEQ ID NO: 173458
aaguuacccagaguuauag

SEQ ID NO: 173460 - RNA, 19 nt, Artificial Sequence
  Description of Artificial Sequence: Synthetic oligonucleotide
  Sense strand starting at position 602 of SEQ ID NO: 2235
ccuauaacucuggguaacu

SEQ ID NO: 173461 - RNA, 19 nt, Artificial Sequence
  Description of Artificial Sequence: Synthetic oligonucleotide
  Antisense strand to SEQ ID NO: 173460
aguuacccagaguuauagg

SEQ ID NO: 173462 - RNA, 19 nt, Artificial Sequence
  Description of Artificial Sequence: Synthetic oligonucleotide
  Sense strand starting at position 600 of SEQ ID NO: 2235
ggccuauaacucuggguaa

SEQ ID NO: 173463 - RNA, 19 nt, Artificial Sequence
  Description of Artificial Sequence: Synthetic oligonucleotide
  Antisense strand to SEQ ID NO: 173462
uuacccagaguuauaggcc

SEQ ID NO: 173464 - RNA, 19 nt, Artificial Sequence
  Description of Artificial Sequence: Synthetic oligonucleotide
  Sense strand starting at position 588 of SEQ ID NO: 2235
uaaguuucuggaggccuau

SEQ ID NO: 173465 - RNA, 19 nt, Artificial Sequence
  Description of Artificial Sequence: Synthetic oligonucleotide
  Antisense strand to SEQ ID NO: 173464
auaggccuccagaaacuua

SEQ ID NO: 173466 - RNA, 19 nt, Artificial Sequence
  Description of Artificial Sequence: Synthetic oligonucleotide
  Sense strand starting at position 542 of SEQ ID NO: 2235
ggucgugugcucucaacuc

SEQ ID NO: 173467 - RNA, 19 nt, Artificial Sequence
  Description of Artificial Sequence: Synthetic oligonucleotide
  Antisense strand to SEQ ID NO: 173466
gaguugagagcacacgacc

SEQ ID NO: 173468 - RNA, 19 nt, Artificial Sequence
  Description of Artificial Sequence: Synthetic oligonucleotide
  Sense strand starting at position 501 of SEQ ID NO: 2235
uuaggaaacucagcuuaca

SEQ ID NO: 173469 - RNA, 19 nt, Artificial Sequence
  Description of Artificial Sequence: Synthetic oligonucleotide
  Antisense strand to SEQ ID NO: 173468
uguaagcugaguuuccuaa

SEQ ID NO: 173470 - RNA, 19 nt, Artificial Sequence
  Description of Artificial Sequence: Synthetic oligonucleotide
  Sense strand starting at position 455 of SEQ ID NO: 2235
auauguugaugagugaaug

SEQ ID NO: 173471 - RNA, 19 nt, Artificial Sequence
  Description of Artificial Sequence: Synthetic oligonucleotide
  Antisense strand to SEQ ID NO: 173470
cauucacucaucaacauau

SEQ ID NO: 173472 - RNA, 19 nt, Artificial Sequence
  Description of Artificial Sequence: Synthetic oligonucleotide
  Sense strand starting at position 453 of SEQ ID NO: 2235
guauauguugaugagugaa

SEQ ID NO: 173473 - RNA, 19 nt, Artificial Sequence
  Description of Artificial Sequence: Synthetic oligonucleotide
  Antisense strand to SEQ ID NO: 173472
uucacucaucaacauauac

SEQ ID NO: 173474 - RNA, 19 nt, Artificial Sequence
  Description of Artificial Sequence: Synthetic oligonucleotide
  Sense strand starting at position 450 of SEQ ID NO: 2235
caaguauauguugaugagu

SEQ ID NO: 173475 - RNA, 19 nt, Artificial Sequence
  Description of Artificial Sequence: Synthetic oligonucleotide
  Antisense strand to SEQ ID NO: 173474
acucaucaacauauacuug

SEQ ID NO: 173476 - RNA, 19 nt, Artificial Sequence
  Description of Artificial Sequence: Synthetic oligonucleotide
  Sense strand starting at position 373 of SEQ ID NO: 2235
guccuauuacaaugaaagg

SEQ ID NO: 173477 - RNA, 19 nt, Artificial Sequence
  Description of Artificial Sequence: Synthetic oligonucleotide
  Antisense strand to SEQ ID NO: 173476
ccuuucauuguaauaggac

SEQ ID NO: 173478 - RNA, 19 nt, Artificial Sequence
  Description of Artificial Sequence: Synthetic oligonucleotide
  Sense strand starting at position 363 of SEQ ID NO: 2235
uugcuugucuguccuauua

SEQ ID NO: 173479 - RNA, 19 nt, Artificial Sequence
  Description of Artificial Sequence: Synthetic oligonucleotide
  Antisense strand to SEQ ID NO: 173478
uaauaggacagacaagcaa

SEQ ID NO: 173480 - RNA, 19 nt, Artificial Sequence
  Description of Artificial Sequence: Synthetic oligonucleotide
  Sense strand starting at position 349 of SEQ ID NO: 2235
uguuaauaugcuuauugcu

SEQ ID NO: 173481 - RNA, 19 nt, Artificial Sequence
  Description of Artificial Sequence: Synthetic oligonucleotide
  Antisense strand to SEQ ID NO: 173480
agcaauaagcauauuaaca

SEQ ID NO: 173482 - RNA, 19 nt, Artificial Sequence
  Description of Artificial Sequence: Synthetic oligonucleotide
  Sense strand starting at position 247 of SEQ ID NO: 2235
acugccauuucugaaguuu

SEQ ID NO: 173483 - RNA, 19 nt, Artificial Sequence
  Description of Artificial Sequence: Synthetic oligonucleotide
  Antisense strand to SEQ ID NO: 173482
aaacuucagaaauggcagu

SEQ ID NO: 173484 - RNA, 19 nt, Artificial Sequence
  Description of Artificial Sequence: Synthetic oligonucleotide
  Sense strand starting at position 246 of SEQ ID NO: 2235
gacugccauuucugaaguu

SEQ ID NO: 173485 - RNA, 19 nt, Artificial Sequence
  Description of Artificial Sequence: Synthetic oligonucleotide
  Antisense strand to SEQ ID NO: 173484
aacuucagaaauggcaguc

SEQ ID NO: 173486 - RNA, 19 nt, Artificial Sequence
  Description of Artificial Sequence: Synthetic oligonucleotide
  Sense strand starting at position 63 of SEQ ID NO: 2235
cacugagaccuaugaucug

SEQ ID NO: 173487 - RNA, 19 nt, Artificial Sequence
  Description of Artificial Sequence: Synthetic oligonucleotide
  Antisense strand to SEQ ID NO: 173486
cagaucauaggucucagug

SEQ ID NO: 173488 - RNA, 19 nt, Artificial Sequence
  Description of Artificial Sequence: Synthetic oligonucleotide
  Sense strand starting at position 3736 of SEQ ID NO: 2236
aaauaugagugagcaucuu

SEQ ID NO: 173489 - RNA, 19 nt, Artificial Sequence
  Description of Artificial Sequence: Synthetic oligonucleotide
  Antisense strand to SEQ ID NO: 173488
aagaugcucacucauauuu

SEQ ID NO: 173490 - RNA, 19 nt, Artificial Sequence
  Description of Artificial Sequence: Synthetic oligonucleotide
  Sense strand starting at position 3733 of SEQ ID NO: 2236
uauaaauaugagugagcau

SEQ ID NO: 173491 - RNA, 19 nt, Artificial Sequence
  Description of Artificial Sequence: Synthetic oligonucleotide
  Antisense strand to SEQ ID NO: 173490
augcucacucauauuuaua

SEQ ID NO: 173492 - RNA, 19 nt, Artificial Sequence
  Description of Artificial Sequence: Synthetic oligonucleotide
  Sense strand starting at position 3732 of SEQ ID NO: 2236
uuauaaauaugagugagca

SEQ ID NO: 173493 - RNA, 19 nt, Artificial Sequence
  Description of Artificial Sequence: Synthetic oligonucleotide
  Antisense strand to SEQ ID NO: 173492
ugcucacucauauuuauaa

SEQ ID NO: 173494 - RNA, 19 nt, Artificial Sequence
  Description of Artificial Sequence: Synthetic oligonucleotide
  Sense strand starting at position 3413 of SEQ ID NO: 2236
gcauuagccgauuaguaga

SEQ ID NO: 173495 - RNA, 19 nt, Artificial Sequence
  Description of Artificial Sequence: Synthetic oligonucleotide
  Antisense strand to SEQ ID NO: 173494
ucuacuaaucggcuaaugc

SEQ ID NO: 173496 - RNA, 19 nt, Artificial Sequence
  Description of Artificial Sequence: Synthetic oligonucleotide
  Sense strand starting at position 3410 of SEQ ID NO: 2236
ggugcauuagccgauuagu

SEQ ID NO: 173497 - RNA, 19 nt, Artificial Sequence
  Description of Artificial Sequence: Synthetic oligonucleotide
  Antisense strand to SEQ ID NO: 173496
acuaaucggcuaaugcacc

SEQ ID NO: 173498 - RNA, 19 nt, Artificial Sequence
  Description of Artificial Sequence: Synthetic oligonucleotide
  Sense strand starting at position 3317 of SEQ ID NO: 2236
gcaguauaugagugggaug

SEQ ID NO: 173499 - RNA, 19 nt, Artificial Sequence
  Description of Artificial Sequence: Synthetic oligonucleotide
  Antisense strand to SEQ ID NO: 173498
caucccacucauauacugc

SEQ ID NO: 173500 - RNA, 19 nt, Artificial Sequence
  Description of Artificial Sequence: Synthetic oligonucleotide
  Sense strand starting at position 3316 of SEQ ID NO: 2236
ggcaguauaugagugggau

SEQ ID NO: 173501 - RNA, 19 nt, Artificial Sequence
  Description of Artificial Sequence: Synthetic oligonucleotide
  Antisense strand to SEQ ID NO: 173500
aucccacucauauacugcc

SEQ ID NO: 173502 - RNA, 19 nt, Artificial Sequence
  Description of Artificial Sequence: Synthetic oligonucleotide
  Sense strand starting at position 3264 of SEQ ID NO: 2236
gucaauugucguuaagaga

SEQ ID NO: 173503 - RNA, 19 nt, Artificial Sequence
  Description of Artificial Sequence: Synthetic oligonucleotide
  Antisense strand to SEQ ID NO: 173502
ucucuuaacgacaauugac

SEQ ID NO: 173504 - RNA, 19 nt, Artificial Sequence
  Description of Artificial Sequence: Synthetic oligonucleotide
  Sense strand starting at position 3263 of SEQ ID NO: 2236
ggucaauugucguuaagag

SEQ ID NO: 173505 - RNA, 19 nt, Artificial Sequence
  Description of Artificial Sequence: Synthetic oligonucleotide
  Antisense strand to SEQ ID NO: 173504
cucuuaacgacaauugacc

SEQ ID NO: 173506 - RNA, 19 nt, Artificial Sequence
  Description of Artificial Sequence: Synthetic oligonucleotide
  Sense strand starting at position 3260 of SEQ ID NO: 2236
gugggucaauugucguuaa

SEQ ID NO: 173507 - RNA, 19 nt, Artificial Sequence
  Description of Artificial Sequence: Synthetic oligonucleotide
  Antisense strand to SEQ ID NO: 173506
uuaacgacaauugacccac

SEQ ID NO: 173508 - RNA, 19 nt, Artificial Sequence
  Description of Artificial Sequence: Synthetic oligonucleotide
  Sense strand starting at position 2209 of SEQ ID NO: 2236
cuucguacccgucuugagu

SEQ ID NO: 173509 - RNA, 19 nt, Artificial Sequence
  Description of Artificial Sequence: Synthetic oligonucleotide
  Antisense strand to SEQ ID NO: 173508
acucaagacggguacgaag

SEQ ID NO: 173510 - RNA, 19 nt, Artificial Sequence
  Description of Artificial Sequence: Synthetic oligonucleotide
  Sense strand starting at position 1545 of SEQ ID NO: 2236
gcuuguccagcugugaagu

SEQ ID NO: 173511 - RNA, 19 nt, Artificial Sequence
  Description of Artificial Sequence: Synthetic oligonucleotide
  Antisense strand to SEQ ID NO: 173510
acuucacagcuggacaagc

SEQ ID NO: 173512 - RNA, 19 nt, Artificial Sequence
  Description of Artificial Sequence: Synthetic oligonucleotide
  Sense strand starting at position 1543 of SEQ ID NO: 2236
cggcuuguccagcugugaa

SEQ ID NO: 173513 - RNA, 19 nt, Artificial Sequence
  Description of Artificial Sequence: Synthetic oligonucleotide
  Antisense strand to SEQ ID NO: 173512
uucacagcuggacaagccg

SEQ ID NO: 173514 - RNA, 19 nt, Artificial Sequence
  Description of Artificial Sequence: Synthetic oligonucleotide
  Sense strand starting at position 1542 of SEQ ID NO: 2236
ucggcuuguccagcuguga

SEQ ID NO: 173515 - RNA, 19 nt, Artificial Sequence
  Description of Artificial Sequence: Synthetic oligonucleotide
  Antisense strand to SEQ ID NO: 173514
ucacagcuggacaagccga

SEQ ID NO: 173516 - RNA, 19 nt, Artificial Sequence
  Description of Artificial Sequence: Synthetic oligonucleotide
  Sense strand starting at position 1424 of SEQ ID NO: 2236
cuccaaacucugggacuuu

SEQ ID NO: 173517 - RNA, 19 nt, Artificial Sequence
  Description of Artificial Sequence: Synthetic oligonucleotide
  Antisense strand to SEQ ID NO: 173516
aaagucccagaguuuggag

SEQ ID NO: 173518 - RNA, 19 nt, Artificial Sequence
  Description of Artificial Sequence: Synthetic oligonucleotide
  Sense strand starting at position 1260 of SEQ ID NO: 2236
uaagaugccuuugggacaa

SEQ ID NO: 173519 - RNA, 19 nt, Artificial Sequence
  Description of Artificial Sequence: Synthetic oligonucleotide
  Antisense strand to SEQ ID NO: 173518
uugucccaaaggcaucuua

SEQ ID NO: 173520 - RNA, 19 nt, Artificial Sequence
  Description of Artificial Sequence: Synthetic oligonucleotide
  Sense strand starting at position 1259 of SEQ ID NO: 2236
cuaagaugccuuugggaca

SEQ ID NO: 173521 - RNA, 19 nt, Artificial Sequence
  Description of Artificial Sequence: Synthetic oligonucleotide
  Antisense strand to SEQ ID NO: 173520
ugucccaaaggcaucuuag

SEQ ID NO: 173522 - RNA, 19 nt, Artificial Sequence
  Description of Artificial Sequence: Synthetic oligonucleotide
  Sense strand starting at position 1189 of SEQ ID NO: 2236
agagcaacgucucccauuu

SEQ ID NO: 173523 - RNA, 19 nt, Artificial Sequence
  Description of Artificial Sequence: Synthetic oligonucleotide
  Antisense strand to SEQ ID NO: 173522
aaaugggagacguugcucu

SEQ ID NO: 173524 - RNA, 19 nt, Artificial Sequence
  Description of Artificial Sequence: Synthetic oligonucleotide
  Sense strand starting at position 1151 of SEQ ID NO: 2236
agcaauuaugguuguccaa

SEQ ID NO: 173525 - RNA, 19 nt, Artificial Sequence
  Description of Artificial Sequence: Synthetic oligonucleotide
  Antisense strand to SEQ ID NO: 173524
uuggacaaccauaauugcu

SEQ ID NO: 173526 - RNA, 19 nt, Artificial Sequence
  Description of Artificial Sequence: Synthetic oligonucleotide
  Sense strand starting at position 1150 of SEQ ID NO: 2236
cagcaauuaugguugucca

SEQ ID NO: 173527 - RNA, 19 nt, Artificial Sequence
  Description of Artificial Sequence: Synthetic oligonucleotide
  Antisense strand to SEQ ID NO: 173526
uggacaaccauaauugcug

SEQ ID NO: 173528 - RNA, 19 nt, Artificial Sequence
  Description of Artificial Sequence: Synthetic oligonucleotide
  Sense strand starting at position 1137 of SEQ ID NO: 2236
gauacuuuguagccagcaa

SEQ ID NO: 173529 - RNA, 19 nt, Artificial Sequence
  Description of Artificial Sequence: Synthetic oligonucleotide
  Antisense strand to SEQ ID NO: 173528
uugcuggcuacaaaguauc

SEQ ID NO: 173530 - RNA, 19 nt, Artificial Sequence
  Description of Artificial Sequence: Synthetic oligonucleotide
  Sense strand starting at position 1133 of SEQ ID NO: 2236
uuaagauacuuuguagcca

SEQ ID NO: 173531 - RNA, 19 nt, Artificial Sequence
  Description of Artificial Sequence: Synthetic oligonucleotide
  Antisense strand to SEQ ID NO: 173530
uggcuacaaaguaucuuaa

SEQ ID NO: 173532 - RNA, 19 nt, Artificial Sequence
  Description of Artificial Sequence: Synthetic oligonucleotide
  Sense strand starting at position 1080 of SEQ ID NO: 2236
acauauaacuugcgaauaa

SEQ ID NO: 173533 - RNA, 19 nt, Artificial Sequence
  Description of Artificial Sequence: Synthetic oligonucleotide
  Antisense strand to SEQ ID NO: 173532
uuauucgcaaguuauaugu

SEQ ID NO: 173534 - RNA, 19 nt, Artificial Sequence
  Description of Artificial Sequence: Synthetic oligonucleotide
  Sense strand starting at position 1036 of SEQ ID NO: 2236
acagccauguuaucucuau

SEQ ID NO: 173535 - RNA, 19 nt, Artificial Sequence
  Description of Artificial Sequence: Synthetic oligonucleotide
  Antisense strand to SEQ ID NO: 173534
auagagauaacauggcugu

SEQ ID NO: 173536 - RNA, 19 nt, Artificial Sequence
  Description of Artificial Sequence: Synthetic oligonucleotide
  Sense strand starting at position 1031 of SEQ ID NO: 2236
gagauacagccauguuauc

SEQ ID NO: 173537 - RNA, 19 nt, Artificial Sequence
  Description of Artificial Sequence: Synthetic oligonucleotide
  Antisense strand to SEQ ID NO: 173536
gauaacauggcuguaucuc

SEQ ID NO: 173538 - RNA, 19 nt, Artificial Sequence
  Description of Artificial Sequence: Synthetic oligonucleotide
  Sense strand starting at position 1018 of SEQ ID NO: 2236
gcaguagagaccugagaua

SEQ ID NO: 173539 - RNA, 19 nt, Artificial Sequence
  Description of Artificial Sequence: Synthetic oligonucleotide
  Antisense strand to SEQ ID NO: 173538
uaucucaggucucuacugc

SEQ ID NO: 173540 - RNA, 19 nt, Artificial Sequence
  Description of Artificial Sequence: Synthetic oligonucleotide
  Sense strand starting at position 914 of SEQ ID NO: 2236
aaucgugguuaauaguaau

SEQ ID NO: 173541 - RNA, 19 nt, Artificial Sequence
  Description of Artificial Sequence: Synthetic oligonucleotide
  Antisense strand to SEQ ID NO: 173540
auuacuauuaaccacgauu

SEQ ID NO: 173542 - RNA, 19 nt, Artificial Sequence
  Description of Artificial Sequence: Synthetic oligonucleotide
  Sense strand starting at position 911 of SEQ ID NO: 2236
cagaaucgugguuaauagu

SEQ ID NO: 173543 - RNA, 19 nt, Artificial Sequence
  Description of Artificial Sequence: Synthetic oligonucleotide
  Antisense strand to SEQ ID NO: 173542
acuauuaaccacgauucug

SEQ ID NO: 173544 - RNA, 19 nt, Artificial Sequence
  Description of Artificial Sequence: Synthetic oligonucleotide
  Sense strand starting at position 910 of SEQ ID NO: 2236
acagaaucgugguuaauag

SEQ ID NO: 173545 - RNA, 19 nt, Artificial Sequence
  Description of Artificial Sequence: Synthetic oligonucleotide
  Antisense strand to SEQ ID NO: 173544
cuauuaaccacgauucugu

SEQ ID NO: 173546 - RNA, 19 nt, Artificial Sequence
  Description of Artificial Sequence: Synthetic oligonucleotide
  Sense strand starting at position 907 of SEQ ID NO: 2236
agcacagaaucgugguuaa

SEQ ID NO: 173547 - RNA, 19 nt, Artificial Sequence
  Description of Artificial Sequence: Synthetic oligonucleotide
  Antisense strand to SEQ ID NO: 173546
uuaaccacgauucugugcu

SEQ ID NO: 173548 - RNA, 19 nt, Artificial Sequence
  Description of Artificial Sequence: Synthetic oligonucleotide
  Sense strand starting at position 829 of SEQ ID NO: 2236
uggugucauuucuauauaa

SEQ ID NO: 173549 - RNA, 19 nt, Artificial Sequence
  Description of Artificial Sequence: Synthetic oligonucleotide
  Antisense strand to SEQ ID NO: 173548
uuauauagaaaugacacca

SEQ ID NO: 173550 - RNA, 19 nt, Artificial Sequence
  Description of Artificial Sequence: Synthetic oligonucleotide
  Sense strand starting at position 706 of SEQ ID NO: 2236
cacagaacguguguuucuu

SEQ ID NO: 173551 - RNA, 19 nt, Artificial Sequence
  Description of Artificial Sequence: Synthetic oligonucleotide
  Antisense strand to SEQ ID NO: 173550
aagaaacacacguucugug

SEQ ID NO: 173552 - RNA, 19 nt, Artificial Sequence
  Description of Artificial Sequence: Synthetic oligonucleotide
  Sense strand starting at position 645 of SEQ ID NO: 2236
uuggcucugaguggaauua

SEQ ID NO: 173553 - RNA, 19 nt, Artificial Sequence
  Description of Artificial Sequence: Synthetic oligonucleotide
  Antisense strand to SEQ ID NO: 173552
uaauuccacucagagccaa

SEQ ID NO: 173554 - RNA, 19 nt, Artificial Sequence
  Description of Artificial Sequence: Synthetic oligonucleotide
  Sense strand starting at position 644 of SEQ ID NO: 2236
uuuggcucugaguggaauu

SEQ ID NO: 173555 - RNA, 19 nt, Artificial Sequence
  Description of Artificial Sequence: Synthetic oligonucleotide
  Antisense strand to SEQ ID NO: 173554
aauuccacucagagccaaa

SEQ ID NO: 173556 - RNA, 19 nt, Artificial Sequence
  Description of Artificial Sequence: Synthetic oligonucleotide
  Sense strand starting at position 636 of SEQ ID NO: 2236
ugauaaacuuuggcucuga

SEQ ID NO: 173557 - RNA, 19 nt, Artificial Sequence
  Description of Artificial Sequence: Synthetic oligonucleotide
  Antisense strand to SEQ ID NO: 173556
ucagagccaaaguuuauca

SEQ ID NO: 173558 - RNA, 19 nt, Artificial Sequence
  Description of Artificial Sequence: Synthetic oligonucleotide
  Sense strand starting at position 627 of SEQ ID NO: 2236
agagacaagugauaaacuu

SEQ ID NO: 173559 - RNA, 19 nt, Artificial Sequence
  Description of Artificial Sequence: Synthetic oligonucleotide
  Antisense strand to SEQ ID NO: 173558
aaguuuaucacuugucucu

SEQ ID NO: 173560 - RNA, 19 nt, Artificial Sequence
  Description of Artificial Sequence: Synthetic oligonucleotide
  Sense strand starting at position 611 of SEQ ID NO: 2236
gcacuaacauuaguagaga

SEQ ID NO: 173561 - RNA, 19 nt, Artificial Sequence
  Description of Artificial Sequence: Synthetic oligonucleotide
  Antisense strand to SEQ ID NO: 173560
ucucuacuaauguuagugc

SEQ ID NO: 173562 - RNA, 19 nt, Artificial Sequence
  Description of Artificial Sequence: Synthetic oligonucleotide
  Sense strand starting at position 494 of SEQ ID NO: 2236
uaaauuaguuuagguggua

SEQ ID NO: 173563 - RNA, 19 nt, Artificial Sequence
  Description of Artificial Sequence: Synthetic oligonucleotide
  Antisense strand to SEQ ID NO: 173562
uaccaccuaaacuaauuua

SEQ ID NO: 173564 - RNA, 19 nt, Artificial Sequence
  Description of Artificial Sequence: Synthetic oligonucleotide
  Sense strand starting at position 403 of SEQ ID NO: 2236
aaaggugggucuccaaaua

SEQ ID NO: 173565 - RNA, 19 nt, Artificial Sequence
  Description of Artificial Sequence: Synthetic oligonucleotide
  Antisense strand to SEQ ID NO: 173564
uauuuggagacccaccuuu

SEQ ID NO: 173566 - RNA, 19 nt, Artificial Sequence
  Description of Artificial Sequence: Synthetic oligonucleotide
  Sense strand starting at position 86 of SEQ ID NO: 2236
ccguaauccuaccaauuug

SEQ ID NO: 173567 - RNA, 19 nt, Artificial Sequence
  Description of Artificial Sequence: Synthetic oligonucleotide
  Antisense strand to SEQ ID NO: 173566
caaauugguaggauuacgg

SEQ ID NO: 173568 - RNA, 19 nt, Artificial Sequence
  Description of Artificial Sequence: Synthetic oligonucleotide
  Sense strand starting at position 3930 of SEQ ID NO: 2238
gggucaauuugucacagca

SEQ ID NO: 173569 - RNA, 19 nt, Artificial Sequence
  Description of Artificial Sequence: Synthetic oligonucleotide
  Antisense strand to SEQ ID NO: 173568
ugcugugacaaauugaccc

SEQ ID NO: 173570 - RNA, 19 nt, Artificial Sequence
  Description of Artificial Sequence: Synthetic oligonucleotide
  Sense strand starting at position 3920 of SEQ ID NO: 2238
caugaaguuugggucaauu

SEQ ID NO: 173571 - RNA, 19 nt, Artificial Sequence
  Description of Artificial Sequence: Synthetic oligonucleotide
  Antisense strand to SEQ ID NO: 173570
aauugacccaaacuucaug

SEQ ID NO: 173572 - RNA, 19 nt, Artificial Sequence
  Description of Artificial Sequence: Synthetic oligonucleotide
  Sense strand starting at position 3911 of SEQ ID NO: 2238
guucuaagccaugaaguuu

SEQ ID NO: 173573 - RNA, 19 nt, Artificial Sequence
  Description of Artificial Sequence: Synthetic oligonucleotide
  Antisense strand to SEQ ID NO: 173572
aaacuucauggcuuagaac

SEQ ID NO: 173574 - RNA, 19 nt, Artificial Sequence
  Description of Artificial Sequence: Synthetic oligonucleotide
  Sense strand starting at position 3708 of SEQ ID NO: 2238
gucaguagccaaggaaugu

SEQ ID NO: 173575 - RNA, 19 nt, Artificial Sequence
  Description of Artificial Sequence: Synthetic oligonucleotide
  Antisense strand to SEQ ID NO: 173574
acauuccuuggcuacugac

SEQ ID NO: 173576 - RNA, 19 nt, Artificial Sequence
  Description of Artificial Sequence: Synthetic oligonucleotide
  Sense strand starting at position 3678 of SEQ ID NO: 2238
agaucagaaugauacaguu

SEQ ID NO: 173577 - RNA, 19 nt, Artificial Sequence
  Description of Artificial Sequence: Synthetic oligonucleotide
  Antisense strand to SEQ ID NO: 173576
aacuguaucauucugaucu

SEQ ID NO: 173578 - RNA, 19 nt, Artificial Sequence
  Description of Artificial Sequence: Synthetic oligonucleotide
  Sense strand starting at position 3509 of SEQ ID NO: 2238
gguuacuuuacguggcaaa

SEQ ID NO: 173579 - RNA, 19 nt, Artificial Sequence
  Description of Artificial Sequence: Synthetic oligonucleotide
  Antisense strand to SEQ ID NO: 173578
uuugccacguaaaguaacc

SEQ ID NO: 173580 - RNA, 19 nt, Artificial Sequence
  Description of Artificial Sequence: Synthetic oligonucleotide
  Sense strand starting at position 3500 of SEQ ID NO: 2238
cccagaacugguuacuuua

SEQ ID NO: 173581 - RNA, 19 nt, Artificial Sequence
  Description of Artificial Sequence: Synthetic oligonucleotide
  Antisense strand to SEQ ID NO: 173580
uaaaguaaccaguucuggg

SEQ ID NO: 173582 - RNA, 19 nt, Artificial Sequence
  Description of Artificial Sequence: Synthetic oligonucleotide
  Sense strand starting at position 3414 of SEQ ID NO: 2238
gggcccuugcucuaaauca

SEQ ID NO: 173583 - RNA, 19 nt, Artificial Sequence
  Description of Artificial Sequence: Synthetic oligonucleotide
  Antisense strand to SEQ ID NO: 173582
ugauuuagagcaagggccc

SEQ ID NO: 173584 - RNA, 19 nt, Artificial Sequence
  Description of Artificial Sequence: Synthetic oligonucleotide
  Sense strand starting at position 3340 of SEQ ID NO: 2238
uguuaagacucagagaagu

SEQ ID NO: 173585 - RNA, 19 nt, Artificial Sequence
  Description of Artificial Sequence: Synthetic oligonucleotide
  Antisense strand to SEQ ID NO: 173584
acuucucugagucuuaaca

SEQ ID NO: 173586 - RNA, 19 nt, Artificial Sequence
  Description of Artificial Sequence: Synthetic oligonucleotide
  Sense strand starting at position 3328 of SEQ ID NO: 2238
uucagaugaggcuguuaag

SEQ ID NO: 173587 - RNA, 19 nt, Artificial Sequence
  Description of Artificial Sequence: Synthetic oligonucleotide
  Antisense strand to SEQ ID NO: 173586
cuuaacagccucaucugaa

SEQ ID NO: 173588 - RNA, 19 nt, Artificial Sequence
  Description of Artificial Sequence: Synthetic oligonucleotide
  Sense strand starting at position 3305 of SEQ ID NO: 2238
ggaagauucuauuauucua

SEQ ID NO: 173589 - RNA, 19 nt, Artificial Sequence
  Description of Artificial Sequence: Synthetic oligonucleotide
  Antisense strand to SEQ ID NO: 173588
uagaauaauagaaucuucc

SEQ ID NO: 173590 - RNA, 19 nt, Artificial Sequence
  Description of Artificial Sequence: Synthetic oligonucleotide
  Sense strand starting at position 3268 of SEQ ID NO: 2238
uacauuguguucuuugguu

SEQ ID NO: 173591 - RNA, 19 nt, Artificial Sequence
  Description of Artificial Sequence: Synthetic oligonucleotide
  Antisense strand to SEQ ID NO: 173590
aaccaaagaacacaaugua

SEQ ID NO: 173592 - RNA, 19 nt, Artificial Sequence
  Description of Artificial Sequence: Synthetic oligonucleotide
  Sense strand starting at position 3236 of SEQ ID NO: 2238
uuuauugaacccuguguuu

SEQ ID NO: 173593 - RNA, 19 nt, Artificial Sequence
  Description of Artificial Sequence: Synthetic oligonucleotide
  Antisense strand to SEQ ID NO: 173592
aaacacaggguucaauaaa

SEQ ID NO: 173594 - RNA, 19 nt, Artificial Sequence
  Description of Artificial Sequence: Synthetic oligonucleotide
  Sense strand starting at position 3206 of SEQ ID NO: 2238
augguuaguuucucugaau

SEQ ID NO: 173595 - RNA, 19 nt, Artificial Sequence
  Description of Artificial Sequence: Synthetic oligonucleotide
  Antisense strand to SEQ ID NO: 173594
auucagagaaacuaaccau

SEQ ID NO: 173596 - RNA, 19 nt, Artificial Sequence
  Description of Artificial Sequence: Synthetic oligonucleotide
  Sense strand starting at position 3205 of SEQ ID NO: 2238
caugguuaguuucucugaa

SEQ ID NO: 173597 - RNA, 19 nt, Artificial Sequence
  Description of Artificial Sequence: Synthetic oligonucleotide
  Antisense strand to SEQ ID NO: 173596
uucagagaaacuaaccaug

SEQ ID NO: 173598 - RNA, 19 nt, Artificial Sequence
  Description of Artificial Sequence: Synthetic oligonucleotide
  Sense strand starting at position 3091 of SEQ ID NO: 2238
gggagagacugacgaaauu

SEQ ID NO: 173599 - RNA, 19 nt, Artificial Sequence
  Description of Artificial Sequence: Synthetic oligonucleotide
  Antisense strand to SEQ ID NO: 173598
aauuucgucagucucuccc

SEQ ID NO: 173600 - RNA, 19 nt, Artificial Sequence
  Description of Artificial Sequence: Synthetic oligonucleotide
  Sense strand starting at position 3020 of SEQ ID NO: 2238
gcaggucuuguuuaucaca

SEQ ID NO: 173601 - RNA, 19 nt, Artificial Sequence
  Description of Artificial Sequence: Synthetic oligonucleotide
  Antisense strand to SEQ ID NO: 173600
ugugauaaacaagaccugc

SEQ ID NO: 173602 - RNA, 19 nt, Artificial Sequence
  Description of Artificial Sequence: Synthetic oligonucleotide
  Sense strand starting at position 2932 of SEQ ID NO: 2238
agcuccuaaucugaagaca

SEQ ID NO: 173603 - RNA, 19 nt, Artificial Sequence
  Description of Artificial Sequence: Synthetic oligonucleotide
  Antisense strand to SEQ ID NO: 173602
ugucuucagauuaggagcu

SEQ ID NO: 173604 - RNA, 19 nt, Artificial Sequence
  Description of Artificial Sequence: Synthetic oligonucleotide
  Sense strand starting at position 2905 of SEQ ID NO: 2238
gggugaucaugucagaaca

SEQ ID NO: 173605 - RNA, 19 nt, Artificial Sequence
  Description of Artificial Sequence: Synthetic oligonucleotide
  Antisense strand to SEQ ID NO: 173604
uguucugacaugaucaccc

SEQ ID NO: 173606 - RNA, 19 nt, Artificial Sequence
  Description of Artificial Sequence: Synthetic oligonucleotide
  Sense strand starting at position 2734 of SEQ ID NO: 2238
auuuaagagcugugcguau

SEQ ID NO: 173607 - RNA, 19 nt, Artificial Sequence
  Description of Artificial Sequence: Synthetic oligonucleotide
  Antisense strand to SEQ ID NO: 173606
auacgcacagcucuuaaau

SEQ ID NO: 173608 - RNA, 19 nt, Artificial Sequence
  Description of Artificial Sequence: Synthetic oligonucleotide
  Sense strand starting at position 2732 of SEQ ID NO: 2238
ccauuuaagagcugugcgu

SEQ ID NO: 173609 - RNA, 19 nt, Artificial Sequence
  Description of Artificial Sequence: Synthetic oligonucleotide
  Antisense strand to SEQ ID NO: 173608
acgcacagcucuuaaaugg

SEQ ID NO: 173610 - RNA, 19 nt, Artificial Sequence
  Description of Artificial Sequence: Synthetic oligonucleotide
  Sense strand starting at position 2704 of SEQ ID NO: 2238
guaggcagguaccuauaau

SEQ ID NO: 173611 - RNA, 19 nt, Artificial Sequence
  Description of Artificial Sequence: Synthetic oligonucleotide
  Antisense strand to SEQ ID NO: 173610
auuauagguaccugccuac

SEQ ID NO: 173612 - RNA, 19 nt, Artificial Sequence
  Description of Artificial Sequence: Synthetic oligonucleotide
  Sense strand starting at position 2620 of SEQ ID NO: 2238
gcaaaugcggaauaaacau

SEQ ID NO: 173613 - RNA, 19 nt, Artificial Sequence
  Description of Artificial Sequence: Synthetic oligonucleotide
  Antisense strand to SEQ ID NO: 173612
auguuuauuccgcauuugc

SEQ ID NO: 173614 - RNA, 19 nt, Artificial Sequence
  Description of Artificial Sequence: Synthetic oligonucleotide
  Sense strand starting at position 2617 of SEQ ID NO: 2238
ccugcaaaugcggaauaaa

SEQ ID NO: 173615 - RNA, 19 nt, Artificial Sequence
  Description of Artificial Sequence: Synthetic oligonucleotide
  Antisense strand to SEQ ID NO: 173614
uuuauuccgcauuugcagg

SEQ ID NO: 173616 - RNA, 19 nt, Artificial Sequence
  Description of Artificial Sequence: Synthetic oligonucleotide
  Sense strand starting at position 2405 of SEQ ID NO: 2238
ggaggcgguuauuuguuau

SEQ ID NO: 173617 - RNA, 19 nt, Artificial Sequence
  Description of Artificial Sequence: Synthetic oligonucleotide
  Antisense strand to SEQ ID NO: 173616
auaacaaauaaccgccucc

SEQ ID NO: 173618 - RNA, 19 nt, Artificial Sequence
  Description of Artificial Sequence: Synthetic oligonucleotide
  Sense strand starting at position 2249 of SEQ ID NO: 2238
uugggucugccuuaugauu

SEQ ID NO: 173619 - RNA, 19 nt, Artificial Sequence
  Description of Artificial Sequence: Synthetic oligonucleotide
  Antisense strand to SEQ ID NO: 173618
aaucauaaggcagacccaa

SEQ ID NO: 173620 - RNA, 19 nt, Artificial Sequence
  Description of Artificial Sequence: Synthetic oligonucleotide
  Sense strand starting at position 2245 of SEQ ID NO: 2238
aaguuugggucugccuuau

SEQ ID NO: 173621 - RNA, 19 nt, Artificial Sequence
  Description of Artificial Sequence: Synthetic oligonucleotide
  Antisense strand to SEQ ID NO: 173620
auaaggcagacccaaacuu

SEQ ID NO: 173622 - RNA, 19 nt, Artificial Sequence
  Description of Artificial Sequence: Synthetic oligonucleotide
  Sense strand starting at position 2244 of SEQ ID NO: 2238
caaguuugggucugccuua

SEQ ID NO: 173623 - RNA, 19 nt, Artificial Sequence
  Description of Artificial Sequence: Synthetic oligonucleotide
  Antisense strand to SEQ ID NO: 173622
uaaggcagacccaaacuug

SEQ ID NO: 173624 - RNA, 19 nt, Artificial Sequence
  Description of Artificial Sequence: Synthetic oligonucleotide
  Sense strand starting at position 2132 of SEQ ID NO: 2238
uguguacaccugcagaguu

SEQ ID NO: 173625 - RNA, 19 nt, Artificial Sequence
  Description of Artificial Sequence: Synthetic oligonucleotide
  Antisense strand to SEQ ID NO: 173624
aacucugcagguguacaca

SEQ ID NO: 173626 - RNA, 19 nt, Artificial Sequence
  Description of Artificial Sequence: Synthetic oligonucleotide
  Sense strand starting at position 2119 of SEQ ID NO: 2238
uaugguguccacgugugua

SEQ ID NO: 173627 - RNA, 19 nt, Artificial Sequence
  Description of Artificial Sequence: Synthetic oligonucleotide
  Antisense strand to SEQ ID NO: 173626
uacacacguggacaccaua

SEQ ID NO: 173628 - RNA, 19 nt, Artificial Sequence
  Description of Artificial Sequence: Synthetic oligonucleotide
  Sense strand starting at position 2102 of SEQ ID NO: 2238
cggaauucauggguacaua

SEQ ID NO: 173629 - RNA, 19 nt, Artificial Sequence
  Description of Artificial Sequence: Synthetic oligonucleotide
  Antisense strand to SEQ ID NO: 173628
uauguacccaugaauuccg

SEQ ID NO: 173630 - RNA, 19 nt, Artificial Sequence
  Description of Artificial Sequence: Synthetic oligonucleotide
  Sense strand starting at position 2100 of SEQ ID NO: 2238
ggcggaauucauggguaca

SEQ ID NO: 173631 - RNA, 19 nt, Artificial Sequence
  Description of Artificial Sequence: Synthetic oligonucleotide
  Antisense strand to SEQ ID NO: 173630
uguacccaugaauuccgcc

SEQ ID NO: 173632 - RNA, 19 nt, Artificial Sequence
  Description of Artificial Sequence: Synthetic oligonucleotide
  Sense strand starting at position 1596 of SEQ ID NO: 2238
gaacuuucccggcgaggca

SEQ ID NO: 173633 - RNA, 19 nt, Artificial Sequence
  Description of Artificial Sequence: Synthetic oligonucleotide
  Antisense strand to SEQ ID NO: 173632
ugccucgccgggaaaguuc

SEQ ID NO: 173634 - RNA, 19 nt, Artificial Sequence
  Description of Artificial Sequence: Synthetic oligonucleotide
  Sense strand starting at position 1592 of SEQ ID NO: 2238
ccgagaacuuucccggcga

SEQ ID NO: 173635 - RNA, 19 nt, Artificial Sequence
  Description of Artificial Sequence: Synthetic oligonucleotide
  Antisense strand to SEQ ID NO: 173634
ucgccgggaaaguucucgg

SEQ ID NO: 173636 - RNA, 19 nt, Artificial Sequence
  Description of Artificial Sequence: Synthetic oligonucleotide
  Sense strand starting at position 1584 of SEQ ID NO: 2238
cagcuuugccgagaacuuu

SEQ ID NO: 173637 - RNA, 19 nt, Artificial Sequence
  Description of Artificial Sequence: Synthetic oligonucleotide
  Antisense strand to SEQ ID NO: 173636
aaaguucucggcaaagcug

SEQ ID NO: 173638 - RNA, 19 nt, Artificial Sequence
  Description of Artificial Sequence: Synthetic oligonucleotide
  Sense strand starting at position 1582 of SEQ ID NO: 2238
cccagcuuugccgagaacu

SEQ ID NO: 173639 - RNA, 19 nt, Artificial Sequence
  Description of Artificial Sequence: Synthetic oligonucleotide
  Antisense strand to SEQ ID NO: 173638
aguucucggcaaagcuggg

SEQ ID NO: 173640 - RNA, 19 nt, Artificial Sequence
  Description of Artificial Sequence: Synthetic oligonucleotide
  Sense strand starting at position 1363 of SEQ ID NO: 2238
gugagugaccggcacaagu

SEQ ID NO: 173641 - RNA, 19 nt, Artificial Sequence
  Description of Artificial Sequence: Synthetic oligonucleotide
  Antisense strand to SEQ ID NO: 173640
acuugugccggucacucac

SEQ ID NO: 173642 - RNA, 19 nt, Artificial Sequence
  Description of Artificial Sequence: Synthetic oligonucleotide
  Sense strand starting at position 209 of SEQ ID NO: 2238
cugggaaguucugcuccua

SEQ ID NO: 173643 - RNA, 19 nt, Artificial Sequence
  Description of Artificial Sequence: Synthetic oligonucleotide
  Antisense strand to SEQ ID NO: 173642
uaggagcagaacuucccag

SEQ ID NO: 173644 - RNA, 19 nt, Artificial Sequence
  Description of Artificial Sequence: Synthetic oligonucleotide
  Sense strand starting at position 190 of SEQ ID NO: 2238
ggugguuuccugggaccua

SEQ ID NO: 173645 - RNA, 19 nt, Artificial Sequence
  Description of Artificial Sequence: Synthetic oligonucleotide
  Antisense strand to SEQ ID NO: 173644
uaggucccaggaaaccacc

SEQ ID NO: 173646 - RNA, 19 nt, Artificial Sequence
  Description of Artificial Sequence: Synthetic oligonucleotide
  Sense strand starting at position 33 of SEQ ID NO: 2238
cagggaaggacucgaguuu

SEQ ID NO: 173647 - RNA, 19 nt, Artificial Sequence
  Description of Artificial Sequence: Synthetic oligonucleotide
  Antisense strand to SEQ ID NO: 173646
aaacucgaguccuucccug

SEQ ID NO: 173648 - RNA, 19 nt, Artificial Sequence
  Description of Artificial Sequence: Synthetic oligonucleotide
  Sense strand starting at position 3935 of SEQ ID NO: 2237
auuuaagagcugugcguau

SEQ ID NO: 173649 - RNA, 19 nt, Artificial Sequence
  Description of Artificial Sequence: Synthetic oligonucleotide
  Antisense strand to SEQ ID NO: 173648
auacgcacagcucuuaaau

SEQ ID NO: 173650 - RNA, 19 nt, Artificial Sequence
  Description of Artificial Sequence: Synthetic oligonucleotide
  Sense strand starting at position 3933 of SEQ ID NO: 2237
ccauuuaagagcugugcgu

SEQ ID NO: 173651 - RNA, 19 nt, Artificial Sequence
  Description of Artificial Sequence: Synthetic oligonucleotide
  Antisense strand to SEQ ID NO: 173650
acgcacagcucuuaaaugg

SEQ ID NO: 173652 - RNA, 19 nt, Artificial Sequence
  Description of Artificial Sequence: Synthetic oligonucleotide
  Sense strand starting at position 3905 of SEQ ID NO: 2237
guaggcagguaccuauaau

SEQ ID NO: 173653 - RNA, 19 nt, Artificial Sequence
  Description of Artificial Sequence: Synthetic oligonucleotide
  Antisense strand to SEQ ID NO: 173652
auuauagguaccugccuac

SEQ ID NO: 173654 - RNA, 19 nt, Artificial Sequence
  Description of Artificial Sequence: Synthetic oligonucleotide
  Sense strand starting at position 3821 of SEQ ID NO: 2237
gcaaaugcggaauaaacau

SEQ ID NO: 173655 - RNA, 19 nt, Artificial Sequence
  Description of Artificial Sequence: Synthetic oligonucleotide
  Antisense strand to SEQ ID NO: 173654
auguuuauuccgcauuugc

SEQ ID NO: 173656 - RNA, 19 nt, Artificial Sequence
  Description of Artificial Sequence: Synthetic oligonucleotide
  Sense strand starting at position 3818 of SEQ ID NO: 2237
ccugcaaaugcggaauaaa

SEQ ID NO: 173657 - RNA, 19 nt, Artificial Sequence
  Description of Artificial Sequence: Synthetic oligonucleotide
  Antisense strand to SEQ ID NO: 173656
uuuauuccgcauuugcagg

SEQ ID NO: 173658 - RNA, 19 nt, Artificial Sequence
  Description of Artificial Sequence: Synthetic oligonucleotide
  Sense strand starting at position 3693 of SEQ ID NO: 2237
ugggaaguaucaggaucua

SEQ ID NO: 173659 - RNA, 19 nt, Artificial Sequence
  Description of Artificial Sequence: Synthetic oligonucleotide
  Antisense strand to SEQ ID NO: 173658
uagauccugauacuuccca

SEQ ID NO: 173660 - RNA, 19 nt, Artificial Sequence
  Description of Artificial Sequence: Synthetic oligonucleotide
  Sense strand starting at position 3606 of SEQ ID NO: 2237
ggaggcgguuauuuguuau

SEQ ID NO: 173661 - RNA, 19 nt, Artificial Sequence
  Description of Artificial Sequence: Synthetic oligonucleotide
  Antisense strand to SEQ ID NO: 173660
auaacaaauaaccgccucc

SEQ ID NO: 173662 - RNA, 19 nt, Artificial Sequence
  Description of Artificial Sequence: Synthetic oligonucleotide
  Sense strand starting at position 3380 of SEQ ID NO: 2237
ccgccauucuggcuucuua

SEQ ID NO: 173663 - RNA, 19 nt, Artificial Sequence
  Description of Artificial Sequence: Synthetic oligonucleotide
  Antisense strand to SEQ ID NO: 173662
uaagaagccagaauggcgg

SEQ ID NO: 173664 - RNA, 19 nt, Artificial Sequence
  Description of Artificial Sequence: Synthetic oligonucleotide
  Sense strand starting at position 3341 of SEQ ID NO: 2237
ccugcagaguuguaacaug

SEQ ID NO: 173665 - RNA, 19 nt, Artificial Sequence
  Description of Artificial Sequence: Synthetic oligonucleotide
  Antisense strand to SEQ ID NO: 173664
cauguuacaacucugcagg

SEQ ID NO: 173666 - RNA, 19 nt, Artificial Sequence
  Description of Artificial Sequence: Synthetic oligonucleotide
  Sense strand starting at position 3333 of SEQ ID NO: 2237
uguguacaccugcagaguu

SEQ ID NO: 173667 - RNA, 19 nt, Artificial Sequence
  Description of Artificial Sequence: Synthetic oligonucleotide
  Antisense strand to SEQ ID NO: 173666
aacucugcagguguacaca

SEQ ID NO: 173668 - RNA, 19 nt, Artificial Sequence
  Description of Artificial Sequence: Synthetic oligonucleotide
  Sense strand starting at position 3320 of SEQ ID NO: 2237
uaugguguccacgugugua

SEQ ID NO: 173669 - RNA, 19 nt, Artificial Sequence
  Description of Artificial Sequence: Synthetic oligonucleotide
  Antisense strand to SEQ ID NO: 173668
uacacacguggacaccaua

SEQ ID NO: 173670 - RNA, 19 nt, Artificial Sequence
  Description of Artificial Sequence: Synthetic oligonucleotide
  Sense strand starting at position 3303 of SEQ ID NO: 2237
cggaauucauggguacaua

SEQ ID NO: 173671 - RNA, 19 nt, Artificial Sequence
  Description of Artificial Sequence: Synthetic oligonucleotide
  Antisense strand to SEQ ID NO: 173670
uauguacccaugaauuccg

SEQ ID NO: 173672 - RNA, 19 nt, Artificial Sequence
  Description of Artificial Sequence: Synthetic oligonucleotide
  Sense strand starting at position 3301 of SEQ ID NO: 2237
ggcggaauucauggguaca

SEQ ID NO: 173673 - RNA, 19 nt, Artificial Sequence
  Description of Artificial Sequence: Synthetic oligonucleotide
  Antisense strand to SEQ ID NO: 173672
uguacccaugaauuccgcc

SEQ ID NO: 173674 - RNA, 19 nt, Artificial Sequence
  Description of Artificial Sequence: Synthetic oligonucleotide
  Sense strand starting at position 2797 of SEQ ID NO: 2237
gaacuuucccggcgaggca

SEQ ID NO: 173675 - RNA, 19 nt, Artificial Sequence
  Description of Artificial Sequence: Synthetic oligonucleotide
  Antisense strand to SEQ ID NO: 173674
ugccucgccgggaaaguuc

SEQ ID NO: 173676 - RNA, 19 nt, Artificial Sequence
  Description of Artificial Sequence: Synthetic oligonucleotide
  Sense strand starting at position 2793 of SEQ ID NO: 2237
ccgagaacuuucccggcga

SEQ ID NO: 173677 - RNA, 19 nt, Artificial Sequence
  Description of Artificial Sequence: Synthetic oligonucleotide
  Antisense strand to SEQ ID NO: 173676
ucgccgggaaaguucucgg

SEQ ID NO: 173678 - RNA, 19 nt, Artificial Sequence
  Description of Artificial Sequence: Synthetic oligonucleotide
  Sense strand starting at position 2785 of SEQ ID NO: 2237
cagcuuugccgagaacuuu

SEQ ID NO: 173679 - RNA, 19 nt, Artificial Sequence
  Description of Artificial Sequence: Synthetic oligonucleotide
  Antisense strand to SEQ ID NO: 173678
aaaguucucggcaaagcug

SEQ ID NO: 173680 - RNA, 19 nt, Artificial Sequence
  Description of Artificial Sequence: Synthetic oligonucleotide
  Sense strand starting at position 2783 of SEQ ID NO: 2237
cccagcuuugccgagaacu

SEQ ID NO: 173681 - RNA, 19 nt, Artificial Sequence
  Description of Artificial Sequence: Synthetic oligonucleotide
  Antisense strand to SEQ ID NO: 173680
aguucucggcaaagcuggg

SEQ ID NO: 173682 - RNA, 19 nt, Artificial Sequence
  Description of Artificial Sequence: Synthetic oligonucleotide
  Sense strand starting at position 2564 of SEQ ID NO: 2237
gugagugaccggcacaagu

SEQ ID NO: 173683 - RNA, 19 nt, Artificial Sequence
  Description of Artificial Sequence: Synthetic oligonucleotide
  Antisense strand to SEQ ID NO: 173682
acuugugccggucacucac

SEQ ID NO: 173684 - RNA, 19 nt, Artificial Sequence
  Description of Artificial Sequence: Synthetic oligonucleotide
  Sense strand starting at position 2472 of SEQ ID NO: 2237
gccuuuaccuggcgggaua

SEQ ID NO: 173685 - RNA, 19 nt, Artificial Sequence
  Description of Artificial Sequence: Synthetic oligonucleotide
  Antisense strand to SEQ ID NO: 173684
uaucccgccagguaaaggc

SEQ ID NO: 173686 - RNA, 19 nt, Artificial Sequence
  Description of Artificial Sequence: Synthetic oligonucleotide
  Sense strand starting at position 1410 of SEQ ID NO: 2237
cugggaaguucugcuccua

SEQ ID NO: 173687 - RNA, 19 nt, Artificial Sequence
  Description of Artificial Sequence: Synthetic oligonucleotide
  Antisense strand to SEQ ID NO: 173686
uaggagcagaacuucccag

SEQ ID NO: 173688 - RNA, 19 nt, Artificial Sequence
  Description of Artificial Sequence: Synthetic oligonucleotide
  Sense strand starting at position 1391 of SEQ ID NO: 2237
ggugguuuccugggaccua

SEQ ID NO: 173689 - RNA, 19 nt, Artificial Sequence
  Description of Artificial Sequence: Synthetic oligonucleotide
  Antisense strand to SEQ ID NO: 173688
uaggucccaggaaaccacc

SEQ ID NO: 173690 - RNA, 19 nt, Artificial Sequence
  Description of Artificial Sequence: Synthetic oligonucleotide
  Sense strand starting at position 1288 of SEQ ID NO: 2237
guguuugcuuguagagcga

SEQ ID NO: 173691 - RNA, 19 nt, Artificial Sequence
  Description of Artificial Sequence: Synthetic oligonucleotide
  Antisense strand to SEQ ID NO: 173690
ucgcucuacaagcaaacac

SEQ ID NO: 173692 - RNA, 19 nt, Artificial Sequence
  Description of Artificial Sequence: Synthetic oligonucleotide
  Sense strand starting at position 1234 of SEQ ID NO: 2237
cagggaaggacucgaguuu

SEQ ID NO: 173693 - RNA, 19 nt, Artificial Sequence
  Description of Artificial Sequence: Synthetic oligonucleotide
  Antisense strand to SEQ ID NO: 173692
aaacucgaguccuucccug

SEQ ID NO: 173694 - RNA, 19 nt, Artificial Sequence
  Description of Artificial Sequence: Synthetic oligonucleotide
  Sense strand starting at position 1155 of SEQ ID NO: 2237
cugggugcugggcaugaau

SEQ ID NO: 173695 - RNA, 19 nt, Artificial Sequence
  Description of Artificial Sequence: Synthetic oligonucleotide
  Antisense strand to SEQ ID NO: 173694
auucaugcccagcacccag

SEQ ID NO: 173696 - RNA, 19 nt, Artificial Sequence
  Description of Artificial Sequence: Synthetic oligonucleotide
  Sense strand starting at position 1072 of SEQ ID NO: 2237
ucccguuugugcgcugauu

SEQ ID NO: 173697 - RNA, 19 nt, Artificial Sequence
  Description of Artificial Sequence: Synthetic oligonucleotide
  Antisense strand to SEQ ID NO: 173696
aaucagcgcacaaacggga

SEQ ID NO: 173698 - RNA, 19 nt, Artificial Sequence
  Description of Artificial Sequence: Synthetic oligonucleotide
  Sense strand starting at position 1026 of SEQ ID NO: 2237
agaccauuauccuguaaug

SEQ ID NO: 173699 - RNA, 19 nt, Artificial Sequence
  Description of Artificial Sequence: Synthetic oligonucleotide
  Antisense strand to SEQ ID NO: 173698
cauuacaggauaauggucu

SEQ ID NO: 173700 - RNA, 19 nt, Artificial Sequence
  Description of Artificial Sequence: Synthetic oligonucleotide
  Sense strand starting at position 715 of SEQ ID NO: 2237
caagcuguucuccggguaa

SEQ ID NO: 173701 - RNA, 19 nt, Artificial Sequence
  Description of Artificial Sequence: Synthetic oligonucleotide
  Antisense strand to SEQ ID NO: 173700
uuacccggagaacagcuug

SEQ ID NO: 173702 - RNA, 19 nt, Artificial Sequence
  Description of Artificial Sequence: Synthetic oligonucleotide
  Sense strand starting at position 698 of SEQ ID NO: 2237
gccaacaguucccuagaca

SEQ ID NO: 173703 - RNA, 19 nt, Artificial Sequence
  Description of Artificial Sequence: Synthetic oligonucleotide
  Antisense strand to SEQ ID NO: 173702
ugucuagggaacuguuggc

SEQ ID NO: 173704 - RNA, 19 nt, Artificial Sequence
  Description of Artificial Sequence: Synthetic oligonucleotide
  Sense strand starting at position 673 of SEQ ID NO: 2237
ugugaaagcuguucacggu

SEQ ID NO: 173705 - RNA, 19 nt, Artificial Sequence
  Description of Artificial Sequence: Synthetic oligonucleotide
  Antisense strand to SEQ ID NO: 173704
accgugaacagcuuucaca

SEQ ID NO: 173706 - RNA, 19 nt, Artificial Sequence
  Description of Artificial Sequence: Synthetic oligonucleotide
  Sense strand starting at position 589 of SEQ ID NO: 2237
cucucaauugguggaguga

SEQ ID NO: 173707 - RNA, 19 nt, Artificial Sequence
  Description of Artificial Sequence: Synthetic oligonucleotide
  Antisense strand to SEQ ID NO: 173706
ucacuccaccaauugagag

SEQ ID NO: 173708 - RNA, 19 nt, Artificial Sequence
  Description of Artificial Sequence: Synthetic oligonucleotide
  Sense strand starting at position 409 of SEQ ID NO: 2237
ucaugaguaucccugacuc

SEQ ID NO: 173709 - RNA, 19 nt, Artificial Sequence
  Description of Artificial Sequence: Synthetic oligonucleotide
  Antisense strand to SEQ ID NO: 173708
gagucagggauacucauga

SEQ ID NO: 173710 - RNA, 19 nt, Artificial Sequence
  Description of Artificial Sequence: Synthetic oligonucleotide
  Sense strand starting at position 388 of SEQ ID NO: 2237
ucgccaauucugcaacacu

SEQ ID NO: 173711 - RNA, 19 nt, Artificial Sequence
  Description of Artificial Sequence: Synthetic oligonucleotide
  Antisense strand to SEQ ID NO: 173710
aguguugcagaauuggcga

SEQ ID NO: 173712 - RNA, 19 nt, Artificial Sequence
  Description of Artificial Sequence: Synthetic oligonucleotide
  Sense strand starting at position 377 of SEQ ID NO: 2237
gccugacuguaucgccaau

SEQ ID NO: 173713 - RNA, 19 nt, Artificial Sequence
  Description of Artificial Sequence: Synthetic oligonucleotide
  Antisense strand to SEQ ID NO: 173712
auuggcgauacagucaggc

SEQ ID NO: 173714 - RNA, 19 nt, Artificial Sequence
  Description of Artificial Sequence: Synthetic oligonucleotide
  Sense strand starting at position 299 of SEQ ID NO: 2237
uggagaucaucaucccauu

SEQ ID NO: 173715 - RNA, 19 nt, Artificial Sequence
  Description of Artificial Sequence: Synthetic oligonucleotide
  Antisense strand to SEQ ID NO: 173714
aaugggaugaugaucucca

SEQ ID NO: 173716 - RNA, 19 nt, Artificial Sequence
  Description of Artificial Sequence: Synthetic oligonucleotide
  Sense strand starting at position 229 of SEQ ID NO: 2237
gucuaagcccugugacaua

SEQ ID NO: 173717 - RNA, 19 nt, Artificial Sequence
  Description of Artificial Sequence: Synthetic oligonucleotide
  Antisense strand to SEQ ID NO: 173716
uaugucacagggcuuagac

SEQ ID NO: 173718 - RNA, 19 nt, Artificial Sequence
  Description of Artificial Sequence: Synthetic oligonucleotide
  Sense strand starting at position 227 of SEQ ID NO: 2237
ucgucuaagcccugugaca

SEQ ID NO: 173719 - RNA, 19 nt, Artificial Sequence
  Description of Artificial Sequence: Synthetic oligonucleotide
  Antisense strand to SEQ ID NO: 173718
ugucacagggcuuagacga

SEQ ID NO: 173720 - RNA, 19 nt, Artificial Sequence
  Description of Artificial Sequence: Synthetic oligonucleotide
  Sense strand starting at position 216 of SEQ ID NO: 2237
uucuucuguucucgucuaa

SEQ ID NO: 173721 - RNA, 19 nt, Artificial Sequence
  Description of Artificial Sequence: Synthetic oligonucleotide
  Antisense strand to SEQ ID NO: 173720
uuagacgagaacagaagaa

SEQ ID NO: 173722 - RNA, 19 nt, Artificial Sequence
  Description of Artificial Sequence: Synthetic oligonucleotide
  Sense strand starting at position 192 of SEQ ID NO: 2237
gcaggaccuccugaguuau

SEQ ID NO: 173723 - RNA, 19 nt, Artificial Sequence
  Description of Artificial Sequence: Synthetic oligonucleotide
  Antisense strand to SEQ ID NO: 173722
auaacucaggagguccugc

SEQ ID NO: 173724 - RNA, 19 nt, Artificial Sequence
  Description of Artificial Sequence: Synthetic oligonucleotide
  Sense strand starting at position 155 of SEQ ID NO: 2237
ccaguucccugaugaauau

SEQ ID NO: 173725 - RNA, 19 nt, Artificial Sequence
  Description of Artificial Sequence: Synthetic oligonucleotide
  Antisense strand to SEQ ID NO: 173724
auauucaucagggaacugg

SEQ ID NO: 173726 - RNA, 19 nt, Artificial Sequence
  Description of Artificial Sequence: Synthetic oligonucleotide
  Sense strand starting at position 99 of SEQ ID NO: 2239
ccagucauuucugccacga

SEQ ID NO: 173727 - RNA, 19 nt, Artificial Sequence
  Description of Artificial Sequence: Synthetic oligonucleotide
  Antisense strand to SEQ ID NO: 173726
ucguggcagaaaugacugg

SEQ ID NO: 173728 - RNA, 19 nt, Artificial Sequence
  Description of Artificial Sequence: Synthetic oligonucleotide
  Sense strand starting at position 101 of SEQ ID NO: 2239
agucauuucugccacgaca

SEQ ID NO: 173729 - RNA, 19 nt, Artificial Sequence
  Description of Artificial Sequence: Synthetic oligonucleotide
  Antisense strand to SEQ ID NO: 173728
ugucguggcagaaaugacu

SEQ ID NO: 173730 - RNA, 19 nt, Artificial Sequence
  Description of Artificial Sequence: Synthetic oligonucleotide
  Sense strand starting at position 540 of SEQ ID NO: 2239
agcauuaguucuccaagcu

SEQ ID NO: 173731 - RNA, 19 nt, Artificial Sequence
  Description of Artificial Sequence: Synthetic oligonucleotide
  Antisense strand to SEQ ID NO: 173730
agcuuggagaacuaaugcu

SEQ ID NO: 173732 - RNA, 19 nt, Artificial Sequence
  Description of Artificial Sequence: Synthetic oligonucleotide
  Sense strand starting at position 541 of SEQ ID NO: 2239
gcauuaguucuccaagcuc

SEQ ID NO: 173733 - RNA, 19 nt, Artificial Sequence
  Description of Artificial Sequence: Synthetic oligonucleotide
  Antisense strand to SEQ ID NO: 173732
gagcuuggagaacuaaugc

SEQ ID NO: 173734 - RNA, 19 nt, Artificial Sequence
  Description of Artificial Sequence: Synthetic oligonucleotide
  Sense strand starting at position 600 of SEQ ID NO: 2239
caaggugguaguugaguau

SEQ ID NO: 173735 - RNA, 19 nt, Artificial Sequence
  Description of Artificial Sequence: Synthetic oligonucleotide
  Antisense strand to SEQ ID NO: 173734
auacucaacuaccaccuug

SEQ ID NO: 173736 - RNA, 19 nt, Artificial Sequence
  Description of Artificial Sequence: Synthetic oligonucleotide
  Sense strand starting at position 677 of SEQ ID NO: 2239
gcuggguuucugggagagu

SEQ ID NO: 173737 - RNA, 19 nt, Artificial Sequence
  Description of Artificial Sequence: Synthetic oligonucleotide
  Antisense strand to SEQ ID NO: 173736
acucucccagaaacccagc

SEQ ID NO: 173738 - RNA, 19 nt, Artificial Sequence
  Description of Artificial Sequence: Synthetic oligonucleotide
  Sense strand starting at position 976 of SEQ ID NO: 2239
ugucacuguccauagggau

SEQ ID NO: 173739 - RNA, 19 nt, Artificial Sequence
  Description of Artificial Sequence: Synthetic oligonucleotide
  Antisense strand to SEQ ID NO: 173738
aucccuauggacagugaca

SEQ ID NO: 173740 - RNA, 19 nt, Artificial Sequence
  Description of Artificial Sequence: Synthetic oligonucleotide
  Sense strand starting at position 2433 of SEQ ID NO: 2239
gagggcuuguccgccacaa

SEQ ID NO: 173741 - RNA, 19 nt, Artificial Sequence
  Description of Artificial Sequence: Synthetic oligonucleotide
  Antisense strand to SEQ ID NO: 173740
uuguggcggacaagcccuc

SEQ ID NO: 173742 - RNA, 19 nt, Artificial Sequence
  Description of Artificial Sequence: Synthetic oligonucleotide
  Sense strand starting at position 2699 of SEQ ID NO: 2239
cgaacuugguguuuggaca

SEQ ID NO: 173743 - RNA, 19 nt, Artificial Sequence
  Description of Artificial Sequence: Synthetic oligonucleotide
  Antisense strand to SEQ ID NO: 173742
uguccaaacaccaaguucg

SEQ ID NO: 173744 - RNA, 19 nt, Artificial Sequence
  Description of Artificial Sequence: Synthetic oligonucleotide
  Sense strand starting at position 3148 of SEQ ID NO: 2239
ucagaacuguuccacaugu

SEQ ID NO: 173745 - RNA, 19 nt, Artificial Sequence
  Description of Artificial Sequence: Synthetic oligonucleotide
  Antisense strand to SEQ ID NO: 173744
acauguggaacaguucuga

SEQ ID NO: 173746 - RNA, 19 nt, Artificial Sequence
  Description of Artificial Sequence: Synthetic oligonucleotide
  Sense strand starting at position 3285 of SEQ ID NO: 2239
uugggcucugccugaaguu

SEQ ID NO: 173747 - RNA, 19 nt, Artificial Sequence
  Description of Artificial Sequence: Synthetic oligonucleotide
  Antisense strand to SEQ ID NO: 173746
aacuucaggcagagcccaa

SEQ ID NO: 173748 - RNA, 19 nt, Artificial Sequence
  Description of Artificial Sequence: Synthetic oligonucleotide
  Sense strand starting at position 3769 of SEQ ID NO: 2239
gggucaaugucacuggcuu

SEQ ID NO: 173749 - RNA, 19 nt, Artificial Sequence
  Description of Artificial Sequence: Synthetic oligonucleotide
  Antisense strand to SEQ ID NO: 173748
aagccagugacauugaccc

SEQ ID NO: 173750 - RNA, 19 nt, Artificial Sequence
  Description of Artificial Sequence: Synthetic oligonucleotide
  Sense strand starting at position 3775 of SEQ ID NO: 2239
augucacuggcuugaaguu

SEQ ID NO: 173751 - RNA, 19 nt, Artificial Sequence
  Description of Artificial Sequence: Synthetic oligonucleotide
  Antisense strand to SEQ ID NO: 173750
aacuucaagccagugacau

SEQ ID NO: 173752 - RNA, 19 nt, Artificial Sequence
  Description of Artificial Sequence: Synthetic oligonucleotide
  Sense strand starting at position 599 of SEQ ID NO: 2240
ucuguucugcgggagucua

SEQ ID NO: 173753 - RNA, 19 nt, Artificial Sequence
  Description of Artificial Sequence: Synthetic oligonucleotide
  Antisense strand to SEQ ID NO: 173752
uagacucccgcagaacaga

SEQ ID NO: 173754 - RNA, 19 nt, Artificial Sequence
  Description of Artificial Sequence: Synthetic oligonucleotide
  Sense strand starting at position 674 of SEQ ID NO: 2240
ugggaaggcucuccuuaag

SEQ ID NO: 173755 - RNA, 19 nt, Artificial Sequence
  Description of Artificial Sequence: Synthetic oligonucleotide
  Antisense strand to SEQ ID NO: 173754
cuuaaggagagccuuccca

SEQ ID NO: 173756 - RNA, 19 nt, Artificial Sequence
  Description of Artificial Sequence: Synthetic oligonucleotide
  Sense strand starting at position 685 of SEQ ID NO: 2240
uccuuaaggagguaaguuu

SEQ ID NO: 173757 - RNA, 19 nt, Artificial Sequence
  Description of Artificial Sequence: Synthetic oligonucleotide
  Antisense strand to SEQ ID NO: 173756
aaacuuaccuccuuaagga

SEQ ID NO: 173758 - RNA, 19 nt, Artificial Sequence
  Description of Artificial Sequence: Synthetic oligonucleotide
  Sense strand starting at position 711 of SEQ ID NO: 2240
agcagaguauaagaucaaa

SEQ ID NO: 173759 - RNA, 19 nt, Artificial Sequence
  Description of Artificial Sequence: Synthetic oligonucleotide
  Antisense strand to SEQ ID NO: 173758
uuugaucuuauacucugcu

SEQ ID NO: 173760 - RNA, 19 nt, Artificial Sequence
  Description of Artificial Sequence: Synthetic oligonucleotide
  Sense strand starting at position 739 of SEQ ID NO: 2240
uagaaagaucacuguggua

SEQ ID NO: 173761 - RNA, 19 nt, Artificial Sequence
  Description of Artificial Sequence: Synthetic oligonucleotide
  Antisense strand to SEQ ID NO: 173760
uaccacagugaucuuucua

SEQ ID NO: 173762 - RNA, 19 nt, Artificial Sequence
  Description of Artificial Sequence: Synthetic oligonucleotide
  Sense strand starting at position 814 of SEQ ID NO: 2240
gacuaaugcaagugaggga

SEQ ID NO: 173763 - RNA, 19 nt, Artificial Sequence
  Description of Artificial Sequence: Synthetic oligonucleotide
  Antisense strand to SEQ ID NO: 173762
ucccucacuugcauuaguc

SEQ ID NO: 173764 - RNA, 19 nt, Artificial Sequence
  Description of Artificial Sequence: Synthetic oligonucleotide
  Sense strand starting at position 838 of SEQ ID NO: 2240
uggccucaggcugaucaua

SEQ ID NO: 173765 - RNA, 19 nt, Artificial Sequence
  Description of Artificial Sequence: Synthetic oligonucleotide
  Antisense strand to SEQ ID NO: 173764
uaugaucagccugaggcca

SEQ ID NO: 173766 - RNA, 19 nt, Artificial Sequence
  Description of Artificial Sequence: Synthetic oligonucleotide
  Sense strand starting at position 840 of SEQ ID NO: 2240
gccucaggcugaucauacu

SEQ ID NO: 173767 - RNA, 19 nt, Artificial Sequence
  Description of Artificial Sequence: Synthetic oligonucleotide
  Antisense strand to SEQ ID NO: 173766
aguaugaucagccugaggc

SEQ ID NO: 173768 - RNA, 19 nt, Artificial Sequence
  Description of Artificial Sequence: Synthetic oligonucleotide
  Sense strand starting at position 870 of SEQ ID NO: 2240
cugccagaauucccagaga

SEQ ID NO: 173769 - RNA, 19 nt, Artificial Sequence
  Description of Artificial Sequence: Synthetic oligonucleotide
  Antisense strand to SEQ ID NO: 173768
ucucugggaauucuggcag

SEQ ID NO: 173770 - RNA, 19 nt, Artificial Sequence
  Description of Artificial Sequence: Synthetic oligonucleotide
  Sense strand starting at position 977 of SEQ ID NO: 2240
acaugucuuucuuuaaugu

SEQ ID NO: 173771 - RNA, 19 nt, Artificial Sequence
  Description of Artificial Sequence: Synthetic oligonucleotide
  Antisense strand to SEQ ID NO: 173770
acauuaaagaaagacaugu

SEQ ID NO: 173772 - RNA, 19 nt, Artificial Sequence
  Description of Artificial Sequence: Synthetic oligonucleotide
  Sense strand starting at position 1002 of SEQ ID NO: 2240
agaaacaaugcugaucgua

SEQ ID NO: 173773 - RNA, 19 nt, Artificial Sequence
  Description of Artificial Sequence: Synthetic oligonucleotide
  Antisense strand to SEQ ID NO: 173772
uacgaucagcauuguuucu

SEQ ID NO: 173774 - RNA, 19 nt, Artificial Sequence
  Description of Artificial Sequence: Synthetic oligonucleotide
  Sense strand starting at position 1219 of SEQ ID NO: 2240
cagagacugcacuguuaac

SEQ ID NO: 173775 - RNA, 19 nt, Artificial Sequence
  Description of Artificial Sequence: Synthetic oligonucleotide
  Antisense strand to SEQ ID NO: 173774
guuaacagugcagucucug

SEQ ID NO: 173776 - RNA, 19 nt, Artificial Sequence
  Description of Artificial Sequence: Synthetic oligonucleotide
  Sense strand starting at position 1419 of SEQ ID NO: 2240
agcuaugagaagugauuaa

SEQ ID NO: 173777 - RNA, 19 nt, Artificial Sequence
  Description of Artificial Sequence: Synthetic oligonucleotide
  Antisense strand to SEQ ID NO: 173776
uuaaucacuucucauagcu

SEQ ID NO: 173778 - RNA, 19 nt, Artificial Sequence
  Description of Artificial Sequence: Synthetic oligonucleotide
  Sense strand starting at position 1744 of SEQ ID NO: 2240
ccgggaucucgauggugua

SEQ ID NO: 173779 - RNA, 19 nt, Artificial Sequence
  Description of Artificial Sequence: Synthetic oligonucleotide
  Antisense strand to SEQ ID NO: 173778
uacaccaucgagaucccgg

SEQ ID NO: 173780 - RNA, 19 nt, Artificial Sequence
  Description of Artificial Sequence: Synthetic oligonucleotide
  Sense strand starting at position 2033 of SEQ ID NO: 2240
ggcuaauucgcuugaucug

SEQ ID NO: 173781 - RNA, 19 nt, Artificial Sequence
  Description of Artificial Sequence: Synthetic oligonucleotide
  Antisense strand to SEQ ID NO: 173780
cagaucaagcgaauuagcc

SEQ ID NO: 173782 - RNA, 19 nt, Artificial Sequence
  Description of Artificial Sequence: Synthetic oligonucleotide
  Sense strand starting at position 2038 of SEQ ID NO: 2240
auucgcuugaucuggauca

SEQ ID NO: 173783 - RNA, 19 nt, Artificial Sequence
  Description of Artificial Sequence: Synthetic oligonucleotide
  Antisense strand to SEQ ID NO: 173782
ugauccagaucaagcgaau

SEQ ID NO: 173784 - RNA, 19 nt, Artificial Sequence
  Description of Artificial Sequence: Synthetic oligonucleotide
  Sense strand starting at position 2378 of SEQ ID NO: 2240
ggaagcagucuucaguuga

SEQ ID NO: 173785 - RNA, 19 nt, Artificial Sequence
  Description of Artificial Sequence: Synthetic oligonucleotide
  Antisense strand to SEQ ID NO: 173784
ucaacugaagacugcuucc

SEQ ID NO: 173786 - RNA, 19 nt, Artificial Sequence
  Description of Artificial Sequence: Synthetic oligonucleotide
  Sense strand starting at position 2403 of SEQ ID NO: 2240
uagagaaugcccuguugau

SEQ ID NO: 173787 - RNA, 19 nt, Artificial Sequence
  Description of Artificial Sequence: Synthetic oligonucleotide
  Antisense strand to SEQ ID NO: 173786
aucaacagggcauucucua

SEQ ID NO: 173788 - RNA, 19 nt, Artificial Sequence
  Description of Artificial Sequence: Synthetic oligonucleotide
  Sense strand starting at position 2442 of SEQ ID NO: 2240
gagugcaacuuucuugcau

SEQ ID NO: 173789 - RNA, 19 nt, Artificial Sequence
  Description of Artificial Sequence: Synthetic oligonucleotide
  Antisense strand to SEQ ID NO: 173788
augcaagaaaguugcacuc

SEQ ID NO: 173790 - RNA, 19 nt, Artificial Sequence
  Description of Artificial Sequence: Synthetic oligonucleotide
  Sense strand starting at position 2443 of SEQ ID NO: 2240
agugcaacuuucuugcauu

SEQ ID NO: 173791 - RNA, 19 nt, Artificial Sequence
  Description of Artificial Sequence: Synthetic oligonucleotide
  Antisense strand to SEQ ID NO: 173790
aaugcaagaaaguugcacu

SEQ ID NO: 173792 - RNA, 19 nt, Artificial Sequence
  Description of Artificial Sequence: Synthetic oligonucleotide
  Sense strand starting at position 2482 of SEQ ID NO: 2240
gugccagcauauuuacaua

SEQ ID NO: 173793 - RNA, 19 nt, Artificial Sequence
  Description of Artificial Sequence: Synthetic oligonucleotide
  Antisense strand to SEQ ID NO: 173792
uauguaaauaugcuggcac

SEQ ID NO: 173794 - RNA, 19 nt, Artificial Sequence
  Description of Artificial Sequence: Synthetic oligonucleotide
  Sense strand starting at position 2622 of SEQ ID NO: 2240
ucugauucugcgugugaga

SEQ ID NO: 173795 - RNA, 19 nt, Artificial Sequence
  Description of Artificial Sequence: Synthetic oligonucleotide
  Antisense strand to SEQ ID NO: 173794
ucucacacgcagaaucaga

SEQ ID NO: 173796 - RNA, 19 nt, Artificial Sequence
  Description of Artificial Sequence: Synthetic oligonucleotide
  Sense strand starting at position 2624 of SEQ ID NO: 2240
ugauucugcgugugagaua

SEQ ID NO: 173797 - RNA, 19 nt, Artificial Sequence
  Description of Artificial Sequence: Synthetic oligonucleotide
  Antisense strand to SEQ ID NO: 173796
uaucucacacgcagaauca

SEQ ID NO: 173798 - RNA, 19 nt, Artificial Sequence
  Description of Artificial Sequence: Synthetic oligonucleotide
  Sense strand starting at position 2629 of SEQ ID NO: 2240
cugcgugugagauaaauac

SEQ ID NO: 173799 - RNA, 19 nt, Artificial Sequence
  Description of Artificial Sequence: Synthetic oligonucleotide
  Antisense strand to SEQ ID NO: 173798
guauuuaucucacacgcag

SEQ ID NO: 173800 - RNA, 19 nt, Artificial Sequence
  Description of Artificial Sequence: Synthetic oligonucleotide
  Sense strand starting at position 2636 of SEQ ID NO: 2240
ugagauaaauacuacagaa

SEQ ID NO: 173801 - RNA, 19 nt, Artificial Sequence
  Description of Artificial Sequence: Synthetic oligonucleotide
  Antisense strand to SEQ ID NO: 173800
uucuguaguauuuaucuca

SEQ ID NO: 173802 - RNA, 19 nt, Artificial Sequence
  Description of Artificial Sequence: Synthetic oligonucleotide
  Sense strand starting at position 2754 of SEQ ID NO: 2240
gggaaagacucuuugcaug

SEQ ID NO: 173803 - RNA, 19 nt, Artificial Sequence
  Description of Artificial Sequence: Synthetic oligonucleotide
  Antisense strand to SEQ ID NO: 173802
caugcaaagagucuuuccc

SEQ ID NO: 173804 - RNA, 19 nt, Artificial Sequence
  Description of Artificial Sequence: Synthetic oligonucleotide
  Sense strand starting at position 3413 of SEQ ID NO: 2240
uuaggagguuguuucagua

SEQ ID NO: 173805 - RNA, 19 nt, Artificial Sequence
  Description of Artificial Sequence: Synthetic oligonucleotide
  Antisense strand to SEQ ID NO: 173804
uacugaaacaaccuccuaa

SEQ ID NO: 173806 - RNA, 19 nt, Artificial Sequence
  Description of Artificial Sequence: Synthetic oligonucleotide
  Sense strand starting at position 3438 of SEQ ID NO: 2240
aaggauuaugguggcacaa

SEQ ID NO: 173807 - RNA, 19 nt, Artificial Sequence
  Description of Artificial Sequence: Synthetic oligonucleotide
  Antisense strand to SEQ ID NO: 173806
uugugccaccauaauccuu

SEQ ID NO: 173808 - RNA, 19 nt, Artificial Sequence
  Description of Artificial Sequence: Synthetic oligonucleotide
  Sense strand starting at position 3692 of SEQ ID NO: 2240
ccagaaggccauuggauau

SEQ ID NO: 173809 - RNA, 19 nt, Artificial Sequence
  Description of Artificial Sequence: Synthetic oligonucleotide
  Antisense strand to SEQ ID NO: 173808
auauccaauggccuucugg

SEQ ID NO: 173810 - RNA, 19 nt, Artificial Sequence
  Description of Artificial Sequence: Synthetic oligonucleotide
  Sense strand starting at position 3698 of SEQ ID NO: 2240
ggccauuggauaugccuaa

SEQ ID NO: 173811 - RNA, 19 nt, Artificial Sequence
  Description of Artificial Sequence: Synthetic oligonucleotide
  Antisense strand to SEQ ID NO: 173810
uuaggcauauccaauggcc

SEQ ID NO: 173812 - RNA, 19 nt, Artificial Sequence
  Description of Artificial Sequence: Synthetic oligonucleotide
  Sense strand starting at position 3705 of SEQ ID NO: 2240
ggauaugccuaacuggagu

SEQ ID NO: 173813 - RNA, 19 nt, Artificial Sequence
  Description of Artificial Sequence: Synthetic oligonucleotide
  Antisense strand to SEQ ID NO: 173812
acuccaguuaggcauaucc

SEQ ID NO: 173814 - RNA, 19 nt, Artificial Sequence
  Description of Artificial Sequence: Synthetic oligonucleotide
  Sense strand starting at position 3716 of SEQ ID NO: 2240
acuggaguucgccagauaa

SEQ ID NO: 173815 - RNA, 19 nt, Artificial Sequence
  Description of Artificial Sequence: Synthetic oligonucleotide
  Antisense strand to SEQ ID NO: 173814
uuaucuggcgaacuccagu

SEQ ID NO: 173816 - RNA, 19 nt, Artificial Sequence
  Description of Artificial Sequence: Synthetic oligonucleotide
  Sense strand starting at position 3718 of SEQ ID NO: 2240
uggaguucgccagauaagu

SEQ ID NO: 173817 - RNA, 19 nt, Artificial Sequence
  Description of Artificial Sequence: Synthetic oligonucleotide
  Antisense strand to SEQ ID NO: 173816
acuuaucuggcgaacucca

SEQ ID NO: 173818 - RNA, 19 nt, Artificial Sequence
  Description of Artificial Sequence: Synthetic oligonucleotide
  Sense strand starting at position 3720 of SEQ ID NO: 2240
gaguucgccagauaagucu

SEQ ID NO: 173819 - RNA, 19 nt, Artificial Sequence
  Description of Artificial Sequence: Synthetic oligonucleotide
  Antisense strand to SEQ ID NO: 173818
agacuuaucuggcgaacuc

SEQ ID NO: 173820 - RNA, 19 nt, Artificial Sequence
  Description of Artificial Sequence: Synthetic oligonucleotide
  Sense strand starting at position 3804 of SEQ ID NO: 2240
ugagcuugcccagggagua

SEQ ID NO: 173821 - RNA, 19 nt, Artificial Sequence
  Description of Artificial Sequence: Synthetic oligonucleotide
  Antisense strand to SEQ ID NO: 173820
uacucccugggcaagcuca

SEQ ID NO: 173822 - RNA, 19 nt, Artificial Sequence
  Description of Artificial Sequence: Synthetic oligonucleotide
  Sense strand starting at position 3805 of SEQ ID NO: 2240
gagcuugcccagggaguaa

SEQ ID NO: 173823 - RNA, 19 nt, Artificial Sequence
  Description of Artificial Sequence: Synthetic oligonucleotide
  Antisense strand to SEQ ID NO: 173822
uuacucccugggcaagcuc

SEQ ID NO: 173824 - RNA, 19 nt, Artificial Sequence
  Description of Artificial Sequence: Synthetic oligonucleotide
  Sense strand starting at position 3816 of SEQ ID NO: 2240
gggaguaaguguagaguca

SEQ ID NO: 173825 - RNA, 19 nt, Artificial Sequence
  Description of Artificial Sequence: Synthetic oligonucleotide
  Antisense strand to SEQ ID NO: 173824
ugacucuacacuuacuccc

SEQ ID NO: 173826 - RNA, 19 nt, Artificial Sequence
  Description of Artificial Sequence: Synthetic oligonucleotide
  Sense strand starting at position 3900 of SEQ ID NO: 2240
cugcaaagguaaucaagau

SEQ ID NO: 173827 - RNA, 19 nt, Artificial Sequence
  Description of Artificial Sequence: Synthetic oligonucleotide
  Antisense strand to SEQ ID NO: 173826
aucuugauuaccuuugcag

SEQ ID NO: 173828 - RNA, 19 nt, Artificial Sequence
  Description of Artificial Sequence: Synthetic oligonucleotide
  Sense strand starting at position 3934 of SEQ ID NO: 2240
guaagaagaucaguaguag

SEQ ID NO: 173829 - RNA, 19 nt, Artificial Sequence
  Description of Artificial Sequence: Synthetic oligonucleotide
  Antisense strand to SEQ ID NO: 173828
cuacuacugaucuucuuac

SEQ ID NO: 173830 - RNA, 19 nt, Artificial Sequence
  Description of Artificial Sequence: Synthetic oligonucleotide
  Sense strand starting at position 3980 of SEQ ID NO: 2240
gaaaguguugaaggcuuau

SEQ ID NO: 173831 - RNA, 19 nt, Artificial Sequence
  Description of Artificial Sequence: Synthetic oligonucleotide
  Antisense strand to SEQ ID NO: 173830
auaagccuucaacacuuuc

SEQ ID NO: 173832 - RNA, 19 nt, Artificial Sequence
  Description of Artificial Sequence: Synthetic oligonucleotide
  Sense strand starting at position 262 of SEQ ID NO: 2241
gaaggaucuucugagccca

SEQ ID NO: 173833 - RNA, 19 nt, Artificial Sequence
  Description of Artificial Sequence: Synthetic oligonucleotide
  Antisense strand to SEQ ID NO: 173832
ugggcucagaagauccuuc

SEQ ID NO: 173834 - RNA, 19 nt, Artificial Sequence
  Description of Artificial Sequence: Synthetic oligonucleotide
  Sense strand starting at position 388 of SEQ ID NO: 2241
gggacaucugucugaagcu

SEQ ID NO: 173835 - RNA, 19 nt, Artificial Sequence
  Description of Artificial Sequence: Synthetic oligonucleotide
  Antisense strand to SEQ ID NO: 173834
agcuucagacagauguccc

SEQ ID NO: 173836 - RNA, 19 nt, Artificial Sequence
  Description of Artificial Sequence: Synthetic oligonucleotide
  Sense strand starting at position 630 of SEQ ID NO: 2241
gcaccaugagacuggaaua

SEQ ID NO: 173837 - RNA, 19 nt, Artificial Sequence
  Description of Artificial Sequence: Synthetic oligonucleotide
  Antisense strand to SEQ ID NO: 173836
uauuccagucucauggugc

SEQ ID NO: 173838 - RNA, 19 nt, Artificial Sequence
  Description of Artificial Sequence: Synthetic oligonucleotide
  Sense strand starting at position 641 of SEQ ID NO: 2241
cuggaauagcauugugaag

SEQ ID NO: 173839 - RNA, 19 nt, Artificial Sequence
  Description of Artificial Sequence: Synthetic oligonucleotide
  Antisense strand to SEQ ID NO: 173838
cuucacaaugcuauuccag

SEQ ID NO: 173840 - RNA, 19 nt, Artificial Sequence
  Description of Artificial Sequence: Synthetic oligonucleotide
  Sense strand starting at position 643 of SEQ ID NO: 2241
ggaauagcauugugaagau

SEQ ID NO: 173841 - RNA, 19 nt, Artificial Sequence
  Description of Artificial Sequence: Synthetic oligonucleotide
  Antisense strand to SEQ ID NO: 173840
aucuucacaaugcuauucc

SEQ ID NO: 173842 - RNA, 19 nt, Artificial Sequence
  Description of Artificial Sequence: Synthetic oligonucleotide
  Sense strand starting at position 800 of SEQ ID NO: 2241
ggaccaagacuuuggucaa

SEQ ID NO: 173843 - RNA, 19 nt, Artificial Sequence
  Description of Artificial Sequence: Synthetic oligonucleotide
  Antisense strand to SEQ ID NO: 173842
uugaccaaagucuuggucc

SEQ ID NO: 173844 - RNA, 19 nt, Artificial Sequence
  Description of Artificial Sequence: Synthetic oligonucleotide
  Sense strand starting at position 801 of SEQ ID NO: 2241
gaccaagacuuuggucaaa

SEQ ID NO: 173845 - RNA, 19 nt, Artificial Sequence
  Description of Artificial Sequence: Synthetic oligonucleotide
  Antisense strand to SEQ ID NO: 173844
uuugaccaaagucuugguc

SEQ ID NO: 173846 - RNA, 19 nt, Artificial Sequence
  Description of Artificial Sequence: Synthetic oligonucleotide
  Sense strand starting at position 871 of SEQ ID NO: 2241
uggagcaguccuugacuuu

SEQ ID NO: 173847 - RNA, 19 nt, Artificial Sequence
  Description of Artificial Sequence: Synthetic oligonucleotide
  Antisense strand to SEQ ID NO: 173846
aaagucaaggacugcucca

SEQ ID NO: 173848 - RNA, 19 nt, Artificial Sequence
  Description of Artificial Sequence: Synthetic oligonucleotide
  Sense strand starting at position 1167 of SEQ ID NO: 2241
uugucuuaccacuguggga

SEQ ID NO: 173849 - RNA, 19 nt, Artificial Sequence
  Description of Artificial Sequence: Synthetic oligonucleotide
  Antisense strand to SEQ ID NO: 173848
ucccacagugguaagacaa

SEQ ID NO: 173850 - RNA, 19 nt, Artificial Sequence
  Description of Artificial Sequence: Synthetic oligonucleotide
  Sense strand starting at position 1210 of SEQ ID NO: 2241
gugcuaagcgcuuuacucu

SEQ ID NO: 173851 - RNA, 19 nt, Artificial Sequence
  Description of Artificial Sequence: Synthetic oligonucleotide
  Antisense strand to SEQ ID NO: 173850
agaguaaagcgcuuagcac

SEQ ID NO: 173852 - RNA, 19 nt, Artificial Sequence
  Description of Artificial Sequence: Synthetic oligonucleotide
  Sense strand starting at position 1236 of SEQ ID NO: 2241
ugcccucauccucauagua

SEQ ID NO: 173853 - RNA, 19 nt, Artificial Sequence
  Description of Artificial Sequence: Synthetic oligonucleotide
  Antisense strand to SEQ ID NO: 173852
uacuaugaggaugagggca

SEQ ID NO: 173854 - RNA, 19 nt, Artificial Sequence
  Description of Artificial Sequence: Synthetic oligonucleotide
  Sense strand starting at position 1525 of SEQ ID NO: 2241
gggucccuucuggguaaga

SEQ ID NO: 173855 - RNA, 19 nt, Artificial Sequence
  Description of Artificial Sequence: Synthetic oligonucleotide
  Antisense strand to SEQ ID NO: 173854
ucuuacccagaagggaccc

SEQ ID NO: 173856 - RNA, 19 nt, Artificial Sequence
  Description of Artificial Sequence: Synthetic oligonucleotide
  Sense strand starting at position 1526 of SEQ ID NO: 2241
ggucccuucuggguaagau

SEQ ID NO: 173857 - RNA, 19 nt, Artificial Sequence
  Description of Artificial Sequence: Synthetic oligonucleotide
  Antisense strand to SEQ ID NO: 173856
aucuuacccagaagggacc

SEQ ID NO: 173858 - RNA, 19 nt, Artificial Sequence
  Description of Artificial Sequence: Synthetic oligonucleotide
  Sense strand starting at position 1527 of SEQ ID NO: 2241
gucccuucuggguaagaug

SEQ ID NO: 173859 - RNA, 19 nt, Artificial Sequence
  Description of Artificial Sequence: Synthetic oligonucleotide
  Antisense strand to SEQ ID NO: 173858
caucuuacccagaagggac

SEQ ID NO: 173860 - RNA, 19 nt, Artificial Sequence
  Description of Artificial Sequence: Synthetic oligonucleotide
  Sense strand starting at position 2479 of SEQ ID NO: 2241
ccgcgagucuugucuucca

SEQ ID NO: 173861 - RNA, 19 nt, Artificial Sequence
  Description of Artificial Sequence: Synthetic oligonucleotide
  Antisense strand to SEQ ID NO: 173860
uggaagacaagacucgcgg

SEQ ID NO: 173862 - RNA, 19 nt, Artificial Sequence
  Description of Artificial Sequence: Synthetic oligonucleotide
  Sense strand starting at position 2486 of SEQ ID NO: 2241
ucuugucuuccacgcugaa

SEQ ID NO: 173863 - RNA, 19 nt, Artificial Sequence
  Description of Artificial Sequence: Synthetic oligonucleotide
  Antisense strand to SEQ ID NO: 173862
uucagcguggaagacaaga

SEQ ID NO: 173864 - RNA, 19 nt, Artificial Sequence
  Description of Artificial Sequence: Synthetic oligonucleotide
  Sense strand starting at position 2543 of SEQ ID NO: 2241
ucaguuccguccuuggaaa

SEQ ID NO: 173865 - RNA, 19 nt, Artificial Sequence
  Description of Artificial Sequence: Synthetic oligonucleotide
  Antisense strand to SEQ ID NO: 173864
uuuccaaggacggaacuga

SEQ ID NO: 173866 - RNA, 19 nt, Artificial Sequence
  Description of Artificial Sequence: Synthetic oligonucleotide
  Sense strand starting at position 2938 of SEQ ID NO: 2241
uuuggaaacucuccagacu

SEQ ID NO: 173867 - RNA, 19 nt, Artificial Sequence
  Description of Artificial Sequence: Synthetic oligonucleotide
  Antisense strand to SEQ ID NO: 173866
agucuggagaguuuccaaa

SEQ ID NO: 173868 - RNA, 19 nt, Artificial Sequence
  Description of Artificial Sequence: Synthetic oligonucleotide
  Sense strand starting at position 2996 of SEQ ID NO: 2241
guaggagcuuuauuaguac

SEQ ID NO: 173869 - RNA, 19 nt, Artificial Sequence
  Description of Artificial Sequence: Synthetic oligonucleotide
  Antisense strand to SEQ ID NO: 173868
guacuaauaaagcuccuac

SEQ ID NO: 173870 - RNA, 19 nt, Artificial Sequence
  Description of Artificial Sequence: Synthetic oligonucleotide
  Sense strand starting at position 3025 of SEQ ID NO: 2241
ugcugagcccuuuaaugug

SEQ ID NO: 173871 - RNA, 19 nt, Artificial Sequence
  Description of Artificial Sequence: Synthetic oligonucleotide
  Antisense strand to SEQ ID NO: 173870
cacauuaaagggcucagca

SEQ ID NO: 173872 - RNA, 19 nt, Artificial Sequence
  Description of Artificial Sequence: Synthetic oligonucleotide
  Sense strand starting at position 3031 of SEQ ID NO: 2241
gcccuuuaaugugucagga

SEQ ID NO: 173873 - RNA, 19 nt, Artificial Sequence
  Description of Artificial Sequence: Synthetic oligonucleotide
  Antisense strand to SEQ ID NO: 173872
uccugacacauuaaagggc

SEQ ID NO: 173874 - RNA, 19 nt, Artificial Sequence
  Description of Artificial Sequence: Synthetic oligonucleotide
  Sense strand starting at position 3033 of SEQ ID NO: 2241
ccuuuaaugugucaggaug

SEQ ID NO: 173875 - RNA, 19 nt, Artificial Sequence
  Description of Artificial Sequence: Synthetic oligonucleotide
  Antisense strand to SEQ ID NO: 173874
cauccugacacauuaaagg

SEQ ID NO: 173876 - RNA, 19 nt, Artificial Sequence
  Description of Artificial Sequence: Synthetic oligonucleotide
  Sense strand starting at position 3078 of SEQ ID NO: 2241
ucagcaucccuuuggcaua

SEQ ID NO: 173877 - RNA, 19 nt, Artificial Sequence
  Description of Artificial Sequence: Synthetic oligonucleotide
  Antisense strand to SEQ ID NO: 173876
uaugccaaagggaugcuga

SEQ ID NO: 173878 - RNA, 19 nt, Artificial Sequence
  Description of Artificial Sequence: Synthetic oligonucleotide
  Sense strand starting at position 3098 of SEQ ID NO: 2241
guaccauuccugcaccuuu

SEQ ID NO: 173879 - RNA, 19 nt, Artificial Sequence
  Description of Artificial Sequence: Synthetic oligonucleotide
  Antisense strand to SEQ ID NO: 173878
aaaggugcaggaaugguac

SEQ ID NO: 173880 - RNA, 19 nt, Artificial Sequence
  Description of Artificial Sequence: Synthetic oligonucleotide
  Sense strand starting at position 3204 of SEQ ID NO: 2241
ugcccaaguucuguagagu

SEQ ID NO: 173881 - RNA, 19 nt, Artificial Sequence
  Description of Artificial Sequence: Synthetic oligonucleotide
  Antisense strand to SEQ ID NO: 173880
acucuacagaacuugggca

SEQ ID NO: 173882 - RNA, 19 nt, Artificial Sequence
  Description of Artificial Sequence: Synthetic oligonucleotide
  Sense strand starting at position 3205 of SEQ ID NO: 2241
gcccaaguucuguagagug

SEQ ID NO: 173883 - RNA, 19 nt, Artificial Sequence
  Description of Artificial Sequence: Synthetic oligonucleotide
  Antisense strand to SEQ ID NO: 173882
cacucuacagaacuugggc

SEQ ID NO: 173884 - RNA, 19 nt, Artificial Sequence
  Description of Artificial Sequence: Synthetic oligonucleotide
  Sense strand starting at position 3266 of SEQ ID NO: 2241
ggcacuuacuaugggaacu

SEQ ID NO: 173885 - RNA, 19 nt, Artificial Sequence
  Description of Artificial Sequence: Synthetic oligonucleotide
  Antisense strand to SEQ ID NO: 173884
aguucccauaguaagugcc

SEQ ID NO: 173886 - RNA, 19 nt, Artificial Sequence
  Description of Artificial Sequence: Synthetic oligonucleotide
  Sense strand starting at position 3325 of SEQ ID NO: 2241
ggcagugucccagagguca

SEQ ID NO: 173887 - RNA, 19 nt, Artificial Sequence
  Description of Artificial Sequence: Synthetic oligonucleotide
  Antisense strand to SEQ ID NO: 173886
ugaccucugggacacugcc

SEQ ID NO: 173888 - RNA, 19 nt, Artificial Sequence
  Description of Artificial Sequence: Synthetic oligonucleotide
  Sense strand starting at position 3402 of SEQ ID NO: 2241
gucugugugucuuucugca

SEQ ID NO: 173889 - RNA, 19 nt, Artificial Sequence
  Description of Artificial Sequence: Synthetic oligonucleotide
  Antisense strand to SEQ ID NO: 173888
ugcagaaagacacacagac

SEQ ID NO: 173890 - RNA, 19 nt, Artificial Sequence
  Description of Artificial Sequence: Synthetic oligonucleotide
  Sense strand starting at position 3404 of SEQ ID NO: 2241
cugugugucuuucugcaca

SEQ ID NO: 173891 - RNA, 19 nt, Artificial Sequence
  Description of Artificial Sequence: Synthetic oligonucleotide
  Antisense strand to SEQ ID NO: 173890
ugugcagaaagacacacag

SEQ ID NO: 173892 - RNA, 19 nt, Artificial Sequence
  Description of Artificial Sequence: Synthetic oligonucleotide
  Sense strand starting at position 3477 of SEQ ID NO: 2241
gccucuggaguuuggagaa

SEQ ID NO: 173893 - RNA, 19 nt, Artificial Sequence
  Description of Artificial Sequence: Synthetic oligonucleotide
  Antisense strand to SEQ ID NO: 173892
uucuccaaacuccagaggc

SEQ ID NO: 173894 - RNA, 19 nt, Artificial Sequence
  Description of Artificial Sequence: Synthetic oligonucleotide
  Sense strand starting at position 3484 of SEQ ID NO: 2241
gaguuuggagaacgcauua

SEQ ID NO: 173895 - RNA, 19 nt, Artificial Sequence
  Description of Artificial Sequence: Synthetic oligonucleotide
  Antisense strand to SEQ ID NO: 173894
uaaugcguucuccaaacuc

SEQ ID NO: 173896 - RNA, 19 nt, Artificial Sequence
  Description of Artificial Sequence: Synthetic oligonucleotide
  Sense strand starting at position 3522 of SEQ ID NO: 2241
agccauuucuccuaggaag

SEQ ID NO: 173897 - RNA, 19 nt, Artificial Sequence
  Description of Artificial Sequence: Synthetic oligonucleotide
  Antisense strand to SEQ ID NO: 173896
cuuccuaggagaaauggcu

SEQ ID NO: 173898 - RNA, 19 nt, Artificial Sequence
  Description of Artificial Sequence: Synthetic oligonucleotide
  Sense strand starting at position 3609 of SEQ ID NO: 2241
ggauaaugugcagggaauu

SEQ ID NO: 173899 - RNA, 19 nt, Artificial Sequence
  Description of Artificial Sequence: Synthetic oligonucleotide
  Antisense strand to SEQ ID NO: 173898
aauucccugcacauuaucc

SEQ ID NO: 173900 - RNA, 19 nt, Artificial Sequence
  Description of Artificial Sequence: Synthetic oligonucleotide
  Sense strand starting at position 3610 of SEQ ID NO: 2241
gauaaugugcagggaauuc

SEQ ID NO: 173901 - RNA, 19 nt, Artificial Sequence
  Description of Artificial Sequence: Synthetic oligonucleotide
  Antisense strand to SEQ ID NO: 173900
gaauucccugcacauuauc

SEQ ID NO: 173902 - RNA, 19 nt, Artificial Sequence
  Description of Artificial Sequence: Synthetic oligonucleotide
  Sense strand starting at position 3640 of SEQ ID NO: 2241
acauauuugucagguggaa

SEQ ID NO: 173903 - RNA, 19 nt, Artificial Sequence
  Description of Artificial Sequence: Synthetic oligonucleotide
  Antisense strand to SEQ ID NO: 173902
uuccaccugacaaauaugu

SEQ ID NO: 173904 - RNA, 19 nt, Artificial Sequence
  Description of Artificial Sequence: Synthetic oligonucleotide
  Sense strand starting at position 3692 of SEQ ID NO: 2241
cuggcaucggaauguugau

SEQ ID NO: 173905 - RNA, 19 nt, Artificial Sequence
  Description of Artificial Sequence: Synthetic oligonucleotide
  Antisense strand to SEQ ID NO: 173904
aucaacauuccgaugccag

SEQ ID NO: 173906 - RNA, 19 nt, Artificial Sequence
  Description of Artificial Sequence: Synthetic oligonucleotide
  Sense strand starting at position 3701 of SEQ ID NO: 2241
gaauguugauguccucaga

SEQ ID NO: 173907 - RNA, 19 nt, Artificial Sequence
  Description of Artificial Sequence: Synthetic oligonucleotide
  Antisense strand to SEQ ID NO: 173906
ucugaggacaucaacauuc

SEQ ID NO: 173908 - RNA, 19 nt, Artificial Sequence
  Description of Artificial Sequence: Synthetic oligonucleotide
  Sense strand starting at position 3704 of SEQ ID NO: 2241
uguugauguccucagacaa

SEQ ID NO: 173909 - RNA, 19 nt, Artificial Sequence
  Description of Artificial Sequence: Synthetic oligonucleotide
  Antisense strand to SEQ ID NO: 173908
uugucugaggacaucaaca

SEQ ID NO: 173910 - RNA, 19 nt, Artificial Sequence
  Description of Artificial Sequence: Synthetic oligonucleotide
  Sense strand starting at position 3743 of SEQ ID NO: 2241
gguaguacuuacucauauu

SEQ ID NO: 173911 - RNA, 19 nt, Artificial Sequence
  Description of Artificial Sequence: Synthetic oligonucleotide
  Antisense strand to SEQ ID NO: 173910
aauaugaguaaguacuacc

SEQ ID NO: 173912 - RNA, 19 nt, Artificial Sequence
  Description of Artificial Sequence: Synthetic oligonucleotide
  Sense strand starting at position 3972 of SEQ ID NO: 2243
guuauaaggguguacaauu

SEQ ID NO: 173913 - RNA, 19 nt, Artificial Sequence
  Description of Artificial Sequence: Synthetic oligonucleotide
  Antisense strand to SEQ ID NO: 173912
aauuguacacccuuauaac

SEQ ID NO: 173914 - RNA, 19 nt, Artificial Sequence
  Description of Artificial Sequence: Synthetic oligonucleotide
  Sense strand starting at position 3970 of SEQ ID NO: 2243
uaguuauaaggguguacaa

SEQ ID NO: 173915 - RNA, 19 nt, Artificial Sequence
  Description of Artificial Sequence: Synthetic oligonucleotide
  Antisense strand to SEQ ID NO: 173914
uuguacacccuuauaacua

SEQ ID NO: 173916 - RNA, 19 nt, Artificial Sequence
  Description of Artificial Sequence: Synthetic oligonucleotide
  Sense strand starting at position 3872 of SEQ ID NO: 2243
caaauaguuggguagcaua

SEQ ID NO: 173917 - RNA, 19 nt, Artificial Sequence
  Description of Artificial Sequence: Synthetic oligonucleotide
  Antisense strand to SEQ ID NO: 173916
uaugcuacccaacuauuug

SEQ ID NO: 173918 - RNA, 19 nt, Artificial Sequence
  Description of Artificial Sequence: Synthetic oligonucleotide
  Sense strand starting at position 3641 of SEQ ID NO: 2243
uguagaucuuucuuaauag

SEQ ID NO: 173919 - RNA, 19 nt, Artificial Sequence
  Description of Artificial Sequence: Synthetic oligonucleotide
  Antisense strand to SEQ ID NO: 173918
cuauuaagaaagaucuaca

SEQ ID NO: 173920 - RNA, 19 nt, Artificial Sequence
  Description of Artificial Sequence: Synthetic oligonucleotide
  Sense strand starting at position 3633 of SEQ ID NO: 2243
guucuuacuguagaucuuu

SEQ ID NO: 173921 - RNA, 19 nt, Artificial Sequence
  Description of Artificial Sequence: Synthetic oligonucleotide
  Antisense strand to SEQ ID NO: 173920
aaagaucuacaguaagaac

SEQ ID NO: 173922 - RNA, 19 nt, Artificial Sequence
  Description of Artificial Sequence: Synthetic oligonucleotide
  Sense strand starting at position 3622 of SEQ ID NO: 2243
acagaagauucguucuuac

SEQ ID NO: 173923 - RNA, 19 nt, Artificial Sequence
  Description of Artificial Sequence: Synthetic oligonucleotide
  Antisense strand to SEQ ID NO: 173922
guaagaacgaaucuucugu

SEQ ID NO: 173924 - RNA, 19 nt, Artificial Sequence
  Description of Artificial Sequence: Synthetic oligonucleotide
  Sense strand starting at position 3621 of SEQ ID NO: 2243
gacagaagauucguucuua

SEQ ID NO: 173925 - RNA, 19 nt, Artificial Sequence
  Description of Artificial Sequence: Synthetic oligonucleotide
  Antisense strand to SEQ ID NO: 173924
uaagaacgaaucuucuguc

SEQ ID NO: 173926 - RNA, 19 nt, Artificial Sequence
  Description of Artificial Sequence: Synthetic oligonucleotide
  Sense strand starting at position 3560 of SEQ ID NO: 2243
ugcaauuugaggugccaua

SEQ ID NO: 173927 - RNA, 19 nt, Artificial Sequence
  Description of Artificial Sequence: Synthetic oligonucleotide
  Antisense strand to SEQ ID NO: 173926
uauggcaccucaaauugca

SEQ ID NO: 173928 - RNA, 19 nt, Artificial Sequence
  Description of Artificial Sequence: Synthetic oligonucleotide
  Sense strand starting at position 3471 of SEQ ID NO: 2243
ucagaacauguuuagaugu

SEQ ID NO: 173929 - RNA, 19 nt, Artificial Sequence
  Description of Artificial Sequence: Synthetic oligonucleotide
  Antisense strand to SEQ ID NO: 173928
acaucuaaacauguucuga

SEQ ID NO: 173930 - RNA, 19 nt, Artificial Sequence
  Description of Artificial Sequence: Synthetic oligonucleotide
  Sense strand starting at position 3470 of SEQ ID NO: 2243
aucagaacauguuuagaug

SEQ ID NO: 173931 - RNA, 19 nt, Artificial Sequence
  Description of Artificial Sequence: Synthetic oligonucleotide
  Antisense strand to SEQ ID NO: 173930
caucuaaacauguucugau

SEQ ID NO: 173932 - RNA, 19 nt, Artificial Sequence
  Description of Artificial Sequence: Synthetic oligonucleotide
  Sense strand starting at position 3403 of SEQ ID NO: 2243
ggcagaggauaugucucaa

SEQ ID NO: 173933 - RNA, 19 nt, Artificial Sequence
  Description of Artificial Sequence: Synthetic oligonucleotide
  Antisense strand to SEQ ID NO: 173932
uugagacauauccucugcc

SEQ ID NO: 173934 - RNA, 19 nt, Artificial Sequence
  Description of Artificial Sequence: Synthetic oligonucleotide
  Sense strand starting at position 2783 of SEQ ID NO: 2243
uuagguggucgauaggacu

SEQ ID NO: 173935 - RNA, 19 nt, Artificial Sequence
  Description of Artificial Sequence: Synthetic oligonucleotide
  Antisense strand to SEQ ID NO: 173934
aguccuaucgaccaccuaa

SEQ ID NO: 173936 - RNA, 19 nt, Artificial Sequence
  Description of Artificial Sequence: Synthetic oligonucleotide
  Sense strand starting at position 2179 of SEQ ID NO: 2243
uuacuagauuagcuagaua

SEQ ID NO: 173937 - RNA, 19 nt, Artificial Sequence
  Description of Artificial Sequence: Synthetic oligonucleotide
  Antisense strand to SEQ ID NO: 173936
uaucuagcuaaucuaguaa

SEQ ID NO: 173938 - RNA, 19 nt, Artificial Sequence
  Description of Artificial Sequence: Synthetic oligonucleotide
  Sense strand starting at position 2178 of SEQ ID NO: 2243
cuuacuagauuagcuagau

SEQ ID NO: 173939 - RNA, 19 nt, Artificial Sequence
  Description of Artificial Sequence: Synthetic oligonucleotide
  Antisense strand to SEQ ID NO: 173938
aucuagcuaaucuaguaag

SEQ ID NO: 173940 - RNA, 19 nt, Artificial Sequence
  Description of Artificial Sequence: Synthetic oligonucleotide
  Sense strand starting at position 2168 of SEQ ID NO: 2243
ucuuuacguccuuacuaga

SEQ ID NO: 173941 - RNA, 19 nt, Artificial Sequence
  Description of Artificial Sequence: Synthetic oligonucleotide
  Antisense strand to SEQ ID NO: 173940
ucuaguaaggacguaaaga

SEQ ID NO: 173942 - RNA, 19 nt, Artificial Sequence
  Description of Artificial Sequence: Synthetic oligonucleotide
  Sense strand starting at position 1433 of SEQ ID NO: 2243
auuugugguuucuuuagca

SEQ ID NO: 173943 - RNA, 19 nt, Artificial Sequence
  Description of Artificial Sequence: Synthetic oligonucleotide
  Antisense strand to SEQ ID NO: 173942
ugcuaaagaaaccacaaau

SEQ ID NO: 173944 - RNA, 19 nt, Artificial Sequence
  Description of Artificial Sequence: Synthetic oligonucleotide
  Sense strand starting at position 1429 of SEQ ID NO: 2243
ucagauuugugguuucuuu

SEQ ID NO: 173945 - RNA, 19 nt, Artificial Sequence
  Description of Artificial Sequence: Synthetic oligonucleotide
  Antisense strand to SEQ ID NO: 173944
aaagaaaccacaaaucuga

SEQ ID NO: 173946 - RNA, 19 nt, Artificial Sequence
  Description of Artificial Sequence: Synthetic oligonucleotide
  Sense strand starting at position 1424 of SEQ ID NO: 2243
ccaagucagauuugugguu

SEQ ID NO: 173947 - RNA, 19 nt, Artificial Sequence
  Description of Artificial Sequence: Synthetic oligonucleotide
  Antisense strand to SEQ ID NO: 173946
aaccacaaaucugacuugg

SEQ ID NO: 173948 - RNA, 19 nt, Artificial Sequence
  Description of Artificial Sequence: Synthetic oligonucleotide
  Sense strand starting at position 1364 of SEQ ID NO: 2243
gauguuggagaauauguuu

SEQ ID NO: 173949 - RNA, 19 nt, Artificial Sequence
  Description of Artificial Sequence: Synthetic oligonucleotide
  Antisense strand to SEQ ID NO: 173948
aaacauauucuccaacauc

SEQ ID NO: 173950 - RNA, 19 nt, Artificial Sequence
  Description of Artificial Sequence: Synthetic oligonucleotide
  Sense strand starting at position 1255 of SEQ ID NO: 2243
cuccacuggccaugaaaga

SEQ ID NO: 173951 - RNA, 19 nt, Artificial Sequence
  Description of Artificial Sequence: Synthetic oligonucleotide
  Antisense strand to SEQ ID NO: 173950
ucuuucauggccaguggag

SEQ ID NO: 173952 - RNA, 19 nt, Artificial Sequence
  Description of Artificial Sequence: Synthetic oligonucleotide
  Sense strand starting at position 1212 of SEQ ID NO: 2243
ccuuaauugcuuguucguu

SEQ ID NO: 173953 - RNA, 19 nt, Artificial Sequence
  Description of Artificial Sequence: Synthetic oligonucleotide
  Antisense strand to SEQ ID NO: 173952
aacgaacaagcaauuaagg

SEQ ID NO: 173954 - RNA, 19 nt, Artificial Sequence
  Description of Artificial Sequence: Synthetic oligonucleotide
  Sense strand starting at position 1118 of SEQ ID NO: 2243
cccaauaugcaagguuaga

SEQ ID NO: 173955 - RNA, 19 nt, Artificial Sequence
  Description of Artificial Sequence: Synthetic oligonucleotide
  Antisense strand to SEQ ID NO: 173954
ucuaaccuugcauauuggg

SEQ ID NO: 173956 - RNA, 19 nt, Artificial Sequence
  Description of Artificial Sequence: Synthetic oligonucleotide
  Sense strand starting at position 1052 of SEQ ID NO: 2243
agauaugacugcuuacagu

SEQ ID NO: 173957 - RNA, 19 nt, Artificial Sequence
  Description of Artificial Sequence: Synthetic oligonucleotide
  Antisense strand to SEQ ID NO: 173956
acuguaagcagucauaucu

SEQ ID NO: 173958 - RNA, 19 nt, Artificial Sequence
  Description of Artificial Sequence: Synthetic oligonucleotide
  Sense strand starting at position 1049 of SEQ ID NO: 2243
uccagauaugacugcuuac

SEQ ID NO: 173959 - RNA, 19 nt, Artificial Sequence
  Description of Artificial Sequence: Synthetic oligonucleotide
  Antisense strand to SEQ ID NO: 173958
guaagcagucauaucugga

SEQ ID NO: 173960 - RNA, 19 nt, Artificial Sequence
  Description of Artificial Sequence: Synthetic oligonucleotide
  Sense strand starting at position 923 of SEQ ID NO: 2243
ccaaacaucugaguggacu

SEQ ID NO: 173961 - RNA, 19 nt, Artificial Sequence
  Description of Artificial Sequence: Synthetic oligonucleotide
  Antisense strand to SEQ ID NO: 173960
aguccacucagauguuugg

SEQ ID NO: 173962 - RNA, 19 nt, Artificial Sequence
  Description of Artificial Sequence: Synthetic oligonucleotide
  Sense strand starting at position 903 of SEQ ID NO: 2243
uagucaaucccuugggaca

SEQ ID NO: 173963 - RNA, 19 nt, Artificial Sequence
  Description of Artificial Sequence: Synthetic oligonucleotide
  Antisense strand to SEQ ID NO: 173962
ugucccaagggauugacua

SEQ ID NO: 173964 - RNA, 19 nt, Artificial Sequence
  Description of Artificial Sequence: Synthetic oligonucleotide
  Sense strand starting at position 824 of SEQ ID NO: 2243
gguaauagguuucugaaua

SEQ ID NO: 173965 - RNA, 19 nt, Artificial Sequence
  Description of Artificial Sequence: Synthetic oligonucleotide
  Antisense strand to SEQ ID NO: 173964
uauucagaaaccuauuacc

SEQ ID NO: 173966 - RNA, 19 nt, Artificial Sequence
  Description of Artificial Sequence: Synthetic oligonucleotide
  Sense strand starting at position 806 of SEQ ID NO: 2243
cggaauugucaauaugcag

SEQ ID NO: 173967 - RNA, 19 nt, Artificial Sequence
  Description of Artificial Sequence: Synthetic oligonucleotide
  Antisense strand to SEQ ID NO: 173966
cugcauauugacaauuccg

SEQ ID NO: 173968 - RNA, 19 nt, Artificial Sequence
  Description of Artificial Sequence: Synthetic oligonucleotide
  Sense strand starting at position 785 of SEQ ID NO: 2243
ccugguuggacauacgaau

SEQ ID NO: 173969 - RNA, 19 nt, Artificial Sequence
  Description of Artificial Sequence: Synthetic oligonucleotide
  Antisense strand to SEQ ID NO: 173968
auucguauguccaaccagg

SEQ ID NO: 173970 - RNA, 19 nt, Artificial Sequence
  Description of Artificial Sequence: Synthetic oligonucleotide
  Sense strand starting at position 780 of SEQ ID NO: 2243
agaauccugguuggacaua

SEQ ID NO: 173971 - RNA, 19 nt, Artificial Sequence
  Description of Artificial Sequence: Synthetic oligonucleotide
  Antisense strand to SEQ ID NO: 173970
uauguccaaccaggauucu

SEQ ID NO: 173972 - RNA, 19 nt, Artificial Sequence
  Description of Artificial Sequence: Synthetic oligonucleotide
  Sense strand starting at position 779 of SEQ ID NO: 2243
gagaauccugguuggacau

SEQ ID NO: 173973 - RNA, 19 nt, Artificial Sequence
  Description of Artificial Sequence: Synthetic oligonucleotide
  Antisense strand to SEQ ID NO: 173972
auguccaaccaggauucuc

SEQ ID NO: 173974 - RNA, 19 nt, Artificial Sequence
  Description of Artificial Sequence: Synthetic oligonucleotide
  Sense strand starting at position 754 of SEQ ID NO: 2243
acauauaugugucuagaac

SEQ ID NO: 173975 - RNA, 19 nt, Artificial Sequence
  Description of Artificial Sequence: Synthetic oligonucleotide
  Antisense strand to SEQ ID NO: 173974
guucuagacacauauaugu

SEQ ID NO: 173976 - RNA, 19 nt, Artificial Sequence
  Description of Artificial Sequence: Synthetic oligonucleotide
  Sense strand starting at position 650 of SEQ ID NO: 2243
gagauaugugguuaaggua

SEQ ID NO: 173977 - RNA, 19 nt, Artificial Sequence
  Description of Artificial Sequence: Synthetic oligonucleotide
  Antisense strand to SEQ ID NO: 173976
uaccuuaaccacauaucuc

SEQ ID NO: 173978 - RNA, 19 nt, Artificial Sequence
  Description of Artificial Sequence: Synthetic oligonucleotide
  Sense strand starting at position 649 of SEQ ID NO: 2243
agagauaugugguuaaggu

SEQ ID NO: 173979 - RNA, 19 nt, Artificial Sequence
  Description of Artificial Sequence: Synthetic oligonucleotide
  Antisense strand to SEQ ID NO: 173978
accuuaaccacauaucucu

SEQ ID NO: 173980 - RNA, 19 nt, Artificial Sequence
  Description of Artificial Sequence: Synthetic oligonucleotide
  Sense strand starting at position 644 of SEQ ID NO: 2243
acagaagagauaugugguu

SEQ ID NO: 173981 - RNA, 19 nt, Artificial Sequence
  Description of Artificial Sequence: Synthetic oligonucleotide
  Antisense strand to SEQ ID NO: 173980
aaccacauaucucuucugu

SEQ ID NO: 173982 - RNA, 19 nt, Artificial Sequence
  Description of Artificial Sequence: Synthetic oligonucleotide
  Sense strand starting at position 545 of SEQ ID NO: 2243
uggaguccaucucuuaaug

SEQ ID NO: 173983 - RNA, 19 nt, Artificial Sequence
  Description of Artificial Sequence: Synthetic oligonucleotide
  Antisense strand to SEQ ID NO: 173982
cauuaagagauggacucca

SEQ ID NO: 173984 - RNA, 19 nt, Artificial Sequence
  Description of Artificial Sequence: Synthetic oligonucleotide
  Sense strand starting at position 533 of SEQ ID NO: 2243
gaaguaaaggucuggaguc

SEQ ID NO: 173985 - RNA, 19 nt, Artificial Sequence
  Description of Artificial Sequence: Synthetic oligonucleotide
  Antisense strand to SEQ ID NO: 173984
gacuccagaccuuuacuuc

SEQ ID NO: 173986 - RNA, 19 nt, Artificial Sequence
  Description of Artificial Sequence: Synthetic oligonucleotide
  Sense strand starting at position 216 of SEQ ID NO: 2243
ugcaauuagccagauguga

SEQ ID NO: 173987 - RNA, 19 nt, Artificial Sequence
  Description of Artificial Sequence: Synthetic oligonucleotide
  Antisense strand to SEQ ID NO: 173986
ucacaucuggcuaauugca

SEQ ID NO: 173988 - RNA, 19 nt, Artificial Sequence
  Description of Artificial Sequence: Synthetic oligonucleotide
  Sense strand starting at position 7 of SEQ ID NO: 2243
agagaucucacugggccuu

SEQ ID NO: 173989 - RNA, 19 nt, Artificial Sequence
  Description of Artificial Sequence: Synthetic oligonucleotide
  Antisense strand to SEQ ID NO: 173988
aaggcccagugagaucucu

SEQ ID NO: 173990 - RNA, 19 nt, Artificial Sequence
  Description of Artificial Sequence: Synthetic oligonucleotide
  Sense strand starting at position 6 of SEQ ID NO: 2243
aagagaucucacugggccu

SEQ ID NO: 173991 - RNA, 19 nt, Artificial Sequence
  Description of Artificial Sequence: Synthetic oligonucleotide
  Antisense strand to SEQ ID NO: 173990
aggcccagugagaucucuu

SEQ ID NO: 173992 - RNA, 19 nt, Artificial Sequence
  Description of Artificial Sequence: Synthetic oligonucleotide
  Sense strand starting at position 3797 of SEQ ID NO: 2242
guaaauaguaguugaaugu

SEQ ID NO: 173993 - RNA, 19 nt, Artificial Sequence
  Description of Artificial Sequence: Synthetic oligonucleotide
  Antisense strand to SEQ ID NO: 173992
acauucaacuacuauuuac

SEQ ID NO: 173994 - RNA, 19 nt, Artificial Sequence
  Description of Artificial Sequence: Synthetic oligonucleotide
  Sense strand starting at position 3796 of SEQ ID NO: 2242
aguaaauaguaguugaaug

SEQ ID NO: 173995 - RNA, 19 nt, Artificial Sequence
  Description of Artificial Sequence: Synthetic oligonucleotide
  Antisense strand to SEQ ID NO: 173994
cauucaacuacuauuuacu

SEQ ID NO: 173996 - RNA, 19 nt, Artificial Sequence
  Description of Artificial Sequence: Synthetic oligonucleotide
  Sense strand starting at position 3777 of SEQ ID NO: 2242
ugagcuaugagaggaauuc

SEQ ID NO: 173997 - RNA, 19 nt, Artificial Sequence
  Description of Artificial Sequence: Synthetic oligonucleotide
  Antisense strand to SEQ ID NO: 173996
gaauuccucucauagcuca

SEQ ID NO: 173998 - RNA, 19 nt, Artificial Sequence
  Description of Artificial Sequence: Synthetic oligonucleotide
  Sense strand starting at position 3766 of SEQ ID NO: 2242
aggacaaggccugagcuau

SEQ ID NO: 173999 - RNA, 19 nt, Artificial Sequence
  Description of Artificial Sequence: Synthetic oligonucleotide
  Antisense strand to SEQ ID NO: 173998
auagcucaggccuuguccu

SEQ ID NO: 174000 - RNA, 19 nt, Artificial Sequence
  Description of Artificial Sequence: Synthetic oligonucleotide
  Sense strand starting at position 3485 of SEQ ID NO: 2242
ucucaagagucuguaucaa

SEQ ID NO: 174001 - RNA, 19 nt, Artificial Sequence
  Description of Artificial Sequence: Synthetic oligonucleotide
  Antisense strand to SEQ ID NO: 174000
uugauacagacucuugaga

SEQ ID NO: 174002 - RNA, 19 nt, Artificial Sequence
  Description of Artificial Sequence: Synthetic oligonucleotide
  Sense strand starting at position 3484 of SEQ ID NO: 2242
cucucaagagucuguauca

SEQ ID NO: 174003 - RNA, 19 nt, Artificial Sequence
  Description of Artificial Sequence: Synthetic oligonucleotide
  Antisense strand to SEQ ID NO: 174002
ugauacagacucuugagag

SEQ ID NO: 174004 - RNA, 19 nt, Artificial Sequence
  Description of Artificial Sequence: Synthetic oligonucleotide
  Sense strand starting at position 3436 of SEQ ID NO: 2242
ugugaacaucugugaaguc

SEQ ID NO: 174005 - RNA, 19 nt, Artificial Sequence
  Description of Artificial Sequence: Synthetic oligonucleotide
  Antisense strand to SEQ ID NO: 174004
gacuucacagauguucaca

SEQ ID NO: 174006 - RNA, 19 nt, Artificial Sequence
  Description of Artificial Sequence: Synthetic oligonucleotide
  Sense strand starting at position 3435 of SEQ ID NO: 2242
augugaacaucugugaagu

SEQ ID NO: 174007 - RNA, 19 nt, Artificial Sequence
  Description of Artificial Sequence: Synthetic oligonucleotide
  Antisense strand to SEQ ID NO: 174006
acuucacagauguucacau

SEQ ID NO: 174008 - RNA, 19 nt, Artificial Sequence
  Description of Artificial Sequence: Synthetic oligonucleotide
  Sense strand starting at position 3430 of SEQ ID NO: 2242
guuauaugugaacaucugu

SEQ ID NO: 174009 - RNA, 19 nt, Artificial Sequence
  Description of Artificial Sequence: Synthetic oligonucleotide
  Antisense strand to SEQ ID NO: 174008
acagauguucacauauaac

SEQ ID NO: 174010 - RNA, 19 nt, Artificial Sequence
  Description of Artificial Sequence: Synthetic oligonucleotide
  Sense strand starting at position 3295 of SEQ ID NO: 2242
uccagugcucuuugaacca

SEQ ID NO: 174011 - RNA, 19 nt, Artificial Sequence
  Description of Artificial Sequence: Synthetic oligonucleotide
  Antisense strand to SEQ ID NO: 174010
ugguucaaagagcacugga

SEQ ID NO: 174012 - RNA, 19 nt, Artificial Sequence
  Description of Artificial Sequence: Synthetic oligonucleotide
  Sense strand starting at position 3041 of SEQ ID NO: 2242
ucugucaguuuauuagagu

SEQ ID NO: 174013 - RNA, 19 nt, Artificial Sequence
  Description of Artificial Sequence: Synthetic oligonucleotide
  Antisense strand to SEQ ID NO: 174012
acucuaauaaacugacaga

SEQ ID NO: 174014 - RNA, 19 nt, Artificial Sequence
  Description of Artificial Sequence: Synthetic oligonucleotide
  Sense strand starting at position 3036 of SEQ ID NO: 2242
ggaauucugucaguuuauu

SEQ ID NO: 174015 - RNA, 19 nt, Artificial Sequence
  Description of Artificial Sequence: Synthetic oligonucleotide
  Antisense strand to SEQ ID NO: 174014
aauaaacugacagaauucc

SEQ ID NO: 174016 - RNA, 19 nt, Artificial Sequence
  Description of Artificial Sequence: Synthetic oligonucleotide
  Sense strand starting at position 2979 of SEQ ID NO: 2242
auauaagcuguccauguuu

SEQ ID NO: 174017 - RNA, 19 nt, Artificial Sequence
  Description of Artificial Sequence: Synthetic oligonucleotide
  Antisense strand to SEQ ID NO: 174016
aaacauggacagcuuauau

SEQ ID NO: 174018 - RNA, 19 nt, Artificial Sequence
  Description of Artificial Sequence: Synthetic oligonucleotide
  Sense strand starting at position 2908 of SEQ ID NO: 2242
cuauauacaugcgcagaaa

SEQ ID NO: 174019 - RNA, 19 nt, Artificial Sequence
  Description of Artificial Sequence: Synthetic oligonucleotide
  Antisense strand to SEQ ID NO: 174018
uuucugcgcauguauauag

SEQ ID NO: 174020 - RNA, 19 nt, Artificial Sequence
  Description of Artificial Sequence: Synthetic oligonucleotide
  Sense strand starting at position 2771 of SEQ ID NO: 2242
uuauaauucgcagagagca

SEQ ID NO: 174021 - RNA, 19 nt, Artificial Sequence
  Description of Artificial Sequence: Synthetic oligonucleotide
  Antisense strand to SEQ ID NO: 174020
ugcucucugcgaauuauaa

SEQ ID NO: 174022 - RNA, 19 nt, Artificial Sequence
  Description of Artificial Sequence: Synthetic oligonucleotide
  Sense strand starting at position 2768 of SEQ ID NO: 2242
gcauuauaauucgcagaga

SEQ ID NO: 174023 - RNA, 19 nt, Artificial Sequence
  Description of Artificial Sequence: Synthetic oligonucleotide
  Antisense strand to SEQ ID NO: 174022
ucucugcgaauuauaaugc

SEQ ID NO: 174024 - RNA, 19 nt, Artificial Sequence
  Description of Artificial Sequence: Synthetic oligonucleotide
  Sense strand starting at position 2722 of SEQ ID NO: 2242
agauaauugucugaaacaa

SEQ ID NO: 174025 - RNA, 19 nt, Artificial Sequence
  Description of Artificial Sequence: Synthetic oligonucleotide
  Antisense strand to SEQ ID NO: 174024
uuguuucagacaauuaucu

SEQ ID NO: 174026 - RNA, 19 nt, Artificial Sequence
  Description of Artificial Sequence: Synthetic oligonucleotide
  Sense strand starting at position 2700 of SEQ ID NO: 2242
ccaagugaucugcaucaac

SEQ ID NO: 174027 - RNA, 19 nt, Artificial Sequence
  Description of Artificial Sequence: Synthetic oligonucleotide
  Antisense strand to SEQ ID NO: 174026
guugaugcagaucacuugg

SEQ ID NO: 174028 - RNA, 19 nt, Artificial Sequence
  Description of Artificial Sequence: Synthetic oligonucleotide
  Sense strand starting at position 2640 of SEQ ID NO: 2242
guagauaaaguuugacauu

SEQ ID NO: 174029 - RNA, 19 nt, Artificial Sequence
  Description of Artificial Sequence: Synthetic oligonucleotide
  Antisense strand to SEQ ID NO: 174028
aaugucaaacuuuaucuac

SEQ ID NO: 174030 - RNA, 19 nt, Artificial Sequence
  Description of Artificial Sequence: Synthetic oligonucleotide
  Sense strand starting at position 2591 of SEQ ID NO: 2242
gaaguuggauuugaauauu

SEQ ID NO: 174031 - RNA, 19 nt, Artificial Sequence
  Description of Artificial Sequence: Synthetic oligonucleotide
  Antisense strand to SEQ ID NO: 174030
aauauucaaauccaacuuc

SEQ ID NO: 174032 - RNA, 19 nt, Artificial Sequence
  Description of Artificial Sequence: Synthetic oligonucleotide
  Sense strand starting at position 2488 of SEQ ID NO: 2242
aagcguguucucuccagca

SEQ ID NO: 174033 - RNA, 19 nt, Artificial Sequence
  Description of Artificial Sequence: Synthetic oligonucleotide
  Antisense strand to SEQ ID NO: 174032
ugcuggagagaacacgcuu

SEQ ID NO: 174034 - RNA, 19 nt, Artificial Sequence
  Description of Artificial Sequence: Synthetic oligonucleotide
  Sense strand starting at position 2340 of SEQ ID NO: 2242
gggacuucaugguuagauc

SEQ ID NO: 174035 - RNA, 19 nt, Artificial Sequence
  Description of Artificial Sequence: Synthetic oligonucleotide
  Antisense strand to SEQ ID NO: 174034
gaucuaaccaugaaguccc

SEQ ID NO: 174036 - RNA, 19 nt, Artificial Sequence
  Description of Artificial Sequence: Synthetic oligonucleotide
  Sense strand starting at position 2270 of SEQ ID NO: 2242
gggcuagccacguaacaaa

SEQ ID NO: 174037 - RNA, 19 nt, Artificial Sequence
  Description of Artificial Sequence: Synthetic oligonucleotide
  Antisense strand to SEQ ID NO: 174036
uuuguuacguggcuagccc

SEQ ID NO: 174038 - RNA, 19 nt, Artificial Sequence
  Description of Artificial Sequence: Synthetic oligonucleotide
  Sense strand starting at position 2143 of SEQ ID NO: 2242
cggagagauccuggaagcu

SEQ ID NO: 174039 - RNA, 19 nt, Artificial Sequence
  Description of Artificial Sequence: Synthetic oligonucleotide
  Antisense strand to SEQ ID NO: 174038
agcuuccaggaucucuccg

SEQ ID NO: 174040 - RNA, 19 nt, Artificial Sequence
  Description of Artificial Sequence: Synthetic oligonucleotide
  Sense strand starting at position 1182 of SEQ ID NO: 2242
ugagaacugcaaggguaaa

SEQ ID NO: 174041 - RNA, 19 nt, Artificial Sequence
  Description of Artificial Sequence: Synthetic oligonucleotide
  Antisense strand to SEQ ID NO: 174040
uuuacccuugcaguucuca

SEQ ID NO: 174042 - RNA, 19 nt, Artificial Sequence
  Description of Artificial Sequence: Synthetic oligonucleotide
  Sense strand starting at position 1130 of SEQ ID NO: 2242
gucccuucccacuagacuu

SEQ ID NO: 174043 - RNA, 19 nt, Artificial Sequence
  Description of Artificial Sequence: Synthetic oligonucleotide
  Antisense strand to SEQ ID NO: 174042
aagucuagugggaagggac

SEQ ID NO: 174044 - RNA, 19 nt, Artificial Sequence
  Description of Artificial Sequence: Synthetic oligonucleotide
  Sense strand starting at position 1019 of SEQ ID NO: 2242
aacugcuggcauuacgaau

SEQ ID NO: 174045 - RNA, 19 nt, Artificial Sequence
  Description of Artificial Sequence: Synthetic oligonucleotide
  Antisense strand to SEQ ID NO: 174044
auucguaaugccagcaguu

SEQ ID NO: 174046 - RNA, 19 nt, Artificial Sequence
  Description of Artificial Sequence: Synthetic oligonucleotide
  Sense strand starting at position 1014 of SEQ ID NO: 2242
uaggaaacugcuggcauua

SEQ ID NO: 174047 - RNA, 19 nt, Artificial Sequence
  Description of Artificial Sequence: Synthetic oligonucleotide
  Antisense strand to SEQ ID NO: 174046
uaaugccagcaguuuccua

SEQ ID NO: 174048 - RNA, 19 nt, Artificial Sequence
  Description of Artificial Sequence: Synthetic oligonucleotide
  Sense strand starting at position 907 of SEQ ID NO: 2242
acucaaauguguguacaau

SEQ ID NO: 174049 - RNA, 19 nt, Artificial Sequence
  Description of Artificial Sequence: Synthetic oligonucleotide
  Antisense strand to SEQ ID NO: 174048
auuguacacacauuugagu

SEQ ID NO: 174050 - RNA, 19 nt, Artificial Sequence
  Description of Artificial Sequence: Synthetic oligonucleotide
  Sense strand starting at position 729 of SEQ ID NO: 2242
uccauuuaugacugcguaa

SEQ ID NO: 174051 - RNA, 19 nt, Artificial Sequence
  Description of Artificial Sequence: Synthetic oligonucleotide
  Antisense strand to SEQ ID NO: 174050
uuacgcagucauaaaugga

SEQ ID NO: 174052 - RNA, 19 nt, Artificial Sequence
  Description of Artificial Sequence: Synthetic oligonucleotide
  Sense strand starting at position 728 of SEQ ID NO: 2242
cuccauuuaugacugcgua

SEQ ID NO: 174053 - RNA, 19 nt, Artificial Sequence
  Description of Artificial Sequence: Synthetic oligonucleotide
  Antisense strand to SEQ ID NO: 174052
uacgcagucauaaauggag

SEQ ID NO: 174054 - RNA, 19 nt, Artificial Sequence
  Description of Artificial Sequence: Synthetic oligonucleotide
  Sense strand starting at position 622 of SEQ ID NO: 2242
accuuaaucggcuacacaa

SEQ ID NO: 174055 - RNA, 19 nt, Artificial Sequence
  Description of Artificial Sequence: Synthetic oligonucleotide
  Antisense strand to SEQ ID NO: 174054
uuguguagccgauuaaggu

SEQ ID NO: 174056 - RNA, 19 nt, Artificial Sequence
  Description of Artificial Sequence: Synthetic oligonucleotide
  Sense strand starting at position 604 of SEQ ID NO: 2242
gggauucucuaacuuauua

SEQ ID NO: 174057 - RNA, 19 nt, Artificial Sequence
  Description of Artificial Sequence: Synthetic oligonucleotide
  Antisense strand to SEQ ID NO: 174056
uaauaaguuagagaauccc

SEQ ID NO: 174058 - RNA, 19 nt, Artificial Sequence
  Description of Artificial Sequence: Synthetic oligonucleotide
  Sense strand starting at position 528 of SEQ ID NO: 2242
uuucguuucgcccaauuua

SEQ ID NO: 174059 - RNA, 19 nt, Artificial Sequence
  Description of Artificial Sequence: Synthetic oligonucleotide
  Antisense strand to SEQ ID NO: 174058
uaaauugggcgaaacgaaa

SEQ ID NO: 174060 - RNA, 19 nt, Artificial Sequence
  Description of Artificial Sequence: Synthetic oligonucleotide
  Sense strand starting at position 526 of SEQ ID NO: 2242
aauuucguuucgcccaauu

SEQ ID NO: 174061 - RNA, 19 nt, Artificial Sequence
  Description of Artificial Sequence: Synthetic oligonucleotide
  Antisense strand to SEQ ID NO: 174060
aauugggcgaaacgaaauu

SEQ ID NO: 174062 - RNA, 19 nt, Artificial Sequence
  Description of Artificial Sequence: Synthetic oligonucleotide
  Sense strand starting at position 446 of SEQ ID NO: 2242
gggcguggcaaauaaacua

SEQ ID NO: 174063 - RNA, 19 nt, Artificial Sequence
  Description of Artificial Sequence: Synthetic oligonucleotide
  Antisense strand to SEQ ID NO: 174062
uaguuuauuugccacgccc

SEQ ID NO: 174064 - RNA, 19 nt, Artificial Sequence
  Description of Artificial Sequence: Synthetic oligonucleotide
  Sense strand starting at position 423 of SEQ ID NO: 2242
uggguuaucagauggcaca

SEQ ID NO: 174065 - RNA, 19 nt, Artificial Sequence
  Description of Artificial Sequence: Synthetic oligonucleotide
  Antisense strand to SEQ ID NO: 174064
ugugccaucugauaaccca

SEQ ID NO: 174066 - RNA, 19 nt, Artificial Sequence
  Description of Artificial Sequence: Synthetic oligonucleotide
  Sense strand starting at position 416 of SEQ ID NO: 2242
uauucucuggguuaucaga

SEQ ID NO: 174067 - RNA, 19 nt, Artificial Sequence
  Description of Artificial Sequence: Synthetic oligonucleotide
  Antisense strand to SEQ ID NO: 174066
ucugauaacccagagaaua

SEQ ID NO: 174068 - RNA, 19 nt, Artificial Sequence
  Description of Artificial Sequence: Synthetic oligonucleotide
  Sense strand starting at position 59 of SEQ ID NO: 2242
ucuguacuccaggaccuau

SEQ ID NO: 174069 - RNA, 19 nt, Artificial Sequence
  Description of Artificial Sequence: Synthetic oligonucleotide
  Antisense strand to SEQ ID NO: 174068
auagguccuggaguacaga

SEQ ID NO: 174070 - RNA, 19 nt, Artificial Sequence
  Description of Artificial Sequence: Synthetic oligonucleotide
  Sense strand starting at position 58 of SEQ ID NO: 2242
aucuguacuccaggaccua

SEQ ID NO: 174071 - RNA, 19 nt, Artificial Sequence
  Description of Artificial Sequence: Synthetic oligonucleotide
  Antisense strand to SEQ ID NO: 174070
uagguccuggaguacagau

SEQ ID NO: 174072 - RNA, 19 nt, Artificial Sequence
  Description of Artificial Sequence: Synthetic oligonucleotide
  Sense strand starting at position 3880 of SEQ ID NO: 2244
uccagugcucuuugaacca

SEQ ID NO: 174073 - RNA, 19 nt, Artificial Sequence
  Description of Artificial Sequence: Synthetic oligonucleotide
  Antisense strand to SEQ ID NO: 174072
ugguucaaagagcacugga

SEQ ID NO: 174074 - RNA, 19 nt, Artificial Sequence
  Description of Artificial Sequence: Synthetic oligonucleotide
  Sense strand starting at position 3626 of SEQ ID NO: 2244
ucugucaguuuauuagagu

SEQ ID NO: 174075 - RNA, 19 nt, Artificial Sequence
  Description of Artificial Sequence: Synthetic oligonucleotide
  Antisense strand to SEQ ID NO: 174074
acucuaauaaacugacaga

SEQ ID NO: 174076 - RNA, 19 nt, Artificial Sequence
  Description of Artificial Sequence: Synthetic oligonucleotide
  Sense strand starting at position 3621 of SEQ ID NO: 2244
ggaauucugucaguuuauu

SEQ ID NO: 174077 - RNA, 19 nt, Artificial Sequence
  Description of Artificial Sequence: Synthetic oligonucleotide
  Antisense strand to SEQ ID NO: 174076
aauaaacugacagaauucc

SEQ ID NO: 174078 - RNA, 19 nt, Artificial Sequence
  Description of Artificial Sequence: Synthetic oligonucleotide
  Sense strand starting at position 3566 of SEQ ID NO: 2244
auaagcuguccauguuuau

SEQ ID NO: 174079 - RNA, 19 nt, Artificial Sequence
  Description of Artificial Sequence: Synthetic oligonucleotide
  Antisense strand to SEQ ID NO: 174078
auaaacauggacagcuuau

SEQ ID NO: 174080 - RNA, 19 nt, Artificial Sequence
  Description of Artificial Sequence: Synthetic oligonucleotide
  Sense strand starting at position 3564 of SEQ ID NO: 2244
auauaagcuguccauguuu

SEQ ID NO: 174081 - RNA, 19 nt, Artificial Sequence
  Description of Artificial Sequence: Synthetic oligonucleotide
  Antisense strand to SEQ ID NO: 174080
aaacauggacagcuuauau

SEQ ID NO: 174082 - RNA, 19 nt, Artificial Sequence
  Description of Artificial Sequence: Synthetic oligonucleotide
  Sense strand starting at position 3493 of SEQ ID NO: 2244
cuauauacaugcgcagaaa

SEQ ID NO: 174083 - RNA, 19 nt, Artificial Sequence
  Description of Artificial Sequence: Synthetic oligonucleotide
  Antisense strand to SEQ ID NO: 174082
uuucugcgcauguauauag

SEQ ID NO: 174084 - RNA, 19 nt, Artificial Sequence
  Description of Artificial Sequence: Synthetic oligonucleotide
  Sense strand starting at position 3356 of SEQ ID NO: 2244
uuauaauucgcagagagca

SEQ ID NO: 174085 - RNA, 19 nt, Artificial Sequence
  Description of Artificial Sequence: Synthetic oligonucleotide
  Antisense strand to SEQ ID NO: 174084
ugcucucugcgaauuauaa

SEQ ID NO: 174086 - RNA, 19 nt, Artificial Sequence
  Description of Artificial Sequence: Synthetic oligonucleotide
  Sense strand starting at position 3353 of SEQ ID NO: 2244
gcauuauaauucgcagaga

SEQ ID NO: 174087 - RNA, 19 nt, Artificial Sequence
  Description of Artificial Sequence: Synthetic oligonucleotide
  Antisense strand to SEQ ID NO: 174086
ucucugcgaauuauaaugc

SEQ ID NO: 174088 - RNA, 19 nt, Artificial Sequence
  Description of Artificial Sequence: Synthetic oligonucleotide
  Sense strand starting at position 3307 of SEQ ID NO: 2244
agauaauugucugaaacaa

SEQ ID NO: 174089 - RNA, 19 nt, Artificial Sequence
  Description of Artificial Sequence: Synthetic oligonucleotide
  Antisense strand to SEQ ID NO: 174088
uuguuucagacaauuaucu

SEQ ID NO: 174090 - RNA, 19 nt, Artificial Sequence
  Description of Artificial Sequence: Synthetic oligonucleotide
  Sense strand starting at position 3285 of SEQ ID NO: 2244
ccaagugaucugcaucaac

SEQ ID NO: 174091 - RNA, 19 nt, Artificial Sequence
  Description of Artificial Sequence: Synthetic oligonucleotide
  Antisense strand to SEQ ID NO: 174090
guugaugcagaucacuugg

SEQ ID NO: 174092 - RNA, 19 nt, Artificial Sequence
  Description of Artificial Sequence: Synthetic oligonucleotide
  Sense strand starting at position 3225 of SEQ ID NO: 2244
guagauaaaguuugacauu

SEQ ID NO: 174093 - RNA, 19 nt, Artificial Sequence
  Description of Artificial Sequence: Synthetic oligonucleotide
  Antisense strand to SEQ ID NO: 174092
aaugucaaacuuuaucuac

SEQ ID NO: 174094 - RNA, 19 nt, Artificial Sequence
  Description of Artificial Sequence: Synthetic oligonucleotide
  Sense strand starting at position 3193 of SEQ ID NO: 2244
uuuggugcuggcugagaau

SEQ ID NO: 174095 - RNA, 19 nt, Artificial Sequence
  Description of Artificial Sequence: Synthetic oligonucleotide
  Antisense strand to SEQ ID NO: 174094
auucucagccagcaccaaa

SEQ ID NO: 174096 - RNA, 19 nt, Artificial Sequence
  Description of Artificial Sequence: Synthetic oligonucleotide
  Sense strand starting at position 3176 of SEQ ID NO: 2244
gaaguuggauuugaauauu

SEQ ID NO: 174097 - RNA, 19 nt, Artificial Sequence
  Description of Artificial Sequence: Synthetic oligonucleotide
  Antisense strand to SEQ ID NO: 174096
aauauucaaauccaacuuc

SEQ ID NO: 174098 - RNA, 19 nt, Artificial Sequence
  Description of Artificial Sequence: Synthetic oligonucleotide
  Sense strand starting at position 3073 of SEQ ID NO: 2244
aagcguguucucuccagca

SEQ ID NO: 174099 - RNA, 19 nt, Artificial Sequence
  Description of Artificial Sequence: Synthetic oligonucleotide
  Antisense strand to SEQ ID NO: 174098
ugcuggagagaacacgcuu

SEQ ID NO: 174100 - RNA, 19 nt, Artificial Sequence
  Description of Artificial Sequence: Synthetic oligonucleotide
  Sense strand starting at position 2925 of SEQ ID NO: 2244
gggacuucaugguuagauc

SEQ ID NO: 174101 - RNA, 19 nt, Artificial Sequence
  Description of Artificial Sequence: Synthetic oligonucleotide
  Antisense strand to SEQ ID NO: 174100
gaucuaaccaugaaguccc

SEQ ID NO: 174102 - RNA, 19 nt, Artificial Sequence
  Description of Artificial Sequence: Synthetic oligonucleotide
  Sense strand starting at position 2855 of SEQ ID NO: 2244
gggcuagccacguaacaaa

SEQ ID NO: 174103 - RNA, 19 nt, Artificial Sequence
  Description of Artificial Sequence: Synthetic oligonucleotide
  Antisense strand to SEQ ID NO: 174102
uuuguuacguggcuagccc

SEQ ID NO: 174104 - RNA, 19 nt, Artificial Sequence
  Description of Artificial Sequence: Synthetic oligonucleotide
  Sense strand starting at position 2728 of SEQ ID NO: 2244
cggagagauccuggaagcu

SEQ ID NO: 174105 - RNA, 19 nt, Artificial Sequence
  Description of Artificial Sequence: Synthetic oligonucleotide
  Antisense strand to SEQ ID NO: 174104
agcuuccaggaucucuccg

SEQ ID NO: 174106 - RNA, 19 nt, Artificial Sequence
  Description of Artificial Sequence: Synthetic oligonucleotide
  Sense strand starting at position 1767 of SEQ ID NO: 2244
ugagaacugcaaggguaaa

SEQ ID NO: 174107 - RNA, 19 nt, Artificial Sequence
  Description of Artificial Sequence: Synthetic oligonucleotide
  Antisense strand to SEQ ID NO: 174106
uuuacccuugcaguucuca

SEQ ID NO: 174108 - RNA, 19 nt, Artificial Sequence
  Description of Artificial Sequence: Synthetic oligonucleotide
  Sense strand starting at position 1715 of SEQ ID NO: 2244
gucccuucccacuagacuu

SEQ ID NO: 174109 - RNA, 19 nt, Artificial Sequence
  Description of Artificial Sequence: Synthetic oligonucleotide
  Antisense strand to SEQ ID NO: 174108
aagucuagugggaagggac

SEQ ID NO: 174110 - RNA, 19 nt, Artificial Sequence
  Description of Artificial Sequence: Synthetic oligonucleotide
  Sense strand starting at position 1604 of SEQ ID NO: 2244
aacugcuggcauuacgaau

SEQ ID NO: 174111 - RNA, 19 nt, Artificial Sequence
  Description of Artificial Sequence: Synthetic oligonucleotide
  Antisense strand to SEQ ID NO: 174110
auucguaaugccagcaguu

SEQ ID NO: 174112 - RNA, 19 nt, Artificial Sequence
  Description of Artificial Sequence: Synthetic oligonucleotide
  Sense strand starting at position 1599 of SEQ ID NO: 2244
uaggaaacugcuggcauua

SEQ ID NO: 174113 - RNA, 19 nt, Artificial Sequence
  Description of Artificial Sequence: Synthetic oligonucleotide
  Antisense strand to SEQ ID NO: 174112
uaaugccagcaguuuccua

SEQ ID NO: 174114 - RNA, 19 nt, Artificial Sequence
  Description of Artificial Sequence: Synthetic oligonucleotide
  Sense strand starting at position 1492 of SEQ ID NO: 2244
acucaaauguguguacaau

SEQ ID NO: 174115 - RNA, 19 nt, Artificial Sequence
  Description of Artificial Sequence: Synthetic oligonucleotide
  Antisense strand to SEQ ID NO: 174114
auuguacacacauuugagu

SEQ ID NO: 174116 - RNA, 19 nt, Artificial Sequence
  Description of Artificial Sequence: Synthetic oligonucleotide
  Sense strand starting at position 1314 of SEQ ID NO: 2244
uccauuuaugacugcguaa

SEQ ID NO: 174117 - RNA, 19 nt, Artificial Sequence
  Description of Artificial Sequence: Synthetic oligonucleotide
  Antisense strand to SEQ ID NO: 174116
uuacgcagucauaaaugga

SEQ ID NO: 174118 - RNA, 19 nt, Artificial Sequence
  Description of Artificial Sequence: Synthetic oligonucleotide
  Sense strand starting at position 1313 of SEQ ID NO: 2244
cuccauuuaugacugcgua

SEQ ID NO: 174119 - RNA, 19 nt, Artificial Sequence
  Description of Artificial Sequence: Synthetic oligonucleotide
  Antisense strand to SEQ ID NO: 174118
uacgcagucauaaauggag

SEQ ID NO: 174120 - RNA, 19 nt, Artificial Sequence
  Description of Artificial Sequence: Synthetic oligonucleotide
  Sense strand starting at position 1207 of SEQ ID NO: 2244
accuuaaucggcuacacaa

SEQ ID NO: 174121 - RNA, 19 nt, Artificial Sequence
  Description of Artificial Sequence: Synthetic oligonucleotide
  Antisense strand to SEQ ID NO: 174120
uuguguagccgauuaaggu

SEQ ID NO: 174122 - RNA, 19 nt, Artificial Sequence
  Description of Artificial Sequence: Synthetic oligonucleotide
  Sense strand starting at position 1189 of SEQ ID NO: 2244
gggauucucuaacuuauua

SEQ ID NO: 174123 - RNA, 19 nt, Artificial Sequence
  Description of Artificial Sequence: Synthetic oligonucleotide
  Antisense strand to SEQ ID NO: 174122
uaauaaguuagagaauccc

SEQ ID NO: 174124 - RNA, 19 nt, Artificial Sequence
  Description of Artificial Sequence: Synthetic oligonucleotide
  Sense strand starting at position 1113 of SEQ ID NO: 2244
uuucguuucgcccaauuua

SEQ ID NO: 174125 - RNA, 19 nt, Artificial Sequence
  Description of Artificial Sequence: Synthetic oligonucleotide
  Antisense strand to SEQ ID NO: 174124
uaaauugggcgaaacgaaa

SEQ ID NO: 174126 - RNA, 19 nt, Artificial Sequence
  Description of Artificial Sequence: Synthetic oligonucleotide
  Sense strand starting at position 1111 of SEQ ID NO: 2244
aauuucguuucgcccaauu

SEQ ID NO: 174127 - RNA, 19 nt, Artificial Sequence
  Description of Artificial Sequence: Synthetic oligonucleotide
  Antisense strand to SEQ ID NO: 174126
aauugggcgaaacgaaauu

SEQ ID NO: 174128 - RNA, 19 nt, Artificial Sequence
  Description of Artificial Sequence: Synthetic oligonucleotide
  Sense strand starting at position 1031 of SEQ ID NO: 2244
gggcguggcaaauaaacua

SEQ ID NO: 174129 - RNA, 19 nt, Artificial Sequence
  Description of Artificial Sequence: Synthetic oligonucleotide
  Antisense strand to SEQ ID NO: 174128
uaguuuauuugccacgccc

SEQ ID NO: 174130 - RNA, 19 nt, Artificial Sequence
  Description of Artificial Sequence: Synthetic oligonucleotide
  Sense strand starting at position 1008 of SEQ ID NO: 2244
uggguuaucagauggcaca

SEQ ID NO: 174131 - RNA, 19 nt, Artificial Sequence
  Description of Artificial Sequence: Synthetic oligonucleotide
  Antisense strand to SEQ ID NO: 174130
ugugccaucugauaaccca

SEQ ID NO: 174132 - RNA, 19 nt, Artificial Sequence
  Description of Artificial Sequence: Synthetic oligonucleotide
  Sense strand starting at position 1001 of SEQ ID NO: 2244
uauucucuggguuaucaga

SEQ ID NO: 174133 - RNA, 19 nt, Artificial Sequence
  Description of Artificial Sequence: Synthetic oligonucleotide
  Antisense strand to SEQ ID NO: 174132
ucugauaacccagagaaua

SEQ ID NO: 174134 - RNA, 19 nt, Artificial Sequence
  Description of Artificial Sequence: Synthetic oligonucleotide
  Sense strand starting at position 960 of SEQ ID NO: 2244
aggaguugcaggcguagaa

SEQ ID NO: 174135 - RNA, 19 nt, Artificial Sequence
  Description of Artificial Sequence: Synthetic oligonucleotide
  Antisense strand to SEQ ID NO: 174134
uucuacgccugcaacuccu

SEQ ID NO: 174136 - RNA, 19 nt, Artificial Sequence
  Description of Artificial Sequence: Synthetic oligonucleotide
  Sense strand starting at position 644 of SEQ ID NO: 2244
ucuguacuccaggaccuau

SEQ ID NO: 174137 - RNA, 19 nt, Artificial Sequence
  Description of Artificial Sequence: Synthetic oligonucleotide
  Antisense strand to SEQ ID NO: 174136
auagguccuggaguacaga

SEQ ID NO: 174138 - RNA, 19 nt, Artificial Sequence
  Description of Artificial Sequence: Synthetic oligonucleotide
  Sense strand starting at position 643 of SEQ ID NO: 2244
aucuguacuccaggaccua

SEQ ID NO: 174139 - RNA, 19 nt, Artificial Sequence
  Description of Artificial Sequence: Synthetic oligonucleotide
  Antisense strand to SEQ ID NO: 174138
uagguccuggaguacagau

SEQ ID NO: 174140 - RNA, 19 nt, Artificial Sequence
  Description of Artificial Sequence: Synthetic oligonucleotide
  Sense strand starting at position 517 of SEQ ID NO: 2244
ggcucuuaaucagucuaac

SEQ ID NO: 174141 - RNA, 19 nt, Artificial Sequence
  Description of Artificial Sequence: Synthetic oligonucleotide
  Antisense strand to SEQ ID NO: 174140
guuagacugauuaagagcc

SEQ ID NO: 174142 - RNA, 19 nt, Artificial Sequence
  Description of Artificial Sequence: Synthetic oligonucleotide
  Sense strand starting at position 439 of SEQ ID NO: 2244
cuaguuaucugguuacagg

SEQ ID NO: 174143 - RNA, 19 nt, Artificial Sequence
  Description of Artificial Sequence: Synthetic oligonucleotide
  Antisense strand to SEQ ID NO: 174142
ccuguaaccagauaacuag

SEQ ID NO: 174144 - RNA, 19 nt, Artificial Sequence
  Description of Artificial Sequence: Synthetic oligonucleotide
  Sense strand starting at position 435 of SEQ ID NO: 2244
ccuacuaguuaucugguua

SEQ ID NO: 174145 - RNA, 19 nt, Artificial Sequence
  Description of Artificial Sequence: Synthetic oligonucleotide
  Antisense strand to SEQ ID NO: 174144
uaaccagauaacuaguagg

SEQ ID NO: 174146 - RNA, 19 nt, Artificial Sequence
  Description of Artificial Sequence: Synthetic oligonucleotide
  Sense strand starting at position 88 of SEQ ID NO: 2244
ugggacuaauuuggaaaga

SEQ ID NO: 174147 - RNA, 19 nt, Artificial Sequence
  Description of Artificial Sequence: Synthetic oligonucleotide
  Antisense strand to SEQ ID NO: 174146
ucuuuccaaauuaguccca

SEQ ID NO: 174148 - RNA, 19 nt, Artificial Sequence
  Description of Artificial Sequence: Synthetic oligonucleotide
  Sense strand starting at position 35 of SEQ ID NO: 2244
aguaucccaguuugagaua

SEQ ID NO: 174149 - RNA, 19 nt, Artificial Sequence
  Description of Artificial Sequence: Synthetic oligonucleotide
  Antisense strand to SEQ ID NO: 174148
uaucucaaacugggauacu

SEQ ID NO: 174150 - RNA, 19 nt, Artificial Sequence
  Description of Artificial Sequence: Synthetic oligonucleotide
  Sense strand starting at position 11 of SEQ ID NO: 2244
aguuuacucuucucagcca

SEQ ID NO: 174151 - RNA, 19 nt, Artificial Sequence
  Description of Artificial Sequence: Synthetic oligonucleotide
  Antisense strand to SEQ ID NO: 174150
uggcugagaagaguaaacu

SEQ ID NO: 174152 - RNA, 19 nt, Artificial Sequence
  Description of Artificial Sequence: Synthetic oligonucleotide
  Sense strand starting at position 3833 of SEQ ID NO: 2245
aacccauucuguuucgaag

SEQ ID NO: 174153 - RNA, 19 nt, Artificial Sequence
  Description of Artificial Sequence: Synthetic oligonucleotide
  Antisense strand to SEQ ID NO: 174152
cuucgaaacagaauggguu

SEQ ID NO: 174154 - RNA, 19 nt, Artificial Sequence
  Description of Artificial Sequence: Synthetic oligonucleotide
  Sense strand starting at position 3767 of SEQ ID NO: 2245
ucaugacucuguguuacuu

SEQ ID NO: 174155 - RNA, 19 nt, Artificial Sequence
  Description of Artificial Sequence: Synthetic oligonucleotide
  Antisense strand to SEQ ID NO: 174154
aaguaacacagagucauga

SEQ ID NO: 174156 - RNA, 19 nt, Artificial Sequence
  Description of Artificial Sequence: Synthetic oligonucleotide
  Sense strand starting at position 3344 of SEQ ID NO: 2245
guaaucccucaacgacaau

SEQ ID NO: 174157 - RNA, 19 nt, Artificial Sequence
  Description of Artificial Sequence: Synthetic oligonucleotide
  Antisense strand to SEQ ID NO: 174156
auugucguugagggauuac

SEQ ID NO: 174158 - RNA, 19 nt, Artificial Sequence
  Description of Artificial Sequence: Synthetic oligonucleotide
  Sense strand starting at position 3341 of SEQ ID NO: 2245
aguguaaucccucaacgac

SEQ ID NO: 174159 - RNA, 19 nt, Artificial Sequence
  Description of Artificial Sequence: Synthetic oligonucleotide
  Antisense strand to SEQ ID NO: 174158
gucguugagggauuacacu

SEQ ID NO: 174160 - RNA, 19 nt, Artificial Sequence
  Description of Artificial Sequence: Synthetic oligonucleotide
  Sense strand starting at position 3336 of SEQ ID NO: 2245
uuaucaguguaaucccuca

SEQ ID NO: 174161 - RNA, 19 nt, Artificial Sequence
  Description of Artificial Sequence: Synthetic oligonucleotide
  Antisense strand to SEQ ID NO: 174160
ugagggauuacacugauaa

SEQ ID NO: 174162 - RNA, 19 nt, Artificial Sequence
  Description of Artificial Sequence: Synthetic oligonucleotide
  Sense strand starting at position 3222 of SEQ ID NO: 2245
guagucauacuagaauagu

SEQ ID NO: 174163 - RNA, 19 nt, Artificial Sequence
  Description of Artificial Sequence: Synthetic oligonucleotide
  Antisense strand to SEQ ID NO: 174162
acuauucuaguaugacuac

SEQ ID NO: 174164 - RNA, 19 nt, Artificial Sequence
  Description of Artificial Sequence: Synthetic oligonucleotide
  Sense strand starting at position 3214 of SEQ ID NO: 2245
cuagaauaguagucauacu

SEQ ID NO: 174165 - RNA, 19 nt, Artificial Sequence
  Description of Artificial Sequence: Synthetic oligonucleotide
  Antisense strand to SEQ ID NO: 174164
aguaugacuacuauucuag

SEQ ID NO: 174166 - RNA, 19 nt, Artificial Sequence
  Description of Artificial Sequence: Synthetic oligonucleotide
  Sense strand starting at position 3208 of SEQ ID NO: 2245
gucauacuagaauaguagu

SEQ ID NO: 174167 - RNA, 19 nt, Artificial Sequence
  Description of Artificial Sequence: Synthetic oligonucleotide
  Antisense strand to SEQ ID NO: 174166
acuacuauucuaguaugac

SEQ ID NO: 174168 - RNA, 19 nt, Artificial Sequence
  Description of Artificial Sequence: Synthetic oligonucleotide
  Sense strand starting at position 3205 of SEQ ID NO: 2245
guggucauacuagaauagu

SEQ ID NO: 174169 - RNA, 19 nt, Artificial Sequence
  Description of Artificial Sequence: Synthetic oligonucleotide
  Antisense strand to SEQ ID NO: 174168
acuauucuaguaugaccac

SEQ ID NO: 174170 - RNA, 19 nt, Artificial Sequence
  Description of Artificial Sequence: Synthetic oligonucleotide
  Sense strand starting at position 3197 of SEQ ID NO: 2245
auagaauaguggucauacu

SEQ ID NO: 174171 - RNA, 19 nt, Artificial Sequence
  Description of Artificial Sequence: Synthetic oligonucleotide
  Antisense strand to SEQ ID NO: 174170
aguaugaccacuauucuau

SEQ ID NO: 174172 - RNA, 19 nt, Artificial Sequence
  Description of Artificial Sequence: Synthetic oligonucleotide
  Sense strand starting at position 3032 of SEQ ID NO: 2245
gaauguuuaucauuagaga

SEQ ID NO: 174173 - RNA, 19 nt, Artificial Sequence
  Description of Artificial Sequence: Synthetic oligonucleotide
  Antisense strand to SEQ ID NO: 174172
ucucuaaugauaaacauuc

SEQ ID NO: 174174 - RNA, 19 nt, Artificial Sequence
  Description of Artificial Sequence: Synthetic oligonucleotide
  Sense strand starting at position 2927 of SEQ ID NO: 2245
gcguguauuugcucauuua

SEQ ID NO: 174175 - RNA, 19 nt, Artificial Sequence
  Description of Artificial Sequence: Synthetic oligonucleotide
  Antisense strand to SEQ ID NO: 174174
uaaaugagcaaauacacgc

SEQ ID NO: 174176 - RNA, 19 nt, Artificial Sequence
  Description of Artificial Sequence: Synthetic oligonucleotide
  Sense strand starting at position 2917 of SEQ ID NO: 2245
uggguaauuugcguguauu

SEQ ID NO: 174177 - RNA, 19 nt, Artificial Sequence
  Description of Artificial Sequence: Synthetic oligonucleotide
  Antisense strand to SEQ ID NO: 174176
aauacacgcaaauuaccca

SEQ ID NO: 174178 - RNA, 19 nt, Artificial Sequence
  Description of Artificial Sequence: Synthetic oligonucleotide
  Sense strand starting at position 2416 of SEQ ID NO: 2245
ucauuauguaagggagcau

SEQ ID NO: 174179 - RNA, 19 nt, Artificial Sequence
  Description of Artificial Sequence: Synthetic oligonucleotide
  Antisense strand to SEQ ID NO: 174178
augcucccuuacauaauga

SEQ ID NO: 174180 - RNA, 19 nt, Artificial Sequence
  Description of Artificial Sequence: Synthetic oligonucleotide
  Sense strand starting at position 2404 of SEQ ID NO: 2245
cagccagucgcgucauuau

SEQ ID NO: 174181 - RNA, 19 nt, Artificial Sequence
  Description of Artificial Sequence: Synthetic oligonucleotide
  Antisense strand to SEQ ID NO: 174180
auaaugacgcgacuggcug

SEQ ID NO: 174182 - RNA, 19 nt, Artificial Sequence
  Description of Artificial Sequence: Synthetic oligonucleotide
  Sense strand starting at position 2336 of SEQ ID NO: 2245
ucuagcaauguaugaaauc

SEQ ID NO: 174183 - RNA, 19 nt, Artificial Sequence
  Description of Artificial Sequence: Synthetic oligonucleotide
  Antisense strand to SEQ ID NO: 174182
gauuucauacauugcuaga

SEQ ID NO: 174184 - RNA, 19 nt, Artificial Sequence
  Description of Artificial Sequence: Synthetic oligonucleotide
  Sense strand starting at position 2334 of SEQ ID NO: 2245
cgucuagcaauguaugaaa

SEQ ID NO: 174185 - RNA, 19 nt, Artificial Sequence
  Description of Artificial Sequence: Synthetic oligonucleotide
  Antisense strand to SEQ ID NO: 174184
uuucauacauugcuagacg

SEQ ID NO: 174186 - RNA, 19 nt, Artificial Sequence
  Description of Artificial Sequence: Synthetic oligonucleotide
  Sense strand starting at position 2325 of SEQ ID NO: 2245
guaggcucucgucuagcaa

SEQ ID NO: 174187 - RNA, 19 nt, Artificial Sequence
  Description of Artificial Sequence: Synthetic oligonucleotide
  Antisense strand to SEQ ID NO: 174186
uugcuagacgagagccuac

SEQ ID NO: 174188 - RNA, 19 nt, Artificial Sequence
  Description of Artificial Sequence: Synthetic oligonucleotide
  Sense strand starting at position 2246 of SEQ ID NO: 2245
gaagguaugcuuuauuauu

SEQ ID NO: 174189 - RNA, 19 nt, Artificial Sequence
  Description of Artificial Sequence: Synthetic oligonucleotide
  Antisense strand to SEQ ID NO: 174188
aauaauaaagcauaccuuc

SEQ ID NO: 174190 - RNA, 19 nt, Artificial Sequence
  Description of Artificial Sequence: Synthetic oligonucleotide
  Sense strand starting at position 2235 of SEQ ID NO: 2245
cgccuuguugcgaagguau

SEQ ID NO: 174191 - RNA, 19 nt, Artificial Sequence
  Description of Artificial Sequence: Synthetic oligonucleotide
  Antisense strand to SEQ ID NO: 174190
auaccuucgcaacaaggcg

SEQ ID NO: 174192 - RNA, 19 nt, Artificial Sequence
  Description of Artificial Sequence: Synthetic oligonucleotide
  Sense strand starting at position 2127 of SEQ ID NO: 2245
ggaagaaugcgccaaucau

SEQ ID NO: 174193 - RNA, 19 nt, Artificial Sequence
  Description of Artificial Sequence: Synthetic oligonucleotide
  Antisense strand to SEQ ID NO: 174192
augauuggcgcauucuucc

SEQ ID NO: 174194 - RNA, 19 nt, Artificial Sequence
  Description of Artificial Sequence: Synthetic oligonucleotide
  Sense strand starting at position 803 of SEQ ID NO: 2245
auaacagucguacacaaau

SEQ ID NO: 174195 - RNA, 19 nt, Artificial Sequence
  Description of Artificial Sequence: Synthetic oligonucleotide
  Antisense strand to SEQ ID NO: 174194
auuuguguacgacuguuau

SEQ ID NO: 174196 - RNA, 19 nt, Artificial Sequence
  Description of Artificial Sequence: Synthetic oligonucleotide
  Sense strand starting at position 742 of SEQ ID NO: 2245
caccgaaaucuguaucaag

SEQ ID NO: 174197 - RNA, 19 nt, Artificial Sequence
  Description of Artificial Sequence: Synthetic oligonucleotide
  Antisense strand to SEQ ID NO: 174196
cuugauacagauuucggug

SEQ ID NO: 174198 - RNA, 19 nt, Artificial Sequence
  Description of Artificial Sequence: Synthetic oligonucleotide
  Sense strand starting at position 709 of SEQ ID NO: 2245
ugagaauucuucuuuguaa

SEQ ID NO: 174199 - RNA, 19 nt, Artificial Sequence
  Description of Artificial Sequence: Synthetic oligonucleotide
  Antisense strand to SEQ ID NO: 174198
uuacaaagaagaauucuca

SEQ ID NO: 174200 - RNA, 19 nt, Artificial Sequence
  Description of Artificial Sequence: Synthetic oligonucleotide
  Sense strand starting at position 706 of SEQ ID NO: 2245
ugcugagaauucuucuuug

SEQ ID NO: 174201 - RNA, 19 nt, Artificial Sequence
  Description of Artificial Sequence: Synthetic oligonucleotide
  Antisense strand to SEQ ID NO: 174200
caaagaagaauucucagca

SEQ ID NO: 174202 - RNA, 19 nt, Artificial Sequence
  Description of Artificial Sequence: Synthetic oligonucleotide
  Sense strand starting at position 601 of SEQ ID NO: 2245
agacaacuugggugucauc

SEQ ID NO: 174203 - RNA, 19 nt, Artificial Sequence
  Description of Artificial Sequence: Synthetic oligonucleotide
  Antisense strand to SEQ ID NO: 174202
gaugacacccaaguugucu

SEQ ID NO: 174204 - RNA, 19 nt, Artificial Sequence
  Description of Artificial Sequence: Synthetic oligonucleotide
  Sense strand starting at position 600 of SEQ ID NO: 2245
aagacaacuugggugucau

SEQ ID NO: 174205 - RNA, 19 nt, Artificial Sequence
  Description of Artificial Sequence: Synthetic oligonucleotide
  Antisense strand to SEQ ID NO: 174204
augacacccaaguugucuu

SEQ ID NO: 174206 - RNA, 19 nt, Artificial Sequence
  Description of Artificial Sequence: Synthetic oligonucleotide
  Sense strand starting at position 585 of SEQ ID NO: 2245
guguacaguuauguuaaga

SEQ ID NO: 174207 - RNA, 19 nt, Artificial Sequence
  Description of Artificial Sequence: Synthetic oligonucleotide
  Antisense strand to SEQ ID NO: 174206
ucuuaacauaacuguacac

SEQ ID NO: 174208 - RNA, 19 nt, Artificial Sequence
  Description of Artificial Sequence: Synthetic oligonucleotide
  Sense strand starting at position 536 of SEQ ID NO: 2245
gcuuguggaaagcaaucau

SEQ ID NO: 174209 - RNA, 19 nt, Artificial Sequence
  Description of Artificial Sequence: Synthetic oligonucleotide
  Antisense strand to SEQ ID NO: 174208
augauugcuuuccacaagc

SEQ ID NO: 174210 - RNA, 19 nt, Artificial Sequence
  Description of Artificial Sequence: Synthetic oligonucleotide
  Sense strand starting at position 377 of SEQ ID NO: 2245
agaaauguuccuggcacau

SEQ ID NO: 174211 - RNA, 19 nt, Artificial Sequence
  Description of Artificial Sequence: Synthetic oligonucleotide
  Antisense strand to SEQ ID NO: 174210
augugccaggaacauuucu

SEQ ID NO: 174212 - RNA, 19 nt, Artificial Sequence
  Description of Artificial Sequence: Synthetic oligonucleotide
  Sense strand starting at position 260 of SEQ ID NO: 2245
cuccaucuauguguagaaa

SEQ ID NO: 174213 - RNA, 19 nt, Artificial Sequence
  Description of Artificial Sequence: Synthetic oligonucleotide
  Antisense strand to SEQ ID NO: 174212
uuucuacacauagauggag

SEQ ID NO: 174214 - RNA, 19 nt, Artificial Sequence
  Description of Artificial Sequence: Synthetic oligonucleotide
  Sense strand starting at position 220 of SEQ ID NO: 2245
gaauguauaguguauguaa

SEQ ID NO: 174215 - RNA, 19 nt, Artificial Sequence
  Description of Artificial Sequence: Synthetic oligonucleotide
  Antisense strand to SEQ ID NO: 174214
uuacauacacuauacauuc

SEQ ID NO: 174216 - RNA, 19 nt, Artificial Sequence
  Description of Artificial Sequence: Synthetic oligonucleotide
  Sense strand starting at position 162 of SEQ ID NO: 2245
uguuaaguuggucaaauau

SEQ ID NO: 174217 - RNA, 19 nt, Artificial Sequence
  Description of Artificial Sequence: Synthetic oligonucleotide
  Antisense strand to SEQ ID NO: 174216
auauuugaccaacuuaaca

SEQ ID NO: 174218 - RNA, 19 nt, Artificial Sequence
  Description of Artificial Sequence: Synthetic oligonucleotide
  Sense strand starting at position 161 of SEQ ID NO: 2245
auguuaaguuggucaaaua

SEQ ID NO: 174219 - RNA, 19 nt, Artificial Sequence
  Description of Artificial Sequence: Synthetic oligonucleotide
  Antisense strand to SEQ ID NO: 174218
uauuugaccaacuuaacau

SEQ ID NO: 174220 - RNA, 19 nt, Artificial Sequence
  Description of Artificial Sequence: Synthetic oligonucleotide
  Sense strand starting at position 160 of SEQ ID NO: 2245
aauguuaaguuggucaaau

SEQ ID NO: 174221 - RNA, 19 nt, Artificial Sequence
  Description of Artificial Sequence: Synthetic oligonucleotide
  Antisense strand to SEQ ID NO: 174220
auuugaccaacuuaacauu

SEQ ID NO: 174222 - RNA, 19 nt, Artificial Sequence
  Description of Artificial Sequence: Synthetic oligonucleotide
  Sense strand starting at position 159 of SEQ ID NO: 2245
uaauguuaaguuggucaaa

SEQ ID NO: 174223 - RNA, 19 nt, Artificial Sequence
  Description of Artificial Sequence: Synthetic oligonucleotide
  Antisense strand to SEQ ID NO: 174222
uuugaccaacuuaacauua

SEQ ID NO: 174224 - RNA, 19 nt, Artificial Sequence
  Description of Artificial Sequence: Synthetic oligonucleotide
  Sense strand starting at position 113 of SEQ ID NO: 2245
ucuaccaacucgguuuaau

SEQ ID NO: 174225 - RNA, 19 nt, Artificial Sequence
  Description of Artificial Sequence: Synthetic oligonucleotide
  Antisense strand to SEQ ID NO: 174224
auuaaaccgaguugguaga

SEQ ID NO: 174226 - RNA, 19 nt, Artificial Sequence
  Description of Artificial Sequence: Synthetic oligonucleotide
  Sense strand starting at position 51 of SEQ ID NO: 2245
ggagguacaucaucuuaug

SEQ ID NO: 174227 - RNA, 19 nt, Artificial Sequence
  Description of Artificial Sequence: Synthetic oligonucleotide
  Antisense strand to SEQ ID NO: 174226
cauaagaugauguaccucc

SEQ ID NO: 174228 - RNA, 19 nt, Artificial Sequence
  Description of Artificial Sequence: Synthetic oligonucleotide
  Sense strand starting at position 42 of SEQ ID NO: 2245
gcuauaaauggagguacau

SEQ ID NO: 174229 - RNA, 19 nt, Artificial Sequence
  Description of Artificial Sequence: Synthetic oligonucleotide
  Antisense strand to SEQ ID NO: 174228
auguaccuccauuuauagc

SEQ ID NO: 174230 - RNA, 19 nt, Artificial Sequence
  Description of Artificial Sequence: Synthetic oligonucleotide
  Sense strand starting at position 39 of SEQ ID NO: 2245
cuugcuauaaauggaggua

SEQ ID NO: 174231 - RNA, 19 nt, Artificial Sequence
  Description of Artificial Sequence: Synthetic oligonucleotide
  Antisense strand to SEQ ID NO: 174230
uaccuccauuuauagcaag

SEQ ID NO: 174232 - RNA, 19 nt, Artificial Sequence
  Description of Artificial Sequence: Synthetic oligonucleotide
  Sense strand starting at position 296 of SEQ ID NO: 2246
cgugguuagaagcaguauu

SEQ ID NO: 174233 - RNA, 19 nt, Artificial Sequence
  Description of Artificial Sequence: Synthetic oligonucleotide
  Antisense strand to SEQ ID NO: 174232
aauacugcuucuaaccacg

SEQ ID NO: 174234 - RNA, 19 nt, Artificial Sequence
  Description of Artificial Sequence: Synthetic oligonucleotide
  Sense strand starting at position 318 of SEQ ID NO: 2246
ugauuuaagucugaaguua

SEQ ID NO: 174235 - RNA, 19 nt, Artificial Sequence
  Description of Artificial Sequence: Synthetic oligonucleotide
  Antisense strand to SEQ ID NO: 174234
uaacuucagacuuaaauca

SEQ ID NO: 174236 - RNA, 19 nt, Artificial Sequence
  Description of Artificial Sequence: Synthetic oligonucleotide
  Sense strand starting at position 348 of SEQ ID NO: 2246
uucuuucucgauuguuaca

SEQ ID NO: 174237 - RNA, 19 nt, Artificial Sequence
  Description of Artificial Sequence: Synthetic oligonucleotide
  Antisense strand to SEQ ID NO: 174236
uguaacaaucgagaaagaa

SEQ ID NO: 174238 - RNA, 19 nt, Artificial Sequence
  Description of Artificial Sequence: Synthetic oligonucleotide
  Sense strand starting at position 422 of SEQ ID NO: 2246
ugauaaucuccaugcaguu

SEQ ID NO: 174239 - RNA, 19 nt, Artificial Sequence
  Description of Artificial Sequence: Synthetic oligonucleotide
  Antisense strand to SEQ ID NO: 174238
aacugcauggagauuauca

SEQ ID NO: 174240 - RNA, 19 nt, Artificial Sequence
  Description of Artificial Sequence: Synthetic oligonucleotide
  Sense strand starting at position 543 of SEQ ID NO: 2246
ggaacugucuccguagcca

SEQ ID NO: 174241 - RNA, 19 nt, Artificial Sequence
  Description of Artificial Sequence: Synthetic oligonucleotide
  Antisense strand to SEQ ID NO: 174240
uggcuacggagacaguucc

SEQ ID NO: 174242 - RNA, 19 nt, Artificial Sequence
  Description of Artificial Sequence: Synthetic oligonucleotide
  Sense strand starting at position 735 of SEQ ID NO: 2246
ucaagcaauuuagaauguu

SEQ ID NO: 174243 - RNA, 19 nt, Artificial Sequence
  Description of Artificial Sequence: Synthetic oligonucleotide
  Antisense strand to SEQ ID NO: 174242
aacauucuaaauugcuuga

SEQ ID NO: 174244 - RNA, 19 nt, Artificial Sequence
  Description of Artificial Sequence: Synthetic oligonucleotide
  Sense strand starting at position 744 of SEQ ID NO: 2246
uuagaauguugaguaaaca

SEQ ID NO: 174245 - RNA, 19 nt, Artificial Sequence
  Description of Artificial Sequence: Synthetic oligonucleotide
  Antisense strand to SEQ ID NO: 174244
uguuuacucaacauucuaa

SEQ ID NO: 174246 - RNA, 19 nt, Artificial Sequence
  Description of Artificial Sequence: Synthetic oligonucleotide
  Sense strand starting at position 761 of SEQ ID NO: 2246
cagaguucuuaggcugaaa

SEQ ID NO: 174247 - RNA, 19 nt, Artificial Sequence
  Description of Artificial Sequence: Synthetic oligonucleotide
  Antisense strand to SEQ ID NO: 174246
uuucagccuaagaacucug

SEQ ID NO: 174248 - RNA, 19 nt, Artificial Sequence
  Description of Artificial Sequence: Synthetic oligonucleotide
  Sense strand starting at position 786 of SEQ ID NO: 2246
cgugaagaggguuagguau

SEQ ID NO: 174249 - RNA, 19 nt, Artificial Sequence
  Description of Artificial Sequence: Synthetic oligonucleotide
  Antisense strand to SEQ ID NO: 174248
auaccuaacccucuucacg

SEQ ID NO: 174250 - RNA, 19 nt, Artificial Sequence
  Description of Artificial Sequence: Synthetic oligonucleotide
  Sense strand starting at position 792 of SEQ ID NO: 2246
gaggguuagguauguaauu

SEQ ID NO: 174251 - RNA, 19 nt, Artificial Sequence
  Description of Artificial Sequence: Synthetic oligonucleotide
  Antisense strand to SEQ ID NO: 174250
aauuacauaccuaacccuc

SEQ ID NO: 174252 - RNA, 19 nt, Artificial Sequence
  Description of Artificial Sequence: Synthetic oligonucleotide
  Sense strand starting at position 793 of SEQ ID NO: 2246
aggguuagguauguaauua

SEQ ID NO: 174253 - RNA, 19 nt, Artificial Sequence
  Description of Artificial Sequence: Synthetic oligonucleotide
  Antisense strand to SEQ ID NO: 174252
uaauuacauaccuaacccu

SEQ ID NO: 174254 - RNA, 19 nt, Artificial Sequence
  Description of Artificial Sequence: Synthetic oligonucleotide
  Sense strand starting at position 840 of SEQ ID NO: 2246
ggccauuccucucuguaag

SEQ ID NO: 174255 - RNA, 19 nt, Artificial Sequence
  Description of Artificial Sequence: Synthetic oligonucleotide
  Antisense strand to SEQ ID NO: 174254
cuuacagagaggaauggcc

SEQ ID NO: 174256 - RNA, 19 nt, Artificial Sequence
  Description of Artificial Sequence: Synthetic oligonucleotide
  Sense strand starting at position 921 of SEQ ID NO: 2246
ugcacugaguggucaguuu

SEQ ID NO: 174257 - RNA, 19 nt, Artificial Sequence
  Description of Artificial Sequence: Synthetic oligonucleotide
  Antisense strand to SEQ ID NO: 174256
aaacugaccacucagugca

SEQ ID NO: 174258 - RNA, 19 nt, Artificial Sequence
  Description of Artificial Sequence: Synthetic oligonucleotide
  Sense strand starting at position 1083 of SEQ ID NO: 2246
aguggaaucgucuacuugu

SEQ ID NO: 174259 - RNA, 19 nt, Artificial Sequence
  Description of Artificial Sequence: Synthetic oligonucleotide
  Antisense strand to SEQ ID NO: 174258
acaaguagacgauuccacu

SEQ ID NO: 174260 - RNA, 19 nt, Artificial Sequence
  Description of Artificial Sequence: Synthetic oligonucleotide
  Sense strand starting at position 1131 of SEQ ID NO: 2246
ccgagaggcgcuuaguaaa

SEQ ID NO: 174261 - RNA, 19 nt, Artificial Sequence
  Description of Artificial Sequence: Synthetic oligonucleotide
  Antisense strand to SEQ ID NO: 174260
uuuacuaagcgccucucgg

SEQ ID NO: 174262 - RNA, 19 nt, Artificial Sequence
  Description of Artificial Sequence: Synthetic oligonucleotide
  Sense strand starting at position 1141 of SEQ ID NO: 2246
cuuaguaaacaaggguuau

SEQ ID NO: 174263 - RNA, 19 nt, Artificial Sequence
  Description of Artificial Sequence: Synthetic oligonucleotide
  Antisense strand to SEQ ID NO: 174262
auaacccuuguuuacuaag

SEQ ID NO: 174264 - RNA, 19 nt, Artificial Sequence
  Description of Artificial Sequence: Synthetic oligonucleotide
  Sense strand starting at position 1381 of SEQ ID NO: 2246
cgguaaugacagcagaaau

SEQ ID NO: 174265 - RNA, 19 nt, Artificial Sequence
  Description of Artificial Sequence: Synthetic oligonucleotide
  Antisense strand to SEQ ID NO: 174264
auuucugcugucauuaccg

SEQ ID NO: 174266 - RNA, 19 nt, Artificial Sequence
  Description of Artificial Sequence: Synthetic oligonucleotide
  Sense strand starting at position 2072 of SEQ ID NO: 2246
cgggaaaguuggucucgga

SEQ ID NO: 174267 - RNA, 19 nt, Artificial Sequence
  Description of Artificial Sequence: Synthetic oligonucleotide
  Antisense strand to SEQ ID NO: 174266
uccgagaccaacuuucccg

SEQ ID NO: 174268 - RNA, 19 nt, Artificial Sequence
  Description of Artificial Sequence: Synthetic oligonucleotide
  Sense strand starting at position 2495 of SEQ ID NO: 2246
cugaguucuggaggugguu

SEQ ID NO: 174269 - RNA, 19 nt, Artificial Sequence
  Description of Artificial Sequence: Synthetic oligonucleotide
  Antisense strand to SEQ ID NO: 174268
aaccaccuccagaacucag

SEQ ID NO: 174270 - RNA, 19 nt, Artificial Sequence
  Description of Artificial Sequence: Synthetic oligonucleotide
  Sense strand starting at position 2507 of SEQ ID NO: 2246
ggugguugucgguugcuga

SEQ ID NO: 174271 - RNA, 19 nt, Artificial Sequence
  Description of Artificial Sequence: Synthetic oligonucleotide
  Antisense strand to SEQ ID NO: 174270
ucagcaaccgacaaccacc

SEQ ID NO: 174272 - RNA, 19 nt, Artificial Sequence
  Description of Artificial Sequence: Synthetic oligonucleotide
  Sense strand starting at position 2531 of SEQ ID NO: 2246
agggcaacccuugggauua

SEQ ID NO: 174273 - RNA, 19 nt, Artificial Sequence
  Description of Artificial Sequence: Synthetic oligonucleotide
  Antisense strand to SEQ ID NO: 174272
uaaucccaaggguugcccu

SEQ ID NO: 174274 - RNA, 19 nt, Artificial Sequence
  Description of Artificial Sequence: Synthetic oligonucleotide
  Sense strand starting at position 2544 of SEQ ID NO: 2246
ggauuauggcuguggugag

SEQ ID NO: 174275 - RNA, 19 nt, Artificial Sequence
  Description of Artificial Sequence: Synthetic oligonucleotide
  Antisense strand to SEQ ID NO: 174274
cucaccacagccauaaucc

SEQ ID NO: 174276 - RNA, 19 nt, Artificial Sequence
  Description of Artificial Sequence: Synthetic oligonucleotide
  Sense strand starting at position 2555 of SEQ ID NO: 2246
guggugaggugguuguuaa

SEQ ID NO: 174277 - RNA, 19 nt, Artificial Sequence
  Description of Artificial Sequence: Synthetic oligonucleotide
  Antisense strand to SEQ ID NO: 174276
uuaacaaccaccucaccac

SEQ ID NO: 174278 - RNA, 19 nt, Artificial Sequence
  Description of Artificial Sequence: Synthetic oligonucleotide
  Sense strand starting at position 2576 of SEQ ID NO: 2246
gggcgucacugagccuaau

SEQ ID NO: 174279 - RNA, 19 nt, Artificial Sequence
  Description of Artificial Sequence: Synthetic oligonucleotide
  Antisense strand to SEQ ID NO: 174278
auuaggcucagugacgccc

SEQ ID NO: 174280 - RNA, 19 nt, Artificial Sequence
  Description of Artificial Sequence: Synthetic oligonucleotide
  Sense strand starting at position 2579 of SEQ ID NO: 2246
cgucacugagccuaaugua

SEQ ID NO: 174281 - RNA, 19 nt, Artificial Sequence
  Description of Artificial Sequence: Synthetic oligonucleotide
  Antisense strand to SEQ ID NO: 174280
uacauuaggcucagugacg

SEQ ID NO: 174282 - RNA, 19 nt, Artificial Sequence
  Description of Artificial Sequence: Synthetic oligonucleotide
  Sense strand starting at position 2708 of SEQ ID NO: 2246
cgugcacuucuggaagcua

SEQ ID NO: 174283 - RNA, 19 nt, Artificial Sequence
  Description of Artificial Sequence: Synthetic oligonucleotide
  Antisense strand to SEQ ID NO: 174282
uagcuuccagaagugcacg

SEQ ID NO: 174284 - RNA, 19 nt, Artificial Sequence
  Description of Artificial Sequence: Synthetic oligonucleotide
  Sense strand starting at position 2747 of SEQ ID NO: 2246
guagacugaugauugauua

SEQ ID NO: 174285 - RNA, 19 nt, Artificial Sequence
  Description of Artificial Sequence: Synthetic oligonucleotide
  Antisense strand to SEQ ID NO: 174284
uaaucaaucaucagucuac

SEQ ID NO: 174286 - RNA, 19 nt, Artificial Sequence
  Description of Artificial Sequence: Synthetic oligonucleotide
  Sense strand starting at position 2751 of SEQ ID NO: 2246
acugaugauugauuacagu

SEQ ID NO: 174287 - RNA, 19 nt, Artificial Sequence
  Description of Artificial Sequence: Synthetic oligonucleotide
  Antisense strand to SEQ ID NO: 174286
acuguaaucaaucaucagu

SEQ ID NO: 174288 - RNA, 19 nt, Artificial Sequence
  Description of Artificial Sequence: Synthetic oligonucleotide
  Sense strand starting at position 2925 of SEQ ID NO: 2246
gcccucuuucuugaccaga

SEQ ID NO: 174289 - RNA, 19 nt, Artificial Sequence
  Description of Artificial Sequence: Synthetic oligonucleotide
  Antisense strand to SEQ ID NO: 174288
ucuggucaagaaagagggc

SEQ ID NO: 174290 - RNA, 19 nt, Artificial Sequence
  Description of Artificial Sequence: Synthetic oligonucleotide
  Sense strand starting at position 3116 of SEQ ID NO: 2246
gugcaaaggacugauagca

SEQ ID NO: 174291 - RNA, 19 nt, Artificial Sequence
  Description of Artificial Sequence: Synthetic oligonucleotide
  Antisense strand to SEQ ID NO: 174290
ugcuaucaguccuuugcac

SEQ ID NO: 174292 - RNA, 19 nt, Artificial Sequence
  Description of Artificial Sequence: Synthetic oligonucleotide
  Sense strand starting at position 3148 of SEQ ID NO: 2246
gguucuguuguggaaagac

SEQ ID NO: 174293 - RNA, 19 nt, Artificial Sequence
  Description of Artificial Sequence: Synthetic oligonucleotide
  Antisense strand to SEQ ID NO: 174292
gucuuuccacaacagaacc

SEQ ID NO: 174294 - RNA, 19 nt, Artificial Sequence
  Description of Artificial Sequence: Synthetic oligonucleotide
  Sense strand starting at position 3283 of SEQ ID NO: 2246
ccuuguaauuacuccgguu

SEQ ID NO: 174295 - RNA, 19 nt, Artificial Sequence
  Description of Artificial Sequence: Synthetic oligonucleotide
  Antisense strand to SEQ ID NO: 174294
aaccggaguaauuacaagg

SEQ ID NO: 174296 - RNA, 19 nt, Artificial Sequence
  Description of Artificial Sequence: Synthetic oligonucleotide
  Sense strand starting at position 3285 of SEQ ID NO: 2246
uuguaauuacuccgguuua

SEQ ID NO: 174297 - RNA, 19 nt, Artificial Sequence
  Description of Artificial Sequence: Synthetic oligonucleotide
  Antisense strand to SEQ ID NO: 174296
uaaaccggaguaauuacaa

SEQ ID NO: 174298 - RNA, 19 nt, Artificial Sequence
  Description of Artificial Sequence: Synthetic oligonucleotide
  Sense strand starting at position 3306 of SEQ ID NO: 2246
ccaugugugcuagcucgua

SEQ ID NO: 174299 - RNA, 19 nt, Artificial Sequence
  Description of Artificial Sequence: Synthetic oligonucleotide
  Antisense strand to SEQ ID NO: 174298
uacgagcuagcacacaugg

SEQ ID NO: 174300 - RNA, 19 nt, Artificial Sequence
  Description of Artificial Sequence: Synthetic oligonucleotide
  Sense strand starting at position 3364 of SEQ ID NO: 2246
gucuguuaggaauguuaaa

SEQ ID NO: 174301 - RNA, 19 nt, Artificial Sequence
  Description of Artificial Sequence: Synthetic oligonucleotide
  Antisense strand to SEQ ID NO: 174300
uuuaacauuccuaacagac

SEQ ID NO: 174302 - RNA, 19 nt, Artificial Sequence
  Description of Artificial Sequence: Synthetic oligonucleotide
  Sense strand starting at position 3436 of SEQ ID NO: 2246
cuuugaugcuguucucuca

SEQ ID NO: 174303 - RNA, 19 nt, Artificial Sequence
  Description of Artificial Sequence: Synthetic oligonucleotide
  Antisense strand to SEQ ID NO: 174302
ugagagaacagcaucaaag

SEQ ID NO: 174304 - RNA, 19 nt, Artificial Sequence
  Description of Artificial Sequence: Synthetic oligonucleotide
  Sense strand starting at position 3467 of SEQ ID NO: 2246
ugcccagaacuguaucaaa

SEQ ID NO: 174305 - RNA, 19 nt, Artificial Sequence
  Description of Artificial Sequence: Synthetic oligonucleotide
  Antisense strand to SEQ ID NO: 174304
uuugauacaguucugggca

SEQ ID NO: 174306 - RNA, 19 nt, Artificial Sequence
  Description of Artificial Sequence: Synthetic oligonucleotide
  Sense strand starting at position 3676 of SEQ ID NO: 2246
auuacagaugccuggcuau

SEQ ID NO: 174307 - RNA, 19 nt, Artificial Sequence
  Description of Artificial Sequence: Synthetic oligonucleotide
  Antisense strand to SEQ ID NO: 174306
auagccaggcaucuguaau

SEQ ID NO: 174308 - RNA, 19 nt, Artificial Sequence
  Description of Artificial Sequence: Synthetic oligonucleotide
  Sense strand starting at position 3870 of SEQ ID NO: 2246
gucugaugucugcaagcaa

SEQ ID NO: 174309 - RNA, 19 nt, Artificial Sequence
  Description of Artificial Sequence: Synthetic oligonucleotide
  Antisense strand to SEQ ID NO: 174308
uugcuugcagacaucagac

SEQ ID NO: 174310 - RNA, 19 nt, Artificial Sequence
  Description of Artificial Sequence: Synthetic oligonucleotide
  Sense strand starting at position 3909 of SEQ ID NO: 2246
uguaucaaucaacauaguu

SEQ ID NO: 174311 - RNA, 19 nt, Artificial Sequence
  Description of Artificial Sequence: Synthetic oligonucleotide
  Antisense strand to SEQ ID NO: 174310
aacuauguugauugauaca

SEQ ID NO: 174312 - RNA, 19 nt, Artificial Sequence
  Description of Artificial Sequence: Synthetic oligonucleotide
  Sense strand starting at position 3977 of SEQ ID NO: 2247
cugggugcuaauugaaauc

SEQ ID NO: 174313 - RNA, 19 nt, Artificial Sequence
  Description of Artificial Sequence: Synthetic oligonucleotide
  Antisense strand to SEQ ID NO: 174312
gauuucaauuagcacccag

SEQ ID NO: 174314 - RNA, 19 nt, Artificial Sequence
  Description of Artificial Sequence: Synthetic oligonucleotide
  Sense strand starting at position 3860 of SEQ ID NO: 2247
uggcucuauuugugaaucu

SEQ ID NO: 174315 - RNA, 19 nt, Artificial Sequence
  Description of Artificial Sequence: Synthetic oligonucleotide
  Antisense strand to SEQ ID NO: 174314
agauucacaaauagagcca

SEQ ID NO: 174316 - RNA, 19 nt, Artificial Sequence
  Description of Artificial Sequence: Synthetic oligonucleotide
  Sense strand starting at position 3836 of SEQ ID NO: 2247
aggguauguccucacauga

SEQ ID NO: 174317 - RNA, 19 nt, Artificial Sequence
  Description of Artificial Sequence: Synthetic oligonucleotide
  Antisense strand to SEQ ID NO: 174316
ucaugugaggacauacccu

SEQ ID NO: 174318 - RNA, 19 nt, Artificial Sequence
  Description of Artificial Sequence: Synthetic oligonucleotide
  Sense strand starting at position 3775 of SEQ ID NO: 2247
ggcaccuccuuccuagaau

SEQ ID NO: 174319 - RNA, 19 nt, Artificial Sequence
  Description of Artificial Sequence: Synthetic oligonucleotide
  Antisense strand to SEQ ID NO: 174318
auucuaggaaggaggugcc

SEQ ID NO: 174320 - RNA, 19 nt, Artificial Sequence
  Description of Artificial Sequence: Synthetic oligonucleotide
  Sense strand starting at position 3556 of SEQ ID NO: 2247
uguguagucccagaaguga

SEQ ID NO: 174321 - RNA, 19 nt, Artificial Sequence
  Description of Artificial Sequence: Synthetic oligonucleotide
  Antisense strand to SEQ ID NO: 174320
ucacuucugggacuacaca

SEQ ID NO: 174322 - RNA, 19 nt, Artificial Sequence
  Description of Artificial Sequence: Synthetic oligonucleotide
  Sense strand starting at position 2974 of SEQ ID NO: 2247
gugagauccugacaaguuc

SEQ ID NO: 174323 - RNA, 19 nt, Artificial Sequence
  Description of Artificial Sequence: Synthetic oligonucleotide
  Antisense strand to SEQ ID NO: 174322
gaacuugucaggaucucac

SEQ ID NO: 174324 - RNA, 19 nt, Artificial Sequence
  Description of Artificial Sequence: Synthetic oligonucleotide
  Sense strand starting at position 2972 of SEQ ID NO: 2247
uggugagauccugacaagu

SEQ ID NO: 174325 - RNA, 19 nt, Artificial Sequence
  Description of Artificial Sequence: Synthetic oligonucleotide
  Antisense strand to SEQ ID NO: 174324
acuugucaggaucucacca

SEQ ID NO: 174326 - RNA, 19 nt, Artificial Sequence
  Description of Artificial Sequence: Synthetic oligonucleotide
  Sense strand starting at position 2890 of SEQ ID NO: 2247
ggacaucugaggugccuua

SEQ ID NO: 174327 - RNA, 19 nt, Artificial Sequence
  Description of Artificial Sequence: Synthetic oligonucleotide
  Antisense strand to SEQ ID NO: 174326
uaaggcaccucagaugucc

SEQ ID NO: 174328 - RNA, 19 nt, Artificial Sequence
  Description of Artificial Sequence: Synthetic oligonucleotide
  Sense strand starting at position 2874 of SEQ ID NO: 2247
gaaucuuuccgugagagga

SEQ ID NO: 174329 - RNA, 19 nt, Artificial Sequence
  Description of Artificial Sequence: Synthetic oligonucleotide
  Antisense strand to SEQ ID NO: 174328
uccucucacggaaagauuc

SEQ ID NO: 174330 - RNA, 19 nt, Artificial Sequence
  Description of Artificial Sequence: Synthetic oligonucleotide
  Sense strand starting at position 2873 of SEQ ID NO: 2247
agaaucuuuccgugagagg

SEQ ID NO: 174331 - RNA, 19 nt, Artificial Sequence
  Description of Artificial Sequence: Synthetic oligonucleotide
  Antisense strand to SEQ ID NO: 174330
ccucucacggaaagauucu

SEQ ID NO: 174332 - RNA, 19 nt, Artificial Sequence
  Description of Artificial Sequence: Synthetic oligonucleotide
  Sense strand starting at position 2872 of SEQ ID NO: 2247
aagaaucuuuccgugagag

SEQ ID NO: 174333 - RNA, 19 nt, Artificial Sequence
  Description of Artificial Sequence: Synthetic oligonucleotide
  Antisense strand to SEQ ID NO: 174332
cucucacggaaagauucuu

SEQ ID NO: 174334 - RNA, 19 nt, Artificial Sequence
  Description of Artificial Sequence: Synthetic oligonucleotide
  Sense strand starting at position 2870 of SEQ ID NO: 2247
guaagaaucuuuccgugag

SEQ ID NO: 174335 - RNA, 19 nt, Artificial Sequence
  Description of Artificial Sequence: Synthetic oligonucleotide
  Antisense strand to SEQ ID NO: 174334
cucacggaaagauucuuac

SEQ ID NO: 174336 - RNA, 19 nt, Artificial Sequence
  Description of Artificial Sequence: Synthetic oligonucleotide
  Sense strand starting at position 2868 of SEQ ID NO: 2247
guguaagaaucuuuccgug

SEQ ID NO: 174337 - RNA, 19 nt, Artificial Sequence
  Description of Artificial Sequence: Synthetic oligonucleotide
  Antisense strand to SEQ ID NO: 174336
cacggaaagauucuuacac

SEQ ID NO: 174338 - RNA, 19 nt, Artificial Sequence
  Description of Artificial Sequence: Synthetic oligonucleotide
  Sense strand starting at position 2768 of SEQ ID NO: 2247
agguuaaguggcuacugaa

SEQ ID NO: 174339 - RNA, 19 nt, Artificial Sequence
  Description of Artificial Sequence: Synthetic oligonucleotide
  Antisense strand to SEQ ID NO: 174338
uucaguagccacuuaaccu

SEQ ID NO: 174340 - RNA, 19 nt, Artificial Sequence
  Description of Artificial Sequence: Synthetic oligonucleotide
  Sense strand starting at position 2755 of SEQ ID NO: 2247
gccuuaagcaugcagguua

SEQ ID NO: 174341 - RNA, 19 nt, Artificial Sequence
  Description of Artificial Sequence: Synthetic oligonucleotide
  Antisense strand to SEQ ID NO: 174340
uaaccugcaugcuuaaggc

SEQ ID NO: 174342 - RNA, 19 nt, Artificial Sequence
  Description of Artificial Sequence: Synthetic oligonucleotide
  Sense strand starting at position 2735 of SEQ ID NO: 2247
caguucugugaggauugaa

SEQ ID NO: 174343 - RNA, 19 nt, Artificial Sequence
  Description of Artificial Sequence: Synthetic oligonucleotide
  Antisense strand to SEQ ID NO: 174342
uucaauccucacagaacug

SEQ ID NO: 174344 - RNA, 19 nt, Artificial Sequence
  Description of Artificial Sequence: Synthetic oligonucleotide
  Sense strand starting at position 2731 of SEQ ID NO: 2247
cucacaguucugugaggau

SEQ ID NO: 174345 - RNA, 19 nt, Artificial Sequence
  Description of Artificial Sequence: Synthetic oligonucleotide
  Antisense strand to SEQ ID NO: 174344
auccucacagaacugugag

SEQ ID NO: 174346 - RNA, 19 nt, Artificial Sequence
  Description of Artificial Sequence: Synthetic oligonucleotide
  Sense strand starting at position 2670 of SEQ ID NO: 2247
gaagaugugucaccuaacu

SEQ ID NO: 174347 - RNA, 19 nt, Artificial Sequence
  Description of Artificial Sequence: Synthetic oligonucleotide
  Antisense strand to SEQ ID NO: 174346
aguuaggugacacaucuuc

SEQ ID NO: 174348 - RNA, 19 nt, Artificial Sequence
  Description of Artificial Sequence: Synthetic oligonucleotide
  Sense strand starting at position 2592 of SEQ ID NO: 2247
agcgauaaugaccagcauu

SEQ ID NO: 174349 - RNA, 19 nt, Artificial Sequence
  Description of Artificial Sequence: Synthetic oligonucleotide
  Antisense strand to SEQ ID NO: 174348
aaugcuggucauuaucgcu

SEQ ID NO: 174350 - RNA, 19 nt, Artificial Sequence
  Description of Artificial Sequence: Synthetic oligonucleotide
  Sense strand starting at position 2585 of SEQ ID NO: 2247
cguucucagcgauaaugac

SEQ ID NO: 174351 - RNA, 19 nt, Artificial Sequence
  Description of Artificial Sequence: Synthetic oligonucleotide
  Antisense strand to SEQ ID NO: 174350
gucauuaucgcugagaacg

SEQ ID NO: 174352 - RNA, 19 nt, Artificial Sequence
  Description of Artificial Sequence: Synthetic oligonucleotide
  Sense strand starting at position 2583 of SEQ ID NO: 2247
ggcguucucagcgauaaug

SEQ ID NO: 174353 - RNA, 19 nt, Artificial Sequence
  Description of Artificial Sequence: Synthetic oligonucleotide
  Antisense strand to SEQ ID NO: 174352
cauuaucgcugagaacgcc

SEQ ID NO: 174354 - RNA, 19 nt, Artificial Sequence
  Description of Artificial Sequence: Synthetic oligonucleotide
  Sense strand starting at position 2582 of SEQ ID NO: 2247
aggcguucucagcgauaau

SEQ ID NO: 174355 - RNA, 19 nt, Artificial Sequence
  Description of Artificial Sequence: Synthetic oligonucleotide
  Antisense strand to SEQ ID NO: 174354
auuaucgcugagaacgccu

SEQ ID NO: 174356 - RNA, 19 nt, Artificial Sequence
  Description of Artificial Sequence: Synthetic oligonucleotide
  Sense strand starting at position 1494 of SEQ ID NO: 2247
acgaaacuguccgaacaag

SEQ ID NO: 174357 - RNA, 19 nt, Artificial Sequence
  Description of Artificial Sequence: Synthetic oligonucleotide
  Antisense strand to SEQ ID NO: 174356
cuuguucggacaguuucgu

SEQ ID NO: 174358 - RNA, 19 nt, Artificial Sequence
  Description of Artificial Sequence: Synthetic oligonucleotide
  Sense strand starting at position 1493 of SEQ ID NO: 2247
gacgaaacuguccgaacaa

SEQ ID NO: 174359 - RNA, 19 nt, Artificial Sequence
  Description of Artificial Sequence: Synthetic oligonucleotide
  Antisense strand to SEQ ID NO: 174358
uuguucggacaguuucguc

SEQ ID NO: 174360 - RNA, 19 nt, Artificial Sequence
  Description of Artificial Sequence: Synthetic oligonucleotide
  Sense strand starting at position 1492 of SEQ ID NO: 2247
agacgaaacuguccgaaca

SEQ ID NO: 174361 - RNA, 19 nt, Artificial Sequence
  Description of Artificial Sequence: Synthetic oligonucleotide
  Antisense strand to SEQ ID NO: 174360
uguucggacaguuucgucu

SEQ ID NO: 174362 - RNA, 19 nt, Artificial Sequence
  Description of Artificial Sequence: Synthetic oligonucleotide
  Sense strand starting at position 1481 of SEQ ID NO: 2247
gcuuucuguaaagacgaaa

SEQ ID NO: 174363 - RNA, 19 nt, Artificial Sequence
  Description of Artificial Sequence: Synthetic oligonucleotide
  Antisense strand to SEQ ID NO: 174362
uuucgucuuuacagaaagc

SEQ ID NO: 174364 - RNA, 19 nt, Artificial Sequence
  Description of Artificial Sequence: Synthetic oligonucleotide
  Sense strand starting at position 1477 of SEQ ID NO: 2247
ugccgcuuucuguaaagac

SEQ ID NO: 174365 - RNA, 19 nt, Artificial Sequence
  Description of Artificial Sequence: Synthetic oligonucleotide
  Antisense strand to SEQ ID NO: 174364
gucuuuacagaaagcggca

SEQ ID NO: 174366 - RNA, 19 nt, Artificial Sequence
  Description of Artificial Sequence: Synthetic oligonucleotide
  Sense strand starting at position 1474 of SEQ ID NO: 2247
agaugccgcuuucuguaaa

SEQ ID NO: 174367 - RNA, 19 nt, Artificial Sequence
  Description of Artificial Sequence: Synthetic oligonucleotide
  Antisense strand to SEQ ID NO: 174366
uuuacagaaagcggcaucu

SEQ ID NO: 174368 - RNA, 19 nt, Artificial Sequence
  Description of Artificial Sequence: Synthetic oligonucleotide
  Sense strand starting at position 1472 of SEQ ID NO: 2247
uuagaugccgcuuucugua

SEQ ID NO: 174369 - RNA, 19 nt, Artificial Sequence
  Description of Artificial Sequence: Synthetic oligonucleotide
  Antisense strand to SEQ ID NO: 174368
uacagaaagcggcaucuaa

SEQ ID NO: 174370 - RNA, 19 nt, Artificial Sequence
  Description of Artificial Sequence: Synthetic oligonucleotide
  Sense strand starting at position 843 of SEQ ID NO: 2247
uucucagaaugagaauaua

SEQ ID NO: 174371 - RNA, 19 nt, Artificial Sequence
  Description of Artificial Sequence: Synthetic oligonucleotide
  Antisense strand to SEQ ID NO: 174370
uauauucucauucugagaa

SEQ ID NO: 174372 - RNA, 19 nt, Artificial Sequence
  Description of Artificial Sequence: Synthetic oligonucleotide
  Sense strand starting at position 840 of SEQ ID NO: 2247
ugcuucucagaaugagaau

SEQ ID NO: 174373 - RNA, 19 nt, Artificial Sequence
  Description of Artificial Sequence: Synthetic oligonucleotide
  Antisense strand to SEQ ID NO: 174372
auucucauucugagaagca

SEQ ID NO: 174374 - RNA, 19 nt, Artificial Sequence
  Description of Artificial Sequence: Synthetic oligonucleotide
  Sense strand starting at position 812 of SEQ ID NO: 2247
ccuguaaaugggcacaaua

SEQ ID NO: 174375 - RNA, 19 nt, Artificial Sequence
  Description of Artificial Sequence: Synthetic oligonucleotide
  Antisense strand to SEQ ID NO: 174374
uauugugcccauuuacagg

SEQ ID NO: 174376 - RNA, 19 nt, Artificial Sequence
  Description of Artificial Sequence: Synthetic oligonucleotide
  Sense strand starting at position 625 of SEQ ID NO: 2247
ccuguuagcucugugacca

SEQ ID NO: 174377 - RNA, 19 nt, Artificial Sequence
  Description of Artificial Sequence: Synthetic oligonucleotide
  Antisense strand to SEQ ID NO: 174376
uggucacagagcuaacagg

SEQ ID NO: 174378 - RNA, 19 nt, Artificial Sequence
  Description of Artificial Sequence: Synthetic oligonucleotide
  Sense strand starting at position 604 of SEQ ID NO: 2247
cucugacuacaguggucau

SEQ ID NO: 174379 - RNA, 19 nt, Artificial Sequence
  Description of Artificial Sequence: Synthetic oligonucleotide
  Antisense strand to SEQ ID NO: 174378
augaccacuguagucagag

SEQ ID NO: 174380 - RNA, 19 nt, Artificial Sequence
  Description of Artificial Sequence: Synthetic oligonucleotide
  Sense strand starting at position 517 of SEQ ID NO: 2247
ccagaaggcugucuacaga

SEQ ID NO: 174381 - RNA, 19 nt, Artificial Sequence
  Description of Artificial Sequence: Synthetic oligonucleotide
  Antisense strand to SEQ ID NO: 174380
ucuguagacagccuucugg

SEQ ID NO: 174382 - RNA, 19 nt, Artificial Sequence
  Description of Artificial Sequence: Synthetic oligonucleotide
  Sense strand starting at position 322 of SEQ ID NO: 2247
gucaauguccacuggauga

SEQ ID NO: 174383 - RNA, 19 nt, Artificial Sequence
  Description of Artificial Sequence: Synthetic oligonucleotide
  Antisense strand to SEQ ID NO: 174382
ucauccaguggacauugac

SEQ ID NO: 174384 - RNA, 19 nt, Artificial Sequence
  Description of Artificial Sequence: Synthetic oligonucleotide
  Sense strand starting at position 117 of SEQ ID NO: 2247
gcucucacucuuuagaaug

SEQ ID NO: 174385 - RNA, 19 nt, Artificial Sequence
  Description of Artificial Sequence: Synthetic oligonucleotide
  Antisense strand to SEQ ID NO: 174384
cauucuaaagagugagagc

SEQ ID NO: 174386 - RNA, 19 nt, Artificial Sequence
  Description of Artificial Sequence: Synthetic oligonucleotide
  Sense strand starting at position 72 of SEQ ID NO: 2247
uugagaccacgcugcaaau

SEQ ID NO: 174387 - RNA, 19 nt, Artificial Sequence
  Description of Artificial Sequence: Synthetic oligonucleotide
  Antisense strand to SEQ ID NO: 174386
auuugcagcguggucucaa

SEQ ID NO: 174388 - RNA, 19 nt, Artificial Sequence
  Description of Artificial Sequence: Synthetic oligonucleotide
  Sense strand starting at position 13 of SEQ ID NO: 2247
gagucaaaucccugucugu

SEQ ID NO: 174389 - RNA, 19 nt, Artificial Sequence
  Description of Artificial Sequence: Synthetic oligonucleotide
  Antisense strand to SEQ ID NO: 174388
acagacagggauuugacuc

SEQ ID NO: 174390 - RNA, 19 nt, Artificial Sequence
  Description of Artificial Sequence: Synthetic oligonucleotide
  Sense strand starting at position 3 of SEQ ID NO: 2247
ggucuagucugagucaaau

SEQ ID NO: 174391 - RNA, 19 nt, Artificial Sequence
  Description of Artificial Sequence: Synthetic oligonucleotide
  Antisense strand to SEQ ID NO: 174390
auuugacucagacuagacc

SEQ ID NO: 174392 - RNA, 19 nt, Artificial Sequence
  Description of Artificial Sequence: Synthetic oligonucleotide
  Sense strand starting at position 49 of SEQ ID NO: 2248
uccaacagcuggucuaaau

SEQ ID NO: 174393 - RNA, 19 nt, Artificial Sequence
  Description of Artificial Sequence: Synthetic oligonucleotide
  Antisense strand to SEQ ID NO: 174392
auuuagaccagcuguugga

SEQ ID NO: 174394 - RNA, 19 nt, Artificial Sequence
  Description of Artificial Sequence: Synthetic oligonucleotide
  Sense strand starting at position 60 of SEQ ID NO: 2248
gucuaaauuugccaaagua

SEQ ID NO: 174395 - RNA, 19 nt, Artificial Sequence
  Description of Artificial Sequence: Synthetic oligonucleotide
  Antisense strand to SEQ ID NO: 174394
uacuuuggcaaauuuagac

SEQ ID NO: 174396 - RNA, 19 nt, Artificial Sequence
  Description of Artificial Sequence: Synthetic oligonucleotide
  Sense strand starting at position 164 of SEQ ID NO: 2248
cagaauguugcaggaagua

SEQ ID NO: 174397 - RNA, 19 nt, Artificial Sequence
  Description of Artificial Sequence: Synthetic oligonucleotide
  Antisense strand to SEQ ID NO: 174396
uacuuccugcaacauucug

SEQ ID NO: 174398 - RNA, 19 nt, Artificial Sequence
  Description of Artificial Sequence: Synthetic oligonucleotide
  Sense strand starting at position 173 of SEQ ID NO: 2248
gcaggaaguauauggauau

SEQ ID NO: 174399 - RNA, 19 nt, Artificial Sequence
  Description of Artificial Sequence: Synthetic oligonucleotide
  Antisense strand to SEQ ID NO: 174398
auauccauauacuuccugc

SEQ ID NO: 174400 - RNA, 19 nt, Artificial Sequence
  Description of Artificial Sequence: Synthetic oligonucleotide
  Sense strand starting at position 184 of SEQ ID NO: 2248
auggauauuguucguucuu

SEQ ID NO: 174401 - RNA, 19 nt, Artificial Sequence
  Description of Artificial Sequence: Synthetic oligonucleotide
  Antisense strand to SEQ ID NO: 174400
aagaacgaacaauauccau

SEQ ID NO: 174402 - RNA, 19 nt, Artificial Sequence
  Description of Artificial Sequence: Synthetic oligonucleotide
  Sense strand starting at position 204 of SEQ ID NO: 2248
caagaaggcccguacaaau

SEQ ID NO: 174403 - RNA, 19 nt, Artificial Sequence
  Description of Artificial Sequence: Synthetic oligonucleotide
  Antisense strand to SEQ ID NO: 174402
auuuguacgggccuucuug

SEQ ID NO: 174404 - RNA, 19 nt, Artificial Sequence
  Description of Artificial Sequence: Synthetic oligonucleotide
  Sense strand starting at position 258 of SEQ ID NO: 2248
cugugaugacaauagcgaa

SEQ ID NO: 174405 - RNA, 19 nt, Artificial Sequence
  Description of Artificial Sequence: Synthetic oligonucleotide
  Antisense strand to SEQ ID NO: 174404
uucgcuauugucaucacag

SEQ ID NO: 174406 - RNA, 19 nt, Artificial Sequence
  Description of Artificial Sequence: Synthetic oligonucleotide
  Sense strand starting at position 331 of SEQ ID NO: 2248
gcagaauaagguugcaaag

SEQ ID NO: 174407 - RNA, 19 nt, Artificial Sequence
  Description of Artificial Sequence: Synthetic oligonucleotide
  Antisense strand to SEQ ID NO: 174406
cuuugcaaccuuauucugc

SEQ ID NO: 174408 - RNA, 19 nt, Artificial Sequence
  Description of Artificial Sequence: Synthetic oligonucleotide
  Sense strand starting at position 465 of SEQ ID NO: 2248
ggcaguguggcucagggau

SEQ ID NO: 174409 - RNA, 19 nt, Artificial Sequence
  Description of Artificial Sequence: Synthetic oligonucleotide
  Antisense strand to SEQ ID NO: 174408
aucccugagccacacugcc

SEQ ID NO: 174410 - RNA, 19 nt, Artificial Sequence
  Description of Artificial Sequence: Synthetic oligonucleotide
  Sense strand starting at position 479 of SEQ ID NO: 2248
gggauuaugugagcaggcu

SEQ ID NO: 174411 - RNA, 19 nt, Artificial Sequence
  Description of Artificial Sequence: Synthetic oligonucleotide
  Antisense strand to SEQ ID NO: 174410
agccugcucacauaauccc

SEQ ID NO: 174412 - RNA, 19 nt, Artificial Sequence
  Description of Artificial Sequence: Synthetic oligonucleotide
  Sense strand starting at position 557 of SEQ ID NO: 2248
uggcuuccuucgccaggaa

SEQ ID NO: 174413 - RNA, 19 nt, Artificial Sequence
  Description of Artificial Sequence: Synthetic oligonucleotide
  Antisense strand to SEQ ID NO: 174412
uuccuggcgaaggaagcca

SEQ ID NO: 174414 - RNA, 19 nt, Artificial Sequence
  Description of Artificial Sequence: Synthetic oligonucleotide
  Sense strand starting at position 558 of SEQ ID NO: 2248
ggcuuccuucgccaggaaa

SEQ ID NO: 174415 - RNA, 19 nt, Artificial Sequence
  Description of Artificial Sequence: Synthetic oligonucleotide
  Antisense strand to SEQ ID NO: 174414
uuuccuggcgaaggaagcc

SEQ ID NO: 174416 - RNA, 19 nt, Artificial Sequence
  Description of Artificial Sequence: Synthetic oligonucleotide
  Sense strand starting at position 560 of SEQ ID NO: 2248
cuuccuucgccaggaaaug

SEQ ID NO: 174417 - RNA, 19 nt, Artificial Sequence
  Description of Artificial Sequence: Synthetic oligonucleotide
  Antisense strand to SEQ ID NO: 174416
cauuuccuggcgaaggaag

SEQ ID NO: 174418 - RNA, 19 nt, Artificial Sequence
  Description of Artificial Sequence: Synthetic oligonucleotide
  Sense strand starting at position 571 of SEQ ID NO: 2248
aggaaaugcgagugaugac

SEQ ID NO: 174419 - RNA, 19 nt, Artificial Sequence
  Description of Artificial Sequence: Synthetic oligonucleotide
  Antisense strand to SEQ ID NO: 174418
gucaucacucgcauuuccu

SEQ ID NO: 174420 - RNA, 19 nt, Artificial Sequence
  Description of Artificial Sequence: Synthetic oligonucleotide
  Sense strand starting at position 572 of SEQ ID NO: 2248
ggaaaugcgagugaugacu

SEQ ID NO: 174421 - RNA, 19 nt, Artificial Sequence
  Description of Artificial Sequence: Synthetic oligonucleotide
  Antisense strand to SEQ ID NO: 174420
agucaucacucgcauuucc

SEQ ID NO: 174422 - RNA, 19 nt, Artificial Sequence
  Description of Artificial Sequence: Synthetic oligonucleotide
  Sense strand starting at position 744 of SEQ ID NO: 2248
ugacgucuucucuguuaga

SEQ ID NO: 174423 - RNA, 19 nt, Artificial Sequence
  Description of Artificial Sequence: Synthetic oligonucleotide
  Antisense strand to SEQ ID NO: 174422
ucuaacagagaagacguca

SEQ ID NO: 174424 - RNA, 19 nt, Artificial Sequence
  Description of Artificial Sequence: Synthetic oligonucleotide
  Sense strand starting at position 745 of SEQ ID NO: 2248
gacgucuucucuguuagag

SEQ ID NO: 174425 - RNA, 19 nt, Artificial Sequence
  Description of Artificial Sequence: Synthetic oligonucleotide
  Antisense strand to SEQ ID NO: 174424
cucuaacagagaagacguc

SEQ ID NO: 174426 - RNA, 19 nt, Artificial Sequence
  Description of Artificial Sequence: Synthetic oligonucleotide
  Sense strand starting at position 754 of SEQ ID NO: 2248
ucuguuagagcccaacgaa

SEQ ID NO: 174427 - RNA, 19 nt, Artificial Sequence
  Description of Artificial Sequence: Synthetic oligonucleotide
  Antisense strand to SEQ ID NO: 174426
uucguugggcucuaacaga

SEQ ID NO: 174428 - RNA, 19 nt, Artificial Sequence
  Description of Artificial Sequence: Synthetic oligonucleotide
  Sense strand starting at position 996 of SEQ ID NO: 2248
ucagguagcuagucuuauc

SEQ ID NO: 174429 - RNA, 19 nt, Artificial Sequence
  Description of Artificial Sequence: Synthetic oligonucleotide
  Antisense strand to SEQ ID NO: 174428
gauaagacuagcuaccuga

SEQ ID NO: 174430 - RNA, 19 nt, Artificial Sequence
  Description of Artificial Sequence: Synthetic oligonucleotide
  Sense strand starting at position 1006 of SEQ ID NO: 2248
agucuuaucaggugcugga

SEQ ID NO: 174431 - RNA, 19 nt, Artificial Sequence
  Description of Artificial Sequence: Synthetic oligonucleotide
  Antisense strand to SEQ ID NO: 174430
uccagcaccugauaagacu

SEQ ID NO: 174432 - RNA, 19 nt, Artificial Sequence
  Description of Artificial Sequence: Synthetic oligonucleotide
  Sense strand starting at position 1019 of SEQ ID NO: 2248
gcuggaaccuuugcggauu

SEQ ID NO: 174433 - RNA, 19 nt, Artificial Sequence
  Description of Artificial Sequence: Synthetic oligonucleotide
  Antisense strand to SEQ ID NO: 174432
aauccgcaaagguuccagc

SEQ ID NO: 174434 - RNA, 19 nt, Artificial Sequence
  Description of Artificial Sequence: Synthetic oligonucleotide
  Sense strand starting at position 1032 of SEQ ID NO: 2248
cggauuugguuucuuagca

SEQ ID NO: 174435 - RNA, 19 nt, Artificial Sequence
  Description of Artificial Sequence: Synthetic oligonucleotide
  Antisense strand to SEQ ID NO: 174434
ugcuaagaaaccaaauccg

SEQ ID NO: 174436 - RNA, 19 nt, Artificial Sequence
  Description of Artificial Sequence: Synthetic oligonucleotide
  Sense strand starting at position 1277 of SEQ ID NO: 2248
ucggacuccgccgacaaau

SEQ ID NO: 174437 - RNA, 19 nt, Artificial Sequence
  Description of Artificial Sequence: Synthetic oligonucleotide
  Antisense strand to SEQ ID NO: 174436
auuugucggcggaguccga

SEQ ID NO: 174438 - RNA, 19 nt, Artificial Sequence
  Description of Artificial Sequence: Synthetic oligonucleotide
  Sense strand starting at position 2006 of SEQ ID NO: 2248
ccuguagugcuuugaauuu

SEQ ID NO: 174439 - RNA, 19 nt, Artificial Sequence
  Description of Artificial Sequence: Synthetic oligonucleotide
  Antisense strand to SEQ ID NO: 174438
aaauucaaagcacuacagg

SEQ ID NO: 174440 - RNA, 19 nt, Artificial Sequence
  Description of Artificial Sequence: Synthetic oligonucleotide
  Sense strand starting at position 2346 of SEQ ID NO: 2248
agccaaauguuuccaggga

SEQ ID NO: 174441 - RNA, 19 nt, Artificial Sequence
  Description of Artificial Sequence: Synthetic oligonucleotide
  Antisense strand to SEQ ID NO: 174440
ucccuggaaacauuuggcu

SEQ ID NO: 174442 - RNA, 19 nt, Artificial Sequence
  Description of Artificial Sequence: Synthetic oligonucleotide
  Sense strand starting at position 2536 of SEQ ID NO: 2248
aaaugagugguuggaccaa

SEQ ID NO: 174443 - RNA, 19 nt, Artificial Sequence
  Description of Artificial Sequence: Synthetic oligonucleotide
  Antisense strand to SEQ ID NO: 174442
uugguccaaccacucauuu

SEQ ID NO: 174444 - RNA, 19 nt, Artificial Sequence
  Description of Artificial Sequence: Synthetic oligonucleotide
  Sense strand starting at position 3019 of SEQ ID NO: 2248
cucccugucccugauucua

SEQ ID NO: 174445 - RNA, 19 nt, Artificial Sequence
  Description of Artificial Sequence: Synthetic oligonucleotide
  Antisense strand to SEQ ID NO: 174444
uagaaucagggacagggag

SEQ ID NO: 174446 - RNA, 19 nt, Artificial Sequence
  Description of Artificial Sequence: Synthetic oligonucleotide
  Sense strand starting at position 3137 of SEQ ID NO: 2248
agcucuagccacuaguuau

SEQ ID NO: 174447 - RNA, 19 nt, Artificial Sequence
  Description of Artificial Sequence: Synthetic oligonucleotide
  Antisense strand to SEQ ID NO: 174446
auaacuaguggcuagagcu

SEQ ID NO: 174448 - RNA, 19 nt, Artificial Sequence
  Description of Artificial Sequence: Synthetic oligonucleotide
  Sense strand starting at position 3311 of SEQ ID NO: 2248
uuagacugucccuguccaa

SEQ ID NO: 174449 - RNA, 19 nt, Artificial Sequence
  Description of Artificial Sequence: Synthetic oligonucleotide
  Antisense strand to SEQ ID NO: 174448
uuggacagggacagucuaa

SEQ ID NO: 174450 - RNA, 19 nt, Artificial Sequence
  Description of Artificial Sequence: Synthetic oligonucleotide
  Sense strand starting at position 3439 of SEQ ID NO: 2248
cggucuugguaauuagaau

SEQ ID NO: 174451 - RNA, 19 nt, Artificial Sequence
  Description of Artificial Sequence: Synthetic oligonucleotide
  Antisense strand to SEQ ID NO: 174450
auucuaauuaccaagaccg

SEQ ID NO: 174452 - RNA, 19 nt, Artificial Sequence
  Description of Artificial Sequence: Synthetic oligonucleotide
  Sense strand starting at position 3440 of SEQ ID NO: 2248
ggucuugguaauuagaaug

SEQ ID NO: 174453 - RNA, 19 nt, Artificial Sequence
  Description of Artificial Sequence: Synthetic oligonucleotide
  Antisense strand to SEQ ID NO: 174452
cauucuaauuaccaagacc

SEQ ID NO: 174454 - RNA, 19 nt, Artificial Sequence
  Description of Artificial Sequence: Synthetic oligonucleotide
  Sense strand starting at position 3445 of SEQ ID NO: 2248
ugguaauuagaaugcugga

SEQ ID NO: 174455 - RNA, 19 nt, Artificial Sequence
  Description of Artificial Sequence: Synthetic oligonucleotide
  Antisense strand to SEQ ID NO: 174454
uccagcauucuaauuacca

SEQ ID NO: 174456 - RNA, 19 nt, Artificial Sequence
  Description of Artificial Sequence: Synthetic oligonucleotide
  Sense strand starting at position 3503 of SEQ ID NO: 2248
auuuguucuugaguagguu

SEQ ID NO: 174457 - RNA, 19 nt, Artificial Sequence
  Description of Artificial Sequence: Synthetic oligonucleotide
  Antisense strand to SEQ ID NO: 174456
aaccuacucaagaacaaau

SEQ ID NO: 174458 - RNA, 19 nt, Artificial Sequence
  Description of Artificial Sequence: Synthetic oligonucleotide
  Sense strand starting at position 3504 of SEQ ID NO: 2248
uuuguucuugaguagguua

SEQ ID NO: 174459 - RNA, 19 nt, Artificial Sequence
  Description of Artificial Sequence: Synthetic oligonucleotide
  Antisense strand to SEQ ID NO: 174458
uaaccuacucaagaacaaa

SEQ ID NO: 174460 - RNA, 19 nt, Artificial Sequence
  Description of Artificial Sequence: Synthetic oligonucleotide
  Sense strand starting at position 3509 of SEQ ID NO: 2248
ucuugaguagguuaagguu

SEQ ID NO: 174461 - RNA, 19 nt, Artificial Sequence
  Description of Artificial Sequence: Synthetic oligonucleotide
  Antisense strand to SEQ ID NO: 174460
aaccuuaaccuacucaaga

SEQ ID NO: 174462 - RNA, 19 nt, Artificial Sequence
  Description of Artificial Sequence: Synthetic oligonucleotide
  Sense strand starting at position 3548 of SEQ ID NO: 2248
ccuugauggaucgauaugu

SEQ ID NO: 174463 - RNA, 19 nt, Artificial Sequence
  Description of Artificial Sequence: Synthetic oligonucleotide
  Antisense strand to SEQ ID NO: 174462
acauaucgauccaucaagg

SEQ ID NO: 174464 - RNA, 19 nt, Artificial Sequence
  Description of Artificial Sequence: Synthetic oligonucleotide
  Sense strand starting at position 3552 of SEQ ID NO: 2248
gauggaucgauaugugagu

SEQ ID NO: 174465 - RNA, 19 nt, Artificial Sequence
  Description of Artificial Sequence: Synthetic oligonucleotide
  Antisense strand to SEQ ID NO: 174464
acucacauaucgauccauc

SEQ ID NO: 174466 - RNA, 19 nt, Artificial Sequence
  Description of Artificial Sequence: Synthetic oligonucleotide
  Sense strand starting at position 3553 of SEQ ID NO: 2248
auggaucgauaugugaguu

SEQ ID NO: 174467 - RNA, 19 nt, Artificial Sequence
  Description of Artificial Sequence: Synthetic oligonucleotide
  Antisense strand to SEQ ID NO: 174466
aacucacauaucgauccau

SEQ ID NO: 174468 - RNA, 19 nt, Artificial Sequence
  Description of Artificial Sequence: Synthetic oligonucleotide
  Sense strand starting at position 3557 of SEQ ID NO: 2248
aucgauaugugaguugaga

SEQ ID NO: 174469 - RNA, 19 nt, Artificial Sequence
  Description of Artificial Sequence: Synthetic oligonucleotide
  Antisense strand to SEQ ID NO: 174468
ucucaacucacauaucgau

SEQ ID NO: 174470 - RNA, 19 nt, Artificial Sequence
  Description of Artificial Sequence: Synthetic oligonucleotide
  Sense strand starting at position 3559 of SEQ ID NO: 2248
cgauaugugaguugagaua

SEQ ID NO: 174471 - RNA, 19 nt, Artificial Sequence
  Description of Artificial Sequence: Synthetic oligonucleotide
  Antisense strand to SEQ ID NO: 174470
uaucucaacucacauaucg

SEQ ID NO: 174472 - RNA, 19 nt, Artificial Sequence
  Description of Artificial Sequence: Synthetic oligonucleotide
  Sense strand starting at position 3838 of SEQ ID NO: 2249
uaaccaacgggcuguuaaa

SEQ ID NO: 174473 - RNA, 19 nt, Artificial Sequence
  Description of Artificial Sequence: Synthetic oligonucleotide
  Antisense strand to SEQ ID NO: 174472
uuuaacagcccguugguua

SEQ ID NO: 174474 - RNA, 19 nt, Artificial Sequence
  Description of Artificial Sequence: Synthetic oligonucleotide
  Sense strand starting at position 3655 of SEQ ID NO: 2249
ggaagagcuuuguuauggu

SEQ ID NO: 174475 - RNA, 19 nt, Artificial Sequence
  Description of Artificial Sequence: Synthetic oligonucleotide
  Antisense strand to SEQ ID NO: 174474
accauaacaaagcucuucc

SEQ ID NO: 174476 - RNA, 19 nt, Artificial Sequence
  Description of Artificial Sequence: Synthetic oligonucleotide
  Sense strand starting at position 3653 of SEQ ID NO: 2249
ugggaagagcuuuguuaug

SEQ ID NO: 174477 - RNA, 19 nt, Artificial Sequence
  Description of Artificial Sequence: Synthetic oligonucleotide
  Antisense strand to SEQ ID NO: 174476
cauaacaaagcucuuccca

SEQ ID NO: 174478 - RNA, 19 nt, Artificial Sequence
  Description of Artificial Sequence: Synthetic oligonucleotide
  Sense strand starting at position 3162 of SEQ ID NO: 2249
cgguuugcaaguccuugua

SEQ ID NO: 174479 - RNA, 19 nt, Artificial Sequence
  Description of Artificial Sequence: Synthetic oligonucleotide
  Antisense strand to SEQ ID NO: 174478
uacaaggacuugcaaaccg

SEQ ID NO: 174480 - RNA, 19 nt, Artificial Sequence
  Description of Artificial Sequence: Synthetic oligonucleotide
  Sense strand starting at position 3142 of SEQ ID NO: 2249
aacacacguuccuccgaaa

SEQ ID NO: 174481 - RNA, 19 nt, Artificial Sequence
  Description of Artificial Sequence: Synthetic oligonucleotide
  Antisense strand to SEQ ID NO: 174480
uuucggaggaacguguguu

SEQ ID NO: 174482 - RNA, 19 nt, Artificial Sequence
  Description of Artificial Sequence: Synthetic oligonucleotide
  Sense strand starting at position 2894 of SEQ ID NO: 2249
gcgauacccaaugagacuu

SEQ ID NO: 174483 - RNA, 19 nt, Artificial Sequence
  Description of Artificial Sequence: Synthetic oligonucleotide
  Antisense strand to SEQ ID NO: 174482
aagucucauuggguaucgc

SEQ ID NO: 174484 - RNA, 19 nt, Artificial Sequence
  Description of Artificial Sequence: Synthetic oligonucleotide
  Sense strand starting at position 2893 of SEQ ID NO: 2249
ugcgauacccaaugagacu

SEQ ID NO: 174485 - RNA, 19 nt, Artificial Sequence
  Description of Artificial Sequence: Synthetic oligonucleotide
  Antisense strand to SEQ ID NO: 174484
agucucauuggguaucgca

SEQ ID NO: 174486 - RNA, 19 nt, Artificial Sequence
  Description of Artificial Sequence: Synthetic oligonucleotide
  Sense strand starting at position 2886 of SEQ ID NO: 2249
ccaguagugcgauacccaa

SEQ ID NO: 174487 - RNA, 19 nt, Artificial Sequence
  Description of Artificial Sequence: Synthetic oligonucleotide
  Antisense strand to SEQ ID NO: 174486
uuggguaucgcacuacugg

SEQ ID NO: 174488 - RNA, 19 nt, Artificial Sequence
  Description of Artificial Sequence: Synthetic oligonucleotide
  Sense strand starting at position 2801 of SEQ ID NO: 2249
cgaagucuuccuuaauagu

SEQ ID NO: 174489 - RNA, 19 nt, Artificial Sequence
  Description of Artificial Sequence: Synthetic oligonucleotide
  Antisense strand to SEQ ID NO: 174488
acuauuaaggaagacuucg

SEQ ID NO: 174490 - RNA, 19 nt, Artificial Sequence
  Description of Artificial Sequence: Synthetic oligonucleotide
  Sense strand starting at position 2799 of SEQ ID NO: 2249
agcgaagucuuccuuaaua

SEQ ID NO: 174491 - RNA, 19 nt, Artificial Sequence
  Description of Artificial Sequence: Synthetic oligonucleotide
  Antisense strand to SEQ ID NO: 174490
uauuaaggaagacuucgcu

SEQ ID NO: 174492 - RNA, 19 nt, Artificial Sequence
  Description of Artificial Sequence: Synthetic oligonucleotide
  Sense strand starting at position 2772 of SEQ ID NO: 2249
uuagcuuuccgugccggau

SEQ ID NO: 174493 - RNA, 19 nt, Artificial Sequence
  Description of Artificial Sequence: Synthetic oligonucleotide
  Antisense strand to SEQ ID NO: 174492
auccggcacggaaagcuaa

SEQ ID NO: 174494 - RNA, 19 nt, Artificial Sequence
  Description of Artificial Sequence: Synthetic oligonucleotide
  Sense strand starting at position 2725 of SEQ ID NO: 2249
ccggauucuagguagucua

SEQ ID NO: 174495 - RNA, 19 nt, Artificial Sequence
  Description of Artificial Sequence: Synthetic oligonucleotide
  Antisense strand to SEQ ID NO: 174494
uagacuaccuagaauccgg

SEQ ID NO: 174496 - RNA, 19 nt, Artificial Sequence
  Description of Artificial Sequence: Synthetic oligonucleotide
  Sense strand starting at position 2716 of SEQ ID NO: 2249
uccaauccuccggauucua

SEQ ID NO: 174497 - RNA, 19 nt, Artificial Sequence
  Description of Artificial Sequence: Synthetic oligonucleotide
  Antisense strand to SEQ ID NO: 174496
uagaauccggaggauugga

SEQ ID NO: 174498 - RNA, 19 nt, Artificial Sequence
  Description of Artificial Sequence: Synthetic oligonucleotide
  Sense strand starting at position 2594 of SEQ ID NO: 2249
uucucuuaucuagacuugu

SEQ ID NO: 174499 - RNA, 19 nt, Artificial Sequence
  Description of Artificial Sequence: Synthetic oligonucleotide
  Antisense strand to SEQ ID NO: 174498
acaagucuagauaagagaa

SEQ ID NO: 174500 - RNA, 19 nt, Artificial Sequence
  Description of Artificial Sequence: Synthetic oligonucleotide
  Sense strand starting at position 2558 of SEQ ID NO: 2249
cuuuauuucucggcuaugu

SEQ ID NO: 174501 - RNA, 19 nt, Artificial Sequence
  Description of Artificial Sequence: Synthetic oligonucleotide
  Antisense strand to SEQ ID NO: 174500
acauagccgagaaauaaag

SEQ ID NO: 174502 - RNA, 19 nt, Artificial Sequence
  Description of Artificial Sequence: Synthetic oligonucleotide
  Sense strand starting at position 2557 of SEQ ID NO: 2249
gcuuuauuucucggcuaug

SEQ ID NO: 174503 - RNA, 19 nt, Artificial Sequence
  Description of Artificial Sequence: Synthetic oligonucleotide
  Antisense strand to SEQ ID NO: 174502
cauagccgagaaauaaagc

SEQ ID NO: 174504 - RNA, 19 nt, Artificial Sequence
  Description of Artificial Sequence: Synthetic oligonucleotide
  Sense strand starting at position 2555 of SEQ ID NO: 2249
cggcuuuauuucucggcua

SEQ ID NO: 174505 - RNA, 19 nt, Artificial Sequence
  Description of Artificial Sequence: Synthetic oligonucleotide
  Antisense strand to SEQ ID NO: 174504
uagccgagaaauaaagccg

SEQ ID NO: 174506 - RNA, 19 nt, Artificial Sequence
  Description of Artificial Sequence: Synthetic oligonucleotide
  Sense strand starting at position 2480 of SEQ ID NO: 2249
ccaugaaagguguggugau

SEQ ID NO: 174507 - RNA, 19 nt, Artificial Sequence
  Description of Artificial Sequence: Synthetic oligonucleotide
  Antisense strand to SEQ ID NO: 174506
aucaccacaccuuucaugg

SEQ ID NO: 174508 - RNA, 19 nt, Artificial Sequence
  Description of Artificial Sequence: Synthetic oligonucleotide
  Sense strand starting at position 2344 of SEQ ID NO: 2249
ggacacaucucacugcauu

SEQ ID NO: 174509 - RNA, 19 nt, Artificial Sequence
  Description of Artificial Sequence: Synthetic oligonucleotide
  Antisense strand to SEQ ID NO: 174508
aaugcagugagaugugucc

SEQ ID NO: 174510 - RNA, 19 nt, Artificial Sequence
  Description of Artificial Sequence: Synthetic oligonucleotide
  Sense strand starting at position 2292 of SEQ ID NO: 2249
aucugugggacuuauguuu

SEQ ID NO: 174511 - RNA, 19 nt, Artificial Sequence
  Description of Artificial Sequence: Synthetic oligonucleotide
  Antisense strand to SEQ ID NO: 174510
aaacauaagucccacagau

SEQ ID NO: 174512 - RNA, 19 nt, Artificial Sequence
  Description of Artificial Sequence: Synthetic oligonucleotide
  Sense strand starting at position 2265 of SEQ ID NO: 2249
ggcccagugugaccugaau

SEQ ID NO: 174513 - RNA, 19 nt, Artificial Sequence
  Description of Artificial Sequence: Synthetic oligonucleotide
  Antisense strand to SEQ ID NO: 174512
auucaggucacacugggcc

SEQ ID NO: 174514 - RNA, 19 nt, Artificial Sequence
  Description of Artificial Sequence: Synthetic oligonucleotide
  Sense strand starting at position 2212 of SEQ ID NO: 2249
cugaaacaaucucagaaug

SEQ ID NO: 174515 - RNA, 19 nt, Artificial Sequence
  Description of Artificial Sequence: Synthetic oligonucleotide
  Antisense strand to SEQ ID NO: 174514
cauucugagauuguuucag

SEQ ID NO: 174516 - RNA, 19 nt, Artificial Sequence
  Description of Artificial Sequence: Synthetic oligonucleotide
  Sense strand starting at position 2172 of SEQ ID NO: 2249
agaaucugcccacagaguu

SEQ ID NO: 174517 - RNA, 19 nt, Artificial Sequence
  Description of Artificial Sequence: Synthetic oligonucleotide
  Antisense strand to SEQ ID NO: 174516
aacucugugggcagauucu

SEQ ID NO: 174518 - RNA, 19 nt, Artificial Sequence
  Description of Artificial Sequence: Synthetic oligonucleotide
  Sense strand starting at position 2169 of SEQ ID NO: 2249
agcagaaucugcccacaga

SEQ ID NO: 174519 - RNA, 19 nt, Artificial Sequence
  Description of Artificial Sequence: Synthetic oligonucleotide
  Antisense strand to SEQ ID NO: 174518
ucugugggcagauucugcu

SEQ ID NO: 174520 - RNA, 19 nt, Artificial Sequence
  Description of Artificial Sequence: Synthetic oligonucleotide
  Sense strand starting at position 2130 of SEQ ID NO: 2249
uugaacgguccuugaaguu

SEQ ID NO: 174521 - RNA, 19 nt, Artificial Sequence
  Description of Artificial Sequence: Synthetic oligonucleotide
  Antisense strand to SEQ ID NO: 174520
aacuucaaggaccguucaa

SEQ ID NO: 174522 - RNA, 19 nt, Artificial Sequence
  Description of Artificial Sequence: Synthetic oligonucleotide
  Sense strand starting at position 2116 of SEQ ID NO: 2249
guugaauccagauguugaa

SEQ ID NO: 174523 - RNA, 19 nt, Artificial Sequence
  Description of Artificial Sequence: Synthetic oligonucleotide
  Antisense strand to SEQ ID NO: 174522
uucaacaucuggauucaac

SEQ ID NO: 174524 - RNA, 19 nt, Artificial Sequence
  Description of Artificial Sequence: Synthetic oligonucleotide
  Sense strand starting at position 1577 of SEQ ID NO: 2249
uccaacuaguggguauuaa

SEQ ID NO: 174525 - RNA, 19 nt, Artificial Sequence
  Description of Artificial Sequence: Synthetic oligonucleotide
  Antisense strand to SEQ ID NO: 174524
uuaauacccacuaguugga

SEQ ID NO: 174526 - RNA, 19 nt, Artificial Sequence
  Description of Artificial Sequence: Synthetic oligonucleotide
  Sense strand starting at position 1386 of SEQ ID NO: 2249
ugggccuccgaguagaauu

SEQ ID NO: 174527 - RNA, 19 nt, Artificial Sequence
  Description of Artificial Sequence: Synthetic oligonucleotide
  Antisense strand to SEQ ID NO: 174526
aauucuacucggaggccca

SEQ ID NO: 174528 - RNA, 19 nt, Artificial Sequence
  Description of Artificial Sequence: Synthetic oligonucleotide
  Sense strand starting at position 1317 of SEQ ID NO: 2249
agaaauccuguauaccagu

SEQ ID NO: 174529 - RNA, 19 nt, Artificial Sequence
  Description of Artificial Sequence: Synthetic oligonucleotide
  Antisense strand to SEQ ID NO: 174528
acugguauacaggauuucu

SEQ ID NO: 174530 - RNA, 19 nt, Artificial Sequence
  Description of Artificial Sequence: Synthetic oligonucleotide
  Sense strand starting at position 1299 of SEQ ID NO: 2249
gaucuuagggcugggucaa

SEQ ID NO: 174531 - RNA, 19 nt, Artificial Sequence
  Description of Artificial Sequence: Synthetic oligonucleotide
  Antisense strand to SEQ ID NO: 174530
uugacccagcccuaagauc

SEQ ID NO: 174532 - RNA, 19 nt, Artificial Sequence
  Description of Artificial Sequence: Synthetic oligonucleotide
  Sense strand starting at position 1239 of SEQ ID NO: 2249
ugcgaagcuccgucucaaa

SEQ ID NO: 174533 - RNA, 19 nt, Artificial Sequence
  Description of Artificial Sequence: Synthetic oligonucleotide
  Antisense strand to SEQ ID NO: 174532
uuugagacggagcuucgca

SEQ ID NO: 174534 - RNA, 19 nt, Artificial Sequence
  Description of Artificial Sequence: Synthetic oligonucleotide
  Sense strand starting at position 786 of SEQ ID NO: 2249
gagaaccgucccugacaca

SEQ ID NO: 174535 - RNA, 19 nt, Artificial Sequence
  Description of Artificial Sequence: Synthetic oligonucleotide
  Antisense strand to SEQ ID NO: 174534
ugugucagggacgguucuc

SEQ ID NO: 174536 - RNA, 19 nt, Artificial Sequence
  Description of Artificial Sequence: Synthetic oligonucleotide
  Sense strand starting at position 772 of SEQ ID NO: 2249
acauguaaauagcugagaa

SEQ ID NO: 174537 - RNA, 19 nt, Artificial Sequence
  Description of Artificial Sequence: Synthetic oligonucleotide
  Antisense strand to SEQ ID NO: 174536
uucucagcuauuuacaugu

SEQ ID NO: 174538 - RNA, 19 nt, Artificial Sequence
  Description of Artificial Sequence: Synthetic oligonucleotide
  Sense strand starting at position 737 of SEQ ID NO: 2249
gccacuuagccugauauaa

SEQ ID NO: 174539 - RNA, 19 nt, Artificial Sequence
  Description of Artificial Sequence: Synthetic oligonucleotide
  Antisense strand to SEQ ID NO: 174538
uuauaucaggcuaaguggc

SEQ ID NO: 174540 - RNA, 19 nt, Artificial Sequence
  Description of Artificial Sequence: Synthetic oligonucleotide
  Sense strand starting at position 736 of SEQ ID NO: 2249
ugccacuuagccugauaua

SEQ ID NO: 174541 - RNA, 19 nt, Artificial Sequence
  Description of Artificial Sequence: Synthetic oligonucleotide
  Antisense strand to SEQ ID NO: 174540
uauaucaggcuaaguggca

SEQ ID NO: 174542 - RNA, 19 nt, Artificial Sequence
  Description of Artificial Sequence: Synthetic oligonucleotide
  Sense strand starting at position 255 of SEQ ID NO: 2249
ccgggaucgagggaucuua

SEQ ID NO: 174543 - RNA, 19 nt, Artificial Sequence
  Description of Artificial Sequence: Synthetic oligonucleotide
  Antisense strand to SEQ ID NO: 174542
uaagaucccucgaucccgg

SEQ ID NO: 174544 - RNA, 19 nt, Artificial Sequence
  Description of Artificial Sequence: Synthetic oligonucleotide
  Sense strand starting at position 39 of SEQ ID NO: 2249
gucaaacuugguuggaauc

SEQ ID NO: 174545 - RNA, 19 nt, Artificial Sequence
  Description of Artificial Sequence: Synthetic oligonucleotide
  Antisense strand to SEQ ID NO: 174544
gauuccaaccaaguuugac

SEQ ID NO: 174546 - RNA, 19 nt, Artificial Sequence
  Description of Artificial Sequence: Synthetic oligonucleotide
  Sense strand starting at position 38 of SEQ ID NO: 2249
ugucaaacuugguuggaau

SEQ ID NO: 174547 - RNA, 19 nt, Artificial Sequence
  Description of Artificial Sequence: Synthetic oligonucleotide
  Antisense strand to SEQ ID NO: 174546
auuccaaccaaguuugaca

SEQ ID NO: 174548 - RNA, 19 nt, Artificial Sequence
  Description of Artificial Sequence: Synthetic oligonucleotide
  Sense strand starting at position 37 of SEQ ID NO: 2249
gugucaaacuugguuggaa

SEQ ID NO: 174549 - RNA, 19 nt, Artificial Sequence
  Description of Artificial Sequence: Synthetic oligonucleotide
  Antisense strand to SEQ ID NO: 174548
uuccaaccaaguuugacac

SEQ ID NO: 174550 - RNA, 19 nt, Artificial Sequence
  Description of Artificial Sequence: Synthetic oligonucleotide
  Sense strand starting at position 6 of SEQ ID NO: 2249
gagagaauagccuguugga

SEQ ID NO: 174551 - RNA, 19 nt, Artificial Sequence
  Description of Artificial Sequence: Synthetic oligonucleotide
  Antisense strand to SEQ ID NO: 174550
uccaacaggcuauucucuc

SEQ ID NO: 174552 - RNA, 19 nt, Artificial Sequence
  Description of Artificial Sequence: Synthetic oligonucleotide
  Sense strand starting at position 3944 of SEQ ID NO: 2250
ggguaauagggugggaauu

SEQ ID NO: 174553 - RNA, 19 nt, Artificial Sequence
  Description of Artificial Sequence: Synthetic oligonucleotide
  Antisense strand to SEQ ID NO: 174552
aauucccacccuauuaccc

SEQ ID NO: 174554 - RNA, 19 nt, Artificial Sequence
  Description of Artificial Sequence: Synthetic oligonucleotide
  Sense strand starting at position 3821 of SEQ ID NO: 2250
guaguaacucgggauggaa

SEQ ID NO: 174555 - RNA, 19 nt, Artificial Sequence
  Description of Artificial Sequence: Synthetic oligonucleotide
  Antisense strand to SEQ ID NO: 174554
uuccaucccgaguuacuac

SEQ ID NO: 174556 - RNA, 19 nt, Artificial Sequence
  Description of Artificial Sequence: Synthetic oligonucleotide
  Sense strand starting at position 3417 of SEQ ID NO: 2250
ggcugccaucgcgagauuu

SEQ ID NO: 174557 - RNA, 19 nt, Artificial Sequence
  Description of Artificial Sequence: Synthetic oligonucleotide
  Antisense strand to SEQ ID NO: 174556
aaaucucgcgauggcagcc

SEQ ID NO: 174558 - RNA, 19 nt, Artificial Sequence
  Description of Artificial Sequence: Synthetic oligonucleotide
  Sense strand starting at position 3164 of SEQ ID NO: 2250
ccaaaugaccauuguagga

SEQ ID NO: 174559 - RNA, 19 nt, Artificial Sequence
  Description of Artificial Sequence: Synthetic oligonucleotide
  Antisense strand to SEQ ID NO: 174558
uccuacaauggucauuugg

SEQ ID NO: 174560 - RNA, 19 nt, Artificial Sequence
  Description of Artificial Sequence: Synthetic oligonucleotide
  Sense strand starting at position 3114 of SEQ ID NO: 2250
gaaagaggcuuggcucaaa

SEQ ID NO: 174561 - RNA, 19 nt, Artificial Sequence
  Description of Artificial Sequence: Synthetic oligonucleotide
  Antisense strand to SEQ ID NO: 174560
uuugagccaagccucuuuc

SEQ ID NO: 174562 - RNA, 19 nt, Artificial Sequence
  Description of Artificial Sequence: Synthetic oligonucleotide
  Sense strand starting at position 3023 of SEQ ID NO: 2250
ggcccuuuccaaggaaacu

SEQ ID NO: 174563 - RNA, 19 nt, Artificial Sequence
  Description of Artificial Sequence: Synthetic oligonucleotide
  Antisense strand to SEQ ID NO: 174562
aguuuccuuggaaagggcc

SEQ ID NO: 174564 - RNA, 19 nt, Artificial Sequence
  Description of Artificial Sequence: Synthetic oligonucleotide
  Sense strand starting at position 3001 of SEQ ID NO: 2250
gcuuuacuccuaugugaug

SEQ ID NO: 174565 - RNA, 19 nt, Artificial Sequence
  Description of Artificial Sequence: Synthetic oligonucleotide
  Antisense strand to SEQ ID NO: 174564
caucacauaggaguaaagc

SEQ ID NO: 174566 - RNA, 19 nt, Artificial Sequence
  Description of Artificial Sequence: Synthetic oligonucleotide
  Sense strand starting at position 2915 of SEQ ID NO: 2250
gcucguaagagauagauau

SEQ ID NO: 174567 - RNA, 19 nt, Artificial Sequence
  Description of Artificial Sequence: Synthetic oligonucleotide
  Antisense strand to SEQ ID NO: 174566
auaucuaucucuuacgagc

SEQ ID NO: 174568 - RNA, 19 nt, Artificial Sequence
  Description of Artificial Sequence: Synthetic oligonucleotide
  Sense strand starting at position 2913 of SEQ ID NO: 2250
uggcucguaagagauagau

SEQ ID NO: 174569 - RNA, 19 nt, Artificial Sequence
  Description of Artificial Sequence: Synthetic oligonucleotide
  Antisense strand to SEQ ID NO: 174568
aucuaucucuuacgagcca

SEQ ID NO: 174570 - RNA, 19 nt, Artificial Sequence
  Description of Artificial Sequence: Synthetic oligonucleotide
  Sense strand starting at position 2906 of SEQ ID NO: 2250
auguuacuggcucguaaga

SEQ ID NO: 174571 - RNA, 19 nt, Artificial Sequence
  Description of Artificial Sequence: Synthetic oligonucleotide
  Antisense strand to SEQ ID NO: 174570
ucuuacgagccaguaacau

SEQ ID NO: 174572 - RNA, 19 nt, Artificial Sequence
  Description of Artificial Sequence: Synthetic oligonucleotide
  Sense strand starting at position 2904 of SEQ ID NO: 2250
aaauguuacuggcucguaa

SEQ ID NO: 174573 - RNA, 19 nt, Artificial Sequence
  Description of Artificial Sequence: Synthetic oligonucleotide
  Antisense strand to SEQ ID NO: 174572
uuacgagccaguaacauuu

SEQ ID NO: 174574 - RNA, 19 nt, Artificial Sequence
  Description of Artificial Sequence: Synthetic oligonucleotide
  Sense strand starting at position 2874 of SEQ ID NO: 2250
ugcacuguggcuggaagau

SEQ ID NO: 174575 - RNA, 19 nt, Artificial Sequence
  Description of Artificial Sequence: Synthetic oligonucleotide
  Antisense strand to SEQ ID NO: 174574
aucuuccagccacagugca

SEQ ID NO: 174576 - RNA, 19 nt, Artificial Sequence
  Description of Artificial Sequence: Synthetic oligonucleotide
  Sense strand starting at position 2853 of SEQ ID NO: 2250
accucugugugucuagaau

SEQ ID NO: 174577 - RNA, 19 nt, Artificial Sequence
  Description of Artificial Sequence: Synthetic oligonucleotide
  Antisense strand to SEQ ID NO: 174576
auucuagacacacagaggu

SEQ ID NO: 174578 - RNA, 19 nt, Artificial Sequence
  Description of Artificial Sequence: Synthetic oligonucleotide
  Sense strand starting at position 2830 of SEQ ID NO: 2250
cagggauagugucuagcuu

SEQ ID NO: 174579 - RNA, 19 nt, Artificial Sequence
  Description of Artificial Sequence: Synthetic oligonucleotide
  Antisense strand to SEQ ID NO: 174578
aagcuagacacuaucccug

SEQ ID NO: 174580 - RNA, 19 nt, Artificial Sequence
  Description of Artificial Sequence: Synthetic oligonucleotide
  Sense strand starting at position 2771 of SEQ ID NO: 2250
ggacuagcuucucauuucu

SEQ ID NO: 174581 - RNA, 19 nt, Artificial Sequence
  Description of Artificial Sequence: Synthetic oligonucleotide
  Antisense strand to SEQ ID NO: 174580
agaaaugagaagcuagucc

SEQ ID NO: 174582 - RNA, 19 nt, Artificial Sequence
  Description of Artificial Sequence: Synthetic oligonucleotide
  Sense strand starting at position 2734 of SEQ ID NO: 2250
gauuuccaaugugaggauu

SEQ ID NO: 174583 - RNA, 19 nt, Artificial Sequence
  Description of Artificial Sequence: Synthetic oligonucleotide
  Antisense strand to SEQ ID NO: 174582
aauccucacauuggaaauc

SEQ ID NO: 174584 - RNA, 19 nt, Artificial Sequence
  Description of Artificial Sequence: Synthetic oligonucleotide
  Sense strand starting at position 2595 of SEQ ID NO: 2250
ggcaauuuauguucucauu

SEQ ID NO: 174585 - RNA, 19 nt, Artificial Sequence
  Description of Artificial Sequence: Synthetic oligonucleotide
  Antisense strand to SEQ ID NO: 174584
aaugagaacauaaauugcc

SEQ ID NO: 174586 - RNA, 19 nt, Artificial Sequence
  Description of Artificial Sequence: Synthetic oligonucleotide
  Sense strand starting at position 2455 of SEQ ID NO: 2250
gaaaccugaugggaaauca

SEQ ID NO: 174587 - RNA, 19 nt, Artificial Sequence
  Description of Artificial Sequence: Synthetic oligonucleotide
  Antisense strand to SEQ ID NO: 174586
ugauuucccaucagguuuc

SEQ ID NO: 174588 - RNA, 19 nt, Artificial Sequence
  Description of Artificial Sequence: Synthetic oligonucleotide
  Sense strand starting at position 2438 of SEQ ID NO: 2250
aagguaauauuugagcuga

SEQ ID NO: 174589 - RNA, 19 nt, Artificial Sequence
  Description of Artificial Sequence: Synthetic oligonucleotide
  Antisense strand to SEQ ID NO: 174588
ucagcucaaauauuaccuu

SEQ ID NO: 174590 - RNA, 19 nt, Artificial Sequence
  Description of Artificial Sequence: Synthetic oligonucleotide
  Sense strand starting at position 2433 of SEQ ID NO: 2250
uugguaagguaauauuuga

SEQ ID NO: 174591 - RNA, 19 nt, Artificial Sequence
  Description of Artificial Sequence: Synthetic oligonucleotide
  Antisense strand to SEQ ID NO: 174590
ucaaauauuaccuuaccaa

SEQ ID NO: 174592 - RNA, 19 nt, Artificial Sequence
  Description of Artificial Sequence: Synthetic oligonucleotide
  Sense strand starting at position 2422 of SEQ ID NO: 2250
gaaagaccucuuugguaag

SEQ ID NO: 174593 - RNA, 19 nt, Artificial Sequence
  Description of Artificial Sequence: Synthetic oligonucleotide
  Antisense strand to SEQ ID NO: 174592
cuuaccaaagaggucuuuc

SEQ ID NO: 174594 - RNA, 19 nt, Artificial Sequence
  Description of Artificial Sequence: Synthetic oligonucleotide
  Sense strand starting at position 2348 of SEQ ID NO: 2250
ugagaagcuuauguucuau

SEQ ID NO: 174595 - RNA, 19 nt, Artificial Sequence
  Description of Artificial Sequence: Synthetic oligonucleotide
  Antisense strand to SEQ ID NO: 174594
auagaacauaagcuucuca

SEQ ID NO: 174596 - RNA, 19 nt, Artificial Sequence
  Description of Artificial Sequence: Synthetic oligonucleotide
  Sense strand starting at position 2345 of SEQ ID NO: 2250
ccuugagaagcuuauguuc

SEQ ID NO: 174597 - RNA, 19 nt, Artificial Sequence
  Description of Artificial Sequence: Synthetic oligonucleotide
  Antisense strand to SEQ ID NO: 174596
gaacauaagcuucucaagg

SEQ ID NO: 174598 - RNA, 19 nt, Artificial Sequence
  Description of Artificial Sequence: Synthetic oligonucleotide
  Sense strand starting at position 2292 of SEQ ID NO: 2250
auuauuagcuaggcagaca

SEQ ID NO: 174599 - RNA, 19 nt, Artificial Sequence
  Description of Artificial Sequence: Synthetic oligonucleotide
  Antisense strand to SEQ ID NO: 174598
ugucugccuagcuaauaau

SEQ ID NO: 174600 - RNA, 19 nt, Artificial Sequence
  Description of Artificial Sequence: Synthetic oligonucleotide
  Sense strand starting at position 2087 of SEQ ID NO: 2250
augucauccuuucugaaag

SEQ ID NO: 174601 - RNA, 19 nt, Artificial Sequence
  Description of Artificial Sequence: Synthetic oligonucleotide
  Antisense strand to SEQ ID NO: 174600
cuuucagaaaggaugacau

SEQ ID NO: 174602 - RNA, 19 nt, Artificial Sequence
  Description of Artificial Sequence: Synthetic oligonucleotide
  Sense strand starting at position 1846 of SEQ ID NO: 2250
gcaguuuggacccaugaca

SEQ ID NO: 174603 - RNA, 19 nt, Artificial Sequence
  Description of Artificial Sequence: Synthetic oligonucleotide
  Antisense strand to SEQ ID NO: 174602
ugucauggguccaaacugc

SEQ ID NO: 174604 - RNA, 19 nt, Artificial Sequence
  Description of Artificial Sequence: Synthetic oligonucleotide
  Sense strand starting at position 1818 of SEQ ID NO: 2250
ccuuuaucucaagggcacu

SEQ ID NO: 174605 - RNA, 19 nt, Artificial Sequence
  Description of Artificial Sequence: Synthetic oligonucleotide
  Antisense strand to SEQ ID NO: 174604
agugcccuugagauaaagg

SEQ ID NO: 174606 - RNA, 19 nt, Artificial Sequence
  Description of Artificial Sequence: Synthetic oligonucleotide
  Sense strand starting at position 1803 of SEQ ID NO: 2250
gggacugauucccuuccuu

SEQ ID NO: 174607 - RNA, 19 nt, Artificial Sequence
  Description of Artificial Sequence: Synthetic oligonucleotide
  Antisense strand to SEQ ID NO: 174606
aaggaagggaaucaguccc

SEQ ID NO: 174608 - RNA, 19 nt, Artificial Sequence
  Description of Artificial Sequence: Synthetic oligonucleotide
  Sense strand starting at position 1715 of SEQ ID NO: 2250
auauuuaggucugaucaug

SEQ ID NO: 174609 - RNA, 19 nt, Artificial Sequence
  Description of Artificial Sequence: Synthetic oligonucleotide
  Antisense strand to SEQ ID NO: 174608
caugaucagaccuaaauau

SEQ ID NO: 174610 - RNA, 19 nt, Artificial Sequence
  Description of Artificial Sequence: Synthetic oligonucleotide
  Sense strand starting at position 1710 of SEQ ID NO: 2250
uucugauauuuaggucuga

SEQ ID NO: 174611 - RNA, 19 nt, Artificial Sequence
  Description of Artificial Sequence: Synthetic oligonucleotide
  Antisense strand to SEQ ID NO: 174610
ucagaccuaaauaucagaa

SEQ ID NO: 174612 - RNA, 19 nt, Artificial Sequence
  Description of Artificial Sequence: Synthetic oligonucleotide
  Sense strand starting at position 1704 of SEQ ID NO: 2250
cugcuauucugauauuuag

SEQ ID NO: 174613 - RNA, 19 nt, Artificial Sequence
  Description of Artificial Sequence: Synthetic oligonucleotide
  Antisense strand to SEQ ID NO: 174612
cuaaauaucagaauagcag

SEQ ID NO: 174614 - RNA, 19 nt, Artificial Sequence
  Description of Artificial Sequence: Synthetic oligonucleotide
  Sense strand starting at position 1699 of SEQ ID NO: 2250
ugggucugcuauucugaua

SEQ ID NO: 174615 - RNA, 19 nt, Artificial Sequence
  Description of Artificial Sequence: Synthetic oligonucleotide
  Antisense strand to SEQ ID NO: 174614
uaucagaauagcagaccca

SEQ ID NO: 174616 - RNA, 19 nt, Artificial Sequence
  Description of Artificial Sequence: Synthetic oligonucleotide
  Sense strand starting at position 1475 of SEQ ID NO: 2250
uuucuuucccacugaggau

SEQ ID NO: 174617 - RNA, 19 nt, Artificial Sequence
  Description of Artificial Sequence: Synthetic oligonucleotide
  Antisense strand to SEQ ID NO: 174616
auccucagugggaaagaaa

SEQ ID NO: 174618 - RNA, 19 nt, Artificial Sequence
  Description of Artificial Sequence: Synthetic oligonucleotide
  Sense strand starting at position 1458 of SEQ ID NO: 2250
ucuagaacuuugccaaguu

SEQ ID NO: 174619 - RNA, 19 nt, Artificial Sequence
  Description of Artificial Sequence: Synthetic oligonucleotide
  Antisense strand to SEQ ID NO: 174618
aacuuggcaaaguucuaga

SEQ ID NO: 174620 - RNA, 19 nt, Artificial Sequence
  Description of Artificial Sequence: Synthetic oligonucleotide
  Sense strand starting at position 1412 of SEQ ID NO: 2250
uggagucauggccacucua

SEQ ID NO: 174621 - RNA, 19 nt, Artificial Sequence
  Description of Artificial Sequence: Synthetic oligonucleotide
  Antisense strand to SEQ ID NO: 174620
uagaguggccaugacucca

SEQ ID NO: 174622 - RNA, 19 nt, Artificial Sequence
  Description of Artificial Sequence: Synthetic oligonucleotide
  Sense strand starting at position 1291 of SEQ ID NO: 2250
gcacccuuucgacaucaaa

SEQ ID NO: 174623 - RNA, 19 nt, Artificial Sequence
  Description of Artificial Sequence: Synthetic oligonucleotide
  Antisense strand to SEQ ID NO: 174622
uuugaugucgaaagggugc

SEQ ID NO: 174624 - RNA, 19 nt, Artificial Sequence
  Description of Artificial Sequence: Synthetic oligonucleotide
  Sense strand starting at position 1131 of SEQ ID NO: 2250
ccugucuucuaguuauuag

SEQ ID NO: 174625 - RNA, 19 nt, Artificial Sequence
  Description of Artificial Sequence: Synthetic oligonucleotide
  Antisense strand to SEQ ID NO: 174624
cuaauaacuagaagacagg

SEQ ID NO: 174626 - RNA, 19 nt, Artificial Sequence
  Description of Artificial Sequence: Synthetic oligonucleotide
  Sense strand starting at position 1109 of SEQ ID NO: 2250
gaggaaagcucugucagaa

SEQ ID NO: 174627 - RNA, 19 nt, Artificial Sequence
  Description of Artificial Sequence: Synthetic oligonucleotide
  Antisense strand to SEQ ID NO: 174626
uucugacagagcuuuccuc

SEQ ID NO: 174628 - RNA, 19 nt, Artificial Sequence
  Description of Artificial Sequence: Synthetic oligonucleotide
  Sense strand starting at position 1108 of SEQ ID NO: 2250
agaggaaagcucugucaga

SEQ ID NO: 174629 - RNA, 19 nt, Artificial Sequence
  Description of Artificial Sequence: Synthetic oligonucleotide
  Antisense strand to SEQ ID NO: 174628
ucugacagagcuuuccucu

SEQ ID NO: 174630 - RNA, 19 nt, Artificial Sequence
  Description of Artificial Sequence: Synthetic oligonucleotide
  Sense strand starting at position 1088 of SEQ ID NO: 2250
caugucauccugcagggaa

SEQ ID NO: 174631 - RNA, 19 nt, Artificial Sequence
  Description of Artificial Sequence: Synthetic oligonucleotide
  Antisense strand to SEQ ID NO: 174630
uucccugcaggaugacaug

SEQ ID NO: 174632 - RNA, 19 nt, Artificial Sequence
  Description of Artificial Sequence: Synthetic oligonucleotide
  Sense strand starting at position 97 of SEQ ID NO: 2251
guaauucucucaguagaau

SEQ ID NO: 174633 - RNA, 19 nt, Artificial Sequence
  Description of Artificial Sequence: Synthetic oligonucleotide
  Antisense strand to SEQ ID NO: 174632
auucuacugagagaauuac

SEQ ID NO: 174634 - RNA, 19 nt, Artificial Sequence
  Description of Artificial Sequence: Synthetic oligonucleotide
  Sense strand starting at position 131 of SEQ ID NO: 2251
ccaagagucuuucccugau

SEQ ID NO: 174635 - RNA, 19 nt, Artificial Sequence
  Description of Artificial Sequence: Synthetic oligonucleotide
  Antisense strand to SEQ ID NO: 174634
aucagggaaagacucuugg

SEQ ID NO: 174636 - RNA, 19 nt, Artificial Sequence
  Description of Artificial Sequence: Synthetic oligonucleotide
  Sense strand starting at position 135 of SEQ ID NO: 2251
gagucuuucccugaugguu

SEQ ID NO: 174637 - RNA, 19 nt, Artificial Sequence
  Description of Artificial Sequence: Synthetic oligonucleotide
  Antisense strand to SEQ ID NO: 174636
aaccaucagggaaagacuc

SEQ ID NO: 174638 - RNA, 19 nt, Artificial Sequence
  Description of Artificial Sequence: Synthetic oligonucleotide
  Sense strand starting at position 206 of SEQ ID NO: 2251
uggauuuccuauggaggaa

SEQ ID NO: 174639 - RNA, 19 nt, Artificial Sequence
  Description of Artificial Sequence: Synthetic oligonucleotide
  Antisense strand to SEQ ID NO: 174638
uuccuccauaggaaaucca

SEQ ID NO: 174640 - RNA, 19 nt, Artificial Sequence
  Description of Artificial Sequence: Synthetic oligonucleotide
  Sense strand starting at position 379 of SEQ ID NO: 2251
aggugaaggaucuaguguu

SEQ ID NO: 174641 - RNA, 19 nt, Artificial Sequence
  Description of Artificial Sequence: Synthetic oligonucleotide
  Antisense strand to SEQ ID NO: 174640
aacacuagauccuucaccu

SEQ ID NO: 174642 - RNA, 19 nt, Artificial Sequence
  Description of Artificial Sequence: Synthetic oligonucleotide
  Sense strand starting at position 488 of SEQ ID NO: 2251
guuggaugucauuacuaac

SEQ ID NO: 174643 - RNA, 19 nt, Artificial Sequence
  Description of Artificial Sequence: Synthetic oligonucleotide
  Antisense strand to SEQ ID NO: 174642
guuaguaaugacauccaac

SEQ ID NO: 174644 - RNA, 19 nt, Artificial Sequence
  Description of Artificial Sequence: Synthetic oligonucleotide
  Sense strand starting at position 550 of SEQ ID NO: 2251
agcagacaauugguuuaau

SEQ ID NO: 174645 - RNA, 19 nt, Artificial Sequence
  Description of Artificial Sequence: Synthetic oligonucleotide
  Antisense strand to SEQ ID NO: 174644
auuaaaccaauugucugcu

SEQ ID NO: 174646 - RNA, 19 nt, Artificial Sequence
  Description of Artificial Sequence: Synthetic oligonucleotide
  Sense strand starting at position 551 of SEQ ID NO: 2251
gcagacaauugguuuaaug

SEQ ID NO: 174647 - RNA, 19 nt, Artificial Sequence
  Description of Artificial Sequence: Synthetic oligonucleotide
  Antisense strand to SEQ ID NO: 174646
cauuaaaccaauugucugc

SEQ ID NO: 174648 - RNA, 19 nt, Artificial Sequence
  Description of Artificial Sequence: Synthetic oligonucleotide
  Sense strand starting at position 553 of SEQ ID NO: 2251
agacaauugguuuaauguc

SEQ ID NO: 174649 - RNA, 19 nt, Artificial Sequence
  Description of Artificial Sequence: Synthetic oligonucleotide
  Antisense strand to SEQ ID NO: 174648
gacauuaaaccaauugucu

SEQ ID NO: 174650 - RNA, 19 nt, Artificial Sequence
  Description of Artificial Sequence: Synthetic oligonucleotide
  Sense strand starting at position 560 of SEQ ID NO: 2251
ugguuuaaugucuauucua

SEQ ID NO: 174651 - RNA, 19 nt, Artificial Sequence
  Description of Artificial Sequence: Synthetic oligonucleotide
  Antisense strand to SEQ ID NO: 174650
uagaauagacauuaaacca

SEQ ID NO: 174652 - RNA, 19 nt, Artificial Sequence
  Description of Artificial Sequence: Synthetic oligonucleotide
  Sense strand starting at position 1222 of SEQ ID NO: 2251
ggaguagcuguccagauua

SEQ ID NO: 174653 - RNA, 19 nt, Artificial Sequence
  Description of Artificial Sequence: Synthetic oligonucleotide
  Antisense strand to SEQ ID NO: 174652
uaaucuggacagcuacucc

SEQ ID NO: 174654 - RNA, 19 nt, Artificial Sequence
  Description of Artificial Sequence: Synthetic oligonucleotide
  Sense strand starting at position 1224 of SEQ ID NO: 2251
aguagcuguccagauuaac

SEQ ID NO: 174655 - RNA, 19 nt, Artificial Sequence
  Description of Artificial Sequence: Synthetic oligonucleotide
  Antisense strand to SEQ ID NO: 174654
guuaaucuggacagcuacu

SEQ ID NO: 174656 - RNA, 19 nt, Artificial Sequence
  Description of Artificial Sequence: Synthetic oligonucleotide
  Sense strand starting at position 1263 of SEQ ID NO: 2251
acuucugauccucaguaag

SEQ ID NO: 174657 - RNA, 19 nt, Artificial Sequence
  Description of Artificial Sequence: Synthetic oligonucleotide
  Antisense strand to SEQ ID NO: 174656
cuuacugaggaucagaagu

SEQ ID NO: 174658 - RNA, 19 nt, Artificial Sequence
  Description of Artificial Sequence: Synthetic oligonucleotide
  Sense strand starting at position 1266 of SEQ ID NO: 2251
ucugauccucaguaaguga

SEQ ID NO: 174659 - RNA, 19 nt, Artificial Sequence
  Description of Artificial Sequence: Synthetic oligonucleotide
  Antisense strand to SEQ ID NO: 174658
ucacuuacugaggaucaga

SEQ ID NO: 174660 - RNA, 19 nt, Artificial Sequence
  Description of Artificial Sequence: Synthetic oligonucleotide
  Sense strand starting at position 1274 of SEQ ID NO: 2251
ucaguaagugacugaugga

SEQ ID NO: 174661 - RNA, 19 nt, Artificial Sequence
  Description of Artificial Sequence: Synthetic oligonucleotide
  Antisense strand to SEQ ID NO: 174660
uccaucagucacuuacuga

SEQ ID NO: 174662 - RNA, 19 nt, Artificial Sequence
  Description of Artificial Sequence: Synthetic oligonucleotide
  Sense strand starting at position 1385 of SEQ ID NO: 2251
cgauaugucccagagucau

SEQ ID NO: 174663 - RNA, 19 nt, Artificial Sequence
  Description of Artificial Sequence: Synthetic oligonucleotide
  Antisense strand to SEQ ID NO: 174662
augacucugggacauaucg

SEQ ID NO: 174664 - RNA, 19 nt, Artificial Sequence
  Description of Artificial Sequence: Synthetic oligonucleotide
  Sense strand starting at position 1398 of SEQ ID NO: 2251
agucauacuccugagcaua

SEQ ID NO: 174665 - RNA, 19 nt, Artificial Sequence
  Description of Artificial Sequence: Synthetic oligonucleotide
  Antisense strand to SEQ ID NO: 174664
uaugcucaggaguaugacu

SEQ ID NO: 174666 - RNA, 19 nt, Artificial Sequence
  Description of Artificial Sequence: Synthetic oligonucleotide
  Sense strand starting at position 1527 of SEQ ID NO: 2251
acuccaagaugucugaacu

SEQ ID NO: 174667 - RNA, 19 nt, Artificial Sequence
  Description of Artificial Sequence: Synthetic oligonucleotide
  Antisense strand to SEQ ID NO: 174666
aguucagacaucuuggagu

SEQ ID NO: 174668 - RNA, 19 nt, Artificial Sequence
  Description of Artificial Sequence: Synthetic oligonucleotide
  Sense strand starting at position 1528 of SEQ ID NO: 2251
cuccaagaugucugaacuc

SEQ ID NO: 174669 - RNA, 19 nt, Artificial Sequence
  Description of Artificial Sequence: Synthetic oligonucleotide
  Antisense strand to SEQ ID NO: 174668
gaguucagacaucuuggag

SEQ ID NO: 174670 - RNA, 19 nt, Artificial Sequence
  Description of Artificial Sequence: Synthetic oligonucleotide
  Sense strand starting at position 1563 of SEQ ID NO: 2251
auuccuugccaaugagaau

SEQ ID NO: 174671 - RNA, 19 nt, Artificial Sequence
  Description of Artificial Sequence: Synthetic oligonucleotide
  Antisense strand to SEQ ID NO: 174670
auucucauuggcaaggaau

SEQ ID NO: 174672 - RNA, 19 nt, Artificial Sequence
  Description of Artificial Sequence: Synthetic oligonucleotide
  Sense strand starting at position 1569 of SEQ ID NO: 2251
ugccaaugagaauggugaa

SEQ ID NO: 174673 - RNA, 19 nt, Artificial Sequence
  Description of Artificial Sequence: Synthetic oligonucleotide
  Antisense strand to SEQ ID NO: 174672
uucaccauucucauuggca

SEQ ID NO: 174674 - RNA, 19 nt, Artificial Sequence
  Description of Artificial Sequence: Synthetic oligonucleotide
  Sense strand starting at position 1570 of SEQ ID NO: 2251
gccaaugagaauggugaaa

SEQ ID NO: 174675 - RNA, 19 nt, Artificial Sequence
  Description of Artificial Sequence: Synthetic oligonucleotide
  Antisense strand to SEQ ID NO: 174674
uuucaccauucucauuggc

SEQ ID NO: 174676 - RNA, 19 nt, Artificial Sequence
  Description of Artificial Sequence: Synthetic oligonucleotide
  Sense strand starting at position 1602 of SEQ ID NO: 2251
agauccaguuggucagaca

SEQ ID NO: 174677 - RNA, 19 nt, Artificial Sequence
  Description of Artificial Sequence: Synthetic oligonucleotide
  Antisense strand to SEQ ID NO: 174676
ugucugaccaacuggaucu

SEQ ID NO: 174678 - RNA, 19 nt, Artificial Sequence
  Description of Artificial Sequence: Synthetic oligonucleotide
  Sense strand starting at position 1603 of SEQ ID NO: 2251
gauccaguuggucagacau

SEQ ID NO: 174679 - RNA, 19 nt, Artificial Sequence
  Description of Artificial Sequence: Synthetic oligonucleotide
  Antisense strand to SEQ ID NO: 174678
augucugaccaacuggauc

SEQ ID NO: 174680 - RNA, 19 nt, Artificial Sequence
  Description of Artificial Sequence: Synthetic oligonucleotide
  Sense strand starting at position 1717 of SEQ ID NO: 2251
gguuguggcauugaugaua

SEQ ID NO: 174681 - RNA, 19 nt, Artificial Sequence
  Description of Artificial Sequence: Synthetic oligonucleotide
  Antisense strand to SEQ ID NO: 174680
uaucaucaaugccacaacc

SEQ ID NO: 174682 - RNA, 19 nt, Artificial Sequence
  Description of Artificial Sequence: Synthetic oligonucleotide
  Sense strand starting at position 1720 of SEQ ID NO: 2251
uguggcauugaugauaacu

SEQ ID NO: 174683 - RNA, 19 nt, Artificial Sequence
  Description of Artificial Sequence: Synthetic oligonucleotide
  Antisense strand to SEQ ID NO: 174682
aguuaucaucaaugccaca

SEQ ID NO: 174684 - RNA, 19 nt, Artificial Sequence
  Description of Artificial Sequence: Synthetic oligonucleotide
  Sense strand starting at position 1783 of SEQ ID NO: 2251
agguguagucaccaccaaa

SEQ ID NO: 174685 - RNA, 19 nt, Artificial Sequence
  Description of Artificial Sequence: Synthetic oligonucleotide
  Antisense strand to SEQ ID NO: 174684
uuugguggugacuacaccu

SEQ ID NO: 174686 - RNA, 19 nt, Artificial Sequence
  Description of Artificial Sequence: Synthetic oligonucleotide
  Sense strand starting at position 1933 of SEQ ID NO: 2251
acuugauuccuuugacaug

SEQ ID NO: 174687 - RNA, 19 nt, Artificial Sequence
  Description of Artificial Sequence: Synthetic oligonucleotide
  Antisense strand to SEQ ID NO: 174686
caugucaaaggaaucaagu

SEQ ID NO: 174688 - RNA, 19 nt, Artificial Sequence
  Description of Artificial Sequence: Synthetic oligonucleotide
  Sense strand starting at position 1972 of SEQ ID NO: 2251
agauaugaugcauguauug

SEQ ID NO: 174689 - RNA, 19 nt, Artificial Sequence
  Description of Artificial Sequence: Synthetic oligonucleotide
  Antisense strand to SEQ ID NO: 174688
caauacaugcaucauaucu

SEQ ID NO: 174690 - RNA, 19 nt, Artificial Sequence
  Description of Artificial Sequence: Synthetic oligonucleotide
  Sense strand starting at position 2526 of SEQ ID NO: 2251
accucaaaugcauagugaa

SEQ ID NO: 174691 - RNA, 19 nt, Artificial Sequence
  Description of Artificial Sequence: Synthetic oligonucleotide
  Antisense strand to SEQ ID NO: 174690
uucacuaugcauuugaggu

SEQ ID NO: 174692 - RNA, 19 nt, Artificial Sequence
  Description of Artificial Sequence: Synthetic oligonucleotide
  Sense strand starting at position 2616 of SEQ ID NO: 2251
aguuaaaugucaccaaaua

SEQ ID NO: 174693 - RNA, 19 nt, Artificial Sequence
  Description of Artificial Sequence: Synthetic oligonucleotide
  Antisense strand to SEQ ID NO: 174692
uauuuggugacauuuaacu

SEQ ID NO: 174694 - RNA, 19 nt, Artificial Sequence
  Description of Artificial Sequence: Synthetic oligonucleotide
  Sense strand starting at position 2823 of SEQ ID NO: 2251
ugauauacuguaugugaga

SEQ ID NO: 174695 - RNA, 19 nt, Artificial Sequence
  Description of Artificial Sequence: Synthetic oligonucleotide
  Antisense strand to SEQ ID NO: 174694
ucucacauacaguauauca

SEQ ID NO: 174696 - RNA, 19 nt, Artificial Sequence
  Description of Artificial Sequence: Synthetic oligonucleotide
  Sense strand starting at position 2824 of SEQ ID NO: 2251
gauauacuguaugugagaa

SEQ ID NO: 174697 - RNA, 19 nt, Artificial Sequence
  Description of Artificial Sequence: Synthetic oligonucleotide
  Antisense strand to SEQ ID NO: 174696
uucucacauacaguauauc

SEQ ID NO: 174698 - RNA, 19 nt, Artificial Sequence
  Description of Artificial Sequence: Synthetic oligonucleotide
  Sense strand starting at position 2836 of SEQ ID NO: 2251
gugagaacacuuuguaaag

SEQ ID NO: 174699 - RNA, 19 nt, Artificial Sequence
  Description of Artificial Sequence: Synthetic oligonucleotide
  Antisense strand to SEQ ID NO: 174698
cuuuacaaaguguucucac

SEQ ID NO: 174700 - RNA, 19 nt, Artificial Sequence
  Description of Artificial Sequence: Synthetic oligonucleotide
  Sense strand starting at position 2837 of SEQ ID NO: 2251
ugagaacacuuuguaaagu

SEQ ID NO: 174701 - RNA, 19 nt, Artificial Sequence
  Description of Artificial Sequence: Synthetic oligonucleotide
  Antisense strand to SEQ ID NO: 174700
acuuuacaaaguguucuca

SEQ ID NO: 174702 - RNA, 19 nt, Artificial Sequence
  Description of Artificial Sequence: Synthetic oligonucleotide
  Sense strand starting at position 2845 of SEQ ID NO: 2251
cuuuguaaagugugaaaca

SEQ ID NO: 174703 - RNA, 19 nt, Artificial Sequence
  Description of Artificial Sequence: Synthetic oligonucleotide
  Antisense strand to SEQ ID NO: 174702
uguuucacacuuuacaaag

SEQ ID NO: 174704 - RNA, 19 nt, Artificial Sequence
  Description of Artificial Sequence: Synthetic oligonucleotide
  Sense strand starting at position 2934 of SEQ ID NO: 2251
aaaucagaauguuuaaggu

SEQ ID NO: 174705 - RNA, 19 nt, Artificial Sequence
  Description of Artificial Sequence: Synthetic oligonucleotide
  Antisense strand to SEQ ID NO: 174704
accuuaaacauucugauuu

SEQ ID NO: 174706 - RNA, 19 nt, Artificial Sequence
  Description of Artificial Sequence: Synthetic oligonucleotide
  Sense strand starting at position 3125 of SEQ ID NO: 2251
ugaugucaaagauggaguu

SEQ ID NO: 174707 - RNA, 19 nt, Artificial Sequence
  Description of Artificial Sequence: Synthetic oligonucleotide
  Antisense strand to SEQ ID NO: 174706
aacuccaucuuugacauca

SEQ ID NO: 174708 - RNA, 19 nt, Artificial Sequence
  Description of Artificial Sequence: Synthetic oligonucleotide
  Sense strand starting at position 3200 of SEQ ID NO: 2251
uuacauagacuuugugaaa

SEQ ID NO: 174709 - RNA, 19 nt, Artificial Sequence
  Description of Artificial Sequence: Synthetic oligonucleotide
  Antisense strand to SEQ ID NO: 174708
uuucacaaagucuauguaa

SEQ ID NO: 174710 - RNA, 19 nt, Artificial Sequence
  Description of Artificial Sequence: Synthetic oligonucleotide
  Sense strand starting at position 3648 of SEQ ID NO: 2251
gugagcaguguuuacaaau

SEQ ID NO: 174711 - RNA, 19 nt, Artificial Sequence
  Description of Artificial Sequence: Synthetic oligonucleotide
  Antisense strand to SEQ ID NO: 174710
auuuguaaacacugcucac

SEQ ID NO: 174712 - RNA, 19 nt, Artificial Sequence
  Description of Artificial Sequence: Synthetic oligonucleotide
  Sense strand starting at position 3091 of SEQ ID NO: 2252
aggagggucguugaaguaa

SEQ ID NO: 174713 - RNA, 19 nt, Artificial Sequence
  Description of Artificial Sequence: Synthetic oligonucleotide
  Antisense strand to SEQ ID NO: 174712
uuacuucaacgacccuccu

SEQ ID NO: 174714 - RNA, 19 nt, Artificial Sequence
  Description of Artificial Sequence: Synthetic oligonucleotide
  Sense strand starting at position 3089 of SEQ ID NO: 2252
agaggagggucguugaagu

SEQ ID NO: 174715 - RNA, 19 nt, Artificial Sequence
  Description of Artificial Sequence: Synthetic oligonucleotide
  Antisense strand to SEQ ID NO: 174714
acuucaacgacccuccucu

SEQ ID NO: 174716 - RNA, 19 nt, Artificial Sequence
  Description of Artificial Sequence: Synthetic oligonucleotide
  Sense strand starting at position 2815 of SEQ ID NO: 2252
uuuguaaggucugguucca

SEQ ID NO: 174717 - RNA, 19 nt, Artificial Sequence
  Description of Artificial Sequence: Synthetic oligonucleotide
  Antisense strand to SEQ ID NO: 174716
uggaaccagaccuuacaaa

SEQ ID NO: 174718 - RNA, 19 nt, Artificial Sequence
  Description of Artificial Sequence: Synthetic oligonucleotide
  Sense strand starting at position 2210 of SEQ ID NO: 2252
ggucucugucccugcuaaa

SEQ ID NO: 174719 - RNA, 19 nt, Artificial Sequence
  Description of Artificial Sequence: Synthetic oligonucleotide
  Antisense strand to SEQ ID NO: 174718
uuuagcagggacagagacc

SEQ ID NO: 174720 - RNA, 19 nt, Artificial Sequence
  Description of Artificial Sequence: Synthetic oligonucleotide
  Sense strand starting at position 1715 of SEQ ID NO: 2252
cuucauugguagggucaga

SEQ ID NO: 174721 - RNA, 19 nt, Artificial Sequence
  Description of Artificial Sequence: Synthetic oligonucleotide
  Antisense strand to SEQ ID NO: 174720
ucugacccuaccaaugaag

SEQ ID NO: 174722 - RNA, 19 nt, Artificial Sequence
  Description of Artificial Sequence: Synthetic oligonucleotide
  Sense strand starting at position 1166 of SEQ ID NO: 2252
uguucucagucuuacggaa

SEQ ID NO: 174723 - RNA, 19 nt, Artificial Sequence
  Description of Artificial Sequence: Synthetic oligonucleotide
  Antisense strand to SEQ ID NO: 174722
uuccguaagacugagaaca

SEQ ID NO: 174724 - RNA, 19 nt, Artificial Sequence
  Description of Artificial Sequence: Synthetic oligonucleotide
  Sense strand starting at position 1102 of SEQ ID NO: 2252
gacuguguccacugugagu

SEQ ID NO: 174725 - RNA, 19 nt, Artificial Sequence
  Description of Artificial Sequence: Synthetic oligonucleotide
  Antisense strand to SEQ ID NO: 174724
acucacaguggacacaguc

SEQ ID NO: 174726 - RNA, 19 nt, Artificial Sequence
  Description of Artificial Sequence: Synthetic oligonucleotide
  Sense strand starting at position 1005 of SEQ ID NO: 2252
ugaggauuacgugaugcac

SEQ ID NO: 174727 - RNA, 19 nt, Artificial Sequence
  Description of Artificial Sequence: Synthetic oligonucleotide
  Antisense strand to SEQ ID NO: 174726
gugcaucacguaauccuca

SEQ ID NO: 174728 - RNA, 19 nt, Artificial Sequence
  Description of Artificial Sequence: Synthetic oligonucleotide
  Sense strand starting at position 1000 of SEQ ID NO: 2252
ggcugugaggauuacguga

SEQ ID NO: 174729 - RNA, 19 nt, Artificial Sequence
  Description of Artificial Sequence: Synthetic oligonucleotide
  Antisense strand to SEQ ID NO: 174728
ucacguaauccucacagcc

SEQ ID NO: 174730 - RNA, 19 nt, Artificial Sequence
  Description of Artificial Sequence: Synthetic oligonucleotide
  Sense strand starting at position 908 of SEQ ID NO: 2252
ucuaucuguugaccauaga

SEQ ID NO: 174731 - RNA, 19 nt, Artificial Sequence
  Description of Artificial Sequence: Synthetic oligonucleotide
  Antisense strand to SEQ ID NO: 174730
ucuauggucaacagauaga

SEQ ID NO: 174732 - RNA, 19 nt, Artificial Sequence
  Description of Artificial Sequence: Synthetic oligonucleotide
  Sense strand starting at position 906 of SEQ ID NO: 2252
acucuaucuguugaccaua

SEQ ID NO: 174733 - RNA, 19 nt, Artificial Sequence
  Description of Artificial Sequence: Synthetic oligonucleotide
  Antisense strand to SEQ ID NO: 174732
uauggucaacagauagagu

SEQ ID NO: 174734 - RNA, 19 nt, Artificial Sequence
  Description of Artificial Sequence: Synthetic oligonucleotide
  Sense strand starting at position 901 of SEQ ID NO: 2252
gccugacucuaucuguuga

SEQ ID NO: 174735 - RNA, 19 nt, Artificial Sequence
  Description of Artificial Sequence: Synthetic oligonucleotide
  Antisense strand to SEQ ID NO: 174734
ucaacagauagagucaggc

SEQ ID NO: 174736 - RNA, 19 nt, Artificial Sequence
  Description of Artificial Sequence: Synthetic oligonucleotide
  Sense strand starting at position 823 of SEQ ID NO: 2252
ucaaucaugucuuaguacu

SEQ ID NO: 174737 - RNA, 19 nt, Artificial Sequence
  Description of Artificial Sequence: Synthetic oligonucleotide
  Antisense strand to SEQ ID NO: 174736
aguacuaagacaugauuga

SEQ ID NO: 174738 - RNA, 19 nt, Artificial Sequence
  Description of Artificial Sequence: Synthetic oligonucleotide
  Sense strand starting at position 3722 of SEQ ID NO: 2253
guaggugucugugagcuga

SEQ ID NO: 174739 - RNA, 19 nt, Artificial Sequence
  Description of Artificial Sequence: Synthetic oligonucleotide
  Antisense strand to SEQ ID NO: 174738
ucagcucacagacaccuac

SEQ ID NO: 174740 - RNA, 19 nt, Artificial Sequence
  Description of Artificial Sequence: Synthetic oligonucleotide
  Sense strand starting at position 3705 of SEQ ID NO: 2253
auaauuaauugacaggagu

SEQ ID NO: 174741 - RNA, 19 nt, Artificial Sequence
  Description of Artificial Sequence: Synthetic oligonucleotide
  Antisense strand to SEQ ID NO: 174740
acuccugucaauuaauuau

SEQ ID NO: 174742 - RNA, 19 nt, Artificial Sequence
  Description of Artificial Sequence: Synthetic oligonucleotide
  Sense strand starting at position 3347 of SEQ ID NO: 2253
gcuuuauugcacgucagca

SEQ ID NO: 174743 - RNA, 19 nt, Artificial Sequence
  Description of Artificial Sequence: Synthetic oligonucleotide
  Antisense strand to SEQ ID NO: 174742
ugcugacgugcaauaaagc

SEQ ID NO: 174744 - RNA, 19 nt, Artificial Sequence
  Description of Artificial Sequence: Synthetic oligonucleotide
  Sense strand starting at position 3006 of SEQ ID NO: 2253
gaacguuacucccgacucu

SEQ ID NO: 174745 - RNA, 19 nt, Artificial Sequence
  Description of Artificial Sequence: Synthetic oligonucleotide
  Antisense strand to SEQ ID NO: 174744
agagucgggaguaacguuc

SEQ ID NO: 174746 - RNA, 19 nt, Artificial Sequence
  Description of Artificial Sequence: Synthetic oligonucleotide
  Sense strand starting at position 2628 of SEQ ID NO: 2253
acaagaaccuguguuccau

SEQ ID NO: 174747 - RNA, 19 nt, Artificial Sequence
  Description of Artificial Sequence: Synthetic oligonucleotide
  Antisense strand to SEQ ID NO: 174746
auggaacacagguucuugu

SEQ ID NO: 174748 - RNA, 19 nt, Artificial Sequence
  Description of Artificial Sequence: Synthetic oligonucleotide
  Sense strand starting at position 1627 of SEQ ID NO: 2253
acacgugucucugaggaca

SEQ ID NO: 174749 - RNA, 19 nt, Artificial Sequence
  Description of Artificial Sequence: Synthetic oligonucleotide
  Antisense strand to SEQ ID NO: 174748
uguccucagagacacgugu

SEQ ID NO: 174750 - RNA, 19 nt, Artificial Sequence
  Description of Artificial Sequence: Synthetic oligonucleotide
  Sense strand starting at position 1540 of SEQ ID NO: 2253
agagcugucccuuggguga

SEQ ID NO: 174751 - RNA, 19 nt, Artificial Sequence
  Description of Artificial Sequence: Synthetic oligonucleotide
  Antisense strand to SEQ ID NO: 174750
ucacccaagggacagcucu

SEQ ID NO: 174752 - RNA, 19 nt, Artificial Sequence
  Description of Artificial Sequence: Synthetic oligonucleotide
  Sense strand starting at position 182 of SEQ ID NO: 2254
gaugaaugacucugaguuc

SEQ ID NO: 174753 - RNA, 19 nt, Artificial Sequence
  Description of Artificial Sequence: Synthetic oligonucleotide
  Antisense strand to SEQ ID NO: 174752
gaacucagagucauucauc

SEQ ID NO: 174754 - RNA, 19 nt, Artificial Sequence
  Description of Artificial Sequence: Synthetic oligonucleotide
  Sense strand starting at position 185 of SEQ ID NO: 2254
gaaugacucugaguucccu

SEQ ID NO: 174755 - RNA, 19 nt, Artificial Sequence
  Description of Artificial Sequence: Synthetic oligonucleotide
  Antisense strand to SEQ ID NO: 174754
agggaacucagagucauuc

SEQ ID NO: 174756 - RNA, 19 nt, Artificial Sequence
  Description of Artificial Sequence: Synthetic oligonucleotide
  Sense strand starting at position 220 of SEQ ID NO: 2254
ugugaaucuggcuauguga

SEQ ID NO: 174757 - RNA, 19 nt, Artificial Sequence
  Description of Artificial Sequence: Synthetic oligonucleotide
  Antisense strand to SEQ ID NO: 174756
ucacauagccagauucaca

SEQ ID NO: 174758 - RNA, 19 nt, Artificial Sequence
  Description of Artificial Sequence: Synthetic oligonucleotide
  Sense strand starting at position 239 of SEQ ID NO: 2254
ccuugacuuggucacugaa

SEQ ID NO: 174759 - RNA, 19 nt, Artificial Sequence
  Description of Artificial Sequence: Synthetic oligonucleotide
  Antisense strand to SEQ ID NO: 174758
uucagugaccaagucaagg

SEQ ID NO: 174760 - RNA, 19 nt, Artificial Sequence
  Description of Artificial Sequence: Synthetic oligonucleotide
  Sense strand starting at position 241 of SEQ ID NO: 2254
uugacuuggucacugaacu

SEQ ID NO: 174761 - RNA, 19 nt, Artificial Sequence
  Description of Artificial Sequence: Synthetic oligonucleotide
  Antisense strand to SEQ ID NO: 174760
aguucagugaccaagucaa

SEQ ID NO: 174762 - RNA, 19 nt, Artificial Sequence
  Description of Artificial Sequence: Synthetic oligonucleotide
  Sense strand starting at position 242 of SEQ ID NO: 2254
ugacuuggucacugaacuu

SEQ ID NO: 174763 - RNA, 19 nt, Artificial Sequence
  Description of Artificial Sequence: Synthetic oligonucleotide
  Antisense strand to SEQ ID NO: 174762
aaguucagugaccaaguca

SEQ ID NO: 174764 - RNA, 19 nt, Artificial Sequence
  Description of Artificial Sequence: Synthetic oligonucleotide
  Sense strand starting at position 299 of SEQ ID NO: 2254
gacuaaggauucuuuagug

SEQ ID NO: 174765 - RNA, 19 nt, Artificial Sequence
  Description of Artificial Sequence: Synthetic oligonucleotide
  Antisense strand to SEQ ID NO: 174764
cacuaaagaauccuuaguc

SEQ ID NO: 174766 - RNA, 19 nt, Artificial Sequence
  Description of Artificial Sequence: Synthetic oligonucleotide
  Sense strand starting at position 303 of SEQ ID NO: 2254
aaggauucuuuagugcuga

SEQ ID NO: 174767 - RNA, 19 nt, Artificial Sequence
  Description of Artificial Sequence: Synthetic oligonucleotide
  Antisense strand to SEQ ID NO: 174766
ucagcacuaaagaauccuu

SEQ ID NO: 174768 - RNA, 19 nt, Artificial Sequence
  Description of Artificial Sequence: Synthetic oligonucleotide
  Sense strand starting at position 308 of SEQ ID NO: 2254
uucuuuagugcugaacaca

SEQ ID NO: 174769 - RNA, 19 nt, Artificial Sequence
  Description of Artificial Sequence: Synthetic oligonucleotide
  Antisense strand to SEQ ID NO: 174768
uguguucagcacuaaagaa

SEQ ID NO: 174770 - RNA, 19 nt, Artificial Sequence
  Description of Artificial Sequence: Synthetic oligonucleotide
  Sense strand starting at position 332 of SEQ ID NO: 2254
cugaauugcuucccagaga

SEQ ID NO: 174771 - RNA, 19 nt, Artificial Sequence
  Description of Artificial Sequence: Synthetic oligonucleotide
  Antisense strand to SEQ ID NO: 174770
ucucugggaagcaauucag

SEQ ID NO: 174772 - RNA, 19 nt, Artificial Sequence
  Description of Artificial Sequence: Synthetic oligonucleotide
  Sense strand starting at position 421 of SEQ ID NO: 2254
aacagaaacugaccguuua

SEQ ID NO: 174773 - RNA, 19 nt, Artificial Sequence
  Description of Artificial Sequence: Synthetic oligonucleotide
  Antisense strand to SEQ ID NO: 174772
uaaacggucaguuucuguu

SEQ ID NO: 174774 - RNA, 19 nt, Artificial Sequence
  Description of Artificial Sequence: Synthetic oligonucleotide
  Sense strand starting at position 422 of SEQ ID NO: 2254
acagaaacugaccguuuaa

SEQ ID NO: 174775 - RNA, 19 nt, Artificial Sequence
  Description of Artificial Sequence: Synthetic oligonucleotide
  Antisense strand to SEQ ID NO: 174774
uuaaacggucaguuucugu

SEQ ID NO: 174776 - RNA, 19 nt, Artificial Sequence
  Description of Artificial Sequence: Synthetic oligonucleotide
  Sense strand starting at position 478 of SEQ ID NO: 2254
ucauauaaucuaugaaacg

SEQ ID NO: 174777 - RNA, 19 nt, Artificial Sequence
  Description of Artificial Sequence: Synthetic oligonucleotide
  Antisense strand to SEQ ID NO: 174776
cguuucauagauuauauga

SEQ ID NO: 174778 - RNA, 19 nt, Artificial Sequence
  Description of Artificial Sequence: Synthetic oligonucleotide
  Sense strand starting at position 628 of SEQ ID NO: 2254
gaaucagucccuuggaccu

SEQ ID NO: 174779 - RNA, 19 nt, Artificial Sequence
  Description of Artificial Sequence: Synthetic oligonucleotide
  Antisense strand to SEQ ID NO: 174778
agguccaagggacugauuc

SEQ ID NO: 174780 - RNA, 19 nt, Artificial Sequence
  Description of Artificial Sequence: Synthetic oligonucleotide
  Sense strand starting at position 819 of SEQ ID NO: 2254
gagagugagcagcauuaua

SEQ ID NO: 174781 - RNA, 19 nt, Artificial Sequence
  Description of Artificial Sequence: Synthetic oligonucleotide
  Antisense strand to SEQ ID NO: 174780
uauaaugcugcucacucuc

SEQ ID NO: 174782 - RNA, 19 nt, Artificial Sequence
  Description of Artificial Sequence: Synthetic oligonucleotide
  Sense strand starting at position 915 of SEQ ID NO: 2254
aguaguagcccacaugaca

SEQ ID NO: 174783 - RNA, 19 nt, Artificial Sequence
  Description of Artificial Sequence: Synthetic oligonucleotide
  Antisense strand to SEQ ID NO: 174782
ugucaugugggcuacuacu

SEQ ID NO: 174784 - RNA, 19 nt, Artificial Sequence
  Description of Artificial Sequence: Synthetic oligonucleotide
  Sense strand starting at position 955 of SEQ ID NO: 2254
ugcugacaagucugagaac

SEQ ID NO: 174785 - RNA, 19 nt, Artificial Sequence
  Description of Artificial Sequence: Synthetic oligonucleotide
  Antisense strand to SEQ ID NO: 174784
guucucagacuugucagca

SEQ ID NO: 174786 - RNA, 19 nt, Artificial Sequence
  Description of Artificial Sequence: Synthetic oligonucleotide
  Sense strand starting at position 1064 of SEQ ID NO: 2254
caccgagacucauuaaguc

SEQ ID NO: 174787 - RNA, 19 nt, Artificial Sequence
  Description of Artificial Sequence: Synthetic oligonucleotide
  Antisense strand to SEQ ID NO: 174786
gacuuaaugagucucggug

SEQ ID NO: 174788 - RNA, 19 nt, Artificial Sequence
  Description of Artificial Sequence: Synthetic oligonucleotide
  Sense strand starting at position 1396 of SEQ ID NO: 2254
guguuaccugaguaagauu

SEQ ID NO: 174789 - RNA, 19 nt, Artificial Sequence
  Description of Artificial Sequence: Synthetic oligonucleotide
  Antisense strand to SEQ ID NO: 174788
aaucuuacucagguaacac

SEQ ID NO: 174790 - RNA, 19 nt, Artificial Sequence
  Description of Artificial Sequence: Synthetic oligonucleotide
  Sense strand starting at position 1614 of SEQ ID NO: 2254
ggugggagaguuugaaaug

SEQ ID NO: 174791 - RNA, 19 nt, Artificial Sequence
  Description of Artificial Sequence: Synthetic oligonucleotide
  Antisense strand to SEQ ID NO: 174790
cauuucaaacucucccacc

SEQ ID NO: 174792 - RNA, 19 nt, Artificial Sequence
  Description of Artificial Sequence: Synthetic oligonucleotide
  Sense strand starting at position 1817 of SEQ ID NO: 2254
ggguccuucugaucccaga

SEQ ID NO: 174793 - RNA, 19 nt, Artificial Sequence
  Description of Artificial Sequence: Synthetic oligonucleotide
  Antisense strand to SEQ ID NO: 174792
ucugggaucagaaggaccc

SEQ ID NO: 174794 - RNA, 19 nt, Artificial Sequence
  Description of Artificial Sequence: Synthetic oligonucleotide
  Sense strand starting at position 1896 of SEQ ID NO: 2254
gagauuacguaccucacau

SEQ ID NO: 174795 - RNA, 19 nt, Artificial Sequence
  Description of Artificial Sequence: Synthetic oligonucleotide
  Antisense strand to SEQ ID NO: 174794
augugagguacguaaucuc

SEQ ID NO: 174796 - RNA, 19 nt, Artificial Sequence
  Description of Artificial Sequence: Synthetic oligonucleotide
  Sense strand starting at position 1917 of SEQ ID NO: 2254
cagucauagagggaucugu

SEQ ID NO: 174797 - RNA, 19 nt, Artificial Sequence
  Description of Artificial Sequence: Synthetic oligonucleotide
  Antisense strand to SEQ ID NO: 174796
acagaucccucuaugacug

SEQ ID NO: 174798 - RNA, 19 nt, Artificial Sequence
  Description of Artificial Sequence: Synthetic oligonucleotide
  Sense strand starting at position 2232 of SEQ ID NO: 2254
cacguuuacucaccaagga

SEQ ID NO: 174799 - RNA, 19 nt, Artificial Sequence
  Description of Artificial Sequence: Synthetic oligonucleotide
  Antisense strand to SEQ ID NO: 174798
uccuuggugaguaaacgug

SEQ ID NO: 174800 - RNA, 19 nt, Artificial Sequence
  Description of Artificial Sequence: Synthetic oligonucleotide
  Sense strand starting at position 2233 of SEQ ID NO: 2254
acguuuacucaccaaggaa

SEQ ID NO: 174801 - RNA, 19 nt, Artificial Sequence
  Description of Artificial Sequence: Synthetic oligonucleotide
  Antisense strand to SEQ ID NO: 174800
uuccuuggugaguaaacgu

SEQ ID NO: 174802 - RNA, 19 nt, Artificial Sequence
  Description of Artificial Sequence: Synthetic oligonucleotide
  Sense strand starting at position 2324 of SEQ ID NO: 2254
uaauuacuuggcuggauga

SEQ ID NO: 174803 - RNA, 19 nt, Artificial Sequence
  Description of Artificial Sequence: Synthetic oligonucleotide
  Antisense strand to SEQ ID NO: 174802
ucauccagccaaguaauua

SEQ ID NO: 174804 - RNA, 19 nt, Artificial Sequence
  Description of Artificial Sequence: Synthetic oligonucleotide
  Sense strand starting at position 2326 of SEQ ID NO: 2254
auuacuuggcuggaugagu

SEQ ID NO: 174805 - RNA, 19 nt, Artificial Sequence
  Description of Artificial Sequence: Synthetic oligonucleotide
  Antisense strand to SEQ ID NO: 174804
acucauccagccaaguaau

SEQ ID NO: 174806 - RNA, 19 nt, Artificial Sequence
  Description of Artificial Sequence: Synthetic oligonucleotide
  Sense strand starting at position 2467 of SEQ ID NO: 2254
ugguaaagauuccuguauu

SEQ ID NO: 174807 - RNA, 19 nt, Artificial Sequence
  Description of Artificial Sequence: Synthetic oligonucleotide
  Antisense strand to SEQ ID NO: 174806
aauacaggaaucuuuacca

SEQ ID NO: 174808 - RNA, 19 nt, Artificial Sequence
  Description of Artificial Sequence: Synthetic oligonucleotide
  Sense strand starting at position 2636 of SEQ ID NO: 2254
uuucuuugaggcugauuga

SEQ ID NO: 174809 - RNA, 19 nt, Artificial Sequence
  Description of Artificial Sequence: Synthetic oligonucleotide
  Antisense strand to SEQ ID NO: 174808
ucaaucagccucaaagaaa

SEQ ID NO: 174810 - RNA, 19 nt, Artificial Sequence
  Description of Artificial Sequence: Synthetic oligonucleotide
  Sense strand starting at position 2637 of SEQ ID NO: 2254
uucuuugaggcugauugaa

SEQ ID NO: 174811 - RNA, 19 nt, Artificial Sequence
  Description of Artificial Sequence: Synthetic oligonucleotide
  Antisense strand to SEQ ID NO: 174810
uucaaucagccucaaagaa

SEQ ID NO: 174812 - RNA, 19 nt, Artificial Sequence
  Description of Artificial Sequence: Synthetic oligonucleotide
  Sense strand starting at position 2639 of SEQ ID NO: 2254
cuuugaggcugauugaaac

SEQ ID NO: 174813 - RNA, 19 nt, Artificial Sequence
  Description of Artificial Sequence: Synthetic oligonucleotide
  Antisense strand to SEQ ID NO: 174812
guuucaaucagccucaaag

SEQ ID NO: 174814 - RNA, 19 nt, Artificial Sequence
  Description of Artificial Sequence: Synthetic oligonucleotide
  Sense strand starting at position 2781 of SEQ ID NO: 2254
uuugaauuccucugguuaa

SEQ ID NO: 174815 - RNA, 19 nt, Artificial Sequence
  Description of Artificial Sequence: Synthetic oligonucleotide
  Antisense strand to SEQ ID NO: 174814
uuaaccagaggaauucaaa

SEQ ID NO: 174816 - RNA, 19 nt, Artificial Sequence
  Description of Artificial Sequence: Synthetic oligonucleotide
  Sense strand starting at position 2784 of SEQ ID NO: 2254
gaauuccucugguuaaagg

SEQ ID NO: 174817 - RNA, 19 nt, Artificial Sequence
  Description of Artificial Sequence: Synthetic oligonucleotide
  Antisense strand to SEQ ID NO: 174816
ccuuuaaccagaggaauuc

SEQ ID NO: 174818 - RNA, 19 nt, Artificial Sequence
  Description of Artificial Sequence: Synthetic oligonucleotide
  Sense strand starting at position 2861 of SEQ ID NO: 2254
ggaguaaguacucacuggu

SEQ ID NO: 174819 - RNA, 19 nt, Artificial Sequence
  Description of Artificial Sequence: Synthetic oligonucleotide
  Antisense strand to SEQ ID NO: 174818
accagugaguacuuacucc

SEQ ID NO: 174820 - RNA, 19 nt, Artificial Sequence
  Description of Artificial Sequence: Synthetic oligonucleotide
  Sense strand starting at position 2943 of SEQ ID NO: 2254
guuaauagaggccauuaau

SEQ ID NO: 174821 - RNA, 19 nt, Artificial Sequence
  Description of Artificial Sequence: Synthetic oligonucleotide
  Antisense strand to SEQ ID NO: 174820
auuaauggccucuauuaac

SEQ ID NO: 174822 - RNA, 19 nt, Artificial Sequence
  Description of Artificial Sequence: Synthetic oligonucleotide
  Sense strand starting at position 3103 of SEQ ID NO: 2254
uggaauaagugcucccaac

SEQ ID NO: 174823 - RNA, 19 nt, Artificial Sequence
  Description of Artificial Sequence: Synthetic oligonucleotide
  Antisense strand to SEQ ID NO: 174822
guugggagcacuuauucca

SEQ ID NO: 174824 - RNA, 19 nt, Artificial Sequence
  Description of Artificial Sequence: Synthetic oligonucleotide
  Sense strand starting at position 3178 of SEQ ID NO: 2254
ugacccaaccuguguuaaa

SEQ ID NO: 174825 - RNA, 19 nt, Artificial Sequence
  Description of Artificial Sequence: Synthetic oligonucleotide
  Antisense strand to SEQ ID NO: 174824
uuuaacacagguuggguca

SEQ ID NO: 174826 - RNA, 19 nt, Artificial Sequence
  Description of Artificial Sequence: Synthetic oligonucleotide
  Sense strand starting at position 3189 of SEQ ID NO: 2254
guguuaaaugccuaacaca

SEQ ID NO: 174827 - RNA, 19 nt, Artificial Sequence
  Description of Artificial Sequence: Synthetic oligonucleotide
  Antisense strand to SEQ ID NO: 174826
uguguuaggcauuuaacac

SEQ ID NO: 174828 - RNA, 19 nt, Artificial Sequence
  Description of Artificial Sequence: Synthetic oligonucleotide
  Sense strand starting at position 3238 of SEQ ID NO: 2254
uacucuggaguuugaaagu

SEQ ID NO: 174829 - RNA, 19 nt, Artificial Sequence
  Description of Artificial Sequence: Synthetic oligonucleotide
  Antisense strand to SEQ ID NO: 174828
acuuucaaacuccagagua

SEQ ID NO: 174830 - RNA, 19 nt, Artificial Sequence
  Description of Artificial Sequence: Synthetic oligonucleotide
  Sense strand starting at position 3707 of SEQ ID NO: 2254
gugcaaacccugcaggauu

SEQ ID NO: 174831 - RNA, 19 nt, Artificial Sequence
  Description of Artificial Sequence: Synthetic oligonucleotide
  Antisense strand to SEQ ID NO: 174830
aauccugcaggguuugcac

SEQ ID NO: 174832 - RNA, 19 nt, Artificial Sequence
  Description of Artificial Sequence: Synthetic oligonucleotide
  Sense strand starting at position 14 of SEQ ID NO: 2255
gugggucacccuuaauaau

SEQ ID NO: 174833 - RNA, 19 nt, Artificial Sequence
  Description of Artificial Sequence: Synthetic oligonucleotide
  Antisense strand to SEQ ID NO: 174832
auuauuaagggugacccac

SEQ ID NO: 174834 - RNA, 19 nt, Artificial Sequence
  Description of Artificial Sequence: Synthetic oligonucleotide
  Sense strand starting at position 46 of SEQ ID NO: 2255
uguauaggacuuuacacuu

SEQ ID NO: 174835 - RNA, 19 nt, Artificial Sequence
  Description of Artificial Sequence: Synthetic oligonucleotide
  Antisense strand to SEQ ID NO: 174834
aaguguaaaguccuauaca

SEQ ID NO: 174836 - RNA, 19 nt, Artificial Sequence
  Description of Artificial Sequence: Synthetic oligonucleotide
  Sense strand starting at position 92 of SEQ ID NO: 2255
uuugauucucccuaagcag

SEQ ID NO: 174837 - RNA, 19 nt, Artificial Sequence
  Description of Artificial Sequence: Synthetic oligonucleotide
  Antisense strand to SEQ ID NO: 174836
cugcuuagggagaaucaaa

SEQ ID NO: 174838 - RNA, 19 nt, Artificial Sequence
  Description of Artificial Sequence: Synthetic oligonucleotide
  Sense strand starting at position 98 of SEQ ID NO: 2255
ucucccuaagcagaguaau

SEQ ID NO: 174839 - RNA, 19 nt, Artificial Sequence
  Description of Artificial Sequence: Synthetic oligonucleotide
  Antisense strand to SEQ ID NO: 174838
auuacucugcuuagggaga

SEQ ID NO: 174840 - RNA, 19 nt, Artificial Sequence
  Description of Artificial Sequence: Synthetic oligonucleotide
  Sense strand starting at position 189 of SEQ ID NO: 2255
acuuguuaagcacagacau

SEQ ID NO: 174841 - RNA, 19 nt, Artificial Sequence
  Description of Artificial Sequence: Synthetic oligonucleotide
  Antisense strand to SEQ ID NO: 174840
augucugugcuuaacaagu

SEQ ID NO: 174842 - RNA, 19 nt, Artificial Sequence
  Description of Artificial Sequence: Synthetic oligonucleotide
  Sense strand starting at position 308 of SEQ ID NO: 2255
agaacaagaaaucguguca

SEQ ID NO: 174843 - RNA, 19 nt, Artificial Sequence
  Description of Artificial Sequence: Synthetic oligonucleotide
  Antisense strand to SEQ ID NO: 174842
ugacacgauuucuuguucu

SEQ ID NO: 174844 - RNA, 19 nt, Artificial Sequence
  Description of Artificial Sequence: Synthetic oligonucleotide
  Sense strand starting at position 370 of SEQ ID NO: 2255
gaaucaggugacuggcaaa

SEQ ID NO: 174845 - RNA, 19 nt, Artificial Sequence
  Description of Artificial Sequence: Synthetic oligonucleotide
  Antisense strand to SEQ ID NO: 174844
uuugccagucaccugauuc

SEQ ID NO: 174846 - RNA, 19 nt, Artificial Sequence
  Description of Artificial Sequence: Synthetic oligonucleotide
  Sense strand starting at position 535 of SEQ ID NO: 2255
gacagaaagccuuauguug

SEQ ID NO: 174847 - RNA, 19 nt, Artificial Sequence
  Description of Artificial Sequence: Synthetic oligonucleotide
  Antisense strand to SEQ ID NO: 174846
caacauaaggcuuucuguc

SEQ ID NO: 174848 - RNA, 19 nt, Artificial Sequence
  Description of Artificial Sequence: Synthetic oligonucleotide
  Sense strand starting at position 544 of SEQ ID NO: 2255
ccuuauguugcugugucua

SEQ ID NO: 174849 - RNA, 19 nt, Artificial Sequence
  Description of Artificial Sequence: Synthetic oligonucleotide
  Antisense strand to SEQ ID NO: 174848
uagacacagcaacauaagg

SEQ ID NO: 174850 - RNA, 19 nt, Artificial Sequence
  Description of Artificial Sequence: Synthetic oligonucleotide
  Sense strand starting at position 632 of SEQ ID NO: 2255
guguuaauaguacaucaua

SEQ ID NO: 174851 - RNA, 19 nt, Artificial Sequence
  Description of Artificial Sequence: Synthetic oligonucleotide
  Antisense strand to SEQ ID NO: 174850
uaugauguacuauuaacac

SEQ ID NO: 174852 - RNA, 19 nt, Artificial Sequence
  Description of Artificial Sequence: Synthetic oligonucleotide
  Sense strand starting at position 659 of SEQ ID NO: 2255
ccguuaagaacuuaugugu

SEQ ID NO: 174853 - RNA, 19 nt, Artificial Sequence
  Description of Artificial Sequence: Synthetic oligonucleotide
  Antisense strand to SEQ ID NO: 174852
acacauaaguucuuaacgg

SEQ ID NO: 174854 - RNA, 19 nt, Artificial Sequence
  Description of Artificial Sequence: Synthetic oligonucleotide
  Sense strand starting at position 662 of SEQ ID NO: 2255
uuaagaacuuauguguaac

SEQ ID NO: 174855 - RNA, 19 nt, Artificial Sequence
  Description of Artificial Sequence: Synthetic oligonucleotide
  Antisense strand to SEQ ID NO: 174854
guuacacauaaguucuuaa

SEQ ID NO: 174856 - RNA, 19 nt, Artificial Sequence
  Description of Artificial Sequence: Synthetic oligonucleotide
  Sense strand starting at position 665 of SEQ ID NO: 2255
agaacuuauguguaacgua

SEQ ID NO: 174857 - RNA, 19 nt, Artificial Sequence
  Description of Artificial Sequence: Synthetic oligonucleotide
  Antisense strand to SEQ ID NO: 174856
uacguuacacauaaguucu

SEQ ID NO: 174858 - RNA, 19 nt, Artificial Sequence
  Description of Artificial Sequence: Synthetic oligonucleotide
  Sense strand starting at position 670 of SEQ ID NO: 2255
uuauguguaacguaagaaa

SEQ ID NO: 174859 - RNA, 19 nt, Artificial Sequence
  Description of Artificial Sequence: Synthetic oligonucleotide
  Antisense strand to SEQ ID NO: 174858
uuucuuacguuacacauaa

SEQ ID NO: 174860 - RNA, 19 nt, Artificial Sequence
  Description of Artificial Sequence: Synthetic oligonucleotide
  Sense strand starting at position 753 of SEQ ID NO: 2255
ccacaugggugccugagau

SEQ ID NO: 174861 - RNA, 19 nt, Artificial Sequence
  Description of Artificial Sequence: Synthetic oligonucleotide
  Antisense strand to SEQ ID NO: 174860
aucucaggcacccaugugg

SEQ ID NO: 174862 - RNA, 19 nt, Artificial Sequence
  Description of Artificial Sequence: Synthetic oligonucleotide
  Sense strand starting at position 788 of SEQ ID NO: 2255
ucugaugguucaguguaga

SEQ ID NO: 174863 - RNA, 19 nt, Artificial Sequence
  Description of Artificial Sequence: Synthetic oligonucleotide
  Antisense strand to SEQ ID NO: 174862
ucuacacugaaccaucaga

SEQ ID NO: 174864 - RNA, 19 nt, Artificial Sequence
  Description of Artificial Sequence: Synthetic oligonucleotide
  Sense strand starting at position 860 of SEQ ID NO: 2255
gggcuauguauauacagca

SEQ ID NO: 174865 - RNA, 19 nt, Artificial Sequence
  Description of Artificial Sequence: Synthetic oligonucleotide
  Antisense strand to SEQ ID NO: 174864
ugcuguauauacauagccc

SEQ ID NO: 174866 - RNA, 19 nt, Artificial Sequence
  Description of Artificial Sequence: Synthetic oligonucleotide
  Sense strand starting at position 867 of SEQ ID NO: 2255
guauauacagcauauauga

SEQ ID NO: 174867 - RNA, 19 nt, Artificial Sequence
  Description of Artificial Sequence: Synthetic oligonucleotide
  Antisense strand to SEQ ID NO: 174866
ucauauaugcuguauauac

SEQ ID NO: 174868 - RNA, 19 nt, Artificial Sequence
  Description of Artificial Sequence: Synthetic oligonucleotide
  Sense strand starting at position 1060 of SEQ ID NO: 2255
cacugaucugucugaucag

SEQ ID NO: 174869 - RNA, 19 nt, Artificial Sequence
  Description of Artificial Sequence: Synthetic oligonucleotide
  Antisense strand to SEQ ID NO: 174868
cugaucagacagaucagug

SEQ ID NO: 174870 - RNA, 19 nt, Artificial Sequence
  Description of Artificial Sequence: Synthetic oligonucleotide
  Sense strand starting at position 1063 of SEQ ID NO: 2255
ugaucugucugaucagagu

SEQ ID NO: 174871 - RNA, 19 nt, Artificial Sequence
  Description of Artificial Sequence: Synthetic oligonucleotide
  Antisense strand to SEQ ID NO: 174870
acucugaucagacagauca

SEQ ID NO: 174872 - RNA, 19 nt, Artificial Sequence
  Description of Artificial Sequence: Synthetic oligonucleotide
  Sense strand starting at position 1069 of SEQ ID NO: 2255
gucugaucagagugagcca

SEQ ID NO: 174873 - RNA, 19 nt, Artificial Sequence
  Description of Artificial Sequence: Synthetic oligonucleotide
  Antisense strand to SEQ ID NO: 174872
uggcucacucugaucagac

SEQ ID NO: 174874 - RNA, 19 nt, Artificial Sequence
  Description of Artificial Sequence: Synthetic oligonucleotide
  Sense strand starting at position 1175 of SEQ ID NO: 2255
agaaguauggcccauaggu

SEQ ID NO: 174875 - RNA, 19 nt, Artificial Sequence
  Description of Artificial Sequence: Synthetic oligonucleotide
  Antisense strand to SEQ ID NO: 174874
accuaugggccauacuucu

SEQ ID NO: 174876 - RNA, 19 nt, Artificial Sequence
  Description of Artificial Sequence: Synthetic oligonucleotide
  Sense strand starting at position 1177 of SEQ ID NO: 2255
aaguauggcccauagguga

SEQ ID NO: 174877 - RNA, 19 nt, Artificial Sequence
  Description of Artificial Sequence: Synthetic oligonucleotide
  Antisense strand to SEQ ID NO: 174876
ucaccuaugggccauacuu

SEQ ID NO: 174878 - RNA, 19 nt, Artificial Sequence
  Description of Artificial Sequence: Synthetic oligonucleotide
  Sense strand starting at position 2022 of SEQ ID NO: 2255
gagacucuugcgcaaggga

SEQ ID NO: 174879 - RNA, 19 nt, Artificial Sequence
  Description of Artificial Sequence: Synthetic oligonucleotide
  Antisense strand to SEQ ID NO: 174878
ucccuugcgcaagagucuc

SEQ ID NO: 174880 - RNA, 19 nt, Artificial Sequence
  Description of Artificial Sequence: Synthetic oligonucleotide
  Sense strand starting at position 2310 of SEQ ID NO: 2255
gucuuugcugcagaagacu

SEQ ID NO: 174881 - RNA, 19 nt, Artificial Sequence
  Description of Artificial Sequence: Synthetic oligonucleotide
  Antisense strand to SEQ ID NO: 174880
agucuucugcagcaaagac

SEQ ID NO: 174882 - RNA, 19 nt, Artificial Sequence
  Description of Artificial Sequence: Synthetic oligonucleotide
  Sense strand starting at position 2533 of SEQ ID NO: 2255
cuauguggcagaugugaac

SEQ ID NO: 174883 - RNA, 19 nt, Artificial Sequence
  Description of Artificial Sequence: Synthetic oligonucleotide
  Antisense strand to SEQ ID NO: 174882
guucacaucugccacauag

SEQ ID NO: 174884 - RNA, 19 nt, Artificial Sequence
  Description of Artificial Sequence: Synthetic oligonucleotide
  Sense strand starting at position 2719 of SEQ ID NO: 2255
aaaugauucgguuggauuc

SEQ ID NO: 174885 - RNA, 19 nt, Artificial Sequence
  Description of Artificial Sequence: Synthetic oligonucleotide
  Antisense strand to SEQ ID NO: 174884
gaauccaaccgaaucauuu

SEQ ID NO: 174886 - RNA, 19 nt, Artificial Sequence
  Description of Artificial Sequence: Synthetic oligonucleotide
  Sense strand starting at position 2753 of SEQ ID NO: 2255
cuuugauauguugggauuc

SEQ ID NO: 174887 - RNA, 19 nt, Artificial Sequence
  Description of Artificial Sequence: Synthetic oligonucleotide
  Antisense strand to SEQ ID NO: 174886
gaaucccaacauaucaaag

SEQ ID NO: 174888 - RNA, 19 nt, Artificial Sequence
  Description of Artificial Sequence: Synthetic oligonucleotide
  Sense strand starting at position 2813 of SEQ ID NO: 2255
gagguugguggcuggauua

SEQ ID NO: 174889 - RNA, 19 nt, Artificial Sequence
  Description of Artificial Sequence: Synthetic oligonucleotide
  Antisense strand to SEQ ID NO: 174888
uaauccagccaccaaccuc

SEQ ID NO: 174890 - RNA, 19 nt, Artificial Sequence
  Description of Artificial Sequence: Synthetic oligonucleotide
  Sense strand starting at position 2890 of SEQ ID NO: 2255
ggcacuuaucuggaggcca

SEQ ID NO: 174891 - RNA, 19 nt, Artificial Sequence
  Description of Artificial Sequence: Synthetic oligonucleotide
  Antisense strand to SEQ ID NO: 174890
uggccuccagauaagugcc

SEQ ID NO: 174892 - RNA, 19 nt, Artificial Sequence
  Description of Artificial Sequence: Synthetic oligonucleotide
  Sense strand starting at position 2999 of SEQ ID NO: 2255
caggaaguguuugcuaaac

SEQ ID NO: 174893 - RNA, 19 nt, Artificial Sequence
  Description of Artificial Sequence: Synthetic oligonucleotide
  Antisense strand to SEQ ID NO: 174892
guuuagcaaacacuuccug

SEQ ID NO: 174894 - RNA, 19 nt, Artificial Sequence
  Description of Artificial Sequence: Synthetic oligonucleotide
  Sense strand starting at position 3141 of SEQ ID NO: 2255
uuccuaguugugugaauuu

SEQ ID NO: 174895 - RNA, 19 nt, Artificial Sequence
  Description of Artificial Sequence: Synthetic oligonucleotide
  Antisense strand to SEQ ID NO: 174894
aaauucacacaacuaggaa

SEQ ID NO: 174896 - RNA, 19 nt, Artificial Sequence
  Description of Artificial Sequence: Synthetic oligonucleotide
  Sense strand starting at position 3161 of SEQ ID NO: 2255
ggugguuuccuuuaggaca

SEQ ID NO: 174897 - RNA, 19 nt, Artificial Sequence
  Description of Artificial Sequence: Synthetic oligonucleotide
  Antisense strand to SEQ ID NO: 174896
uguccuaaaggaaaccacc

SEQ ID NO: 174898 - RNA, 19 nt, Artificial Sequence
  Description of Artificial Sequence: Synthetic oligonucleotide
  Sense strand starting at position 3193 of SEQ ID NO: 2255
uuuggaagucuuuggaauc

SEQ ID NO: 174899 - RNA, 19 nt, Artificial Sequence
  Description of Artificial Sequence: Synthetic oligonucleotide
  Antisense strand to SEQ ID NO: 174898
gauuccaaagacuuccaaa

SEQ ID NO: 174900 - RNA, 19 nt, Artificial Sequence
  Description of Artificial Sequence: Synthetic oligonucleotide
  Sense strand starting at position 3271 of SEQ ID NO: 2255
ggugguuguagggauauaa

SEQ ID NO: 174901 - RNA, 19 nt, Artificial Sequence
  Description of Artificial Sequence: Synthetic oligonucleotide
  Antisense strand to SEQ ID NO: 174900
uuauaucccuacaaccacc

SEQ ID NO: 174902 - RNA, 19 nt, Artificial Sequence
  Description of Artificial Sequence: Synthetic oligonucleotide
  Sense strand starting at position 3481 of SEQ ID NO: 2255
auauacguuccauaugaag

SEQ ID NO: 174903 - RNA, 19 nt, Artificial Sequence
  Description of Artificial Sequence: Synthetic oligonucleotide
  Antisense strand to SEQ ID NO: 174902
cuucauauggaacguauau

SEQ ID NO: 174904 - RNA, 19 nt, Artificial Sequence
  Description of Artificial Sequence: Synthetic oligonucleotide
  Sense strand starting at position 3483 of SEQ ID NO: 2255
auacguuccauaugaaggu

SEQ ID NO: 174905 - RNA, 19 nt, Artificial Sequence
  Description of Artificial Sequence: Synthetic oligonucleotide
  Antisense strand to SEQ ID NO: 174904
accuucauauggaacguau

SEQ ID NO: 174906 - RNA, 19 nt, Artificial Sequence
  Description of Artificial Sequence: Synthetic oligonucleotide
  Sense strand starting at position 3643 of SEQ ID NO: 2255
ugcauuucugcagguccua

SEQ ID NO: 174907 - RNA, 19 nt, Artificial Sequence
  Description of Artificial Sequence: Synthetic oligonucleotide
  Antisense strand to SEQ ID NO: 174906
uaggaccugcagaaaugca

SEQ ID NO: 174908 - RNA, 19 nt, Artificial Sequence
  Description of Artificial Sequence: Synthetic oligonucleotide
  Sense strand starting at position 3924 of SEQ ID NO: 2255
aagccaagugguuaccauu

SEQ ID NO: 174909 - RNA, 19 nt, Artificial Sequence
  Description of Artificial Sequence: Synthetic oligonucleotide
  Antisense strand to SEQ ID NO: 174908
aaugguaaccacuuggcuu

SEQ ID NO: 174910 - RNA, 19 nt, Artificial Sequence
  Description of Artificial Sequence: Synthetic oligonucleotide
  Sense strand starting at position 3958 of SEQ ID NO: 2255
cccaucucaucacugguua

SEQ ID NO: 174911 - RNA, 19 nt, Artificial Sequence
  Description of Artificial Sequence: Synthetic oligonucleotide
  Antisense strand to SEQ ID NO: 174910
uaaccagugaugagauggg

SEQ ID NO: 174912 - RNA, 19 nt, Artificial Sequence
  Description of Artificial Sequence: Synthetic oligonucleotide
  Sense strand starting at position 119 of SEQ ID NO: 2256
uuucuaugagauggucuuu

SEQ ID NO: 174913 - RNA, 19 nt, Artificial Sequence
  Description of Artificial Sequence: Synthetic oligonucleotide
  Antisense strand to SEQ ID NO: 174912
aaagaccaucucauagaaa

SEQ ID NO: 174914 - RNA, 19 nt, Artificial Sequence
  Description of Artificial Sequence: Synthetic oligonucleotide
  Sense strand starting at position 153 of SEQ ID NO: 2256
ggacaaaucuuagcuauuc

SEQ ID NO: 174915 - RNA, 19 nt, Artificial Sequence
  Description of Artificial Sequence: Synthetic oligonucleotide
  Antisense strand to SEQ ID NO: 174914
gaauagcuaagauuugucc

SEQ ID NO: 174916 - RNA, 19 nt, Artificial Sequence
  Description of Artificial Sequence: Synthetic oligonucleotide
  Sense strand starting at position 178 of SEQ ID NO: 2256
uacgccauuuccucuguga

SEQ ID NO: 174917 - RNA, 19 nt, Artificial Sequence
  Description of Artificial Sequence: Synthetic oligonucleotide
  Antisense strand to SEQ ID NO: 174916
ucacagaggaaauggcgua

SEQ ID NO: 174918 - RNA, 19 nt, Artificial Sequence
  Description of Artificial Sequence: Synthetic oligonucleotide
  Sense strand starting at position 180 of SEQ ID NO: 2256
cgccauuuccucugugaaa

SEQ ID NO: 174919 - RNA, 19 nt, Artificial Sequence
  Description of Artificial Sequence: Synthetic oligonucleotide
  Antisense strand to SEQ ID NO: 174918
uuucacagaggaaauggcg

SEQ ID NO: 174920 - RNA, 19 nt, Artificial Sequence
  Description of Artificial Sequence: Synthetic oligonucleotide
  Sense strand starting at position 181 of SEQ ID NO: 2256
gccauuuccucugugaaau

SEQ ID NO: 174921 - RNA, 19 nt, Artificial Sequence
  Description of Artificial Sequence: Synthetic oligonucleotide
  Antisense strand to SEQ ID NO: 174920
auuucacagaggaaauggc

SEQ ID NO: 174922 - RNA, 19 nt, Artificial Sequence
  Description of Artificial Sequence: Synthetic oligonucleotide
  Sense strand starting at position 361 of SEQ ID NO: 2256
guugguagaguucaguaag

SEQ ID NO: 174923 - RNA, 19 nt, Artificial Sequence
  Description of Artificial Sequence: Synthetic oligonucleotide
  Antisense strand to SEQ ID NO: 174922
cuuacugaacucuaccaac

SEQ ID NO: 174924 - RNA, 19 nt, Artificial Sequence
  Description of Artificial Sequence: Synthetic oligonucleotide
  Sense strand starting at position 364 of SEQ ID NO: 2256
gguagaguucaguaagagu

SEQ ID NO: 174925 - RNA, 19 nt, Artificial Sequence
  Description of Artificial Sequence: Synthetic oligonucleotide
  Antisense strand to SEQ ID NO: 174924
acucuuacugaacucuacc

SEQ ID NO: 174926 - RNA, 19 nt, Artificial Sequence
  Description of Artificial Sequence: Synthetic oligonucleotide
  Sense strand starting at position 436 of SEQ ID NO: 2256
uguuaaucauuauugguca

SEQ ID NO: 174927 - RNA, 19 nt, Artificial Sequence
  Description of Artificial Sequence: Synthetic oligonucleotide
  Antisense strand to SEQ ID NO: 174926
ugaccaauaaugauuaaca

SEQ ID NO: 174928 - RNA, 19 nt, Artificial Sequence
  Description of Artificial Sequence: Synthetic oligonucleotide
  Sense strand starting at position 521 of SEQ ID NO: 2256
gacagaugauuuggaagug

SEQ ID NO: 174929 - RNA, 19 nt, Artificial Sequence
  Description of Artificial Sequence: Synthetic oligonucleotide
  Antisense strand to SEQ ID NO: 174928
cacuuccaaaucaucuguc

SEQ ID NO: 174930 - RNA, 19 nt, Artificial Sequence
  Description of Artificial Sequence: Synthetic oligonucleotide
  Sense strand starting at position 574 of SEQ ID NO: 2256
ccauacuugugucccauaa

SEQ ID NO: 174931 - RNA, 19 nt, Artificial Sequence
  Description of Artificial Sequence: Synthetic oligonucleotide
  Antisense strand to SEQ ID NO: 174930
uuaugggacacaaguaugg

SEQ ID NO: 174932 - RNA, 19 nt, Artificial Sequence
  Description of Artificial Sequence: Synthetic oligonucleotide
  Sense strand starting at position 578 of SEQ ID NO: 2256
acuugugucccauaaacau

SEQ ID NO: 174933 - RNA, 19 nt, Artificial Sequence
  Description of Artificial Sequence: Synthetic oligonucleotide
  Antisense strand to SEQ ID NO: 174932
auguuuaugggacacaagu

SEQ ID NO: 174934 - RNA, 19 nt, Artificial Sequence
  Description of Artificial Sequence: Synthetic oligonucleotide
  Sense strand starting at position 870 of SEQ ID NO: 2256
caaguagaugcuuagccuu

SEQ ID NO: 174935 - RNA, 19 nt, Artificial Sequence
  Description of Artificial Sequence: Synthetic oligonucleotide
  Antisense strand to SEQ ID NO: 174934
aaggcuaagcaucuacuug

SEQ ID NO: 174936 - RNA, 19 nt, Artificial Sequence
  Description of Artificial Sequence: Synthetic oligonucleotide
  Sense strand starting at position 883 of SEQ ID NO: 2256
agccuugugcugguagcua

SEQ ID NO: 174937 - RNA, 19 nt, Artificial Sequence
  Description of Artificial Sequence: Synthetic oligonucleotide
  Antisense strand to SEQ ID NO: 174936
uagcuaccagcacaaggcu

SEQ ID NO: 174938 - RNA, 19 nt, Artificial Sequence
  Description of Artificial Sequence: Synthetic oligonucleotide
  Sense strand starting at position 917 of SEQ ID NO: 2256
auugauuagucucuuacua

SEQ ID NO: 174939 - RNA, 19 nt, Artificial Sequence
  Description of Artificial Sequence: Synthetic oligonucleotide
  Antisense strand to SEQ ID NO: 174938
uaguaagagacuaaucaau

SEQ ID NO: 174940 - RNA, 19 nt, Artificial Sequence
  Description of Artificial Sequence: Synthetic oligonucleotide
  Sense strand starting at position 921 of SEQ ID NO: 2256
auuagucucuuacuaugua

SEQ ID NO: 174941 - RNA, 19 nt, Artificial Sequence
  Description of Artificial Sequence: Synthetic oligonucleotide
  Antisense strand to SEQ ID NO: 174940
uacauaguaagagacuaau

SEQ ID NO: 174942 - RNA, 19 nt, Artificial Sequence
  Description of Artificial Sequence: Synthetic oligonucleotide
  Sense strand starting at position 1210 of SEQ ID NO: 2256
cacgaugagccaugauuag

SEQ ID NO: 174943 - RNA, 19 nt, Artificial Sequence
  Description of Artificial Sequence: Synthetic oligonucleotide
  Antisense strand to SEQ ID NO: 174942
cuaaucauggcucaucgug

SEQ ID NO: 174944 - RNA, 19 nt, Artificial Sequence
  Description of Artificial Sequence: Synthetic oligonucleotide
  Sense strand starting at position 1389 of SEQ ID NO: 2256
acaguauuccuugaaaugu

SEQ ID NO: 174945 - RNA, 19 nt, Artificial Sequence
  Description of Artificial Sequence: Synthetic oligonucleotide
  Antisense strand to SEQ ID NO: 174944
acauuucaaggaauacugu

SEQ ID NO: 174946 - RNA, 19 nt, Artificial Sequence
  Description of Artificial Sequence: Synthetic oligonucleotide
  Sense strand starting at position 1423 of SEQ ID NO: 2256
uaaguucuccaaggccaga

SEQ ID NO: 174947 - RNA, 19 nt, Artificial Sequence
  Description of Artificial Sequence: Synthetic oligonucleotide
  Antisense strand to SEQ ID NO: 174946
ucuggccuuggagaacuua

SEQ ID NO: 174948 - RNA, 19 nt, Artificial Sequence
  Description of Artificial Sequence: Synthetic oligonucleotide
  Sense strand starting at position 1479 of SEQ ID NO: 2256
gagaaacgagccugaguuu

SEQ ID NO: 174949 - RNA, 19 nt, Artificial Sequence
  Description of Artificial Sequence: Synthetic oligonucleotide
  Antisense strand to SEQ ID NO: 174948
aaacucaggcucguuucuc

SEQ ID NO: 174950 - RNA, 19 nt, Artificial Sequence
  Description of Artificial Sequence: Synthetic oligonucleotide
  Sense strand starting at position 1517 of SEQ ID NO: 2256
uuacaagagcccugaguua

SEQ ID NO: 174951 - RNA, 19 nt, Artificial Sequence
  Description of Artificial Sequence: Synthetic oligonucleotide
  Antisense strand to SEQ ID NO: 174950
uaacucagggcucuuguaa

SEQ ID NO: 174952 - RNA, 19 nt, Artificial Sequence
  Description of Artificial Sequence: Synthetic oligonucleotide
  Sense strand starting at position 2016 of SEQ ID NO: 2256
cccuucugccauuagagaa

SEQ ID NO: 174953 - RNA, 19 nt, Artificial Sequence
  Description of Artificial Sequence: Synthetic oligonucleotide
  Antisense strand to SEQ ID NO: 174952
uucucuaauggcagaaggg

SEQ ID NO: 174954 - RNA, 19 nt, Artificial Sequence
  Description of Artificial Sequence: Synthetic oligonucleotide
  Sense strand starting at position 2215 of SEQ ID NO: 2256
auugaaauuucuggaacuc

SEQ ID NO: 174955 - RNA, 19 nt, Artificial Sequence
  Description of Artificial Sequence: Synthetic oligonucleotide
  Antisense strand to SEQ ID NO: 174954
gaguuccagaaauuucaau

SEQ ID NO: 174956 - RNA, 19 nt, Artificial Sequence
  Description of Artificial Sequence: Synthetic oligonucleotide
  Sense strand starting at position 2232 of SEQ ID NO: 2256
ucuacuucugaguaccuua

SEQ ID NO: 174957 - RNA, 19 nt, Artificial Sequence
  Description of Artificial Sequence: Synthetic oligonucleotide
  Antisense strand to SEQ ID NO: 174956
uaagguacucagaaguaga

SEQ ID NO: 174958 - RNA, 19 nt, Artificial Sequence
  Description of Artificial Sequence: Synthetic oligonucleotide
  Sense strand starting at position 2340 of SEQ ID NO: 2256
aaacuauucuaaguuggga

SEQ ID NO: 174959 - RNA, 19 nt, Artificial Sequence
  Description of Artificial Sequence: Synthetic oligonucleotide
  Antisense strand to SEQ ID NO: 174958
ucccaacuuagaauaguuu

SEQ ID NO: 174960 - RNA, 19 nt, Artificial Sequence
  Description of Artificial Sequence: Synthetic oligonucleotide
  Sense strand starting at position 2343 of SEQ ID NO: 2256
cuauucuaaguugggagua

SEQ ID NO: 174961 - RNA, 19 nt, Artificial Sequence
  Description of Artificial Sequence: Synthetic oligonucleotide
  Antisense strand to SEQ ID NO: 174960
uacucccaacuuagaauag

SEQ ID NO: 174962 - RNA, 19 nt, Artificial Sequence
  Description of Artificial Sequence: Synthetic oligonucleotide
  Sense strand starting at position 2845 of SEQ ID NO: 2256
aggugaaugcaucacugau

SEQ ID NO: 174963 - RNA, 19 nt, Artificial Sequence
  Description of Artificial Sequence: Synthetic oligonucleotide
  Antisense strand to SEQ ID NO: 174962
aucagugaugcauucaccu

SEQ ID NO: 174964 - RNA, 19 nt, Artificial Sequence
  Description of Artificial Sequence: Synthetic oligonucleotide
  Sense strand starting at position 2847 of SEQ ID NO: 2256
gugaaugcaucacugauca

SEQ ID NO: 174965 - RNA, 19 nt, Artificial Sequence
  Description of Artificial Sequence: Synthetic oligonucleotide
  Antisense strand to SEQ ID NO: 174964
ugaucagugaugcauucac

SEQ ID NO: 174966 - RNA, 19 nt, Artificial Sequence
  Description of Artificial Sequence: Synthetic oligonucleotide
  Sense strand starting at position 2886 of SEQ ID NO: 2256
gcuugcuaucaugaaacuu

SEQ ID NO: 174967 - RNA, 19 nt, Artificial Sequence
  Description of Artificial Sequence: Synthetic oligonucleotide
  Antisense strand to SEQ ID NO: 174966
aaguuucaugauagcaagc

SEQ ID NO: 174968 - RNA, 19 nt, Artificial Sequence
  Description of Artificial Sequence: Synthetic oligonucleotide
  Sense strand starting at position 2944 of SEQ ID NO: 2256
ccaaauggugauggacauu

SEQ ID NO: 174969 - RNA, 19 nt, Artificial Sequence
  Description of Artificial Sequence: Synthetic oligonucleotide
  Antisense strand to SEQ ID NO: 174968
aauguccaucaccauuugg

SEQ ID NO: 174970 - RNA, 19 nt, Artificial Sequence
  Description of Artificial Sequence: Synthetic oligonucleotide
  Sense strand starting at position 2950 of SEQ ID NO: 2256
ggugauggacauugugaug

SEQ ID NO: 174971 - RNA, 19 nt, Artificial Sequence
  Description of Artificial Sequence: Synthetic oligonucleotide
  Antisense strand to SEQ ID NO: 174970
caucacaauguccaucacc

SEQ ID NO: 174972 - RNA, 19 nt, Artificial Sequence
  Description of Artificial Sequence: Synthetic oligonucleotide
  Sense strand starting at position 3270 of SEQ ID NO: 2256
gccucauaggcccauagaa

SEQ ID NO: 174973 - RNA, 19 nt, Artificial Sequence
  Description of Artificial Sequence: Synthetic oligonucleotide
  Antisense strand to SEQ ID NO: 174972
uucuaugggccuaugaggc

SEQ ID NO: 174974 - RNA, 19 nt, Artificial Sequence
  Description of Artificial Sequence: Synthetic oligonucleotide
  Sense strand starting at position 3280 of SEQ ID NO: 2256
cccauagaagauuguuguu

SEQ ID NO: 174975 - RNA, 19 nt, Artificial Sequence
  Description of Artificial Sequence: Synthetic oligonucleotide
  Antisense strand to SEQ ID NO: 174974
aacaacaaucuucuauggg

SEQ ID NO: 174976 - RNA, 19 nt, Artificial Sequence
  Description of Artificial Sequence: Synthetic oligonucleotide
  Sense strand starting at position 3400 of SEQ ID NO: 2256
ucaagaagcugagucugau

SEQ ID NO: 174977 - RNA, 19 nt, Artificial Sequence
  Description of Artificial Sequence: Synthetic oligonucleotide
  Antisense strand to SEQ ID NO: 174976
aucagacucagcuucuuga

SEQ ID NO: 174978 - RNA, 19 nt, Artificial Sequence
  Description of Artificial Sequence: Synthetic oligonucleotide
  Sense strand starting at position 3403 of SEQ ID NO: 2256
agaagcugagucugaugaa

SEQ ID NO: 174979 - RNA, 19 nt, Artificial Sequence
  Description of Artificial Sequence: Synthetic oligonucleotide
  Antisense strand to SEQ ID NO: 174978
uucaucagacucagcuucu

SEQ ID NO: 174980 - RNA, 19 nt, Artificial Sequence
  Description of Artificial Sequence: Synthetic oligonucleotide
  Sense strand starting at position 3437 of SEQ ID NO: 2256
agcagacagcuauaucaca

SEQ ID NO: 174981 - RNA, 19 nt, Artificial Sequence
  Description of Artificial Sequence: Synthetic oligonucleotide
  Antisense strand to SEQ ID NO: 174980
ugugauauagcugucugcu

SEQ ID NO: 174982 - RNA, 19 nt, Artificial Sequence
  Description of Artificial Sequence: Synthetic oligonucleotide
  Sense strand starting at position 3476 of SEQ ID NO: 2256
ggguuaagcccugauuccu

SEQ ID NO: 174983 - RNA, 19 nt, Artificial Sequence
  Description of Artificial Sequence: Synthetic oligonucleotide
  Antisense strand to SEQ ID NO: 174982
aggaaucagggcuuaaccc

SEQ ID NO: 174984 - RNA, 19 nt, Artificial Sequence
  Description of Artificial Sequence: Synthetic oligonucleotide
  Sense strand starting at position 3484 of SEQ ID NO: 2256
cccugauuccuguaguaac

SEQ ID NO: 174985 - RNA, 19 nt, Artificial Sequence
  Description of Artificial Sequence: Synthetic oligonucleotide
  Antisense strand to SEQ ID NO: 174984
guuacuacaggaaucaggg

SEQ ID NO: 174986 - RNA, 19 nt, Artificial Sequence
  Description of Artificial Sequence: Synthetic oligonucleotide
  Sense strand starting at position 3585 of SEQ ID NO: 2256
ugugaaaugugacuaguau

SEQ ID NO: 174987 - RNA, 19 nt, Artificial Sequence
  Description of Artificial Sequence: Synthetic oligonucleotide
  Antisense strand to SEQ ID NO: 174986
auacuagucacauuucaca

SEQ ID NO: 174988 - RNA, 19 nt, Artificial Sequence
  Description of Artificial Sequence: Synthetic oligonucleotide
  Sense strand starting at position 3586 of SEQ ID NO: 2256
gugaaaugugacuaguaug

SEQ ID NO: 174989 - RNA, 19 nt, Artificial Sequence
  Description of Artificial Sequence: Synthetic oligonucleotide
  Antisense strand to SEQ ID NO: 174988
cauacuagucacauuucac

SEQ ID NO: 174990 - RNA, 19 nt, Artificial Sequence
  Description of Artificial Sequence: Synthetic oligonucleotide
  Sense strand starting at position 3818 of SEQ ID NO: 2256
auaaauauguggcucacau

SEQ ID NO: 174991 - RNA, 19 nt, Artificial Sequence
  Description of Artificial Sequence: Synthetic oligonucleotide
  Antisense strand to SEQ ID NO: 174990
augugagccacauauuuau

SEQ ID NO: 174992 - RNA, 19 nt, Artificial Sequence
  Description of Artificial Sequence: Synthetic oligonucleotide
  Sense strand starting at position 610 of SEQ ID NO: 38
uuagccaaggauuaguaau

SEQ ID NO: 174993 - RNA, 19 nt, Artificial Sequence
  Description of Artificial Sequence: Synthetic oligonucleotide
  Antisense strand to SEQ ID NO: 174992
auuacuaauccuuggcuaa

SEQ ID NO: 174994 - RNA, 19 nt, Artificial Sequence
  Description of Artificial Sequence: Synthetic oligonucleotide
  Sense strand starting at position 612 of SEQ ID NO: 38
agccaaggauuaguaauua

SEQ ID NO: 174995 - RNA, 19 nt, Artificial Sequence
  Description of Artificial Sequence: Synthetic oligonucleotide
  Antisense strand to SEQ ID NO: 174994
uaauuacuaauccuuggcu

SEQ ID NO: 174996 - RNA, 19 nt, Artificial Sequence
  Description of Artificial Sequence: Synthetic oligonucleotide
  Sense strand starting at position 675 of SEQ ID NO: 38
auuggagcauuccucugau

SEQ ID NO: 174997 - RNA, 19 nt, Artificial Sequence
  Description of Artificial Sequence: Synthetic oligonucleotide
  Antisense strand to SEQ ID NO: 174996
aucagaggaaugcuccaau

SEQ ID NO: 174998 - RNA, 19 nt, Artificial Sequence
  Description of Artificial Sequence: Synthetic oligonucleotide
  Sense strand starting at position 678 of SEQ ID NO: 38
ggagcauuccucugauucu

SEQ ID NO: 174999 - RNA, 19 nt, Artificial Sequence
  Description of Artificial Sequence: Synthetic oligonucleotide
  Antisense strand to SEQ ID NO: 174998
agaaucagaggaaugcucc

SEQ ID NO: 175000 - RNA, 19 nt, Artificial Sequence
  Description of Artificial Sequence: Synthetic oligonucleotide
  Sense strand starting at position 687 of SEQ ID NO: 38
cucugauucuagcuccuga

SEQ ID NO: 175001 - RNA, 19 nt, Artificial Sequence
  Description of Artificial Sequence: Synthetic oligonucleotide
  Antisense strand to SEQ ID NO: 175000
ucaggagcuagaaucagag

SEQ ID NO: 175002 - RNA, 19 nt, Artificial Sequence
  Description of Artificial Sequence: Synthetic oligonucleotide
  Sense strand starting at position 892 of SEQ ID NO: 38
aagcuugacccgcaaguau

SEQ ID NO: 175003 - RNA, 19 nt, Artificial Sequence
  Description of Artificial Sequence: Synthetic oligonucleotide
  Antisense strand to SEQ ID NO: 175002
auacuugcgggucaagcuu

SEQ ID NO: 175004 - RNA, 19 nt, Artificial Sequence
  Description of Artificial Sequence: Synthetic oligonucleotide
  Sense strand starting at position 991 of SEQ ID NO: 38
guagaaguggauugugaug

SEQ ID NO: 175005 - RNA, 19 nt, Artificial Sequence
  Description of Artificial Sequence: Synthetic oligonucleotide
  Antisense strand to SEQ ID NO: 175004
caucacaauccacuucuac

SEQ ID NO: 175006 - RNA, 19 nt, Artificial Sequence
  Description of Artificial Sequence: Synthetic oligonucleotide
  Sense strand starting at position 1180 of SEQ ID NO: 38
cauggugauguagguaaca

SEQ ID NO: 175007 - RNA, 19 nt, Artificial Sequence
  Description of Artificial Sequence: Synthetic oligonucleotide
  Antisense strand to SEQ ID NO: 175006
uguuaccuacaucaccaug

SEQ ID NO: 175008 - RNA, 19 nt, Artificial Sequence
  Description of Artificial Sequence: Synthetic oligonucleotide
  Sense strand starting at position 1182 of SEQ ID NO: 38
uggugauguagguaacauu

SEQ ID NO: 175009 - RNA, 19 nt, Artificial Sequence
  Description of Artificial Sequence: Synthetic oligonucleotide
  Antisense strand to SEQ ID NO: 175008
aauguuaccuacaucacca

SEQ ID NO: 175010 - RNA, 19 nt, Artificial Sequence
  Description of Artificial Sequence: Synthetic oligonucleotide
  Sense strand starting at position 1189 of SEQ ID NO: 38
guagguaacauuggccaau

SEQ ID NO: 175011 - RNA, 19 nt, Artificial Sequence
  Description of Artificial Sequence: Synthetic oligonucleotide
  Antisense strand to SEQ ID NO: 175010
auuggccaauguuaccuac

SEQ ID NO: 175012 - RNA, 19 nt, Artificial Sequence
  Description of Artificial Sequence: Synthetic oligonucleotide
  Sense strand starting at position 1191 of SEQ ID NO: 38
agguaacauuggccaauga

SEQ ID NO: 175013 - RNA, 19 nt, Artificial Sequence
  Description of Artificial Sequence: Synthetic oligonucleotide
  Antisense strand to SEQ ID NO: 175012
ucauuggccaauguuaccu

SEQ ID NO: 175014 - RNA, 19 nt, Artificial Sequence
  Description of Artificial Sequence: Synthetic oligonucleotide
  Sense strand starting at position 1390 of SEQ ID NO: 38
gggugaucucuuggaaacc

SEQ ID NO: 175015 - RNA, 19 nt, Artificial Sequence
  Description of Artificial Sequence: Synthetic oligonucleotide
  Antisense strand to SEQ ID NO: 175014
gguuuccaagagaucaccc

SEQ ID NO: 175016 - RNA, 19 nt, Artificial Sequence
  Description of Artificial Sequence: Synthetic oligonucleotide
  Sense strand starting at position 1402 of SEQ ID NO: 38
ggaaacccuucuccuuaga

SEQ ID NO: 175017 - RNA, 19 nt, Artificial Sequence
  Description of Artificial Sequence: Synthetic oligonucleotide
  Antisense strand to SEQ ID NO: 175016
ucuaaggagaaggguuucc

SEQ ID NO: 175018 - RNA, 19 nt, Artificial Sequence
  Description of Artificial Sequence: Synthetic oligonucleotide
  Sense strand starting at position 1475 of SEQ ID NO: 38
aaguuuccagaaugcugua

SEQ ID NO: 175019 - RNA, 19 nt, Artificial Sequence
  Description of Artificial Sequence: Synthetic oligonucleotide
  Antisense strand to SEQ ID NO: 175018
uacagcauucuggaaacuu

SEQ ID NO: 175020 - RNA, 19 nt, Artificial Sequence
  Description of Artificial Sequence: Synthetic oligonucleotide
  Sense strand starting at position 1480 of SEQ ID NO: 38
uccagaaugcuguaggaca

SEQ ID NO: 175021 - RNA, 19 nt, Artificial Sequence
  Description of Artificial Sequence: Synthetic oligonucleotide
  Antisense strand to SEQ ID NO: 175020
uguccuacagcauucugga

SEQ ID NO: 175022 - RNA, 19 nt, Artificial Sequence
  Description of Artificial Sequence: Synthetic oligonucleotide
  Sense strand starting at position 1727 of SEQ ID NO: 38
ucgagacaagauuggguau

SEQ ID NO: 175023 - RNA, 19 nt, Artificial Sequence
  Description of Artificial Sequence: Synthetic oligonucleotide
  Antisense strand to SEQ ID NO: 175022
auacccaaucuugucucga

SEQ ID NO: 175024 - RNA, 19 nt, Artificial Sequence
  Description of Artificial Sequence: Synthetic oligonucleotide
  Sense strand starting at position 1938 of SEQ ID NO: 38
aaguucuugcacgaguuga

SEQ ID NO: 175025 - RNA, 19 nt, Artificial Sequence
  Description of Artificial Sequence: Synthetic oligonucleotide
  Antisense strand to SEQ ID NO: 175024
ucaacucgugcaagaacuu

SEQ ID NO: 175026 - RNA, 19 nt, Artificial Sequence
  Description of Artificial Sequence: Synthetic oligonucleotide
  Sense strand starting at position 1949 of SEQ ID NO: 38
cgaguugacgcuuugcuga

SEQ ID NO: 175027 - RNA, 19 nt, Artificial Sequence
  Description of Artificial Sequence: Synthetic oligonucleotide
  Antisense strand to SEQ ID NO: 175026
ucagcaaagcgucaacucg

SEQ ID NO: 175028 - RNA, 19 nt, Artificial Sequence
  Description of Artificial Sequence: Synthetic oligonucleotide
  Sense strand starting at position 1991 of SEQ ID NO: 38
cagcaaagauccuugguca

SEQ ID NO: 175029 - RNA, 19 nt, Artificial Sequence
  Description of Artificial Sequence: Synthetic oligonucleotide
  Antisense strand to SEQ ID NO: 175028
ugaccaaggaucuuugcug

SEQ ID NO: 175030 - RNA, 19 nt, Artificial Sequence
  Description of Artificial Sequence: Synthetic oligonucleotide
  Sense strand starting at position 1992 of SEQ ID NO: 38
agcaaagauccuuggucaa

SEQ ID NO: 175031 - RNA, 19 nt, Artificial Sequence
  Description of Artificial Sequence: Synthetic oligonucleotide
  Antisense strand to SEQ ID NO: 175030
uugaccaaggaucuuugcu

SEQ ID NO: 175032 - RNA, 19 nt, Artificial Sequence
  Description of Artificial Sequence: Synthetic oligonucleotide
  Sense strand starting at position 1994 of SEQ ID NO: 38
caaagauccuuggucaaag

SEQ ID NO: 175033 - RNA, 19 nt, Artificial Sequence
  Description of Artificial Sequence: Synthetic oligonucleotide
  Antisense strand to SEQ ID NO: 175032
cuuugaccaaggaucuuug

SEQ ID NO: 175034 - RNA, 19 nt, Artificial Sequence
  Description of Artificial Sequence: Synthetic oligonucleotide
  Sense strand starting at position 2018 of SEQ ID NO: 38
agcaaagauucccugcuca

SEQ ID NO: 175035 - RNA, 19 nt, Artificial Sequence
  Description of Artificial Sequence: Synthetic oligonucleotide
  Antisense strand to SEQ ID NO: 175034
ugagcagggaaucuuugcu

SEQ ID NO: 175036 - RNA, 19 nt, Artificial Sequence
  Description of Artificial Sequence: Synthetic oligonucleotide
  Sense strand starting at position 2153 of SEQ ID NO: 38
guccaaccuaugugaggaa

SEQ ID NO: 175037 - RNA, 19 nt, Artificial Sequence
  Description of Artificial Sequence: Synthetic oligonucleotide
  Antisense strand to SEQ ID NO: 175036
uuccucacauagguuggac

SEQ ID NO: 175038 - RNA, 19 nt, Artificial Sequence
  Description of Artificial Sequence: Synthetic oligonucleotide
  Sense strand starting at position 2216 of SEQ ID NO: 38
gaacgugugcaacagaauc

SEQ ID NO: 175039 - RNA, 19 nt, Artificial Sequence
  Description of Artificial Sequence: Synthetic oligonucleotide
  Antisense strand to SEQ ID NO: 175038
gauucuguugcacacguuc

SEQ ID NO: 175040 - RNA, 19 nt, Artificial Sequence
  Description of Artificial Sequence: Synthetic oligonucleotide
  Sense strand starting at position 2218 of SEQ ID NO: 38
acgugugcaacagaaucaa

SEQ ID NO: 175041 - RNA, 19 nt, Artificial Sequence
  Description of Artificial Sequence: Synthetic oligonucleotide
  Antisense strand to SEQ ID NO: 175040
uugauucuguugcacacgu

SEQ ID NO: 175042 - RNA, 19 nt, Artificial Sequence
  Description of Artificial Sequence: Synthetic oligonucleotide
  Sense strand starting at position 2293 of SEQ ID NO: 38
ggcgacugucugggaauca

SEQ ID NO: 175043 - RNA, 19 nt, Artificial Sequence
  Description of Artificial Sequence: Synthetic oligonucleotide
  Antisense strand to SEQ ID NO: 175042
ugauucccagacagucgcc

SEQ ID NO: 175044 - RNA, 19 nt, Artificial Sequence
  Description of Artificial Sequence: Synthetic oligonucleotide
  Sense strand starting at position 2495 of SEQ ID NO: 38
gcuugagggcuuuaucauu

SEQ ID NO: 175045 - RNA, 19 nt, Artificial Sequence
  Description of Artificial Sequence: Synthetic oligonucleotide
  Antisense strand to SEQ ID NO: 175044
aaugauaaagcccucaagc

SEQ ID NO: 175046 - RNA, 19 nt, Artificial Sequence
  Description of Artificial Sequence: Synthetic oligonucleotide
  Sense strand starting at position 2572 of SEQ ID NO: 38
ggcguucugguguuuacua

SEQ ID NO: 175047 - RNA, 19 nt, Artificial Sequence
  Description of Artificial Sequence: Synthetic oligonucleotide
  Antisense strand to SEQ ID NO: 175046
uaguaaacaccagaacgcc

SEQ ID NO: 175048 - RNA, 19 nt, Artificial Sequence
  Description of Artificial Sequence: Synthetic oligonucleotide
  Sense strand starting at position 2752 of SEQ ID NO: 38
ccgccagacuugucauuuc

SEQ ID NO: 175049 - RNA, 19 nt, Artificial Sequence
  Description of Artificial Sequence: Synthetic oligonucleotide
  Antisense strand to SEQ ID NO: 175048
gaaaugacaagucuggcgg

SEQ ID NO: 175050 - RNA, 19 nt, Artificial Sequence
  Description of Artificial Sequence: Synthetic oligonucleotide
  Sense strand starting at position 2762 of SEQ ID NO: 38
ugucauuucucccugagca

SEQ ID NO: 175051 - RNA, 19 nt, Artificial Sequence
  Description of Artificial Sequence: Synthetic oligonucleotide
  Antisense strand to SEQ ID NO: 175050
ugcucagggagaaaugaca

SEQ ID NO: 175052 - RNA, 19 nt, Artificial Sequence
  Description of Artificial Sequence: Synthetic oligonucleotide
  Sense strand starting at position 2763 of SEQ ID NO: 38
gucauuucucccugagcag

SEQ ID NO: 175053 - RNA, 19 nt, Artificial Sequence
  Description of Artificial Sequence: Synthetic oligonucleotide
  Antisense strand to SEQ ID NO: 175052
cugcucagggagaaaugac

SEQ ID NO: 175054 - RNA, 19 nt, Artificial Sequence
  Description of Artificial Sequence: Synthetic oligonucleotide
  Sense strand starting at position 2802 of SEQ ID NO: 38
ggcaguccucuccaacuga

SEQ ID NO: 175055 - RNA, 19 nt, Artificial Sequence
  Description of Artificial Sequence: Synthetic oligonucleotide
  Antisense strand to SEQ ID NO: 175054
ucaguuggagaggacugcc

SEQ ID NO: 175056 - RNA, 19 nt, Artificial Sequence
  Description of Artificial Sequence: Synthetic oligonucleotide
  Sense strand starting at position 2901 of SEQ ID NO: 38
uccaaugugucccucauaa

SEQ ID NO: 175057 - RNA, 19 nt, Artificial Sequence
  Description of Artificial Sequence: Synthetic oligonucleotide
  Antisense strand to SEQ ID NO: 175056
uuaugagggacacauugga

SEQ ID NO: 175058 - RNA, 19 nt, Artificial Sequence
  Description of Artificial Sequence: Synthetic oligonucleotide
  Sense strand starting at position 2914 of SEQ ID NO: 38
ucauaaauguuucuacugu

SEQ ID NO: 175059 - RNA, 19 nt, Artificial Sequence
  Description of Artificial Sequence: Synthetic oligonucleotide
  Antisense strand to SEQ ID NO: 175058
acaguagaaacauuuauga

SEQ ID NO: 175060 - RNA, 19 nt, Artificial Sequence
  Description of Artificial Sequence: Synthetic oligonucleotide
  Sense strand starting at position 3102 of SEQ ID NO: 38
guacauaggugaguucuuu

SEQ ID NO: 175061 - RNA, 19 nt, Artificial Sequence
  Description of Artificial Sequence: Synthetic oligonucleotide
  Antisense strand to SEQ ID NO: 175060
aaagaacucaccuauguac

SEQ ID NO: 175062 - RNA, 19 nt, Artificial Sequence
  Description of Artificial Sequence: Synthetic oligonucleotide
  Sense strand starting at position 3183 of SEQ ID NO: 38
gcaugcuguaggcaagaua

SEQ ID NO: 175063 - RNA, 19 nt, Artificial Sequence
  Description of Artificial Sequence: Synthetic oligonucleotide
  Antisense strand to SEQ ID NO: 175062
uaucuugccuacagcaugc

SEQ ID NO: 175064 - RNA, 19 nt, Artificial Sequence
  Description of Artificial Sequence: Synthetic oligonucleotide
  Sense strand starting at position 3283 of SEQ ID NO: 38
ugggaauucuacccucaga

SEQ ID NO: 175065 - RNA, 19 nt, Artificial Sequence
  Description of Artificial Sequence: Synthetic oligonucleotide
  Antisense strand to SEQ ID NO: 175064
ucugaggguagaauuccca

SEQ ID NO: 175066 - RNA, 19 nt, Artificial Sequence
  Description of Artificial Sequence: Synthetic oligonucleotide
  Sense strand starting at position 3698 of SEQ ID NO: 38
accauuuggucugcacauu

SEQ ID NO: 175067 - RNA, 19 nt, Artificial Sequence
  Description of Artificial Sequence: Synthetic oligonucleotide
  Antisense strand to SEQ ID NO: 175066
aaugugcagaccaaauggu

SEQ ID NO: 175068 - RNA, 19 nt, Artificial Sequence
  Description of Artificial Sequence: Synthetic oligonucleotide
  Sense strand starting at position 3729 of SEQ ID NO: 38
aguccagacuccuuagagu

SEQ ID NO: 175069 - RNA, 19 nt, Artificial Sequence
  Description of Artificial Sequence: Synthetic oligonucleotide
  Antisense strand to SEQ ID NO: 175068
acucuaaggagucuggacu

SEQ ID NO: 175070 - RNA, 19 nt, Artificial Sequence
  Description of Artificial Sequence: Synthetic oligonucleotide
  Sense strand starting at position 3735 of SEQ ID NO: 38
gacuccuuagaguggcuua

SEQ ID NO: 175071 - RNA, 19 nt, Artificial Sequence
  Description of Artificial Sequence: Synthetic oligonucleotide
  Antisense strand to SEQ ID NO: 175070
uaagccacucuaaggaguc

SEQ ID NO: 175072 - RNA, 19 nt, Artificial Sequence
  Description of Artificial Sequence: Synthetic oligonucleotide
  Sense strand starting at position 285 of SEQ ID NO: 2257
gguucuacgaggcauggau

SEQ ID NO: 175073 - RNA, 19 nt, Artificial Sequence
  Description of Artificial Sequence: Synthetic oligonucleotide
  Antisense strand to SEQ ID NO: 175072
auccaugccucguagaacc

SEQ ID NO: 175074 - RNA, 19 nt, Artificial Sequence
  Description of Artificial Sequence: Synthetic oligonucleotide
  Sense strand starting at position 371 of SEQ ID NO: 2257
gugccuguugcuccaagua

SEQ ID NO: 175075 - RNA, 19 nt, Artificial Sequence
  Description of Artificial Sequence: Synthetic oligonucleotide
  Antisense strand to SEQ ID NO: 175074
uacuuggagcaacaggcac

SEQ ID NO: 175076 - RNA, 19 nt, Artificial Sequence
  Description of Artificial Sequence: Synthetic oligonucleotide
  Sense strand starting at position 466 of SEQ ID NO: 2257
aggagcauguucuuaggga

SEQ ID NO: 175077 - RNA, 19 nt, Artificial Sequence
  Description of Artificial Sequence: Synthetic oligonucleotide
  Antisense strand to SEQ ID NO: 175076
ucccuaagaacaugcuccu

SEQ ID NO: 175078 - RNA, 19 nt, Artificial Sequence
  Description of Artificial Sequence: Synthetic oligonucleotide
  Sense strand starting at position 471 of SEQ ID NO: 2257
cauguucuuagggaugagu

SEQ ID NO: 175079 - RNA, 19 nt, Artificial Sequence
  Description of Artificial Sequence: Synthetic oligonucleotide
  Antisense strand to SEQ ID NO: 175078
acucaucccuaagaacaug

SEQ ID NO: 175080 - RNA, 19 nt, Artificial Sequence
  Description of Artificial Sequence: Synthetic oligonucleotide
  Sense strand starting at position 473 of SEQ ID NO: 2257
uguucuuagggaugaguuu

SEQ ID NO: 175081 - RNA, 19 nt, Artificial Sequence
  Description of Artificial Sequence: Synthetic oligonucleotide
  Antisense strand to SEQ ID NO: 175080
aaacucaucccuaagaaca

SEQ ID NO: 175082 - RNA, 19 nt, Artificial Sequence
  Description of Artificial Sequence: Synthetic oligonucleotide
  Sense strand starting at position 732 of SEQ ID NO: 2257
ggcucaagguccuuaggau

SEQ ID NO: 175083 - RNA, 19 nt, Artificial Sequence
  Description of Artificial Sequence: Synthetic oligonucleotide
  Antisense strand to SEQ ID NO: 175082
auccuaaggaccuugagcc

SEQ ID NO: 175084 - RNA, 19 nt, Artificial Sequence
  Description of Artificial Sequence: Synthetic oligonucleotide
  Sense strand starting at position 733 of SEQ ID NO: 2257
gcucaagguccuuaggauc

SEQ ID NO: 175085 - RNA, 19 nt, Artificial Sequence
  Description of Artificial Sequence: Synthetic oligonucleotide
  Antisense strand to SEQ ID NO: 175084
gauccuaaggaccuugagc

SEQ ID NO: 175086 - RNA, 19 nt, Artificial Sequence
  Description of Artificial Sequence: Synthetic oligonucleotide
  Sense strand starting at position 941 of SEQ ID NO: 2257
uuggauuucuuggagauua

SEQ ID NO: 175087 - RNA, 19 nt, Artificial Sequence
  Description of Artificial Sequence: Synthetic oligonucleotide
  Antisense strand to SEQ ID NO: 175086
uaaucuccaagaaauccaa

SEQ ID NO: 175088 - RNA, 19 nt, Artificial Sequence
  Description of Artificial Sequence: Synthetic oligonucleotide
  Sense strand starting at position 957 of SEQ ID NO: 2257
uuagaagucuaguugagga

SEQ ID NO: 175089 - RNA, 19 nt, Artificial Sequence
  Description of Artificial Sequence: Synthetic oligonucleotide
  Antisense strand to SEQ ID NO: 175088
uccucaacuagacuucuaa

SEQ ID NO: 175090 - RNA, 19 nt, Artificial Sequence
  Description of Artificial Sequence: Synthetic oligonucleotide
  Sense strand starting at position 986 of SEQ ID NO: 2257
ggaagauuagguuguuuag

SEQ ID NO: 175091 - RNA, 19 nt, Artificial Sequence
  Description of Artificial Sequence: Synthetic oligonucleotide
  Antisense strand to SEQ ID NO: 175090
cuaaacaaccuaaucuucc

SEQ ID NO: 175092 - RNA, 19 nt, Artificial Sequence
  Description of Artificial Sequence: Synthetic oligonucleotide
  Sense strand starting at position 988 of SEQ ID NO: 2257
aagauuagguuguuuagag

SEQ ID NO: 175093 - RNA, 19 nt, Artificial Sequence
  Description of Artificial Sequence: Synthetic oligonucleotide
  Antisense strand to SEQ ID NO: 175092
cucuaaacaaccuaaucuu

SEQ ID NO: 175094 - RNA, 19 nt, Artificial Sequence
  Description of Artificial Sequence: Synthetic oligonucleotide
  Sense strand starting at position 989 of SEQ ID NO: 2257
agauuagguuguuuagagu

SEQ ID NO: 175095 - RNA, 19 nt, Artificial Sequence
  Description of Artificial Sequence: Synthetic oligonucleotide
  Antisense strand to SEQ ID NO: 175094
acucuaaacaaccuaaucu

SEQ ID NO: 175096 - RNA, 19 nt, Artificial Sequence
  Description of Artificial Sequence: Synthetic oligonucleotide
  Sense strand starting at position 996 of SEQ ID NO: 2257
guuguuuagaguuagaacu

SEQ ID NO: 175097 - RNA, 19 nt, Artificial Sequence
  Description of Artificial Sequence: Synthetic oligonucleotide
  Antisense strand to SEQ ID NO: 175096
aguucuaacucuaaacaac

SEQ ID NO: 175098 - RNA, 19 nt, Artificial Sequence
  Description of Artificial Sequence: Synthetic oligonucleotide
  Sense strand starting at position 1102 of SEQ ID NO: 2257
cagagaaauccuggcagca

SEQ ID NO: 175099 - RNA, 19 nt, Artificial Sequence
  Description of Artificial Sequence: Synthetic oligonucleotide
  Antisense strand to SEQ ID NO: 175098
ugcugccaggauuucucug

SEQ ID NO: 175100 - RNA, 19 nt, Artificial Sequence
  Description of Artificial Sequence: Synthetic oligonucleotide
  Sense strand starting at position 1534 of SEQ ID NO: 2257
cagaccaauggguguaaau

SEQ ID NO: 175101 - RNA, 19 nt, Artificial Sequence
  Description of Artificial Sequence: Synthetic oligonucleotide
  Antisense strand to SEQ ID NO: 175100
auuuacacccauuggucug

SEQ ID NO: 175102 - RNA, 19 nt, Artificial Sequence
  Description of Artificial Sequence: Synthetic oligonucleotide
  Sense strand starting at position 1545 of SEQ ID NO: 2257
guguaaauaggguaaaguu

SEQ ID NO: 175103 - RNA, 19 nt, Artificial Sequence
  Description of Artificial Sequence: Synthetic oligonucleotide
  Antisense strand to SEQ ID NO: 175102
aacuuuacccuauuuacac

SEQ ID NO: 175104 - RNA, 19 nt, Artificial Sequence
  Description of Artificial Sequence: Synthetic oligonucleotide
  Sense strand starting at position 1553 of SEQ ID NO: 2257
aggguaaaguuucuuuaaa

SEQ ID NO: 175105 - RNA, 19 nt, Artificial Sequence
  Description of Artificial Sequence: Synthetic oligonucleotide
  Antisense strand to SEQ ID NO: 175104
uuuaaagaaacuuuacccu

SEQ ID NO: 175106 - RNA, 19 nt, Artificial Sequence
  Description of Artificial Sequence: Synthetic oligonucleotide
  Sense strand starting at position 1618 of SEQ ID NO: 2257
cgcauaaggagcuaugcau

SEQ ID NO: 175107 - RNA, 19 nt, Artificial Sequence
  Description of Artificial Sequence: Synthetic oligonucleotide
  Antisense strand to SEQ ID NO: 175106
augcauagcuccuuaugcg

SEQ ID NO: 175108 - RNA, 19 nt, Artificial Sequence
  Description of Artificial Sequence: Synthetic oligonucleotide
  Sense strand starting at position 1662 of SEQ ID NO: 2257
ccagaaaguaugugagaca

SEQ ID NO: 175109 - RNA, 19 nt, Artificial Sequence
  Description of Artificial Sequence: Synthetic oligonucleotide
  Antisense strand to SEQ ID NO: 175108
ugucucacauacuuucugg

SEQ ID NO: 175110 - RNA, 19 nt, Artificial Sequence
  Description of Artificial Sequence: Synthetic oligonucleotide
  Sense strand starting at position 1720 of SEQ ID NO: 2257
ggcacaguggcagaaauau

SEQ ID NO: 175111 - RNA, 19 nt, Artificial Sequence
  Description of Artificial Sequence: Synthetic oligonucleotide
  Antisense strand to SEQ ID NO: 175110
auauuucugccacugugcc

SEQ ID NO: 175112 - RNA, 19 nt, Artificial Sequence
  Description of Artificial Sequence: Synthetic oligonucleotide
  Sense strand starting at position 2065 of SEQ ID NO: 2257
gccucuaguggucauuaac

SEQ ID NO: 175113 - RNA, 19 nt, Artificial Sequence
  Description of Artificial Sequence: Synthetic oligonucleotide
  Antisense strand to SEQ ID NO: 175112
guuaaugaccacuagaggc

SEQ ID NO: 175114 - RNA, 19 nt, Artificial Sequence
  Description of Artificial Sequence: Synthetic oligonucleotide
  Sense strand starting at position 2124 of SEQ ID NO: 2257
gucugagacauaugaguuc

SEQ ID NO: 175115 - RNA, 19 nt, Artificial Sequence
  Description of Artificial Sequence: Synthetic oligonucleotide
  Antisense strand to SEQ ID NO: 175114
gaacucauaugucucagac

SEQ ID NO: 175116 - RNA, 19 nt, Artificial Sequence
  Description of Artificial Sequence: Synthetic oligonucleotide
  Sense strand starting at position 2130 of SEQ ID NO: 2257
gacauaugaguucgacuag

SEQ ID NO: 175117 - RNA, 19 nt, Artificial Sequence
  Description of Artificial Sequence: Synthetic oligonucleotide
  Antisense strand to SEQ ID NO: 175116
cuagucgaacucauauguc

SEQ ID NO: 175118 - RNA, 19 nt, Artificial Sequence
  Description of Artificial Sequence: Synthetic oligonucleotide
  Sense strand starting at position 2142 of SEQ ID NO: 2257
cgacuagaaucagccaguu

SEQ ID NO: 175119 - RNA, 19 nt, Artificial Sequence
  Description of Artificial Sequence: Synthetic oligonucleotide
  Antisense strand to SEQ ID NO: 175118
aacuggcugauucuagucg

SEQ ID NO: 175120 - RNA, 19 nt, Artificial Sequence
  Description of Artificial Sequence: Synthetic oligonucleotide
  Sense strand starting at position 2154 of SEQ ID NO: 2257
gccaguuccuccuuauuug

SEQ ID NO: 175121 - RNA, 19 nt, Artificial Sequence
  Description of Artificial Sequence: Synthetic oligonucleotide
  Antisense strand to SEQ ID NO: 175120
caaauaaggaggaacuggc

SEQ ID NO: 175122 - RNA, 19 nt, Artificial Sequence
  Description of Artificial Sequence: Synthetic oligonucleotide
  Sense strand starting at position 2215 of SEQ ID NO: 2257
ggucaauacaaggaugugu

SEQ ID NO: 175123 - RNA, 19 nt, Artificial Sequence
  Description of Artificial Sequence: Synthetic oligonucleotide
  Antisense strand to SEQ ID NO: 175122
acacauccuuguauugacc

SEQ ID NO: 175124 - RNA, 19 nt, Artificial Sequence
  Description of Artificial Sequence: Synthetic oligonucleotide
  Sense strand starting at position 2217 of SEQ ID NO: 2257
ucaauacaaggauguguuu

SEQ ID NO: 175125 - RNA, 19 nt, Artificial Sequence
  Description of Artificial Sequence: Synthetic oligonucleotide
  Antisense strand to SEQ ID NO: 175124
aaacacauccuuguauuga

SEQ ID NO: 175126 - RNA, 19 nt, Artificial Sequence
  Description of Artificial Sequence: Synthetic oligonucleotide
  Sense strand starting at position 2259 of SEQ ID NO: 2257
auaauuuaguuggaggaau

SEQ ID NO: 175127 - RNA, 19 nt, Artificial Sequence
  Description of Artificial Sequence: Synthetic oligonucleotide
  Antisense strand to SEQ ID NO: 175126
auuccuccaacuaaauuau

SEQ ID NO: 175128 - RNA, 19 nt, Artificial Sequence
  Description of Artificial Sequence: Synthetic oligonucleotide
  Sense strand starting at position 2674 of SEQ ID NO: 2257
guccaugggcaguaaugua

SEQ ID NO: 175129 - RNA, 19 nt, Artificial Sequence
  Description of Artificial Sequence: Synthetic oligonucleotide
  Antisense strand to SEQ ID NO: 175128
uacauuacugcccauggac

SEQ ID NO: 175130 - RNA, 19 nt, Artificial Sequence
  Description of Artificial Sequence: Synthetic oligonucleotide
  Sense strand starting at position 2695 of SEQ ID NO: 2257
ucuuguaagccucacgaau

SEQ ID NO: 175131 - RNA, 19 nt, Artificial Sequence
  Description of Artificial Sequence: Synthetic oligonucleotide
  Antisense strand to SEQ ID NO: 175130
auucgugaggcuuacaaga

SEQ ID NO: 175132 - RNA, 19 nt, Artificial Sequence
  Description of Artificial Sequence: Synthetic oligonucleotide
  Sense strand starting at position 2704 of SEQ ID NO: 2257
ccucacgaaugaucuugaa

SEQ ID NO: 175133 - RNA, 19 nt, Artificial Sequence
  Description of Artificial Sequence: Synthetic oligonucleotide
  Antisense strand to SEQ ID NO: 175132
uucaagaucauucgugagg

SEQ ID NO: 175134 - RNA, 19 nt, Artificial Sequence
  Description of Artificial Sequence: Synthetic oligonucleotide
  Sense strand starting at position 2708 of SEQ ID NO: 2257
acgaaugaucuugaaggcu

SEQ ID NO: 175135 - RNA, 19 nt, Artificial Sequence
  Description of Artificial Sequence: Synthetic oligonucleotide
  Antisense strand to SEQ ID NO: 175134
agccuucaagaucauucgu

SEQ ID NO: 175136 - RNA, 19 nt, Artificial Sequence
  Description of Artificial Sequence: Synthetic oligonucleotide
  Sense strand starting at position 2739 of SEQ ID NO: 2257
uaggguaugucuguaacag

SEQ ID NO: 175137 - RNA, 19 nt, Artificial Sequence
  Description of Artificial Sequence: Synthetic oligonucleotide
  Antisense strand to SEQ ID NO: 175136
cuguuacagacauacccua

SEQ ID NO: 175138 - RNA, 19 nt, Artificial Sequence
  Description of Artificial Sequence: Synthetic oligonucleotide
  Sense strand starting at position 2832 of SEQ ID NO: 2257
gggaaccauuccucgaaag

SEQ ID NO: 175139 - RNA, 19 nt, Artificial Sequence
  Description of Artificial Sequence: Synthetic oligonucleotide
  Antisense strand to SEQ ID NO: 175138
cuuucgaggaaugguuccc

SEQ ID NO: 175140 - RNA, 19 nt, Artificial Sequence
  Description of Artificial Sequence: Synthetic oligonucleotide
  Sense strand starting at position 2833 of SEQ ID NO: 2257
ggaaccauuccucgaaagu

SEQ ID NO: 175141 - RNA, 19 nt, Artificial Sequence
  Description of Artificial Sequence: Synthetic oligonucleotide
  Antisense strand to SEQ ID NO: 175140
acuuucgaggaaugguucc

SEQ ID NO: 175142 - RNA, 19 nt, Artificial Sequence
  Description of Artificial Sequence: Synthetic oligonucleotide
  Sense strand starting at position 2834 of SEQ ID NO: 2257
gaaccauuccucgaaaguu

SEQ ID NO: 175143 - RNA, 19 nt, Artificial Sequence
  Description of Artificial Sequence: Synthetic oligonucleotide
  Antisense strand to SEQ ID NO: 175142
aacuuucgaggaaugguuc

SEQ ID NO: 175144 - RNA, 19 nt, Artificial Sequence
  Description of Artificial Sequence: Synthetic oligonucleotide
  Sense strand starting at position 3839 of SEQ ID NO: 2257
uaaggagagcugugugaga

SEQ ID NO: 175145 - RNA, 19 nt, Artificial Sequence
  Description of Artificial Sequence: Synthetic oligonucleotide
  Antisense strand to SEQ ID NO: 175144
ucucacacagcucuccuua

SEQ ID NO: 175146 - RNA, 19 nt, Artificial Sequence
  Description of Artificial Sequence: Synthetic oligonucleotide
  Sense strand starting at position 3841 of SEQ ID NO: 2257
aggagagcugugugagaaa

SEQ ID NO: 175147 - RNA, 19 nt, Artificial Sequence
  Description of Artificial Sequence: Synthetic oligonucleotide
  Antisense strand to SEQ ID NO: 175146
uuucucacacagcucuccu

SEQ ID NO: 175148 - RNA, 19 nt, Artificial Sequence
  Description of Artificial Sequence: Synthetic oligonucleotide
  Sense strand starting at position 3977 of SEQ ID NO: 2257
uggcacugucacugaauga

SEQ ID NO: 175149 - RNA, 19 nt, Artificial Sequence
  Description of Artificial Sequence: Synthetic oligonucleotide
  Antisense strand to SEQ ID NO: 175148
ucauucagugacagugcca

SEQ ID NO: 175150 - RNA, 19 nt, Artificial Sequence
  Description of Artificial Sequence: Synthetic oligonucleotide
  Sense strand starting at position 3978 of SEQ ID NO: 2257
ggcacugucacugaaugau

SEQ ID NO: 175151 - RNA, 19 nt, Artificial Sequence
  Description of Artificial Sequence: Synthetic oligonucleotide
  Antisense strand to SEQ ID NO: 175150
aucauucagugacagugcc

SEQ ID NO: 175152 - RNA, 19 nt, Artificial Sequence
  Description of Artificial Sequence: Synthetic oligonucleotide
  Sense strand starting at position 3930 of SEQ ID NO: 2258
gcccuccagccuggugaua

SEQ ID NO: 175153 - RNA, 19 nt, Artificial Sequence
  Description of Artificial Sequence: Synthetic oligonucleotide
  Antisense strand to SEQ ID NO: 175152
uaucaccaggcuggagggc

SEQ ID NO: 175154 - RNA, 19 nt, Artificial Sequence
  Description of Artificial Sequence: Synthetic oligonucleotide
  Sense strand starting at position 3503 of SEQ ID NO: 2258
aguuguuugagagauaagu

SEQ ID NO: 175155 - RNA, 19 nt, Artificial Sequence
  Description of Artificial Sequence: Synthetic oligonucleotide
  Antisense strand to SEQ ID NO: 175154
acuuaucucucaaacaacu

SEQ ID NO: 175156 - RNA, 19 nt, Artificial Sequence
  Description of Artificial Sequence: Synthetic oligonucleotide
  Sense strand starting at position 3498 of SEQ ID NO: 2258
auguaaguuguuugagaga

SEQ ID NO: 175157 - RNA, 19 nt, Artificial Sequence
  Description of Artificial Sequence: Synthetic oligonucleotide
  Antisense strand to SEQ ID NO: 175156
ucucucaaacaacuuacau

SEQ ID NO: 175158 - RNA, 19 nt, Artificial Sequence
  Description of Artificial Sequence: Synthetic oligonucleotide
  Sense strand starting at position 3497 of SEQ ID NO: 2258
aauguaaguuguuugagag

SEQ ID NO: 175159 - RNA, 19 nt, Artificial Sequence
  Description of Artificial Sequence: Synthetic oligonucleotide
  Antisense strand to SEQ ID NO: 175158
cucucaaacaacuuacauu

SEQ ID NO: 175160 - RNA, 19 nt, Artificial Sequence
  Description of Artificial Sequence: Synthetic oligonucleotide
  Sense strand starting at position 3496 of SEQ ID NO: 2258
gaauguaaguuguuugaga

SEQ ID NO: 175161 - RNA, 19 nt, Artificial Sequence
  Description of Artificial Sequence: Synthetic oligonucleotide
  Antisense strand to SEQ ID NO: 175160
ucucaaacaacuuacauuc

SEQ ID NO: 175162 - RNA, 19 nt, Artificial Sequence
  Description of Artificial Sequence: Synthetic oligonucleotide
  Sense strand starting at position 3487 of SEQ ID NO: 2258
uuaugucuggaauguaagu

SEQ ID NO: 175163 - RNA, 19 nt, Artificial Sequence
  Description of Artificial Sequence: Synthetic oligonucleotide
  Antisense strand to SEQ ID NO: 175162
acuuacauuccagacauaa

SEQ ID NO: 175164 - RNA, 19 nt, Artificial Sequence
  Description of Artificial Sequence: Synthetic oligonucleotide
  Sense strand starting at position 3383 of SEQ ID NO: 2258
acuacuuaauagccagaga

SEQ ID NO: 175165 - RNA, 19 nt, Artificial Sequence
  Description of Artificial Sequence: Synthetic oligonucleotide
  Antisense strand to SEQ ID NO: 175164
ucucuggcuauuaaguagu

SEQ ID NO: 175166 - RNA, 19 nt, Artificial Sequence
  Description of Artificial Sequence: Synthetic oligonucleotide
  Sense strand starting at position 3357 of SEQ ID NO: 2258
gagguagacuuggaaagau

SEQ ID NO: 175167 - RNA, 19 nt, Artificial Sequence
  Description of Artificial Sequence: Synthetic oligonucleotide
  Antisense strand to SEQ ID NO: 175166
aucuuuccaagucuaccuc

SEQ ID NO: 175168 - RNA, 19 nt, Artificial Sequence
  Description of Artificial Sequence: Synthetic oligonucleotide
  Sense strand starting at position 3341 of SEQ ID NO: 2258
uuaugauagggcugaagag

SEQ ID NO: 175169 - RNA, 19 nt, Artificial Sequence
  Description of Artificial Sequence: Synthetic oligonucleotide
  Antisense strand to SEQ ID NO: 175168
cucuucagcccuaucauaa

SEQ ID NO: 175170 - RNA, 19 nt, Artificial Sequence
  Description of Artificial Sequence: Synthetic oligonucleotide
  Sense strand starting at position 3337 of SEQ ID NO: 2258
uuaauuaugauagggcuga

SEQ ID NO: 175171 - RNA, 19 nt, Artificial Sequence
  Description of Artificial Sequence: Synthetic oligonucleotide
  Antisense strand to SEQ ID NO: 175170
ucagcccuaucauaauuaa

SEQ ID NO: 175172 - RNA, 19 nt, Artificial Sequence
  Description of Artificial Sequence: Synthetic oligonucleotide
  Sense strand starting at position 3289 of SEQ ID NO: 2258
ugccauuaacuuuaaugga

SEQ ID NO: 175173 - RNA, 19 nt, Artificial Sequence
  Description of Artificial Sequence: Synthetic oligonucleotide
  Antisense strand to SEQ ID NO: 175172
uccauuaaaguuaauggca

SEQ ID NO: 175174 - RNA, 19 nt, Artificial Sequence
  Description of Artificial Sequence: Synthetic oligonucleotide
  Sense strand starting at position 3233 of SEQ ID NO: 2258
gaaucuggcgagggaaaua

SEQ ID NO: 175175 - RNA, 19 nt, Artificial Sequence
  Description of Artificial Sequence: Synthetic oligonucleotide
  Antisense strand to SEQ ID NO: 175174
uauuucccucgccagauuc

SEQ ID NO: 175176 - RNA, 19 nt, Artificial Sequence
  Description of Artificial Sequence: Synthetic oligonucleotide
  Sense strand starting at position 3232 of SEQ ID NO: 2258
ggaaucuggcgagggaaau

SEQ ID NO: 175177 - RNA, 19 nt, Artificial Sequence
  Description of Artificial Sequence: Synthetic oligonucleotide
  Antisense strand to SEQ ID NO: 175176
auuucccucgccagauucc

SEQ ID NO: 175178 - RNA, 19 nt, Artificial Sequence
  Description of Artificial Sequence: Synthetic oligonucleotide
  Sense strand starting at position 3185 of SEQ ID NO: 2258
acaguuguugaaugagaca

SEQ ID NO: 175179 - RNA, 19 nt, Artificial Sequence
  Description of Artificial Sequence: Synthetic oligonucleotide
  Antisense strand to SEQ ID NO: 175178
ugucucauucaacaacugu

SEQ ID NO: 175180 - RNA, 19 nt, Artificial Sequence
  Description of Artificial Sequence: Synthetic oligonucleotide
  Sense strand starting at position 2342 of SEQ ID NO: 2258
auauuauuccagugauugc

SEQ ID NO: 175181 - RNA, 19 nt, Artificial Sequence
  Description of Artificial Sequence: Synthetic oligonucleotide
  Antisense strand to SEQ ID NO: 175180
gcaaucacuggaauaauau

SEQ ID NO: 175182 - RNA, 19 nt, Artificial Sequence
  Description of Artificial Sequence: Synthetic oligonucleotide
  Sense strand starting at position 2279 of SEQ ID NO: 2258
guaggaggucagugggaaa

SEQ ID NO: 175183 - RNA, 19 nt, Artificial Sequence
  Description of Artificial Sequence: Synthetic oligonucleotide
  Antisense strand to SEQ ID NO: 175182
uuucccacugaccuccuac

SEQ ID NO: 175184 - RNA, 19 nt, Artificial Sequence
  Description of Artificial Sequence: Synthetic oligonucleotide
  Sense strand starting at position 2218 of SEQ ID NO: 2258
ugaagauccuguccuuaca

SEQ ID NO: 175185 - RNA, 19 nt, Artificial Sequence
  Description of Artificial Sequence: Synthetic oligonucleotide
  Antisense strand to SEQ ID NO: 175184
uguaaggacaggaucuuca

SEQ ID NO: 175186 - RNA, 19 nt, Artificial Sequence
  Description of Artificial Sequence: Synthetic oligonucleotide
  Sense strand starting at position 2207 of SEQ ID NO: 2258
ugcccaguuccugaagauc

SEQ ID NO: 175187 - RNA, 19 nt, Artificial Sequence
  Description of Artificial Sequence: Synthetic oligonucleotide
  Antisense strand to SEQ ID NO: 175186
gaucuucaggaacugggca

SEQ ID NO: 175188 - RNA, 19 nt, Artificial Sequence
  Description of Artificial Sequence: Synthetic oligonucleotide
  Sense strand starting at position 2119 of SEQ ID NO: 2258
ggaauucuguuggaaauag

SEQ ID NO: 175189 - RNA, 19 nt, Artificial Sequence
  Description of Artificial Sequence: Synthetic oligonucleotide
  Antisense strand to SEQ ID NO: 175188
cuauuuccaacagaauucc

SEQ ID NO: 175190 - RNA, 19 nt, Artificial Sequence
  Description of Artificial Sequence: Synthetic oligonucleotide
  Sense strand starting at position 1847 of SEQ ID NO: 2258
agagauuccucugccacca

SEQ ID NO: 175191 - RNA, 19 nt, Artificial Sequence
  Description of Artificial Sequence: Synthetic oligonucleotide
  Antisense strand to SEQ ID NO: 175190
ugguggcagaggaaucucu

SEQ ID NO: 175192 - RNA, 19 nt, Artificial Sequence
  Description of Artificial Sequence: Synthetic oligonucleotide
  Sense strand starting at position 1844 of SEQ ID NO: 2258
gcuagagauuccucugcca

SEQ ID NO: 175193 - RNA, 19 nt, Artificial Sequence
  Description of Artificial Sequence: Synthetic oligonucleotide
  Antisense strand to SEQ ID NO: 175192
uggcagaggaaucucuagc

SEQ ID NO: 175194 - RNA, 19 nt, Artificial Sequence
  Description of Artificial Sequence: Synthetic oligonucleotide
  Sense strand starting at position 1791 of SEQ ID NO: 2258
ccaagaauuguacaagcga

SEQ ID NO: 175195 - RNA, 19 nt, Artificial Sequence
  Description of Artificial Sequence: Synthetic oligonucleotide
  Antisense strand to SEQ ID NO: 175194
ucgcuuguacaauucuugg

SEQ ID NO: 175196 - RNA, 19 nt, Artificial Sequence
  Description of Artificial Sequence: Synthetic oligonucleotide
  Sense strand starting at position 1673 of SEQ ID NO: 2258
cauccauauggauguggau

SEQ ID NO: 175197 - RNA, 19 nt, Artificial Sequence
  Description of Artificial Sequence: Synthetic oligonucleotide
  Antisense strand to SEQ ID NO: 175196
auccacauccauauggaug

SEQ ID NO: 175198 - RNA, 19 nt, Artificial Sequence
  Description of Artificial Sequence: Synthetic oligonucleotide
  Sense strand starting at position 1667 of SEQ ID NO: 2258
cgcacacauccauauggau

SEQ ID NO: 175199 - RNA, 19 nt, Artificial Sequence
  Description of Artificial Sequence: Synthetic oligonucleotide
  Antisense strand to SEQ ID NO: 175198
auccauauggaugugugcg

SEQ ID NO: 175200 - RNA, 19 nt, Artificial Sequence
  Description of Artificial Sequence: Synthetic oligonucleotide
  Sense strand starting at position 1575 of SEQ ID NO: 2258
cuggguccucccuaugauc

SEQ ID NO: 175201 - RNA, 19 nt, Artificial Sequence
  Description of Artificial Sequence: Synthetic oligonucleotide
  Antisense strand to SEQ ID NO: 175200
gaucauagggaggacccag

SEQ ID NO: 175202 - RNA, 19 nt, Artificial Sequence
  Description of Artificial Sequence: Synthetic oligonucleotide
  Sense strand starting at position 1440 of SEQ ID NO: 2258
gagauugcuccaugugagc

SEQ ID NO: 175203 - RNA, 19 nt, Artificial Sequence
  Description of Artificial Sequence: Synthetic oligonucleotide
  Antisense strand to SEQ ID NO: 175202
gcucacauggagcaaucuc

SEQ ID NO: 175204 - RNA, 19 nt, Artificial Sequence
  Description of Artificial Sequence: Synthetic oligonucleotide
  Sense strand starting at position 1438 of SEQ ID NO: 2258
aggagauugcuccauguga

SEQ ID NO: 175205 - RNA, 19 nt, Artificial Sequence
  Description of Artificial Sequence: Synthetic oligonucleotide
  Antisense strand to SEQ ID NO: 175204
ucacauggagcaaucuccu

SEQ ID NO: 175206 - RNA, 19 nt, Artificial Sequence
  Description of Artificial Sequence: Synthetic oligonucleotide
  Sense strand starting at position 1356 of SEQ ID NO: 2258
gaauccuuccaguggaaac

SEQ ID NO: 175207 - RNA, 19 nt, Artificial Sequence
  Description of Artificial Sequence: Synthetic oligonucleotide
  Antisense strand to SEQ ID NO: 175206
guuuccacuggaaggauuc

SEQ ID NO: 175208 - RNA, 19 nt, Artificial Sequence
  Description of Artificial Sequence: Synthetic oligonucleotide
  Sense strand starting at position 959 of SEQ ID NO: 2258
ggccaaagucacuaguaaa

SEQ ID NO: 175209 - RNA, 19 nt, Artificial Sequence
  Description of Artificial Sequence: Synthetic oligonucleotide
  Antisense strand to SEQ ID NO: 175208
uuuacuagugacuuuggcc

SEQ ID NO: 175210 - RNA, 19 nt, Artificial Sequence
  Description of Artificial Sequence: Synthetic oligonucleotide
  Sense strand starting at position 958 of SEQ ID NO: 2258
uggccaaagucacuaguaa

SEQ ID NO: 175211 - RNA, 19 nt, Artificial Sequence
  Description of Artificial Sequence: Synthetic oligonucleotide
  Antisense strand to SEQ ID NO: 175210
uuacuagugacuuuggcca

SEQ ID NO: 175212 - RNA, 19 nt, Artificial Sequence
  Description of Artificial Sequence: Synthetic oligonucleotide
  Sense strand starting at position 881 of SEQ ID NO: 2258
cccaauccuguguaagguu

SEQ ID NO: 175213 - RNA, 19 nt, Artificial Sequence
  Description of Artificial Sequence: Synthetic oligonucleotide
  Antisense strand to SEQ ID NO: 175212
aaccuuacacaggauuggg

SEQ ID NO: 175214 - RNA, 19 nt, Artificial Sequence
  Description of Artificial Sequence: Synthetic oligonucleotide
  Sense strand starting at position 880 of SEQ ID NO: 2258
ucccaauccuguguaaggu

SEQ ID NO: 175215 - RNA, 19 nt, Artificial Sequence
  Description of Artificial Sequence: Synthetic oligonucleotide
  Antisense strand to SEQ ID NO: 175214
accuuacacaggauuggga

SEQ ID NO: 175216 - RNA, 19 nt, Artificial Sequence
  Description of Artificial Sequence: Synthetic oligonucleotide
  Sense strand starting at position 853 of SEQ ID NO: 2258
agugcuuuacgucagucau

SEQ ID NO: 175217 - RNA, 19 nt, Artificial Sequence
  Description of Artificial Sequence: Synthetic oligonucleotide
  Antisense strand to SEQ ID NO: 175216
augacugacguaaagcacu

SEQ ID NO: 175218 - RNA, 19 nt, Artificial Sequence
  Description of Artificial Sequence: Synthetic oligonucleotide
  Sense strand starting at position 799 of SEQ ID NO: 2258
caggaauccuaauaggagu

SEQ ID NO: 175219 - RNA, 19 nt, Artificial Sequence
  Description of Artificial Sequence: Synthetic oligonucleotide
  Antisense strand to SEQ ID NO: 175218
acuccuauuaggauuccug

SEQ ID NO: 175220 - RNA, 19 nt, Artificial Sequence
  Description of Artificial Sequence: Synthetic oligonucleotide
  Sense strand starting at position 640 of SEQ ID NO: 2258
cuguguggcauagauauua

SEQ ID NO: 175221 - RNA, 19 nt, Artificial Sequence
  Description of Artificial Sequence: Synthetic oligonucleotide
  Antisense strand to SEQ ID NO: 175220
uaauaucuaugccacacag

SEQ ID NO: 175222 - RNA, 19 nt, Artificial Sequence
  Description of Artificial Sequence: Synthetic oligonucleotide
  Sense strand starting at position 638 of SEQ ID NO: 2258
gucuguguggcauagauau

SEQ ID NO: 175223 - RNA, 19 nt, Artificial Sequence
  Description of Artificial Sequence: Synthetic oligonucleotide
  Antisense strand to SEQ ID NO: 175222
auaucuaugccacacagac

SEQ ID NO: 175224 - RNA, 19 nt, Artificial Sequence
  Description of Artificial Sequence: Synthetic oligonucleotide
  Sense strand starting at position 623 of SEQ ID NO: 2258
gacucugugccauaugucu

SEQ ID NO: 175225 - RNA, 19 nt, Artificial Sequence
  Description of Artificial Sequence: Synthetic oligonucleotide
  Antisense strand to SEQ ID NO: 175224
agacauauggcacagaguc

SEQ ID NO: 175226 - RNA, 19 nt, Artificial Sequence
  Description of Artificial Sequence: Synthetic oligonucleotide
  Sense strand starting at position 122 of SEQ ID NO: 2258
cccuuagugcuguagcaaa

SEQ ID NO: 175227 - RNA, 19 nt, Artificial Sequence
  Description of Artificial Sequence: Synthetic oligonucleotide
  Antisense strand to SEQ ID NO: 175226
uuugcuacagcacuaaggg

SEQ ID NO: 175228 - RNA, 19 nt, Artificial Sequence
  Description of Artificial Sequence: Synthetic oligonucleotide
  Sense strand starting at position 45 of SEQ ID NO: 2258
ucaucaucuuuguuuguca

SEQ ID NO: 175229 - RNA, 19 nt, Artificial Sequence
  Description of Artificial Sequence: Synthetic oligonucleotide
  Antisense strand to SEQ ID NO: 175228
ugacaaacaaagaugauga

SEQ ID NO: 175230 - RNA, 19 nt, Artificial Sequence
  Description of Artificial Sequence: Synthetic oligonucleotide
  Sense strand starting at position 33 of SEQ ID NO: 2258
guuuccaugucaucaucau

SEQ ID NO: 175231 - RNA, 19 nt, Artificial Sequence
  Description of Artificial Sequence: Synthetic oligonucleotide
  Antisense strand to SEQ ID NO: 175230
augaugaugacauggaaac

SEQ ID NO: 175232 - RNA, 19 nt, Artificial Sequence
  Description of Artificial Sequence: Synthetic oligonucleotide
  Sense strand starting at position 3930 of SEQ ID NO: 2258
gcccuccagccuggugaua

SEQ ID NO: 175233 - RNA, 19 nt, Artificial Sequence
  Description of Artificial Sequence: Synthetic oligonucleotide
  Antisense strand to SEQ ID NO: 175232
uaucaccaggcuggagggc

SEQ ID NO: 175234 - RNA, 19 nt, Artificial Sequence
  Description of Artificial Sequence: Synthetic oligonucleotide
  Sense strand starting at position 3503 of SEQ ID NO: 2258
aguuguuugagagauaagu

SEQ ID NO: 175235 - RNA, 19 nt, Artificial Sequence
  Description of Artificial Sequence: Synthetic oligonucleotide
  Antisense strand to SEQ ID NO: 175234
acuuaucucucaaacaacu

SEQ ID NO: 175236 - RNA, 19 nt, Artificial Sequence
  Description of Artificial Sequence: Synthetic oligonucleotide
  Sense strand starting at position 3498 of SEQ ID NO: 2258
auguaaguuguuugagaga

SEQ ID NO: 175237 - RNA, 19 nt, Artificial Sequence
  Description of Artificial Sequence: Synthetic oligonucleotide
  Antisense strand to SEQ ID NO: 175236
ucucucaaacaacuuacau

SEQ ID NO: 175238 - RNA, 19 nt, Artificial Sequence
  Description of Artificial Sequence: Synthetic oligonucleotide
  Sense strand starting at position 3497 of SEQ ID NO: 2258
aauguaaguuguuugagag

SEQ ID NO: 175239 - RNA, 19 nt, Artificial Sequence
  Description of Artificial Sequence: Synthetic oligonucleotide
  Antisense strand to SEQ ID NO: 175238
cucucaaacaacuuacauu

SEQ ID NO: 175240 - RNA, 19 nt, Artificial Sequence
  Description of Artificial Sequence: Synthetic oligonucleotide
  Sense strand starting at position 3496 of SEQ ID NO: 2258
gaauguaaguuguuugaga

SEQ ID NO: 175241 - RNA, 19 nt, Artificial Sequence
  Description of Artificial Sequence: Synthetic oligonucleotide
  Antisense strand to SEQ ID NO: 175240
ucucaaacaacuuacauuc

SEQ ID NO: 175242 - RNA, 19 nt, Artificial Sequence
  Description of Artificial Sequence: Synthetic oligonucleotide
  Sense strand starting at position 3487 of SEQ ID NO: 2258
uuaugucuggaauguaagu

SEQ ID NO: 175243 - RNA, 19 nt, Artificial Sequence
  Description of Artificial Sequence: Synthetic oligonucleotide
  Antisense strand to SEQ ID NO: 175242
acuuacauuccagacauaa

SEQ ID NO: 175244 - RNA, 19 nt, Artificial Sequence
  Description of Artificial Sequence: Synthetic oligonucleotide
  Sense strand starting at position 3383 of SEQ ID NO: 2258
acuacuuaauagccagaga

SEQ ID NO: 175245 - RNA, 19 nt, Artificial Sequence
  Description of Artificial Sequence: Synthetic oligonucleotide
  Antisense strand to SEQ ID NO: 175244
ucucuggcuauuaaguagu

SEQ ID NO: 175246 - RNA, 19 nt, Artificial Sequence
  Description of Artificial Sequence: Synthetic oligonucleotide
  Sense strand starting at position 3357 of SEQ ID NO: 2258
gagguagacuuggaaagau

SEQ ID NO: 175247 - RNA, 19 nt, Artificial Sequence
  Description of Artificial Sequence: Synthetic oligonucleotide
  Antisense strand to SEQ ID NO: 175246
aucuuuccaagucuaccuc

SEQ ID NO: 175248 - RNA, 19 nt, Artificial Sequence
  Description of Artificial Sequence: Synthetic oligonucleotide
  Sense strand starting at position 3341 of SEQ ID NO: 2258
uuaugauagggcugaagag

SEQ ID NO: 175249 - RNA, 19 nt, Artificial Sequence
  Description of Artificial Sequence: Synthetic oligonucleotide
  Antisense strand to SEQ ID NO: 175248
cucuucagcccuaucauaa

SEQ ID NO: 175250 - RNA, 19 nt, Artificial Sequence
  Description of Artificial Sequence: Synthetic oligonucleotide
  Sense strand starting at position 3337 of SEQ ID NO: 2258
uuaauuaugauagggcuga

SEQ ID NO: 175251 - RNA, 19 nt, Artificial Sequence
  Description of Artificial Sequence: Synthetic oligonucleotide
  Antisense strand to SEQ ID NO: 175250
ucagcccuaucauaauuaa

SEQ ID NO: 175252 - RNA, 19 nt, Artificial Sequence
  Description of Artificial Sequence: Synthetic oligonucleotide
  Sense strand starting at position 3289 of SEQ ID NO: 2258
ugccauuaacuuuaaugga

SEQ ID NO: 175253 - RNA, 19 nt, Artificial Sequence
  Description of Artificial Sequence: Synthetic oligonucleotide
  Antisense strand to SEQ ID NO: 175252
uccauuaaaguuaauggca

SEQ ID NO: 175254 - RNA, 19 nt, Artificial Sequence
  Description of Artificial Sequence: Synthetic oligonucleotide
  Sense strand starting at position 3233 of SEQ ID NO: 2258
gaaucuggcgagggaaaua

SEQ ID NO: 175255 - RNA, 19 nt, Artificial Sequence
  Description of Artificial Sequence: Synthetic oligonucleotide
  Antisense strand to SEQ ID NO: 175254
uauuucccucgccagauuc

SEQ ID NO: 175256 - RNA, 19 nt, Artificial Sequence
  Description of Artificial Sequence: Synthetic oligonucleotide
  Sense strand starting at position 3232 of SEQ ID NO: 2258
ggaaucuggcgagggaaau

SEQ ID NO: 175257 - RNA, 19 nt, Artificial Sequence
  Description of Artificial Sequence: Synthetic oligonucleotide
  Antisense strand to SEQ ID NO: 175256
auuucccucgccagauucc

SEQ ID NO: 175258 - RNA, 19 nt, Artificial Sequence
  Description of Artificial Sequence: Synthetic oligonucleotide
  Sense strand starting at position 3185 of SEQ ID NO: 2258
acaguuguugaaugagaca

SEQ ID NO: 175259 - RNA, 19 nt, Artificial Sequence
  Description of Artificial Sequence: Synthetic oligonucleotide
  Antisense strand to SEQ ID NO: 175258
ugucucauucaacaacugu

SEQ ID NO: 175260 - RNA, 19 nt, Artificial Sequence
  Description of Artificial Sequence: Synthetic oligonucleotide
  Sense strand starting at position 2342 of SEQ ID NO: 2258
auauuauuccagugauugc

SEQ ID NO: 175261 - RNA, 19 nt, Artificial Sequence
  Description of Artificial Sequence: Synthetic oligonucleotide
  Antisense strand to SEQ ID NO: 175260
gcaaucacuggaauaauau

SEQ ID NO: 175262 - RNA, 19 nt, Artificial Sequence
  Description of Artificial Sequence: Synthetic oligonucleotide
  Sense strand starting at position 2279 of SEQ ID NO: 2258
guaggaggucagugggaaa

SEQ ID NO: 175263 - RNA, 19 nt, Artificial Sequence
  Description of Artificial Sequence: Synthetic oligonucleotide
  Antisense strand to SEQ ID NO: 175262
uuucccacugaccuccuac

SEQ ID NO: 175264 - RNA, 19 nt, Artificial Sequence
  Description of Artificial Sequence: Synthetic oligonucleotide
  Sense strand starting at position 2218 of SEQ ID NO: 2258
ugaagauccuguccuuaca

SEQ ID NO: 175265 - RNA, 19 nt, Artificial Sequence
  Description of Artificial Sequence: Synthetic oligonucleotide
  Antisense strand to SEQ ID NO: 175264
uguaaggacaggaucuuca

SEQ ID NO: 175266 - RNA, 19 nt, Artificial Sequence
  Description of Artificial Sequence: Synthetic oligonucleotide
  Sense strand starting at position 2207 of SEQ ID NO: 2258
ugcccaguuccugaagauc

SEQ ID NO: 175267 - RNA, 19 nt, Artificial Sequence
  Description of Artificial Sequence: Synthetic oligonucleotide
  Antisense strand to SEQ ID NO: 175266
gaucuucaggaacugggca

SEQ ID NO: 175268 - RNA, 19 nt, Artificial Sequence
  Description of Artificial Sequence: Synthetic oligonucleotide
  Sense strand starting at position 2119 of SEQ ID NO: 2258
ggaauucuguuggaaauag

SEQ ID NO: 175269 - RNA, 19 nt, Artificial Sequence
  Description of Artificial Sequence: Synthetic oligonucleotide
  Antisense strand to SEQ ID NO: 175268
cuauuuccaacagaauucc

SEQ ID NO: 175270 - RNA, 19 nt, Artificial Sequence
  Description of Artificial Sequence: Synthetic oligonucleotide
  Sense strand starting at position 1847 of SEQ ID NO: 2258
agagauuccucugccacca

SEQ ID NO: 175271 - RNA, 19 nt, Artificial Sequence
  Description of Artificial Sequence: Synthetic oligonucleotide
  Antisense strand to SEQ ID NO: 175270
ugguggcagaggaaucucu

SEQ ID NO: 175272 - RNA, 19 nt, Artificial Sequence
  Description of Artificial Sequence: Synthetic oligonucleotide
  Sense strand starting at position 1844 of SEQ ID NO: 2258
gcuagagauuccucugcca

SEQ ID NO: 175273 - RNA, 19 nt, Artificial Sequence
  Description of Artificial Sequence: Synthetic oligonucleotide
  Antisense strand to SEQ ID NO: 175272
uggcagaggaaucucuagc

SEQ ID NO: 175274 - RNA, 19 nt, Artificial Sequence
  Description of Artificial Sequence: Synthetic oligonucleotide
  Sense strand starting at position 1791 of SEQ ID NO: 2258
ccaagaauuguacaagcga

SEQ ID NO: 175275 - RNA, 19 nt, Artificial Sequence
  Description of Artificial Sequence: Synthetic oligonucleotide
  Antisense strand to SEQ ID NO: 175274
ucgcuuguacaauucuugg

SEQ ID NO: 175276 - RNA, 19 nt, Artificial Sequence
  Description of Artificial Sequence: Synthetic oligonucleotide
  Sense strand starting at position 1673 of SEQ ID NO: 2258
cauccauauggauguggau

SEQ ID NO: 175277 - RNA, 19 nt, Artificial Sequence
  Description of Artificial Sequence: Synthetic oligonucleotide
  Antisense strand to SEQ ID NO: 175276
auccacauccauauggaug

SEQ ID NO: 175278 - RNA, 19 nt, Artificial Sequence
  Description of Artificial Sequence: Synthetic oligonucleotide
  Sense strand starting at position 1667 of SEQ ID NO: 2258
cgcacacauccauauggau

SEQ ID NO: 175279 - RNA, 19 nt, Artificial Sequence
  Description of Artificial Sequence: Synthetic oligonucleotide
  Antisense strand to SEQ ID NO: 175278
auccauauggaugugugcg

SEQ ID NO: 175280 - RNA, 19 nt, Artificial Sequence
  Description of Artificial Sequence: Synthetic oligonucleotide
  Sense strand starting at position 1575 of SEQ ID NO: 2258
cuggguccucccuaugauc

SEQ ID NO: 175281 - RNA, 19 nt, Artificial Sequence
  Description of Artificial Sequence: Synthetic oligonucleotide
  Antisense strand to SEQ ID NO: 175280
gaucauagggaggacccag

SEQ ID NO: 175282 - RNA, 19 nt, Artificial Sequence
  Description of Artificial Sequence: Synthetic oligonucleotide
  Sense strand starting at position 1440 of SEQ ID NO: 2258
gagauugcuccaugugagc

SEQ ID NO: 175283 - RNA, 19 nt, Artificial Sequence
  Description of Artificial Sequence: Synthetic oligonucleotide
  Antisense strand to SEQ ID NO: 175282
gcucacauggagcaaucuc

SEQ ID NO: 175284 - RNA, 19 nt, Artificial Sequence
  Description of Artificial Sequence: Synthetic oligonucleotide
  Sense strand starting at position 1438 of SEQ ID NO: 2258
aggagauugcuccauguga

SEQ ID NO: 175285 - RNA, 19 nt, Artificial Sequence
  Description of Artificial Sequence: Synthetic oligonucleotide
  Antisense strand to SEQ ID NO: 175284
ucacauggagcaaucuccu

SEQ ID NO: 175286 - RNA, 19 nt, Artificial Sequence
  Description of Artificial Sequence: Synthetic oligonucleotide
  Sense strand starting at position 1356 of SEQ ID NO: 2258
gaauccuuccaguggaaac

SEQ ID NO: 175287 - RNA, 19 nt, Artificial Sequence
  Description of Artificial Sequence: Synthetic oligonucleotide
  Antisense strand to SEQ ID NO: 175286
guuuccacuggaaggauuc

SEQ ID NO: 175288 - RNA, 19 nt, Artificial Sequence
  Description of Artificial Sequence: Synthetic oligonucleotide
  Sense strand starting at position 959 of SEQ ID NO: 2258
ggccaaagucacuaguaaa

SEQ ID NO: 175289 - RNA, 19 nt, Artificial Sequence
  Description of Artificial Sequence: Synthetic oligonucleotide
  Antisense strand to SEQ ID NO: 175288
uuuacuagugacuuuggcc

SEQ ID NO: 175290 - RNA, 19 nt, Artificial Sequence
  Description of Artificial Sequence: Synthetic oligonucleotide
  Sense strand starting at position 958 of SEQ ID NO: 2258
uggccaaagucacuaguaa

SEQ ID NO: 175291 - RNA, 19 nt, Artificial Sequence
  Description of Artificial Sequence: Synthetic oligonucleotide
  Antisense strand to SEQ ID NO: 175290
uuacuagugacuuuggcca

SEQ ID NO: 175292 - RNA, 19 nt, Artificial Sequence
  Description of Artificial Sequence: Synthetic oligonucleotide
  Sense strand starting at position 881 of SEQ ID NO: 2258
cccaauccuguguaagguu

SEQ ID NO: 175293 - RNA, 19 nt, Artificial Sequence
  Description of Artificial Sequence: Synthetic oligonucleotide
  Antisense strand to SEQ ID NO: 175292
aaccuuacacaggauuggg

SEQ ID NO: 175294 - RNA, 19 nt, Artificial Sequence
  Description of Artificial Sequence: Synthetic oligonucleotide
  Sense strand starting at position 880 of SEQ ID NO: 2258
ucccaauccuguguaaggu

SEQ ID NO: 175295 - RNA, 19 nt, Artificial Sequence
  Description of Artificial Sequence: Synthetic oligonucleotide
  Antisense strand to SEQ ID NO: 175294
accuuacacaggauuggga

SEQ ID NO: 175296 - RNA, 19 nt, Artificial Sequence
  Description of Artificial Sequence: Synthetic oligonucleotide
  Sense strand starting at position 853 of SEQ ID NO: 2258
agugcuuuacgucagucau

SEQ ID NO: 175297 - RNA, 19 nt, Artificial Sequence
  Description of Artificial Sequence: Synthetic oligonucleotide
  Antisense strand to SEQ ID NO: 175296
augacugacguaaagcacu

SEQ ID NO: 175298 - RNA, 19 nt, Artificial Sequence
  Description of Artificial Sequence: Synthetic oligonucleotide
  Sense strand starting at position 799 of SEQ ID NO: 2258
caggaauccuaauaggagu

SEQ ID NO: 175299 - RNA, 19 nt, Artificial Sequence
  Description of Artificial Sequence: Synthetic oligonucleotide
  Antisense strand to SEQ ID NO: 175298
acuccuauuaggauuccug

SEQ ID NO: 175300 - RNA, 19 nt, Artificial Sequence
  Description of Artificial Sequence: Synthetic oligonucleotide
  Sense strand starting at position 640 of SEQ ID NO: 2258
cuguguggcauagauauua

SEQ ID NO: 175301 - RNA, 19 nt, Artificial Sequence
  Description of Artificial Sequence: Synthetic oligonucleotide
  Antisense strand to SEQ ID NO: 175300
uaauaucuaugccacacag

SEQ ID NO: 175302 - RNA, 19 nt, Artificial Sequence
  Description of Artificial Sequence: Synthetic oligonucleotide
  Sense strand starting at position 638 of SEQ ID NO: 2258
gucuguguggcauagauau

SEQ ID NO: 175303 - RNA, 19 nt, Artificial Sequence
  Description of Artificial Sequence: Synthetic oligonucleotide
  Antisense strand to SEQ ID NO: 175302
auaucuaugccacacagac

SEQ ID NO: 175304 - RNA, 19 nt, Artificial Sequence
  Description of Artificial Sequence: Synthetic oligonucleotide
  Sense strand starting at position 623 of SEQ ID NO: 2258
gacucugugccauaugucu

SEQ ID NO: 175305 - RNA, 19 nt, Artificial Sequence
  Description of Artificial Sequence: Synthetic oligonucleotide
  Antisense strand to SEQ ID NO: 175304
agacauauggcacagaguc

SEQ ID NO: 175306 - RNA, 19 nt, Artificial Sequence
  Description of Artificial Sequence: Synthetic oligonucleotide
  Sense strand starting at position 122 of SEQ ID NO: 2258
cccuuagugcuguagcaaa

SEQ ID NO: 175307 - RNA, 19 nt, Artificial Sequence
  Description of Artificial Sequence: Synthetic oligonucleotide
  Antisense strand to SEQ ID NO: 175306
uuugcuacagcacuaaggg

SEQ ID NO: 175308 - RNA, 19 nt, Artificial Sequence
  Description of Artificial Sequence: Synthetic oligonucleotide
  Sense strand starting at position 45 of SEQ ID NO: 2258
ucaucaucuuuguuuguca

SEQ ID NO: 175309 - RNA, 19 nt, Artificial Sequence
  Description of Artificial Sequence: Synthetic oligonucleotide
  Antisense strand to SEQ ID NO: 175308
ugacaaacaaagaugauga

SEQ ID NO: 175310 - RNA, 19 nt, Artificial Sequence
  Description of Artificial Sequence: Synthetic oligonucleotide
  Sense strand starting at position 33 of SEQ ID NO: 2258
guuuccaugucaucaucau

SEQ ID NO: 175311 - RNA, 19 nt, Artificial Sequence
  Description of Artificial Sequence: Synthetic oligonucleotide
  Antisense strand to SEQ ID NO: 175310
augaugaugacauggaaac

SEQ ID NO: 175312 - RNA, 19 nt, Artificial Sequence
  Description of Artificial Sequence: Synthetic oligonucleotide
  Sense strand starting at position 3841 of SEQ ID NO: 2259
uucucugauugcugaguaa

SEQ ID NO: 175313 - RNA, 19 nt, Artificial Sequence
  Description of Artificial Sequence: Synthetic oligonucleotide
  Antisense strand to SEQ ID NO: 175312
uuacucagcaaucagagaa

SEQ ID NO: 175314 - RNA, 19 nt, Artificial Sequence
  Description of Artificial Sequence: Synthetic oligonucleotide
  Sense strand starting at position 3840 of SEQ ID NO: 2259
cuucucugauugcugagua

SEQ ID NO: 175315 - RNA, 19 nt, Artificial Sequence
  Description of Artificial Sequence: Synthetic oligonucleotide
  Antisense strand to SEQ ID NO: 175314
uacucagcaaucagagaag

SEQ ID NO: 175316 - RNA, 19 nt, Artificial Sequence
  Description of Artificial Sequence: Synthetic oligonucleotide
  Sense strand starting at position 3837 of SEQ ID NO: 2259
ggccuucucugauugcuga

SEQ ID NO: 175317 - RNA, 19 nt, Artificial Sequence
  Description of Artificial Sequence: Synthetic oligonucleotide
  Antisense strand to SEQ ID NO: 175316
ucagcaaucagagaaggcc

SEQ ID NO: 175318 - RNA, 19 nt, Artificial Sequence
  Description of Artificial Sequence: Synthetic oligonucleotide
  Sense strand starting at position 3800 of SEQ ID NO: 2259
gugccaggucuuugcugaa

SEQ ID NO: 175319 - RNA, 19 nt, Artificial Sequence
  Description of Artificial Sequence: Synthetic oligonucleotide
  Antisense strand to SEQ ID NO: 175318
uucagcaaagaccuggcac

SEQ ID NO: 175320 - RNA, 19 nt, Artificial Sequence
  Description of Artificial Sequence: Synthetic oligonucleotide
  Sense strand starting at position 3567 of SEQ ID NO: 2259
ccuccagagucgucucauc

SEQ ID NO: 175321 - RNA, 19 nt, Artificial Sequence
  Description of Artificial Sequence: Synthetic oligonucleotide
  Antisense strand to SEQ ID NO: 175320
gaugagacgacucuggagg

SEQ ID NO: 175322 - RNA, 19 nt, Artificial Sequence
  Description of Artificial Sequence: Synthetic oligonucleotide
  Sense strand starting at position 3374 of SEQ ID NO: 2259
ugggucuugcaaggaagaa

SEQ ID NO: 175323 - RNA, 19 nt, Artificial Sequence
  Description of Artificial Sequence: Synthetic oligonucleotide
  Antisense strand to SEQ ID NO: 175322
uucuuccuugcaagaccca

SEQ ID NO: 175324 - RNA, 19 nt, Artificial Sequence
  Description of Artificial Sequence: Synthetic oligonucleotide
  Sense strand starting at position 2660 of SEQ ID NO: 2259
acgugaugcagucaaugga

SEQ ID NO: 175325 - RNA, 19 nt, Artificial Sequence
  Description of Artificial Sequence: Synthetic oligonucleotide
  Antisense strand to SEQ ID NO: 175324
uccauugacugcaucacgu

SEQ ID NO: 175326 - RNA, 19 nt, Artificial Sequence
  Description of Artificial Sequence: Synthetic oligonucleotide
  Sense strand starting at position 2217 of SEQ ID NO: 2259
ggguaaacuucccuuccga

SEQ ID NO: 175327 - RNA, 19 nt, Artificial Sequence
  Description of Artificial Sequence: Synthetic oligonucleotide
  Antisense strand to SEQ ID NO: 175326
ucggaagggaaguuuaccc

SEQ ID NO: 175328 - RNA, 19 nt, Artificial Sequence
  Description of Artificial Sequence: Synthetic oligonucleotide
  Sense strand starting at position 1238 of SEQ ID NO: 2259
cugaucuuaucaccuguca

SEQ ID NO: 175329 - RNA, 19 nt, Artificial Sequence
  Description of Artificial Sequence: Synthetic oligonucleotide
  Antisense strand to SEQ ID NO: 175328
ugacaggugauaagaucag

SEQ ID NO: 175330 - RNA, 19 nt, Artificial Sequence
  Description of Artificial Sequence: Synthetic oligonucleotide
  Sense strand starting at position 715 of SEQ ID NO: 2259
ugaaucucccucugugcaa

SEQ ID NO: 175331 - RNA, 19 nt, Artificial Sequence
  Description of Artificial Sequence: Synthetic oligonucleotide
  Antisense strand to SEQ ID NO: 175330
uugcacagagggagauuca

SEQ ID NO: 175332 - RNA, 19 nt, Artificial Sequence
  Description of Artificial Sequence: Synthetic oligonucleotide
  Sense strand starting at position 207 of SEQ ID NO: 2259
cggaaaguucuggaagcac

SEQ ID NO: 175333 - RNA, 19 nt, Artificial Sequence
  Description of Artificial Sequence: Synthetic oligonucleotide
  Antisense strand to SEQ ID NO: 175332
gugcuuccagaacuuuccg

SEQ ID NO: 175334 - RNA, 19 nt, Artificial Sequence
  Description of Artificial Sequence: Synthetic oligonucleotide
  Sense strand starting at position 206 of SEQ ID NO: 2259
ucggaaaguucuggaagca

SEQ ID NO: 175335 - RNA, 19 nt, Artificial Sequence
  Description of Artificial Sequence: Synthetic oligonucleotide
  Antisense strand to SEQ ID NO: 175334
ugcuuccagaacuuuccga

SEQ ID NO: 175336 - RNA, 19 nt, Artificial Sequence
  Description of Artificial Sequence: Synthetic oligonucleotide
  Sense strand starting at position 38 of SEQ ID NO: 2259
gugggaacuucgcaagucu

SEQ ID NO: 175337 - RNA, 19 nt, Artificial Sequence
  Description of Artificial Sequence: Synthetic oligonucleotide
  Antisense strand to SEQ ID NO: 175336
agacuugcgaaguucccac

SEQ ID NO: 175338 - RNA, 19 nt, Artificial Sequence
  Description of Artificial Sequence: Synthetic oligonucleotide
  Sense strand starting at position 227 of SEQ ID NO: 2260
gaccucuccugucagguaa

SEQ ID NO: 175339 - RNA, 19 nt, Artificial Sequence
  Description of Artificial Sequence: Synthetic oligonucleotide
  Antisense strand to SEQ ID NO: 175338
uuaccugacaggagagguc

SEQ ID NO: 175340 - RNA, 19 nt, Artificial Sequence
  Description of Artificial Sequence: Synthetic oligonucleotide
  Sense strand starting at position 326 of SEQ ID NO: 2260
agggcaggcucuuucagua

SEQ ID NO: 175341 - RNA, 19 nt, Artificial Sequence
  Description of Artificial Sequence: Synthetic oligonucleotide
  Antisense strand to SEQ ID NO: 175340
uacugaaagagccugcccu

SEQ ID NO: 175342 - RNA, 19 nt, Artificial Sequence
  Description of Artificial Sequence: Synthetic oligonucleotide
  Sense strand starting at position 339 of SEQ ID NO: 2260
ucaguauguggugaggaca

SEQ ID NO: 175343 - RNA, 19 nt, Artificial Sequence
  Description of Artificial Sequence: Synthetic oligonucleotide
  Antisense strand to SEQ ID NO: 175342
uguccucaccacauacuga

SEQ ID NO: 175344 - RNA, 19 nt, Artificial Sequence
  Description of Artificial Sequence: Synthetic oligonucleotide
  Sense strand starting at position 436 of SEQ ID NO: 2260
ccucgugcuggauggagaa

SEQ ID NO: 175345 - RNA, 19 nt, Artificial Sequence
  Description of Artificial Sequence: Synthetic oligonucleotide
  Antisense strand to SEQ ID NO: 175344
uucuccauccagcacgagg

SEQ ID NO: 175346 - RNA, 19 nt, Artificial Sequence
  Description of Artificial Sequence: Synthetic oligonucleotide
  Sense strand starting at position 653 of SEQ ID NO: 2260
ggacuuacccugggacugu

SEQ ID NO: 175347 - RNA, 19 nt, Artificial Sequence
  Description of Artificial Sequence: Synthetic oligonucleotide
  Antisense strand to SEQ ID NO: 175346
acagucccaggguaagucc

SEQ ID NO: 175348 - RNA, 19 nt, Artificial Sequence
  Description of Artificial Sequence: Synthetic oligonucleotide
  Sense strand starting at position 720 of SEQ ID NO: 2260
gggucuccgcaguggaauu

SEQ ID NO: 175349 - RNA, 19 nt, Artificial Sequence
  Description of Artificial Sequence: Synthetic oligonucleotide
  Antisense strand to SEQ ID NO: 175348
aauuccacugcggagaccc

SEQ ID NO: 175350 - RNA, 19 nt, Artificial Sequence
  Description of Artificial Sequence: Synthetic oligonucleotide
  Sense strand starting at position 1019 of SEQ ID NO: 2260
gugcuaacuccauaugcaa

SEQ ID NO: 175351 - RNA, 19 nt, Artificial Sequence
  Description of Artificial Sequence: Synthetic oligonucleotide
  Antisense strand to SEQ ID NO: 175350
uugcauauggaguuagcac

SEQ ID NO: 175352 - RNA, 19 nt, Artificial Sequence
  Description of Artificial Sequence: Synthetic oligonucleotide
  Sense strand starting at position 1641 of SEQ ID NO: 2260
ggccgguccgcguuaagua

SEQ ID NO: 175353 - RNA, 19 nt, Artificial Sequence
  Description of Artificial Sequence: Synthetic oligonucleotide
  Antisense strand to SEQ ID NO: 175352
uacuuaacgcggaccggcc

SEQ ID NO: 175354 - RNA, 19 nt, Artificial Sequence
  Description of Artificial Sequence: Synthetic oligonucleotide
  Sense strand starting at position 1642 of SEQ ID NO: 2260
gccgguccgcguuaaguaa

SEQ ID NO: 175355 - RNA, 19 nt, Artificial Sequence
  Description of Artificial Sequence: Synthetic oligonucleotide
  Antisense strand to SEQ ID NO: 175354
uuacuuaacgcggaccggc

SEQ ID NO: 175356 - RNA, 19 nt, Artificial Sequence
  Description of Artificial Sequence: Synthetic oligonucleotide
  Sense strand starting at position 1643 of SEQ ID NO: 2260
ccgguccgcguuaaguaaa

SEQ ID NO: 175357 - RNA, 19 nt, Artificial Sequence
  Description of Artificial Sequence: Synthetic oligonucleotide
  Antisense strand to SEQ ID NO: 175356
uuuacuuaacgcggaccgg

SEQ ID NO: 175358 - RNA, 19 nt, Artificial Sequence
  Description of Artificial Sequence: Synthetic oligonucleotide
  Sense strand starting at position 1665 of SEQ ID NO: 2260
gguuuacuuacccggguaa

SEQ ID NO: 175359 - RNA, 19 nt, Artificial Sequence
  Description of Artificial Sequence: Synthetic oligonucleotide
  Antisense strand to SEQ ID NO: 175358
uuacccggguaaguaaacc

SEQ ID NO: 175360 - RNA, 19 nt, Artificial Sequence
  Description of Artificial Sequence: Synthetic oligonucleotide
  Sense strand starting at position 1666 of SEQ ID NO: 2260
guuuacuuacccggguaau

SEQ ID NO: 175361 - RNA, 19 nt, Artificial Sequence
  Description of Artificial Sequence: Synthetic oligonucleotide
  Antisense strand to SEQ ID NO: 175360
auuacccggguaaguaaac

SEQ ID NO: 175362 - RNA, 19 nt, Artificial Sequence
  Description of Artificial Sequence: Synthetic oligonucleotide
  Sense strand starting at position 1667 of SEQ ID NO: 2260
uuuacuuacccggguaauc

SEQ ID NO: 175363 - RNA, 19 nt, Artificial Sequence
  Description of Artificial Sequence: Synthetic oligonucleotide
  Antisense strand to SEQ ID NO: 175362
gauuacccggguaaguaaa

SEQ ID NO: 175364 - RNA, 19 nt, Artificial Sequence
  Description of Artificial Sequence: Synthetic oligonucleotide
  Sense strand starting at position 1856 of SEQ ID NO: 2260
gugccaugcucggguuuca

SEQ ID NO: 175365 - RNA, 19 nt, Artificial Sequence
  Description of Artificial Sequence: Synthetic oligonucleotide
  Antisense strand to SEQ ID NO: 175364
ugaaacccgagcauggcac

SEQ ID NO: 175366 - RNA, 19 nt, Artificial Sequence
  Description of Artificial Sequence: Synthetic oligonucleotide
  Sense strand starting at position 2222 of SEQ ID NO: 2260
ccgagaggucuccacaaau

SEQ ID NO: 175367 - RNA, 19 nt, Artificial Sequence
  Description of Artificial Sequence: Synthetic oligonucleotide
  Antisense strand to SEQ ID NO: 175366
auuuguggagaccucucgg

SEQ ID NO: 175368 - RNA, 19 nt, Artificial Sequence
  Description of Artificial Sequence: Synthetic oligonucleotide
  Sense strand starting at position 2251 of SEQ ID NO: 2260
cccagagagccucaaccau

SEQ ID NO: 175369 - RNA, 19 nt, Artificial Sequence
  Description of Artificial Sequence: Synthetic oligonucleotide
  Antisense strand to SEQ ID NO: 175368
augguugaggcucucuggg

SEQ ID NO: 175370 - RNA, 19 nt, Artificial Sequence
  Description of Artificial Sequence: Synthetic oligonucleotide
  Sense strand starting at position 2339 of SEQ ID NO: 2260
uggcuucaggugugaaacu

SEQ ID NO: 175371 - RNA, 19 nt, Artificial Sequence
  Description of Artificial Sequence: Synthetic oligonucleotide
  Antisense strand to SEQ ID NO: 175370
aguuucacaccugaagcca

SEQ ID NO: 175372 - RNA, 19 nt, Artificial Sequence
  Description of Artificial Sequence: Synthetic oligonucleotide
  Sense strand starting at position 2629 of SEQ ID NO: 2260
gggagacuguccuaugucu

SEQ ID NO: 175373 - RNA, 19 nt, Artificial Sequence
  Description of Artificial Sequence: Synthetic oligonucleotide
  Antisense strand to SEQ ID NO: 175372
agacauaggacagucuccc

SEQ ID NO: 175374 - RNA, 19 nt, Artificial Sequence
  Description of Artificial Sequence: Synthetic oligonucleotide
  Sense strand starting at position 2875 of SEQ ID NO: 2260
caagguaaaugacaggaau

SEQ ID NO: 175375 - RNA, 19 nt, Artificial Sequence
  Description of Artificial Sequence: Synthetic oligonucleotide
  Antisense strand to SEQ ID NO: 175374
auuccugucauuuaccuug

SEQ ID NO: 175376 - RNA, 19 nt, Artificial Sequence
  Description of Artificial Sequence: Synthetic oligonucleotide
  Sense strand starting at position 2889 of SEQ ID NO: 2260
ggaauuagcuguuugugac

SEQ ID NO: 175377 - RNA, 19 nt, Artificial Sequence
  Description of Artificial Sequence: Synthetic oligonucleotide
  Antisense strand to SEQ ID NO: 175376
gucacaaacagcuaauucc

SEQ ID NO: 175378 - RNA, 19 nt, Artificial Sequence
  Description of Artificial Sequence: Synthetic oligonucleotide
  Sense strand starting at position 2890 of SEQ ID NO: 2260
gaauuagcuguuugugaca

SEQ ID NO: 175379 - RNA, 19 nt, Artificial Sequence
  Description of Artificial Sequence: Synthetic oligonucleotide
  Antisense strand to SEQ ID NO: 175378
ugucacaaacagcuaauuc

SEQ ID NO: 175380 - RNA, 19 nt, Artificial Sequence
  Description of Artificial Sequence: Synthetic oligonucleotide
  Sense strand starting at position 3052 of SEQ ID NO: 2260
cuuugagaggccuggagau

SEQ ID NO: 175381 - RNA, 19 nt, Artificial Sequence
  Description of Artificial Sequence: Synthetic oligonucleotide
  Antisense strand to SEQ ID NO: 175380
aucuccaggccucucaaag

SEQ ID NO: 175382 - RNA, 19 nt, Artificial Sequence
  Description of Artificial Sequence: Synthetic oligonucleotide
  Sense strand starting at position 3432 of SEQ ID NO: 2260
cacggugugagucauccau

SEQ ID NO: 175383 - RNA, 19 nt, Artificial Sequence
  Description of Artificial Sequence: Synthetic oligonucleotide
  Antisense strand to SEQ ID NO: 175382
auggaugacucacaccgug

SEQ ID NO: 175384 - RNA, 19 nt, Artificial Sequence
  Description of Artificial Sequence: Synthetic oligonucleotide
  Sense strand starting at position 3434 of SEQ ID NO: 2260
cggugugagucauccaucu

SEQ ID NO: 175385 - RNA, 19 nt, Artificial Sequence
  Description of Artificial Sequence: Synthetic oligonucleotide
  Antisense strand to SEQ ID NO: 175384
agauggaugacucacaccg

SEQ ID NO: 175386 - RNA, 19 nt, Artificial Sequence
  Description of Artificial Sequence: Synthetic oligonucleotide
  Sense strand starting at position 3436 of SEQ ID NO: 2260
gugugagucauccaucuag

SEQ ID NO: 175387 - RNA, 19 nt, Artificial Sequence
  Description of Artificial Sequence: Synthetic oligonucleotide
  Antisense strand to SEQ ID NO: 175386
cuagauggaugacucacac

SEQ ID NO: 175388 - RNA, 19 nt, Artificial Sequence
  Description of Artificial Sequence: Synthetic oligonucleotide
  Sense strand starting at position 3699 of SEQ ID NO: 2260
ggaggugacuuguucaucu

SEQ ID NO: 175389 - RNA, 19 nt, Artificial Sequence
  Description of Artificial Sequence: Synthetic oligonucleotide
  Antisense strand to SEQ ID NO: 175388
agaugaacaagucaccucc

SEQ ID NO: 175390 - RNA, 19 nt, Artificial Sequence
  Description of Artificial Sequence: Synthetic oligonucleotide
  Sense strand starting at position 3895 of SEQ ID NO: 2260
aggaguugccagcagagau

SEQ ID NO: 175391 - RNA, 19 nt, Artificial Sequence
  Description of Artificial Sequence: Synthetic oligonucleotide
  Antisense strand to SEQ ID NO: 175390
aucucugcuggcaacuccu

SEQ ID NO: 175392 - RNA, 19 nt, Artificial Sequence
  Description of Artificial Sequence: Synthetic oligonucleotide
  Sense strand starting at position 3911 of SEQ ID NO: 2261
cgacuucucucugaacucu

SEQ ID NO: 175393 - RNA, 19 nt, Artificial Sequence
  Description of Artificial Sequence: Synthetic oligonucleotide
  Antisense strand to SEQ ID NO: 175392
agaguucagagagaagucg

SEQ ID NO: 175394 - RNA, 19 nt, Artificial Sequence
  Description of Artificial Sequence: Synthetic oligonucleotide
  Sense strand starting at position 3910 of SEQ ID NO: 2261
gcgacuucucucugaacuc

SEQ ID NO: 175395 - RNA, 19 nt, Artificial Sequence
  Description of Artificial Sequence: Synthetic oligonucleotide
  Antisense strand to SEQ ID NO: 175394
gaguucagagagaagucgc

SEQ ID NO: 175396 - RNA, 19 nt, Artificial Sequence
  Description of Artificial Sequence: Synthetic oligonucleotide
  Sense strand starting at position 3909 of SEQ ID NO: 2261
ggcgacuucucucugaacu

SEQ ID NO: 175397 - RNA, 19 nt, Artificial Sequence
  Description of Artificial Sequence: Synthetic oligonucleotide
  Antisense strand to SEQ ID NO: 175396
aguucagagagaagucgcc

SEQ ID NO: 175398 - RNA, 19 nt, Artificial Sequence
  Description of Artificial Sequence: Synthetic oligonucleotide
  Sense strand starting at position 3823 of SEQ ID NO: 2261
gucccauccugggaacgaa

SEQ ID NO: 175399 - RNA, 19 nt, Artificial Sequence
  Description of Artificial Sequence: Synthetic oligonucleotide
  Antisense strand to SEQ ID NO: 175398
uucguucccaggaugggac

SEQ ID NO: 175400 - RNA, 19 nt, Artificial Sequence
  Description of Artificial Sequence: Synthetic oligonucleotide
  Sense strand starting at position 3661 of SEQ ID NO: 2261
ggacaauaguucucucuag

SEQ ID NO: 175401 - RNA, 19 nt, Artificial Sequence
  Description of Artificial Sequence: Synthetic oligonucleotide
  Antisense strand to SEQ ID NO: 175400
cuagagagaacuauugucc

SEQ ID NO: 175402 - RNA, 19 nt, Artificial Sequence
  Description of Artificial Sequence: Synthetic oligonucleotide
  Sense strand starting at position 3597 of SEQ ID NO: 2261
aggacuccuugaucccuaa

SEQ ID NO: 175403 - RNA, 19 nt, Artificial Sequence
  Description of Artificial Sequence: Synthetic oligonucleotide
  Antisense strand to SEQ ID NO: 175402
uuagggaucaaggaguccu

SEQ ID NO: 175404 - RNA, 19 nt, Artificial Sequence
  Description of Artificial Sequence: Synthetic oligonucleotide
  Sense strand starting at position 3559 of SEQ ID NO: 2261
ucuucuggcccuuaugaga

SEQ ID NO: 175405 - RNA, 19 nt, Artificial Sequence
  Description of Artificial Sequence: Synthetic oligonucleotide
  Antisense strand to SEQ ID NO: 175404
ucucauaagggccagaaga

SEQ ID NO: 175406 - RNA, 19 nt, Artificial Sequence
  Description of Artificial Sequence: Synthetic oligonucleotide
  Sense strand starting at position 3555 of SEQ ID NO: 2261
gagcucuucuggcccuuau

SEQ ID NO: 175407 - RNA, 19 nt, Artificial Sequence
  Description of Artificial Sequence: Synthetic oligonucleotide
  Antisense strand to SEQ ID NO: 175406
auaagggccagaagagcuc

SEQ ID NO: 175408 - RNA, 19 nt, Artificial Sequence
  Description of Artificial Sequence: Synthetic oligonucleotide
  Sense strand starting at position 3466 of SEQ ID NO: 2261
ccacauguuucugugacau

SEQ ID NO: 175409 - RNA, 19 nt, Artificial Sequence
  Description of Artificial Sequence: Synthetic oligonucleotide
  Antisense strand to SEQ ID NO: 175408
augucacagaaacaugugg

SEQ ID NO: 175410 - RNA, 19 nt, Artificial Sequence
  Description of Artificial Sequence: Synthetic oligonucleotide
  Sense strand starting at position 3465 of SEQ ID NO: 2261
uccacauguuucugugaca

SEQ ID NO: 175411 - RNA, 19 nt, Artificial Sequence
  Description of Artificial Sequence: Synthetic oligonucleotide
  Antisense strand to SEQ ID NO: 175410
ugucacagaaacaugugga

SEQ ID NO: 175412 - RNA, 19 nt, Artificial Sequence
  Description of Artificial Sequence: Synthetic oligonucleotide
  Sense strand starting at position 3448 of SEQ ID NO: 2261
ugggaaaucaccugguuuc

SEQ ID NO: 175413 - RNA, 19 nt, Artificial Sequence
  Description of Artificial Sequence: Synthetic oligonucleotide
  Antisense strand to SEQ ID NO: 175412
gaaaccaggugauuuccca

SEQ ID NO: 175414 - RNA, 19 nt, Artificial Sequence
  Description of Artificial Sequence: Synthetic oligonucleotide
  Sense strand starting at position 3378 of SEQ ID NO: 2261
cugagugcugagugagaaa

SEQ ID NO: 175415 - RNA, 19 nt, Artificial Sequence
  Description of Artificial Sequence: Synthetic oligonucleotide
  Antisense strand to SEQ ID NO: 175414
uuucucacucagcacucag

SEQ ID NO: 175416 - RNA, 19 nt, Artificial Sequence
  Description of Artificial Sequence: Synthetic oligonucleotide
  Sense strand starting at position 3376 of SEQ ID NO: 2261
ugcugagugcugagugaga

SEQ ID NO: 175417 - RNA, 19 nt, Artificial Sequence
  Description of Artificial Sequence: Synthetic oligonucleotide
  Antisense strand to SEQ ID NO: 175416
ucucacucagcacucagca

SEQ ID NO: 175418 - RNA, 19 nt, Artificial Sequence
  Description of Artificial Sequence: Synthetic oligonucleotide
  Sense strand starting at position 3374 of SEQ ID NO: 2261
ggugcugagugcugaguga

SEQ ID NO: 175419 - RNA, 19 nt, Artificial Sequence
  Description of Artificial Sequence: Synthetic oligonucleotide
  Antisense strand to SEQ ID NO: 175418
ucacucagcacucagcacc

SEQ ID NO: 175420 - RNA, 19 nt, Artificial Sequence
  Description of Artificial Sequence: Synthetic oligonucleotide
  Sense strand starting at position 3079 of SEQ ID NO: 2261
ggauuuacaucaugaccga

SEQ ID NO: 175421 - RNA, 19 nt, Artificial Sequence
  Description of Artificial Sequence: Synthetic oligonucleotide
  Antisense strand to SEQ ID NO: 175420
ucggucaugauguaaaucc

SEQ ID NO: 175422 - RNA, 19 nt, Artificial Sequence
  Description of Artificial Sequence: Synthetic oligonucleotide
  Sense strand starting at position 2936 of SEQ ID NO: 2261
gggagaagacucugcacuu

SEQ ID NO: 175423 - RNA, 19 nt, Artificial Sequence
  Description of Artificial Sequence: Synthetic oligonucleotide
  Antisense strand to SEQ ID NO: 175422
aagugcagagucuucuccc

SEQ ID NO: 175424 - RNA, 19 nt, Artificial Sequence
  Description of Artificial Sequence: Synthetic oligonucleotide
  Sense strand starting at position 2924 of SEQ ID NO: 2261
agccuucucacagggagaa

SEQ ID NO: 175425 - RNA, 19 nt, Artificial Sequence
  Description of Artificial Sequence: Synthetic oligonucleotide
  Antisense strand to SEQ ID NO: 175424
uucucccugugagaaggcu

SEQ ID NO: 175426 - RNA, 19 nt, Artificial Sequence
  Description of Artificial Sequence: Synthetic oligonucleotide
  Sense strand starting at position 2862 of SEQ ID NO: 2261
uuuauaaaucuuggcuguu

SEQ ID NO: 175427 - RNA, 19 nt, Artificial Sequence
  Description of Artificial Sequence: Synthetic oligonucleotide
  Antisense strand to SEQ ID NO: 175426
aacagccaagauuuauaaa

SEQ ID NO: 175428 - RNA, 19 nt, Artificial Sequence
  Description of Artificial Sequence: Synthetic oligonucleotide
  Sense strand starting at position 2806 of SEQ ID NO: 2261
ugcagucuguacuuuauau

SEQ ID NO: 175429 - RNA, 19 nt, Artificial Sequence
  Description of Artificial Sequence: Synthetic oligonucleotide
  Antisense strand to SEQ ID NO: 175428
auauaaaguacagacugca

SEQ ID NO: 175430 - RNA, 19 nt, Artificial Sequence
  Description of Artificial Sequence: Synthetic oligonucleotide
  Sense strand starting at position 2739 of SEQ ID NO: 2261
gggucuggaucucugaacu

SEQ ID NO: 175431 - RNA, 19 nt, Artificial Sequence
  Description of Artificial Sequence: Synthetic oligonucleotide
  Antisense strand to SEQ ID NO: 175430
aguucagagauccagaccc

SEQ ID NO: 175432 - RNA, 19 nt, Artificial Sequence
  Description of Artificial Sequence: Synthetic oligonucleotide
  Sense strand starting at position 2562 of SEQ ID NO: 2261
cugauuucuuuauagagau

SEQ ID NO: 175433 - RNA, 19 nt, Artificial Sequence
  Description of Artificial Sequence: Synthetic oligonucleotide
  Antisense strand to SEQ ID NO: 175432
aucucuauaaagaaaucag

SEQ ID NO: 175434 - RNA, 19 nt, Artificial Sequence
  Description of Artificial Sequence: Synthetic oligonucleotide
  Sense strand starting at position 2365 of SEQ ID NO: 2261
ccaagagaauucuagauca

SEQ ID NO: 175435 - RNA, 19 nt, Artificial Sequence
  Description of Artificial Sequence: Synthetic oligonucleotide
  Antisense strand to SEQ ID NO: 175434
ugaucuagaauucucuugg

SEQ ID NO: 175436 - RNA, 19 nt, Artificial Sequence
  Description of Artificial Sequence: Synthetic oligonucleotide
  Sense strand starting at position 1676 of SEQ ID NO: 2261
gcgcgugucugaugcggau

SEQ ID NO: 175437 - RNA, 19 nt, Artificial Sequence
  Description of Artificial Sequence: Synthetic oligonucleotide
  Antisense strand to SEQ ID NO: 175436
auccgcaucagacacgcgc

SEQ ID NO: 175438 - RNA, 19 nt, Artificial Sequence
  Description of Artificial Sequence: Synthetic oligonucleotide
  Sense strand starting at position 1332 of SEQ ID NO: 2261
ugguauuucuaagaaaucg

SEQ ID NO: 175439 - RNA, 19 nt, Artificial Sequence
  Description of Artificial Sequence: Synthetic oligonucleotide
  Antisense strand to SEQ ID NO: 175438
cgauuucuuagaaauacca

SEQ ID NO: 175440 - RNA, 19 nt, Artificial Sequence
  Description of Artificial Sequence: Synthetic oligonucleotide
  Sense strand starting at position 1320 of SEQ ID NO: 2261
gacacaggacccugguauu

SEQ ID NO: 175441 - RNA, 19 nt, Artificial Sequence
  Description of Artificial Sequence: Synthetic oligonucleotide
  Antisense strand to SEQ ID NO: 175440
aauaccaggguccuguguc

SEQ ID NO: 175442 - RNA, 19 nt, Artificial Sequence
  Description of Artificial Sequence: Synthetic oligonucleotide
  Sense strand starting at position 1148 of SEQ ID NO: 2261
ucauuugccuugcucgauu

SEQ ID NO: 175443 - RNA, 19 nt, Artificial Sequence
  Description of Artificial Sequence: Synthetic oligonucleotide
  Antisense strand to SEQ ID NO: 175442
aaucgagcaaggcaaauga

SEQ ID NO: 175444 - RNA, 19 nt, Artificial Sequence
  Description of Artificial Sequence: Synthetic oligonucleotide
  Sense strand starting at position 1075 of SEQ ID NO: 2261
gggagugacguucauauug

SEQ ID NO: 175445 - RNA, 19 nt, Artificial Sequence
  Description of Artificial Sequence: Synthetic oligonucleotide
  Antisense strand to SEQ ID NO: 175444
caauaugaacgucacuccc

SEQ ID NO: 175446 - RNA, 19 nt, Artificial Sequence
  Description of Artificial Sequence: Synthetic oligonucleotide
  Sense strand starting at position 993 of SEQ ID NO: 2261
ggguuauccuauguuacca

SEQ ID NO: 175447 - RNA, 19 nt, Artificial Sequence
  Description of Artificial Sequence: Synthetic oligonucleotide
  Antisense strand to SEQ ID NO: 175446
ugguaacauaggauaaccc

SEQ ID NO: 175448 - RNA, 19 nt, Artificial Sequence
  Description of Artificial Sequence: Synthetic oligonucleotide
  Sense strand starting at position 947 of SEQ ID NO: 2261
gguuuaucuuaucuuacca

SEQ ID NO: 175449 - RNA, 19 nt, Artificial Sequence
  Description of Artificial Sequence: Synthetic oligonucleotide
  Antisense strand to SEQ ID NO: 175448
ugguaagauaagauaaacc

SEQ ID NO: 175450 - RNA, 19 nt, Artificial Sequence
  Description of Artificial Sequence: Synthetic oligonucleotide
  Sense strand starting at position 906 of SEQ ID NO: 2261
auacaaguucucugagccu

SEQ ID NO: 175451 - RNA, 19 nt, Artificial Sequence
  Description of Artificial Sequence: Synthetic oligonucleotide
  Antisense strand to SEQ ID NO: 175450
aggcucagagaacuuguau

SEQ ID NO: 175452 - RNA, 19 nt, Artificial Sequence
  Description of Artificial Sequence: Synthetic oligonucleotide
  Sense strand starting at position 628 of SEQ ID NO: 2261
agucaauucuagucugaca

SEQ ID NO: 175453 - RNA, 19 nt, Artificial Sequence
  Description of Artificial Sequence: Synthetic oligonucleotide
  Antisense strand to SEQ ID NO: 175452
ugucagacuagaauugacu

SEQ ID NO: 175454 - RNA, 19 nt, Artificial Sequence
  Description of Artificial Sequence: Synthetic oligonucleotide
  Sense strand starting at position 617 of SEQ ID NO: 2261
cacugucggugagucaauu

SEQ ID NO: 175455 - RNA, 19 nt, Artificial Sequence
  Description of Artificial Sequence: Synthetic oligonucleotide
  Antisense strand to SEQ ID NO: 175454
aauugacucaccgacagug

SEQ ID NO: 175456 - RNA, 19 nt, Artificial Sequence
  Description of Artificial Sequence: Synthetic oligonucleotide
  Sense strand starting at position 615 of SEQ ID NO: 2261
cccacugucggugagucaa

SEQ ID NO: 175457 - RNA, 19 nt, Artificial Sequence
  Description of Artificial Sequence: Synthetic oligonucleotide
  Antisense strand to SEQ ID NO: 175456
uugacucaccgacaguggg

SEQ ID NO: 175458 - RNA, 19 nt, Artificial Sequence
  Description of Artificial Sequence: Synthetic oligonucleotide
  Sense strand starting at position 587 of SEQ ID NO: 2261
ggcaguucuccaggaccca

SEQ ID NO: 175459 - RNA, 19 nt, Artificial Sequence
  Description of Artificial Sequence: Synthetic oligonucleotide
  Antisense strand to SEQ ID NO: 175458
uggguccuggagaacugcc

SEQ ID NO: 175460 - RNA, 19 nt, Artificial Sequence
  Description of Artificial Sequence: Synthetic oligonucleotide
  Sense strand starting at position 168 of SEQ ID NO: 2261
gggucucucugccaaggau

SEQ ID NO: 175461 - RNA, 19 nt, Artificial Sequence
  Description of Artificial Sequence: Synthetic oligonucleotide
  Antisense strand to SEQ ID NO: 175460
auccuuggcagagagaccc

SEQ ID NO: 175462 - RNA, 19 nt, Artificial Sequence
  Description of Artificial Sequence: Synthetic oligonucleotide
  Sense strand starting at position 150 of SEQ ID NO: 2261
gugccucaugcuugagaag

SEQ ID NO: 175463 - RNA, 19 nt, Artificial Sequence
  Description of Artificial Sequence: Synthetic oligonucleotide
  Antisense strand to SEQ ID NO: 175462
cuucucaagcaugaggcac

SEQ ID NO: 175464 - RNA, 19 nt, Artificial Sequence
  Description of Artificial Sequence: Synthetic oligonucleotide
  Sense strand starting at position 149 of SEQ ID NO: 2261
ggugccucaugcuugagaa

SEQ ID NO: 175465 - RNA, 19 nt, Artificial Sequence
  Description of Artificial Sequence: Synthetic oligonucleotide
  Antisense strand to SEQ ID NO: 175464
uucucaagcaugaggcacc

SEQ ID NO: 175466 - RNA, 19 nt, Artificial Sequence
  Description of Artificial Sequence: Synthetic oligonucleotide
  Sense strand starting at position 146 of SEQ ID NO: 2261
agaggugccucaugcuuga

SEQ ID NO: 175467 - RNA, 19 nt, Artificial Sequence
  Description of Artificial Sequence: Synthetic oligonucleotide
  Antisense strand to SEQ ID NO: 175466
ucaagcaugaggcaccucu

SEQ ID NO: 175468 - RNA, 19 nt, Artificial Sequence
  Description of Artificial Sequence: Synthetic oligonucleotide
  Sense strand starting at position 18 of SEQ ID NO: 2262
ccaucuaaguuugccugaa

SEQ ID NO: 175469 - RNA, 19 nt, Artificial Sequence
  Description of Artificial Sequence: Synthetic oligonucleotide
  Antisense strand to SEQ ID NO: 175468
uucaggcaaacuuagaugg

SEQ ID NO: 175470 - RNA, 19 nt, Artificial Sequence
  Description of Artificial Sequence: Synthetic oligonucleotide
  Sense strand starting at position 19 of SEQ ID NO: 2262
caucuaaguuugccugaag

SEQ ID NO: 175471 - RNA, 19 nt, Artificial Sequence
  Description of Artificial Sequence: Synthetic oligonucleotide
  Antisense strand to SEQ ID NO: 175470
cuucaggcaaacuuagaug

SEQ ID NO: 175472 - RNA, 19 nt, Artificial Sequence
  Description of Artificial Sequence: Synthetic oligonucleotide
  Sense strand starting at position 20 of SEQ ID NO: 2262
aucuaaguuugccugaagu

SEQ ID NO: 175473 - RNA, 19 nt, Artificial Sequence
  Description of Artificial Sequence: Synthetic oligonucleotide
  Antisense strand to SEQ ID NO: 175472
acuucaggcaaacuuagau

SEQ ID NO: 175474 - RNA, 19 nt, Artificial Sequence
  Description of Artificial Sequence: Synthetic oligonucleotide
  Sense strand starting at position 160 of SEQ ID NO: 2262
ccacgacagcuaggaauua

SEQ ID NO: 175475 - RNA, 19 nt, Artificial Sequence
  Description of Artificial Sequence: Synthetic oligonucleotide
  Antisense strand to SEQ ID NO: 175474
uaauuccuagcugucgugg

SEQ ID NO: 175476 - RNA, 19 nt, Artificial Sequence
  Description of Artificial Sequence: Synthetic oligonucleotide
  Sense strand starting at position 239 of SEQ ID NO: 2262
gucaguaucucugcgggaa

SEQ ID NO: 175477 - RNA, 19 nt, Artificial Sequence
  Description of Artificial Sequence: Synthetic oligonucleotide
  Antisense strand to SEQ ID NO: 175476
uucccgcagagauacugac

SEQ ID NO: 175478 - RNA, 19 nt, Artificial Sequence
  Description of Artificial Sequence: Synthetic oligonucleotide
  Sense strand starting at position 240 of SEQ ID NO: 2262
ucaguaucucugcgggaac

SEQ ID NO: 175479 - RNA, 19 nt, Artificial Sequence
  Description of Artificial Sequence: Synthetic oligonucleotide
  Antisense strand to SEQ ID NO: 175478
guucccgcagagauacuga

SEQ ID NO: 175480 - RNA, 19 nt, Artificial Sequence
  Description of Artificial Sequence: Synthetic oligonucleotide
  Sense strand starting at position 415 of SEQ ID NO: 2262
gggugaacugcugacacau

SEQ ID NO: 175481 - RNA, 19 nt, Artificial Sequence
  Description of Artificial Sequence: Synthetic oligonucleotide
  Antisense strand to SEQ ID NO: 175480
augugucagcaguucaccc

SEQ ID NO: 175482 - RNA, 19 nt, Artificial Sequence
  Description of Artificial Sequence: Synthetic oligonucleotide
  Sense strand starting at position 554 of SEQ ID NO: 2262
gagaguuagucagggccaa

SEQ ID NO: 175483 - RNA, 19 nt, Artificial Sequence
  Description of Artificial Sequence: Synthetic oligonucleotide
  Antisense strand to SEQ ID NO: 175482
uuggcccugacuaacucuc

SEQ ID NO: 175484 - RNA, 19 nt, Artificial Sequence
  Description of Artificial Sequence: Synthetic oligonucleotide
  Sense strand starting at position 555 of SEQ ID NO: 2262
agaguuagucagggccaaa

SEQ ID NO: 175485 - RNA, 19 nt, Artificial Sequence
  Description of Artificial Sequence: Synthetic oligonucleotide
  Antisense strand to SEQ ID NO: 175484
uuuggcccugacuaacucu

SEQ ID NO: 175486 - RNA, 19 nt, Artificial Sequence
  Description of Artificial Sequence: Synthetic oligonucleotide
  Sense strand starting at position 663 of SEQ ID NO: 2262
gagagaagcucagagauua

SEQ ID NO: 175487 - RNA, 19 nt, Artificial Sequence
  Description of Artificial Sequence: Synthetic oligonucleotide
  Antisense strand to SEQ ID NO: 175486
uaaucucugagcuucucuc

SEQ ID NO: 175488 - RNA, 19 nt, Artificial Sequence
  Description of Artificial Sequence: Synthetic oligonucleotide
  Sense strand starting at position 844 of SEQ ID NO: 2262
aaaggccuguccuuaggaa

SEQ ID NO: 175489 - RNA, 19 nt, Artificial Sequence
  Description of Artificial Sequence: Synthetic oligonucleotide
  Antisense strand to SEQ ID NO: 175488
uuccuaaggacaggccuuu

SEQ ID NO: 175490 - RNA, 19 nt, Artificial Sequence
  Description of Artificial Sequence: Synthetic oligonucleotide
  Sense strand starting at position 925 of SEQ ID NO: 2262
ucagaauuauggugguucu

SEQ ID NO: 175491 - RNA, 19 nt, Artificial Sequence
  Description of Artificial Sequence: Synthetic oligonucleotide
  Antisense strand to SEQ ID NO: 175490
agaaccaccauaauucuga

SEQ ID NO: 175492 - RNA, 19 nt, Artificial Sequence
  Description of Artificial Sequence: Synthetic oligonucleotide
  Sense strand starting at position 1017 of SEQ ID NO: 2262
cagguagugcccuguggaa

SEQ ID NO: 175493 - RNA, 19 nt, Artificial Sequence
  Description of Artificial Sequence: Synthetic oligonucleotide
  Antisense strand to SEQ ID NO: 175492
uuccacagggcacuaccug

SEQ ID NO: 175494 - RNA, 19 nt, Artificial Sequence
  Description of Artificial Sequence: Synthetic oligonucleotide
  Sense strand starting at position 1126 of SEQ ID NO: 2262
cuacuucucugucagccua

SEQ ID NO: 175495 - RNA, 19 nt, Artificial Sequence
  Description of Artificial Sequence: Synthetic oligonucleotide
  Antisense strand to SEQ ID NO: 175494
uaggcugacagagaaguag

SEQ ID NO: 175496 - RNA, 19 nt, Artificial Sequence
  Description of Artificial Sequence: Synthetic oligonucleotide
  Sense strand starting at position 1271 of SEQ ID NO: 2262
agaccaaucuucuugugga

SEQ ID NO: 175497 - RNA, 19 nt, Artificial Sequence
  Description of Artificial Sequence: Synthetic oligonucleotide
  Antisense strand to SEQ ID NO: 175496
uccacaagaagauuggucu

SEQ ID NO: 175498 - RNA, 19 nt, Artificial Sequence
  Description of Artificial Sequence: Synthetic oligonucleotide
  Sense strand starting at position 1272 of SEQ ID NO: 2262
gaccaaucuucuuguggaa

SEQ ID NO: 175499 - RNA, 19 nt, Artificial Sequence
  Description of Artificial Sequence: Synthetic oligonucleotide
  Antisense strand to SEQ ID NO: 175498
uuccacaagaagauugguc

SEQ ID NO: 175500 - RNA, 19 nt, Artificial Sequence
  Description of Artificial Sequence: Synthetic oligonucleotide
  Sense strand starting at position 1274 of SEQ ID NO: 2262
ccaaucuucuuguggaagu

SEQ ID NO: 175501 - RNA, 19 nt, Artificial Sequence
  Description of Artificial Sequence: Synthetic oligonucleotide
  Antisense strand to SEQ ID NO: 175500
acuuccacaagaagauugg

SEQ ID NO: 175502 - RNA, 19 nt, Artificial Sequence
  Description of Artificial Sequence: Synthetic oligonucleotide
  Sense strand starting at position 1733 of SEQ ID NO: 2262
agccuuuaacgagaucgga

SEQ ID NO: 175503 - RNA, 19 nt, Artificial Sequence
  Description of Artificial Sequence: Synthetic oligonucleotide
  Antisense strand to SEQ ID NO: 175502
uccgaucucguuaaaggcu

SEQ ID NO: 175504 - RNA, 19 nt, Artificial Sequence
  Description of Artificial Sequence: Synthetic oligonucleotide
  Sense strand starting at position 3240 of SEQ ID NO: 2262
cagggauccugcccagcau

SEQ ID NO: 175505 - RNA, 19 nt, Artificial Sequence
  Description of Artificial Sequence: Synthetic oligonucleotide
  Antisense strand to SEQ ID NO: 175504
augcugggcaggaucccug

SEQ ID NO: 175506 - RNA, 19 nt, Artificial Sequence
  Description of Artificial Sequence: Synthetic oligonucleotide
  Sense strand starting at position 3323 of SEQ ID NO: 2262
ucugcugucucuuggucaa

SEQ ID NO: 175507 - RNA, 19 nt, Artificial Sequence
  Description of Artificial Sequence: Synthetic oligonucleotide
  Antisense strand to SEQ ID NO: 175506
uugaccaagagacagcaga

SEQ ID NO: 175508 - RNA, 19 nt, Artificial Sequence
  Description of Artificial Sequence: Synthetic oligonucleotide
  Sense strand starting at position 3393 of SEQ ID NO: 2262
gggacagaguccuucuuug

SEQ ID NO: 175509 - RNA, 19 nt, Artificial Sequence
  Description of Artificial Sequence: Synthetic oligonucleotide
  Antisense strand to SEQ ID NO: 175508
caaagaaggacucuguccc

SEQ ID NO: 175510 - RNA, 19 nt, Artificial Sequence
  Description of Artificial Sequence: Synthetic oligonucleotide
  Sense strand starting at position 3551 of SEQ ID NO: 2262
augcgaugcucccaggcau

SEQ ID NO: 175511 - RNA, 19 nt, Artificial Sequence
  Description of Artificial Sequence: Synthetic oligonucleotide
  Antisense strand to SEQ ID NO: 175510
augccugggagcaucgcau

SEQ ID NO: 175512 - RNA, 19 nt, Artificial Sequence
  Description of Artificial Sequence: Synthetic oligonucleotide
  Sense strand starting at position 3632 of SEQ ID NO: 2262
ggcagugagcguggaguua

SEQ ID NO: 175513 - RNA, 19 nt, Artificial Sequence
  Description of Artificial Sequence: Synthetic oligonucleotide
  Antisense strand to SEQ ID NO: 175512
uaacuccacgcucacugcc

SEQ ID NO: 175514 - RNA, 19 nt, Artificial Sequence
  Description of Artificial Sequence: Synthetic oligonucleotide
  Sense strand starting at position 3633 of SEQ ID NO: 2262
gcagugagcguggaguuaa

SEQ ID NO: 175515 - RNA, 19 nt, Artificial Sequence
  Description of Artificial Sequence: Synthetic oligonucleotide
  Antisense strand to SEQ ID NO: 175514
uuaacuccacgcucacugc

SEQ ID NO: 175516 - RNA, 19 nt, Artificial Sequence
  Description of Artificial Sequence: Synthetic oligonucleotide
  Sense strand starting at position 3634 of SEQ ID NO: 2262
cagugagcguggaguuaag

SEQ ID NO: 175517 - RNA, 19 nt, Artificial Sequence
  Description of Artificial Sequence: Synthetic oligonucleotide
  Antisense strand to SEQ ID NO: 175516
cuuaacuccacgcucacug

SEQ ID NO: 175518 - RNA, 19 nt, Artificial Sequence
  Description of Artificial Sequence: Synthetic oligonucleotide
  Sense strand starting at position 3658 of SEQ ID NO: 2262
gggugguccugauucggua

SEQ ID NO: 175519 - RNA, 19 nt, Artificial Sequence
  Description of Artificial Sequence: Synthetic oligonucleotide
  Antisense strand to SEQ ID NO: 175518
uaccgaaucaggaccaccc

SEQ ID NO: 175520 - RNA, 19 nt, Artificial Sequence
  Description of Artificial Sequence: Synthetic oligonucleotide
  Sense strand starting at position 697 of SEQ ID NO: 2263
ggagcucggucuugaggau

SEQ ID NO: 175521 - RNA, 19 nt, Artificial Sequence
  Description of Artificial Sequence: Synthetic oligonucleotide
  Antisense strand to SEQ ID NO: 175520
auccucaagaccgagcucc

SEQ ID NO: 175522 - RNA, 19 nt, Artificial Sequence
  Description of Artificial Sequence: Synthetic oligonucleotide
  Sense strand starting at position 703 of SEQ ID NO: 2263
cggucuugaggaugccaga

SEQ ID NO: 175523 - RNA, 19 nt, Artificial Sequence
  Description of Artificial Sequence: Synthetic oligonucleotide
  Antisense strand to SEQ ID NO: 175522
ucuggcauccucaagaccg

SEQ ID NO: 175524 - RNA, 19 nt, Artificial Sequence
  Description of Artificial Sequence: Synthetic oligonucleotide
  Sense strand starting at position 1483 of SEQ ID NO: 2263
gugggagcucacugagguu

SEQ ID NO: 175525 - RNA, 19 nt, Artificial Sequence
  Description of Artificial Sequence: Synthetic oligonucleotide
  Antisense strand to SEQ ID NO: 175524
aaccucagugagcucccac

SEQ ID NO: 175526 - RNA, 19 nt, Artificial Sequence
  Description of Artificial Sequence: Synthetic oligonucleotide
  Sense strand starting at position 1486 of SEQ ID NO: 2263
ggagcucacugagguuaca

SEQ ID NO: 175527 - RNA, 19 nt, Artificial Sequence
  Description of Artificial Sequence: Synthetic oligonucleotide
  Antisense strand to SEQ ID NO: 175526
uguaaccucagugagcucc

SEQ ID NO: 175528 - RNA, 19 nt, Artificial Sequence
  Description of Artificial Sequence: Synthetic oligonucleotide
  Sense strand starting at position 1534 of SEQ ID NO: 2263
ugaccacgucguuguagaa

SEQ ID NO: 175529 - RNA, 19 nt, Artificial Sequence
  Description of Artificial Sequence: Synthetic oligonucleotide
  Antisense strand to SEQ ID NO: 175528
uucuacaacgacgugguca

SEQ ID NO: 175530 - RNA, 19 nt, Artificial Sequence
  Description of Artificial Sequence: Synthetic oligonucleotide
  Sense strand starting at position 2137 of SEQ ID NO: 2263
ggcuuauucugccuucuga

SEQ ID NO: 175531 - RNA, 19 nt, Artificial Sequence
  Description of Artificial Sequence: Synthetic oligonucleotide
  Antisense strand to SEQ ID NO: 175530
ucagaaggcagaauaagcc

SEQ ID NO: 175532 - RNA, 19 nt, Artificial Sequence
  Description of Artificial Sequence: Synthetic oligonucleotide
  Sense strand starting at position 2762 of SEQ ID NO: 2263
cuuaaauuccugcguggaa

SEQ ID NO: 175533 - RNA, 19 nt, Artificial Sequence
  Description of Artificial Sequence: Synthetic oligonucleotide
  Antisense strand to SEQ ID NO: 175532
uuccacgcaggaauuuaag

SEQ ID NO: 175534 - RNA, 19 nt, Artificial Sequence
  Description of Artificial Sequence: Synthetic oligonucleotide
  Sense strand starting at position 2763 of SEQ ID NO: 2263
uuaaauuccugcguggaag

SEQ ID NO: 175535 - RNA, 19 nt, Artificial Sequence
  Description of Artificial Sequence: Synthetic oligonucleotide
  Antisense strand to SEQ ID NO: 175534
cuuccacgcaggaauuuaa

SEQ ID NO: 175536 - RNA, 19 nt, Artificial Sequence
  Description of Artificial Sequence: Synthetic oligonucleotide
  Sense strand starting at position 2795 of SEQ ID NO: 2263
guggcaguguuuggagaca

SEQ ID NO: 175537 - RNA, 19 nt, Artificial Sequence
  Description of Artificial Sequence: Synthetic oligonucleotide
  Antisense strand to SEQ ID NO: 175536
ugucuccaaacacugccac

SEQ ID NO: 175538 - RNA, 19 nt, Artificial Sequence
  Description of Artificial Sequence: Synthetic oligonucleotide
  Sense strand starting at position 2891 of SEQ ID NO: 2263
ugcaaacaguucucagguu

SEQ ID NO: 175539 - RNA, 19 nt, Artificial Sequence
  Description of Artificial Sequence: Synthetic oligonucleotide
  Antisense strand to SEQ ID NO: 175538
aaccugagaacuguuugca

SEQ ID NO: 175540 - RNA, 19 nt, Artificial Sequence
  Description of Artificial Sequence: Synthetic oligonucleotide
  Sense strand starting at position 2911 of SEQ ID NO: 2263
cagguuugcccagaggaug

SEQ ID NO: 175541 - RNA, 19 nt, Artificial Sequence
  Description of Artificial Sequence: Synthetic oligonucleotide
  Antisense strand to SEQ ID NO: 175540
cauccucugggcaaaccug

SEQ ID NO: 175542 - RNA, 19 nt, Artificial Sequence
  Description of Artificial Sequence: Synthetic oligonucleotide
  Sense strand starting at position 3004 of SEQ ID NO: 2263
cugugaccagccugugauu

SEQ ID NO: 175543 - RNA, 19 nt, Artificial Sequence
  Description of Artificial Sequence: Synthetic oligonucleotide
  Antisense strand to SEQ ID NO: 175542
aaucacaggcuggucacag

SEQ ID NO: 175544 - RNA, 19 nt, Artificial Sequence
  Description of Artificial Sequence: Synthetic oligonucleotide
  Sense strand starting at position 3006 of SEQ ID NO: 2263
gugaccagccugugauuau

SEQ ID NO: 175545 - RNA, 19 nt, Artificial Sequence
  Description of Artificial Sequence: Synthetic oligonucleotide
  Antisense strand to SEQ ID NO: 175544
auaaucacaggcuggucac

SEQ ID NO: 175546 - RNA, 19 nt, Artificial Sequence
  Description of Artificial Sequence: Synthetic oligonucleotide
  Sense strand starting at position 3007 of SEQ ID NO: 2263
ugaccagccugugauuauc

SEQ ID NO: 175547 - RNA, 19 nt, Artificial Sequence
  Description of Artificial Sequence: Synthetic oligonucleotide
  Antisense strand to SEQ ID NO: 175546
gauaaucacaggcugguca

SEQ ID NO: 175548 - RNA, 19 nt, Artificial Sequence
  Description of Artificial Sequence: Synthetic oligonucleotide
  Sense strand starting at position 3010 of SEQ ID NO: 2263
ccagccugugauuauccaa

SEQ ID NO: 175549 - RNA, 19 nt, Artificial Sequence
  Description of Artificial Sequence: Synthetic oligonucleotide
  Antisense strand to SEQ ID NO: 175548
uuggauaaucacaggcugg

SEQ ID NO: 175550 - RNA, 19 nt, Artificial Sequence
  Description of Artificial Sequence: Synthetic oligonucleotide
  Sense strand starting at position 3223 of SEQ ID NO: 2263
gacugagggucccuaaguu

SEQ ID NO: 175551 - RNA, 19 nt, Artificial Sequence
  Description of Artificial Sequence: Synthetic oligonucleotide
  Antisense strand to SEQ ID NO: 175550
aacuuagggacccucaguc

SEQ ID NO: 175552 - RNA, 19 nt, Artificial Sequence
  Description of Artificial Sequence: Synthetic oligonucleotide
  Sense strand starting at position 3349 of SEQ ID NO: 2263
ggaggaaaguucuggcauu

SEQ ID NO: 175553 - RNA, 19 nt, Artificial Sequence
  Description of Artificial Sequence: Synthetic oligonucleotide
  Antisense strand to SEQ ID NO: 175552
aaugccagaacuuuccucc

SEQ ID NO: 175554 - RNA, 19 nt, Artificial Sequence
  Description of Artificial Sequence: Synthetic oligonucleotide
  Sense strand starting at position 3350 of SEQ ID NO: 2263
gaggaaaguucuggcauuu

SEQ ID NO: 175555 - RNA, 19 nt, Artificial Sequence
  Description of Artificial Sequence: Synthetic oligonucleotide
  Antisense strand to SEQ ID NO: 175554
aaaugccagaacuuuccuc

SEQ ID NO: 175556 - RNA, 19 nt, Artificial Sequence
  Description of Artificial Sequence: Synthetic oligonucleotide
  Sense strand starting at position 3396 of SEQ ID NO: 2263
aggguuucccacugacagu

SEQ ID NO: 175557 - RNA, 19 nt, Artificial Sequence
  Description of Artificial Sequence: Synthetic oligonucleotide
  Antisense strand to SEQ ID NO: 175556
acugucagugggaaacccu

SEQ ID NO: 175558 - RNA, 19 nt, Artificial Sequence
  Description of Artificial Sequence: Synthetic oligonucleotide
  Sense strand starting at position 3402 of SEQ ID NO: 2263
ucccacugacagugagaaa

SEQ ID NO: 175559 - RNA, 19 nt, Artificial Sequence
  Description of Artificial Sequence: Synthetic oligonucleotide
  Antisense strand to SEQ ID NO: 175558
uuucucacugucaguggga

SEQ ID NO: 175560 - RNA, 19 nt, Artificial Sequence
  Description of Artificial Sequence: Synthetic oligonucleotide
  Sense strand starting at position 3643 of SEQ ID NO: 2263
cuccuuguccugggcuuaa

SEQ ID NO: 175561 - RNA, 19 nt, Artificial Sequence
  Description of Artificial Sequence: Synthetic oligonucleotide
  Antisense strand to SEQ ID NO: 175560
uuaagcccaggacaaggag

SEQ ID NO: 175562 - RNA, 19 nt, Artificial Sequence
  Description of Artificial Sequence: Synthetic oligonucleotide
  Sense strand starting at position 3681 of SEQ ID NO: 2263
cccugcuguguccauggaa

SEQ ID NO: 175563 - RNA, 19 nt, Artificial Sequence
  Description of Artificial Sequence: Synthetic oligonucleotide
  Antisense strand to SEQ ID NO: 175562
uuccauggacacagcaggg

SEQ ID NO: 175564 - RNA, 19 nt, Artificial Sequence
  Description of Artificial Sequence: Synthetic oligonucleotide
  Sense strand starting at position 3971 of SEQ ID NO: 2264
ggugacauggcucauaucu

SEQ ID NO: 175565 - RNA, 19 nt, Artificial Sequence
  Description of Artificial Sequence: Synthetic oligonucleotide
  Antisense strand to SEQ ID NO: 175564
agauaugagccaugucacc

SEQ ID NO: 175566 - RNA, 19 nt, Artificial Sequence
  Description of Artificial Sequence: Synthetic oligonucleotide
  Sense strand starting at position 3863 of SEQ ID NO: 2264
gugaccugccugugauaau

SEQ ID NO: 175567 - RNA, 19 nt, Artificial Sequence
  Description of Artificial Sequence: Synthetic oligonucleotide
  Antisense strand to SEQ ID NO: 175566
auuaucacaggcaggucac

SEQ ID NO: 175568 - RNA, 19 nt, Artificial Sequence
  Description of Artificial Sequence: Synthetic oligonucleotide
  Sense strand starting at position 3861 of SEQ ID NO: 2264
aagugaccugccugugaua

SEQ ID NO: 175569 - RNA, 19 nt, Artificial Sequence
  Description of Artificial Sequence: Synthetic oligonucleotide
  Antisense strand to SEQ ID NO: 175568
uaucacaggcaggucacuu

SEQ ID NO: 175570 - RNA, 19 nt, Artificial Sequence
  Description of Artificial Sequence: Synthetic oligonucleotide
  Sense strand starting at position 3831 of SEQ ID NO: 2264
uauguuaaacaaugaggua

SEQ ID NO: 175571 - RNA, 19 nt, Artificial Sequence
  Description of Artificial Sequence: Synthetic oligonucleotide
  Antisense strand to SEQ ID NO: 175570
uaccucauuguuuaacaua

SEQ ID NO: 175572 - RNA, 19 nt, Artificial Sequence
  Description of Artificial Sequence: Synthetic oligonucleotide
  Sense strand starting at position 3819 of SEQ ID NO: 2264
uugagcugggacuauguua

SEQ ID NO: 175573 - RNA, 19 nt, Artificial Sequence
  Description of Artificial Sequence: Synthetic oligonucleotide
  Antisense strand to SEQ ID NO: 175572
uaacauagucccagcucaa

SEQ ID NO: 175574 - RNA, 19 nt, Artificial Sequence
  Description of Artificial Sequence: Synthetic oligonucleotide
  Sense strand starting at position 3815 of SEQ ID NO: 2264
cuguuugagcugggacuau

SEQ ID NO: 175575 - RNA, 19 nt, Artificial Sequence
  Description of Artificial Sequence: Synthetic oligonucleotide
  Antisense strand to SEQ ID NO: 175574
auagucccagcucaaacag

SEQ ID NO: 175576 - RNA, 19 nt, Artificial Sequence
  Description of Artificial Sequence: Synthetic oligonucleotide
  Sense strand starting at position 3814 of SEQ ID NO: 2264
gcuguuugagcugggacua

SEQ ID NO: 175577 - RNA, 19 nt, Artificial Sequence
  Description of Artificial Sequence: Synthetic oligonucleotide
  Antisense strand to SEQ ID NO: 175576
uagucccagcucaaacagc

SEQ ID NO: 175578 - RNA, 19 nt, Artificial Sequence
  Description of Artificial Sequence: Synthetic oligonucleotide
  Sense strand starting at position 3813 of SEQ ID NO: 2264
ggcuguuugagcugggacu

SEQ ID NO: 175579 - RNA, 19 nt, Artificial Sequence
  Description of Artificial Sequence: Synthetic oligonucleotide
  Antisense strand to SEQ ID NO: 175578
agucccagcucaaacagcc

SEQ ID NO: 175580 - RNA, 19 nt, Artificial Sequence
  Description of Artificial Sequence: Synthetic oligonucleotide
  Sense strand starting at position 3774 of SEQ ID NO: 2264
uccagacucuccucuggau

SEQ ID NO: 175581 - RNA, 19 nt, Artificial Sequence
  Description of Artificial Sequence: Synthetic oligonucleotide
  Antisense strand to SEQ ID NO: 175580
auccagaggagagucugga

SEQ ID NO: 175582 - RNA, 19 nt, Artificial Sequence
  Description of Artificial Sequence: Synthetic oligonucleotide
  Sense strand starting at position 3588 of SEQ ID NO: 2264
ugaucuguccugcgaggua

SEQ ID NO: 175583 - RNA, 19 nt, Artificial Sequence
  Description of Artificial Sequence: Synthetic oligonucleotide
  Antisense strand to SEQ ID NO: 175582
uaccucgcaggacagauca

SEQ ID NO: 175584 - RNA, 19 nt, Artificial Sequence
  Description of Artificial Sequence: Synthetic oligonucleotide
  Sense strand starting at position 3550 of SEQ ID NO: 2264
agaauagccuaaggauacu

SEQ ID NO: 175585 - RNA, 19 nt, Artificial Sequence
  Description of Artificial Sequence: Synthetic oligonucleotide
  Antisense strand to SEQ ID NO: 175584
aguauccuuaggcuauucu

SEQ ID NO: 175586 - RNA, 19 nt, Artificial Sequence
  Description of Artificial Sequence: Synthetic oligonucleotide
  Sense strand starting at position 3501 of SEQ ID NO: 2264
aguccuaggugcucuaauu

SEQ ID NO: 175587 - RNA, 19 nt, Artificial Sequence
  Description of Artificial Sequence: Synthetic oligonucleotide
  Antisense strand to SEQ ID NO: 175586
aauuagagcaccuaggacu

SEQ ID NO: 175588 - RNA, 19 nt, Artificial Sequence
  Description of Artificial Sequence: Synthetic oligonucleotide
  Sense strand starting at position 3393 of SEQ ID NO: 2264
cgugugucuguguugagca

SEQ ID NO: 175589 - RNA, 19 nt, Artificial Sequence
  Description of Artificial Sequence: Synthetic oligonucleotide
  Antisense strand to SEQ ID NO: 175588
ugcucaacacagacacacg

SEQ ID NO: 175590 - RNA, 19 nt, Artificial Sequence
  Description of Artificial Sequence: Synthetic oligonucleotide
  Sense strand starting at position 3312 of SEQ ID NO: 2264
cucauuugcuggugaauga

SEQ ID NO: 175591 - RNA, 19 nt, Artificial Sequence
  Description of Artificial Sequence: Synthetic oligonucleotide
  Antisense strand to SEQ ID NO: 175590
ucauucaccagcaaaugag

SEQ ID NO: 175592 - RNA, 19 nt, Artificial Sequence
  Description of Artificial Sequence: Synthetic oligonucleotide
  Sense strand starting at position 3299 of SEQ ID NO: 2264
cucguacuauguucucauu

SEQ ID NO: 175593 - RNA, 19 nt, Artificial Sequence
  Description of Artificial Sequence: Synthetic oligonucleotide
  Antisense strand to SEQ ID NO: 175592
aaugagaacauaguacgag

SEQ ID NO: 175594 - RNA, 19 nt, Artificial Sequence
  Description of Artificial Sequence: Synthetic oligonucleotide
  Sense strand starting at position 3265 of SEQ ID NO: 2264
ggcacucucuccuaacaga

SEQ ID NO: 175595 - RNA, 19 nt, Artificial Sequence
  Description of Artificial Sequence: Synthetic oligonucleotide
  Antisense strand to SEQ ID NO: 175594
ucuguuaggagagagugcc

SEQ ID NO: 175596 - RNA, 19 nt, Artificial Sequence
  Description of Artificial Sequence: Synthetic oligonucleotide
  Sense strand starting at position 2452 of SEQ ID NO: 2264
gaaucagugaguggaugau

SEQ ID NO: 175597 - RNA, 19 nt, Artificial Sequence
  Description of Artificial Sequence: Synthetic oligonucleotide
  Antisense strand to SEQ ID NO: 175596
aucauccacucacugauuc

SEQ ID NO: 175598 - RNA, 19 nt, Artificial Sequence
  Description of Artificial Sequence: Synthetic oligonucleotide
  Sense strand starting at position 2451 of SEQ ID NO: 2264
ugaaucagugaguggauga

SEQ ID NO: 175599 - RNA, 19 nt, Artificial Sequence
  Description of Artificial Sequence: Synthetic oligonucleotide
  Antisense strand to SEQ ID NO: 175598
ucauccacucacugauuca

SEQ ID NO: 175600 - RNA, 19 nt, Artificial Sequence
  Description of Artificial Sequence: Synthetic oligonucleotide
  Sense strand starting at position 2430 of SEQ ID NO: 2264
ucauaagcauuugcuguaa

SEQ ID NO: 175601 - RNA, 19 nt, Artificial Sequence
  Description of Artificial Sequence: Synthetic oligonucleotide
  Antisense strand to SEQ ID NO: 175600
uuacagcaaaugcuuauga

SEQ ID NO: 175602 - RNA, 19 nt, Artificial Sequence
  Description of Artificial Sequence: Synthetic oligonucleotide
  Sense strand starting at position 2358 of SEQ ID NO: 2264
ugagauucuuuggaaggga

SEQ ID NO: 175603 - RNA, 19 nt, Artificial Sequence
  Description of Artificial Sequence: Synthetic oligonucleotide
  Antisense strand to SEQ ID NO: 175602
ucccuuccaaagaaucuca

SEQ ID NO: 175604 - RNA, 19 nt, Artificial Sequence
  Description of Artificial Sequence: Synthetic oligonucleotide
  Sense strand starting at position 2355 of SEQ ID NO: 2264
ccuugagauucuuuggaag

SEQ ID NO: 175605 - RNA, 19 nt, Artificial Sequence
  Description of Artificial Sequence: Synthetic oligonucleotide
  Antisense strand to SEQ ID NO: 175604
cuuccaaagaaucucaagg

SEQ ID NO: 175606 - RNA, 19 nt, Artificial Sequence
  Description of Artificial Sequence: Synthetic oligonucleotide
  Sense strand starting at position 2346 of SEQ ID NO: 2264
cucccaugcccuugagauu

SEQ ID NO: 175607 - RNA, 19 nt, Artificial Sequence
  Description of Artificial Sequence: Synthetic oligonucleotide
  Antisense strand to SEQ ID NO: 175606
aaucucaagggcaugggag

SEQ ID NO: 175608 - RNA, 19 nt, Artificial Sequence
  Description of Artificial Sequence: Synthetic oligonucleotide
  Sense strand starting at position 2298 of SEQ ID NO: 2264
gugaaaugugaguaguuuc

SEQ ID NO: 175609 - RNA, 19 nt, Artificial Sequence
  Description of Artificial Sequence: Synthetic oligonucleotide
  Antisense strand to SEQ ID NO: 175608
gaaacuacucacauuucac

SEQ ID NO: 175610 - RNA, 19 nt, Artificial Sequence
  Description of Artificial Sequence: Synthetic oligonucleotide
  Sense strand starting at position 2297 of SEQ ID NO: 2264
ggugaaaugugaguaguuu

SEQ ID NO: 175611 - RNA, 19 nt, Artificial Sequence
  Description of Artificial Sequence: Synthetic oligonucleotide
  Antisense strand to SEQ ID NO: 175610
aaacuacucacauuucacc

SEQ ID NO: 175612 - RNA, 19 nt, Artificial Sequence
  Description of Artificial Sequence: Synthetic oligonucleotide
  Sense strand starting at position 2296 of SEQ ID NO: 2264
cggugaaaugugaguaguu

SEQ ID NO: 175613 - RNA, 19 nt, Artificial Sequence
  Description of Artificial Sequence: Synthetic oligonucleotide
  Antisense strand to SEQ ID NO: 175612
aacuacucacauuucaccg

SEQ ID NO: 175614 - RNA, 19 nt, Artificial Sequence
  Description of Artificial Sequence: Synthetic oligonucleotide
  Sense strand starting at position 2139 of SEQ ID NO: 2264
acuagugguccuggcucua

SEQ ID NO: 175615 - RNA, 19 nt, Artificial Sequence
  Description of Artificial Sequence: Synthetic oligonucleotide
  Antisense strand to SEQ ID NO: 175614
uagagccaggaccacuagu

SEQ ID NO: 175616 - RNA, 19 nt, Artificial Sequence
  Description of Artificial Sequence: Synthetic oligonucleotide
  Sense strand starting at position 2099 of SEQ ID NO: 2264
ucccuuagcuguuugaaug

SEQ ID NO: 175617 - RNA, 19 nt, Artificial Sequence
  Description of Artificial Sequence: Synthetic oligonucleotide
  Antisense strand to SEQ ID NO: 175616
cauucaaacagcuaaggga

SEQ ID NO: 175618 - RNA, 19 nt, Artificial Sequence
  Description of Artificial Sequence: Synthetic oligonucleotide
  Sense strand starting at position 1987 of SEQ ID NO: 2264
uuaguucucccguaucaaa

SEQ ID NO: 175619 - RNA, 19 nt, Artificial Sequence
  Description of Artificial Sequence: Synthetic oligonucleotide
  Antisense strand to SEQ ID NO: 175618
uuugauacgggagaacuaa

SEQ ID NO: 175620 - RNA, 19 nt, Artificial Sequence
  Description of Artificial Sequence: Synthetic oligonucleotide
  Sense strand starting at position 1984 of SEQ ID NO: 2264
gccuuaguucucccguauc

SEQ ID NO: 175621 - RNA, 19 nt, Artificial Sequence
  Description of Artificial Sequence: Synthetic oligonucleotide
  Antisense strand to SEQ ID NO: 175620
gauacgggagaacuaaggc

SEQ ID NO: 175622 - RNA, 19 nt, Artificial Sequence
  Description of Artificial Sequence: Synthetic oligonucleotide
  Sense strand starting at position 1563 of SEQ ID NO: 2264
agcauauuccgguguuccu

SEQ ID NO: 175623 - RNA, 19 nt, Artificial Sequence
  Description of Artificial Sequence: Synthetic oligonucleotide
  Antisense strand to SEQ ID NO: 175622
aggaacaccggaauaugcu

SEQ ID NO: 175624 - RNA, 19 nt, Artificial Sequence
  Description of Artificial Sequence: Synthetic oligonucleotide
  Sense strand starting at position 1125 of SEQ ID NO: 2264
ccacgugcuccagcgaauu

SEQ ID NO: 175625 - RNA, 19 nt, Artificial Sequence
  Description of Artificial Sequence: Synthetic oligonucleotide
  Antisense strand to SEQ ID NO: 175624
aauucgcuggagcacgugg

SEQ ID NO: 175626 - RNA, 19 nt, Artificial Sequence
  Description of Artificial Sequence: Synthetic oligonucleotide
  Sense strand starting at position 1018 of SEQ ID NO: 2264
acugguaagugcucaguuu

SEQ ID NO: 175627 - RNA, 19 nt, Artificial Sequence
  Description of Artificial Sequence: Synthetic oligonucleotide
  Antisense strand to SEQ ID NO: 175626
aaacugagcacuuaccagu

SEQ ID NO: 175628 - RNA, 19 nt, Artificial Sequence
  Description of Artificial Sequence: Synthetic oligonucleotide
  Sense strand starting at position 763 of SEQ ID NO: 2264
cucuuccuguaggauuaaa

SEQ ID NO: 175629 - RNA, 19 nt, Artificial Sequence
  Description of Artificial Sequence: Synthetic oligonucleotide
  Antisense strand to SEQ ID NO: 175628
uuuaauccuacaggaagag

SEQ ID NO: 175630 - RNA, 19 nt, Artificial Sequence
  Description of Artificial Sequence: Synthetic oligonucleotide
  Sense strand starting at position 762 of SEQ ID NO: 2264
ucucuuccuguaggauuaa

SEQ ID NO: 175631 - RNA, 19 nt, Artificial Sequence
  Description of Artificial Sequence: Synthetic oligonucleotide
  Antisense strand to SEQ ID NO: 175630
uuaauccuacaggaagaga

SEQ ID NO: 175632 - RNA, 19 nt, Artificial Sequence
  Description of Artificial Sequence: Synthetic oligonucleotide
  Sense strand starting at position 760 of SEQ ID NO: 2264
ccucucuuccuguaggauu

SEQ ID NO: 175633 - RNA, 19 nt, Artificial Sequence
  Description of Artificial Sequence: Synthetic oligonucleotide
  Antisense strand to SEQ ID NO: 175632
aauccuacaggaagagagg

SEQ ID NO: 175634 - RNA, 19 nt, Artificial Sequence
  Description of Artificial Sequence: Synthetic oligonucleotide
  Sense strand starting at position 755 of SEQ ID NO: 2264
ggaguccucucuuccugua

SEQ ID NO: 175635 - RNA, 19 nt, Artificial Sequence
  Description of Artificial Sequence: Synthetic oligonucleotide
  Antisense strand to SEQ ID NO: 175634
uacaggaagagaggacucc

SEQ ID NO: 175636 - RNA, 19 nt, Artificial Sequence
  Description of Artificial Sequence: Synthetic oligonucleotide
  Sense strand starting at position 326 of SEQ ID NO: 2264
gugaguuaugaucgcacuc

SEQ ID NO: 175637 - RNA, 19 nt, Artificial Sequence
  Description of Artificial Sequence: Synthetic oligonucleotide
  Antisense strand to SEQ ID NO: 175636
gagugcgaucauaacucac

SEQ ID NO: 175638 - RNA, 19 nt, Artificial Sequence
  Description of Artificial Sequence: Synthetic oligonucleotide
  Sense strand starting at position 310 of SEQ ID NO: 2264
gagaguucaggcuguagug

SEQ ID NO: 175639 - RNA, 19 nt, Artificial Sequence
  Description of Artificial Sequence: Synthetic oligonucleotide
  Antisense strand to SEQ ID NO: 175638
cacuacagccugaacucuc

SEQ ID NO: 175640 - RNA, 19 nt, Artificial Sequence
  Description of Artificial Sequence: Synthetic oligonucleotide
  Sense strand starting at position 298 of SEQ ID NO: 2264
aagguuugguaugagaguu

SEQ ID NO: 175641 - RNA, 19 nt, Artificial Sequence
  Description of Artificial Sequence: Synthetic oligonucleotide
  Antisense strand to SEQ ID NO: 175640
aacucucauaccaaaccuu

SEQ ID NO: 175642 - RNA, 19 nt, Artificial Sequence
  Description of Artificial Sequence: Synthetic oligonucleotide
  Sense strand starting at position 297 of SEQ ID NO: 2264
aaagguuugguaugagagu

SEQ ID NO: 175643 - RNA, 19 nt, Artificial Sequence
  Description of Artificial Sequence: Synthetic oligonucleotide
  Antisense strand to SEQ ID NO: 175642
acucucauaccaaaccuuu

SEQ ID NO: 175644 - RNA, 19 nt, Artificial Sequence
  Description of Artificial Sequence: Synthetic oligonucleotide
  Sense strand starting at position 37 of SEQ ID NO: 2265
acuccauagucacuguaau

SEQ ID NO: 175645 - RNA, 19 nt, Artificial Sequence
  Description of Artificial Sequence: Synthetic oligonucleotide
  Antisense strand to SEQ ID NO: 175644
auuacagugacuauggagu

SEQ ID NO: 175646 - RNA, 19 nt, Artificial Sequence
  Description of Artificial Sequence: Synthetic oligonucleotide
  Sense strand starting at position 38 of SEQ ID NO: 2265
cuccauagucacuguaaug

SEQ ID NO: 175647 - RNA, 19 nt, Artificial Sequence
  Description of Artificial Sequence: Synthetic oligonucleotide
  Antisense strand to SEQ ID NO: 175646
cauuacagugacuauggag

SEQ ID NO: 175648 - RNA, 19 nt, Artificial Sequence
  Description of Artificial Sequence: Synthetic oligonucleotide
  Sense strand starting at position 63 of SEQ ID NO: 2265
cugccauuacuugagcaca

SEQ ID NO: 175649 - RNA, 19 nt, Artificial Sequence
  Description of Artificial Sequence: Synthetic oligonucleotide
  Antisense strand to SEQ ID NO: 175648
ugugcucaaguaauggcag

SEQ ID NO: 175650 - RNA, 19 nt, Artificial Sequence
  Description of Artificial Sequence: Synthetic oligonucleotide
  Sense strand starting at position 120 of SEQ ID NO: 2265
acacacuauccucgaaaga

SEQ ID NO: 175651 - RNA, 19 nt, Artificial Sequence
  Description of Artificial Sequence: Synthetic oligonucleotide
  Antisense strand to SEQ ID NO: 175650
ucuuucgaggauagugugu

SEQ ID NO: 175652 - RNA, 19 nt, Artificial Sequence
  Description of Artificial Sequence: Synthetic oligonucleotide
  Sense strand starting at position 139 of SEQ ID NO: 2265
acccuagaacuugguauga

SEQ ID NO: 175653 - RNA, 19 nt, Artificial Sequence
  Description of Artificial Sequence: Synthetic oligonucleotide
  Antisense strand to SEQ ID NO: 175652
ucauaccaaguucuagggu

SEQ ID NO: 175654 - RNA, 19 nt, Artificial Sequence
  Description of Artificial Sequence: Synthetic oligonucleotide
  Sense strand starting at position 1094 of SEQ ID NO: 2265
agaugaaccugcccaucau

SEQ ID NO: 175655 - RNA, 19 nt, Artificial Sequence
  Description of Artificial Sequence: Synthetic oligonucleotide
  Antisense strand to SEQ ID NO: 175654
augaugggcagguucaucu

SEQ ID NO: 175656 - RNA, 19 nt, Artificial Sequence
  Description of Artificial Sequence: Synthetic oligonucleotide
  Sense strand starting at position 1226 of SEQ ID NO: 2265
acgagcucucccgacagaa

SEQ ID NO: 175657 - RNA, 19 nt, Artificial Sequence
  Description of Artificial Sequence: Synthetic oligonucleotide
  Antisense strand to SEQ ID NO: 175656
uucugucgggagagcucgu

SEQ ID NO: 175658 - RNA, 19 nt, Artificial Sequence
  Description of Artificial Sequence: Synthetic oligonucleotide
  Sense strand starting at position 1228 of SEQ ID NO: 2265
gagcucucccgacagaaga

SEQ ID NO: 175659 - RNA, 19 nt, Artificial Sequence
  Description of Artificial Sequence: Synthetic oligonucleotide
  Antisense strand to SEQ ID NO: 175658
ucuucugucgggagagcuc

SEQ ID NO: 175660 - RNA, 19 nt, Artificial Sequence
  Description of Artificial Sequence: Synthetic oligonucleotide
  Sense strand starting at position 1279 of SEQ ID NO: 2265
cgcugagaugcggacagau

SEQ ID NO: 175661 - RNA, 19 nt, Artificial Sequence
  Description of Artificial Sequence: Synthetic oligonucleotide
  Antisense strand to SEQ ID NO: 175660
aucuguccgcaucucagcg

SEQ ID NO: 175662 - RNA, 19 nt, Artificial Sequence
  Description of Artificial Sequence: Synthetic oligonucleotide
  Sense strand starting at position 1748 of SEQ ID NO: 2265
agacgaugagcaugaaaua

SEQ ID NO: 175663 - RNA, 19 nt, Artificial Sequence
  Description of Artificial Sequence: Synthetic oligonucleotide
  Antisense strand to SEQ ID NO: 175662
uauuucaugcucaucgucu

SEQ ID NO: 175664 - RNA, 19 nt, Artificial Sequence
  Description of Artificial Sequence: Synthetic oligonucleotide
  Sense strand starting at position 1760 of SEQ ID NO: 2265
ugaaauacuuagcucaaug

SEQ ID NO: 175665 - RNA, 19 nt, Artificial Sequence
  Description of Artificial Sequence: Synthetic oligonucleotide
  Antisense strand to SEQ ID NO: 175664
cauugagcuaaguauuuca

SEQ ID NO: 175666 - RNA, 19 nt, Artificial Sequence
  Description of Artificial Sequence: Synthetic oligonucleotide
  Sense strand starting at position 1782 of SEQ ID NO: 2265
ggcacauaguucucaagaa

SEQ ID NO: 175667 - RNA, 19 nt, Artificial Sequence
  Description of Artificial Sequence: Synthetic oligonucleotide
  Antisense strand to SEQ ID NO: 175666
uucuugagaacuaugugcc

SEQ ID NO: 175668 - RNA, 19 nt, Artificial Sequence
  Description of Artificial Sequence: Synthetic oligonucleotide
  Sense strand starting at position 1803 of SEQ ID NO: 2265
uaggaauugcuaugaucag

SEQ ID NO: 175669 - RNA, 19 nt, Artificial Sequence
  Description of Artificial Sequence: Synthetic oligonucleotide
  Antisense strand to SEQ ID NO: 175668
cugaucauagcaauuccua

SEQ ID NO: 175670 - RNA, 19 nt, Artificial Sequence
  Description of Artificial Sequence: Synthetic oligonucleotide
  Sense strand starting at position 1815 of SEQ ID NO: 2265
ugaucagacuuacugguuu

SEQ ID NO: 175671 - RNA, 19 nt, Artificial Sequence
  Description of Artificial Sequence: Synthetic oligonucleotide
  Antisense strand to SEQ ID NO: 175670
aaaccaguaagucugauca

SEQ ID NO: 175672 - RNA, 19 nt, Artificial Sequence
  Description of Artificial Sequence: Synthetic oligonucleotide
  Sense strand starting at position 1819 of SEQ ID NO: 2265
cagacuuacugguuugaaa

SEQ ID NO: 175673 - RNA, 19 nt, Artificial Sequence
  Description of Artificial Sequence: Synthetic oligonucleotide
  Antisense strand to SEQ ID NO: 175672
uuucaaaccaguaagucug

SEQ ID NO: 175674 - RNA, 19 nt, Artificial Sequence
  Description of Artificial Sequence: Synthetic oligonucleotide
  Sense strand starting at position 1821 of SEQ ID NO: 2265
gacuuacugguuugaaaug

SEQ ID NO: 175675 - RNA, 19 nt, Artificial Sequence
  Description of Artificial Sequence: Synthetic oligonucleotide
  Antisense strand to SEQ ID NO: 175674
cauuucaaaccaguaaguc

SEQ ID NO: 175676 - RNA, 19 nt, Artificial Sequence
  Description of Artificial Sequence: Synthetic oligonucleotide
  Sense strand starting at position 1945 of SEQ ID NO: 2265
uacugacggucaucugaga

SEQ ID NO: 175677 - RNA, 19 nt, Artificial Sequence
  Description of Artificial Sequence: Synthetic oligonucleotide
  Antisense strand to SEQ ID NO: 175676
ucucagaugaccgucagua

SEQ ID NO: 175678 - RNA, 19 nt, Artificial Sequence
  Description of Artificial Sequence: Synthetic oligonucleotide
  Sense strand starting at position 1961 of SEQ ID NO: 2265
agaguuaucuuaccuguga

SEQ ID NO: 175679 - RNA, 19 nt, Artificial Sequence
  Description of Artificial Sequence: Synthetic oligonucleotide
  Antisense strand to SEQ ID NO: 175678
ucacagguaagauaacucu

SEQ ID NO: 175680 - RNA, 19 nt, Artificial Sequence
  Description of Artificial Sequence: Synthetic oligonucleotide
  Sense strand starting at position 1962 of SEQ ID NO: 2265
gaguuaucuuaccugugac

SEQ ID NO: 175681 - RNA, 19 nt, Artificial Sequence
  Description of Artificial Sequence: Synthetic oligonucleotide
  Antisense strand to SEQ ID NO: 175680
gucacagguaagauaacuc

SEQ ID NO: 175682 - RNA, 19 nt, Artificial Sequence
  Description of Artificial Sequence: Synthetic oligonucleotide
  Sense strand starting at position 1965 of SEQ ID NO: 2265
uuaucuuaccugugacauc

SEQ ID NO: 175683 - RNA, 19 nt, Artificial Sequence
  Description of Artificial Sequence: Synthetic oligonucleotide
  Antisense strand to SEQ ID NO: 175682
gaugucacagguaagauaa

SEQ ID NO: 175684 - RNA, 19 nt, Artificial Sequence
  Description of Artificial Sequence: Synthetic oligonucleotide
  Sense strand starting at position 1972 of SEQ ID NO: 2265
accugugacaucuguggga

SEQ ID NO: 175685 - RNA, 19 nt, Artificial Sequence
  Description of Artificial Sequence: Synthetic oligonucleotide
  Antisense strand to SEQ ID NO: 175684
ucccacagaugucacaggu

SEQ ID NO: 175686 - RNA, 19 nt, Artificial Sequence
  Description of Artificial Sequence: Synthetic oligonucleotide
  Sense strand starting at position 1974 of SEQ ID NO: 2265
cugugacaucugugggauc

SEQ ID NO: 175687 - RNA, 19 nt, Artificial Sequence
  Description of Artificial Sequence: Synthetic oligonucleotide
  Antisense strand to SEQ ID NO: 175686
gaucccacagaugucacag

SEQ ID NO: 175688 - RNA, 19 nt, Artificial Sequence
  Description of Artificial Sequence: Synthetic oligonucleotide
  Sense strand starting at position 2010 of SEQ ID NO: 2265
ggcagaaauuggcugaaug

SEQ ID NO: 175689 - RNA, 19 nt, Artificial Sequence
  Description of Artificial Sequence: Synthetic oligonucleotide
  Antisense strand to SEQ ID NO: 175688
cauucagccaauuucugcc

SEQ ID NO: 175690 - RNA, 19 nt, Artificial Sequence
  Description of Artificial Sequence: Synthetic oligonucleotide
  Sense strand starting at position 2011 of SEQ ID NO: 2265
gcagaaauuggcugaaugu

SEQ ID NO: 175691 - RNA, 19 nt, Artificial Sequence
  Description of Artificial Sequence: Synthetic oligonucleotide
  Antisense strand to SEQ ID NO: 175690
acauucagccaauuucugc

SEQ ID NO: 175692 - RNA, 19 nt, Artificial Sequence
  Description of Artificial Sequence: Synthetic oligonucleotide
  Sense strand starting at position 2120 of SEQ ID NO: 2265
ugguacucuguuuaacauu

SEQ ID NO: 175693 - RNA, 19 nt, Artificial Sequence
  Description of Artificial Sequence: Synthetic oligonucleotide
  Antisense strand to SEQ ID NO: 175692
aauguuaaacagaguacca

SEQ ID NO: 175694 - RNA, 19 nt, Artificial Sequence
  Description of Artificial Sequence: Synthetic oligonucleotide
  Sense strand starting at position 2204 of SEQ ID NO: 2265
gacauucuguaggcagaga

SEQ ID NO: 175695 - RNA, 19 nt, Artificial Sequence
  Description of Artificial Sequence: Synthetic oligonucleotide
  Antisense strand to SEQ ID NO: 175694
ucucugccuacagaauguc

SEQ ID NO: 175696 - RNA, 19 nt, Artificial Sequence
  Description of Artificial Sequence: Synthetic oligonucleotide
  Sense strand starting at position 2209 of SEQ ID NO: 2265
ucuguaggcagagacauua

SEQ ID NO: 175697 - RNA, 19 nt, Artificial Sequence
  Description of Artificial Sequence: Synthetic oligonucleotide
  Antisense strand to SEQ ID NO: 175696
uaaugucucugccuacaga

SEQ ID NO: 175698 - RNA, 19 nt, Artificial Sequence
  Description of Artificial Sequence: Synthetic oligonucleotide
  Sense strand starting at position 2249 of SEQ ID NO: 2265
uuaguuucccagcacagua

SEQ ID NO: 175699 - RNA, 19 nt, Artificial Sequence
  Description of Artificial Sequence: Synthetic oligonucleotide
  Antisense strand to SEQ ID NO: 175698
uacugugcugggaaacuaa

SEQ ID NO: 175700 - RNA, 19 nt, Artificial Sequence
  Description of Artificial Sequence: Synthetic oligonucleotide
  Sense strand starting at position 2301 of SEQ ID NO: 2265
acauaagagucuuuacuga

SEQ ID NO: 175701 - RNA, 19 nt, Artificial Sequence
  Description of Artificial Sequence: Synthetic oligonucleotide
  Antisense strand to SEQ ID NO: 175700
ucaguaaagacucuuaugu

SEQ ID NO: 175702 - RNA, 19 nt, Artificial Sequence
  Description of Artificial Sequence: Synthetic oligonucleotide
  Sense strand starting at position 2828 of SEQ ID NO: 2265
uagccaaagguguaauacu

SEQ ID NO: 175703 - RNA, 19 nt, Artificial Sequence
  Description of Artificial Sequence: Synthetic oligonucleotide
  Antisense strand to SEQ ID NO: 175702
aguauuacaccuuuggcua

SEQ ID NO: 175704 - RNA, 19 nt, Artificial Sequence
  Description of Artificial Sequence: Synthetic oligonucleotide
  Sense strand starting at position 3462 of SEQ ID NO: 2265
gauugacuauaggucuaau

SEQ ID NO: 175705 - RNA, 19 nt, Artificial Sequence
  Description of Artificial Sequence: Synthetic oligonucleotide
  Antisense strand to SEQ ID NO: 175704
auuagaccuauagucaauc

SEQ ID NO: 175706 - RNA, 19 nt, Artificial Sequence
  Description of Artificial Sequence: Synthetic oligonucleotide
  Sense strand starting at position 3465 of SEQ ID NO: 2265
ugacuauaggucuaaucuu

SEQ ID NO: 175707 - RNA, 19 nt, Artificial Sequence
  Description of Artificial Sequence: Synthetic oligonucleotide
  Antisense strand to SEQ ID NO: 175706
aagauuagaccuauaguca

SEQ ID NO: 175708 - RNA, 19 nt, Artificial Sequence
  Description of Artificial Sequence: Synthetic oligonucleotide
  Sense strand starting at position 3497 of SEQ ID NO: 2265
agcuaaauacuuugaggcu

SEQ ID NO: 175709 - RNA, 19 nt, Artificial Sequence
  Description of Artificial Sequence: Synthetic oligonucleotide
  Antisense strand to SEQ ID NO: 175708
agccucaaaguauuuagcu

SEQ ID NO: 175710 - RNA, 19 nt, Artificial Sequence
  Description of Artificial Sequence: Synthetic oligonucleotide
  Sense strand starting at position 3634 of SEQ ID NO: 2265
ggaaucucuuccgugggau

SEQ ID NO: 175711 - RNA, 19 nt, Artificial Sequence
  Description of Artificial Sequence: Synthetic oligonucleotide
  Antisense strand to SEQ ID NO: 175710
aucccacggaagagauucc

SEQ ID NO: 175712 - RNA, 19 nt, Artificial Sequence
  Description of Artificial Sequence: Synthetic oligonucleotide
  Sense strand starting at position 3635 of SEQ ID NO: 2265
gaaucucuuccgugggaua

SEQ ID NO: 175713 - RNA, 19 nt, Artificial Sequence
  Description of Artificial Sequence: Synthetic oligonucleotide
  Antisense strand to SEQ ID NO: 175712
uaucccacggaagagauuc

SEQ ID NO: 175714 - RNA, 19 nt, Artificial Sequence
  Description of Artificial Sequence: Synthetic oligonucleotide
  Sense strand starting at position 3636 of SEQ ID NO: 2265
aaucucuuccgugggauau

SEQ ID NO: 175715 - RNA, 19 nt, Artificial Sequence
  Description of Artificial Sequence: Synthetic oligonucleotide
  Antisense strand to SEQ ID NO: 175714
auaucccacggaagagauu

SEQ ID NO: 175716 - RNA, 19 nt, Artificial Sequence
  Description of Artificial Sequence: Synthetic oligonucleotide
  Sense strand starting at position 3735 of SEQ ID NO: 2265
acuaguagucacuauuaga

SEQ ID NO: 175717 - RNA, 19 nt, Artificial Sequence
  Description of Artificial Sequence: Synthetic oligonucleotide
  Antisense strand to SEQ ID NO: 175716
ucuaauagugacuacuagu

SEQ ID NO: 175718 - RNA, 19 nt, Artificial Sequence
  Description of Artificial Sequence: Synthetic oligonucleotide
  Sense strand starting at position 3764 of SEQ ID NO: 2265
gcuugugaugucaguaggu

SEQ ID NO: 175719 - RNA, 19 nt, Artificial Sequence
  Description of Artificial Sequence: Synthetic oligonucleotide
  Antisense strand to SEQ ID NO: 175718
accuacugacaucacaagc

SEQ ID NO: 175720 - RNA, 19 nt, Artificial Sequence
  Description of Artificial Sequence: Synthetic oligonucleotide
  Sense strand starting at position 3975 of SEQ ID NO: 2265
ugcuaaggcuuaucaauag

SEQ ID NO: 175721 - RNA, 19 nt, Artificial Sequence
  Description of Artificial Sequence: Synthetic oligonucleotide
  Antisense strand to SEQ ID NO: 175720
cuauugauaagccuuagca

SEQ ID NO: 175722 - RNA, 19 nt, Artificial Sequence
  Description of Artificial Sequence: Synthetic oligonucleotide
  Sense strand starting at position 3979 of SEQ ID NO: 2265
aaggcuuaucaauaguugu

SEQ ID NO: 175723 - RNA, 19 nt, Artificial Sequence
  Description of Artificial Sequence: Synthetic oligonucleotide
  Antisense strand to SEQ ID NO: 175722
acaacuauugauaagccuu

SEQ ID NO: 175724 - RNA, 19 nt, Artificial Sequence
  Description of Artificial Sequence: Synthetic oligonucleotide
  Sense strand starting at position 80 of SEQ ID NO: 2266
cuggguuaucuuuagaggu

SEQ ID NO: 175725 - RNA, 19 nt, Artificial Sequence
  Description of Artificial Sequence: Synthetic oligonucleotide
  Antisense strand to SEQ ID NO: 175724
accucuaaagauaacccag

SEQ ID NO: 175726 - RNA, 19 nt, Artificial Sequence
  Description of Artificial Sequence: Synthetic oligonucleotide
  Sense strand starting at position 84 of SEQ ID NO: 2266
guuaucuuuagagguagaa

SEQ ID NO: 175727 - RNA, 19 nt, Artificial Sequence
  Description of Artificial Sequence: Synthetic oligonucleotide
  Antisense strand to SEQ ID NO: 175726
uucuaccucuaaagauaac

SEQ ID NO: 175728 - RNA, 19 nt, Artificial Sequence
  Description of Artificial Sequence: Synthetic oligonucleotide
  Sense strand starting at position 149 of SEQ ID NO: 2266
gcucaaacacaugggauua

SEQ ID NO: 175729 - RNA, 19 nt, Artificial Sequence
  Description of Artificial Sequence: Synthetic oligonucleotide
  Antisense strand to SEQ ID NO: 175728
uaaucccauguguuugagc

SEQ ID NO: 175730 - RNA, 19 nt, Artificial Sequence
  Description of Artificial Sequence: Synthetic oligonucleotide
  Sense strand starting at position 151 of SEQ ID NO: 2266
ucaaacacaugggauuaau

SEQ ID NO: 175731 - RNA, 19 nt, Artificial Sequence
  Description of Artificial Sequence: Synthetic oligonucleotide
  Antisense strand to SEQ ID NO: 175730
auuaaucccauguguuuga

SEQ ID NO: 175732 - RNA, 19 nt, Artificial Sequence
  Description of Artificial Sequence: Synthetic oligonucleotide
  Sense strand starting at position 187 of SEQ ID NO: 2266
agaggugucccagaugauc

SEQ ID NO: 175733 - RNA, 19 nt, Artificial Sequence
  Description of Artificial Sequence: Synthetic oligonucleotide
  Antisense strand to SEQ ID NO: 175732
gaucaucugggacaccucu

SEQ ID NO: 175734 - RNA, 19 nt, Artificial Sequence
  Description of Artificial Sequence: Synthetic oligonucleotide
  Sense strand starting at position 280 of SEQ ID NO: 2266
uccugagucauauguagga

SEQ ID NO: 175735 - RNA, 19 nt, Artificial Sequence
  Description of Artificial Sequence: Synthetic oligonucleotide
  Antisense strand to SEQ ID NO: 175734
uccuacauaugacucagga

SEQ ID NO: 175736 - RNA, 19 nt, Artificial Sequence
  Description of Artificial Sequence: Synthetic oligonucleotide
  Sense strand starting at position 328 of SEQ ID NO: 2266
aggguuaucuggcuaauua

SEQ ID NO: 175737 - RNA, 19 nt, Artificial Sequence
  Description of Artificial Sequence: Synthetic oligonucleotide
  Antisense strand to SEQ ID NO: 175736
uaauuagccagauaacccu

SEQ ID NO: 175738 - RNA, 19 nt, Artificial Sequence
  Description of Artificial Sequence: Synthetic oligonucleotide
  Sense strand starting at position 329 of SEQ ID NO: 2266
ggguuaucuggcuaauuaa

SEQ ID NO: 175739 - RNA, 19 nt, Artificial Sequence
  Description of Artificial Sequence: Synthetic oligonucleotide
  Antisense strand to SEQ ID NO: 175738
uuaauuagccagauaaccc

SEQ ID NO: 175740 - RNA, 19 nt, Artificial Sequence
  Description of Artificial Sequence: Synthetic oligonucleotide
  Sense strand starting at position 494 of SEQ ID NO: 2266
ucauacauuucuugagaga

SEQ ID NO: 175741 - RNA, 19 nt, Artificial Sequence
  Description of Artificial Sequence: Synthetic oligonucleotide
  Antisense strand to SEQ ID NO: 175740
ucucucaagaaauguauga

SEQ ID NO: 175742 - RNA, 19 nt, Artificial Sequence
  Description of Artificial Sequence: Synthetic oligonucleotide
  Sense strand starting at position 497 of SEQ ID NO: 2266
uacauuucuugagagagca

SEQ ID NO: 175743 - RNA, 19 nt, Artificial Sequence
  Description of Artificial Sequence: Synthetic oligonucleotide
  Antisense strand to SEQ ID NO: 175742
ugcucucucaagaaaugua

SEQ ID NO: 175744 - RNA, 19 nt, Artificial Sequence
  Description of Artificial Sequence: Synthetic oligonucleotide
  Sense strand starting at position 681 of SEQ ID NO: 2266
ucuuaagugguagaacuau

SEQ ID NO: 175745 - RNA, 19 nt, Artificial Sequence
  Description of Artificial Sequence: Synthetic oligonucleotide
  Antisense strand to SEQ ID NO: 175744
auaguucuaccacuuaaga

SEQ ID NO: 175746 - RNA, 19 nt, Artificial Sequence
  Description of Artificial Sequence: Synthetic oligonucleotide
  Sense strand starting at position 687 of SEQ ID NO: 2266
gugguagaacuauaucuuu

SEQ ID NO: 175747 - RNA, 19 nt, Artificial Sequence
  Description of Artificial Sequence: Synthetic oligonucleotide
  Antisense strand to SEQ ID NO: 175746
aaagauauaguucuaccac

SEQ ID NO: 175748 - RNA, 19 nt, Artificial Sequence
  Description of Artificial Sequence: Synthetic oligonucleotide
  Sense strand starting at position 690 of SEQ ID NO: 2266
guagaacuauaucuuugaa

SEQ ID NO: 175749 - RNA, 19 nt, Artificial Sequence
  Description of Artificial Sequence: Synthetic oligonucleotide
  Antisense strand to SEQ ID NO: 175748
uucaaagauauaguucuac

SEQ ID NO: 175750 - RNA, 19 nt, Artificial Sequence
  Description of Artificial Sequence: Synthetic oligonucleotide
  Sense strand starting at position 704 of SEQ ID NO: 2266
uugaaaucuuugcugguca

SEQ ID NO: 175751 - RNA, 19 nt, Artificial Sequence
  Description of Artificial Sequence: Synthetic oligonucleotide
  Antisense strand to SEQ ID NO: 175750
ugaccagcaaagauuucaa

SEQ ID NO: 175752 - RNA, 19 nt, Artificial Sequence
  Description of Artificial Sequence: Synthetic oligonucleotide
  Sense strand starting at position 716 of SEQ ID NO: 2266
cuggucaguucccuuaaga

SEQ ID NO: 175753 - RNA, 19 nt, Artificial Sequence
  Description of Artificial Sequence: Synthetic oligonucleotide
  Antisense strand to SEQ ID NO: 175752
ucuuaagggaacugaccag

SEQ ID NO: 175754 - RNA, 19 nt, Artificial Sequence
  Description of Artificial Sequence: Synthetic oligonucleotide
  Sense strand starting at position 762 of SEQ ID NO: 2266
ucuuucucagauggacaua

SEQ ID NO: 175755 - RNA, 19 nt, Artificial Sequence
  Description of Artificial Sequence: Synthetic oligonucleotide
  Antisense strand to SEQ ID NO: 175754
uauguccaucugagaaaga

SEQ ID NO: 175756 - RNA, 19 nt, Artificial Sequence
  Description of Artificial Sequence: Synthetic oligonucleotide
  Sense strand starting at position 886 of SEQ ID NO: 2266
cguaguuaacugugaggaa

SEQ ID NO: 175757 - RNA, 19 nt, Artificial Sequence
  Description of Artificial Sequence: Synthetic oligonucleotide
  Antisense strand to SEQ ID NO: 175756
uuccucacaguuaacuacg

SEQ ID NO: 175758 - RNA, 19 nt, Artificial Sequence
  Description of Artificial Sequence: Synthetic oligonucleotide
  Sense strand starting at position 978 of SEQ ID NO: 2266
ccugcaucucaaugggaaa

SEQ ID NO: 175759 - RNA, 19 nt, Artificial Sequence
  Description of Artificial Sequence: Synthetic oligonucleotide
  Antisense strand to SEQ ID NO: 175758
uuucccauugagaugcagg

SEQ ID NO: 175760 - RNA, 19 nt, Artificial Sequence
  Description of Artificial Sequence: Synthetic oligonucleotide
  Sense strand starting at position 1545 of SEQ ID NO: 2266
aacagaguucugcagcuaa

SEQ ID NO: 175761 - RNA, 19 nt, Artificial Sequence
  Description of Artificial Sequence: Synthetic oligonucleotide
  Antisense strand to SEQ ID NO: 175760
uuagcugcagaacucuguu

SEQ ID NO: 175762 - RNA, 19 nt, Artificial Sequence
  Description of Artificial Sequence: Synthetic oligonucleotide
  Sense strand starting at position 1616 of SEQ ID NO: 2266
acgccaugucaugacaaua

SEQ ID NO: 175763 - RNA, 19 nt, Artificial Sequence
  Description of Artificial Sequence: Synthetic oligonucleotide
  Antisense strand to SEQ ID NO: 175762
uauugucaugacauggcgu

SEQ ID NO: 175764 - RNA, 19 nt, Artificial Sequence
  Description of Artificial Sequence: Synthetic oligonucleotide
  Sense strand starting at position 1772 of SEQ ID NO: 2266
ccuuaccucuaauuggaga

SEQ ID NO: 175765 - RNA, 19 nt, Artificial Sequence
  Description of Artificial Sequence: Synthetic oligonucleotide
  Antisense strand to SEQ ID NO: 175764
ucuccaauuagagguaagg

SEQ ID NO: 175766 - RNA, 19 nt, Artificial Sequence
  Description of Artificial Sequence: Synthetic oligonucleotide
  Sense strand starting at position 1862 of SEQ ID NO: 2266
ccaggaugaucucugagcu

SEQ ID NO: 175767 - RNA, 19 nt, Artificial Sequence
  Description of Artificial Sequence: Synthetic oligonucleotide
  Antisense strand to SEQ ID NO: 175766
agcucagagaucauccugg

SEQ ID NO: 175768 - RNA, 19 nt, Artificial Sequence
  Description of Artificial Sequence: Synthetic oligonucleotide
  Sense strand starting at position 1879 of SEQ ID NO: 2266
cuccuugaguucuugaaug

SEQ ID NO: 175769 - RNA, 19 nt, Artificial Sequence
  Description of Artificial Sequence: Synthetic oligonucleotide
  Antisense strand to SEQ ID NO: 175768
cauucaagaacucaaggag

SEQ ID NO: 175770 - RNA, 19 nt, Artificial Sequence
  Description of Artificial Sequence: Synthetic oligonucleotide
  Sense strand starting at position 1884 of SEQ ID NO: 2266
ugaguucuugaauggcuua

SEQ ID NO: 175771 - RNA, 19 nt, Artificial Sequence
  Description of Artificial Sequence: Synthetic oligonucleotide
  Antisense strand to SEQ ID NO: 175770
uaagccauucaagaacuca

SEQ ID NO: 175772 - RNA, 19 nt, Artificial Sequence
  Description of Artificial Sequence: Synthetic oligonucleotide
  Sense strand starting at position 1887 of SEQ ID NO: 2266
guucuugaauggcuuaaag

SEQ ID NO: 175773 - RNA, 19 nt, Artificial Sequence
  Description of Artificial Sequence: Synthetic oligonucleotide
  Antisense strand to SEQ ID NO: 175772
cuuuaagccauucaagaac

SEQ ID NO: 175774 - RNA, 19 nt, Artificial Sequence
  Description of Artificial Sequence: Synthetic oligonucleotide
  Sense strand starting at position 2008 of SEQ ID NO: 2266
gcaauaugguaauuaguag

SEQ ID NO: 175775 - RNA, 19 nt, Artificial Sequence
  Description of Artificial Sequence: Synthetic oligonucleotide
  Antisense strand to SEQ ID NO: 175774
cuacuaauuaccauauugc

SEQ ID NO: 175776 - RNA, 19 nt, Artificial Sequence
  Description of Artificial Sequence: Synthetic oligonucleotide
  Sense strand starting at position 2019 of SEQ ID NO: 2266
auuaguaguggguguggaa

SEQ ID NO: 175777 - RNA, 19 nt, Artificial Sequence
  Description of Artificial Sequence: Synthetic oligonucleotide
  Antisense strand to SEQ ID NO: 175776
uuccacacccacuacuaau

SEQ ID NO: 175778 - RNA, 19 nt, Artificial Sequence
  Description of Artificial Sequence: Synthetic oligonucleotide
  Sense strand starting at position 2413 of SEQ ID NO: 2266
aggcuaggaucucuaguuu

SEQ ID NO: 175779 - RNA, 19 nt, Artificial Sequence
  Description of Artificial Sequence: Synthetic oligonucleotide
  Antisense strand to SEQ ID NO: 175778
aaacuagagauccuagccu

SEQ ID NO: 175780 - RNA, 19 nt, Artificial Sequence
  Description of Artificial Sequence: Synthetic oligonucleotide
  Sense strand starting at position 2417 of SEQ ID NO: 2266
uaggaucucuaguuuggaa

SEQ ID NO: 175781 - RNA, 19 nt, Artificial Sequence
  Description of Artificial Sequence: Synthetic oligonucleotide
  Antisense strand to SEQ ID NO: 175780
uuccaaacuagagauccua

SEQ ID NO: 175782 - RNA, 19 nt, Artificial Sequence
  Description of Artificial Sequence: Synthetic oligonucleotide
  Sense strand starting at position 2686 of SEQ ID NO: 2266
cuaguucuggcauaagaag

SEQ ID NO: 175783 - RNA, 19 nt, Artificial Sequence
  Description of Artificial Sequence: Synthetic oligonucleotide
  Antisense strand to SEQ ID NO: 175782
cuucuuaugccagaacuag

SEQ ID NO: 175784 - RNA, 19 nt, Artificial Sequence
  Description of Artificial Sequence: Synthetic oligonucleotide
  Sense strand starting at position 2836 of SEQ ID NO: 2266
gaagucuccugguucuaug

SEQ ID NO: 175785 - RNA, 19 nt, Artificial Sequence
  Description of Artificial Sequence: Synthetic oligonucleotide
  Antisense strand to SEQ ID NO: 175784
cauagaaccaggagacuuc

SEQ ID NO: 175786 - RNA, 19 nt, Artificial Sequence
  Description of Artificial Sequence: Synthetic oligonucleotide
  Sense strand starting at position 3062 of SEQ ID NO: 2266
guuagauuaucucuucucu

SEQ ID NO: 175787 - RNA, 19 nt, Artificial Sequence
  Description of Artificial Sequence: Synthetic oligonucleotide
  Antisense strand to SEQ ID NO: 175786
agagaagagauaaucuaac

SEQ ID NO: 175788 - RNA, 19 nt, Artificial Sequence
  Description of Artificial Sequence: Synthetic oligonucleotide
  Sense strand starting at position 3085 of SEQ ID NO: 2266
ucuuuagcgauguagugaa

SEQ ID NO: 175789 - RNA, 19 nt, Artificial Sequence
  Description of Artificial Sequence: Synthetic oligonucleotide
  Antisense strand to SEQ ID NO: 175788
uucacuacaucgcuaaaga

SEQ ID NO: 175790 - RNA, 19 nt, Artificial Sequence
  Description of Artificial Sequence: Synthetic oligonucleotide
  Sense strand starting at position 3353 of SEQ ID NO: 2266
cugguuaaugauggaguga

SEQ ID NO: 175791 - RNA, 19 nt, Artificial Sequence
  Description of Artificial Sequence: Synthetic oligonucleotide
  Antisense strand to SEQ ID NO: 175790
ucacuccaucauuaaccag

SEQ ID NO: 175792 - RNA, 19 nt, Artificial Sequence
  Description of Artificial Sequence: Synthetic oligonucleotide
  Sense strand starting at position 3584 of SEQ ID NO: 2266
gcugcaaugcagggauaaa

SEQ ID NO: 175793 - RNA, 19 nt, Artificial Sequence
  Description of Artificial Sequence: Synthetic oligonucleotide
  Antisense strand to SEQ ID NO: 175792
uuuaucccugcauugcagc

SEQ ID NO: 175794 - RNA, 19 nt, Artificial Sequence
  Description of Artificial Sequence: Synthetic oligonucleotide
  Sense strand starting at position 3625 of SEQ ID NO: 2266
gacugaugccuugauccca

SEQ ID NO: 175795 - RNA, 19 nt, Artificial Sequence
  Description of Artificial Sequence: Synthetic oligonucleotide
  Antisense strand to SEQ ID NO: 175794
ugggaucaaggcaucaguc

SEQ ID NO: 175796 - RNA, 19 nt, Artificial Sequence
  Description of Artificial Sequence: Synthetic oligonucleotide
  Sense strand starting at position 3707 of SEQ ID NO: 2266
guuaaauuauguccuuccu

SEQ ID NO: 175797 - RNA, 19 nt, Artificial Sequence
  Description of Artificial Sequence: Synthetic oligonucleotide
  Antisense strand to SEQ ID NO: 175796
aggaaggacauaauuuaac

SEQ ID NO: 175798 - RNA, 19 nt, Artificial Sequence
  Description of Artificial Sequence: Synthetic oligonucleotide
  Sense strand starting at position 3864 of SEQ ID NO: 2266
acuguuaggcccuggaaua

SEQ ID NO: 175799 - RNA, 19 nt, Artificial Sequence
  Description of Artificial Sequence: Synthetic oligonucleotide
  Antisense strand to SEQ ID NO: 175798
uauuccagggccuaacagu

SEQ ID NO: 175800 - RNA, 19 nt, Artificial Sequence
  Description of Artificial Sequence: Synthetic oligonucleotide
  Sense strand starting at position 3865 of SEQ ID NO: 2266
cuguuaggcccuggaauau

SEQ ID NO: 175801 - RNA, 19 nt, Artificial Sequence
  Description of Artificial Sequence: Synthetic oligonucleotide
  Antisense strand to SEQ ID NO: 175800
auauuccagggccuaacag

SEQ ID NO: 175802 - RNA, 19 nt, Artificial Sequence
  Description of Artificial Sequence: Synthetic oligonucleotide
  Sense strand starting at position 3903 of SEQ ID NO: 2266
uuaugacaguaucuuaaga

SEQ ID NO: 175803 - RNA, 19 nt, Artificial Sequence
  Description of Artificial Sequence: Synthetic oligonucleotide
  Antisense strand to SEQ ID NO: 175802
ucuuaagauacugucauaa

SEQ ID NO: 175804 - RNA, 19 nt, Artificial Sequence
  Description of Artificial Sequence: Synthetic oligonucleotide
  Sense strand starting at position 160 of SEQ ID NO: 2268
auaaguaggaauugcugaa

SEQ ID NO: 175805 - RNA, 19 nt, Artificial Sequence
  Description of Artificial Sequence: Synthetic oligonucleotide
  Antisense strand to SEQ ID NO: 175804
uucagcaauuccuacuuau

SEQ ID NO: 175806 - RNA, 19 nt, Artificial Sequence
  Description of Artificial Sequence: Synthetic oligonucleotide
  Sense strand starting at position 200 of SEQ ID NO: 2268
ggucuuugagcaugaugau

SEQ ID NO: 175807 - RNA, 19 nt, Artificial Sequence
  Description of Artificial Sequence: Synthetic oligonucleotide
  Antisense strand to SEQ ID NO: 175806
aucaucaugcucaaagacc

SEQ ID NO: 175808 - RNA, 19 nt, Artificial Sequence
  Description of Artificial Sequence: Synthetic oligonucleotide
  Sense strand starting at position 313 of SEQ ID NO: 2268
gcugaaguuccagguaaga

SEQ ID NO: 175809 - RNA, 19 nt, Artificial Sequence
  Description of Artificial Sequence: Synthetic oligonucleotide
  Antisense strand to SEQ ID NO: 175808
ucuuaccuggaacuucagc

SEQ ID NO: 175810 - RNA, 19 nt, Artificial Sequence
  Description of Artificial Sequence: Synthetic oligonucleotide
  Sense strand starting at position 332 of SEQ ID NO: 2268
cuggaagccugacaauuua

SEQ ID NO: 175811 - RNA, 19 nt, Artificial Sequence
  Description of Artificial Sequence: Synthetic oligonucleotide
  Antisense strand to SEQ ID NO: 175810
uaaauugucaggcuuccag

SEQ ID NO: 175812 - RNA, 19 nt, Artificial Sequence
  Description of Artificial Sequence: Synthetic oligonucleotide
  Sense strand starting at position 483 of SEQ ID NO: 2268
gcuaauccagaauagguua

SEQ ID NO: 175813 - RNA, 19 nt, Artificial Sequence
  Description of Artificial Sequence: Synthetic oligonucleotide
  Antisense strand to SEQ ID NO: 175812
uaaccuauucuggauuagc

SEQ ID NO: 175814 - RNA, 19 nt, Artificial Sequence
  Description of Artificial Sequence: Synthetic oligonucleotide
  Sense strand starting at position 788 of SEQ ID NO: 2268
guggguagggucuaacuuu

SEQ ID NO: 175815 - RNA, 19 nt, Artificial Sequence
  Description of Artificial Sequence: Synthetic oligonucleotide
  Antisense strand to SEQ ID NO: 175814
aaaguuagacccuacccac

SEQ ID NO: 175816 - RNA, 19 nt, Artificial Sequence
  Description of Artificial Sequence: Synthetic oligonucleotide
  Sense strand starting at position 837 of SEQ ID NO: 2268
gcauuuccugcauguagau

SEQ ID NO: 175817 - RNA, 19 nt, Artificial Sequence
  Description of Artificial Sequence: Synthetic oligonucleotide
  Antisense strand to SEQ ID NO: 175816
aucuacaugcaggaaaugc

SEQ ID NO: 175818 - RNA, 19 nt, Artificial Sequence
  Description of Artificial Sequence: Synthetic oligonucleotide
  Sense strand starting at position 857 of SEQ ID NO: 2268
gaccuaacccagugaugag

SEQ ID NO: 175819 - RNA, 19 nt, Artificial Sequence
  Description of Artificial Sequence: Synthetic oligonucleotide
  Antisense strand to SEQ ID NO: 175818
cucaucacuggguuagguc

SEQ ID NO: 175820 - RNA, 19 nt, Artificial Sequence
  Description of Artificial Sequence: Synthetic oligonucleotide
  Sense strand starting at position 936 of SEQ ID NO: 2268
guagcuauaucuguauuua

SEQ ID NO: 175821 - RNA, 19 nt, Artificial Sequence
  Description of Artificial Sequence: Synthetic oligonucleotide
  Antisense strand to SEQ ID NO: 175820
uaaauacagauauagcuac

SEQ ID NO: 175822 - RNA, 19 nt, Artificial Sequence
  Description of Artificial Sequence: Synthetic oligonucleotide
  Sense strand starting at position 1077 of SEQ ID NO: 2268
uggguaaauggugagcauu

SEQ ID NO: 175823 - RNA, 19 nt, Artificial Sequence
  Description of Artificial Sequence: Synthetic oligonucleotide
  Antisense strand to SEQ ID NO: 175822
aaugcucaccauuuaccca

SEQ ID NO: 175824 - RNA, 19 nt, Artificial Sequence
  Description of Artificial Sequence: Synthetic oligonucleotide
  Sense strand starting at position 1223 of SEQ ID NO: 2268
aacaguauuguagaugagu

SEQ ID NO: 175825 - RNA, 19 nt, Artificial Sequence
  Description of Artificial Sequence: Synthetic oligonucleotide
  Antisense strand to SEQ ID NO: 175824
acucaucuacaauacuguu

SEQ ID NO: 175826 - RNA, 19 nt, Artificial Sequence
  Description of Artificial Sequence: Synthetic oligonucleotide
  Sense strand starting at position 1743 of SEQ ID NO: 2268
gaucacucaccaugagguu

SEQ ID NO: 175827 - RNA, 19 nt, Artificial Sequence
  Description of Artificial Sequence: Synthetic oligonucleotide
  Antisense strand to SEQ ID NO: 175826
aaccucauggugagugauc

SEQ ID NO: 175828 - RNA, 19 nt, Artificial Sequence
  Description of Artificial Sequence: Synthetic oligonucleotide
  Sense strand starting at position 1756 of SEQ ID NO: 2268
gagguuuaguguccuagaa

SEQ ID NO: 175829 - RNA, 19 nt, Artificial Sequence
  Description of Artificial Sequence: Synthetic oligonucleotide
  Antisense strand to SEQ ID NO: 175828
uucuaggacacuaaaccuc

SEQ ID NO: 175830 - RNA, 19 nt, Artificial Sequence
  Description of Artificial Sequence: Synthetic oligonucleotide
  Sense strand starting at position 1760 of SEQ ID NO: 2268
uuuaguguccuagaaacca

SEQ ID NO: 175831 - RNA, 19 nt, Artificial Sequence
  Description of Artificial Sequence: Synthetic oligonucleotide
  Antisense strand to SEQ ID NO: 175830
ugguuucuaggacacuaaa

SEQ ID NO: 175832 - RNA, 19 nt, Artificial Sequence
  Description of Artificial Sequence: Synthetic oligonucleotide
  Sense strand starting at position 1824 of SEQ ID NO: 2268
cuggaugacuuguuggaaa

SEQ ID NO: 175833 - RNA, 19 nt, Artificial Sequence
  Description of Artificial Sequence: Synthetic oligonucleotide
  Antisense strand to SEQ ID NO: 175832
uuuccaacaagucauccag

SEQ ID NO: 175834 - RNA, 19 nt, Artificial Sequence
  Description of Artificial Sequence: Synthetic oligonucleotide
  Sense strand starting at position 1871 of SEQ ID NO: 2268
ggauauugauaguccaaug

SEQ ID NO: 175835 - RNA, 19 nt, Artificial Sequence
  Description of Artificial Sequence: Synthetic oligonucleotide
  Antisense strand to SEQ ID NO: 175834
cauuggacuaucaauaucc

SEQ ID NO: 175836 - RNA, 19 nt, Artificial Sequence
  Description of Artificial Sequence: Synthetic oligonucleotide
  Sense strand starting at position 1945 of SEQ ID NO: 2268
cucagagccguugugcaau

SEQ ID NO: 175837 - RNA, 19 nt, Artificial Sequence
  Description of Artificial Sequence: Synthetic oligonucleotide
  Antisense strand to SEQ ID NO: 175836
auugcacaacggcucugag

SEQ ID NO: 175838 - RNA, 19 nt, Artificial Sequence
  Description of Artificial Sequence: Synthetic oligonucleotide
  Sense strand starting at position 1951 of SEQ ID NO: 2268
gccguugugcaaucaguua

SEQ ID NO: 175839 - RNA, 19 nt, Artificial Sequence
  Description of Artificial Sequence: Synthetic oligonucleotide
  Antisense strand to SEQ ID NO: 175838
uaacugauugcacaacggc

SEQ ID NO: 175840 - RNA, 19 nt, Artificial Sequence
  Description of Artificial Sequence: Synthetic oligonucleotide
  Sense strand starting at position 1963 of SEQ ID NO: 2268
ucaguuagccuugaaugga

SEQ ID NO: 175841 - RNA, 19 nt, Artificial Sequence
  Description of Artificial Sequence: Synthetic oligonucleotide
  Antisense strand to SEQ ID NO: 175840
uccauucaaggcuaacuga

SEQ ID NO: 175842 - RNA, 19 nt, Artificial Sequence
  Description of Artificial Sequence: Synthetic oligonucleotide
  Sense strand starting at position 1980 of SEQ ID NO: 2268
gagccauguguccuguguu

SEQ ID NO: 175843 - RNA, 19 nt, Artificial Sequence
  Description of Artificial Sequence: Synthetic oligonucleotide
  Antisense strand to SEQ ID NO: 175842
aacacaggacacauggcuc

SEQ ID NO: 175844 - RNA, 19 nt, Artificial Sequence
  Description of Artificial Sequence: Synthetic oligonucleotide
  Sense strand starting at position 2086 of SEQ ID NO: 2268
gcuguucuauauuugguua

SEQ ID NO: 175845 - RNA, 19 nt, Artificial Sequence
  Description of Artificial Sequence: Synthetic oligonucleotide
  Antisense strand to SEQ ID NO: 175844
uaaccaaauauagaacagc

SEQ ID NO: 175846 - RNA, 19 nt, Artificial Sequence
  Description of Artificial Sequence: Synthetic oligonucleotide
  Sense strand starting at position 2242 of SEQ ID NO: 2268
caaagaguucugcgagaag

SEQ ID NO: 175847 - RNA, 19 nt, Artificial Sequence
  Description of Artificial Sequence: Synthetic oligonucleotide
  Antisense strand to SEQ ID NO: 175846
cuucucgcagaacucuuug

SEQ ID NO: 175848 - RNA, 19 nt, Artificial Sequence
  Description of Artificial Sequence: Synthetic oligonucleotide
  Sense strand starting at position 2245 of SEQ ID NO: 2268
agaguucugcgagaagaca

SEQ ID NO: 175849 - RNA, 19 nt, Artificial Sequence
  Description of Artificial Sequence: Synthetic oligonucleotide
  Antisense strand to SEQ ID NO: 175848
ugucuucucgcagaacucu

SEQ ID NO: 175850 - RNA, 19 nt, Artificial Sequence
  Description of Artificial Sequence: Synthetic oligonucleotide
  Sense strand starting at position 2269 of SEQ ID NO: 2268
guguggugugaugaggaga

SEQ ID NO: 175851 - RNA, 19 nt, Artificial Sequence
  Description of Artificial Sequence: Synthetic oligonucleotide
  Antisense strand to SEQ ID NO: 175850
ucuccucaucacaccacac

SEQ ID NO: 175852 - RNA, 19 nt, Artificial Sequence
  Description of Artificial Sequence: Synthetic oligonucleotide
  Sense strand starting at position 2309 of SEQ ID NO: 2268
cacuguucugcagaccuga

SEQ ID NO: 175853 - RNA, 19 nt, Artificial Sequence
  Description of Artificial Sequence: Synthetic oligonucleotide
  Antisense strand to SEQ ID NO: 175852
ucaggucugcagaacagug

SEQ ID NO: 175854 - RNA, 19 nt, Artificial Sequence
  Description of Artificial Sequence: Synthetic oligonucleotide
  Sense strand starting at position 2376 of SEQ ID NO: 2268
gugguacagugaucauaac

SEQ ID NO: 175855 - RNA, 19 nt, Artificial Sequence
  Description of Artificial Sequence: Synthetic oligonucleotide
  Antisense strand to SEQ ID NO: 175854
guuaugaucacuguaccac

SEQ ID NO: 175856 - RNA, 19 nt, Artificial Sequence
  Description of Artificial Sequence: Synthetic oligonucleotide
  Sense strand starting at position 2499 of SEQ ID NO: 2268
ggaggugcuuaaucucaga

SEQ ID NO: 175857 - RNA, 19 nt, Artificial Sequence
  Description of Artificial Sequence: Synthetic oligonucleotide
  Antisense strand to SEQ ID NO: 175856
ucugagauuaagcaccucc

SEQ ID NO: 175858 - RNA, 19 nt, Artificial Sequence
  Description of Artificial Sequence: Synthetic oligonucleotide
  Sense strand starting at position 2528 of SEQ ID NO: 2268
agaaaucaguuuguauuac

SEQ ID NO: 175859 - RNA, 19 nt, Artificial Sequence
  Description of Artificial Sequence: Synthetic oligonucleotide
  Antisense strand to SEQ ID NO: 175858
guaauacaaacugauuucu

SEQ ID NO: 175860 - RNA, 19 nt, Artificial Sequence
  Description of Artificial Sequence: Synthetic oligonucleotide
  Sense strand starting at position 2827 of SEQ ID NO: 2268
cuccuacuacaugauguau

SEQ ID NO: 175861 - RNA, 19 nt, Artificial Sequence
  Description of Artificial Sequence: Synthetic oligonucleotide
  Antisense strand to SEQ ID NO: 175860
auacaucauguaguaggag

SEQ ID NO: 175862 - RNA, 19 nt, Artificial Sequence
  Description of Artificial Sequence: Synthetic oligonucleotide
  Sense strand starting at position 2865 of SEQ ID NO: 2268
gugaaaugaugucuuuaaa

SEQ ID NO: 175863 - RNA, 19 nt, Artificial Sequence
  Description of Artificial Sequence: Synthetic oligonucleotide
  Antisense strand to SEQ ID NO: 175862
uuuaaagacaucauuucac

SEQ ID NO: 175864 - RNA, 19 nt, Artificial Sequence
  Description of Artificial Sequence: Synthetic oligonucleotide
  Sense strand starting at position 2937 of SEQ ID NO: 2268
gugaaugagugagcacaua

SEQ ID NO: 175865 - RNA, 19 nt, Artificial Sequence
  Description of Artificial Sequence: Synthetic oligonucleotide
  Antisense strand to SEQ ID NO: 175864
uaugugcucacucauucac

SEQ ID NO: 175866 - RNA, 19 nt, Artificial Sequence
  Description of Artificial Sequence: Synthetic oligonucleotide
  Sense strand starting at position 3135 of SEQ ID NO: 2268
auggguagaccagguauau

SEQ ID NO: 175867 - RNA, 19 nt, Artificial Sequence
  Description of Artificial Sequence: Synthetic oligonucleotide
  Antisense strand to SEQ ID NO: 175866
auauaccuggucuacccau

SEQ ID NO: 175868 - RNA, 19 nt, Artificial Sequence
  Description of Artificial Sequence: Synthetic oligonucleotide
  Sense strand starting at position 3145 of SEQ ID NO: 2268
cagguauaucagugacuca

SEQ ID NO: 175869 - RNA, 19 nt, Artificial Sequence
  Description of Artificial Sequence: Synthetic oligonucleotide
  Antisense strand to SEQ ID NO: 175868
ugagucacugauauaccug

SEQ ID NO: 175870 - RNA, 19 nt, Artificial Sequence
  Description of Artificial Sequence: Synthetic oligonucleotide
  Sense strand starting at position 3148 of SEQ ID NO: 2268
guauaucagugacucaaag

SEQ ID NO: 175871 - RNA, 19 nt, Artificial Sequence
  Description of Artificial Sequence: Synthetic oligonucleotide
  Antisense strand to SEQ ID NO: 175870
cuuugagucacugauauac

SEQ ID NO: 175872 - RNA, 19 nt, Artificial Sequence
  Description of Artificial Sequence: Synthetic oligonucleotide
  Sense strand starting at position 3198 of SEQ ID NO: 2268
ggaaucuugcauugcaaag

SEQ ID NO: 175873 - RNA, 19 nt, Artificial Sequence
  Description of Artificial Sequence: Synthetic oligonucleotide
  Antisense strand to SEQ ID NO: 175872
cuuugcaaugcaagauucc

SEQ ID NO: 175874 - RNA, 19 nt, Artificial Sequence
  Description of Artificial Sequence: Synthetic oligonucleotide
  Sense strand starting at position 3454 of SEQ ID NO: 2268
ggugcaucuuaccugaaga

SEQ ID NO: 175875 - RNA, 19 nt, Artificial Sequence
  Description of Artificial Sequence: Synthetic oligonucleotide
  Antisense strand to SEQ ID NO: 175874
ucuucagguaagaugcacc

SEQ ID NO: 175876 - RNA, 19 nt, Artificial Sequence
  Description of Artificial Sequence: Synthetic oligonucleotide
  Sense strand starting at position 3455 of SEQ ID NO: 2268
gugcaucuuaccugaagag

SEQ ID NO: 175877 - RNA, 19 nt, Artificial Sequence
  Description of Artificial Sequence: Synthetic oligonucleotide
  Antisense strand to SEQ ID NO: 175876
cucuucagguaagaugcac

SEQ ID NO: 175878 - RNA, 19 nt, Artificial Sequence
  Description of Artificial Sequence: Synthetic oligonucleotide
  Sense strand starting at position 3829 of SEQ ID NO: 2268
gggaacuucuuugugacua

SEQ ID NO: 175879 - RNA, 19 nt, Artificial Sequence
  Description of Artificial Sequence: Synthetic oligonucleotide
  Antisense strand to SEQ ID NO: 175878
uagucacaaagaaguuccc

SEQ ID NO: 175880 - RNA, 19 nt, Artificial Sequence
  Description of Artificial Sequence: Synthetic oligonucleotide
  Sense strand starting at position 3837 of SEQ ID NO: 2268
cuuugugacuaaucugaau

SEQ ID NO: 175881 - RNA, 19 nt, Artificial Sequence
  Description of Artificial Sequence: Synthetic oligonucleotide
  Antisense strand to SEQ ID NO: 175880
auucagauuagucacaaag

SEQ ID NO: 175882 - RNA, 19 nt, Artificial Sequence
  Description of Artificial Sequence: Synthetic oligonucleotide
  Sense strand starting at position 3936 of SEQ ID NO: 2268
gugacugugaaaugacagu

SEQ ID NO: 175883 - RNA, 19 nt, Artificial Sequence
  Description of Artificial Sequence: Synthetic oligonucleotide
  Antisense strand to SEQ ID NO: 175882
acugucauuucacagucac

SEQ ID NO: 175884 - RNA, 19 nt, Artificial Sequence
  Description of Artificial Sequence: Synthetic oligonucleotide
  Sense strand starting at position 5 of SEQ ID NO: 2267
uuuaguguccuagaaacca

SEQ ID NO: 175885 - RNA, 19 nt, Artificial Sequence
  Description of Artificial Sequence: Synthetic oligonucleotide
  Antisense strand to SEQ ID NO: 175884
ugguuucuaggacacuaaa

SEQ ID NO: 175886 - RNA, 19 nt, Artificial Sequence
  Description of Artificial Sequence: Synthetic oligonucleotide
  Sense strand starting at position 69 of SEQ ID NO: 2267
cuggaugacuuguuggaaa

SEQ ID NO: 175887 - RNA, 19 nt, Artificial Sequence
  Description of Artificial Sequence: Synthetic oligonucleotide
  Antisense strand to SEQ ID NO: 175886
uuuccaacaagucauccag

SEQ ID NO: 175888 - RNA, 19 nt, Artificial Sequence
  Description of Artificial Sequence: Synthetic oligonucleotide
  Sense strand starting at position 116 of SEQ ID NO: 2267
ggauauugauaguccaaug

SEQ ID NO: 175889 - RNA, 19 nt, Artificial Sequence
  Description of Artificial Sequence: Synthetic oligonucleotide
  Antisense strand to SEQ ID NO: 175888
cauuggacuaucaauaucc

SEQ ID NO: 175890 - RNA, 19 nt, Artificial Sequence
  Description of Artificial Sequence: Synthetic oligonucleotide
  Sense strand starting at position 190 of SEQ ID NO: 2267
cucagagccguugugcaau

SEQ ID NO: 175891 - RNA, 19 nt, Artificial Sequence
  Description of Artificial Sequence: Synthetic oligonucleotide
  Antisense strand to SEQ ID NO: 175890
auugcacaacggcucugag

SEQ ID NO: 175892 - RNA, 19 nt, Artificial Sequence
  Description of Artificial Sequence: Synthetic oligonucleotide
  Sense strand starting at position 196 of SEQ ID NO: 2267
gccguugugcaaucaguua

SEQ ID NO: 175893 - RNA, 19 nt, Artificial Sequence
  Description of Artificial Sequence: Synthetic oligonucleotide
  Antisense strand to SEQ ID NO: 175892
uaacugauugcacaacggc

SEQ ID NO: 175894 - RNA, 19 nt, Artificial Sequence
  Description of Artificial Sequence: Synthetic oligonucleotide
  Sense strand starting at position 208 of SEQ ID NO: 2267
ucaguuagccuugaaugga

SEQ ID NO: 175895 - RNA, 19 nt, Artificial Sequence
  Description of Artificial Sequence: Synthetic oligonucleotide
  Antisense strand to SEQ ID NO: 175894
uccauucaaggcuaacuga

SEQ ID NO: 175896 - RNA, 19 nt, Artificial Sequence
  Description of Artificial Sequence: Synthetic oligonucleotide
  Sense strand starting at position 225 of SEQ ID NO: 2267
gagccauguguccuguguu

SEQ ID NO: 175897 - RNA, 19 nt, Artificial Sequence
  Description of Artificial Sequence: Synthetic oligonucleotide
  Antisense strand to SEQ ID NO: 175896
aacacaggacacauggcuc

SEQ ID NO: 175898 - RNA, 19 nt, Artificial Sequence
  Description of Artificial Sequence: Synthetic oligonucleotide
  Sense strand starting at position 331 of SEQ ID NO: 2267
gcuguucuauauuugguua

SEQ ID NO: 175899 - RNA, 19 nt, Artificial Sequence
  Description of Artificial Sequence: Synthetic oligonucleotide
  Antisense strand to SEQ ID NO: 175898
uaaccaaauauagaacagc

SEQ ID NO: 175900 - RNA, 19 nt, Artificial Sequence
  Description of Artificial Sequence: Synthetic oligonucleotide
  Sense strand starting at position 487 of SEQ ID NO: 2267
caaagaguucugcgagaag

SEQ ID NO: 175901 - RNA, 19 nt, Artificial Sequence
  Description of Artificial Sequence: Synthetic oligonucleotide
  Antisense strand to SEQ ID NO: 175900
cuucucgcagaacucuuug

SEQ ID NO: 175902 - RNA, 19 nt, Artificial Sequence
  Description of Artificial Sequence: Synthetic oligonucleotide
  Sense strand starting at position 490 of SEQ ID NO: 2267
agaguucugcgagaagaca

SEQ ID NO: 175903 - RNA, 19 nt, Artificial Sequence
  Description of Artificial Sequence: Synthetic oligonucleotide
  Antisense strand to SEQ ID NO: 175902
ugucuucucgcagaacucu

SEQ ID NO: 175904 - RNA, 19 nt, Artificial Sequence
  Description of Artificial Sequence: Synthetic oligonucleotide
  Sense strand starting at position 514 of SEQ ID NO: 2267
guguggugugaugaggaga

SEQ ID NO: 175905 - RNA, 19 nt, Artificial Sequence
  Description of Artificial Sequence: Synthetic oligonucleotide
  Antisense strand to SEQ ID NO: 175904
ucuccucaucacaccacac

SEQ ID NO: 175906 - RNA, 19 nt, Artificial Sequence
  Description of Artificial Sequence: Synthetic oligonucleotide
  Sense strand starting at position 554 of SEQ ID NO: 2267
cacuguucugcagaccuga

SEQ ID NO: 175907 - RNA, 19 nt, Artificial Sequence
  Description of Artificial Sequence: Synthetic oligonucleotide
  Antisense strand to SEQ ID NO: 175906
ucaggucugcagaacagug

SEQ ID NO: 175908 - RNA, 19 nt, Artificial Sequence
  Description of Artificial Sequence: Synthetic oligonucleotide
  Sense strand starting at position 744 of SEQ ID NO: 2267
ggaggugcuuaaucucaga

SEQ ID NO: 175909 - RNA, 19 nt, Artificial Sequence
  Description of Artificial Sequence: Synthetic oligonucleotide
  Antisense strand to SEQ ID NO: 175908
ucugagauuaagcaccucc

SEQ ID NO: 175910 - RNA, 19 nt, Artificial Sequence
  Description of Artificial Sequence: Synthetic oligonucleotide
  Sense strand starting at position 773 of SEQ ID NO: 2267
agaaaucaguuuguauuac

SEQ ID NO: 175911 - RNA, 19 nt, Artificial Sequence
  Description of Artificial Sequence: Synthetic oligonucleotide
  Antisense strand to SEQ ID NO: 175910
guaauacaaacugauuucu

SEQ ID NO: 175912 - RNA, 19 nt, Artificial Sequence
  Description of Artificial Sequence: Synthetic oligonucleotide
  Sense strand starting at position 1072 of SEQ ID NO: 2267
cuccuacuacaugauguau

SEQ ID NO: 175913 - RNA, 19 nt, Artificial Sequence
  Description of Artificial Sequence: Synthetic oligonucleotide
  Antisense strand to SEQ ID NO: 175912
auacaucauguaguaggag

SEQ ID NO: 175914 - RNA, 19 nt, Artificial Sequence
  Description of Artificial Sequence: Synthetic oligonucleotide
  Sense strand starting at position 1110 of SEQ ID NO: 2267
gugaaaugaugucuuuaaa

SEQ ID NO: 175915 - RNA, 19 nt, Artificial Sequence
  Description of Artificial Sequence: Synthetic oligonucleotide
  Antisense strand to SEQ ID NO: 175914
uuuaaagacaucauuucac

SEQ ID NO: 175916 - RNA, 19 nt, Artificial Sequence
  Description of Artificial Sequence: Synthetic oligonucleotide
  Sense strand starting at position 1182 of SEQ ID NO: 2267
gugaaugagugagcacaua

SEQ ID NO: 175917 - RNA, 19 nt, Artificial Sequence
  Description of Artificial Sequence: Synthetic oligonucleotide
  Antisense strand to SEQ ID NO: 175916
uaugugcucacucauucac

SEQ ID NO: 175918 - RNA, 19 nt, Artificial Sequence
  Description of Artificial Sequence: Synthetic oligonucleotide
  Sense strand starting at position 1380 of SEQ ID NO: 2267
auggguagaccagguauau

SEQ ID NO: 175919 - RNA, 19 nt, Artificial Sequence
  Description of Artificial Sequence: Synthetic oligonucleotide
  Antisense strand to SEQ ID NO: 175918
auauaccuggucuacccau

SEQ ID NO: 175920 - RNA, 19 nt, Artificial Sequence
  Description of Artificial Sequence: Synthetic oligonucleotide
  Sense strand starting at position 1390 of SEQ ID NO: 2267
cagguauaucagugacuca

SEQ ID NO: 175921 - RNA, 19 nt, Artificial Sequence
  Description of Artificial Sequence: Synthetic oligonucleotide
  Antisense strand to SEQ ID NO: 175920
ugagucacugauauaccug

SEQ ID NO: 175922 - RNA, 19 nt, Artificial Sequence
  Description of Artificial Sequence: Synthetic oligonucleotide
  Sense strand starting at position 1393 of SEQ ID NO: 2267
guauaucagugacucaaag

SEQ ID NO: 175923 - RNA, 19 nt, Artificial Sequence
  Description of Artificial Sequence: Synthetic oligonucleotide
  Antisense strand to SEQ ID NO: 175922
cuuugagucacugauauac

SEQ ID NO: 175924 - RNA, 19 nt, Artificial Sequence
  Description of Artificial Sequence: Synthetic oligonucleotide
  Sense strand starting at position 1699 of SEQ ID NO: 2267
ggugcaucuuaccugaaga

SEQ ID NO: 175925 - RNA, 19 nt, Artificial Sequence
  Description of Artificial Sequence: Synthetic oligonucleotide
  Antisense strand to SEQ ID NO: 175924
ucuucagguaagaugcacc

SEQ ID NO: 175926 - RNA, 19 nt, Artificial Sequence
  Description of Artificial Sequence: Synthetic oligonucleotide
  Sense strand starting at position 2074 of SEQ ID NO: 2267
gggaacuucuuugugacua

SEQ ID NO: 175927 - RNA, 19 nt, Artificial Sequence
  Description of Artificial Sequence: Synthetic oligonucleotide
  Antisense strand to SEQ ID NO: 175926
uagucacaaagaaguuccc

SEQ ID NO: 175928 - RNA, 19 nt, Artificial Sequence
  Description of Artificial Sequence: Synthetic oligonucleotide
  Sense strand starting at position 2082 of SEQ ID NO: 2267
cuuugugacuaaucugaau

SEQ ID NO: 175929 - RNA, 19 nt, Artificial Sequence
  Description of Artificial Sequence: Synthetic oligonucleotide
  Antisense strand to SEQ ID NO: 175928
auucagauuagucacaaag

SEQ ID NO: 175930 - RNA, 19 nt, Artificial Sequence
  Description of Artificial Sequence: Synthetic oligonucleotide
  Sense strand starting at position 2181 of SEQ ID NO: 2267
gugacugugaaaugacagu

SEQ ID NO: 175931 - RNA, 19 nt, Artificial Sequence
  Description of Artificial Sequence: Synthetic oligonucleotide
  Antisense strand to SEQ ID NO: 175930
acugucauuucacagucac

SEQ ID NO: 175932 - RNA, 19 nt, Artificial Sequence
  Description of Artificial Sequence: Synthetic oligonucleotide
  Sense strand starting at position 2237 of SEQ ID NO: 2267
uaacaaauugugggucacu

SEQ ID NO: 175933 - RNA, 19 nt, Artificial Sequence
  Description of Artificial Sequence: Synthetic oligonucleotide
  Antisense strand to SEQ ID NO: 175932
agugacccacaauuuguua

SEQ ID NO: 175934 - RNA, 19 nt, Artificial Sequence
  Description of Artificial Sequence: Synthetic oligonucleotide
  Sense strand starting at position 2238 of SEQ ID NO: 2267
aacaaauugugggucacuu

SEQ ID NO: 175935 - RNA, 19 nt, Artificial Sequence
  Description of Artificial Sequence: Synthetic oligonucleotide
  Antisense strand to SEQ ID NO: 175934
aagugacccacaauuuguu

SEQ ID NO: 175936 - RNA, 19 nt, Artificial Sequence
  Description of Artificial Sequence: Synthetic oligonucleotide
  Sense strand starting at position 2246 of SEQ ID NO: 2267
gugggucacuugguaaaga

SEQ ID NO: 175937 - RNA, 19 nt, Artificial Sequence
  Description of Artificial Sequence: Synthetic oligonucleotide
  Antisense strand to SEQ ID NO: 175936
ucuuuaccaagugacccac

SEQ ID NO: 175938 - RNA, 19 nt, Artificial Sequence
  Description of Artificial Sequence: Synthetic oligonucleotide
  Sense strand starting at position 2270 of SEQ ID NO: 2267
aucaucauccguuaaugua

SEQ ID NO: 175939 - RNA, 19 nt, Artificial Sequence
  Description of Artificial Sequence: Synthetic oligonucleotide
  Antisense strand to SEQ ID NO: 175938
uacauuaacggaugaugau

SEQ ID NO: 175940 - RNA, 19 nt, Artificial Sequence
  Description of Artificial Sequence: Synthetic oligonucleotide
  Sense strand starting at position 2473 of SEQ ID NO: 2267
cugggucaugcagaaguaa

SEQ ID NO: 175941 - RNA, 19 nt, Artificial Sequence
  Description of Artificial Sequence: Synthetic oligonucleotide
  Antisense strand to SEQ ID NO: 175940
uuacuucugcaugacccag

SEQ ID NO: 175942 - RNA, 19 nt, Artificial Sequence
  Description of Artificial Sequence: Synthetic oligonucleotide
  Sense strand starting at position 2492 of SEQ ID NO: 2267
aggagagauccuugguugu

SEQ ID NO: 175943 - RNA, 19 nt, Artificial Sequence
  Description of Artificial Sequence: Synthetic oligonucleotide
  Antisense strand to SEQ ID NO: 175942
acaaccaaggaucucuccu

SEQ ID NO: 175944 - RNA, 19 nt, Artificial Sequence
  Description of Artificial Sequence: Synthetic oligonucleotide
  Sense strand starting at position 2494 of SEQ ID NO: 2267
gagagauccuugguuguag

SEQ ID NO: 175945 - RNA, 19 nt, Artificial Sequence
  Description of Artificial Sequence: Synthetic oligonucleotide
  Antisense strand to SEQ ID NO: 175944
cuacaaccaaggaucucuc

SEQ ID NO: 175946 - RNA, 19 nt, Artificial Sequence
  Description of Artificial Sequence: Synthetic oligonucleotide
  Sense strand starting at position 2747 of SEQ ID NO: 2267
guaaauaagcuuugaagau

SEQ ID NO: 175947 - RNA, 19 nt, Artificial Sequence
  Description of Artificial Sequence: Synthetic oligonucleotide
  Antisense strand to SEQ ID NO: 175946
aucuucaaagcuuauuuac

SEQ ID NO: 175948 - RNA, 19 nt, Artificial Sequence
  Description of Artificial Sequence: Synthetic oligonucleotide
  Sense strand starting at position 2792 of SEQ ID NO: 2267
gccucagaacuuggaaagu

SEQ ID NO: 175949 - RNA, 19 nt, Artificial Sequence
  Description of Artificial Sequence: Synthetic oligonucleotide
  Antisense strand to SEQ ID NO: 175948
acuuuccaaguucugaggc

SEQ ID NO: 175950 - RNA, 19 nt, Artificial Sequence
  Description of Artificial Sequence: Synthetic oligonucleotide
  Sense strand starting at position 2981 of SEQ ID NO: 2267
cuguuuaagacggaauugu

SEQ ID NO: 175951 - RNA, 19 nt, Artificial Sequence
  Description of Artificial Sequence: Synthetic oligonucleotide
  Antisense strand to SEQ ID NO: 175950
acaauuccgucuuaaacag

SEQ ID NO: 175952 - RNA, 19 nt, Artificial Sequence
  Description of Artificial Sequence: Synthetic oligonucleotide
  Sense strand starting at position 3446 of SEQ ID NO: 2267
ccaauucuuguguaauagu

SEQ ID NO: 175953 - RNA, 19 nt, Artificial Sequence
  Description of Artificial Sequence: Synthetic oligonucleotide
  Antisense strand to SEQ ID NO: 175952
acuauuacacaagaauugg

SEQ ID NO: 175954 - RNA, 19 nt, Artificial Sequence
  Description of Artificial Sequence: Synthetic oligonucleotide
  Sense strand starting at position 3697 of SEQ ID NO: 2267
auuucuucucaguguuaau

SEQ ID NO: 175955 - RNA, 19 nt, Artificial Sequence
  Description of Artificial Sequence: Synthetic oligonucleotide
  Antisense strand to SEQ ID NO: 175954
auuaacacugagaagaaau

SEQ ID NO: 175956 - RNA, 19 nt, Artificial Sequence
  Description of Artificial Sequence: Synthetic oligonucleotide
  Sense strand starting at position 3714 of SEQ ID NO: 2267
auaucauggcuccgagaaa

SEQ ID NO: 175957 - RNA, 19 nt, Artificial Sequence
  Description of Artificial Sequence: Synthetic oligonucleotide
  Antisense strand to SEQ ID NO: 175956
uuucucggagccaugauau

SEQ ID NO: 175958 - RNA, 19 nt, Artificial Sequence
  Description of Artificial Sequence: Synthetic oligonucleotide
  Sense strand starting at position 3805 of SEQ ID NO: 2267
uugucuugucguccuacua

SEQ ID NO: 175959 - RNA, 19 nt, Artificial Sequence
  Description of Artificial Sequence: Synthetic oligonucleotide
  Antisense strand to SEQ ID NO: 175958
uaguaggacgacaagacaa

SEQ ID NO: 175960 - RNA, 19 nt, Artificial Sequence
  Description of Artificial Sequence: Synthetic oligonucleotide
  Sense strand starting at position 3847 of SEQ ID NO: 2267
uuuguugauguuuaaguga

SEQ ID NO: 175961 - RNA, 19 nt, Artificial Sequence
  Description of Artificial Sequence: Synthetic oligonucleotide
  Antisense strand to SEQ ID NO: 175960
ucacuuaaacaucaacaaa

SEQ ID NO: 175962 - RNA, 19 nt, Artificial Sequence
  Description of Artificial Sequence: Synthetic oligonucleotide
  Sense strand starting at position 3969 of SEQ ID NO: 2267
acagauuucugauagacua

SEQ ID NO: 175963 - RNA, 19 nt, Artificial Sequence
  Description of Artificial Sequence: Synthetic oligonucleotide
  Antisense strand to SEQ ID NO: 175962
uagucuaucagaaaucugu

SEQ ID NO: 175964 - RNA, 19 nt, Artificial Sequence
  Description of Artificial Sequence: Synthetic oligonucleotide
  Sense strand starting at position 3800 of SEQ ID NO: 2269
cgugcucauuccuuacaaa

SEQ ID NO: 175965 - RNA, 19 nt, Artificial Sequence
  Description of Artificial Sequence: Synthetic oligonucleotide
  Antisense strand to SEQ ID NO: 175964
uuuguaaggaaugagcacg

SEQ ID NO: 175966 - RNA, 19 nt, Artificial Sequence
  Description of Artificial Sequence: Synthetic oligonucleotide
  Sense strand starting at position 3630 of SEQ ID NO: 2269
ccuccaaugcagugacuua

SEQ ID NO: 175967 - RNA, 19 nt, Artificial Sequence
  Description of Artificial Sequence: Synthetic oligonucleotide
  Antisense strand to SEQ ID NO: 175966
uaagucacugcauuggagg

SEQ ID NO: 175968 - RNA, 19 nt, Artificial Sequence
  Description of Artificial Sequence: Synthetic oligonucleotide
  Sense strand starting at position 3589 of SEQ ID NO: 2269
guauuaguuaguugcagga

SEQ ID NO: 175969 - RNA, 19 nt, Artificial Sequence
  Description of Artificial Sequence: Synthetic oligonucleotide
  Antisense strand to SEQ ID NO: 175968
uccugcaacuaacuaauac

SEQ ID NO: 175970 - RNA, 19 nt, Artificial Sequence
  Description of Artificial Sequence: Synthetic oligonucleotide
  Sense strand starting at position 3576 of SEQ ID NO: 2269
cuuauuacagcugguauua

SEQ ID NO: 175971 - RNA, 19 nt, Artificial Sequence
  Description of Artificial Sequence: Synthetic oligonucleotide
  Antisense strand to SEQ ID NO: 175970
uaauaccagcuguaauaag

SEQ ID NO: 175972 - RNA, 19 nt, Artificial Sequence
  Description of Artificial Sequence: Synthetic oligonucleotide
  Sense strand starting at position 3506 of SEQ ID NO: 2269
ccaugcccucaauaggaau

SEQ ID NO: 175973 - RNA, 19 nt, Artificial Sequence
  Description of Artificial Sequence: Synthetic oligonucleotide
  Antisense strand to SEQ ID NO: 175972
auuccuauugagggcaugg

SEQ ID NO: 175974 - RNA, 19 nt, Artificial Sequence
  Description of Artificial Sequence: Synthetic oligonucleotide
  Sense strand starting at position 3408 of SEQ ID NO: 2269
ucuauugcgcccucaaguu

SEQ ID NO: 175975 - RNA, 19 nt, Artificial Sequence
  Description of Artificial Sequence: Synthetic oligonucleotide
  Antisense strand to SEQ ID NO: 175974
aacuugagggcgcaauaga

SEQ ID NO: 175976 - RNA, 19 nt, Artificial Sequence
  Description of Artificial Sequence: Synthetic oligonucleotide
  Sense strand starting at position 3393 of SEQ ID NO: 2269
agaggauccuaagacucua

SEQ ID NO: 175977 - RNA, 19 nt, Artificial Sequence
  Description of Artificial Sequence: Synthetic oligonucleotide
  Antisense strand to SEQ ID NO: 175976
uagagucuuaggauccucu

SEQ ID NO: 175978 - RNA, 19 nt, Artificial Sequence
  Description of Artificial Sequence: Synthetic oligonucleotide
  Sense strand starting at position 3390 of SEQ ID NO: 2269
cccagaggauccuaagacu

SEQ ID NO: 175979 - RNA, 19 nt, Artificial Sequence
  Description of Artificial Sequence: Synthetic oligonucleotide
  Antisense strand to SEQ ID NO: 175978
agucuuaggauccucuggg

SEQ ID NO: 175980 - RNA, 19 nt, Artificial Sequence
  Description of Artificial Sequence: Synthetic oligonucleotide
  Sense strand starting at position 3280 of SEQ ID NO: 2269
agaggugaccagugcagua

SEQ ID NO: 175981 - RNA, 19 nt, Artificial Sequence
  Description of Artificial Sequence: Synthetic oligonucleotide
  Antisense strand to SEQ ID NO: 175980
uacugcacuggucaccucu

SEQ ID NO: 175982 - RNA, 19 nt, Artificial Sequence
  Description of Artificial Sequence: Synthetic oligonucleotide
  Sense strand starting at position 3103 of SEQ ID NO: 2269
ugguaaagauuaccugcua

SEQ ID NO: 175983 - RNA, 19 nt, Artificial Sequence
  Description of Artificial Sequence: Synthetic oligonucleotide
  Antisense strand to SEQ ID NO: 175982
uagcagguaaucuuuacca

SEQ ID NO: 175984 - RNA, 19 nt, Artificial Sequence
  Description of Artificial Sequence: Synthetic oligonucleotide
  Sense strand starting at position 3026 of SEQ ID NO: 2269
gucuuaugguuauugugag

SEQ ID NO: 175985 - RNA, 19 nt, Artificial Sequence
  Description of Artificial Sequence: Synthetic oligonucleotide
  Antisense strand to SEQ ID NO: 175984
cucacaauaaccauaagac

SEQ ID NO: 175986 - RNA, 19 nt, Artificial Sequence
  Description of Artificial Sequence: Synthetic oligonucleotide
  Sense strand starting at position 2928 of SEQ ID NO: 2269
gcagcuugccuggaucuga

SEQ ID NO: 175987 - RNA, 19 nt, Artificial Sequence
  Description of Artificial Sequence: Synthetic oligonucleotide
  Antisense strand to SEQ ID NO: 175986
ucagauccaggcaagcugc

SEQ ID NO: 175988 - RNA, 19 nt, Artificial Sequence
  Description of Artificial Sequence: Synthetic oligonucleotide
  Sense strand starting at position 2777 of SEQ ID NO: 2269
uagauucuggagugcagau

SEQ ID NO: 175989 - RNA, 19 nt, Artificial Sequence
  Description of Artificial Sequence: Synthetic oligonucleotide
  Antisense strand to SEQ ID NO: 175988
aucugcacuccagaaucua

SEQ ID NO: 175990 - RNA, 19 nt, Artificial Sequence
  Description of Artificial Sequence: Synthetic oligonucleotide
  Sense strand starting at position 2760 of SEQ ID NO: 2269
uccugcucugugggaagua

SEQ ID NO: 175991 - RNA, 19 nt, Artificial Sequence
  Description of Artificial Sequence: Synthetic oligonucleotide
  Antisense strand to SEQ ID NO: 175990
uacuucccacagagcagga

SEQ ID NO: 175992 - RNA, 19 nt, Artificial Sequence
  Description of Artificial Sequence: Synthetic oligonucleotide
  Sense strand starting at position 2228 of SEQ ID NO: 2269
ggaggcuguuuccauuuaa

SEQ ID NO: 175993 - RNA, 19 nt, Artificial Sequence
  Description of Artificial Sequence: Synthetic oligonucleotide
  Antisense strand to SEQ ID NO: 175992
uuaaauggaaacagccucc

SEQ ID NO: 175994 - RNA, 19 nt, Artificial Sequence
  Description of Artificial Sequence: Synthetic oligonucleotide
  Sense strand starting at position 2035 of SEQ ID NO: 2269
uucccuuccuggguuuaaa

SEQ ID NO: 175995 - RNA, 19 nt, Artificial Sequence
  Description of Artificial Sequence: Synthetic oligonucleotide
  Antisense strand to SEQ ID NO: 175994
uuuaaacccaggaagggaa

SEQ ID NO: 175996 - RNA, 19 nt, Artificial Sequence
  Description of Artificial Sequence: Synthetic oligonucleotide
  Sense strand starting at position 1892 of SEQ ID NO: 2269
guaaguaaagcuugggcaa

SEQ ID NO: 175997 - RNA, 19 nt, Artificial Sequence
  Description of Artificial Sequence: Synthetic oligonucleotide
  Antisense strand to SEQ ID NO: 175996
uugcccaagcuuuacuuac

SEQ ID NO: 175998 - RNA, 19 nt, Artificial Sequence
  Description of Artificial Sequence: Synthetic oligonucleotide
  Sense strand starting at position 1715 of SEQ ID NO: 2269
ggaguauaauacuaaggau

SEQ ID NO: 175999 - RNA, 19 nt, Artificial Sequence
  Description of Artificial Sequence: Synthetic oligonucleotide
  Antisense strand to SEQ ID NO: 175998
auccuuaguauuauacucc

SEQ ID NO: 176000 - RNA, 19 nt, Artificial Sequence
  Description of Artificial Sequence: Synthetic oligonucleotide
  Sense strand starting at position 1703 of SEQ ID NO: 2269
cugucugagacuggaguau

SEQ ID NO: 176001 - RNA, 19 nt, Artificial Sequence
  Description of Artificial Sequence: Synthetic oligonucleotide
  Antisense strand to SEQ ID NO: 176000
auacuccagucucagacag

SEQ ID NO: 176002 - RNA, 19 nt, Artificial Sequence
  Description of Artificial Sequence: Synthetic oligonucleotide
  Sense strand starting at position 1682 of SEQ ID NO: 2269
agaggauaacuaugcuuag

SEQ ID NO: 176003 - RNA, 19 nt, Artificial Sequence
  Description of Artificial Sequence: Synthetic oligonucleotide
  Antisense strand to SEQ ID NO: 176002
cuaagcauaguuauccucu

SEQ ID NO: 176004 - RNA, 19 nt, Artificial Sequence
  Description of Artificial Sequence: Synthetic oligonucleotide
  Sense strand starting at position 1592 of SEQ ID NO: 2269
gaaggaacaucuuaaagga

SEQ ID NO: 176005 - RNA, 19 nt, Artificial Sequence
  Description of Artificial Sequence: Synthetic oligonucleotide
  Antisense strand to SEQ ID NO: 176004
uccuuuaagauguuccuuc

SEQ ID NO: 176006 - RNA, 19 nt, Artificial Sequence
  Description of Artificial Sequence: Synthetic oligonucleotide
  Sense strand starting at position 1555 of SEQ ID NO: 2269
uugacauuguaaguaaguu

SEQ ID NO: 176007 - RNA, 19 nt, Artificial Sequence
  Description of Artificial Sequence: Synthetic oligonucleotide
  Antisense strand to SEQ ID NO: 176006
aacuuacuuacaaugucaa

SEQ ID NO: 176008 - RNA, 19 nt, Artificial Sequence
  Description of Artificial Sequence: Synthetic oligonucleotide
  Sense strand starting at position 1550 of SEQ ID NO: 2269
aagcuuugacauuguaagu

SEQ ID NO: 176009 - RNA, 19 nt, Artificial Sequence
  Description of Artificial Sequence: Synthetic oligonucleotide
  Antisense strand to SEQ ID NO: 176008
acuuacaaugucaaagcuu

SEQ ID NO: 176010 - RNA, 19 nt, Artificial Sequence
  Description of Artificial Sequence: Synthetic oligonucleotide
  Sense strand starting at position 1544 of SEQ ID NO: 2269
gagagaaagcuuugacauu

SEQ ID NO: 176011 - RNA, 19 nt, Artificial Sequence
  Description of Artificial Sequence: Synthetic oligonucleotide
  Antisense strand to SEQ ID NO: 176010
aaugucaaagcuuucucuc

SEQ ID NO: 176012 - RNA, 19 nt, Artificial Sequence
  Description of Artificial Sequence: Synthetic oligonucleotide
  Sense strand starting at position 1382 of SEQ ID NO: 2269
ucaaauguguuugcaaaca

SEQ ID NO: 176013 - RNA, 19 nt, Artificial Sequence
  Description of Artificial Sequence: Synthetic oligonucleotide
  Antisense strand to SEQ ID NO: 176012
uguuugcaaacacauuuga

SEQ ID NO: 176014 - RNA, 19 nt, Artificial Sequence
  Description of Artificial Sequence: Synthetic oligonucleotide
  Sense strand starting at position 1276 of SEQ ID NO: 2269
agguauugugaggguaaua

SEQ ID NO: 176015 - RNA, 19 nt, Artificial Sequence
  Description of Artificial Sequence: Synthetic oligonucleotide
  Antisense strand to SEQ ID NO: 176014
uauuacccucacaauaccu

SEQ ID NO: 176016 - RNA, 19 nt, Artificial Sequence
  Description of Artificial Sequence: Synthetic oligonucleotide
  Sense strand starting at position 649 of SEQ ID NO: 2269
aucugaugccuuggugaca

SEQ ID NO: 176017 - RNA, 19 nt, Artificial Sequence
  Description of Artificial Sequence: Synthetic oligonucleotide
  Antisense strand to SEQ ID NO: 176016
ugucaccaaggcaucagau

SEQ ID NO: 176018 - RNA, 19 nt, Artificial Sequence
  Description of Artificial Sequence: Synthetic oligonucleotide
  Sense strand starting at position 577 of SEQ ID NO: 2269
cugagucugcaacaaaugu

SEQ ID NO: 176019 - RNA, 19 nt, Artificial Sequence
  Description of Artificial Sequence: Synthetic oligonucleotide
  Antisense strand to SEQ ID NO: 176018
acauuuguugcagacucag

SEQ ID NO: 176020 - RNA, 19 nt, Artificial Sequence
  Description of Artificial Sequence: Synthetic oligonucleotide
  Sense strand starting at position 573 of SEQ ID NO: 2269
gauucugagucugcaacaa

SEQ ID NO: 176021 - RNA, 19 nt, Artificial Sequence
  Description of Artificial Sequence: Synthetic oligonucleotide
  Antisense strand to SEQ ID NO: 176020
uuguugcagacucagaauc

SEQ ID NO: 176022 - RNA, 19 nt, Artificial Sequence
  Description of Artificial Sequence: Synthetic oligonucleotide
  Sense strand starting at position 572 of SEQ ID NO: 2269
ugauucugagucugcaaca

SEQ ID NO: 176023 - RNA, 19 nt, Artificial Sequence
  Description of Artificial Sequence: Synthetic oligonucleotide
  Antisense strand to SEQ ID NO: 176022
uguugcagacucagaauca

SEQ ID NO: 176024 - RNA, 19 nt, Artificial Sequence
  Description of Artificial Sequence: Synthetic oligonucleotide
  Sense strand starting at position 569 of SEQ ID NO: 2269
ccuugauucugagucugca

SEQ ID NO: 176025 - RNA, 19 nt, Artificial Sequence
  Description of Artificial Sequence: Synthetic oligonucleotide
  Antisense strand to SEQ ID NO: 176024
ugcagacucagaaucaagg

SEQ ID NO: 176026 - RNA, 19 nt, Artificial Sequence
  Description of Artificial Sequence: Synthetic oligonucleotide
  Sense strand starting at position 557 of SEQ ID NO: 2269
cugacacugucaccuugau

SEQ ID NO: 176027 - RNA, 19 nt, Artificial Sequence
  Description of Artificial Sequence: Synthetic oligonucleotide
  Antisense strand to SEQ ID NO: 176026
aucaaggugacagugucag

SEQ ID NO: 176028 - RNA, 19 nt, Artificial Sequence
  Description of Artificial Sequence: Synthetic oligonucleotide
  Sense strand starting at position 467 of SEQ ID NO: 2269
cuuagaguuguaugaaaga

SEQ ID NO: 176029 - RNA, 19 nt, Artificial Sequence
  Description of Artificial Sequence: Synthetic oligonucleotide
  Antisense strand to SEQ ID NO: 176028
ucuuucauacaacucuaag

SEQ ID NO: 176030 - RNA, 19 nt, Artificial Sequence
  Description of Artificial Sequence: Synthetic oligonucleotide
  Sense strand starting at position 463 of SEQ ID NO: 2269
aguacuuagaguuguauga

SEQ ID NO: 176031 - RNA, 19 nt, Artificial Sequence
  Description of Artificial Sequence: Synthetic oligonucleotide
  Antisense strand to SEQ ID NO: 176030
ucauacaacucuaaguacu

SEQ ID NO: 176032 - RNA, 19 nt, Artificial Sequence
  Description of Artificial Sequence: Synthetic oligonucleotide
  Sense strand starting at position 386 of SEQ ID NO: 2269
acgggaugauuugaaauca

SEQ ID NO: 176033 - RNA, 19 nt, Artificial Sequence
  Description of Artificial Sequence: Synthetic oligonucleotide
  Antisense strand to SEQ ID NO: 176032
ugauuucaaaucaucccgu

SEQ ID NO: 176034 - RNA, 19 nt, Artificial Sequence
  Description of Artificial Sequence: Synthetic oligonucleotide
  Sense strand starting at position 304 of SEQ ID NO: 2269
ucaggcaucuucucagaaa

SEQ ID NO: 176035 - RNA, 19 nt, Artificial Sequence
  Description of Artificial Sequence: Synthetic oligonucleotide
  Antisense strand to SEQ ID NO: 176034
uuucugagaagaugccuga

SEQ ID NO: 176036 - RNA, 19 nt, Artificial Sequence
  Description of Artificial Sequence: Synthetic oligonucleotide
  Sense strand starting at position 256 of SEQ ID NO: 2269
ugagcagugaauggacaaa

SEQ ID NO: 176037 - RNA, 19 nt, Artificial Sequence
  Description of Artificial Sequence: Synthetic oligonucleotide
  Antisense strand to SEQ ID NO: 176036
uuuguccauucacugcuca

SEQ ID NO: 176038 - RNA, 19 nt, Artificial Sequence
  Description of Artificial Sequence: Synthetic oligonucleotide
  Sense strand starting at position 154 of SEQ ID NO: 2269
agcaacuucugcucacaga

SEQ ID NO: 176039 - RNA, 19 nt, Artificial Sequence
  Description of Artificial Sequence: Synthetic oligonucleotide
  Antisense strand to SEQ ID NO: 176038
ucugugagcagaaguugcu

SEQ ID NO: 176040 - RNA, 19 nt, Artificial Sequence
  Description of Artificial Sequence: Synthetic oligonucleotide
  Sense strand starting at position 133 of SEQ ID NO: 2269
agagaucaggccugagauc

SEQ ID NO: 176041 - RNA, 19 nt, Artificial Sequence
  Description of Artificial Sequence: Synthetic oligonucleotide
  Antisense strand to SEQ ID NO: 176040
gaucucaggccugaucucu

SEQ ID NO: 176042 - RNA, 19 nt, Artificial Sequence
  Description of Artificial Sequence: Synthetic oligonucleotide
  Sense strand starting at position 6 of SEQ ID NO: 2269
agcguuugcuaauuuccaa

SEQ ID NO: 176043 - RNA, 19 nt, Artificial Sequence
  Description of Artificial Sequence: Synthetic oligonucleotide
  Antisense strand to SEQ ID NO: 176042
uuggaaauuagcaaacgcu

SEQ ID NO: 176044 - RNA, 19 nt, Artificial Sequence
  Description of Artificial Sequence: Synthetic oligonucleotide
  Sense strand starting at position 124 of SEQ ID NO: 2270
ccaugaauuccugagaugc

SEQ ID NO: 176045 - RNA, 19 nt, Artificial Sequence
  Description of Artificial Sequence: Synthetic oligonucleotide
  Antisense strand to SEQ ID NO: 176044
gcaucucaggaauucaugg

SEQ ID NO: 176046 - RNA, 19 nt, Artificial Sequence
  Description of Artificial Sequence: Synthetic oligonucleotide
  Sense strand starting at position 345 of SEQ ID NO: 2270
ggcauuuggcagugaucau

SEQ ID NO: 176047 - RNA, 19 nt, Artificial Sequence
  Description of Artificial Sequence: Synthetic oligonucleotide
  Antisense strand to SEQ ID NO: 176046
augaucacugccaaaugcc

SEQ ID NO: 176048 - RNA, 19 nt, Artificial Sequence
  Description of Artificial Sequence: Synthetic oligonucleotide
  Sense strand starting at position 368 of SEQ ID NO: 2270
cccugucucccucagagau

SEQ ID NO: 176049 - RNA, 19 nt, Artificial Sequence
  Description of Artificial Sequence: Synthetic oligonucleotide
  Antisense strand to SEQ ID NO: 176048
aucucugagggagacaggg

SEQ ID NO: 176050 - RNA, 19 nt, Artificial Sequence
  Description of Artificial Sequence: Synthetic oligonucleotide
  Sense strand starting at position 765 of SEQ ID NO: 2270
gggacuauccgcuagacua

SEQ ID NO: 176051 - RNA, 19 nt, Artificial Sequence
  Description of Artificial Sequence: Synthetic oligonucleotide
  Antisense strand to SEQ ID NO: 176050
uagucuagcggauaguccc

SEQ ID NO: 176052 - RNA, 19 nt, Artificial Sequence
  Description of Artificial Sequence: Synthetic oligonucleotide
  Sense strand starting at position 772 of SEQ ID NO: 2270
uccgcuagacuaugagauu

SEQ ID NO: 176053 - RNA, 19 nt, Artificial Sequence
  Description of Artificial Sequence: Synthetic oligonucleotide
  Antisense strand to SEQ ID NO: 176052
aaucucauagucuagcgga

SEQ ID NO: 176054 - RNA, 19 nt, Artificial Sequence
  Description of Artificial Sequence: Synthetic oligonucleotide
  Sense strand starting at position 778 of SEQ ID NO: 2270
agacuaugagauugagucu

SEQ ID NO: 176055 - RNA, 19 nt, Artificial Sequence
  Description of Artificial Sequence: Synthetic oligonucleotide
  Antisense strand to SEQ ID NO: 176054
agacucaaucucauagucu

SEQ ID NO: 176056 - RNA, 19 nt, Artificial Sequence
  Description of Artificial Sequence: Synthetic oligonucleotide
  Sense strand starting at position 897 of SEQ ID NO: 2270
ugaucacguccacaaguau

SEQ ID NO: 176057 - RNA, 19 nt, Artificial Sequence
  Description of Artificial Sequence: Synthetic oligonucleotide
  Antisense strand to SEQ ID NO: 176056
auacuuguggacgugauca

SEQ ID NO: 176058 - RNA, 19 nt, Artificial Sequence
  Description of Artificial Sequence: Synthetic oligonucleotide
  Sense strand starting at position 904 of SEQ ID NO: 2270
guccacaaguaucuaguua

SEQ ID NO: 176059 - RNA, 19 nt, Artificial Sequence
  Description of Artificial Sequence: Synthetic oligonucleotide
  Antisense strand to SEQ ID NO: 176058
uaacuagauacuuguggac

SEQ ID NO: 176060 - RNA, 19 nt, Artificial Sequence
  Description of Artificial Sequence: Synthetic oligonucleotide
  Sense strand starting at position 908 of SEQ ID NO: 2270
acaaguaucuaguuaggcu

SEQ ID NO: 176061 - RNA, 19 nt, Artificial Sequence
  Description of Artificial Sequence: Synthetic oligonucleotide
  Antisense strand to SEQ ID NO: 176060
agccuaacuagauacuugu

SEQ ID NO: 176062 - RNA, 19 nt, Artificial Sequence
  Description of Artificial Sequence: Synthetic oligonucleotide
  Sense strand starting at position 1043 of SEQ ID NO: 2270
uugaguucugaacagcaaa

SEQ ID NO: 176063 - RNA, 19 nt, Artificial Sequence
  Description of Artificial Sequence: Synthetic oligonucleotide
  Antisense strand to SEQ ID NO: 176062
uuugcuguucagaacucaa

SEQ ID NO: 176064 - RNA, 19 nt, Artificial Sequence
  Description of Artificial Sequence: Synthetic oligonucleotide
  Sense strand starting at position 1056 of SEQ ID NO: 2270
agcaaagccuaaucucaga

SEQ ID NO: 176065 - RNA, 19 nt, Artificial Sequence
  Description of Artificial Sequence: Synthetic oligonucleotide
  Antisense strand to SEQ ID NO: 176064
ucugagauuaggcuuugcu

SEQ ID NO: 176066 - RNA, 19 nt, Artificial Sequence
  Description of Artificial Sequence: Synthetic oligonucleotide
  Sense strand starting at position 1172 of SEQ ID NO: 2270
uggguuacccuguagauac

SEQ ID NO: 176067 - RNA, 19 nt, Artificial Sequence
  Description of Artificial Sequence: Synthetic oligonucleotide
  Antisense strand to SEQ ID NO: 176066
guaucuacaggguaaccca

SEQ ID NO: 176068 - RNA, 19 nt, Artificial Sequence
  Description of Artificial Sequence: Synthetic oligonucleotide
  Sense strand starting at position 1417 of SEQ ID NO: 2270
gaagcaagaugguuuccuu

SEQ ID NO: 176069 - RNA, 19 nt, Artificial Sequence
  Description of Artificial Sequence: Synthetic oligonucleotide
  Antisense strand to SEQ ID NO: 176068
aaggaaaccaucuugcuuc

SEQ ID NO: 176070 - RNA, 19 nt, Artificial Sequence
  Description of Artificial Sequence: Synthetic oligonucleotide
  Sense strand starting at position 1665 of SEQ ID NO: 2270
acggaagauucugcuccuu

SEQ ID NO: 176071 - RNA, 19 nt, Artificial Sequence
  Description of Artificial Sequence: Synthetic oligonucleotide
  Antisense strand to SEQ ID NO: 176070
aaggagcagaaucuuccgu

SEQ ID NO: 176072 - RNA, 19 nt, Artificial Sequence
  Description of Artificial Sequence: Synthetic oligonucleotide
  Sense strand starting at position 1744 of SEQ ID NO: 2270
gaugccauucugugggaca

SEQ ID NO: 176073 - RNA, 19 nt, Artificial Sequence
  Description of Artificial Sequence: Synthetic oligonucleotide
  Antisense strand to SEQ ID NO: 176072
ugucccacagaauggcauc

SEQ ID NO: 176074 - RNA, 19 nt, Artificial Sequence
  Description of Artificial Sequence: Synthetic oligonucleotide
  Sense strand starting at position 1746 of SEQ ID NO: 2270
ugccauucugugggacaaa

SEQ ID NO: 176075 - RNA, 19 nt, Artificial Sequence
  Description of Artificial Sequence: Synthetic oligonucleotide
  Antisense strand to SEQ ID NO: 176074
uuugucccacagaauggca

SEQ ID NO: 176076 - RNA, 19 nt, Artificial Sequence
  Description of Artificial Sequence: Synthetic oligonucleotide
  Sense strand starting at position 1874 of SEQ ID NO: 2270
guucucugccugggaucaa

SEQ ID NO: 176077 - RNA, 19 nt, Artificial Sequence
  Description of Artificial Sequence: Synthetic oligonucleotide
  Antisense strand to SEQ ID NO: 176076
uugaucccaggcagagaac

SEQ ID NO: 176078 - RNA, 19 nt, Artificial Sequence
  Description of Artificial Sequence: Synthetic oligonucleotide
  Sense strand starting at position 2148 of SEQ ID NO: 2270
ggcagaugcgugcugcaau

SEQ ID NO: 176079 - RNA, 19 nt, Artificial Sequence
  Description of Artificial Sequence: Synthetic oligonucleotide
  Antisense strand to SEQ ID NO: 176078
auugcagcacgcaucugcc

SEQ ID NO: 176080 - RNA, 19 nt, Artificial Sequence
  Description of Artificial Sequence: Synthetic oligonucleotide
  Sense strand starting at position 2220 of SEQ ID NO: 2270
gaggcaaauucugugcaca

SEQ ID NO: 176081 - RNA, 19 nt, Artificial Sequence
  Description of Artificial Sequence: Synthetic oligonucleotide
  Antisense strand to SEQ ID NO: 176080
ugugcacagaauuugccuc

SEQ ID NO: 176082 - RNA, 19 nt, Artificial Sequence
  Description of Artificial Sequence: Synthetic oligonucleotide
  Sense strand starting at position 2222 of SEQ ID NO: 2270
ggcaaauucugugcacaua

SEQ ID NO: 176083 - RNA, 19 nt, Artificial Sequence
  Description of Artificial Sequence: Synthetic oligonucleotide
  Antisense strand to SEQ ID NO: 176082
uaugugcacagaauuugcc

SEQ ID NO: 176084 - RNA, 19 nt, Artificial Sequence
  Description of Artificial Sequence: Synthetic oligonucleotide
  Sense strand starting at position 2500 of SEQ ID NO: 2270
gggcuaaagacucagcuuu

SEQ ID NO: 176085 - RNA, 19 nt, Artificial Sequence
  Description of Artificial Sequence: Synthetic oligonucleotide
  Antisense strand to SEQ ID NO: 176084
aaagcugagucuuuagccc

SEQ ID NO: 176086 - RNA, 19 nt, Artificial Sequence
  Description of Artificial Sequence: Synthetic oligonucleotide
  Sense strand starting at position 2610 of SEQ ID NO: 2270
gaguguuuccagggcugag

SEQ ID NO: 176087 - RNA, 19 nt, Artificial Sequence
  Description of Artificial Sequence: Synthetic oligonucleotide
  Antisense strand to SEQ ID NO: 176086
cucagcccuggaaacacuc

SEQ ID NO: 176088 - RNA, 19 nt, Artificial Sequence
  Description of Artificial Sequence: Synthetic oligonucleotide
  Sense strand starting at position 2652 of SEQ ID NO: 2270
acaccuuuaugcucaggga

SEQ ID NO: 176089 - RNA, 19 nt, Artificial Sequence
  Description of Artificial Sequence: Synthetic oligonucleotide
  Antisense strand to SEQ ID NO: 176088
ucccugagcauaaaggugu

SEQ ID NO: 176090 - RNA, 19 nt, Artificial Sequence
  Description of Artificial Sequence: Synthetic oligonucleotide
  Sense strand starting at position 2705 of SEQ ID NO: 2270
ccagauggguuuccuggaa

SEQ ID NO: 176091 - RNA, 19 nt, Artificial Sequence
  Description of Artificial Sequence: Synthetic oligonucleotide
  Antisense strand to SEQ ID NO: 176090
uuccaggaaacccaucugg

SEQ ID NO: 176092 - RNA, 19 nt, Artificial Sequence
  Description of Artificial Sequence: Synthetic oligonucleotide
  Sense strand starting at position 2754 of SEQ ID NO: 2270
gagucucaugccuggaacu

SEQ ID NO: 176093 - RNA, 19 nt, Artificial Sequence
  Description of Artificial Sequence: Synthetic oligonucleotide
  Antisense strand to SEQ ID NO: 176092
aguuccaggcaugagacuc

SEQ ID NO: 176094 - RNA, 19 nt, Artificial Sequence
  Description of Artificial Sequence: Synthetic oligonucleotide
  Sense strand starting at position 2756 of SEQ ID NO: 2270
gucucaugccuggaacuca

SEQ ID NO: 176095 - RNA, 19 nt, Artificial Sequence
  Description of Artificial Sequence: Synthetic oligonucleotide
  Antisense strand to SEQ ID NO: 176094
ugaguuccaggcaugagac

SEQ ID NO: 176096 - RNA, 19 nt, Artificial Sequence
  Description of Artificial Sequence: Synthetic oligonucleotide
  Sense strand starting at position 2764 of SEQ ID NO: 2270
ccuggaacucagugagacu

SEQ ID NO: 176097 - RNA, 19 nt, Artificial Sequence
  Description of Artificial Sequence: Synthetic oligonucleotide
  Antisense strand to SEQ ID NO: 176096
agucucacugaguuccagg

SEQ ID NO: 176098 - RNA, 19 nt, Artificial Sequence
  Description of Artificial Sequence: Synthetic oligonucleotide
  Sense strand starting at position 2863 of SEQ ID NO: 2270
accuguuuaccggguauuu

SEQ ID NO: 176099 - RNA, 19 nt, Artificial Sequence
  Description of Artificial Sequence: Synthetic oligonucleotide
  Antisense strand to SEQ ID NO: 176098
aaauacccgguaaacaggu

SEQ ID NO: 176100 - RNA, 19 nt, Artificial Sequence
  Description of Artificial Sequence: Synthetic oligonucleotide
  Sense strand starting at position 2945 of SEQ ID NO: 2270
uuaauccuguggcuauuau

SEQ ID NO: 176101 - RNA, 19 nt, Artificial Sequence
  Description of Artificial Sequence: Synthetic oligonucleotide
  Antisense strand to SEQ ID NO: 176100
auaauagccacaggauuaa

SEQ ID NO: 176102 - RNA, 19 nt, Artificial Sequence
  Description of Artificial Sequence: Synthetic oligonucleotide
  Sense strand starting at position 2957 of SEQ ID NO: 2270
cuauuauagucugucaucu

SEQ ID NO: 176103 - RNA, 19 nt, Artificial Sequence
  Description of Artificial Sequence: Synthetic oligonucleotide
  Antisense strand to SEQ ID NO: 176102
agaugacagacuauaauag

SEQ ID NO: 176104 - RNA, 19 nt, Artificial Sequence
  Description of Artificial Sequence: Synthetic oligonucleotide
  Sense strand starting at position 3165 of SEQ ID NO: 2270
ccuaauagagguugcucua

SEQ ID NO: 176105 - RNA, 19 nt, Artificial Sequence
  Description of Artificial Sequence: Synthetic oligonucleotide
  Antisense strand to SEQ ID NO: 176104
uagagcaaccucuauuagg

SEQ ID NO: 176106 - RNA, 19 nt, Artificial Sequence
  Description of Artificial Sequence: Synthetic oligonucleotide
  Sense strand starting at position 3168 of SEQ ID NO: 2270
aauagagguugcucuaauu

SEQ ID NO: 176107 - RNA, 19 nt, Artificial Sequence
  Description of Artificial Sequence: Synthetic oligonucleotide
  Antisense strand to SEQ ID NO: 176106
aauuagagcaaccucuauu

SEQ ID NO: 176108 - RNA, 19 nt, Artificial Sequence
  Description of Artificial Sequence: Synthetic oligonucleotide
  Sense strand starting at position 3196 of SEQ ID NO: 2270
ucgggucaacuuugagaag

SEQ ID NO: 176109 - RNA, 19 nt, Artificial Sequence
  Description of Artificial Sequence: Synthetic oligonucleotide
  Antisense strand to SEQ ID NO: 176108
cuucucaaaguugacccga

SEQ ID NO: 176110 - RNA, 19 nt, Artificial Sequence
  Description of Artificial Sequence: Synthetic oligonucleotide
  Sense strand starting at position 3207 of SEQ ID NO: 2270
uugagaagccucuauguga

SEQ ID NO: 176111 - RNA, 19 nt, Artificial Sequence
  Description of Artificial Sequence: Synthetic oligonucleotide
  Antisense strand to SEQ ID NO: 176110
ucacauagaggcuucucaa

SEQ ID NO: 176112 - RNA, 19 nt, Artificial Sequence
  Description of Artificial Sequence: Synthetic oligonucleotide
  Sense strand starting at position 3227 of SEQ ID NO: 2270
acggcugccagggagaaau

SEQ ID NO: 176113 - RNA, 19 nt, Artificial Sequence
  Description of Artificial Sequence: Synthetic oligonucleotide
  Antisense strand to SEQ ID NO: 176112
auuucucccuggcagccgu

SEQ ID NO: 176114 - RNA, 19 nt, Artificial Sequence
  Description of Artificial Sequence: Synthetic oligonucleotide
  Sense strand starting at position 3295 of SEQ ID NO: 2270
agaggcugugauggauaau

SEQ ID NO: 176115 - RNA, 19 nt, Artificial Sequence
  Description of Artificial Sequence: Synthetic oligonucleotide
  Antisense strand to SEQ ID NO: 176114
auuauccaucacagccucu

SEQ ID NO: 176116 - RNA, 19 nt, Artificial Sequence
  Description of Artificial Sequence: Synthetic oligonucleotide
  Sense strand starting at position 3393 of SEQ ID NO: 2270
auugccuuggcuuauuaua

SEQ ID NO: 176117 - RNA, 19 nt, Artificial Sequence
  Description of Artificial Sequence: Synthetic oligonucleotide
  Antisense strand to SEQ ID NO: 176116
uauaauaagccaaggcaau

SEQ ID NO: 176118 - RNA, 19 nt, Artificial Sequence
  Description of Artificial Sequence: Synthetic oligonucleotide
  Sense strand starting at position 3779 of SEQ ID NO: 2270
aggccuugauauucucaaa

SEQ ID NO: 176119 - RNA, 19 nt, Artificial Sequence
  Description of Artificial Sequence: Synthetic oligonucleotide
  Antisense strand to SEQ ID NO: 176118
uuugagaauaucaaggccu

SEQ ID NO: 176120 - RNA, 19 nt, Artificial Sequence
  Description of Artificial Sequence: Synthetic oligonucleotide
  Sense strand starting at position 3800 of SEQ ID NO: 2270
augaauucucugcaugaau

SEQ ID NO: 176121 - RNA, 19 nt, Artificial Sequence
  Description of Artificial Sequence: Synthetic oligonucleotide
  Antisense strand to SEQ ID NO: 176120
auucaugcagagaauucau

SEQ ID NO: 176122 - RNA, 19 nt, Artificial Sequence
  Description of Artificial Sequence: Synthetic oligonucleotide
  Sense strand starting at position 3910 of SEQ ID NO: 2270
ccggauguccgcagcaaga

SEQ ID NO: 176123 - RNA, 19 nt, Artificial Sequence
  Description of Artificial Sequence: Synthetic oligonucleotide
  Antisense strand to SEQ ID NO: 176122
ucuugcugcggacauccgg

SEQ ID NO: 176124 - RNA, 19 nt, Artificial Sequence
  Description of Artificial Sequence: Synthetic oligonucleotide
  Sense strand starting at position 3973 of SEQ ID NO: 2271
aucagcaacucaguugaau

SEQ ID NO: 176125 - RNA, 19 nt, Artificial Sequence
  Description of Artificial Sequence: Synthetic oligonucleotide
  Antisense strand to SEQ ID NO: 176124
auucaacugaguugcugau

SEQ ID NO: 176126 - RNA, 19 nt, Artificial Sequence
  Description of Artificial Sequence: Synthetic oligonucleotide
  Sense strand starting at position 3945 of SEQ ID NO: 2271
ugauuucugcgaugaguuu

SEQ ID NO: 176127 - RNA, 19 nt, Artificial Sequence
  Description of Artificial Sequence: Synthetic oligonucleotide
  Antisense strand to SEQ ID NO: 176126
aaacucaucgcagaaauca

SEQ ID NO: 176128 - RNA, 19 nt, Artificial Sequence
  Description of Artificial Sequence: Synthetic oligonucleotide
  Sense strand starting at position 3942 of SEQ ID NO: 2271
gugugauuucugcgaugag

SEQ ID NO: 176129 - RNA, 19 nt, Artificial Sequence
  Description of Artificial Sequence: Synthetic oligonucleotide
  Antisense strand to SEQ ID NO: 176128
cucaucgcagaaaucacac

SEQ ID NO: 176130 - RNA, 19 nt, Artificial Sequence
  Description of Artificial Sequence: Synthetic oligonucleotide
  Sense strand starting at position 3830 of SEQ ID NO: 2271
gggacacaagucugaugua

SEQ ID NO: 176131 - RNA, 19 nt, Artificial Sequence
  Description of Artificial Sequence: Synthetic oligonucleotide
  Antisense strand to SEQ ID NO: 176130
uacaucagacuuguguccc

SEQ ID NO: 176132 - RNA, 19 nt, Artificial Sequence
  Description of Artificial Sequence: Synthetic oligonucleotide
  Sense strand starting at position 3804 of SEQ ID NO: 2271
uccacuguguuucuaauuu

SEQ ID NO: 176133 - RNA, 19 nt, Artificial Sequence
  Description of Artificial Sequence: Synthetic oligonucleotide
  Antisense strand to SEQ ID NO: 176132
aaauuagaaacacagugga

SEQ ID NO: 176134 - RNA, 19 nt, Artificial Sequence
  Description of Artificial Sequence: Synthetic oligonucleotide
  Sense strand starting at position 3530 of SEQ ID NO: 2271
cuggauagcuuucuuuaaa

SEQ ID NO: 176135 - RNA, 19 nt, Artificial Sequence
  Description of Artificial Sequence: Synthetic oligonucleotide
  Antisense strand to SEQ ID NO: 176134
uuuaaagaaagcuauccag

SEQ ID NO: 176136 - RNA, 19 nt, Artificial Sequence
  Description of Artificial Sequence: Synthetic oligonucleotide
  Sense strand starting at position 3269 of SEQ ID NO: 2271
uguccucaucuggacauau

SEQ ID NO: 176137 - RNA, 19 nt, Artificial Sequence
  Description of Artificial Sequence: Synthetic oligonucleotide
  Antisense strand to SEQ ID NO: 176136
auauguccagaugaggaca

SEQ ID NO: 176138 - RNA, 19 nt, Artificial Sequence
  Description of Artificial Sequence: Synthetic oligonucleotide
  Sense strand starting at position 2934 of SEQ ID NO: 2271
ccagucuaugauggagaau

SEQ ID NO: 176139 - RNA, 19 nt, Artificial Sequence
  Description of Artificial Sequence: Synthetic oligonucleotide
  Antisense strand to SEQ ID NO: 176138
auucuccaucauagacugg

SEQ ID NO: 176140 - RNA, 19 nt, Artificial Sequence
  Description of Artificial Sequence: Synthetic oligonucleotide
  Sense strand starting at position 2882 of SEQ ID NO: 2271
acauuucucuuuguaugca

SEQ ID NO: 176141 - RNA, 19 nt, Artificial Sequence
  Description of Artificial Sequence: Synthetic oligonucleotide
  Antisense strand to SEQ ID NO: 176140
ugcauacaaagagaaaugu

SEQ ID NO: 176142 - RNA, 19 nt, Artificial Sequence
  Description of Artificial Sequence: Synthetic oligonucleotide
  Sense strand starting at position 2792 of SEQ ID NO: 2271
cugaccaugugacucuaau

SEQ ID NO: 176143 - RNA, 19 nt, Artificial Sequence
  Description of Artificial Sequence: Synthetic oligonucleotide
  Antisense strand to SEQ ID NO: 176142
auuagagucacauggucag

SEQ ID NO: 176144 - RNA, 19 nt, Artificial Sequence
  Description of Artificial Sequence: Synthetic oligonucleotide
  Sense strand starting at position 2785 of SEQ ID NO: 2271
aucaguucugaccauguga

SEQ ID NO: 176145 - RNA, 19 nt, Artificial Sequence
  Description of Artificial Sequence: Synthetic oligonucleotide
  Antisense strand to SEQ ID NO: 176144
ucacauggucagaacugau

SEQ ID NO: 176146 - RNA, 19 nt, Artificial Sequence
  Description of Artificial Sequence: Synthetic oligonucleotide
  Sense strand starting at position 2641 of SEQ ID NO: 2271
gcauuugcuaugugucaga

SEQ ID NO: 176147 - RNA, 19 nt, Artificial Sequence
  Description of Artificial Sequence: Synthetic oligonucleotide
  Antisense strand to SEQ ID NO: 176146
ucugacacauagcaaaugc

SEQ ID NO: 176148 - RNA, 19 nt, Artificial Sequence
  Description of Artificial Sequence: Synthetic oligonucleotide
  Sense strand starting at position 2458 of SEQ ID NO: 2271
guauaagagcuacauaauu

SEQ ID NO: 176149 - RNA, 19 nt, Artificial Sequence
  Description of Artificial Sequence: Synthetic oligonucleotide
  Antisense strand to SEQ ID NO: 176148
aauuauguagcucuuauac

SEQ ID NO: 176150 - RNA, 19 nt, Artificial Sequence
  Description of Artificial Sequence: Synthetic oligonucleotide
  Sense strand starting at position 2447 of SEQ ID NO: 2271
agguuuggccuguauaaga

SEQ ID NO: 176151 - RNA, 19 nt, Artificial Sequence
  Description of Artificial Sequence: Synthetic oligonucleotide
  Antisense strand to SEQ ID NO: 176150
ucuuauacaggccaaaccu

SEQ ID NO: 176152 - RNA, 19 nt, Artificial Sequence
  Description of Artificial Sequence: Synthetic oligonucleotide
  Sense strand starting at position 2372 of SEQ ID NO: 2271
auagaaugugucuacauac

SEQ ID NO: 176153 - RNA, 19 nt, Artificial Sequence
  Description of Artificial Sequence: Synthetic oligonucleotide
  Antisense strand to SEQ ID NO: 176152
guauguagacacauucuau

SEQ ID NO: 176154 - RNA, 19 nt, Artificial Sequence
  Description of Artificial Sequence: Synthetic oligonucleotide
  Sense strand starting at position 2356 of SEQ ID NO: 2271
uugguaaagagugguaaua

SEQ ID NO: 176155 - RNA, 19 nt, Artificial Sequence
  Description of Artificial Sequence: Synthetic oligonucleotide
  Antisense strand to SEQ ID NO: 176154
uauuaccacucuuuaccaa

SEQ ID NO: 176156 - RNA, 19 nt, Artificial Sequence
  Description of Artificial Sequence: Synthetic oligonucleotide
  Sense strand starting at position 2131 of SEQ ID NO: 2271
acuaaucagucuguuuaaa

SEQ ID NO: 176157 - RNA, 19 nt, Artificial Sequence
  Description of Artificial Sequence: Synthetic oligonucleotide
  Antisense strand to SEQ ID NO: 176156
uuuaaacagacugauuagu

SEQ ID NO: 176158 - RNA, 19 nt, Artificial Sequence
  Description of Artificial Sequence: Synthetic oligonucleotide
  Sense strand starting at position 2104 of SEQ ID NO: 2271
gcuuucgagggugaaauca

SEQ ID NO: 176159 - RNA, 19 nt, Artificial Sequence
  Description of Artificial Sequence: Synthetic oligonucleotide
  Antisense strand to SEQ ID NO: 176158
ugauuucacccucgaaagc

SEQ ID NO: 176160 - RNA, 19 nt, Artificial Sequence
  Description of Artificial Sequence: Synthetic oligonucleotide
  Sense strand starting at position 1829 of SEQ ID NO: 2271
guuaguuaucaguaacuau

SEQ ID NO: 176161 - RNA, 19 nt, Artificial Sequence
  Description of Artificial Sequence: Synthetic oligonucleotide
  Antisense strand to SEQ ID NO: 176160
auaguuacugauaacuaac

SEQ ID NO: 176162 - RNA, 19 nt, Artificial Sequence
  Description of Artificial Sequence: Synthetic oligonucleotide
  Sense strand starting at position 1814 of SEQ ID NO: 2271
auauuccaaugaguuguua

SEQ ID NO: 176163 - RNA, 19 nt, Artificial Sequence
  Description of Artificial Sequence: Synthetic oligonucleotide
  Antisense strand to SEQ ID NO: 176162
uaacaacucauuggaauau

SEQ ID NO: 176164 - RNA, 19 nt, Artificial Sequence
  Description of Artificial Sequence: Synthetic oligonucleotide
  Sense strand starting at position 1058 of SEQ ID NO: 2271
uuagaacaugacugcuuau

SEQ ID NO: 176165 - RNA, 19 nt, Artificial Sequence
  Description of Artificial Sequence: Synthetic oligonucleotide
  Antisense strand to SEQ ID NO: 176164
auaagcagucauguucuaa

SEQ ID NO: 176166 - RNA, 19 nt, Artificial Sequence
  Description of Artificial Sequence: Synthetic oligonucleotide
  Sense strand starting at position 1057 of SEQ ID NO: 2271
cuuagaacaugacugcuua

SEQ ID NO: 176167 - RNA, 19 nt, Artificial Sequence
  Description of Artificial Sequence: Synthetic oligonucleotide
  Antisense strand to SEQ ID NO: 176166
uaagcagucauguucuaag

SEQ ID NO: 176168 - RNA, 19 nt, Artificial Sequence
  Description of Artificial Sequence: Synthetic oligonucleotide
  Sense strand starting at position 1016 of SEQ ID NO: 2271
cuauaugaguggucaaaga

SEQ ID NO: 176169 - RNA, 19 nt, Artificial Sequence
  Description of Artificial Sequence: Synthetic oligonucleotide
  Antisense strand to SEQ ID NO: 176168
ucuuugaccacucauauag

SEQ ID NO: 176170 - RNA, 19 nt, Artificial Sequence
  Description of Artificial Sequence: Synthetic oligonucleotide
  Sense strand starting at position 991 of SEQ ID NO: 2271
agauguuauguuugcauuu

SEQ ID NO: 176171 - RNA, 19 nt, Artificial Sequence
  Description of Artificial Sequence: Synthetic oligonucleotide
  Antisense strand to SEQ ID NO: 176170
aaaugcaaacauaacaucu

SEQ ID NO: 176172 - RNA, 19 nt, Artificial Sequence
  Description of Artificial Sequence: Synthetic oligonucleotide
  Sense strand starting at position 859 of SEQ ID NO: 2271
gguuuacaagaaugaucua

SEQ ID NO: 176173 - RNA, 19 nt, Artificial Sequence
  Description of Artificial Sequence: Synthetic oligonucleotide
  Antisense strand to SEQ ID NO: 176172
uagaucauucuuguaaacc

SEQ ID NO: 176174 - RNA, 19 nt, Artificial Sequence
  Description of Artificial Sequence: Synthetic oligonucleotide
  Sense strand starting at position 794 of SEQ ID NO: 2271
agaacaauguggccaauau

SEQ ID NO: 176175 - RNA, 19 nt, Artificial Sequence
  Description of Artificial Sequence: Synthetic oligonucleotide
  Antisense strand to SEQ ID NO: 176174
auauuggccacauuguucu

SEQ ID NO: 176176 - RNA, 19 nt, Artificial Sequence
  Description of Artificial Sequence: Synthetic oligonucleotide
  Sense strand starting at position 654 of SEQ ID NO: 2271
ugaaauccugaaggcaaua

SEQ ID NO: 176177 - RNA, 19 nt, Artificial Sequence
  Description of Artificial Sequence: Synthetic oligonucleotide
  Antisense strand to SEQ ID NO: 176176
uauugccuucaggauuuca

SEQ ID NO: 176178 - RNA, 19 nt, Artificial Sequence
  Description of Artificial Sequence: Synthetic oligonucleotide
  Sense strand starting at position 628 of SEQ ID NO: 2271
ucuuguuaucauggaacaa

SEQ ID NO: 176179 - RNA, 19 nt, Artificial Sequence
  Description of Artificial Sequence: Synthetic oligonucleotide
  Antisense strand to SEQ ID NO: 176178
uuguuccaugauaacaaga

SEQ ID NO: 176180 - RNA, 19 nt, Artificial Sequence
  Description of Artificial Sequence: Synthetic oligonucleotide
  Sense strand starting at position 603 of SEQ ID NO: 2271
gguugugacacuuagauua

SEQ ID NO: 176181 - RNA, 19 nt, Artificial Sequence
  Description of Artificial Sequence: Synthetic oligonucleotide
  Antisense strand to SEQ ID NO: 176180
uaaucuaagugucacaacc

SEQ ID NO: 176182 - RNA, 19 nt, Artificial Sequence
  Description of Artificial Sequence: Synthetic oligonucleotide
  Sense strand starting at position 467 of SEQ ID NO: 2271
uccuuagucaggcagguaa

SEQ ID NO: 176183 - RNA, 19 nt, Artificial Sequence
  Description of Artificial Sequence: Synthetic oligonucleotide
  Antisense strand to SEQ ID NO: 176182
uuaccugccugacuaagga

SEQ ID NO: 176184 - RNA, 19 nt, Artificial Sequence
  Description of Artificial Sequence: Synthetic oligonucleotide
  Sense strand starting at position 404 of SEQ ID NO: 2271
ccaugagugcauuacauaa

SEQ ID NO: 176185 - RNA, 19 nt, Artificial Sequence
  Description of Artificial Sequence: Synthetic oligonucleotide
  Antisense strand to SEQ ID NO: 176184
uuauguaaugcacucaugg

SEQ ID NO: 176186 - RNA, 19 nt, Artificial Sequence
  Description of Artificial Sequence: Synthetic oligonucleotide
  Sense strand starting at position 349 of SEQ ID NO: 2271
ucauuuggucauugcuuua

SEQ ID NO: 176187 - RNA, 19 nt, Artificial Sequence
  Description of Artificial Sequence: Synthetic oligonucleotide
  Antisense strand to SEQ ID NO: 176186
uaaagcaaugaccaaauga

SEQ ID NO: 176188 - RNA, 19 nt, Artificial Sequence
  Description of Artificial Sequence: Synthetic oligonucleotide
  Sense strand starting at position 348 of SEQ ID NO: 2271
gucauuuggucauugcuuu

SEQ ID NO: 176189 - RNA, 19 nt, Artificial Sequence
  Description of Artificial Sequence: Synthetic oligonucleotide
  Antisense strand to SEQ ID NO: 176188
aaagcaaugaccaaaugac

SEQ ID NO: 176190 - RNA, 19 nt, Artificial Sequence
  Description of Artificial Sequence: Synthetic oligonucleotide
  Sense strand starting at position 346 of SEQ ID NO: 2271
gugucauuuggucauugcu

SEQ ID NO: 176191 - RNA, 19 nt, Artificial Sequence
  Description of Artificial Sequence: Synthetic oligonucleotide
  Antisense strand to SEQ ID NO: 176190
agcaaugaccaaaugacac

SEQ ID NO: 176192 - RNA, 19 nt, Artificial Sequence
  Description of Artificial Sequence: Synthetic oligonucleotide
  Sense strand starting at position 342 of SEQ ID NO: 2271
agaugugucauuuggucau

SEQ ID NO: 176193 - RNA, 19 nt, Artificial Sequence
  Description of Artificial Sequence: Synthetic oligonucleotide
  Antisense strand to SEQ ID NO: 176192
augaccaaaugacacaucu

SEQ ID NO: 176194 - RNA, 19 nt, Artificial Sequence
  Description of Artificial Sequence: Synthetic oligonucleotide
  Sense strand starting at position 266 of SEQ ID NO: 2271
uauauuauacaugggugau

SEQ ID NO: 176195 - RNA, 19 nt, Artificial Sequence
  Description of Artificial Sequence: Synthetic oligonucleotide
  Antisense strand to SEQ ID NO: 176194
aucacccauguauaauaua

SEQ ID NO: 176196 - RNA, 19 nt, Artificial Sequence
  Description of Artificial Sequence: Synthetic oligonucleotide
  Sense strand starting at position 130 of SEQ ID NO: 2271
gugguaucucaucacaagu

SEQ ID NO: 176197 - RNA, 19 nt, Artificial Sequence
  Description of Artificial Sequence: Synthetic oligonucleotide
  Antisense strand to SEQ ID NO: 176196
acuugugaugagauaccac

SEQ ID NO: 176198 - RNA, 19 nt, Artificial Sequence
  Description of Artificial Sequence: Synthetic oligonucleotide
  Sense strand starting at position 129 of SEQ ID NO: 2271
agugguaucucaucacaag

SEQ ID NO: 176199 - RNA, 19 nt, Artificial Sequence
  Description of Artificial Sequence: Synthetic oligonucleotide
  Antisense strand to SEQ ID NO: 176198
cuugugaugagauaccacu

SEQ ID NO: 176200 - RNA, 19 nt, Artificial Sequence
  Description of Artificial Sequence: Synthetic oligonucleotide
  Sense strand starting at position 118 of SEQ ID NO: 2271
aaagucagaucagugguau

SEQ ID NO: 176201 - RNA, 19 nt, Artificial Sequence
  Description of Artificial Sequence: Synthetic oligonucleotide
  Antisense strand to SEQ ID NO: 176200
auaccacugaucugacuuu

SEQ ID NO: 176202 - RNA, 19 nt, Artificial Sequence
  Description of Artificial Sequence: Synthetic oligonucleotide
  Sense strand starting at position 101 of SEQ ID NO: 2271
augugauacuacuugcaaa

SEQ ID NO: 176203 - RNA, 19 nt, Artificial Sequence
  Description of Artificial Sequence: Synthetic oligonucleotide
  Antisense strand to SEQ ID NO: 176202
uuugcaaguaguaucacau

SEQ ID NO: 176204 - RNA, 19 nt, Artificial Sequence
  Description of Artificial Sequence: Synthetic oligonucleotide
  Sense strand starting at position 14 of SEQ ID NO: 2272
aggagaagcuugucccuca

SEQ ID NO: 176205 - RNA, 19 nt, Artificial Sequence
  Description of Artificial Sequence: Synthetic oligonucleotide
  Antisense strand to SEQ ID NO: 176204
ugagggacaagcuucuccu

SEQ ID NO: 176206 - RNA, 19 nt, Artificial Sequence
  Description of Artificial Sequence: Synthetic oligonucleotide
  Sense strand starting at position 682 of SEQ ID NO: 2272
uagaaacagucuccgaguu

SEQ ID NO: 176207 - RNA, 19 nt, Artificial Sequence
  Description of Artificial Sequence: Synthetic oligonucleotide
  Antisense strand to SEQ ID NO: 176206
aacucggagacuguuucua

SEQ ID NO: 176208 - RNA, 19 nt, Artificial Sequence
  Description of Artificial Sequence: Synthetic oligonucleotide
  Sense strand starting at position 683 of SEQ ID NO: 2272
agaaacagucuccgaguuu

SEQ ID NO: 176209 - RNA, 19 nt, Artificial Sequence
  Description of Artificial Sequence: Synthetic oligonucleotide
  Antisense strand to SEQ ID NO: 176208
aaacucggagacuguuucu

SEQ ID NO: 176210 - RNA, 19 nt, Artificial Sequence
  Description of Artificial Sequence: Synthetic oligonucleotide
  Sense strand starting at position 690 of SEQ ID NO: 2272
gucuccgaguuucugagaa

SEQ ID NO: 176211 - RNA, 19 nt, Artificial Sequence
  Description of Artificial Sequence: Synthetic oligonucleotide
  Antisense strand to SEQ ID NO: 176210
uucucagaaacucggagac

SEQ ID NO: 176212 - RNA, 19 nt, Artificial Sequence
  Description of Artificial Sequence: Synthetic oligonucleotide
  Sense strand starting at position 738 of SEQ ID NO: 2272
ccagcacucgaaugggauu

SEQ ID NO: 176213 - RNA, 19 nt, Artificial Sequence
  Description of Artificial Sequence: Synthetic oligonucleotide
  Antisense strand to SEQ ID NO: 176212
aaucccauucgagugcugg

SEQ ID NO: 176214 - RNA, 19 nt, Artificial Sequence
  Description of Artificial Sequence: Synthetic oligonucleotide
  Sense strand starting at position 858 of SEQ ID NO: 2272
gcaaccugauccucucaga

SEQ ID NO: 176215 - RNA, 19 nt, Artificial Sequence
  Description of Artificial Sequence: Synthetic oligonucleotide
  Antisense strand to SEQ ID NO: 176214
ucugagaggaucagguugc

SEQ ID NO: 176216 - RNA, 19 nt, Artificial Sequence
  Description of Artificial Sequence: Synthetic oligonucleotide
  Sense strand starting at position 895 of SEQ ID NO: 2272
aaggaagauucgcccucua

SEQ ID NO: 176217 - RNA, 19 nt, Artificial Sequence
  Description of Artificial Sequence: Synthetic oligonucleotide
  Antisense strand to SEQ ID NO: 176216
uagagggcgaaucuuccuu

SEQ ID NO: 176218 - RNA, 19 nt, Artificial Sequence
  Description of Artificial Sequence: Synthetic oligonucleotide
  Sense strand starting at position 900 of SEQ ID NO: 2272
agauucgcccucuaagaca

SEQ ID NO: 176219 - RNA, 19 nt, Artificial Sequence
  Description of Artificial Sequence: Synthetic oligonucleotide
  Antisense strand to SEQ ID NO: 176218
ugucuuagagggcgaaucu

SEQ ID NO: 176220 - RNA, 19 nt, Artificial Sequence
  Description of Artificial Sequence: Synthetic oligonucleotide
  Sense strand starting at position 909 of SEQ ID NO: 2272
cucuaagacaugggucaga

SEQ ID NO: 176221 - RNA, 19 nt, Artificial Sequence
  Description of Artificial Sequence: Synthetic oligonucleotide
  Antisense strand to SEQ ID NO: 176220
ucugacccaugucuuagag

SEQ ID NO: 176222 - RNA, 19 nt, Artificial Sequence
  Description of Artificial Sequence: Synthetic oligonucleotide
  Sense strand starting at position 970 of SEQ ID NO: 2272
ccaggaaugugcucugaaa

SEQ ID NO: 176223 - RNA, 19 nt, Artificial Sequence
  Description of Artificial Sequence: Synthetic oligonucleotide
  Antisense strand to SEQ ID NO: 176222
uuucagagcacauuccugg

SEQ ID NO: 176224 - RNA, 19 nt, Artificial Sequence
  Description of Artificial Sequence: Synthetic oligonucleotide
  Sense strand starting at position 972 of SEQ ID NO: 2272
aggaaugugcucugaaauu

SEQ ID NO: 176225 - RNA, 19 nt, Artificial Sequence
  Description of Artificial Sequence: Synthetic oligonucleotide
  Antisense strand to SEQ ID NO: 176224
aauuucagagcacauuccu

SEQ ID NO: 176226 - RNA, 19 nt, Artificial Sequence
  Description of Artificial Sequence: Synthetic oligonucleotide
  Sense strand starting at position 1056 of SEQ ID NO: 2272
agggaaucuuucucuacca

SEQ ID NO: 176227 - RNA, 19 nt, Artificial Sequence
  Description of Artificial Sequence: Synthetic oligonucleotide
  Antisense strand to SEQ ID NO: 176226
ugguagagaaagauucccu

SEQ ID NO: 176228 - RNA, 19 nt, Artificial Sequence
  Description of Artificial Sequence: Synthetic oligonucleotide
  Sense strand starting at position 1057 of SEQ ID NO: 2272
gggaaucuuucucuaccac

SEQ ID NO: 176229 - RNA, 19 nt, Artificial Sequence
  Description of Artificial Sequence: Synthetic oligonucleotide
  Antisense strand to SEQ ID NO: 176228
gugguagagaaagauuccc

SEQ ID NO: 176230 - RNA, 19 nt, Artificial Sequence
  Description of Artificial Sequence: Synthetic oligonucleotide
  Sense strand starting at position 1293 of SEQ ID NO: 2272
cugagucagcggcaucaaa

SEQ ID NO: 176231 - RNA, 19 nt, Artificial Sequence
  Description of Artificial Sequence: Synthetic oligonucleotide
  Antisense strand to SEQ ID NO: 176230
uuugaugccgcugacucag

SEQ ID NO: 176232 - RNA, 19 nt, Artificial Sequence
  Description of Artificial Sequence: Synthetic oligonucleotide
  Sense strand starting at position 1300 of SEQ ID NO: 2272
agcggcaucaaauggaauu

SEQ ID NO: 176233 - RNA, 19 nt, Artificial Sequence
  Description of Artificial Sequence: Synthetic oligonucleotide
  Antisense strand to SEQ ID NO: 176232
aauuccauuugaugccgcu

SEQ ID NO: 176234 - RNA, 19 nt, Artificial Sequence
  Description of Artificial Sequence: Synthetic oligonucleotide
  Sense strand starting at position 1371 of SEQ ID NO: 2272
ucaguacuuccaggacagu

SEQ ID NO: 176235 - RNA, 19 nt, Artificial Sequence
  Description of Artificial Sequence: Synthetic oligonucleotide
  Antisense strand to SEQ ID NO: 176234
acuguccuggaaguacuga

SEQ ID NO: 176236 - RNA, 19 nt, Artificial Sequence
  Description of Artificial Sequence: Synthetic oligonucleotide
  Sense strand starting at position 1372 of SEQ ID NO: 2272
caguacuuccaggacaguu

SEQ ID NO: 176237 - RNA, 19 nt, Artificial Sequence
  Description of Artificial Sequence: Synthetic oligonucleotide
  Antisense strand to SEQ ID NO: 176236
aacuguccuggaaguacug

SEQ ID NO: 176238 - RNA, 19 nt, Artificial Sequence
  Description of Artificial Sequence: Synthetic oligonucleotide
  Sense strand starting at position 1380 of SEQ ID NO: 2272
ccaggacaguuucugaguu

SEQ ID NO: 176239 - RNA, 19 nt, Artificial Sequence
  Description of Artificial Sequence: Synthetic oligonucleotide
  Antisense strand to SEQ ID NO: 176238
aacucagaaacuguccugg

SEQ ID NO: 176240 - RNA, 19 nt, Artificial Sequence
  Description of Artificial Sequence: Synthetic oligonucleotide
  Sense strand starting at position 1384 of SEQ ID NO: 2272
gacaguuucugaguuccua

SEQ ID NO: 176241 - RNA, 19 nt, Artificial Sequence
  Description of Artificial Sequence: Synthetic oligonucleotide
  Antisense strand to SEQ ID NO: 176240
uaggaacucagaaacuguc

SEQ ID NO: 176242 - RNA, 19 nt, Artificial Sequence
  Description of Artificial Sequence: Synthetic oligonucleotide
  Sense strand starting at position 1395 of SEQ ID NO: 2272
aguuccuagccuugagaau

SEQ ID NO: 176243 - RNA, 19 nt, Artificial Sequence
  Description of Artificial Sequence: Synthetic oligonucleotide
  Antisense strand to SEQ ID NO: 176242
auucucaaggcuaggaacu

SEQ ID NO: 176244 - RNA, 19 nt, Artificial Sequence
  Description of Artificial Sequence: Synthetic oligonucleotide
  Sense strand starting at position 1396 of SEQ ID NO: 2272
guuccuagccuugagaaua

SEQ ID NO: 176245 - RNA, 19 nt, Artificial Sequence
  Description of Artificial Sequence: Synthetic oligonucleotide
  Antisense strand to SEQ ID NO: 176244
uauucucaaggcuaggaac

SEQ ID NO: 176246 - RNA, 19 nt, Artificial Sequence
  Description of Artificial Sequence: Synthetic oligonucleotide
  Sense strand starting at position 1418 of SEQ ID NO: 2272
ccaggagacucacuugacu

SEQ ID NO: 176247 - RNA, 19 nt, Artificial Sequence
  Description of Artificial Sequence: Synthetic oligonucleotide
  Antisense strand to SEQ ID NO: 176246
agucaagugagucuccugg

SEQ ID NO: 176248 - RNA, 19 nt, Artificial Sequence
  Description of Artificial Sequence: Synthetic oligonucleotide
  Sense strand starting at position 1531 of SEQ ID NO: 2272
ggagucucuguugguuaga

SEQ ID NO: 176249 - RNA, 19 nt, Artificial Sequence
  Description of Artificial Sequence: Synthetic oligonucleotide
  Antisense strand to SEQ ID NO: 176248
ucuaaccaacagagacucc

SEQ ID NO: 176250 - RNA, 19 nt, Artificial Sequence
  Description of Artificial Sequence: Synthetic oligonucleotide
  Sense strand starting at position 1542 of SEQ ID NO: 2272
ugguuagagccucauugua

SEQ ID NO: 176251 - RNA, 19 nt, Artificial Sequence
  Description of Artificial Sequence: Synthetic oligonucleotide
  Antisense strand to SEQ ID NO: 176250
uacaaugaggcucuaacca

SEQ ID NO: 176252 - RNA, 19 nt, Artificial Sequence
  Description of Artificial Sequence: Synthetic oligonucleotide
  Sense strand starting at position 1827 of SEQ ID NO: 2272
ggcagacucuggguaaaua

SEQ ID NO: 176253 - RNA, 19 nt, Artificial Sequence
  Description of Artificial Sequence: Synthetic oligonucleotide
  Antisense strand to SEQ ID NO: 176252
uauuuacccagagucugcc

SEQ ID NO: 176254 - RNA, 19 nt, Artificial Sequence
  Description of Artificial Sequence: Synthetic oligonucleotide
  Sense strand starting at position 1828 of SEQ ID NO: 2272
gcagacucuggguaaauau

SEQ ID NO: 176255 - RNA, 19 nt, Artificial Sequence
  Description of Artificial Sequence: Synthetic oligonucleotide
  Antisense strand to SEQ ID NO: 176254
auauuuacccagagucugc

SEQ ID NO: 176256 - RNA, 19 nt, Artificial Sequence
  Description of Artificial Sequence: Synthetic oligonucleotide
  Sense strand starting at position 1913 of SEQ ID NO: 2272
cgagccuuaccucagaaca

SEQ ID NO: 176257 - RNA, 19 nt, Artificial Sequence
  Description of Artificial Sequence: Synthetic oligonucleotide
  Antisense strand to SEQ ID NO: 176256
uguucugagguaaggcucg

SEQ ID NO: 176258 - RNA, 19 nt, Artificial Sequence
  Description of Artificial Sequence: Synthetic oligonucleotide
  Sense strand starting at position 2187 of SEQ ID NO: 2272
ccuccagcugcucagauaa

SEQ ID NO: 176259 - RNA, 19 nt, Artificial Sequence
  Description of Artificial Sequence: Synthetic oligonucleotide
  Antisense strand to SEQ ID NO: 176258
uuaucugagcagcuggagg

SEQ ID NO: 176260 - RNA, 19 nt, Artificial Sequence
  Description of Artificial Sequence: Synthetic oligonucleotide
  Sense strand starting at position 2221 of SEQ ID NO: 2272
agcagauaugcagggaaca

SEQ ID NO: 176261 - RNA, 19 nt, Artificial Sequence
  Description of Artificial Sequence: Synthetic oligonucleotide
  Antisense strand to SEQ ID NO: 176260
uguucccugcauaucugcu

SEQ ID NO: 176262 - RNA, 19 nt, Artificial Sequence
  Description of Artificial Sequence: Synthetic oligonucleotide
  Sense strand starting at position 2368 of SEQ ID NO: 2272
gucucagcaccagaaucuu

SEQ ID NO: 176263 - RNA, 19 nt, Artificial Sequence
  Description of Artificial Sequence: Synthetic oligonucleotide
  Antisense strand to SEQ ID NO: 176262
aagauucuggugcugagac

SEQ ID NO: 176264 - RNA, 19 nt, Artificial Sequence
  Description of Artificial Sequence: Synthetic oligonucleotide
  Sense strand starting at position 2391 of SEQ ID NO: 2272
ggcagagggcaagaguuau

SEQ ID NO: 176265 - RNA, 19 nt, Artificial Sequence
  Description of Artificial Sequence: Synthetic oligonucleotide
  Antisense strand to SEQ ID NO: 176264
auaacucuugcccucugcc

SEQ ID NO: 176266 - RNA, 19 nt, Artificial Sequence
  Description of Artificial Sequence: Synthetic oligonucleotide
  Sense strand starting at position 2443 of SEQ ID NO: 2272
agacaucuuccaggcuacu

SEQ ID NO: 176267 - RNA, 19 nt, Artificial Sequence
  Description of Artificial Sequence: Synthetic oligonucleotide
  Antisense strand to SEQ ID NO: 176266
aguagccuggaagaugucu

SEQ ID NO: 176268 - RNA, 19 nt, Artificial Sequence
  Description of Artificial Sequence: Synthetic oligonucleotide
  Sense strand starting at position 2724 of SEQ ID NO: 2272
gggcuaugaucugcuaaac

SEQ ID NO: 176269 - RNA, 19 nt, Artificial Sequence
  Description of Artificial Sequence: Synthetic oligonucleotide
  Antisense strand to SEQ ID NO: 176268
guuuagcagaucauagccc

SEQ ID NO: 176270 - RNA, 19 nt, Artificial Sequence
  Description of Artificial Sequence: Synthetic oligonucleotide
  Sense strand starting at position 2842 of SEQ ID NO: 2272
caggguuugguagauuaug

SEQ ID NO: 176271 - RNA, 19 nt, Artificial Sequence
  Description of Artificial Sequence: Synthetic oligonucleotide
  Antisense strand to SEQ ID NO: 176270
cauaaucuaccaaacccug

SEQ ID NO: 176272 - RNA, 19 nt, Artificial Sequence
  Description of Artificial Sequence: Synthetic oligonucleotide
  Sense strand starting at position 3197 of SEQ ID NO: 2272
ccacuaauguccuugaaag

SEQ ID NO: 176273 - RNA, 19 nt, Artificial Sequence
  Description of Artificial Sequence: Synthetic oligonucleotide
  Antisense strand to SEQ ID NO: 176272
cuuucaaggacauuagugg

SEQ ID NO: 176274 - RNA, 19 nt, Artificial Sequence
  Description of Artificial Sequence: Synthetic oligonucleotide
  Sense strand starting at position 3198 of SEQ ID NO: 2272
cacuaauguccuugaaagg

SEQ ID NO: 176275 - RNA, 19 nt, Artificial Sequence
  Description of Artificial Sequence: Synthetic oligonucleotide
  Antisense strand to SEQ ID NO: 176274
ccuuucaaggacauuagug

SEQ ID NO: 176276 - RNA, 19 nt, Artificial Sequence
  Description of Artificial Sequence: Synthetic oligonucleotide
  Sense strand starting at position 3486 of SEQ ID NO: 2272
cagauucccgagggauagu

SEQ ID NO: 176277 - RNA, 19 nt, Artificial Sequence
  Description of Artificial Sequence: Synthetic oligonucleotide
  Antisense strand to SEQ ID NO: 176276
acuaucccucgggaaucug

SEQ ID NO: 176278 - RNA, 19 nt, Artificial Sequence
  Description of Artificial Sequence: Synthetic oligonucleotide
  Sense strand starting at position 3596 of SEQ ID NO: 2272
ggguccuggccuggaguaa

SEQ ID NO: 176279 - RNA, 19 nt, Artificial Sequence
  Description of Artificial Sequence: Synthetic oligonucleotide
  Antisense strand to SEQ ID NO: 176278
uuacuccaggccaggaccc

SEQ ID NO: 176280 - RNA, 19 nt, Artificial Sequence
  Description of Artificial Sequence: Synthetic oligonucleotide
  Sense strand starting at position 3605 of SEQ ID NO: 2272
ccuggaguaacguagaauu

SEQ ID NO: 176281 - RNA, 19 nt, Artificial Sequence
  Description of Artificial Sequence: Synthetic oligonucleotide
  Antisense strand to SEQ ID NO: 176280
aauucuacguuacuccagg

SEQ ID NO: 176282 - RNA, 19 nt, Artificial Sequence
  Description of Artificial Sequence: Synthetic oligonucleotide
  Sense strand starting at position 3696 of SEQ ID NO: 2272
caaacagaccacgguuuau

SEQ ID NO: 176283 - RNA, 19 nt, Artificial Sequence
  Description of Artificial Sequence: Synthetic oligonucleotide
  Antisense strand to SEQ ID NO: 176282
auaaaccguggucuguuug

SEQ ID NO: 176284 - RNA, 19 nt, Artificial Sequence
  Description of Artificial Sequence: Synthetic oligonucleotide
  Sense strand starting at position 38 of SEQ ID NO: 2273
gggagaugcuaagauuucu

SEQ ID NO: 176285 - RNA, 19 nt, Artificial Sequence
  Description of Artificial Sequence: Synthetic oligonucleotide
  Antisense strand to SEQ ID NO: 176284
agaaaucuuagcaucuccc

SEQ ID NO: 176286 - RNA, 19 nt, Artificial Sequence
  Description of Artificial Sequence: Synthetic oligonucleotide
  Sense strand starting at position 138 of SEQ ID NO: 2273
gccagaggcagagaguauu

SEQ ID NO: 176287 - RNA, 19 nt, Artificial Sequence
  Description of Artificial Sequence: Synthetic oligonucleotide
  Antisense strand to SEQ ID NO: 176286
aauacucucugccucuggc

SEQ ID NO: 176288 - RNA, 19 nt, Artificial Sequence
  Description of Artificial Sequence: Synthetic oligonucleotide
  Sense strand starting at position 372 of SEQ ID NO: 2273
ucaaguucccuguaggaug

SEQ ID NO: 176289 - RNA, 19 nt, Artificial Sequence
  Description of Artificial Sequence: Synthetic oligonucleotide
  Antisense strand to SEQ ID NO: 176288
cauccuacagggaacuuga

SEQ ID NO: 176290 - RNA, 19 nt, Artificial Sequence
  Description of Artificial Sequence: Synthetic oligonucleotide
  Sense strand starting at position 434 of SEQ ID NO: 2273
ccacuuguugaaugacuca

SEQ ID NO: 176291 - RNA, 19 nt, Artificial Sequence
  Description of Artificial Sequence: Synthetic oligonucleotide
  Antisense strand to SEQ ID NO: 176290
ugagucauucaacaagugg

SEQ ID NO: 176292 - RNA, 19 nt, Artificial Sequence
  Description of Artificial Sequence: Synthetic oligonucleotide
  Sense strand starting at position 494 of SEQ ID NO: 2273
ccuauagugucuccaagac

SEQ ID NO: 176293 - RNA, 19 nt, Artificial Sequence
  Description of Artificial Sequence: Synthetic oligonucleotide
  Antisense strand to SEQ ID NO: 176292
gucuuggagacacuauagg

SEQ ID NO: 176294 - RNA, 19 nt, Artificial Sequence
  Description of Artificial Sequence: Synthetic oligonucleotide
  Sense strand starting at position 1202 of SEQ ID NO: 2273
ggcuugucgggagagaguu

SEQ ID NO: 176295 - RNA, 19 nt, Artificial Sequence
  Description of Artificial Sequence: Synthetic oligonucleotide
  Antisense strand to SEQ ID NO: 176294
aacucucucccgacaagcc

SEQ ID NO: 176296 - RNA, 19 nt, Artificial Sequence
  Description of Artificial Sequence: Synthetic oligonucleotide
  Sense strand starting at position 1253 of SEQ ID NO: 2273
cucgcuuaucuacagacaa

SEQ ID NO: 176297 - RNA, 19 nt, Artificial Sequence
  Description of Artificial Sequence: Synthetic oligonucleotide
  Antisense strand to SEQ ID NO: 176296
uugucuguagauaagcgag

SEQ ID NO: 176298 - RNA, 19 nt, Artificial Sequence
  Description of Artificial Sequence: Synthetic oligonucleotide
  Sense strand starting at position 1332 of SEQ ID NO: 2273
ugucuuaugcaacaguaca

SEQ ID NO: 176299 - RNA, 19 nt, Artificial Sequence
  Description of Artificial Sequence: Synthetic oligonucleotide
  Antisense strand to SEQ ID NO: 176298
uguacuguugcauaagaca

SEQ ID NO: 176300 - RNA, 19 nt, Artificial Sequence
  Description of Artificial Sequence: Synthetic oligonucleotide
  Sense strand starting at position 1402 of SEQ ID NO: 2273
cccuuuaauucgguaaaca

SEQ ID NO: 176301 - RNA, 19 nt, Artificial Sequence
  Description of Artificial Sequence: Synthetic oligonucleotide
  Antisense strand to SEQ ID NO: 176300
uguuuaccgaauuaaaggg

SEQ ID NO: 176302 - RNA, 19 nt, Artificial Sequence
  Description of Artificial Sequence: Synthetic oligonucleotide
  Sense strand starting at position 1403 of SEQ ID NO: 2273
ccuuuaauucgguaaacau

SEQ ID NO: 176303 - RNA, 19 nt, Artificial Sequence
  Description of Artificial Sequence: Synthetic oligonucleotide
  Antisense strand to SEQ ID NO: 176302
auguuuaccgaauuaaagg

SEQ ID NO: 176304 - RNA, 19 nt, Artificial Sequence
  Description of Artificial Sequence: Synthetic oligonucleotide
  Sense strand starting at position 1562 of SEQ ID NO: 2273
gaaaucacguuagccagaa

SEQ ID NO: 176305 - RNA, 19 nt, Artificial Sequence
  Description of Artificial Sequence: Synthetic oligonucleotide
  Antisense strand to SEQ ID NO: 176304
uucuggcuaacgugauuuc

SEQ ID NO: 176306 - RNA, 19 nt, Artificial Sequence
  Description of Artificial Sequence: Synthetic oligonucleotide
  Sense strand starting at position 1563 of SEQ ID NO: 2273
aaaucacguuagccagaaa

SEQ ID NO: 176307 - RNA, 19 nt, Artificial Sequence
  Description of Artificial Sequence: Synthetic oligonucleotide
  Antisense strand to SEQ ID NO: 176306
uuucuggcuaacgugauuu

SEQ ID NO: 176308 - RNA, 19 nt, Artificial Sequence
  Description of Artificial Sequence: Synthetic oligonucleotide
  Sense strand starting at position 2267 of SEQ ID NO: 2273
gauagaggcuucccucuga

SEQ ID NO: 176309 - RNA, 19 nt, Artificial Sequence
  Description of Artificial Sequence: Synthetic oligonucleotide
  Antisense strand to SEQ ID NO: 176308
ucagagggaagccucuauc

SEQ ID NO: 176310 - RNA, 19 nt, Artificial Sequence
  Description of Artificial Sequence: Synthetic oligonucleotide
  Sense strand starting at position 2330 of SEQ ID NO: 2273
agauccuuugcccaugauu

SEQ ID NO: 176311 - RNA, 19 nt, Artificial Sequence
  Description of Artificial Sequence: Synthetic oligonucleotide
  Antisense strand to SEQ ID NO: 176310
aaucaugggcaaaggaucu

SEQ ID NO: 176312 - RNA, 19 nt, Artificial Sequence
  Description of Artificial Sequence: Synthetic oligonucleotide
  Sense strand starting at position 2332 of SEQ ID NO: 2273
auccuuugcccaugauuga

SEQ ID NO: 176313 - RNA, 19 nt, Artificial Sequence
  Description of Artificial Sequence: Synthetic oligonucleotide
  Antisense strand to SEQ ID NO: 176312
ucaaucaugggcaaaggau

SEQ ID NO: 176314 - RNA, 19 nt, Artificial Sequence
  Description of Artificial Sequence: Synthetic oligonucleotide
  Sense strand starting at position 2333 of SEQ ID NO: 2273
uccuuugcccaugauugaa

SEQ ID NO: 176315 - RNA, 19 nt, Artificial Sequence
  Description of Artificial Sequence: Synthetic oligonucleotide
  Antisense strand to SEQ ID NO: 176314
uucaaucaugggcaaagga

SEQ ID NO: 176316 - RNA, 19 nt, Artificial Sequence
  Description of Artificial Sequence: Synthetic oligonucleotide
  Sense strand starting at position 2364 of SEQ ID NO: 2273
gguggaauggguugggaua

SEQ ID NO: 176317 - RNA, 19 nt, Artificial Sequence
  Description of Artificial Sequence: Synthetic oligonucleotide
  Antisense strand to SEQ ID NO: 176316
uaucccaacccauuccacc

SEQ ID NO: 176318 - RNA, 19 nt, Artificial Sequence
  Description of Artificial Sequence: Synthetic oligonucleotide
  Sense strand starting at position 2610 of SEQ ID NO: 2273
aaagauauggccugagauc

SEQ ID NO: 176319 - RNA, 19 nt, Artificial Sequence
  Description of Artificial Sequence: Synthetic oligonucleotide
  Antisense strand to SEQ ID NO: 176318
gaucucaggccauaucuuu

SEQ ID NO: 176320 - RNA, 19 nt, Artificial Sequence
  Description of Artificial Sequence: Synthetic oligonucleotide
  Sense strand starting at position 2668 of SEQ ID NO: 2273
uauggagaaccuuggcaga

SEQ ID NO: 176321 - RNA, 19 nt, Artificial Sequence
  Description of Artificial Sequence: Synthetic oligonucleotide
  Antisense strand to SEQ ID NO: 176320
ucugccaagguucuccaua

SEQ ID NO: 176322 - RNA, 19 nt, Artificial Sequence
  Description of Artificial Sequence: Synthetic oligonucleotide
  Sense strand starting at position 2951 of SEQ ID NO: 2273
ucaggauuggcagggaauu

SEQ ID NO: 176323 - RNA, 19 nt, Artificial Sequence
  Description of Artificial Sequence: Synthetic oligonucleotide
  Antisense strand to SEQ ID NO: 176322
aauucccugccaauccuga

SEQ ID NO: 176324 - RNA, 19 nt, Artificial Sequence
  Description of Artificial Sequence: Synthetic oligonucleotide
  Sense strand starting at position 3087 of SEQ ID NO: 2273
uguauuagcucauuuaagc

SEQ ID NO: 176325 - RNA, 19 nt, Artificial Sequence
  Description of Artificial Sequence: Synthetic oligonucleotide
  Antisense strand to SEQ ID NO: 176324
gcuuaaaugagcuaauaca

SEQ ID NO: 176326 - RNA, 19 nt, Artificial Sequence
  Description of Artificial Sequence: Synthetic oligonucleotide
  Sense strand starting at position 3116 of SEQ ID NO: 2273
cucuauaaugcagaggcua

SEQ ID NO: 176327 - RNA, 19 nt, Artificial Sequence
  Description of Artificial Sequence: Synthetic oligonucleotide
  Antisense strand to SEQ ID NO: 176326
uagccucugcauuauagag

SEQ ID NO: 176328 - RNA, 19 nt, Artificial Sequence
  Description of Artificial Sequence: Synthetic oligonucleotide
  Sense strand starting at position 3206 of SEQ ID NO: 2273
gugagugucagggauggua

SEQ ID NO: 176329 - RNA, 19 nt, Artificial Sequence
  Description of Artificial Sequence: Synthetic oligonucleotide
  Antisense strand to SEQ ID NO: 176328
uaccaucccugacacucac

SEQ ID NO: 176330 - RNA, 19 nt, Artificial Sequence
  Description of Artificial Sequence: Synthetic oligonucleotide
  Sense strand starting at position 3208 of SEQ ID NO: 2273
gagugucagggaugguaau

SEQ ID NO: 176331 - RNA, 19 nt, Artificial Sequence
  Description of Artificial Sequence: Synthetic oligonucleotide
  Antisense strand to SEQ ID NO: 176330
auuaccaucccugacacuc

SEQ ID NO: 176332 - RNA, 19 nt, Artificial Sequence
  Description of Artificial Sequence: Synthetic oligonucleotide
  Sense strand starting at position 3246 of SEQ ID NO: 2273
ccuggagcuuccucauuga

SEQ ID NO: 176333 - RNA, 19 nt, Artificial Sequence
  Description of Artificial Sequence: Synthetic oligonucleotide
  Antisense strand to SEQ ID NO: 176332
ucaaugaggaagcuccagg

SEQ ID NO: 176334 - RNA, 19 nt, Artificial Sequence
  Description of Artificial Sequence: Synthetic oligonucleotide
  Sense strand starting at position 3249 of SEQ ID NO: 2273
ggagcuuccucauugaauu

SEQ ID NO: 176335 - RNA, 19 nt, Artificial Sequence
  Description of Artificial Sequence: Synthetic oligonucleotide
  Antisense strand to SEQ ID NO: 176334
aauucaaugaggaagcucc

SEQ ID NO: 176336 - RNA, 19 nt, Artificial Sequence
  Description of Artificial Sequence: Synthetic oligonucleotide
  Sense strand starting at position 3350 of SEQ ID NO: 2273
augacaaagugccuagauu

SEQ ID NO: 176337 - RNA, 19 nt, Artificial Sequence
  Description of Artificial Sequence: Synthetic oligonucleotide
  Antisense strand to SEQ ID NO: 176336
aaucuaggcacuuugucau

SEQ ID NO: 176338 - RNA, 19 nt, Artificial Sequence
  Description of Artificial Sequence: Synthetic oligonucleotide
  Sense strand starting at position 3351 of SEQ ID NO: 2273
ugacaaagugccuagauug

SEQ ID NO: 176339 - RNA, 19 nt, Artificial Sequence
  Description of Artificial Sequence: Synthetic oligonucleotide
  Antisense strand to SEQ ID NO: 176338
caaucuaggcacuuuguca

SEQ ID NO: 176340 - RNA, 19 nt, Artificial Sequence
  Description of Artificial Sequence: Synthetic oligonucleotide
  Sense strand starting at position 3379 of SEQ ID NO: 2273
auuuauauguggcugaguu

SEQ ID NO: 176341 - RNA, 19 nt, Artificial Sequence
  Description of Artificial Sequence: Synthetic oligonucleotide
  Antisense strand to SEQ ID NO: 176340
aacucagccacauauaaau

SEQ ID NO: 176342 - RNA, 19 nt, Artificial Sequence
  Description of Artificial Sequence: Synthetic oligonucleotide
  Sense strand starting at position 3445 of SEQ ID NO: 2273
auugcuauuaccgaugaga

SEQ ID NO: 176343 - RNA, 19 nt, Artificial Sequence
  Description of Artificial Sequence: Synthetic oligonucleotide
  Antisense strand to SEQ ID NO: 176342
ucucaucgguaauagcaau

SEQ ID NO: 176344 - RNA, 19 nt, Artificial Sequence
  Description of Artificial Sequence: Synthetic oligonucleotide
  Sense strand starting at position 3447 of SEQ ID NO: 2273
ugcuauuaccgaugagaau

SEQ ID NO: 176345 - RNA, 19 nt, Artificial Sequence
  Description of Artificial Sequence: Synthetic oligonucleotide
  Antisense strand to SEQ ID NO: 176344
auucucaucgguaauagca

SEQ ID NO: 176346 - RNA, 19 nt, Artificial Sequence
  Description of Artificial Sequence: Synthetic oligonucleotide
  Sense strand starting at position 3448 of SEQ ID NO: 2273
gcuauuaccgaugagaauc

SEQ ID NO: 176347 - RNA, 19 nt, Artificial Sequence
  Description of Artificial Sequence: Synthetic oligonucleotide
  Antisense strand to SEQ ID NO: 176346
gauucucaucgguaauagc

SEQ ID NO: 176348 - RNA, 19 nt, Artificial Sequence
  Description of Artificial Sequence: Synthetic oligonucleotide
  Sense strand starting at position 3456 of SEQ ID NO: 2273
cgaugagaaucuccuaaga

SEQ ID NO: 176349 - RNA, 19 nt, Artificial Sequence
  Description of Artificial Sequence: Synthetic oligonucleotide
  Antisense strand to SEQ ID NO: 176348
ucuuaggagauucucaucg

SEQ ID NO: 176350 - RNA, 19 nt, Artificial Sequence
  Description of Artificial Sequence: Synthetic oligonucleotide
  Sense strand starting at position 3477 of SEQ ID NO: 2273
auuaauucucuuggugauu

SEQ ID NO: 176351 - RNA, 19 nt, Artificial Sequence
  Description of Artificial Sequence: Synthetic oligonucleotide
  Antisense strand to SEQ ID NO: 176350
aaucaccaagagaauuaau

SEQ ID NO: 176352 - RNA, 19 nt, Artificial Sequence
  Description of Artificial Sequence: Synthetic oligonucleotide
  Sense strand starting at position 3682 of SEQ ID NO: 2273
guaauaaacgcucagugag

SEQ ID NO: 176353 - RNA, 19 nt, Artificial Sequence
  Description of Artificial Sequence: Synthetic oligonucleotide
  Antisense strand to SEQ ID NO: 176352
cucacugagcguuuauuac

SEQ ID NO: 176354 - RNA, 19 nt, Artificial Sequence
  Description of Artificial Sequence: Synthetic oligonucleotide
  Sense strand starting at position 3684 of SEQ ID NO: 2273
aauaaacgcucagugagaa

SEQ ID NO: 176355 - RNA, 19 nt, Artificial Sequence
  Description of Artificial Sequence: Synthetic oligonucleotide
  Antisense strand to SEQ ID NO: 176354
uucucacugagcguuuauu

SEQ ID NO: 176356 - RNA, 19 nt, Artificial Sequence
  Description of Artificial Sequence: Synthetic oligonucleotide
  Sense strand starting at position 3685 of SEQ ID NO: 2273
auaaacgcucagugagaaa

SEQ ID NO: 176357 - RNA, 19 nt, Artificial Sequence
  Description of Artificial Sequence: Synthetic oligonucleotide
  Antisense strand to SEQ ID NO: 176356
uuucucacugagcguuuau

SEQ ID NO: 176358 - RNA, 19 nt, Artificial Sequence
  Description of Artificial Sequence: Synthetic oligonucleotide
  Sense strand starting at position 3730 of SEQ ID NO: 2273
uuaugaauuccuuagcuga

SEQ ID NO: 176359 - RNA, 19 nt, Artificial Sequence
  Description of Artificial Sequence: Synthetic oligonucleotide
  Antisense strand to SEQ ID NO: 176358
ucagcuaaggaauucauaa

SEQ ID NO: 176360 - RNA, 19 nt, Artificial Sequence
  Description of Artificial Sequence: Synthetic oligonucleotide
  Sense strand starting at position 3839 of SEQ ID NO: 2273
ggucccuguccucaacaga

SEQ ID NO: 176361 - RNA, 19 nt, Artificial Sequence
  Description of Artificial Sequence: Synthetic oligonucleotide
  Antisense strand to SEQ ID NO: 176360
ucuguugaggacagggacc

SEQ ID NO: 176362 - RNA, 19 nt, Artificial Sequence
  Description of Artificial Sequence: Synthetic oligonucleotide
  Sense strand starting at position 3842 of SEQ ID NO: 2273
cccuguccucaacagaguu

SEQ ID NO: 176363 - RNA, 19 nt, Artificial Sequence
  Description of Artificial Sequence: Synthetic oligonucleotide
  Antisense strand to SEQ ID NO: 176362
aacucuguugaggacaggg

SEQ ID NO: 176364 - RNA, 19 nt, Artificial Sequence
  Description of Artificial Sequence: Synthetic oligonucleotide
  Sense strand starting at position 3636 of SEQ ID NO: 2274
cuuagaaugcuuugggucu

SEQ ID NO: 176365 - RNA, 19 nt, Artificial Sequence
  Description of Artificial Sequence: Synthetic oligonucleotide
  Antisense strand to SEQ ID NO: 176364
agacccaaagcauucuaag

SEQ ID NO: 176366 - RNA, 19 nt, Artificial Sequence
  Description of Artificial Sequence: Synthetic oligonucleotide
  Sense strand starting at position 3519 of SEQ ID NO: 2274
gguuuacuucucugaccuc

SEQ ID NO: 176367 - RNA, 19 nt, Artificial Sequence
  Description of Artificial Sequence: Synthetic oligonucleotide
  Antisense strand to SEQ ID NO: 176366
gaggucagagaaguaaacc

SEQ ID NO: 176368 - RNA, 19 nt, Artificial Sequence
  Description of Artificial Sequence: Synthetic oligonucleotide
  Sense strand starting at position 3518 of SEQ ID NO: 2274
ugguuuacuucucugaccu

SEQ ID NO: 176369 - RNA, 19 nt, Artificial Sequence
  Description of Artificial Sequence: Synthetic oligonucleotide
  Antisense strand to SEQ ID NO: 176368
aggucagagaaguaaacca

SEQ ID NO: 176370 - RNA, 19 nt, Artificial Sequence
  Description of Artificial Sequence: Synthetic oligonucleotide
  Sense strand starting at position 3478 of SEQ ID NO: 2274
ccuauaagguacuuuguga

SEQ ID NO: 176371 - RNA, 19 nt, Artificial Sequence
  Description of Artificial Sequence: Synthetic oligonucleotide
  Antisense strand to SEQ ID NO: 176370
ucacaaaguaccuuauagg

SEQ ID NO: 176372 - RNA, 19 nt, Artificial Sequence
  Description of Artificial Sequence: Synthetic oligonucleotide
  Sense strand starting at position 3470 of SEQ ID NO: 2274
uccaauggccuauaaggua

SEQ ID NO: 176373 - RNA, 19 nt, Artificial Sequence
  Description of Artificial Sequence: Synthetic oligonucleotide
  Antisense strand to SEQ ID NO: 176372
uaccuuauaggccauugga

SEQ ID NO: 176374 - RNA, 19 nt, Artificial Sequence
  Description of Artificial Sequence: Synthetic oligonucleotide
  Sense strand starting at position 3327 of SEQ ID NO: 2274
ugagguguuuaagcaacua

SEQ ID NO: 176375 - RNA, 19 nt, Artificial Sequence
  Description of Artificial Sequence: Synthetic oligonucleotide
  Antisense strand to SEQ ID NO: 176374
uaguugcuuaaacaccuca

SEQ ID NO: 176376 - RNA, 19 nt, Artificial Sequence
  Description of Artificial Sequence: Synthetic oligonucleotide
  Sense strand starting at position 3324 of SEQ ID NO: 2274
acuugagguguuuaagcaa

SEQ ID NO: 176377 - RNA, 19 nt, Artificial Sequence
  Description of Artificial Sequence: Synthetic oligonucleotide
  Antisense strand to SEQ ID NO: 176376
uugcuuaaacaccucaagu

SEQ ID NO: 176378 - RNA, 19 nt, Artificial Sequence
  Description of Artificial Sequence: Synthetic oligonucleotide
  Sense strand starting at position 3284 of SEQ ID NO: 2274
gaggaaauggauuguguga

SEQ ID NO: 176379 - RNA, 19 nt, Artificial Sequence
  Description of Artificial Sequence: Synthetic oligonucleotide
  Antisense strand to SEQ ID NO: 176378
ucacacaauccauuuccuc

SEQ ID NO: 176380 - RNA, 19 nt, Artificial Sequence
  Description of Artificial Sequence: Synthetic oligonucleotide
  Sense strand starting at position 3207 of SEQ ID NO: 2274
gggaccugauuuggacauu

SEQ ID NO: 176381 - RNA, 19 nt, Artificial Sequence
  Description of Artificial Sequence: Synthetic oligonucleotide
  Antisense strand to SEQ ID NO: 176380
aauguccaaaucagguccc

SEQ ID NO: 176382 - RNA, 19 nt, Artificial Sequence
  Description of Artificial Sequence: Synthetic oligonucleotide
  Sense strand starting at position 3181 of SEQ ID NO: 2274
agaaauaugugauaggaua

SEQ ID NO: 176383 - RNA, 19 nt, Artificial Sequence
  Description of Artificial Sequence: Synthetic oligonucleotide
  Antisense strand to SEQ ID NO: 176382
uauccuaucacauauuucu

SEQ ID NO: 176384 - RNA, 19 nt, Artificial Sequence
  Description of Artificial Sequence: Synthetic oligonucleotide
  Sense strand starting at position 3071 of SEQ ID NO: 2274
gagaaucaguccuugcacu

SEQ ID NO: 176385 - RNA, 19 nt, Artificial Sequence
  Description of Artificial Sequence: Synthetic oligonucleotide
  Antisense strand to SEQ ID NO: 176384
agugcaaggacugauucuc

SEQ ID NO: 176386 - RNA, 19 nt, Artificial Sequence
  Description of Artificial Sequence: Synthetic oligonucleotide
  Sense strand starting at position 3017 of SEQ ID NO: 2274
aucuauuguguacaguuua

SEQ ID NO: 176387 - RNA, 19 nt, Artificial Sequence
  Description of Artificial Sequence: Synthetic oligonucleotide
  Antisense strand to SEQ ID NO: 176386
uaaacuguacacaauagau

SEQ ID NO: 176388 - RNA, 19 nt, Artificial Sequence
  Description of Artificial Sequence: Synthetic oligonucleotide
  Sense strand starting at position 3015 of SEQ ID NO: 2274
guaucuauuguguacaguu

SEQ ID NO: 176389 - RNA, 19 nt, Artificial Sequence
  Description of Artificial Sequence: Synthetic oligonucleotide
  Antisense strand to SEQ ID NO: 176388
aacuguacacaauagauac

SEQ ID NO: 176390 - RNA, 19 nt, Artificial Sequence
  Description of Artificial Sequence: Synthetic oligonucleotide
  Sense strand starting at position 2882 of SEQ ID NO: 2274
gggacacacugucucuaaa

SEQ ID NO: 176391 - RNA, 19 nt, Artificial Sequence
  Description of Artificial Sequence: Synthetic oligonucleotide
  Antisense strand to SEQ ID NO: 176390
uuuagagacaguguguccc

SEQ ID NO: 176392 - RNA, 19 nt, Artificial Sequence
  Description of Artificial Sequence: Synthetic oligonucleotide
  Sense strand starting at position 2623 of SEQ ID NO: 2274
gcuuauggccuguaaucau

SEQ ID NO: 176393 - RNA, 19 nt, Artificial Sequence
  Description of Artificial Sequence: Synthetic oligonucleotide
  Antisense strand to SEQ ID NO: 176392
augauuacaggccauaagc

SEQ ID NO: 176394 - RNA, 19 nt, Artificial Sequence
  Description of Artificial Sequence: Synthetic oligonucleotide
  Sense strand starting at position 2532 of SEQ ID NO: 2274
cuuuguuacucauuguuua

SEQ ID NO: 176395 - RNA, 19 nt, Artificial Sequence
  Description of Artificial Sequence: Synthetic oligonucleotide
  Antisense strand to SEQ ID NO: 176394
uaaacaaugaguaacaaag

SEQ ID NO: 176396 - RNA, 19 nt, Artificial Sequence
  Description of Artificial Sequence: Synthetic oligonucleotide
  Sense strand starting at position 2486 of SEQ ID NO: 2274
cuccguaaacacuacgauu

SEQ ID NO: 176397 - RNA, 19 nt, Artificial Sequence
  Description of Artificial Sequence: Synthetic oligonucleotide
  Antisense strand to SEQ ID NO: 176396
aaucguaguguuuacggag

SEQ ID NO: 176398 - RNA, 19 nt, Artificial Sequence
  Description of Artificial Sequence: Synthetic oligonucleotide
  Sense strand starting at position 2478 of SEQ ID NO: 2274
acuagucccuccguaaaca

SEQ ID NO: 176399 - RNA, 19 nt, Artificial Sequence
  Description of Artificial Sequence: Synthetic oligonucleotide
  Antisense strand to SEQ ID NO: 176398
uguuuacggagggacuagu

SEQ ID NO: 176400 - RNA, 19 nt, Artificial Sequence
  Description of Artificial Sequence: Synthetic oligonucleotide
  Sense strand starting at position 2474 of SEQ ID NO: 2274
ggagacuagucccuccgua

SEQ ID NO: 176401 - RNA, 19 nt, Artificial Sequence
  Description of Artificial Sequence: Synthetic oligonucleotide
  Antisense strand to SEQ ID NO: 176400
uacggagggacuagucucc

SEQ ID NO: 176402 - RNA, 19 nt, Artificial Sequence
  Description of Artificial Sequence: Synthetic oligonucleotide
  Sense strand starting at position 2132 of SEQ ID NO: 2274
gugauugaauuugaaagag

SEQ ID NO: 176403 - RNA, 19 nt, Artificial Sequence
  Description of Artificial Sequence: Synthetic oligonucleotide
  Antisense strand to SEQ ID NO: 176402
cucuuucaaauucaaucac

SEQ ID NO: 176404 - RNA, 19 nt, Artificial Sequence
  Description of Artificial Sequence: Synthetic oligonucleotide
  Sense strand starting at position 2124 of SEQ ID NO: 2274
ccuagagggugauugaauu

SEQ ID NO: 176405 - RNA, 19 nt, Artificial Sequence
  Description of Artificial Sequence: Synthetic oligonucleotide
  Antisense strand to SEQ ID NO: 176404
aauucaaucacccucuagg

SEQ ID NO: 176406 - RNA, 19 nt, Artificial Sequence
  Description of Artificial Sequence: Synthetic oligonucleotide
  Sense strand starting at position 2121 of SEQ ID NO: 2274
cgaccuagagggugauuga

SEQ ID NO: 176407 - RNA, 19 nt, Artificial Sequence
  Description of Artificial Sequence: Synthetic oligonucleotide
  Antisense strand to SEQ ID NO: 176406
ucaaucacccucuaggucg

SEQ ID NO: 176408 - RNA, 19 nt, Artificial Sequence
  Description of Artificial Sequence: Synthetic oligonucleotide
  Sense strand starting at position 2111 of SEQ ID NO: 2274
gcgguauagucgaccuaga

SEQ ID NO: 176409 - RNA, 19 nt, Artificial Sequence
  Description of Artificial Sequence: Synthetic oligonucleotide
  Antisense strand to SEQ ID NO: 176408
ucuaggucgacuauaccgc

SEQ ID NO: 176410 - RNA, 19 nt, Artificial Sequence
  Description of Artificial Sequence: Synthetic oligonucleotide
  Sense strand starting at position 2055 of SEQ ID NO: 2274
ugaauuaaggcuggcagua

SEQ ID NO: 176411 - RNA, 19 nt, Artificial Sequence
  Description of Artificial Sequence: Synthetic oligonucleotide
  Antisense strand to SEQ ID NO: 176410
uacugccagccuuaauuca

SEQ ID NO: 176412 - RNA, 19 nt, Artificial Sequence
  Description of Artificial Sequence: Synthetic oligonucleotide
  Sense strand starting at position 1261 of SEQ ID NO: 2274
ggagcaguccucugaagcu

SEQ ID NO: 176413 - RNA, 19 nt, Artificial Sequence
  Description of Artificial Sequence: Synthetic oligonucleotide
  Antisense strand to SEQ ID NO: 176412
agcuucagaggacugcucc

SEQ ID NO: 176414 - RNA, 19 nt, Artificial Sequence
  Description of Artificial Sequence: Synthetic oligonucleotide
  Sense strand starting at position 1230 of SEQ ID NO: 2274
uguagucuccucguggcua

SEQ ID NO: 176415 - RNA, 19 nt, Artificial Sequence
  Description of Artificial Sequence: Synthetic oligonucleotide
  Antisense strand to SEQ ID NO: 176414
uagccacgaggagacuaca

SEQ ID NO: 176416 - RNA, 19 nt, Artificial Sequence
  Description of Artificial Sequence: Synthetic oligonucleotide
  Sense strand starting at position 1131 of SEQ ID NO: 2274
uuaugagcuccagacuaca

SEQ ID NO: 176417 - RNA, 19 nt, Artificial Sequence
  Description of Artificial Sequence: Synthetic oligonucleotide
  Antisense strand to SEQ ID NO: 176416
uguagucuggagcucauaa

SEQ ID NO: 176418 - RNA, 19 nt, Artificial Sequence
  Description of Artificial Sequence: Synthetic oligonucleotide
  Sense strand starting at position 1129 of SEQ ID NO: 2274
cguuaugagcuccagacua

SEQ ID NO: 176419 - RNA, 19 nt, Artificial Sequence
  Description of Artificial Sequence: Synthetic oligonucleotide
  Antisense strand to SEQ ID NO: 176418
uagucuggagcucauaacg

SEQ ID NO: 176420 - RNA, 19 nt, Artificial Sequence
  Description of Artificial Sequence: Synthetic oligonucleotide
  Sense strand starting at position 1059 of SEQ ID NO: 2274
guccuaccuuccuuuggau

SEQ ID NO: 176421 - RNA, 19 nt, Artificial Sequence
  Description of Artificial Sequence: Synthetic oligonucleotide
  Antisense strand to SEQ ID NO: 176420
auccaaaggaagguaggac

SEQ ID NO: 176422 - RNA, 19 nt, Artificial Sequence
  Description of Artificial Sequence: Synthetic oligonucleotide
  Sense strand starting at position 898 of SEQ ID NO: 2274
ccauguccugcaggaaaca

SEQ ID NO: 176423 - RNA, 19 nt, Artificial Sequence
  Description of Artificial Sequence: Synthetic oligonucleotide
  Antisense strand to SEQ ID NO: 176422
uguuuccugcaggacaugg

SEQ ID NO: 176424 - RNA, 19 nt, Artificial Sequence
  Description of Artificial Sequence: Synthetic oligonucleotide
  Sense strand starting at position 896 of SEQ ID NO: 2274
ucccauguccugcaggaaa

SEQ ID NO: 176425 - RNA, 19 nt, Artificial Sequence
  Description of Artificial Sequence: Synthetic oligonucleotide
  Antisense strand to SEQ ID NO: 176424
uuuccugcaggacauggga

SEQ ID NO: 176426 - RNA, 19 nt, Artificial Sequence
  Description of Artificial Sequence: Synthetic oligonucleotide
  Sense strand starting at position 859 of SEQ ID NO: 2274
aggagaaaguuggacuaga

SEQ ID NO: 176427 - RNA, 19 nt, Artificial Sequence
  Description of Artificial Sequence: Synthetic oligonucleotide
  Antisense strand to SEQ ID NO: 176426
ucuaguccaacuuucuccu

SEQ ID NO: 176428 - RNA, 19 nt, Artificial Sequence
  Description of Artificial Sequence: Synthetic oligonucleotide
  Sense strand starting at position 808 of SEQ ID NO: 2274
cuuguaugagccuggguaa

SEQ ID NO: 176429 - RNA, 19 nt, Artificial Sequence
  Description of Artificial Sequence: Synthetic oligonucleotide
  Antisense strand to SEQ ID NO: 176428
uuacccaggcucauacaag

SEQ ID NO: 176430 - RNA, 19 nt, Artificial Sequence
  Description of Artificial Sequence: Synthetic oligonucleotide
  Sense strand starting at position 798 of SEQ ID NO: 2274
cuucuacuggcuuguauga

SEQ ID NO: 176431 - RNA, 19 nt, Artificial Sequence
  Description of Artificial Sequence: Synthetic oligonucleotide
  Antisense strand to SEQ ID NO: 176430
ucauacaagccaguagaag

SEQ ID NO: 176432 - RNA, 19 nt, Artificial Sequence
  Description of Artificial Sequence: Synthetic oligonucleotide
  Sense strand starting at position 758 of SEQ ID NO: 2274
aguggagaaugcccugaau

SEQ ID NO: 176433 - RNA, 19 nt, Artificial Sequence
  Description of Artificial Sequence: Synthetic oligonucleotide
  Antisense strand to SEQ ID NO: 176432
auucagggcauucuccacu

SEQ ID NO: 176434 - RNA, 19 nt, Artificial Sequence
  Description of Artificial Sequence: Synthetic oligonucleotide
  Sense strand starting at position 749 of SEQ ID NO: 2274
aggccuuggaguggagaau

SEQ ID NO: 176435 - RNA, 19 nt, Artificial Sequence
  Description of Artificial Sequence: Synthetic oligonucleotide
  Antisense strand to SEQ ID NO: 176434
auucuccacuccaaggccu

SEQ ID NO: 176436 - RNA, 19 nt, Artificial Sequence
  Description of Artificial Sequence: Synthetic oligonucleotide
  Sense strand starting at position 619 of SEQ ID NO: 2274
ggauguucaugcuuaagga

SEQ ID NO: 176437 - RNA, 19 nt, Artificial Sequence
  Description of Artificial Sequence: Synthetic oligonucleotide
  Antisense strand to SEQ ID NO: 176436
uccuuaagcaugaacaucc

SEQ ID NO: 176438 - RNA, 19 nt, Artificial Sequence
  Description of Artificial Sequence: Synthetic oligonucleotide
  Sense strand starting at position 610 of SEQ ID NO: 2274
gagggugauggauguucau

SEQ ID NO: 176439 - RNA, 19 nt, Artificial Sequence
  Description of Artificial Sequence: Synthetic oligonucleotide
  Antisense strand to SEQ ID NO: 176438
augaacauccaucacccuc

SEQ ID NO: 176440 - RNA, 19 nt, Artificial Sequence
  Description of Artificial Sequence: Synthetic oligonucleotide
  Sense strand starting at position 218 of SEQ ID NO: 2274
guugcuguggcuaggaguu

SEQ ID NO: 176441 - RNA, 19 nt, Artificial Sequence
  Description of Artificial Sequence: Synthetic oligonucleotide
  Antisense strand to SEQ ID NO: 176440
aacuccuagccacagcaac

SEQ ID NO: 176442 - RNA, 19 nt, Artificial Sequence
  Description of Artificial Sequence: Synthetic oligonucleotide
  Sense strand starting at position 30 of SEQ ID NO: 2274
ugauguucccuagaaucuc

SEQ ID NO: 176443 - RNA, 19 nt, Artificial Sequence
  Description of Artificial Sequence: Synthetic oligonucleotide
  Antisense strand to SEQ ID NO: 176442
gagauucuagggaacauca

SEQ ID NO: 176444 - RNA, 19 nt, Artificial Sequence
  Description of Artificial Sequence: Synthetic oligonucleotide
  Sense strand starting at position 7 of SEQ ID NO: 2275
cacuguaaucauuagguug

SEQ ID NO: 176445 - RNA, 19 nt, Artificial Sequence
  Description of Artificial Sequence: Synthetic oligonucleotide
  Antisense strand to SEQ ID NO: 176444
caaccuaaugauuacagug

SEQ ID NO: 176446 - RNA, 19 nt, Artificial Sequence
  Description of Artificial Sequence: Synthetic oligonucleotide
  Sense strand starting at position 137 of SEQ ID NO: 2275
caggguuuccaacggaaga

SEQ ID NO: 176447 - RNA, 19 nt, Artificial Sequence
  Description of Artificial Sequence: Synthetic oligonucleotide
  Antisense strand to SEQ ID NO: 176446
ucuuccguuggaaacccug

SEQ ID NO: 176448 - RNA, 19 nt, Artificial Sequence
  Description of Artificial Sequence: Synthetic oligonucleotide
  Sense strand starting at position 138 of SEQ ID NO: 2275
aggguuuccaacggaagau

SEQ ID NO: 176449 - RNA, 19 nt, Artificial Sequence
  Description of Artificial Sequence: Synthetic oligonucleotide
  Antisense strand to SEQ ID NO: 176448
aucuuccguuggaaacccu

SEQ ID NO: 176450 - RNA, 19 nt, Artificial Sequence
  Description of Artificial Sequence: Synthetic oligonucleotide
  Sense strand starting at position 270 of SEQ ID NO: 2275
aggagcauuuccuauguca

SEQ ID NO: 176451 - RNA, 19 nt, Artificial Sequence
  Description of Artificial Sequence: Synthetic oligonucleotide
  Antisense strand to SEQ ID NO: 176450
ugacauaggaaaugcuccu

SEQ ID NO: 176452 - RNA, 19 nt, Artificial Sequence
  Description of Artificial Sequence: Synthetic oligonucleotide
  Sense strand starting at position 405 of SEQ ID NO: 2275
cuaaccuggcccuagaaau

SEQ ID NO: 176453 - RNA, 19 nt, Artificial Sequence
  Description of Artificial Sequence: Synthetic oligonucleotide
  Antisense strand to SEQ ID NO: 176452
auuucuagggccagguuag

SEQ ID NO: 176454 - RNA, 19 nt, Artificial Sequence
  Description of Artificial Sequence: Synthetic oligonucleotide
  Sense strand starting at position 450 of SEQ ID NO: 2275
cuauuagucugccuaguca

SEQ ID NO: 176455 - RNA, 19 nt, Artificial Sequence
  Description of Artificial Sequence: Synthetic oligonucleotide
  Antisense strand to SEQ ID NO: 176454
ugacuaggcagacuaauag

SEQ ID NO: 176456 - RNA, 19 nt, Artificial Sequence
  Description of Artificial Sequence: Synthetic oligonucleotide
  Sense strand starting at position 515 of SEQ ID NO: 2275
gcuggaacuagaugucuga

SEQ ID NO: 176457 - RNA, 19 nt, Artificial Sequence
  Description of Artificial Sequence: Synthetic oligonucleotide
  Antisense strand to SEQ ID NO: 176456
ucagacaucuaguuccagc

SEQ ID NO: 176458 - RNA, 19 nt, Artificial Sequence
  Description of Artificial Sequence: Synthetic oligonucleotide
  Sense strand starting at position 518 of SEQ ID NO: 2275
ggaacuagaugucugauuc

SEQ ID NO: 176459 - RNA, 19 nt, Artificial Sequence
  Description of Artificial Sequence: Synthetic oligonucleotide
  Antisense strand to SEQ ID NO: 176458
gaaucagacaucuaguucc

SEQ ID NO: 176460 - RNA, 19 nt, Artificial Sequence
  Description of Artificial Sequence: Synthetic oligonucleotide
  Sense strand starting at position 519 of SEQ ID NO: 2275
gaacuagaugucugauucu

SEQ ID NO: 176461 - RNA, 19 nt, Artificial Sequence
  Description of Artificial Sequence: Synthetic oligonucleotide
  Antisense strand to SEQ ID NO: 176460
agaaucagacaucuaguuc

SEQ ID NO: 176462 - RNA, 19 nt, Artificial Sequence
  Description of Artificial Sequence: Synthetic oligonucleotide
  Sense strand starting at position 522 of SEQ ID NO: 2275
cuagaugucugauucuuag

SEQ ID NO: 176463 - RNA, 19 nt, Artificial Sequence
  Description of Artificial Sequence: Synthetic oligonucleotide
  Antisense strand to SEQ ID NO: 176462
cuaagaaucagacaucuag

SEQ ID NO: 176464 - RNA, 19 nt, Artificial Sequence
  Description of Artificial Sequence: Synthetic oligonucleotide
  Sense strand starting at position 528 of SEQ ID NO: 2275
gucugauucuuagugcuag

SEQ ID NO: 176465 - RNA, 19 nt, Artificial Sequence
  Description of Artificial Sequence: Synthetic oligonucleotide
  Antisense strand to SEQ ID NO: 176464
cuagcacuaagaaucagac

SEQ ID NO: 176466 - RNA, 19 nt, Artificial Sequence
  Description of Artificial Sequence: Synthetic oligonucleotide
  Sense strand starting at position 546 of SEQ ID NO: 2275
guaagaucagcgcugcagu

SEQ ID NO: 176467 - RNA, 19 nt, Artificial Sequence
  Description of Artificial Sequence: Synthetic oligonucleotide
  Antisense strand to SEQ ID NO: 176466
acugcagcgcugaucuuac

SEQ ID NO: 176468 - RNA, 19 nt, Artificial Sequence
  Description of Artificial Sequence: Synthetic oligonucleotide
  Sense strand starting at position 599 of SEQ ID NO: 2275
gacuuaguauagcugaauu

SEQ ID NO: 176469 - RNA, 19 nt, Artificial Sequence
  Description of Artificial Sequence: Synthetic oligonucleotide
  Antisense strand to SEQ ID NO: 176468
aauucagcuauacuaaguc

SEQ ID NO: 176470 - RNA, 19 nt, Artificial Sequence
  Description of Artificial Sequence: Synthetic oligonucleotide
  Sense strand starting at position 601 of SEQ ID NO: 2275
cuuaguauagcugaauuaa

SEQ ID NO: 176471 - RNA, 19 nt, Artificial Sequence
  Description of Artificial Sequence: Synthetic oligonucleotide
  Antisense strand to SEQ ID NO: 176470
uuaauucagcuauacuaag

SEQ ID NO: 176472 - RNA, 19 nt, Artificial Sequence
  Description of Artificial Sequence: Synthetic oligonucleotide
  Sense strand starting at position 676 of SEQ ID NO: 2275
uuaguaacuuacguaucaa

SEQ ID NO: 176473 - RNA, 19 nt, Artificial Sequence
  Description of Artificial Sequence: Synthetic oligonucleotide
  Antisense strand to SEQ ID NO: 176472
uugauacguaaguuacuaa

SEQ ID NO: 176474 - RNA, 19 nt, Artificial Sequence
  Description of Artificial Sequence: Synthetic oligonucleotide
  Sense strand starting at position 773 of SEQ ID NO: 2275
caaugaugcgaaugaagau

SEQ ID NO: 176475 - RNA, 19 nt, Artificial Sequence
  Description of Artificial Sequence: Synthetic oligonucleotide
  Antisense strand to SEQ ID NO: 176474
aucuucauucgcaucauug

SEQ ID NO: 176476 - RNA, 19 nt, Artificial Sequence
  Description of Artificial Sequence: Synthetic oligonucleotide
  Sense strand starting at position 860 of SEQ ID NO: 2275
aaagaugucgcagguauga

SEQ ID NO: 176477 - RNA, 19 nt, Artificial Sequence
  Description of Artificial Sequence: Synthetic oligonucleotide
  Antisense strand to SEQ ID NO: 176476
ucauaccugcgacaucuuu

SEQ ID NO: 176478 - RNA, 19 nt, Artificial Sequence
  Description of Artificial Sequence: Synthetic oligonucleotide
  Sense strand starting at position 862 of SEQ ID NO: 2275
agaugucgcagguaugaaa

SEQ ID NO: 176479 - RNA, 19 nt, Artificial Sequence
  Description of Artificial Sequence: Synthetic oligonucleotide
  Antisense strand to SEQ ID NO: 176478
uuucauaccugcgacaucu

SEQ ID NO: 176480 - RNA, 19 nt, Artificial Sequence
  Description of Artificial Sequence: Synthetic oligonucleotide
  Sense strand starting at position 982 of SEQ ID NO: 2275
gguuuaagaaugcagcaau

SEQ ID NO: 176481 - RNA, 19 nt, Artificial Sequence
  Description of Artificial Sequence: Synthetic oligonucleotide
  Antisense strand to SEQ ID NO: 176480
auugcugcauucuuaaacc

SEQ ID NO: 176482 - RNA, 19 nt, Artificial Sequence
  Description of Artificial Sequence: Synthetic oligonucleotide
  Sense strand starting at position 1412 of SEQ ID NO: 2275
agugcauuugcacggcuaa

SEQ ID NO: 176483 - RNA, 19 nt, Artificial Sequence
  Description of Artificial Sequence: Synthetic oligonucleotide
  Antisense strand to SEQ ID NO: 176482
uuagccgugcaaaugcacu

SEQ ID NO: 176484 - RNA, 19 nt, Artificial Sequence
  Description of Artificial Sequence: Synthetic oligonucleotide
  Sense strand starting at position 1413 of SEQ ID NO: 2275
gugcauuugcacggcuaaa

SEQ ID NO: 176485 - RNA, 19 nt, Artificial Sequence
  Description of Artificial Sequence: Synthetic oligonucleotide
  Antisense strand to SEQ ID NO: 176484
uuuagccgugcaaaugcac

SEQ ID NO: 176486 - RNA, 19 nt, Artificial Sequence
  Description of Artificial Sequence: Synthetic oligonucleotide
  Sense strand starting at position 1657 of SEQ ID NO: 2275
cucgaagccuguucuugaa

SEQ ID NO: 176487 - RNA, 19 nt, Artificial Sequence
  Description of Artificial Sequence: Synthetic oligonucleotide
  Antisense strand to SEQ ID NO: 176486
uucaagaacaggcuucgag

SEQ ID NO: 176488 - RNA, 19 nt, Artificial Sequence
  Description of Artificial Sequence: Synthetic oligonucleotide
  Sense strand starting at position 2222 of SEQ ID NO: 2275
gccugugacuuguuugaau

SEQ ID NO: 176489 - RNA, 19 nt, Artificial Sequence
  Description of Artificial Sequence: Synthetic oligonucleotide
  Antisense strand to SEQ ID NO: 176488
auucaaacaagucacaggc

SEQ ID NO: 176490 - RNA, 19 nt, Artificial Sequence
  Description of Artificial Sequence: Synthetic oligonucleotide
  Sense strand starting at position 2224 of SEQ ID NO: 2275
cugugacuuguuugaauua

SEQ ID NO: 176491 - RNA, 19 nt, Artificial Sequence
  Description of Artificial Sequence: Synthetic oligonucleotide
  Antisense strand to SEQ ID NO: 176490
uaauucaaacaagucacag

SEQ ID NO: 176492 - RNA, 19 nt, Artificial Sequence
  Description of Artificial Sequence: Synthetic oligonucleotide
  Sense strand starting at position 2272 of SEQ ID NO: 2275
uccauugugcguagugguu

SEQ ID NO: 176493 - RNA, 19 nt, Artificial Sequence
  Description of Artificial Sequence: Synthetic oligonucleotide
  Antisense strand to SEQ ID NO: 176492
aaccacuacgcacaaugga

SEQ ID NO: 176494 - RNA, 19 nt, Artificial Sequence
  Description of Artificial Sequence: Synthetic oligonucleotide
  Sense strand starting at position 2754 of SEQ ID NO: 2275
uuaagauauugacaaggaa

SEQ ID NO: 176495 - RNA, 19 nt, Artificial Sequence
  Description of Artificial Sequence: Synthetic oligonucleotide
  Antisense strand to SEQ ID NO: 176494
uuccuugucaauaucuuaa

SEQ ID NO: 176496 - RNA, 19 nt, Artificial Sequence
  Description of Artificial Sequence: Synthetic oligonucleotide
  Sense strand starting at position 2827 of SEQ ID NO: 2275
agucaagcaucagugucaa

SEQ ID NO: 176497 - RNA, 19 nt, Artificial Sequence
  Description of Artificial Sequence: Synthetic oligonucleotide
  Antisense strand to SEQ ID NO: 176496
uugacacugaugcuugacu

SEQ ID NO: 176498 - RNA, 19 nt, Artificial Sequence
  Description of Artificial Sequence: Synthetic oligonucleotide
  Sense strand starting at position 2860 of SEQ ID NO: 2275
agagcuaccuuaccuugaa

SEQ ID NO: 176499 - RNA, 19 nt, Artificial Sequence
  Description of Artificial Sequence: Synthetic oligonucleotide
  Antisense strand to SEQ ID NO: 176498
uucaagguaagguagcucu

SEQ ID NO: 176500 - RNA, 19 nt, Artificial Sequence
  Description of Artificial Sequence: Synthetic oligonucleotide
  Sense strand starting at position 2914 of SEQ ID NO: 2275
ggcacauucccaggaaguu

SEQ ID NO: 176501 - RNA, 19 nt, Artificial Sequence
  Description of Artificial Sequence: Synthetic oligonucleotide
  Antisense strand to SEQ ID NO: 176500
aacuuccugggaaugugcc

SEQ ID NO: 176502 - RNA, 19 nt, Artificial Sequence
  Description of Artificial Sequence: Synthetic oligonucleotide
  Sense strand starting at position 2915 of SEQ ID NO: 2275
gcacauucccaggaaguuu

SEQ ID NO: 176503 - RNA, 19 nt, Artificial Sequence
  Description of Artificial Sequence: Synthetic oligonucleotide
  Antisense strand to SEQ ID NO: 176502
aaacuuccugggaaugugc

SEQ ID NO: 176504 - RNA, 19 nt, Artificial Sequence
  Description of Artificial Sequence: Synthetic oligonucleotide
  Sense strand starting at position 2931 of SEQ ID NO: 2275
uuuggcauucuuggucaca

SEQ ID NO: 176505 - RNA, 19 nt, Artificial Sequence
  Description of Artificial Sequence: Synthetic oligonucleotide
  Antisense strand to SEQ ID NO: 176504
ugugaccaagaaugccaaa

SEQ ID NO: 176506 - RNA, 19 nt, Artificial Sequence
  Description of Artificial Sequence: Synthetic oligonucleotide
  Sense strand starting at position 3300 of SEQ ID NO: 2275
gggaaugaugcggaaguau

SEQ ID NO: 176507 - RNA, 19 nt, Artificial Sequence
  Description of Artificial Sequence: Synthetic oligonucleotide
  Antisense strand to SEQ ID NO: 176506
auacuuccgcaucauuccc

SEQ ID NO: 176508 - RNA, 19 nt, Artificial Sequence
  Description of Artificial Sequence: Synthetic oligonucleotide
  Sense strand starting at position 3309 of SEQ ID NO: 2275
gcggaaguaucccuuaauc

SEQ ID NO: 176509 - RNA, 19 nt, Artificial Sequence
  Description of Artificial Sequence: Synthetic oligonucleotide
  Antisense strand to SEQ ID NO: 176508
gauuaagggauacuuccgc

SEQ ID NO: 176510 - RNA, 19 nt, Artificial Sequence
  Description of Artificial Sequence: Synthetic oligonucleotide
  Sense strand starting at position 3311 of SEQ ID NO: 2275
ggaaguaucccuuaauccc

SEQ ID NO: 176511 - RNA, 19 nt, Artificial Sequence
  Description of Artificial Sequence: Synthetic oligonucleotide
  Antisense strand to SEQ ID NO: 176510
gggauuaagggauacuucc

SEQ ID NO: 176512 - RNA, 19 nt, Artificial Sequence
  Description of Artificial Sequence: Synthetic oligonucleotide
  Sense strand starting at position 3319 of SEQ ID NO: 2275
cccuuaaucccaggagguu

SEQ ID NO: 176513 - RNA, 19 nt, Artificial Sequence
  Description of Artificial Sequence: Synthetic oligonucleotide
  Antisense strand to SEQ ID NO: 176512
aaccuccugggauuaaggg

SEQ ID NO: 176514 - RNA, 19 nt, Artificial Sequence
  Description of Artificial Sequence: Synthetic oligonucleotide
  Sense strand starting at position 3348 of SEQ ID NO: 2275
uugaguuaugauuguacca

SEQ ID NO: 176515 - RNA, 19 nt, Artificial Sequence
  Description of Artificial Sequence: Synthetic oligonucleotide
  Antisense strand to SEQ ID NO: 176514
ugguacaaucauaacucaa

SEQ ID NO: 176516 - RNA, 19 nt, Artificial Sequence
  Description of Artificial Sequence: Synthetic oligonucleotide
  Sense strand starting at position 3388 of SEQ ID NO: 2275
aggguaagaccucgucuca

SEQ ID NO: 176517 - RNA, 19 nt, Artificial Sequence
  Description of Artificial Sequence: Synthetic oligonucleotide
  Antisense strand to SEQ ID NO: 176516
ugagacgaggucuuacccu

SEQ ID NO: 176518 - RNA, 19 nt, Artificial Sequence
  Description of Artificial Sequence: Synthetic oligonucleotide
  Sense strand starting at position 3506 of SEQ ID NO: 2275
uggacauguuccuucucuu

SEQ ID NO: 176519 - RNA, 19 nt, Artificial Sequence
  Description of Artificial Sequence: Synthetic oligonucleotide
  Antisense strand to SEQ ID NO: 176518
aagagaaggaacaugucca

SEQ ID NO: 176520 - RNA, 19 nt, Artificial Sequence
  Description of Artificial Sequence: Synthetic oligonucleotide
  Sense strand starting at position 3529 of SEQ ID NO: 2275
uaggguaugcaccauucua

SEQ ID NO: 176521 - RNA, 19 nt, Artificial Sequence
  Description of Artificial Sequence: Synthetic oligonucleotide
  Antisense strand to SEQ ID NO: 176520
uagaauggugcauacccua

SEQ ID NO: 176522 - RNA, 19 nt, Artificial Sequence
  Description of Artificial Sequence: Synthetic oligonucleotide
  Sense strand starting at position 3854 of SEQ ID NO: 2275
caccgugagugaucuucuu

SEQ ID NO: 176523 - RNA, 19 nt, Artificial Sequence
  Description of Artificial Sequence: Synthetic oligonucleotide
  Antisense strand to SEQ ID NO: 176522
aagaagaucacucacggug

SEQ ID NO: 176524 - RNA, 19 nt, Artificial Sequence
  Description of Artificial Sequence: Synthetic oligonucleotide
  Sense strand starting at position 3980 of SEQ ID NO: 2276
gguauuccauggguugaua

SEQ ID NO: 176525 - RNA, 19 nt, Artificial Sequence
  Description of Artificial Sequence: Synthetic oligonucleotide
  Antisense strand to SEQ ID NO: 176524
uaucaacccauggaauacc

SEQ ID NO: 176526 - RNA, 19 nt, Artificial Sequence
  Description of Artificial Sequence: Synthetic oligonucleotide
  Sense strand starting at position 3979 of SEQ ID NO: 2276
ugguauuccauggguugau

SEQ ID NO: 176527 - RNA, 19 nt, Artificial Sequence
  Description of Artificial Sequence: Synthetic oligonucleotide
  Antisense strand to SEQ ID NO: 176526
aucaacccauggaauacca

SEQ ID NO: 176528 - RNA, 19 nt, Artificial Sequence
  Description of Artificial Sequence: Synthetic oligonucleotide
  Sense strand starting at position 3965 of SEQ ID NO: 2276
guaugauggguugauggua

SEQ ID NO: 176529 - RNA, 19 nt, Artificial Sequence
  Description of Artificial Sequence: Synthetic oligonucleotide
  Antisense strand to SEQ ID NO: 176528
uaccaucaacccaucauac

SEQ ID NO: 176530 - RNA, 19 nt, Artificial Sequence
  Description of Artificial Sequence: Synthetic oligonucleotide
  Sense strand starting at position 3964 of SEQ ID NO: 2276
gguaugauggguugauggu

SEQ ID NO: 176531 - RNA, 19 nt, Artificial Sequence
  Description of Artificial Sequence: Synthetic oligonucleotide
  Antisense strand to SEQ ID NO: 176530
accaucaacccaucauacc

SEQ ID NO: 176532 - RNA, 19 nt, Artificial Sequence
  Description of Artificial Sequence: Synthetic oligonucleotide
  Sense strand starting at position 3961 of SEQ ID NO: 2276
caugguaugauggguugau

SEQ ID NO: 176533 - RNA, 19 nt, Artificial Sequence
  Description of Artificial Sequence: Synthetic oligonucleotide
  Antisense strand to SEQ ID NO: 176532
aucaacccaucauaccaug

SEQ ID NO: 176534 - RNA, 19 nt, Artificial Sequence
  Description of Artificial Sequence: Synthetic oligonucleotide
  Sense strand starting at position 3952 of SEQ ID NO: 2276
ugagcuuuccaugguauga

SEQ ID NO: 176535 - RNA, 19 nt, Artificial Sequence
  Description of Artificial Sequence: Synthetic oligonucleotide
  Antisense strand to SEQ ID NO: 176534
ucauaccauggaaagcuca

SEQ ID NO: 176536 - RNA, 19 nt, Artificial Sequence
  Description of Artificial Sequence: Synthetic oligonucleotide
  Sense strand starting at position 3951 of SEQ ID NO: 2276
augagcuuuccaugguaug

SEQ ID NO: 176537 - RNA, 19 nt, Artificial Sequence
  Description of Artificial Sequence: Synthetic oligonucleotide
  Antisense strand to SEQ ID NO: 176536
cauaccauggaaagcucau

SEQ ID NO: 176538 - RNA, 19 nt, Artificial Sequence
  Description of Artificial Sequence: Synthetic oligonucleotide
  Sense strand starting at position 3949 of SEQ ID NO: 2276
ccaugagcuuuccauggua

SEQ ID NO: 176539 - RNA, 19 nt, Artificial Sequence
  Description of Artificial Sequence: Synthetic oligonucleotide
  Antisense strand to SEQ ID NO: 176538
uaccauggaaagcucaugg

SEQ ID NO: 176540 - RNA, 19 nt, Artificial Sequence
  Description of Artificial Sequence: Synthetic oligonucleotide
  Sense strand starting at position 3904 of SEQ ID NO: 2276
ggauaagguugagagauga

SEQ ID NO: 176541 - RNA, 19 nt, Artificial Sequence
  Description of Artificial Sequence: Synthetic oligonucleotide
  Antisense strand to SEQ ID NO: 176540
ucaucucucaaccuuaucc

SEQ ID NO: 176542 - RNA, 19 nt, Artificial Sequence
  Description of Artificial Sequence: Synthetic oligonucleotide
  Sense strand starting at position 3903 of SEQ ID NO: 2276
gggauaagguugagagaug

SEQ ID NO: 176543 - RNA, 19 nt, Artificial Sequence
  Description of Artificial Sequence: Synthetic oligonucleotide
  Antisense strand to SEQ ID NO: 176542
caucucucaaccuuauccc

SEQ ID NO: 176544 - RNA, 19 nt, Artificial Sequence
  Description of Artificial Sequence: Synthetic oligonucleotide
  Sense strand starting at position 3890 of SEQ ID NO: 2276
guugcaguaaagugggaua

SEQ ID NO: 176545 - RNA, 19 nt, Artificial Sequence
  Description of Artificial Sequence: Synthetic oligonucleotide
  Antisense strand to SEQ ID NO: 176544
uaucccacuuuacugcaac

SEQ ID NO: 176546 - RNA, 19 nt, Artificial Sequence
  Description of Artificial Sequence: Synthetic oligonucleotide
  Sense strand starting at position 3684 of SEQ ID NO: 2276
ggguauguucagugaucag

SEQ ID NO: 176547 - RNA, 19 nt, Artificial Sequence
  Description of Artificial Sequence: Synthetic oligonucleotide
  Antisense strand to SEQ ID NO: 176546
cugaucacugaacauaccc

SEQ ID NO: 176548 - RNA, 19 nt, Artificial Sequence
  Description of Artificial Sequence: Synthetic oligonucleotide
  Sense strand starting at position 3683 of SEQ ID NO: 2276
aggguauguucagugauca

SEQ ID NO: 176549 - RNA, 19 nt, Artificial Sequence
  Description of Artificial Sequence: Synthetic oligonucleotide
  Antisense strand to SEQ ID NO: 176548
ugaucacugaacauacccu

SEQ ID NO: 176550 - RNA, 19 nt, Artificial Sequence
  Description of Artificial Sequence: Synthetic oligonucleotide
  Sense strand starting at position 3527 of SEQ ID NO: 2276
gcuaaucacugccuagaac

SEQ ID NO: 176551 - RNA, 19 nt, Artificial Sequence
  Description of Artificial Sequence: Synthetic oligonucleotide
  Antisense strand to SEQ ID NO: 176550
guucuaggcagugauuagc

SEQ ID NO: 176552 - RNA, 19 nt, Artificial Sequence
  Description of Artificial Sequence: Synthetic oligonucleotide
  Sense strand starting at position 3435 of SEQ ID NO: 2276
cuuugaaccugggaaugua

SEQ ID NO: 176553 - RNA, 19 nt, Artificial Sequence
  Description of Artificial Sequence: Synthetic oligonucleotide
  Antisense strand to SEQ ID NO: 176552
uacauucccagguucaaag

SEQ ID NO: 176554 - RNA, 19 nt, Artificial Sequence
  Description of Artificial Sequence: Synthetic oligonucleotide
  Sense strand starting at position 3348 of SEQ ID NO: 2276
ccacauacucagcgaguau

SEQ ID NO: 176555 - RNA, 19 nt, Artificial Sequence
  Description of Artificial Sequence: Synthetic oligonucleotide
  Antisense strand to SEQ ID NO: 176554
auacucgcugaguaugugg

SEQ ID NO: 176556 - RNA, 19 nt, Artificial Sequence
  Description of Artificial Sequence: Synthetic oligonucleotide
  Sense strand starting at position 3347 of SEQ ID NO: 2276
uccacauacucagcgagua

SEQ ID NO: 176557 - RNA, 19 nt, Artificial Sequence
  Description of Artificial Sequence: Synthetic oligonucleotide
  Antisense strand to SEQ ID NO: 176556
uacucgcugaguaugugga

SEQ ID NO: 176558 - RNA, 19 nt, Artificial Sequence
  Description of Artificial Sequence: Synthetic oligonucleotide
  Sense strand starting at position 3337 of SEQ ID NO: 2276
ucaggaauguuccacauac

SEQ ID NO: 176559 - RNA, 19 nt, Artificial Sequence
  Description of Artificial Sequence: Synthetic oligonucleotide
  Antisense strand to SEQ ID NO: 176558
guauguggaacauuccuga

SEQ ID NO: 176560 - RNA, 19 nt, Artificial Sequence
  Description of Artificial Sequence: Synthetic oligonucleotide
  Sense strand starting at position 2906 of SEQ ID NO: 2276
uuacguguguaacaaacuu

SEQ ID NO: 176561 - RNA, 19 nt, Artificial Sequence
  Description of Artificial Sequence: Synthetic oligonucleotide
  Antisense strand to SEQ ID NO: 176560
aaguuuguuacacacguaa

SEQ ID NO: 176562 - RNA, 19 nt, Artificial Sequence
  Description of Artificial Sequence: Synthetic oligonucleotide
  Sense strand starting at position 2903 of SEQ ID NO: 2276
aguuuacguguguaacaaa

SEQ ID NO: 176563 - RNA, 19 nt, Artificial Sequence
  Description of Artificial Sequence: Synthetic oligonucleotide
  Antisense strand to SEQ ID NO: 176562
uuuguuacacacguaaacu

SEQ ID NO: 176564 - RNA, 19 nt, Artificial Sequence
  Description of Artificial Sequence: Synthetic oligonucleotide
  Sense strand starting at position 2902 of SEQ ID NO: 2276
aaguuuacguguguaacaa

SEQ ID NO: 176565 - RNA, 19 nt, Artificial Sequence
  Description of Artificial Sequence: Synthetic oligonucleotide
  Antisense strand to SEQ ID NO: 176564
uuguuacacacguaaacuu

SEQ ID NO: 176566 - RNA, 19 nt, Artificial Sequence
  Description of Artificial Sequence: Synthetic oligonucleotide
  Sense strand starting at position 2901 of SEQ ID NO: 2276
caaguuuacguguguaaca

SEQ ID NO: 176567 - RNA, 19 nt, Artificial Sequence
  Description of Artificial Sequence: Synthetic oligonucleotide
  Antisense strand to SEQ ID NO: 176566
uguuacacacguaaacuug

SEQ ID NO: 176568 - RNA, 19 nt, Artificial Sequence
  Description of Artificial Sequence: Synthetic oligonucleotide
  Sense strand starting at position 2898 of SEQ ID NO: 2276
acacaaguuuacgugugua

SEQ ID NO: 176569 - RNA, 19 nt, Artificial Sequence
  Description of Artificial Sequence: Synthetic oligonucleotide
  Antisense strand to SEQ ID NO: 176568
uacacacguaaacuugugu

SEQ ID NO: 176570 - RNA, 19 nt, Artificial Sequence
  Description of Artificial Sequence: Synthetic oligonucleotide
  Sense strand starting at position 2786 of SEQ ID NO: 2276
cuuggucuuggagggugaa

SEQ ID NO: 176571 - RNA, 19 nt, Artificial Sequence
  Description of Artificial Sequence: Synthetic oligonucleotide
  Antisense strand to SEQ ID NO: 176570
uucacccuccaagaccaag

SEQ ID NO: 176572 - RNA, 19 nt, Artificial Sequence
  Description of Artificial Sequence: Synthetic oligonucleotide
  Sense strand starting at position 2779 of SEQ ID NO: 2276
aagaguucuuggucuugga

SEQ ID NO: 176573 - RNA, 19 nt, Artificial Sequence
  Description of Artificial Sequence: Synthetic oligonucleotide
  Antisense strand to SEQ ID NO: 176572
uccaagaccaagaacucuu

SEQ ID NO: 176574 - RNA, 19 nt, Artificial Sequence
  Description of Artificial Sequence: Synthetic oligonucleotide
  Sense strand starting at position 2777 of SEQ ID NO: 2276
guaagaguucuuggucuug

SEQ ID NO: 176575 - RNA, 19 nt, Artificial Sequence
  Description of Artificial Sequence: Synthetic oligonucleotide
  Antisense strand to SEQ ID NO: 176574
caagaccaagaacucuuac

SEQ ID NO: 176576 - RNA, 19 nt, Artificial Sequence
  Description of Artificial Sequence: Synthetic oligonucleotide
  Sense strand starting at position 2775 of SEQ ID NO: 2276
gaguaagaguucuuggucu

SEQ ID NO: 176577 - RNA, 19 nt, Artificial Sequence
  Description of Artificial Sequence: Synthetic oligonucleotide
  Antisense strand to SEQ ID NO: 176576
agaccaagaacucuuacuc

SEQ ID NO: 176578 - RNA, 19 nt, Artificial Sequence
  Description of Artificial Sequence: Synthetic oligonucleotide
  Sense strand starting at position 2644 of SEQ ID NO: 2276
aaggcagaguuggcaaaua

SEQ ID NO: 176579 - RNA, 19 nt, Artificial Sequence
  Description of Artificial Sequence: Synthetic oligonucleotide
  Antisense strand to SEQ ID NO: 176578
uauuugccaacucugccuu

SEQ ID NO: 176580 - RNA, 19 nt, Artificial Sequence
  Description of Artificial Sequence: Synthetic oligonucleotide
  Sense strand starting at position 2605 of SEQ ID NO: 2276
agcugcuuucuguauuuaa

SEQ ID NO: 176581 - RNA, 19 nt, Artificial Sequence
  Description of Artificial Sequence: Synthetic oligonucleotide
  Antisense strand to SEQ ID NO: 176580
uuaaauacagaaagcagcu

SEQ ID NO: 176582 - RNA, 19 nt, Artificial Sequence
  Description of Artificial Sequence: Synthetic oligonucleotide
  Sense strand starting at position 2588 of SEQ ID NO: 2276
gaacuauucgcugaaacag

SEQ ID NO: 176583 - RNA, 19 nt, Artificial Sequence
  Description of Artificial Sequence: Synthetic oligonucleotide
  Antisense strand to SEQ ID NO: 176582
cuguuucagcgaauaguuc

SEQ ID NO: 176584 - RNA, 19 nt, Artificial Sequence
  Description of Artificial Sequence: Synthetic oligonucleotide
  Sense strand starting at position 2587 of SEQ ID NO: 2276
agaacuauucgcugaaaca

SEQ ID NO: 176585 - RNA, 19 nt, Artificial Sequence
  Description of Artificial Sequence: Synthetic oligonucleotide
  Antisense strand to SEQ ID NO: 176584
uguuucagcgaauaguucu

SEQ ID NO: 176586 - RNA, 19 nt, Artificial Sequence
  Description of Artificial Sequence: Synthetic oligonucleotide
  Sense strand starting at position 2585 of SEQ ID NO: 2276
gcagaacuauucgcugaaa

SEQ ID NO: 176587 - RNA, 19 nt, Artificial Sequence
  Description of Artificial Sequence: Synthetic oligonucleotide
  Antisense strand to SEQ ID NO: 176586
uuucagcgaauaguucugc

SEQ ID NO: 176588 - RNA, 19 nt, Artificial Sequence
  Description of Artificial Sequence: Synthetic oligonucleotide
  Sense strand starting at position 2571 of SEQ ID NO: 2276
aggaguaaguucuagcaga

SEQ ID NO: 176589 - RNA, 19 nt, Artificial Sequence
  Description of Artificial Sequence: Synthetic oligonucleotide
  Antisense strand to SEQ ID NO: 176588
ucugcuagaacuuacuccu

SEQ ID NO: 176590 - RNA, 19 nt, Artificial Sequence
  Description of Artificial Sequence: Synthetic oligonucleotide
  Sense strand starting at position 2556 of SEQ ID NO: 2276
gagaguuuggcgcagagga

SEQ ID NO: 176591 - RNA, 19 nt, Artificial Sequence
  Description of Artificial Sequence: Synthetic oligonucleotide
  Antisense strand to SEQ ID NO: 176590
uccucugcgccaaacucuc

SEQ ID NO: 176592 - RNA, 19 nt, Artificial Sequence
  Description of Artificial Sequence: Synthetic oligonucleotide
  Sense strand starting at position 2399 of SEQ ID NO: 2276
gggaaauccuccucacagc

SEQ ID NO: 176593 - RNA, 19 nt, Artificial Sequence
  Description of Artificial Sequence: Synthetic oligonucleotide
  Antisense strand to SEQ ID NO: 176592
gcugugaggaggauuuccc

SEQ ID NO: 176594 - RNA, 19 nt, Artificial Sequence
  Description of Artificial Sequence: Synthetic oligonucleotide
  Sense strand starting at position 1328 of SEQ ID NO: 2276
guucucaccuuugcauaga

SEQ ID NO: 176595 - RNA, 19 nt, Artificial Sequence
  Description of Artificial Sequence: Synthetic oligonucleotide
  Antisense strand to SEQ ID NO: 176594
ucuaugcaaaggugagaac

SEQ ID NO: 176596 - RNA, 19 nt, Artificial Sequence
  Description of Artificial Sequence: Synthetic oligonucleotide
  Sense strand starting at position 1136 of SEQ ID NO: 2276
gggaacacuuuggaggaau

SEQ ID NO: 176597 - RNA, 19 nt, Artificial Sequence
  Description of Artificial Sequence: Synthetic oligonucleotide
  Antisense strand to SEQ ID NO: 176596
auuccuccaaaguguuccc

SEQ ID NO: 176598 - RNA, 19 nt, Artificial Sequence
  Description of Artificial Sequence: Synthetic oligonucleotide
  Sense strand starting at position 806 of SEQ ID NO: 2276
agagaaggucaucggauua

SEQ ID NO: 176599 - RNA, 19 nt, Artificial Sequence
  Description of Artificial Sequence: Synthetic oligonucleotide
  Antisense strand to SEQ ID NO: 176598
uaauccgaugaccuucucu

SEQ ID NO: 176600 - RNA, 19 nt, Artificial Sequence
  Description of Artificial Sequence: Synthetic oligonucleotide
  Sense strand starting at position 805 of SEQ ID NO: 2276
cagagaaggucaucggauu

SEQ ID NO: 176601 - RNA, 19 nt, Artificial Sequence
  Description of Artificial Sequence: Synthetic oligonucleotide
  Antisense strand to SEQ ID NO: 176600
aauccgaugaccuucucug

SEQ ID NO: 176602 - RNA, 19 nt, Artificial Sequence
  Description of Artificial Sequence: Synthetic oligonucleotide
  Sense strand starting at position 194 of SEQ ID NO: 2276
uguggucaccuggaagaca

SEQ ID NO: 176603 - RNA, 19 nt, Artificial Sequence
  Description of Artificial Sequence: Synthetic oligonucleotide
  Antisense strand to SEQ ID NO: 176602
ugucuuccaggugaccaca

SEQ ID NO: 176604 - RNA, 19 nt, Artificial Sequence
  Description of Artificial Sequence: Synthetic oligonucleotide
  Sense strand starting at position 3945 of SEQ ID NO: 2277
gagguaugguaacuuuaau

SEQ ID NO: 176605 - RNA, 19 nt, Artificial Sequence
  Description of Artificial Sequence: Synthetic oligonucleotide
  Antisense strand to SEQ ID NO: 176604
auuaaaguuaccauaccuc

SEQ ID NO: 176606 - RNA, 19 nt, Artificial Sequence
  Description of Artificial Sequence: Synthetic oligonucleotide
  Sense strand starting at position 3939 of SEQ ID NO: 2277
aaauuagagguaugguaac

SEQ ID NO: 176607 - RNA, 19 nt, Artificial Sequence
  Description of Artificial Sequence: Synthetic oligonucleotide
  Antisense strand to SEQ ID NO: 176606
guuaccauaccucuaauuu

SEQ ID NO: 176608 - RNA, 19 nt, Artificial Sequence
  Description of Artificial Sequence: Synthetic oligonucleotide
  Sense strand starting at position 3885 of SEQ ID NO: 2277
cuuguaaaggcuuaggaau

SEQ ID NO: 176609 - RNA, 19 nt, Artificial Sequence
  Description of Artificial Sequence: Synthetic oligonucleotide
  Antisense strand to SEQ ID NO: 176608
auuccuaagccuuuacaag

SEQ ID NO: 176610 - RNA, 19 nt, Artificial Sequence
  Description of Artificial Sequence: Synthetic oligonucleotide
  Sense strand starting at position 3829 of SEQ ID NO: 2277
agagguucugcauauuauu

SEQ ID NO: 176611 - RNA, 19 nt, Artificial Sequence
  Description of Artificial Sequence: Synthetic oligonucleotide
  Antisense strand to SEQ ID NO: 176610
aauaauaugcagaaccucu

SEQ ID NO: 176612 - RNA, 19 nt, Artificial Sequence
  Description of Artificial Sequence: Synthetic oligonucleotide
  Sense strand starting at position 3826 of SEQ ID NO: 2277
aggagagguucugcauauu

SEQ ID NO: 176613 - RNA, 19 nt, Artificial Sequence
  Description of Artificial Sequence: Synthetic oligonucleotide
  Antisense strand to SEQ ID NO: 176612
aauaugcagaaccucuccu

SEQ ID NO: 176614 - RNA, 19 nt, Artificial Sequence
  Description of Artificial Sequence: Synthetic oligonucleotide
  Sense strand starting at position 3813 of SEQ ID NO: 2277
auugaacaaucagaggaga

SEQ ID NO: 176615 - RNA, 19 nt, Artificial Sequence
  Description of Artificial Sequence: Synthetic oligonucleotide
  Antisense strand to SEQ ID NO: 176614
ucuccucugauuguucaau

SEQ ID NO: 176616 - RNA, 19 nt, Artificial Sequence
  Description of Artificial Sequence: Synthetic oligonucleotide
  Sense strand starting at position 3725 of SEQ ID NO: 2277
cugggauacuagcuuauaa

SEQ ID NO: 176617 - RNA, 19 nt, Artificial Sequence
  Description of Artificial Sequence: Synthetic oligonucleotide
  Antisense strand to SEQ ID NO: 176616
uuauaagcuaguaucccag

SEQ ID NO: 176618 - RNA, 19 nt, Artificial Sequence
  Description of Artificial Sequence: Synthetic oligonucleotide
  Sense strand starting at position 3604 of SEQ ID NO: 2277
guauaaguuccuuaauaga

SEQ ID NO: 176619 - RNA, 19 nt, Artificial Sequence
  Description of Artificial Sequence: Synthetic oligonucleotide
  Antisense strand to SEQ ID NO: 176618
ucuauuaaggaacuuauac

SEQ ID NO: 176620 - RNA, 19 nt, Artificial Sequence
  Description of Artificial Sequence: Synthetic oligonucleotide
  Sense strand starting at position 3603 of SEQ ID NO: 2277
aguauaaguuccuuaauag

SEQ ID NO: 176621 - RNA, 19 nt, Artificial Sequence
  Description of Artificial Sequence: Synthetic oligonucleotide
  Antisense strand to SEQ ID NO: 176620
cuauuaaggaacuuauacu

SEQ ID NO: 176622 - RNA, 19 nt, Artificial Sequence
  Description of Artificial Sequence: Synthetic oligonucleotide
  Sense strand starting at position 3564 of SEQ ID NO: 2277
cuuuaaaguggcuauuaca

SEQ ID NO: 176623 - RNA, 19 nt, Artificial Sequence
  Description of Artificial Sequence: Synthetic oligonucleotide
  Antisense strand to SEQ ID NO: 176622
uguaauagccacuuuaaag

SEQ ID NO: 176624 - RNA, 19 nt, Artificial Sequence
  Description of Artificial Sequence: Synthetic oligonucleotide
  Sense strand starting at position 3555 of SEQ ID NO: 2277
gggcuuucucuuuaaagug

SEQ ID NO: 176625 - RNA, 19 nt, Artificial Sequence
  Description of Artificial Sequence: Synthetic oligonucleotide
  Antisense strand to SEQ ID NO: 176624
cacuuuaaagagaaagccc

SEQ ID NO: 176626 - RNA, 19 nt, Artificial Sequence
  Description of Artificial Sequence: Synthetic oligonucleotide
  Sense strand starting at position 3468 of SEQ ID NO: 2277
uucggaaauuagcuagauu

SEQ ID NO: 176627 - RNA, 19 nt, Artificial Sequence
  Description of Artificial Sequence: Synthetic oligonucleotide
  Antisense strand to SEQ ID NO: 176626
aaucuagcuaauuuccgaa

SEQ ID NO: 176628 - RNA, 19 nt, Artificial Sequence
  Description of Artificial Sequence: Synthetic oligonucleotide
  Sense strand starting at position 3460 of SEQ ID NO: 2277
ugguauauuucggaaauua

SEQ ID NO: 176629 - RNA, 19 nt, Artificial Sequence
  Description of Artificial Sequence: Synthetic oligonucleotide
  Antisense strand to SEQ ID NO: 176628
uaauuuccgaaauauacca

SEQ ID NO: 176630 - RNA, 19 nt, Artificial Sequence
  Description of Artificial Sequence: Synthetic oligonucleotide
  Sense strand starting at position 3451 of SEQ ID NO: 2277
uggauuagaugguauauuu

SEQ ID NO: 176631 - RNA, 19 nt, Artificial Sequence
  Description of Artificial Sequence: Synthetic oligonucleotide
  Antisense strand to SEQ ID NO: 176630
aaauauaccaucuaaucca

SEQ ID NO: 176632 - RNA, 19 nt, Artificial Sequence
  Description of Artificial Sequence: Synthetic oligonucleotide
  Sense strand starting at position 3449 of SEQ ID NO: 2277
ucuggauuagaugguauau

SEQ ID NO: 176633 - RNA, 19 nt, Artificial Sequence
  Description of Artificial Sequence: Synthetic oligonucleotide
  Antisense strand to SEQ ID NO: 176632
auauaccaucuaauccaga

SEQ ID NO: 176634 - RNA, 19 nt, Artificial Sequence
  Description of Artificial Sequence: Synthetic oligonucleotide
  Sense strand starting at position 3441 of SEQ ID NO: 2277
cuugucagucuggauuaga

SEQ ID NO: 176635 - RNA, 19 nt, Artificial Sequence
  Description of Artificial Sequence: Synthetic oligonucleotide
  Antisense strand to SEQ ID NO: 176634
ucuaauccagacugacaag

SEQ ID NO: 176636 - RNA, 19 nt, Artificial Sequence
  Description of Artificial Sequence: Synthetic oligonucleotide
  Sense strand starting at position 3429 of SEQ ID NO: 2277
aggauacucuuccuuguca

SEQ ID NO: 176637 - RNA, 19 nt, Artificial Sequence
  Description of Artificial Sequence: Synthetic oligonucleotide
  Antisense strand to SEQ ID NO: 176636
ugacaaggaagaguauccu

SEQ ID NO: 176638 - RNA, 19 nt, Artificial Sequence
  Description of Artificial Sequence: Synthetic oligonucleotide
  Sense strand starting at position 3295 of SEQ ID NO: 2277
cuguuaggagcuuaguuua

SEQ ID NO: 176639 - RNA, 19 nt, Artificial Sequence
  Description of Artificial Sequence: Synthetic oligonucleotide
  Antisense strand to SEQ ID NO: 176638
uaaacuaagcuccuaacag

SEQ ID NO: 176640 - RNA, 19 nt, Artificial Sequence
  Description of Artificial Sequence: Synthetic oligonucleotide
  Sense strand starting at position 2844 of SEQ ID NO: 2277
ugcucaaacuuggcacaaa

SEQ ID NO: 176641 - RNA, 19 nt, Artificial Sequence
  Description of Artificial Sequence: Synthetic oligonucleotide
  Antisense strand to SEQ ID NO: 176640
uuugugccaaguuugagca

SEQ ID NO: 176642 - RNA, 19 nt, Artificial Sequence
  Description of Artificial Sequence: Synthetic oligonucleotide
  Sense strand starting at position 2710 of SEQ ID NO: 2277
guaugauuggagugaauag

SEQ ID NO: 176643 - RNA, 19 nt, Artificial Sequence
  Description of Artificial Sequence: Synthetic oligonucleotide
  Antisense strand to SEQ ID NO: 176642
cuauucacuccaaucauac

SEQ ID NO: 176644 - RNA, 19 nt, Artificial Sequence
  Description of Artificial Sequence: Synthetic oligonucleotide
  Sense strand starting at position 2706 of SEQ ID NO: 2277
cuuuguaugauuggaguga

SEQ ID NO: 176645 - RNA, 19 nt, Artificial Sequence
  Description of Artificial Sequence: Synthetic oligonucleotide
  Antisense strand to SEQ ID NO: 176644
ucacuccaaucauacaaag

SEQ ID NO: 176646 - RNA, 19 nt, Artificial Sequence
  Description of Artificial Sequence: Synthetic oligonucleotide
  Sense strand starting at position 2494 of SEQ ID NO: 2277
uuuagaaugcuuuauggac

SEQ ID NO: 176647 - RNA, 19 nt, Artificial Sequence
  Description of Artificial Sequence: Synthetic oligonucleotide
  Antisense strand to SEQ ID NO: 176646
guccauaaagcauucuaaa

SEQ ID NO: 176648 - RNA, 19 nt, Artificial Sequence
  Description of Artificial Sequence: Synthetic oligonucleotide
  Sense strand starting at position 2378 of SEQ ID NO: 2277
cauugugcacagugagaaa

SEQ ID NO: 176649 - RNA, 19 nt, Artificial Sequence
  Description of Artificial Sequence: Synthetic oligonucleotide
  Antisense strand to SEQ ID NO: 176648
uuucucacugugcacaaug

SEQ ID NO: 176650 - RNA, 19 nt, Artificial Sequence
  Description of Artificial Sequence: Synthetic oligonucleotide
  Sense strand starting at position 2319 of SEQ ID NO: 2277
cuuuaauauuucucgguuu

SEQ ID NO: 176651 - RNA, 19 nt, Artificial Sequence
  Description of Artificial Sequence: Synthetic oligonucleotide
  Antisense strand to SEQ ID NO: 176650
aaaccgagaaauauuaaag

SEQ ID NO: 176652 - RNA, 19 nt, Artificial Sequence
  Description of Artificial Sequence: Synthetic oligonucleotide
  Sense strand starting at position 2318 of SEQ ID NO: 2277
ucuuuaauauuucucgguu

SEQ ID NO: 176653 - RNA, 19 nt, Artificial Sequence
  Description of Artificial Sequence: Synthetic oligonucleotide
  Antisense strand to SEQ ID NO: 176652
aaccgagaaauauuaaaga

SEQ ID NO: 176654 - RNA, 19 nt, Artificial Sequence
  Description of Artificial Sequence: Synthetic oligonucleotide
  Sense strand starting at position 2255 of SEQ ID NO: 2277
auacucguuggauguauuu

SEQ ID NO: 176655 - RNA, 19 nt, Artificial Sequence
  Description of Artificial Sequence: Synthetic oligonucleotide
  Antisense strand to SEQ ID NO: 176654
aaauacauccaacgaguau

SEQ ID NO: 176656 - RNA, 19 nt, Artificial Sequence
  Description of Artificial Sequence: Synthetic oligonucleotide
  Sense strand starting at position 2220 of SEQ ID NO: 2277
acuuguugaggguguacaa

SEQ ID NO: 176657 - RNA, 19 nt, Artificial Sequence
  Description of Artificial Sequence: Synthetic oligonucleotide
  Antisense strand to SEQ ID NO: 176656
uuguacacccucaacaagu

SEQ ID NO: 176658 - RNA, 19 nt, Artificial Sequence
  Description of Artificial Sequence: Synthetic oligonucleotide
  Sense strand starting at position 2104 of SEQ ID NO: 2277
uguccuuagcaggagugau

SEQ ID NO: 176659 - RNA, 19 nt, Artificial Sequence
  Description of Artificial Sequence: Synthetic oligonucleotide
  Antisense strand to SEQ ID NO: 176658
aucacuccugcuaaggaca

SEQ ID NO: 176660 - RNA, 19 nt, Artificial Sequence
  Description of Artificial Sequence: Synthetic oligonucleotide
  Sense strand starting at position 2049 of SEQ ID NO: 2277
gcaguuucccuggaaucuu

SEQ ID NO: 176661 - RNA, 19 nt, Artificial Sequence
  Description of Artificial Sequence: Synthetic oligonucleotide
  Antisense strand to SEQ ID NO: 176660
aagauuccagggaaacugc

SEQ ID NO: 176662 - RNA, 19 nt, Artificial Sequence
  Description of Artificial Sequence: Synthetic oligonucleotide
  Sense strand starting at position 695 of SEQ ID NO: 2277
gaaacauccgcaggguaga

SEQ ID NO: 176663 - RNA, 19 nt, Artificial Sequence
  Description of Artificial Sequence: Synthetic oligonucleotide
  Antisense strand to SEQ ID NO: 176662
ucuacccugcggauguuuc

SEQ ID NO: 176664 - RNA, 19 nt, Artificial Sequence
  Description of Artificial Sequence: Synthetic oligonucleotide
  Sense strand starting at position 693 of SEQ ID NO: 2277
uagaaacauccgcagggua

SEQ ID NO: 176665 - RNA, 19 nt, Artificial Sequence
  Description of Artificial Sequence: Synthetic oligonucleotide
  Antisense strand to SEQ ID NO: 176664
uacccugcggauguuucua

SEQ ID NO: 176666 - RNA, 19 nt, Artificial Sequence
  Description of Artificial Sequence: Synthetic oligonucleotide
  Sense strand starting at position 683 of SEQ ID NO: 2277
gugguuucuguagaaacau

SEQ ID NO: 176667 - RNA, 19 nt, Artificial Sequence
  Description of Artificial Sequence: Synthetic oligonucleotide
  Antisense strand to SEQ ID NO: 176666
auguuucuacagaaaccac

SEQ ID NO: 176668 - RNA, 19 nt, Artificial Sequence
  Description of Artificial Sequence: Synthetic oligonucleotide
  Sense strand starting at position 547 of SEQ ID NO: 2277
ucagcaaucccucgaaaug

SEQ ID NO: 176669 - RNA, 19 nt, Artificial Sequence
  Description of Artificial Sequence: Synthetic oligonucleotide
  Antisense strand to SEQ ID NO: 176668
cauuucgagggauugcuga

SEQ ID NO: 176670 - RNA, 19 nt, Artificial Sequence
  Description of Artificial Sequence: Synthetic oligonucleotide
  Sense strand starting at position 509 of SEQ ID NO: 2277
gaaaguauugggugagguc

SEQ ID NO: 176671 - RNA, 19 nt, Artificial Sequence
  Description of Artificial Sequence: Synthetic oligonucleotide
  Antisense strand to SEQ ID NO: 176670
gaccucacccaauacuuuc

SEQ ID NO: 176672 - RNA, 19 nt, Artificial Sequence
  Description of Artificial Sequence: Synthetic oligonucleotide
  Sense strand starting at position 365 of SEQ ID NO: 2277
gccagacuacuugagguua

SEQ ID NO: 176673 - RNA, 19 nt, Artificial Sequence
  Description of Artificial Sequence: Synthetic oligonucleotide
  Antisense strand to SEQ ID NO: 176672
uaaccucaaguagucuggc

SEQ ID NO: 176674 - RNA, 19 nt, Artificial Sequence
  Description of Artificial Sequence: Synthetic oligonucleotide
  Sense strand starting at position 352 of SEQ ID NO: 2277
gucagucugauuugccaga

SEQ ID NO: 176675 - RNA, 19 nt, Artificial Sequence
  Description of Artificial Sequence: Synthetic oligonucleotide
  Antisense strand to SEQ ID NO: 176674
ucuggcaaaucagacugac

SEQ ID NO: 176676 - RNA, 19 nt, Artificial Sequence
  Description of Artificial Sequence: Synthetic oligonucleotide
  Sense strand starting at position 350 of SEQ ID NO: 2277
uugucagucugauuugcca

SEQ ID NO: 176677 - RNA, 19 nt, Artificial Sequence
  Description of Artificial Sequence: Synthetic oligonucleotide
  Antisense strand to SEQ ID NO: 176676
uggcaaaucagacugacaa

SEQ ID NO: 176678 - RNA, 19 nt, Artificial Sequence
  Description of Artificial Sequence: Synthetic oligonucleotide
  Sense strand starting at position 150 of SEQ ID NO: 2277
gugccuuacaugggauuaa

SEQ ID NO: 176679 - RNA, 19 nt, Artificial Sequence
  Description of Artificial Sequence: Synthetic oligonucleotide
  Antisense strand to SEQ ID NO: 176678
uuaaucccauguaaggcac

SEQ ID NO: 176680 - RNA, 19 nt, Artificial Sequence
  Description of Artificial Sequence: Synthetic oligonucleotide
  Sense strand starting at position 149 of SEQ ID NO: 2277
ggugccuuacaugggauua

SEQ ID NO: 176681 - RNA, 19 nt, Artificial Sequence
  Description of Artificial Sequence: Synthetic oligonucleotide
  Antisense strand to SEQ ID NO: 176680
uaaucccauguaaggcacc

SEQ ID NO: 176682 - RNA, 19 nt, Artificial Sequence
  Description of Artificial Sequence: Synthetic oligonucleotide
  Sense strand starting at position 20 of SEQ ID NO: 2277
cgagucagcagguaaacuu

SEQ ID NO: 176683 - RNA, 19 nt, Artificial Sequence
  Description of Artificial Sequence: Synthetic oligonucleotide
  Antisense strand to SEQ ID NO: 176682
aaguuuaccugcugacucg

SEQ ID NO: 176684 - RNA, 19 nt, Artificial Sequence
  Description of Artificial Sequence: Synthetic oligonucleotide
  Sense strand starting at position 86 of SEQ ID NO: 2278
auaugaucgcccuaugaau

SEQ ID NO: 176685 - RNA, 19 nt, Artificial Sequence
  Description of Artificial Sequence: Synthetic oligonucleotide
  Antisense strand to SEQ ID NO: 176684
auucauagggcgaucauau

SEQ ID NO: 176686 - RNA, 19 nt, Artificial Sequence
  Description of Artificial Sequence: Synthetic oligonucleotide
  Sense strand starting at position 265 of SEQ ID NO: 2278
acaguugacuuagugaaca

SEQ ID NO: 176687 - RNA, 19 nt, Artificial Sequence
  Description of Artificial Sequence: Synthetic oligonucleotide
  Antisense strand to SEQ ID NO: 176686
uguucacuaagucaacugu

SEQ ID NO: 176688 - RNA, 19 nt, Artificial Sequence
  Description of Artificial Sequence: Synthetic oligonucleotide
  Sense strand starting at position 362 of SEQ ID NO: 2278
guggacuuuccuggaauag

SEQ ID NO: 176689 - RNA, 19 nt, Artificial Sequence
  Description of Artificial Sequence: Synthetic oligonucleotide
  Antisense strand to SEQ ID NO: 176688
cuauuccaggaaaguccac

SEQ ID NO: 176690 - RNA, 19 nt, Artificial Sequence
  Description of Artificial Sequence: Synthetic oligonucleotide
  Sense strand starting at position 392 of SEQ ID NO: 2278
cuguguuccauggaaauga

SEQ ID NO: 176691 - RNA, 19 nt, Artificial Sequence
  Description of Artificial Sequence: Synthetic oligonucleotide
  Antisense strand to SEQ ID NO: 176690
ucauuuccauggaacacag

SEQ ID NO: 176692 - RNA, 19 nt, Artificial Sequence
  Description of Artificial Sequence: Synthetic oligonucleotide
  Sense strand starting at position 766 of SEQ ID NO: 2278
guuacucuaccaugaaguu

SEQ ID NO: 176693 - RNA, 19 nt, Artificial Sequence
  Description of Artificial Sequence: Synthetic oligonucleotide
  Antisense strand to SEQ ID NO: 176692
aacuucaugguagaguaac

SEQ ID NO: 176694 - RNA, 19 nt, Artificial Sequence
  Description of Artificial Sequence: Synthetic oligonucleotide
  Sense strand starting at position 860 of SEQ ID NO: 2278
ggauaacugccacagcuua

SEQ ID NO: 176695 - RNA, 19 nt, Artificial Sequence
  Description of Artificial Sequence: Synthetic oligonucleotide
  Antisense strand to SEQ ID NO: 176694
uaagcuguggcaguuaucc

SEQ ID NO: 176696 - RNA, 19 nt, Artificial Sequence
  Description of Artificial Sequence: Synthetic oligonucleotide
  Sense strand starting at position 956 of SEQ ID NO: 2278
uguuuaaucuauguaacuc

SEQ ID NO: 176697 - RNA, 19 nt, Artificial Sequence
  Description of Artificial Sequence: Synthetic oligonucleotide
  Antisense strand to SEQ ID NO: 176696
gaguuacauagauuaaaca

SEQ ID NO: 176698 - RNA, 19 nt, Artificial Sequence
  Description of Artificial Sequence: Synthetic oligonucleotide
  Sense strand starting at position 978 of SEQ ID NO: 2278
ucuggaucuguguaacagu

SEQ ID NO: 176699 - RNA, 19 nt, Artificial Sequence
  Description of Artificial Sequence: Synthetic oligonucleotide
  Antisense strand to SEQ ID NO: 176698
acuguuacacagauccaga

SEQ ID NO: 176700 - RNA, 19 nt, Artificial Sequence
  Description of Artificial Sequence: Synthetic oligonucleotide
  Sense strand starting at position 1243 of SEQ ID NO: 2278
gcauguugggaauggagua

SEQ ID NO: 176701 - RNA, 19 nt, Artificial Sequence
  Description of Artificial Sequence: Synthetic oligonucleotide
  Antisense strand to SEQ ID NO: 176700
uacuccauucccaacaugc

SEQ ID NO: 176702 - RNA, 19 nt, Artificial Sequence
  Description of Artificial Sequence: Synthetic oligonucleotide
  Sense strand starting at position 1257 of SEQ ID NO: 2278
gaguaaucgccgccuacac

SEQ ID NO: 176703 - RNA, 19 nt, Artificial Sequence
  Description of Artificial Sequence: Synthetic oligonucleotide
  Antisense strand to SEQ ID NO: 176702
guguaggcggcgauuacuc

SEQ ID NO: 176704 - RNA, 19 nt, Artificial Sequence
  Description of Artificial Sequence: Synthetic oligonucleotide
  Sense strand starting at position 1763 of SEQ ID NO: 2278
ccauuugugcgguacgaag

SEQ ID NO: 176705 - RNA, 19 nt, Artificial Sequence
  Description of Artificial Sequence: Synthetic oligonucleotide
  Antisense strand to SEQ ID NO: 176704
cuucguaccgcacaaaugg

SEQ ID NO: 176706 - RNA, 19 nt, Artificial Sequence
  Description of Artificial Sequence: Synthetic oligonucleotide
  Sense strand starting at position 1793 of SEQ ID NO: 2278
gagggaccguuucugaaag

SEQ ID NO: 176707 - RNA, 19 nt, Artificial Sequence
  Description of Artificial Sequence: Synthetic oligonucleotide
  Antisense strand to SEQ ID NO: 176706
cuuucagaaacggucccuc

SEQ ID NO: 176708 - RNA, 19 nt, Artificial Sequence
  Description of Artificial Sequence: Synthetic oligonucleotide
  Sense strand starting at position 1885 of SEQ ID NO: 2278
acaaauucuggcgaaguuu

SEQ ID NO: 176709 - RNA, 19 nt, Artificial Sequence
  Description of Artificial Sequence: Synthetic oligonucleotide
  Antisense strand to SEQ ID NO: 176708
aaacuucgccagaauuugu

SEQ ID NO: 176710 - RNA, 19 nt, Artificial Sequence
  Description of Artificial Sequence: Synthetic oligonucleotide
  Sense strand starting at position 1927 of SEQ ID NO: 2278
aggagagcccuucgaguau

SEQ ID NO: 176711 - RNA, 19 nt, Artificial Sequence
  Description of Artificial Sequence: Synthetic oligonucleotide
  Antisense strand to SEQ ID NO: 176710
auacucgaagggcucuccu

SEQ ID NO: 176712 - RNA, 19 nt, Artificial Sequence
  Description of Artificial Sequence: Synthetic oligonucleotide
  Sense strand starting at position 2330 of SEQ ID NO: 2278
gugccauuaagaggagcau

SEQ ID NO: 176713 - RNA, 19 nt, Artificial Sequence
  Description of Artificial Sequence: Synthetic oligonucleotide
  Antisense strand to SEQ ID NO: 176712
augcuccucuuaauggcac

SEQ ID NO: 176714 - RNA, 19 nt, Artificial Sequence
  Description of Artificial Sequence: Synthetic oligonucleotide
  Sense strand starting at position 2336 of SEQ ID NO: 2278
uuaagaggagcauguaauc

SEQ ID NO: 176715 - RNA, 19 nt, Artificial Sequence
  Description of Artificial Sequence: Synthetic oligonucleotide
  Antisense strand to SEQ ID NO: 176714
gauuacaugcuccucuuaa

SEQ ID NO: 176716 - RNA, 19 nt, Artificial Sequence
  Description of Artificial Sequence: Synthetic oligonucleotide
  Sense strand starting at position 2346 of SEQ ID NO: 2278
cauguaauccaaugaguug

SEQ ID NO: 176717 - RNA, 19 nt, Artificial Sequence
  Description of Artificial Sequence: Synthetic oligonucleotide
  Antisense strand to SEQ ID NO: 176716
caacucauuggauuacaug

SEQ ID NO: 176718 - RNA, 19 nt, Artificial Sequence
  Description of Artificial Sequence: Synthetic oligonucleotide
  Sense strand starting at position 2353 of SEQ ID NO: 2278
uccaaugaguugccuaauc

SEQ ID NO: 176719 - RNA, 19 nt, Artificial Sequence
  Description of Artificial Sequence: Synthetic oligonucleotide
  Antisense strand to SEQ ID NO: 176718
gauuaggcaacucauugga

SEQ ID NO: 176720 - RNA, 19 nt, Artificial Sequence
  Description of Artificial Sequence: Synthetic oligonucleotide
  Sense strand starting at position 2358 of SEQ ID NO: 2278
ugaguugccuaaucuaaac

SEQ ID NO: 176721 - RNA, 19 nt, Artificial Sequence
  Description of Artificial Sequence: Synthetic oligonucleotide
  Antisense strand to SEQ ID NO: 176720
guuuagauuaggcaacuca

SEQ ID NO: 176722 - RNA, 19 nt, Artificial Sequence
  Description of Artificial Sequence: Synthetic oligonucleotide
  Sense strand starting at position 2379 of SEQ ID NO: 2278
caguuugcucgugugucaa

SEQ ID NO: 176723 - RNA, 19 nt, Artificial Sequence
  Description of Artificial Sequence: Synthetic oligonucleotide
  Antisense strand to SEQ ID NO: 176722
uugacacacgagcaaacug

SEQ ID NO: 176724 - RNA, 19 nt, Artificial Sequence
  Description of Artificial Sequence: Synthetic oligonucleotide
  Sense strand starting at position 2408 of SEQ ID NO: 2278
cguuacuuaccucauaagu

SEQ ID NO: 176725 - RNA, 19 nt, Artificial Sequence
  Description of Artificial Sequence: Synthetic oligonucleotide
  Antisense strand to SEQ ID NO: 176724
acuuaugagguaaguaacg

SEQ ID NO: 176726 - RNA, 19 nt, Artificial Sequence
  Description of Artificial Sequence: Synthetic oligonucleotide
  Sense strand starting at position 2416 of SEQ ID NO: 2278
accucauaaguuuguuauu

SEQ ID NO: 176727 - RNA, 19 nt, Artificial Sequence
  Description of Artificial Sequence: Synthetic oligonucleotide
  Antisense strand to SEQ ID NO: 176726
aauaacaaacuuaugaggu

SEQ ID NO: 176728 - RNA, 19 nt, Artificial Sequence
  Description of Artificial Sequence: Synthetic oligonucleotide
  Sense strand starting at position 2417 of SEQ ID NO: 2278
ccucauaaguuuguuauua

SEQ ID NO: 176729 - RNA, 19 nt, Artificial Sequence
  Description of Artificial Sequence: Synthetic oligonucleotide
  Antisense strand to SEQ ID NO: 176728
uaauaacaaacuuaugagg

SEQ ID NO: 176730 - RNA, 19 nt, Artificial Sequence
  Description of Artificial Sequence: Synthetic oligonucleotide
  Sense strand starting at position 2418 of SEQ ID NO: 2278
cucauaaguuuguuauuag

SEQ ID NO: 176731 - RNA, 19 nt, Artificial Sequence
  Description of Artificial Sequence: Synthetic oligonucleotide
  Antisense strand to SEQ ID NO: 176730
cuaauaacaaacuuaugag

SEQ ID NO: 176732 - RNA, 19 nt, Artificial Sequence
  Description of Artificial Sequence: Synthetic oligonucleotide
  Sense strand starting at position 2435 of SEQ ID NO: 2278
aguagauuagaugacguau

SEQ ID NO: 176733 - RNA, 19 nt, Artificial Sequence
  Description of Artificial Sequence: Synthetic oligonucleotide
  Antisense strand to SEQ ID NO: 176732
auacgucaucuaaucuacu

SEQ ID NO: 176734 - RNA, 19 nt, Artificial Sequence
  Description of Artificial Sequence: Synthetic oligonucleotide
  Sense strand starting at position 2453 of SEQ ID NO: 2278
ugcagcauuucuguuaaau

SEQ ID NO: 176735 - RNA, 19 nt, Artificial Sequence
  Description of Artificial Sequence: Synthetic oligonucleotide
  Antisense strand to SEQ ID NO: 176734
auuuaacagaaaugcugca

SEQ ID NO: 176736 - RNA, 19 nt, Artificial Sequence
  Description of Artificial Sequence: Synthetic oligonucleotide
  Sense strand starting at position 2527 of SEQ ID NO: 2278
uuaagagauggcgagcaau

SEQ ID NO: 176737 - RNA, 19 nt, Artificial Sequence
  Description of Artificial Sequence: Synthetic oligonucleotide
  Antisense strand to SEQ ID NO: 176736
auugcucgccaucucuuaa

SEQ ID NO: 176738 - RNA, 19 nt, Artificial Sequence
  Description of Artificial Sequence: Synthetic oligonucleotide
  Sense strand starting at position 2601 of SEQ ID NO: 2278
guucuugaccuacagcaau

SEQ ID NO: 176739 - RNA, 19 nt, Artificial Sequence
  Description of Artificial Sequence: Synthetic oligonucleotide
  Antisense strand to SEQ ID NO: 176738
auugcuguaggucaagaac

SEQ ID NO: 176740 - RNA, 19 nt, Artificial Sequence
  Description of Artificial Sequence: Synthetic oligonucleotide
  Sense strand starting at position 2931 of SEQ ID NO: 2278
ccucucuuggcagaaguga

SEQ ID NO: 176741 - RNA, 19 nt, Artificial Sequence
  Description of Artificial Sequence: Synthetic oligonucleotide
  Antisense strand to SEQ ID NO: 176740
ucacuucugccaagagagg

SEQ ID NO: 176742 - RNA, 19 nt, Artificial Sequence
  Description of Artificial Sequence: Synthetic oligonucleotide
  Sense strand starting at position 2967 of SEQ ID NO: 2278
cuuggaugguguuuaauaa

SEQ ID NO: 176743 - RNA, 19 nt, Artificial Sequence
  Description of Artificial Sequence: Synthetic oligonucleotide
  Antisense strand to SEQ ID NO: 176742
uuauuaaacaccauccaag

SEQ ID NO: 176744 - RNA, 19 nt, Artificial Sequence
  Description of Artificial Sequence: Synthetic oligonucleotide
  Sense strand starting at position 2968 of SEQ ID NO: 2278
uuggaugguguuuaauaau

SEQ ID NO: 176745 - RNA, 19 nt, Artificial Sequence
  Description of Artificial Sequence: Synthetic oligonucleotide
  Antisense strand to SEQ ID NO: 176744
auuauuaaacaccauccaa

SEQ ID NO: 176746 - RNA, 19 nt, Artificial Sequence
  Description of Artificial Sequence: Synthetic oligonucleotide
  Sense strand starting at position 3057 of SEQ ID NO: 2278
guauaacauuuccaggaau

SEQ ID NO: 176747 - RNA, 19 nt, Artificial Sequence
  Description of Artificial Sequence: Synthetic oligonucleotide
  Antisense strand to SEQ ID NO: 176746
auuccuggaaauguuauac

SEQ ID NO: 176748 - RNA, 19 nt, Artificial Sequence
  Description of Artificial Sequence: Synthetic oligonucleotide
  Sense strand starting at position 3229 of SEQ ID NO: 2278
cuaagucacaacggauaga

SEQ ID NO: 176749 - RNA, 19 nt, Artificial Sequence
  Description of Artificial Sequence: Synthetic oligonucleotide
  Antisense strand to SEQ ID NO: 176748
ucuauccguugugacuuag

SEQ ID NO: 176750 - RNA, 19 nt, Artificial Sequence
  Description of Artificial Sequence: Synthetic oligonucleotide
  Sense strand starting at position 3718 of SEQ ID NO: 2278
aauaguuaagugugugaau

SEQ ID NO: 176751 - RNA, 19 nt, Artificial Sequence
  Description of Artificial Sequence: Synthetic oligonucleotide
  Antisense strand to SEQ ID NO: 176750
auucacacacuuaacuauu

SEQ ID NO: 176752 - RNA, 19 nt, Artificial Sequence
  Description of Artificial Sequence: Synthetic oligonucleotide
  Sense strand starting at position 3731 of SEQ ID NO: 2278
gugaauuaaugccauuuaa

SEQ ID NO: 176753 - RNA, 19 nt, Artificial Sequence
  Description of Artificial Sequence: Synthetic oligonucleotide
  Antisense strand to SEQ ID NO: 176752
uuaaauggcauuaauucac

SEQ ID NO: 176754 - RNA, 19 nt, Artificial Sequence
  Description of Artificial Sequence: Synthetic oligonucleotide
  Sense strand starting at position 3769 of SEQ ID NO: 2278
uguuucugucguucccaau

SEQ ID NO: 176755 - RNA, 19 nt, Artificial Sequence
  Description of Artificial Sequence: Synthetic oligonucleotide
  Antisense strand to SEQ ID NO: 176754
auugggaacgacagaaaca

SEQ ID NO: 176756 - RNA, 19 nt, Artificial Sequence
  Description of Artificial Sequence: Synthetic oligonucleotide
  Sense strand starting at position 3775 of SEQ ID NO: 2278
ugucguucccaauaaauga

SEQ ID NO: 176757 - RNA, 19 nt, Artificial Sequence
  Description of Artificial Sequence: Synthetic oligonucleotide
  Antisense strand to SEQ ID NO: 176756
ucauuuauugggaacgaca

SEQ ID NO: 176758 - RNA, 19 nt, Artificial Sequence
  Description of Artificial Sequence: Synthetic oligonucleotide
  Sense strand starting at position 3830 of SEQ ID NO: 2278
cacguuugauaaguaaaug

SEQ ID NO: 176759 - RNA, 19 nt, Artificial Sequence
  Description of Artificial Sequence: Synthetic oligonucleotide
  Antisense strand to SEQ ID NO: 176758
cauuuacuuaucaaacgug

SEQ ID NO: 176760 - RNA, 19 nt, Artificial Sequence
  Description of Artificial Sequence: Synthetic oligonucleotide
  Sense strand starting at position 3908 of SEQ ID NO: 2278
gucacugaauuccuccaga

SEQ ID NO: 176761 - RNA, 19 nt, Artificial Sequence
  Description of Artificial Sequence: Synthetic oligonucleotide
  Antisense strand to SEQ ID NO: 176760
ucuggaggaauucagugac

SEQ ID NO: 176762 - RNA, 19 nt, Artificial Sequence
  Description of Artificial Sequence: Synthetic oligonucleotide
  Sense strand starting at position 3948 of SEQ ID NO: 2278
cuuuaauauccagagcuga

SEQ ID NO: 176763 - RNA, 19 nt, Artificial Sequence
  Description of Artificial Sequence: Synthetic oligonucleotide
  Antisense strand to SEQ ID NO: 176762
ucagcucuggauauuaaag

SEQ ID NO: 176764 - RNA, 19 nt, Artificial Sequence
  Description of Artificial Sequence: Synthetic oligonucleotide
  Sense strand starting at position 3964 of SEQ ID NO: 2279
uggaaagaauuaucuguac

SEQ ID NO: 176765 - RNA, 19 nt, Artificial Sequence
  Description of Artificial Sequence: Synthetic oligonucleotide
  Antisense strand to SEQ ID NO: 176764
guacagauaauucuuucca

SEQ ID NO: 176766 - RNA, 19 nt, Artificial Sequence
  Description of Artificial Sequence: Synthetic oligonucleotide
  Sense strand starting at position 3894 of SEQ ID NO: 2279
aagugaauuuauggugaaa

SEQ ID NO: 176767 - RNA, 19 nt, Artificial Sequence
  Description of Artificial Sequence: Synthetic oligonucleotide
  Antisense strand to SEQ ID NO: 176766
uuucaccauaaauucacuu

SEQ ID NO: 176768 - RNA, 19 nt, Artificial Sequence
  Description of Artificial Sequence: Synthetic oligonucleotide
  Sense strand starting at position 3884 of SEQ ID NO: 2279
ggugguuuauaagugaauu

SEQ ID NO: 176769 - RNA, 19 nt, Artificial Sequence
  Description of Artificial Sequence: Synthetic oligonucleotide
  Antisense strand to SEQ ID NO: 176768
aauucacuuauaaaccacc

SEQ ID NO: 176770 - RNA, 19 nt, Artificial Sequence
  Description of Artificial Sequence: Synthetic oligonucleotide
  Sense strand starting at position 3877 of SEQ ID NO: 2279
uaauacuggugguuuauaa

SEQ ID NO: 176771 - RNA, 19 nt, Artificial Sequence
  Description of Artificial Sequence: Synthetic oligonucleotide
  Antisense strand to SEQ ID NO: 176770
uuauaaaccaccaguauua

SEQ ID NO: 176772 - RNA, 19 nt, Artificial Sequence
  Description of Artificial Sequence: Synthetic oligonucleotide
  Sense strand starting at position 3875 of SEQ ID NO: 2279
guuaauacuggugguuuau

SEQ ID NO: 176773 - RNA, 19 nt, Artificial Sequence
  Description of Artificial Sequence: Synthetic oligonucleotide
  Antisense strand to SEQ ID NO: 176772
auaaaccaccaguauuaac

SEQ ID NO: 176774 - RNA, 19 nt, Artificial Sequence
  Description of Artificial Sequence: Synthetic oligonucleotide
  Sense strand starting at position 3688 of SEQ ID NO: 2279
augccuguuuccucaccua

SEQ ID NO: 176775 - RNA, 19 nt, Artificial Sequence
  Description of Artificial Sequence: Synthetic oligonucleotide
  Antisense strand to SEQ ID NO: 176774
uaggugaggaaacaggcau

SEQ ID NO: 176776 - RNA, 19 nt, Artificial Sequence
  Description of Artificial Sequence: Synthetic oligonucleotide
  Sense strand starting at position 3624 of SEQ ID NO: 2279
ggcagucuaauauagugau

SEQ ID NO: 176777 - RNA, 19 nt, Artificial Sequence
  Description of Artificial Sequence: Synthetic oligonucleotide
  Antisense strand to SEQ ID NO: 176776
aucacuauauuagacugcc

SEQ ID NO: 176778 - RNA, 19 nt, Artificial Sequence
  Description of Artificial Sequence: Synthetic oligonucleotide
  Sense strand starting at position 3604 of SEQ ID NO: 2279
aaugucguuugagucugaa

SEQ ID NO: 176779 - RNA, 19 nt, Artificial Sequence
  Description of Artificial Sequence: Synthetic oligonucleotide
  Antisense strand to SEQ ID NO: 176778
uucagacucaaacgacauu

SEQ ID NO: 176780 - RNA, 19 nt, Artificial Sequence
  Description of Artificial Sequence: Synthetic oligonucleotide
  Sense strand starting at position 3601 of SEQ ID NO: 2279
acaaaugucguuugagucu

SEQ ID NO: 176781 - RNA, 19 nt, Artificial Sequence
  Description of Artificial Sequence: Synthetic oligonucleotide
  Antisense strand to SEQ ID NO: 176780
agacucaaacgacauuugu

SEQ ID NO: 176782 - RNA, 19 nt, Artificial Sequence
  Description of Artificial Sequence: Synthetic oligonucleotide
  Sense strand starting at position 3081 of SEQ ID NO: 2279
acacgagguugaguugaaa

SEQ ID NO: 176783 - RNA, 19 nt, Artificial Sequence
  Description of Artificial Sequence: Synthetic oligonucleotide
  Antisense strand to SEQ ID NO: 176782
uuucaacucaaccucgugu

SEQ ID NO: 176784 - RNA, 19 nt, Artificial Sequence
  Description of Artificial Sequence: Synthetic oligonucleotide
  Sense strand starting at position 2991 of SEQ ID NO: 2279
gugccaggucugcuccauu

SEQ ID NO: 176785 - RNA, 19 nt, Artificial Sequence
  Description of Artificial Sequence: Synthetic oligonucleotide
  Antisense strand to SEQ ID NO: 176784
aauggagcagaccuggcac

SEQ ID NO: 176786 - RNA, 19 nt, Artificial Sequence
  Description of Artificial Sequence: Synthetic oligonucleotide
  Sense strand starting at position 2849 of SEQ ID NO: 2279
aucagaggacuuggcuaau

SEQ ID NO: 176787 - RNA, 19 nt, Artificial Sequence
  Description of Artificial Sequence: Synthetic oligonucleotide
  Antisense strand to SEQ ID NO: 176786
auuagccaaguccucugau

SEQ ID NO: 176788 - RNA, 19 nt, Artificial Sequence
  Description of Artificial Sequence: Synthetic oligonucleotide
  Sense strand starting at position 2832 of SEQ ID NO: 2279
aacugcugucuagagagau

SEQ ID NO: 176789 - RNA, 19 nt, Artificial Sequence
  Description of Artificial Sequence: Synthetic oligonucleotide
  Antisense strand to SEQ ID NO: 176788
aucucucuagacagcaguu

SEQ ID NO: 176790 - RNA, 19 nt, Artificial Sequence
  Description of Artificial Sequence: Synthetic oligonucleotide
  Sense strand starting at position 2761 of SEQ ID NO: 2279
agcuuaaugcauuguuuaa

SEQ ID NO: 176791 - RNA, 19 nt, Artificial Sequence
  Description of Artificial Sequence: Synthetic oligonucleotide
  Antisense strand to SEQ ID NO: 176790
uuaaacaaugcauuaagcu

SEQ ID NO: 176792 - RNA, 19 nt, Artificial Sequence
  Description of Artificial Sequence: Synthetic oligonucleotide
  Sense strand starting at position 2736 of SEQ ID NO: 2279
gaacaaggcuguuagauuu

SEQ ID NO: 176793 - RNA, 19 nt, Artificial Sequence
  Description of Artificial Sequence: Synthetic oligonucleotide
  Antisense strand to SEQ ID NO: 176792
aaaucuaacagccuuguuc

SEQ ID NO: 176794 - RNA, 19 nt, Artificial Sequence
  Description of Artificial Sequence: Synthetic oligonucleotide
  Sense strand starting at position 2609 of SEQ ID NO: 2279
gugugcacuuucuugacua

SEQ ID NO: 176795 - RNA, 19 nt, Artificial Sequence
  Description of Artificial Sequence: Synthetic oligonucleotide
  Antisense strand to SEQ ID NO: 176794
uagucaagaaagugcacac

SEQ ID NO: 176796 - RNA, 19 nt, Artificial Sequence
  Description of Artificial Sequence: Synthetic oligonucleotide
  Sense strand starting at position 2542 of SEQ ID NO: 2279
ccgagucauggguaaauca

SEQ ID NO: 176797 - RNA, 19 nt, Artificial Sequence
  Description of Artificial Sequence: Synthetic oligonucleotide
  Antisense strand to SEQ ID NO: 176796
ugauuuacccaugacucgg

SEQ ID NO: 176798 - RNA, 19 nt, Artificial Sequence
  Description of Artificial Sequence: Synthetic oligonucleotide
  Sense strand starting at position 2520 of SEQ ID NO: 2279
guguuuggaguuuggaaac

SEQ ID NO: 176799 - RNA, 19 nt, Artificial Sequence
  Description of Artificial Sequence: Synthetic oligonucleotide
  Antisense strand to SEQ ID NO: 176798
guuuccaaacuccaaacac

SEQ ID NO: 176800 - RNA, 19 nt, Artificial Sequence
  Description of Artificial Sequence: Synthetic oligonucleotide
  Sense strand starting at position 2513 of SEQ ID NO: 2279
ucuggagguguuuggaguu

SEQ ID NO: 176801 - RNA, 19 nt, Artificial Sequence
  Description of Artificial Sequence: Synthetic oligonucleotide
  Antisense strand to SEQ ID NO: 176800
aacuccaaacaccuccaga

SEQ ID NO: 176802 - RNA, 19 nt, Artificial Sequence
  Description of Artificial Sequence: Synthetic oligonucleotide
  Sense strand starting at position 2259 of SEQ ID NO: 2279
cgcguuugcagaucaacuu

SEQ ID NO: 176803 - RNA, 19 nt, Artificial Sequence
  Description of Artificial Sequence: Synthetic oligonucleotide
  Antisense strand to SEQ ID NO: 176802
aaguugaucugcaaacgcg

SEQ ID NO: 176804 - RNA, 19 nt, Artificial Sequence
  Description of Artificial Sequence: Synthetic oligonucleotide
  Sense strand starting at position 2165 of SEQ ID NO: 2279
ugaaauggccacugucaau

SEQ ID NO: 176805 - RNA, 19 nt, Artificial Sequence
  Description of Artificial Sequence: Synthetic oligonucleotide
  Antisense strand to SEQ ID NO: 176804
auugacaguggccauuuca

SEQ ID NO: 176806 - RNA, 19 nt, Artificial Sequence
  Description of Artificial Sequence: Synthetic oligonucleotide
  Sense strand starting at position 2153 of SEQ ID NO: 2279
gaacucaggcuuugaaaug

SEQ ID NO: 176807 - RNA, 19 nt, Artificial Sequence
  Description of Artificial Sequence: Synthetic oligonucleotide
  Antisense strand to SEQ ID NO: 176806
cauuucaaagccugaguuc

SEQ ID NO: 176808 - RNA, 19 nt, Artificial Sequence
  Description of Artificial Sequence: Synthetic oligonucleotide
  Sense strand starting at position 2117 of SEQ ID NO: 2279
uuuauucugggucgugauu

SEQ ID NO: 176809 - RNA, 19 nt, Artificial Sequence
  Description of Artificial Sequence: Synthetic oligonucleotide
  Antisense strand to SEQ ID NO: 176808
aaucacgacccagaauaaa

SEQ ID NO: 176810 - RNA, 19 nt, Artificial Sequence
  Description of Artificial Sequence: Synthetic oligonucleotide
  Sense strand starting at position 2115 of SEQ ID NO: 2279
aguuuauucugggucguga

SEQ ID NO: 176811 - RNA, 19 nt, Artificial Sequence
  Description of Artificial Sequence: Synthetic oligonucleotide
  Antisense strand to SEQ ID NO: 176810
ucacgacccagaauaaacu

SEQ ID NO: 176812 - RNA, 19 nt, Artificial Sequence
  Description of Artificial Sequence: Synthetic oligonucleotide
  Sense strand starting at position 1245 of SEQ ID NO: 2279
ggacguucccuagagcugu

SEQ ID NO: 176813 - RNA, 19 nt, Artificial Sequence
  Description of Artificial Sequence: Synthetic oligonucleotide
  Antisense strand to SEQ ID NO: 176812
acagcucuagggaacgucc

SEQ ID NO: 176814 - RNA, 19 nt, Artificial Sequence
  Description of Artificial Sequence: Synthetic oligonucleotide
  Sense strand starting at position 1076 of SEQ ID NO: 2279
uccggugcucuacagugau

SEQ ID NO: 176815 - RNA, 19 nt, Artificial Sequence
  Description of Artificial Sequence: Synthetic oligonucleotide
  Antisense strand to SEQ ID NO: 176814
aucacuguagagcaccgga

SEQ ID NO: 176816 - RNA, 19 nt, Artificial Sequence
  Description of Artificial Sequence: Synthetic oligonucleotide
  Sense strand starting at position 916 of SEQ ID NO: 2279
ggguccaaccuguaaaguu

SEQ ID NO: 176817 - RNA, 19 nt, Artificial Sequence
  Description of Artificial Sequence: Synthetic oligonucleotide
  Antisense strand to SEQ ID NO: 176816
aacuuuacagguuggaccc

SEQ ID NO: 176818 - RNA, 19 nt, Artificial Sequence
  Description of Artificial Sequence: Synthetic oligonucleotide
  Sense strand starting at position 835 of SEQ ID NO: 2279
gacgaaaggucccuugcau

SEQ ID NO: 176819 - RNA, 19 nt, Artificial Sequence
  Description of Artificial Sequence: Synthetic oligonucleotide
  Antisense strand to SEQ ID NO: 176818
augcaagggaccuuucguc

SEQ ID NO: 176820 - RNA, 19 nt, Artificial Sequence
  Description of Artificial Sequence: Synthetic oligonucleotide
  Sense strand starting at position 724 of SEQ ID NO: 2279
gcuauuaagcuagaggcua

SEQ ID NO: 176821 - RNA, 19 nt, Artificial Sequence
  Description of Artificial Sequence: Synthetic oligonucleotide
  Antisense strand to SEQ ID NO: 176820
uagccucuagcuuaauagc

SEQ ID NO: 176822 - RNA, 19 nt, Artificial Sequence
  Description of Artificial Sequence: Synthetic oligonucleotide
  Sense strand starting at position 712 of SEQ ID NO: 2279
caguuugccugggcuauua

SEQ ID NO: 176823 - RNA, 19 nt, Artificial Sequence
  Description of Artificial Sequence: Synthetic oligonucleotide
  Antisense strand to SEQ ID NO: 176822
uaauagcccaggcaaacug

SEQ ID NO: 176824 - RNA, 19 nt, Artificial Sequence
  Description of Artificial Sequence: Synthetic oligonucleotide
  Sense strand starting at position 688 of SEQ ID NO: 2279
gugcucugggccugacaaa

SEQ ID NO: 176825 - RNA, 19 nt, Artificial Sequence
  Description of Artificial Sequence: Synthetic oligonucleotide
  Antisense strand to SEQ ID NO: 176824
uuugucaggcccagagcac

SEQ ID NO: 176826 - RNA, 19 nt, Artificial Sequence
  Description of Artificial Sequence: Synthetic oligonucleotide
  Sense strand starting at position 667 of SEQ ID NO: 2279
uucuguuuagagugaaaca

SEQ ID NO: 176827 - RNA, 19 nt, Artificial Sequence
  Description of Artificial Sequence: Synthetic oligonucleotide
  Antisense strand to SEQ ID NO: 176826
uguuucacucuaaacagaa

SEQ ID NO: 176828 - RNA, 19 nt, Artificial Sequence
  Description of Artificial Sequence: Synthetic oligonucleotide
  Sense strand starting at position 623 of SEQ ID NO: 2279
caguucucucuggauaguu

SEQ ID NO: 176829 - RNA, 19 nt, Artificial Sequence
  Description of Artificial Sequence: Synthetic oligonucleotide
  Antisense strand to SEQ ID NO: 176828
aacuauccagagagaacug

SEQ ID NO: 176830 - RNA, 19 nt, Artificial Sequence
  Description of Artificial Sequence: Synthetic oligonucleotide
  Sense strand starting at position 621 of SEQ ID NO: 2279
aucaguucucucuggauag

SEQ ID NO: 176831 - RNA, 19 nt, Artificial Sequence
  Description of Artificial Sequence: Synthetic oligonucleotide
  Antisense strand to SEQ ID NO: 176830
cuauccagagagaacugau

SEQ ID NO: 176832 - RNA, 19 nt, Artificial Sequence
  Description of Artificial Sequence: Synthetic oligonucleotide
  Sense strand starting at position 213 of SEQ ID NO: 2279
gcaaaucaacugcgauaug

SEQ ID NO: 176833 - RNA, 19 nt, Artificial Sequence
  Description of Artificial Sequence: Synthetic oligonucleotide
  Antisense strand to SEQ ID NO: 176832
cauaucgcaguugauuugc

SEQ ID NO: 176834 - RNA, 19 nt, Artificial Sequence
  Description of Artificial Sequence: Synthetic oligonucleotide
  Sense strand starting at position 186 of SEQ ID NO: 2279
caaagaucaccuugugaga

SEQ ID NO: 176835 - RNA, 19 nt, Artificial Sequence
  Description of Artificial Sequence: Synthetic oligonucleotide
  Antisense strand to SEQ ID NO: 176834
ucucacaaggugaucuuug

SEQ ID NO: 176836 - RNA, 19 nt, Artificial Sequence
  Description of Artificial Sequence: Synthetic oligonucleotide
  Sense strand starting at position 68 of SEQ ID NO: 2279
ggccucauuuauggagauu

SEQ ID NO: 176837 - RNA, 19 nt, Artificial Sequence
  Description of Artificial Sequence: Synthetic oligonucleotide
  Antisense strand to SEQ ID NO: 176836
aaucuccauaaaugaggcc

SEQ ID NO: 176838 - RNA, 19 nt, Artificial Sequence
  Description of Artificial Sequence: Synthetic oligonucleotide
  Sense strand starting at position 67 of SEQ ID NO: 2279
gggccucauuuauggagau

SEQ ID NO: 176839 - RNA, 19 nt, Artificial Sequence
  Description of Artificial Sequence: Synthetic oligonucleotide
  Antisense strand to SEQ ID NO: 176838
aucuccauaaaugaggccc

SEQ ID NO: 176840 - RNA, 19 nt, Artificial Sequence
  Description of Artificial Sequence: Synthetic oligonucleotide
  Sense strand starting at position 10 of SEQ ID NO: 2279
cuaaacacacuguguuauu

SEQ ID NO: 176841 - RNA, 19 nt, Artificial Sequence
  Description of Artificial Sequence: Synthetic oligonucleotide
  Antisense strand to SEQ ID NO: 176840
aauaacacaguguguuuag

SEQ ID NO: 176842 - RNA, 19 nt, Artificial Sequence
  Description of Artificial Sequence: Synthetic oligonucleotide
  Sense strand starting at position 8 of SEQ ID NO: 2279
cccuaaacacacuguguua

SEQ ID NO: 176843 - RNA, 19 nt, Artificial Sequence
  Description of Artificial Sequence: Synthetic oligonucleotide
  Antisense strand to SEQ ID NO: 176842
uaacacaguguguuuaggg

SEQ ID NO: 176844 - RNA, 19 nt, Artificial Sequence
  Description of Artificial Sequence: Synthetic oligonucleotide
  Sense strand starting at position 49 of SEQ ID NO: 2280
cuaagagcugaguacuauu

SEQ ID NO: 176845 - RNA, 19 nt, Artificial Sequence
  Description of Artificial Sequence: Synthetic oligonucleotide
  Antisense strand to SEQ ID NO: 176844
aauaguacucagcucuuag

SEQ ID NO: 176846 - RNA, 19 nt, Artificial Sequence
  Description of Artificial Sequence: Synthetic oligonucleotide
  Sense strand starting at position 115 of SEQ ID NO: 2280
uggcuacgucacuaaaggu

SEQ ID NO: 176847 - RNA, 19 nt, Artificial Sequence
  Description of Artificial Sequence: Synthetic oligonucleotide
  Antisense strand to SEQ ID NO: 176846
accuuuagugacguagcca

SEQ ID NO: 176848 - RNA, 19 nt, Artificial Sequence
  Description of Artificial Sequence: Synthetic oligonucleotide
  Sense strand starting at position 129 of SEQ ID NO: 2280
aagguaguagcugagcaau

SEQ ID NO: 176849 - RNA, 19 nt, Artificial Sequence
  Description of Artificial Sequence: Synthetic oligonucleotide
  Antisense strand to SEQ ID NO: 176848
auugcucagcuacuaccuu

SEQ ID NO: 176850 - RNA, 19 nt, Artificial Sequence
  Description of Artificial Sequence: Synthetic oligonucleotide
  Sense strand starting at position 132 of SEQ ID NO: 2280
guaguagcugagcaauacu

SEQ ID NO: 176851 - RNA, 19 nt, Artificial Sequence
  Description of Artificial Sequence: Synthetic oligonucleotide
  Antisense strand to SEQ ID NO: 176850
aguauugcucagcuacuac

SEQ ID NO: 176852 - RNA, 19 nt, Artificial Sequence
  Description of Artificial Sequence: Synthetic oligonucleotide
  Sense strand starting at position 135 of SEQ ID NO: 2280
guagcugagcaauacugaa

SEQ ID NO: 176853 - RNA, 19 nt, Artificial Sequence
  Description of Artificial Sequence: Synthetic oligonucleotide
  Antisense strand to SEQ ID NO: 176852
uucaguauugcucagcuac

SEQ ID NO: 176854 - RNA, 19 nt, Artificial Sequence
  Description of Artificial Sequence: Synthetic oligonucleotide
  Sense strand starting at position 143 of SEQ ID NO: 2280
gcaauacugaaguguuagu

SEQ ID NO: 176855 - RNA, 19 nt, Artificial Sequence
  Description of Artificial Sequence: Synthetic oligonucleotide
  Antisense strand to SEQ ID NO: 176854
acuaacacuucaguauugc

SEQ ID NO: 176856 - RNA, 19 nt, Artificial Sequence
  Description of Artificial Sequence: Synthetic oligonucleotide
  Sense strand starting at position 194 of SEQ ID NO: 2280
ccacacugagucuguguua

SEQ ID NO: 176857 - RNA, 19 nt, Artificial Sequence
  Description of Artificial Sequence: Synthetic oligonucleotide
  Antisense strand to SEQ ID NO: 176856
uaacacagacucagugugg

SEQ ID NO: 176858 - RNA, 19 nt, Artificial Sequence
  Description of Artificial Sequence: Synthetic oligonucleotide
  Sense strand starting at position 197 of SEQ ID NO: 2280
cacugagucuguguuagga

SEQ ID NO: 176859 - RNA, 19 nt, Artificial Sequence
  Description of Artificial Sequence: Synthetic oligonucleotide
  Antisense strand to SEQ ID NO: 176858
uccuaacacagacucagug

SEQ ID NO: 176860 - RNA, 19 nt, Artificial Sequence
  Description of Artificial Sequence: Synthetic oligonucleotide
  Sense strand starting at position 205 of SEQ ID NO: 2280
cuguguuaggauuguauuc

SEQ ID NO: 176861 - RNA, 19 nt, Artificial Sequence
  Description of Artificial Sequence: Synthetic oligonucleotide
  Antisense strand to SEQ ID NO: 176860
gaauacaauccuaacacag

SEQ ID NO: 176862 - RNA, 19 nt, Artificial Sequence
  Description of Artificial Sequence: Synthetic oligonucleotide
  Sense strand starting at position 390 of SEQ ID NO: 2280
cguguuucucuugcuccua

SEQ ID NO: 176863 - RNA, 19 nt, Artificial Sequence
  Description of Artificial Sequence: Synthetic oligonucleotide
  Antisense strand to SEQ ID NO: 176862
uaggagcaagagaaacacg

SEQ ID NO: 176864 - RNA, 19 nt, Artificial Sequence
  Description of Artificial Sequence: Synthetic oligonucleotide
  Sense strand starting at position 425 of SEQ ID NO: 2280
acagacaauccguacaagu

SEQ ID NO: 176865 - RNA, 19 nt, Artificial Sequence
  Description of Artificial Sequence: Synthetic oligonucleotide
  Antisense strand to SEQ ID NO: 176864
acuuguacggauugucugu

SEQ ID NO: 176866 - RNA, 19 nt, Artificial Sequence
  Description of Artificial Sequence: Synthetic oligonucleotide
  Sense strand starting at position 427 of SEQ ID NO: 2280
agacaauccguacaaguua

SEQ ID NO: 176867 - RNA, 19 nt, Artificial Sequence
  Description of Artificial Sequence: Synthetic oligonucleotide
  Antisense strand to SEQ ID NO: 176866
uaacuuguacggauugucu

SEQ ID NO: 176868 - RNA, 19 nt, Artificial Sequence
  Description of Artificial Sequence: Synthetic oligonucleotide
  Sense strand starting at position 505 of SEQ ID NO: 2280
ccuuaucuaugguccauua

SEQ ID NO: 176869 - RNA, 19 nt, Artificial Sequence
  Description of Artificial Sequence: Synthetic oligonucleotide
  Antisense strand to SEQ ID NO: 176868
uaauggaccauagauaagg

SEQ ID NO: 176870 - RNA, 19 nt, Artificial Sequence
  Description of Artificial Sequence: Synthetic oligonucleotide
  Sense strand starting at position 619 of SEQ ID NO: 2280
ugaauccuggcaggacaaa

SEQ ID NO: 176871 - RNA, 19 nt, Artificial Sequence
  Description of Artificial Sequence: Synthetic oligonucleotide
  Antisense strand to SEQ ID NO: 176870
uuuguccugccaggauuca

SEQ ID NO: 176872 - RNA, 19 nt, Artificial Sequence
  Description of Artificial Sequence: Synthetic oligonucleotide
  Sense strand starting at position 670 of SEQ ID NO: 2280
ucuagugaauuguuaaguc

SEQ ID NO: 176873 - RNA, 19 nt, Artificial Sequence
  Description of Artificial Sequence: Synthetic oligonucleotide
  Antisense strand to SEQ ID NO: 176872
gacuuaacaauucacuaga

SEQ ID NO: 176874 - RNA, 19 nt, Artificial Sequence
  Description of Artificial Sequence: Synthetic oligonucleotide
  Sense strand starting at position 743 of SEQ ID NO: 2280
agcauauuauacucuguau

SEQ ID NO: 176875 - RNA, 19 nt, Artificial Sequence
  Description of Artificial Sequence: Synthetic oligonucleotide
  Antisense strand to SEQ ID NO: 176874
auacagaguauaauaugcu

SEQ ID NO: 176876 - RNA, 19 nt, Artificial Sequence
  Description of Artificial Sequence: Synthetic oligonucleotide
  Sense strand starting at position 749 of SEQ ID NO: 2280
uuauacucuguauguauga

SEQ ID NO: 176877 - RNA, 19 nt, Artificial Sequence
  Description of Artificial Sequence: Synthetic oligonucleotide
  Antisense strand to SEQ ID NO: 176876
ucauacauacagaguauaa

SEQ ID NO: 176878 - RNA, 19 nt, Artificial Sequence
  Description of Artificial Sequence: Synthetic oligonucleotide
  Sense strand starting at position 756 of SEQ ID NO: 2280
cuguauguaugacugcaaa

SEQ ID NO: 176879 - RNA, 19 nt, Artificial Sequence
  Description of Artificial Sequence: Synthetic oligonucleotide
  Antisense strand to SEQ ID NO: 176878
uuugcagucauacauacag

SEQ ID NO: 176880 - RNA, 19 nt, Artificial Sequence
  Description of Artificial Sequence: Synthetic oligonucleotide
  Sense strand starting at position 820 of SEQ ID NO: 2280
uuuguuucuuugucugaac

SEQ ID NO: 176881 - RNA, 19 nt, Artificial Sequence
  Description of Artificial Sequence: Synthetic oligonucleotide
  Antisense strand to SEQ ID NO: 176880
guucagacaaagaaacaaa

SEQ ID NO: 176882 - RNA, 19 nt, Artificial Sequence
  Description of Artificial Sequence: Synthetic oligonucleotide
  Sense strand starting at position 821 of SEQ ID NO: 2280
uuguuucuuugucugaaca

SEQ ID NO: 176883 - RNA, 19 nt, Artificial Sequence
  Description of Artificial Sequence: Synthetic oligonucleotide
  Antisense strand to SEQ ID NO: 176882
uguucagacaaagaaacaa

SEQ ID NO: 176884 - RNA, 19 nt, Artificial Sequence
  Description of Artificial Sequence: Synthetic oligonucleotide
  Sense strand starting at position 855 of SEQ ID NO: 2280
auaggaugccugcaagaug

SEQ ID NO: 176885 - RNA, 19 nt, Artificial Sequence
  Description of Artificial Sequence: Synthetic oligonucleotide
  Antisense strand to SEQ ID NO: 176884
caucuugcaggcauccuau

SEQ ID NO: 176886 - RNA, 19 nt, Artificial Sequence
  Description of Artificial Sequence: Synthetic oligonucleotide
  Sense strand starting at position 912 of SEQ ID NO: 2280
cgaagaaacucgcuacuga

SEQ ID NO: 176887 - RNA, 19 nt, Artificial Sequence
  Description of Artificial Sequence: Synthetic oligonucleotide
  Antisense strand to SEQ ID NO: 176886
ucaguagcgaguuucuucg

SEQ ID NO: 176888 - RNA, 19 nt, Artificial Sequence
  Description of Artificial Sequence: Synthetic oligonucleotide
  Sense strand starting at position 923 of SEQ ID NO: 2280
gcuacugaagucugcagaa

SEQ ID NO: 176889 - RNA, 19 nt, Artificial Sequence
  Description of Artificial Sequence: Synthetic oligonucleotide
  Antisense strand to SEQ ID NO: 176888
uucugcagacuucaguagc

SEQ ID NO: 176890 - RNA, 19 nt, Artificial Sequence
  Description of Artificial Sequence: Synthetic oligonucleotide
  Sense strand starting at position 973 of SEQ ID NO: 2280
gcgaucgcugaaugacaga

SEQ ID NO: 176891 - RNA, 19 nt, Artificial Sequence
  Description of Artificial Sequence: Synthetic oligonucleotide
  Antisense strand to SEQ ID NO: 176890
ucugucauucagcgaucgc

SEQ ID NO: 176892 - RNA, 19 nt, Artificial Sequence
  Description of Artificial Sequence: Synthetic oligonucleotide
  Sense strand starting at position 1132 of SEQ ID NO: 2280
guacgcuuuccugcaaucu

SEQ ID NO: 176893 - RNA, 19 nt, Artificial Sequence
  Description of Artificial Sequence: Synthetic oligonucleotide
  Antisense strand to SEQ ID NO: 176892
agauugcaggaaagcguac

SEQ ID NO: 176894 - RNA, 19 nt, Artificial Sequence
  Description of Artificial Sequence: Synthetic oligonucleotide
  Sense strand starting at position 1266 of SEQ ID NO: 2280
guuccaguaacguauguuu

SEQ ID NO: 176895 - RNA, 19 nt, Artificial Sequence
  Description of Artificial Sequence: Synthetic oligonucleotide
  Antisense strand to SEQ ID NO: 176894
aaacauacguuacuggaac

SEQ ID NO: 176896 - RNA, 19 nt, Artificial Sequence
  Description of Artificial Sequence: Synthetic oligonucleotide
  Sense strand starting at position 2552 of SEQ ID NO: 2280
cccagagcuccucagugau

SEQ ID NO: 176897 - RNA, 19 nt, Artificial Sequence
  Description of Artificial Sequence: Synthetic oligonucleotide
  Antisense strand to SEQ ID NO: 176896
aucacugaggagcucuggg

SEQ ID NO: 176898 - RNA, 19 nt, Artificial Sequence
  Description of Artificial Sequence: Synthetic oligonucleotide
  Sense strand starting at position 2579 of SEQ ID NO: 2280
cggauuguucgccuuucau

SEQ ID NO: 176899 - RNA, 19 nt, Artificial Sequence
  Description of Artificial Sequence: Synthetic oligonucleotide
  Antisense strand to SEQ ID NO: 176898
augaaaggcgaacaauccg

SEQ ID NO: 176900 - RNA, 19 nt, Artificial Sequence
  Description of Artificial Sequence: Synthetic oligonucleotide
  Sense strand starting at position 2598 of SEQ ID NO: 2280
cucauuugccguuguccaa

SEQ ID NO: 176901 - RNA, 19 nt, Artificial Sequence
  Description of Artificial Sequence: Synthetic oligonucleotide
  Antisense strand to SEQ ID NO: 176900
uuggacaacggcaaaugag

SEQ ID NO: 176902 - RNA, 19 nt, Artificial Sequence
  Description of Artificial Sequence: Synthetic oligonucleotide
  Sense strand starting at position 2637 of SEQ ID NO: 2280
uguuacuugcuguaagguu

SEQ ID NO: 176903 - RNA, 19 nt, Artificial Sequence
  Description of Artificial Sequence: Synthetic oligonucleotide
  Antisense strand to SEQ ID NO: 176902
aaccuuacagcaaguaaca

SEQ ID NO: 176904 - RNA, 19 nt, Artificial Sequence
  Description of Artificial Sequence: Synthetic oligonucleotide
  Sense strand starting at position 2954 of SEQ ID NO: 2280
caggaagcuuuguucuagu

SEQ ID NO: 176905 - RNA, 19 nt, Artificial Sequence
  Description of Artificial Sequence: Synthetic oligonucleotide
  Antisense strand to SEQ ID NO: 176904
acuagaacaaagcuuccug

SEQ ID NO: 176906 - RNA, 19 nt, Artificial Sequence
  Description of Artificial Sequence: Synthetic oligonucleotide
  Sense strand starting at position 3146 of SEQ ID NO: 2280
cagauacuguaucuggaaa

SEQ ID NO: 176907 - RNA, 19 nt, Artificial Sequence
  Description of Artificial Sequence: Synthetic oligonucleotide
  Antisense strand to SEQ ID NO: 176906
uuuccagauacaguaucug

SEQ ID NO: 176908 - RNA, 19 nt, Artificial Sequence
  Description of Artificial Sequence: Synthetic oligonucleotide
  Sense strand starting at position 3550 of SEQ ID NO: 2280
ggguuauacugaguuaagc

SEQ ID NO: 176909 - RNA, 19 nt, Artificial Sequence
  Description of Artificial Sequence: Synthetic oligonucleotide
  Antisense strand to SEQ ID NO: 176908
gcuuaacucaguauaaccc

SEQ ID NO: 176910 - RNA, 19 nt, Artificial Sequence
  Description of Artificial Sequence: Synthetic oligonucleotide
  Sense strand starting at position 3617 of SEQ ID NO: 2280
cuugguagauauucuucua

SEQ ID NO: 176911 - RNA, 19 nt, Artificial Sequence
  Description of Artificial Sequence: Synthetic oligonucleotide
  Antisense strand to SEQ ID NO: 176910
uagaagaauaucuaccaag

SEQ ID NO: 176912 - RNA, 19 nt, Artificial Sequence
  Description of Artificial Sequence: Synthetic oligonucleotide
  Sense strand starting at position 3620 of SEQ ID NO: 2280
gguagauauucuucuaagu

SEQ ID NO: 176913 - RNA, 19 nt, Artificial Sequence
  Description of Artificial Sequence: Synthetic oligonucleotide
  Antisense strand to SEQ ID NO: 176912
acuuagaagaauaucuacc

SEQ ID NO: 176914 - RNA, 19 nt, Artificial Sequence
  Description of Artificial Sequence: Synthetic oligonucleotide
  Sense strand starting at position 3672 of SEQ ID NO: 2280
agacaaguguaguuauugu

SEQ ID NO: 176915 - RNA, 19 nt, Artificial Sequence
  Description of Artificial Sequence: Synthetic oligonucleotide
  Antisense strand to SEQ ID NO: 176914
acaauaacuacacuugucu

SEQ ID NO: 176916 - RNA, 19 nt, Artificial Sequence
  Description of Artificial Sequence: Synthetic oligonucleotide
  Sense strand starting at position 3743 of SEQ ID NO: 2280
uaaauaugguggucaaggu

SEQ ID NO: 176917 - RNA, 19 nt, Artificial Sequence
  Description of Artificial Sequence: Synthetic oligonucleotide
  Antisense strand to SEQ ID NO: 176916
accuugaccaccauauuua

SEQ ID NO: 176918 - RNA, 19 nt, Artificial Sequence
  Description of Artificial Sequence: Synthetic oligonucleotide
  Sense strand starting at position 3744 of SEQ ID NO: 2280
aaauaugguggucaaggua

SEQ ID NO: 176919 - RNA, 19 nt, Artificial Sequence
  Description of Artificial Sequence: Synthetic oligonucleotide
  Antisense strand to SEQ ID NO: 176918
uaccuugaccaccauauuu

SEQ ID NO: 176920 - RNA, 19 nt, Artificial Sequence
  Description of Artificial Sequence: Synthetic oligonucleotide
  Sense strand starting at position 3812 of SEQ ID NO: 2280
gugugaacuccacaaauau

SEQ ID NO: 176921 - RNA, 19 nt, Artificial Sequence
  Description of Artificial Sequence: Synthetic oligonucleotide
  Antisense strand to SEQ ID NO: 176920
auauuuguggaguucacac

SEQ ID NO: 176922 - RNA, 19 nt, Artificial Sequence
  Description of Artificial Sequence: Synthetic oligonucleotide
  Sense strand starting at position 3862 of SEQ ID NO: 2280
aacgcuaaggccugauaug

SEQ ID NO: 176923 - RNA, 19 nt, Artificial Sequence
  Description of Artificial Sequence: Synthetic oligonucleotide
  Antisense strand to SEQ ID NO: 176922
cauaucaggccuuagcguu

SEQ ID NO: 176924 - RNA, 19 nt, Artificial Sequence
  Description of Artificial Sequence: Synthetic oligonucleotide
  Sense strand starting at position 3983 of SEQ ID NO: 2282
gcacccagcuuucugcaaa

SEQ ID NO: 176925 - RNA, 19 nt, Artificial Sequence
  Description of Artificial Sequence: Synthetic oligonucleotide
  Antisense strand to SEQ ID NO: 176924
uuugcagaaagcugggugc

SEQ ID NO: 176926 - RNA, 19 nt, Artificial Sequence
  Description of Artificial Sequence: Synthetic oligonucleotide
  Sense strand starting at position 3680 of SEQ ID NO: 2282
gguguccucuccugccaaa

SEQ ID NO: 176927 - RNA, 19 nt, Artificial Sequence
  Description of Artificial Sequence: Synthetic oligonucleotide
  Antisense strand to SEQ ID NO: 176926
uuuggcaggagaggacacc

SEQ ID NO: 176928 - RNA, 19 nt, Artificial Sequence
  Description of Artificial Sequence: Synthetic oligonucleotide
  Sense strand starting at position 3286 of SEQ ID NO: 2282
cgucucuuccuguggcaga

SEQ ID NO: 176929 - RNA, 19 nt, Artificial Sequence
  Description of Artificial Sequence: Synthetic oligonucleotide
  Antisense strand to SEQ ID NO: 176928
ucugccacaggaagagacg

SEQ ID NO: 176930 - RNA, 19 nt, Artificial Sequence
  Description of Artificial Sequence: Synthetic oligonucleotide
  Sense strand starting at position 2919 of SEQ ID NO: 2282
gagaaauccaugcggagac

SEQ ID NO: 176931 - RNA, 19 nt, Artificial Sequence
  Description of Artificial Sequence: Synthetic oligonucleotide
  Antisense strand to SEQ ID NO: 176930
gucuccgcauggauuucuc

SEQ ID NO: 176932 - RNA, 19 nt, Artificial Sequence
  Description of Artificial Sequence: Synthetic oligonucleotide
  Sense strand starting at position 2917 of SEQ ID NO: 2282
cugagaaauccaugcggag

SEQ ID NO: 176933 - RNA, 19 nt, Artificial Sequence
  Description of Artificial Sequence: Synthetic oligonucleotide
  Antisense strand to SEQ ID NO: 176932
cuccgcauggauuucucag

SEQ ID NO: 176934 - RNA, 19 nt, Artificial Sequence
  Description of Artificial Sequence: Synthetic oligonucleotide
  Sense strand starting at position 2814 of SEQ ID NO: 2282
ggcaucuaugcucagacaa

SEQ ID NO: 176935 - RNA, 19 nt, Artificial Sequence
  Description of Artificial Sequence: Synthetic oligonucleotide
  Antisense strand to SEQ ID NO: 176934
uugucugagcauagaugcc

SEQ ID NO: 176936 - RNA, 19 nt, Artificial Sequence
  Description of Artificial Sequence: Synthetic oligonucleotide
  Sense strand starting at position 2813 of SEQ ID NO: 2282
gggcaucuaugcucagaca

SEQ ID NO: 176937 - RNA, 19 nt, Artificial Sequence
  Description of Artificial Sequence: Synthetic oligonucleotide
  Antisense strand to SEQ ID NO: 176936
ugucugagcauagaugccc

SEQ ID NO: 176938 - RNA, 19 nt, Artificial Sequence
  Description of Artificial Sequence: Synthetic oligonucleotide
  Sense strand starting at position 2766 of SEQ ID NO: 2282
caaaguugacccuggcaga

SEQ ID NO: 176939 - RNA, 19 nt, Artificial Sequence
  Description of Artificial Sequence: Synthetic oligonucleotide
  Antisense strand to SEQ ID NO: 176938
ucugccagggucaacuuug

SEQ ID NO: 176940 - RNA, 19 nt, Artificial Sequence
  Description of Artificial Sequence: Synthetic oligonucleotide
  Sense strand starting at position 2587 of SEQ ID NO: 2282
agccacuguugccaaagaa

SEQ ID NO: 176941 - RNA, 19 nt, Artificial Sequence
  Description of Artificial Sequence: Synthetic oligonucleotide
  Antisense strand to SEQ ID NO: 176940
uucuuuggcaacaguggcu

SEQ ID NO: 176942 - RNA, 19 nt, Artificial Sequence
  Description of Artificial Sequence: Synthetic oligonucleotide
  Sense strand starting at position 2268 of SEQ ID NO: 2282
uggagaucaugguaggcaa

SEQ ID NO: 176943 - RNA, 19 nt, Artificial Sequence
  Description of Artificial Sequence: Synthetic oligonucleotide
  Antisense strand to SEQ ID NO: 176942
uugccuaccaugaucucca

SEQ ID NO: 176944 - RNA, 19 nt, Artificial Sequence
  Description of Artificial Sequence: Synthetic oligonucleotide
  Sense strand starting at position 2027 of SEQ ID NO: 2282
uuuauuccucaugaguauu

SEQ ID NO: 176945 - RNA, 19 nt, Artificial Sequence
  Description of Artificial Sequence: Synthetic oligonucleotide
  Antisense strand to SEQ ID NO: 176944
aauacucaugaggaauaaa

SEQ ID NO: 176946 - RNA, 19 nt, Artificial Sequence
  Description of Artificial Sequence: Synthetic oligonucleotide
  Sense strand starting at position 2026 of SEQ ID NO: 2282
cuuuauuccucaugaguau

SEQ ID NO: 176947 - RNA, 19 nt, Artificial Sequence
  Description of Artificial Sequence: Synthetic oligonucleotide
  Antisense strand to SEQ ID NO: 176946
auacucaugaggaauaaag

SEQ ID NO: 176948 - RNA, 19 nt, Artificial Sequence
  Description of Artificial Sequence: Synthetic oligonucleotide
  Sense strand starting at position 2024 of SEQ ID NO: 2282
cccuuuauuccucaugagu

SEQ ID NO: 176949 - RNA, 19 nt, Artificial Sequence
  Description of Artificial Sequence: Synthetic oligonucleotide
  Antisense strand to SEQ ID NO: 176948
acucaugaggaauaaaggg

SEQ ID NO: 176950 - RNA, 19 nt, Artificial Sequence
  Description of Artificial Sequence: Synthetic oligonucleotide
  Sense strand starting at position 1705 of SEQ ID NO: 2282
cuaugaauggcgcgucaca

SEQ ID NO: 176951 - RNA, 19 nt, Artificial Sequence
  Description of Artificial Sequence: Synthetic oligonucleotide
  Antisense strand to SEQ ID NO: 176950
ugugacgcgccauucauag

SEQ ID NO: 176952 - RNA, 19 nt, Artificial Sequence
  Description of Artificial Sequence: Synthetic oligonucleotide
  Sense strand starting at position 1316 of SEQ ID NO: 2282
agaugacuucuagggugca

SEQ ID NO: 176953 - RNA, 19 nt, Artificial Sequence
  Description of Artificial Sequence: Synthetic oligonucleotide
  Antisense strand to SEQ ID NO: 176952
ugcacccuagaagucaucu

SEQ ID NO: 176954 - RNA, 19 nt, Artificial Sequence
  Description of Artificial Sequence: Synthetic oligonucleotide
  Sense strand starting at position 1262 of SEQ ID NO: 2282
gagcaaauucccugaugag

SEQ ID NO: 176955 - RNA, 19 nt, Artificial Sequence
  Description of Artificial Sequence: Synthetic oligonucleotide
  Antisense strand to SEQ ID NO: 176954
cucaucagggaauuugcuc

SEQ ID NO: 176956 - RNA, 19 nt, Artificial Sequence
  Description of Artificial Sequence: Synthetic oligonucleotide
  Sense strand starting at position 1261 of SEQ ID NO: 2282
ugagcaaauucccugauga

SEQ ID NO: 176957 - RNA, 19 nt, Artificial Sequence
  Description of Artificial Sequence: Synthetic oligonucleotide
  Antisense strand to SEQ ID NO: 176956
ucaucagggaauuugcuca

SEQ ID NO: 176958 - RNA, 19 nt, Artificial Sequence
  Description of Artificial Sequence: Synthetic oligonucleotide
  Sense strand starting at position 1252 of SEQ ID NO: 2282
gcugucaaaugagcaaauu

SEQ ID NO: 176959 - RNA, 19 nt, Artificial Sequence
  Description of Artificial Sequence: Synthetic oligonucleotide
  Antisense strand to SEQ ID NO: 176958
aauuugcucauuugacagc

SEQ ID NO: 176960 - RNA, 19 nt, Artificial Sequence
  Description of Artificial Sequence: Synthetic oligonucleotide
  Sense strand starting at position 1245 of SEQ ID NO: 2282
ugccacugcugucaaauga

SEQ ID NO: 176961 - RNA, 19 nt, Artificial Sequence
  Description of Artificial Sequence: Synthetic oligonucleotide
  Antisense strand to SEQ ID NO: 176960
ucauuugacagcaguggca

SEQ ID NO: 176962 - RNA, 19 nt, Artificial Sequence
  Description of Artificial Sequence: Synthetic oligonucleotide
  Sense strand starting at position 1242 of SEQ ID NO: 2282
gucugccacugcugucaaa

SEQ ID NO: 176963 - RNA, 19 nt, Artificial Sequence
  Description of Artificial Sequence: Synthetic oligonucleotide
  Antisense strand to SEQ ID NO: 176962
uuugacagcaguggcagac

SEQ ID NO: 176964 - RNA, 19 nt, Artificial Sequence
  Description of Artificial Sequence: Synthetic oligonucleotide
  Sense strand starting at position 892 of SEQ ID NO: 2282
cugaguuucccguguggca

SEQ ID NO: 176965 - RNA, 19 nt, Artificial Sequence
  Description of Artificial Sequence: Synthetic oligonucleotide
  Antisense strand to SEQ ID NO: 176964
ugccacacgggaaacucag

SEQ ID NO: 176966 - RNA, 19 nt, Artificial Sequence
  Description of Artificial Sequence: Synthetic oligonucleotide
  Sense strand starting at position 646 of SEQ ID NO: 2282
cugcguauugcaugcacau

SEQ ID NO: 176967 - RNA, 19 nt, Artificial Sequence
  Description of Artificial Sequence: Synthetic oligonucleotide
  Antisense strand to SEQ ID NO: 176966
augugcaugcaauacgcag

SEQ ID NO: 176968 - RNA, 19 nt, Artificial Sequence
  Description of Artificial Sequence: Synthetic oligonucleotide
  Sense strand starting at position 453 of SEQ ID NO: 2282
ccauguauccaucgcaaca

SEQ ID NO: 176969 - RNA, 19 nt, Artificial Sequence
  Description of Artificial Sequence: Synthetic oligonucleotide
  Antisense strand to SEQ ID NO: 176968
uguugcgauggauacaugg

SEQ ID NO: 176970 - RNA, 19 nt, Artificial Sequence
  Description of Artificial Sequence: Synthetic oligonucleotide
  Sense strand starting at position 215 of SEQ ID NO: 2282
gccugauguagccguucca

SEQ ID NO: 176971 - RNA, 19 nt, Artificial Sequence
  Description of Artificial Sequence: Synthetic oligonucleotide
  Antisense strand to SEQ ID NO: 176970
uggaacggcuacaucaggc

SEQ ID NO: 176972 - RNA, 19 nt, Artificial Sequence
  Description of Artificial Sequence: Synthetic oligonucleotide
  Sense strand starting at position 154 of SEQ ID NO: 2282
ggauacauguaucaaugca

SEQ ID NO: 176973 - RNA, 19 nt, Artificial Sequence
  Description of Artificial Sequence: Synthetic oligonucleotide
  Antisense strand to SEQ ID NO: 176972
ugcauugauacauguaucc

SEQ ID NO: 176974 - RNA, 19 nt, Artificial Sequence
  Description of Artificial Sequence: Synthetic oligonucleotide
  Sense strand starting at position 142 of SEQ ID NO: 2282
caacguguugguggauaca

SEQ ID NO: 176975 - RNA, 19 nt, Artificial Sequence
  Description of Artificial Sequence: Synthetic oligonucleotide
  Antisense strand to SEQ ID NO: 176974
uguauccaccaacacguug

SEQ ID NO: 176976 - RNA, 19 nt, Artificial Sequence
  Description of Artificial Sequence: Synthetic oligonucleotide
  Sense strand starting at position 127 of SEQ ID NO: 2282
gugcguuucuaauagcaac

SEQ ID NO: 176977 - RNA, 19 nt, Artificial Sequence
  Description of Artificial Sequence: Synthetic oligonucleotide
  Antisense strand to SEQ ID NO: 176976
guugcuauuagaaacgcac

SEQ ID NO: 176978 - RNA, 19 nt, Artificial Sequence
  Description of Artificial Sequence: Synthetic oligonucleotide
  Sense strand starting at position 123 of SEQ ID NO: 2282
ugcugugcguuucuaauag

SEQ ID NO: 176979 - RNA, 19 nt, Artificial Sequence
  Description of Artificial Sequence: Synthetic oligonucleotide
  Antisense strand to SEQ ID NO: 176978
cuauuagaaacgcacagca

SEQ ID NO: 176980 - RNA, 19 nt, Artificial Sequence
  Description of Artificial Sequence: Synthetic oligonucleotide
  Sense strand starting at position 121 of SEQ ID NO: 2282
ccugcugugcguuucuaau

SEQ ID NO: 176981 - RNA, 19 nt, Artificial Sequence
  Description of Artificial Sequence: Synthetic oligonucleotide
  Antisense strand to SEQ ID NO: 176980
auuagaaacgcacagcagg

SEQ ID NO: 176982 - RNA, 19 nt, Artificial Sequence
  Description of Artificial Sequence: Synthetic oligonucleotide
  Sense strand starting at position 120 of SEQ ID NO: 2282
gccugcugugcguuucuaa

SEQ ID NO: 176983 - RNA, 19 nt, Artificial Sequence
  Description of Artificial Sequence: Synthetic oligonucleotide
  Antisense strand to SEQ ID NO: 176982
uuagaaacgcacagcaggc

SEQ ID NO: 176984 - RNA, 19 nt, Artificial Sequence
  Description of Artificial Sequence: Synthetic oligonucleotide
  Sense strand starting at position 3874 of SEQ ID NO: 2281
ccuugaucucaguggcacu

SEQ ID NO: 176985 - RNA, 19 nt, Artificial Sequence
  Description of Artificial Sequence: Synthetic oligonucleotide
  Antisense strand to SEQ ID NO: 176984
agugccacugagaucaagg

SEQ ID NO: 176986 - RNA, 19 nt, Artificial Sequence
  Description of Artificial Sequence: Synthetic oligonucleotide
  Sense strand starting at position 3859 of SEQ ID NO: 2281
gcaaauucguucucuccuu

SEQ ID NO: 176987 - RNA, 19 nt, Artificial Sequence
  Description of Artificial Sequence: Synthetic oligonucleotide
  Antisense strand to SEQ ID NO: 176986
aaggagagaacgaauuugc

SEQ ID NO: 176988 - RNA, 19 nt, Artificial Sequence
  Description of Artificial Sequence: Synthetic oligonucleotide
  Sense strand starting at position 3635 of SEQ ID NO: 2281
ggccgcugucuagggaaga

SEQ ID NO: 176989 - RNA, 19 nt, Artificial Sequence
  Description of Artificial Sequence: Synthetic oligonucleotide
  Antisense strand to SEQ ID NO: 176988
ucuucccuagacagcggcc

SEQ ID NO: 176990 - RNA, 19 nt, Artificial Sequence
  Description of Artificial Sequence: Synthetic oligonucleotide
  Sense strand starting at position 3341 of SEQ ID NO: 2281
agacgaaucccaugcagag

SEQ ID NO: 176991 - RNA, 19 nt, Artificial Sequence
  Description of Artificial Sequence: Synthetic oligonucleotide
  Antisense strand to SEQ ID NO: 176990
cucugcaugggauucgucu

SEQ ID NO: 176992 - RNA, 19 nt, Artificial Sequence
  Description of Artificial Sequence: Synthetic oligonucleotide
  Sense strand starting at position 3178 of SEQ ID NO: 2281
gaaagucgcgucagugaag

SEQ ID NO: 176993 - RNA, 19 nt, Artificial Sequence
  Description of Artificial Sequence: Synthetic oligonucleotide
  Antisense strand to SEQ ID NO: 176992
cuucacugacgcgacuuuc

SEQ ID NO: 176994 - RNA, 19 nt, Artificial Sequence
  Description of Artificial Sequence: Synthetic oligonucleotide
  Sense strand starting at position 3177 of SEQ ID NO: 2281
ggaaagucgcgucagugaa

SEQ ID NO: 176995 - RNA, 19 nt, Artificial Sequence
  Description of Artificial Sequence: Synthetic oligonucleotide
  Antisense strand to SEQ ID NO: 176994
uucacugacgcgacuuucc

SEQ ID NO: 176996 - RNA, 19 nt, Artificial Sequence
  Description of Artificial Sequence: Synthetic oligonucleotide
  Sense strand starting at position 3174 of SEQ ID NO: 2281
cuuggaaagucgcgucagu

SEQ ID NO: 176997 - RNA, 19 nt, Artificial Sequence
  Description of Artificial Sequence: Synthetic oligonucleotide
  Antisense strand to SEQ ID NO: 176996
acugacgcgacuuuccaag

SEQ ID NO: 176998 - RNA, 19 nt, Artificial Sequence
  Description of Artificial Sequence: Synthetic oligonucleotide
  Sense strand starting at position 3098 of SEQ ID NO: 2281
ugcuuauggucugaugcuu

SEQ ID NO: 176999 - RNA, 19 nt, Artificial Sequence
  Description of Artificial Sequence: Synthetic oligonucleotide
  Antisense strand to SEQ ID NO: 176998
aagcaucagaccauaagca

SEQ ID NO: 177000 - RNA, 19 nt, Artificial Sequence
  Description of Artificial Sequence: Synthetic oligonucleotide
  Sense strand starting at position 2859 of SEQ ID NO: 2281
ucccguucgguguuuggaa

SEQ ID NO: 177001 - RNA, 19 nt, Artificial Sequence
  Description of Artificial Sequence: Synthetic oligonucleotide
  Antisense strand to SEQ ID NO: 177000
uuccaaacaccgaacggga

SEQ ID NO: 177002 - RNA, 19 nt, Artificial Sequence
  Description of Artificial Sequence: Synthetic oligonucleotide
  Sense strand starting at position 1652 of SEQ ID NO: 2281
ggcugucuuuggcgccaaa

SEQ ID NO: 177003 - RNA, 19 nt, Artificial Sequence
  Description of Artificial Sequence: Synthetic oligonucleotide
  Antisense strand to SEQ ID NO: 177002
uuuggcgccaaagacagcc

SEQ ID NO: 177004 - RNA, 19 nt, Artificial Sequence
  Description of Artificial Sequence: Synthetic oligonucleotide
  Sense strand starting at position 1364 of SEQ ID NO: 2281
aucgaaaccgcuuaguaac

SEQ ID NO: 177005 - RNA, 19 nt, Artificial Sequence
  Description of Artificial Sequence: Synthetic oligonucleotide
  Antisense strand to SEQ ID NO: 177004
guuacuaagcgguuucgau

SEQ ID NO: 177006 - RNA, 19 nt, Artificial Sequence
  Description of Artificial Sequence: Synthetic oligonucleotide
  Sense strand starting at position 1343 of SEQ ID NO: 2281
ggagcugucccucgggaaa

SEQ ID NO: 177007 - RNA, 19 nt, Artificial Sequence
  Description of Artificial Sequence: Synthetic oligonucleotide
  Antisense strand to SEQ ID NO: 177006
uuucccgagggacagcucc

SEQ ID NO: 177008 - RNA, 19 nt, Artificial Sequence
  Description of Artificial Sequence: Synthetic oligonucleotide
  Sense strand starting at position 1087 of SEQ ID NO: 2281
agcagacgugugcauacua

SEQ ID NO: 177009 - RNA, 19 nt, Artificial Sequence
  Description of Artificial Sequence: Synthetic oligonucleotide
  Antisense strand to SEQ ID NO: 177008
uaguaugcacacgucugcu

SEQ ID NO: 177010 - RNA, 19 nt, Artificial Sequence
  Description of Artificial Sequence: Synthetic oligonucleotide
  Sense strand starting at position 1053 of SEQ ID NO: 2281
gguugaagaucgucuaucu

SEQ ID NO: 177011 - RNA, 19 nt, Artificial Sequence
  Description of Artificial Sequence: Synthetic oligonucleotide
  Antisense strand to SEQ ID NO: 177010
agauagacgaucuucaacc

SEQ ID NO: 177012 - RNA, 19 nt, Artificial Sequence
  Description of Artificial Sequence: Synthetic oligonucleotide
  Sense strand starting at position 1044 of SEQ ID NO: 2281
acccuugcugguugaagau

SEQ ID NO: 177013 - RNA, 19 nt, Artificial Sequence
  Description of Artificial Sequence: Synthetic oligonucleotide
  Antisense strand to SEQ ID NO: 177012
aucuucaaccagcaagggu

SEQ ID NO: 177014 - RNA, 19 nt, Artificial Sequence
  Description of Artificial Sequence: Synthetic oligonucleotide
  Sense strand starting at position 1043 of SEQ ID NO: 2281
cacccuugcugguugaaga

SEQ ID NO: 177015 - RNA, 19 nt, Artificial Sequence
  Description of Artificial Sequence: Synthetic oligonucleotide
  Antisense strand to SEQ ID NO: 177014
ucuucaaccagcaagggug

SEQ ID NO: 177016 - RNA, 19 nt, Artificial Sequence
  Description of Artificial Sequence: Synthetic oligonucleotide
  Sense strand starting at position 1003 of SEQ ID NO: 2281
gaccucuggucagaaguuu

SEQ ID NO: 177017 - RNA, 19 nt, Artificial Sequence
  Description of Artificial Sequence: Synthetic oligonucleotide
  Antisense strand to SEQ ID NO: 177016
aaacuucugaccagagguc

SEQ ID NO: 177018 - RNA, 19 nt, Artificial Sequence
  Description of Artificial Sequence: Synthetic oligonucleotide
  Sense strand starting at position 1001 of SEQ ID NO: 2281
augaccucuggucagaagu

SEQ ID NO: 177019 - RNA, 19 nt, Artificial Sequence
  Description of Artificial Sequence: Synthetic oligonucleotide
  Antisense strand to SEQ ID NO: 177018
acuucugaccagaggucau

SEQ ID NO: 177020 - RNA, 19 nt, Artificial Sequence
  Description of Artificial Sequence: Synthetic oligonucleotide
  Sense strand starting at position 982 of SEQ ID NO: 2281
gcagcaucuuuggaagcaa

SEQ ID NO: 177021 - RNA, 19 nt, Artificial Sequence
  Description of Artificial Sequence: Synthetic oligonucleotide
  Antisense strand to SEQ ID NO: 177020
uugcuuccaaagaugcugc

SEQ ID NO: 177022 - RNA, 19 nt, Artificial Sequence
  Description of Artificial Sequence: Synthetic oligonucleotide
  Sense strand starting at position 956 of SEQ ID NO: 2281
auguccagacagugaauaa

SEQ ID NO: 177023 - RNA, 19 nt, Artificial Sequence
  Description of Artificial Sequence: Synthetic oligonucleotide
  Antisense strand to SEQ ID NO: 177022
uuauucacugucuggacau

SEQ ID NO: 177024 - RNA, 19 nt, Artificial Sequence
  Description of Artificial Sequence: Synthetic oligonucleotide
  Sense strand starting at position 941 of SEQ ID NO: 2281
cugagccauuuccaaaugu

SEQ ID NO: 177025 - RNA, 19 nt, Artificial Sequence
  Description of Artificial Sequence: Synthetic oligonucleotide
  Antisense strand to SEQ ID NO: 177024
acauuuggaaauggcucag

SEQ ID NO: 177026 - RNA, 19 nt, Artificial Sequence
  Description of Artificial Sequence: Synthetic oligonucleotide
  Sense strand starting at position 931 of SEQ ID NO: 2281
guuaaugagccugagccau

SEQ ID NO: 177027 - RNA, 19 nt, Artificial Sequence
  Description of Artificial Sequence: Synthetic oligonucleotide
  Antisense strand to SEQ ID NO: 177026
auggcucaggcucauuaac

SEQ ID NO: 177028 - RNA, 19 nt, Artificial Sequence
  Description of Artificial Sequence: Synthetic oligonucleotide
  Sense strand starting at position 930 of SEQ ID NO: 2281
uguuaaugagccugagcca

SEQ ID NO: 177029 - RNA, 19 nt, Artificial Sequence
  Description of Artificial Sequence: Synthetic oligonucleotide
  Antisense strand to SEQ ID NO: 177028
uggcucaggcucauuaaca

SEQ ID NO: 177030 - RNA, 19 nt, Artificial Sequence
  Description of Artificial Sequence: Synthetic oligonucleotide
  Sense strand starting at position 921 of SEQ ID NO: 2281
aaagcauuguguuaaugag

SEQ ID NO: 177031 - RNA, 19 nt, Artificial Sequence
  Description of Artificial Sequence: Synthetic oligonucleotide
  Antisense strand to SEQ ID NO: 177030
cucauuaacacaaugcuuu

SEQ ID NO: 177032 - RNA, 19 nt, Artificial Sequence
  Description of Artificial Sequence: Synthetic oligonucleotide
  Sense strand starting at position 918 of SEQ ID NO: 2281
accaaagcauuguguuaau

SEQ ID NO: 177033 - RNA, 19 nt, Artificial Sequence
  Description of Artificial Sequence: Synthetic oligonucleotide
  Antisense strand to SEQ ID NO: 177032
auuaacacaaugcuuuggu

SEQ ID NO: 177034 - RNA, 19 nt, Artificial Sequence
  Description of Artificial Sequence: Synthetic oligonucleotide
  Sense strand starting at position 805 of SEQ ID NO: 2281
guggcucagcgcucaguaa

SEQ ID NO: 177035 - RNA, 19 nt, Artificial Sequence
  Description of Artificial Sequence: Synthetic oligonucleotide
  Antisense strand to SEQ ID NO: 177034
uuacugagcgcugagccac

SEQ ID NO: 177036 - RNA, 19 nt, Artificial Sequence
  Description of Artificial Sequence: Synthetic oligonucleotide
  Sense strand starting at position 751 of SEQ ID NO: 2281
uccuguucuuaaugaaaug

SEQ ID NO: 177037 - RNA, 19 nt, Artificial Sequence
  Description of Artificial Sequence: Synthetic oligonucleotide
  Antisense strand to SEQ ID NO: 177036
cauuucauuaagaacagga

SEQ ID NO: 177038 - RNA, 19 nt, Artificial Sequence
  Description of Artificial Sequence: Synthetic oligonucleotide
  Sense strand starting at position 748 of SEQ ID NO: 2281
guguccuguucuuaaugaa

SEQ ID NO: 177039 - RNA, 19 nt, Artificial Sequence
  Description of Artificial Sequence: Synthetic oligonucleotide
  Antisense strand to SEQ ID NO: 177038
uucauuaagaacaggacac

SEQ ID NO: 177040 - RNA, 19 nt, Artificial Sequence
  Description of Artificial Sequence: Synthetic oligonucleotide
  Sense strand starting at position 747 of SEQ ID NO: 2281
cguguccuguucuuaauga

SEQ ID NO: 177041 - RNA, 19 nt, Artificial Sequence
  Description of Artificial Sequence: Synthetic oligonucleotide
  Antisense strand to SEQ ID NO: 177040
ucauuaagaacaggacacg

SEQ ID NO: 177042 - RNA, 19 nt, Artificial Sequence
  Description of Artificial Sequence: Synthetic oligonucleotide
  Sense strand starting at position 314 of SEQ ID NO: 2281
gcuaccucugauugacaau

SEQ ID NO: 177043 - RNA, 19 nt, Artificial Sequence
  Description of Artificial Sequence: Synthetic oligonucleotide
  Antisense strand to SEQ ID NO: 177042
auugucaaucagagguagc

SEQ ID NO: 177044 - RNA, 19 nt, Artificial Sequence
  Description of Artificial Sequence: Synthetic oligonucleotide
  Sense strand starting at position 313 of SEQ ID NO: 2281
ggcuaccucugauugacaa

SEQ ID NO: 177045 - RNA, 19 nt, Artificial Sequence
  Description of Artificial Sequence: Synthetic oligonucleotide
  Antisense strand to SEQ ID NO: 177044
uugucaaucagagguagcc

SEQ ID NO: 177046 - RNA, 19 nt, Artificial Sequence
  Description of Artificial Sequence: Synthetic oligonucleotide
  Sense strand starting at position 310 of SEQ ID NO: 2281
ccaggcuaccucugauuga

SEQ ID NO: 177047 - RNA, 19 nt, Artificial Sequence
  Description of Artificial Sequence: Synthetic oligonucleotide
  Antisense strand to SEQ ID NO: 177046
ucaaucagagguagccugg

SEQ ID NO: 177048 - RNA, 19 nt, Artificial Sequence
  Description of Artificial Sequence: Synthetic oligonucleotide
  Sense strand starting at position 201 of SEQ ID NO: 2281
cgcuguagcuuucacgaga

SEQ ID NO: 177049 - RNA, 19 nt, Artificial Sequence
  Description of Artificial Sequence: Synthetic oligonucleotide
  Antisense strand to SEQ ID NO: 177048
ucucgugaaagcuacagcg

SEQ ID NO: 177050 - RNA, 19 nt, Artificial Sequence
  Description of Artificial Sequence: Synthetic oligonucleotide
  Sense strand starting at position 165 of SEQ ID NO: 2281
gcgacuggccuucgggauu

SEQ ID NO: 177051 - RNA, 19 nt, Artificial Sequence
  Description of Artificial Sequence: Synthetic oligonucleotide
  Antisense strand to SEQ ID NO: 177050
aaucccgaaggccagucgc

SEQ ID NO: 177052 - RNA, 19 nt, Artificial Sequence
  Description of Artificial Sequence: Synthetic oligonucleotide
  Sense strand starting at position 66 of SEQ ID NO: 2281
agugacuugcuggaguaaa

SEQ ID NO: 177053 - RNA, 19 nt, Artificial Sequence
  Description of Artificial Sequence: Synthetic oligonucleotide
  Antisense strand to SEQ ID NO: 177052
uuuacuccagcaagucacu

SEQ ID NO: 177054 - RNA, 19 nt, Artificial Sequence
  Description of Artificial Sequence: Synthetic oligonucleotide
  Sense strand starting at position 65 of SEQ ID NO: 2281
aagugacuugcuggaguaa

SEQ ID NO: 177055 - RNA, 19 nt, Artificial Sequence
  Description of Artificial Sequence: Synthetic oligonucleotide
  Antisense strand to SEQ ID NO: 177054
uuacuccagcaagucacuu

SEQ ID NO: 177056 - RNA, 19 nt, Artificial Sequence
  Description of Artificial Sequence: Synthetic oligonucleotide
  Sense strand starting at position 63 of SEQ ID NO: 2281
uuaagugacuugcuggagu

SEQ ID NO: 177057 - RNA, 19 nt, Artificial Sequence
  Description of Artificial Sequence: Synthetic oligonucleotide
  Antisense strand to SEQ ID NO: 177056
acuccagcaagucacuuaa

SEQ ID NO: 177058 - RNA, 19 nt, Artificial Sequence
  Description of Artificial Sequence: Synthetic oligonucleotide
  Sense strand starting at position 52 of SEQ ID NO: 2281
gcuccaagugguuaaguga

SEQ ID NO: 177059 - RNA, 19 nt, Artificial Sequence
  Description of Artificial Sequence: Synthetic oligonucleotide
  Antisense strand to SEQ ID NO: 177058
ucacuuaaccacuuggagc

SEQ ID NO: 177060 - RNA, 19 nt, Artificial Sequence
  Description of Artificial Sequence: Synthetic oligonucleotide
  Sense strand starting at position 48 of SEQ ID NO: 2281
ugaggcuccaagugguuaa

SEQ ID NO: 177061 - RNA, 19 nt, Artificial Sequence
  Description of Artificial Sequence: Synthetic oligonucleotide
  Antisense strand to SEQ ID NO: 177060
uuaaccacuuggagccuca

SEQ ID NO: 177062 - RNA, 19 nt, Artificial Sequence
  Description of Artificial Sequence: Synthetic oligonucleotide
  Sense strand starting at position 27 of SEQ ID NO: 2281
cgacucugcagauggguaa

SEQ ID NO: 177063 - RNA, 19 nt, Artificial Sequence
  Description of Artificial Sequence: Synthetic oligonucleotide
  Antisense strand to SEQ ID NO: 177062
uuacccaucugcagagucg

SEQ ID NO: 177064 - RNA, 19 nt, Artificial Sequence
  Description of Artificial Sequence: Synthetic oligonucleotide
  Sense strand starting at position 3779 of SEQ ID NO: 2283
ucagcaucuuucuggaauc

SEQ ID NO: 177065 - RNA, 19 nt, Artificial Sequence
  Description of Artificial Sequence: Synthetic oligonucleotide
  Antisense strand to SEQ ID NO: 177064
gauuccagaaagaugcuga

SEQ ID NO: 177066 - RNA, 19 nt, Artificial Sequence
  Description of Artificial Sequence: Synthetic oligonucleotide
  Sense strand starting at position 3778 of SEQ ID NO: 2283
cucagcaucuuucuggaau

SEQ ID NO: 177067 - RNA, 19 nt, Artificial Sequence
  Description of Artificial Sequence: Synthetic oligonucleotide
  Antisense strand to SEQ ID NO: 177066
auuccagaaagaugcugag

SEQ ID NO: 177068 - RNA, 19 nt, Artificial Sequence
  Description of Artificial Sequence: Synthetic oligonucleotide
  Sense strand starting at position 3503 of SEQ ID NO: 2283
uggugucucggaugucgua

SEQ ID NO: 177069 - RNA, 19 nt, Artificial Sequence
  Description of Artificial Sequence: Synthetic oligonucleotide
  Antisense strand to SEQ ID NO: 177068
uacgacauccgagacacca

SEQ ID NO: 177070 - RNA, 19 nt, Artificial Sequence
  Description of Artificial Sequence: Synthetic oligonucleotide
  Sense strand starting at position 3340 of SEQ ID NO: 2283
ucagcaaucccaugagcca

SEQ ID NO: 177071 - RNA, 19 nt, Artificial Sequence
  Description of Artificial Sequence: Synthetic oligonucleotide
  Antisense strand to SEQ ID NO: 177070
uggcucaugggauugcuga

SEQ ID NO: 177072 - RNA, 19 nt, Artificial Sequence
  Description of Artificial Sequence: Synthetic oligonucleotide
  Sense strand starting at position 3037 of SEQ ID NO: 2283
agauaaguuuaguuugggu

SEQ ID NO: 177073 - RNA, 19 nt, Artificial Sequence
  Description of Artificial Sequence: Synthetic oligonucleotide
  Antisense strand to SEQ ID NO: 177072
acccaaacuaaacuuaucu

SEQ ID NO: 177074 - RNA, 19 nt, Artificial Sequence
  Description of Artificial Sequence: Synthetic oligonucleotide
  Sense strand starting at position 2991 of SEQ ID NO: 2283
uggauuuccugcuggcuga

SEQ ID NO: 177075 - RNA, 19 nt, Artificial Sequence
  Description of Artificial Sequence: Synthetic oligonucleotide
  Antisense strand to SEQ ID NO: 177074
ucagccagcaggaaaucca

SEQ ID NO: 177076 - RNA, 19 nt, Artificial Sequence
  Description of Artificial Sequence: Synthetic oligonucleotide
  Sense strand starting at position 2964 of SEQ ID NO: 2283
gggcucuggccugagcaaa

SEQ ID NO: 177077 - RNA, 19 nt, Artificial Sequence
  Description of Artificial Sequence: Synthetic oligonucleotide
  Antisense strand to SEQ ID NO: 177076
uuugcucaggccagagccc

SEQ ID NO: 177078 - RNA, 19 nt, Artificial Sequence
  Description of Artificial Sequence: Synthetic oligonucleotide
  Sense strand starting at position 2827 of SEQ ID NO: 2283
ugagauguaucugagcagu

SEQ ID NO: 177079 - RNA, 19 nt, Artificial Sequence
  Description of Artificial Sequence: Synthetic oligonucleotide
  Antisense strand to SEQ ID NO: 177078
acugcucagauacaucuca

SEQ ID NO: 177080 - RNA, 19 nt, Artificial Sequence
  Description of Artificial Sequence: Synthetic oligonucleotide
  Sense strand starting at position 2826 of SEQ ID NO: 2283
gugagauguaucugagcag

SEQ ID NO: 177081 - RNA, 19 nt, Artificial Sequence
  Description of Artificial Sequence: Synthetic oligonucleotide
  Antisense strand to SEQ ID NO: 177080
cugcucagauacaucucac

SEQ ID NO: 177082 - RNA, 19 nt, Artificial Sequence
  Description of Artificial Sequence: Synthetic oligonucleotide
  Sense strand starting at position 2820 of SEQ ID NO: 2283
gcaauugugagauguaucu

SEQ ID NO: 177083 - RNA, 19 nt, Artificial Sequence
  Description of Artificial Sequence: Synthetic oligonucleotide
  Antisense strand to SEQ ID NO: 177082
agauacaucucacaauugc

SEQ ID NO: 177084 - RNA, 19 nt, Artificial Sequence
  Description of Artificial Sequence: Synthetic oligonucleotide
  Sense strand starting at position 2818 of SEQ ID NO: 2283
cagcaauugugagauguau

SEQ ID NO: 177085 - RNA, 19 nt, Artificial Sequence
  Description of Artificial Sequence: Synthetic oligonucleotide
  Antisense strand to SEQ ID NO: 177084
auacaucucacaauugcug

SEQ ID NO: 177086 - RNA, 19 nt, Artificial Sequence
  Description of Artificial Sequence: Synthetic oligonucleotide
  Sense strand starting at position 2816 of SEQ ID NO: 2283
ggcagcaauugugagaugu

SEQ ID NO: 177087 - RNA, 19 nt, Artificial Sequence
  Description of Artificial Sequence: Synthetic oligonucleotide
  Antisense strand to SEQ ID NO: 177086
acaucucacaauugcugcc

SEQ ID NO: 177088 - RNA, 19 nt, Artificial Sequence
  Description of Artificial Sequence: Synthetic oligonucleotide
  Sense strand starting at position 2440 of SEQ ID NO: 2283
ccaugcugacgacaguaaa

SEQ ID NO: 177089 - RNA, 19 nt, Artificial Sequence
  Description of Artificial Sequence: Synthetic oligonucleotide
  Antisense strand to SEQ ID NO: 177088
uuuacugucgucagcaugg

SEQ ID NO: 177090 - RNA, 19 nt, Artificial Sequence
  Description of Artificial Sequence: Synthetic oligonucleotide
  Sense strand starting at position 2224 of SEQ ID NO: 2283
cagcaugcuugcucaggaa

SEQ ID NO: 177091 - RNA, 19 nt, Artificial Sequence
  Description of Artificial Sequence: Synthetic oligonucleotide
  Antisense strand to SEQ ID NO: 177090
uuccugagcaagcaugcug

SEQ ID NO: 177092 - RNA, 19 nt, Artificial Sequence
  Description of Artificial Sequence: Synthetic oligonucleotide
  Sense strand starting at position 2029 of SEQ ID NO: 2283
agccgagaacuugaauuau

SEQ ID NO: 177093 - RNA, 19 nt, Artificial Sequence
  Description of Artificial Sequence: Synthetic oligonucleotide
  Antisense strand to SEQ ID NO: 177092
auaauucaaguucucggcu

SEQ ID NO: 177094 - RNA, 19 nt, Artificial Sequence
  Description of Artificial Sequence: Synthetic oligonucleotide
  Sense strand starting at position 2022 of SEQ ID NO: 2283
guggcugagccgagaacuu

SEQ ID NO: 177095 - RNA, 19 nt, Artificial Sequence
  Description of Artificial Sequence: Synthetic oligonucleotide
  Antisense strand to SEQ ID NO: 177094
aaguucucggcucagccac

SEQ ID NO: 177096 - RNA, 19 nt, Artificial Sequence
  Description of Artificial Sequence: Synthetic oligonucleotide
  Sense strand starting at position 1827 of SEQ ID NO: 2283
aggugucagcccugacauc

SEQ ID NO: 177097 - RNA, 19 nt, Artificial Sequence
  Description of Artificial Sequence: Synthetic oligonucleotide
  Antisense strand to SEQ ID NO: 177096
gaugucagggcugacaccu

SEQ ID NO: 177098 - RNA, 19 nt, Artificial Sequence
  Description of Artificial Sequence: Synthetic oligonucleotide
  Sense strand starting at position 1637 of SEQ ID NO: 2283
ugugcugcugccuaugaga

SEQ ID NO: 177099 - RNA, 19 nt, Artificial Sequence
  Description of Artificial Sequence: Synthetic oligonucleotide
  Antisense strand to SEQ ID NO: 177098
ucucauaggcagcagcaca

SEQ ID NO: 177100 - RNA, 19 nt, Artificial Sequence
  Description of Artificial Sequence: Synthetic oligonucleotide
  Sense strand starting at position 854 of SEQ ID NO: 2283
ccgugauuaaacgaaugga

SEQ ID NO: 177101 - RNA, 19 nt, Artificial Sequence
  Description of Artificial Sequence: Synthetic oligonucleotide
  Antisense strand to SEQ ID NO: 177100
uccauucguuuaaucacgg

SEQ ID NO: 177102 - RNA, 19 nt, Artificial Sequence
  Description of Artificial Sequence: Synthetic oligonucleotide
  Sense strand starting at position 846 of SEQ ID NO: 2283
cccggagcccgugauuaaa

SEQ ID NO: 177103 - RNA, 19 nt, Artificial Sequence
  Description of Artificial Sequence: Synthetic oligonucleotide
  Antisense strand to SEQ ID NO: 177102
uuuaaucacgggcuccggg

SEQ ID NO: 177104 - RNA, 19 nt, Artificial Sequence
  Description of Artificial Sequence: Synthetic oligonucleotide
  Sense strand starting at position 703 of SEQ ID NO: 2283
ccugaucucucgugggcau

SEQ ID NO: 177105 - RNA, 19 nt, Artificial Sequence
  Description of Artificial Sequence: Synthetic oligonucleotide
  Antisense strand to SEQ ID NO: 177104
augcccacgagagaucagg

SEQ ID NO: 177106 - RNA, 19 nt, Artificial Sequence
  Description of Artificial Sequence: Synthetic oligonucleotide
  Sense strand starting at position 645 of SEQ ID NO: 2283
ggagaauauugagaccaga

SEQ ID NO: 177107 - RNA, 19 nt, Artificial Sequence
  Description of Artificial Sequence: Synthetic oligonucleotide
  Antisense strand to SEQ ID NO: 177106
ucuggucucaauauucucc

SEQ ID NO: 177108 - RNA, 19 nt, Artificial Sequence
  Description of Artificial Sequence: Synthetic oligonucleotide
  Sense strand starting at position 636 of SEQ ID NO: 2283
ucguucccuggagaauauu

SEQ ID NO: 177109 - RNA, 19 nt, Artificial Sequence
  Description of Artificial Sequence: Synthetic oligonucleotide
  Antisense strand to SEQ ID NO: 177108
aauauucuccagggaacga

SEQ ID NO: 177110 - RNA, 19 nt, Artificial Sequence
  Description of Artificial Sequence: Synthetic oligonucleotide
  Sense strand starting at position 634 of SEQ ID NO: 2283
ccucguucccuggagaaua

SEQ ID NO: 177111 - RNA, 19 nt, Artificial Sequence
  Description of Artificial Sequence: Synthetic oligonucleotide
  Antisense strand to SEQ ID NO: 177110
uauucuccagggaacgagg

SEQ ID NO: 177112 - RNA, 19 nt, Artificial Sequence
  Description of Artificial Sequence: Synthetic oligonucleotide
  Sense strand starting at position 632 of SEQ ID NO: 2283
guccucguucccuggagaa

SEQ ID NO: 177113 - RNA, 19 nt, Artificial Sequence
  Description of Artificial Sequence: Synthetic oligonucleotide
  Antisense strand to SEQ ID NO: 177112
uucuccagggaacgaggac

SEQ ID NO: 177114 - RNA, 19 nt, Artificial Sequence
  Description of Artificial Sequence: Synthetic oligonucleotide
  Sense strand starting at position 214 of SEQ ID NO: 2283
agggaugucagcugaaauc

SEQ ID NO: 177115 - RNA, 19 nt, Artificial Sequence
  Description of Artificial Sequence: Synthetic oligonucleotide
  Antisense strand to SEQ ID NO: 177114
gauuucagcugacaucccu

SEQ ID NO: 177116 - RNA, 19 nt, Artificial Sequence
  Description of Artificial Sequence: Synthetic oligonucleotide
  Sense strand starting at position 167 of SEQ ID NO: 2283
ucacuuaggauccgaguca

SEQ ID NO: 177117 - RNA, 19 nt, Artificial Sequence
  Description of Artificial Sequence: Synthetic oligonucleotide
  Antisense strand to SEQ ID NO: 177116
ugacucggauccuaaguga

SEQ ID NO: 177118 - RNA, 19 nt, Artificial Sequence
  Description of Artificial Sequence: Synthetic oligonucleotide
  Sense strand starting at position 147 of SEQ ID NO: 2283
agagauuccucugauccua

SEQ ID NO: 177119 - RNA, 19 nt, Artificial Sequence
  Description of Artificial Sequence: Synthetic oligonucleotide
  Antisense strand to SEQ ID NO: 177118
uaggaucagaggaaucucu

SEQ ID NO: 177120 - RNA, 19 nt, Artificial Sequence
  Description of Artificial Sequence: Synthetic oligonucleotide
  Sense strand starting at position 4 of SEQ ID NO: 2284
auaagugaguauuccaaca

SEQ ID NO: 177121 - RNA, 19 nt, Artificial Sequence
  Description of Artificial Sequence: Synthetic oligonucleotide
  Antisense strand to SEQ ID NO: 177120
uguuggaauacucacuuau

SEQ ID NO: 177122 - RNA, 19 nt, Artificial Sequence
  Description of Artificial Sequence: Synthetic oligonucleotide
  Sense strand starting at position 109 of SEQ ID NO: 2284
ucaguuauuucccagagga

SEQ ID NO: 177123 - RNA, 19 nt, Artificial Sequence
  Description of Artificial Sequence: Synthetic oligonucleotide
  Antisense strand to SEQ ID NO: 177122
uccucugggaaauaacuga

SEQ ID NO: 177124 - RNA, 19 nt, Artificial Sequence
  Description of Artificial Sequence: Synthetic oligonucleotide
  Sense strand starting at position 759 of SEQ ID NO: 2284
ccacuagagucaccuggaa

SEQ ID NO: 177125 - RNA, 19 nt, Artificial Sequence
  Description of Artificial Sequence: Synthetic oligonucleotide
  Antisense strand to SEQ ID NO: 177124
uuccaggugacucuagugg

SEQ ID NO: 177126 - RNA, 19 nt, Artificial Sequence
  Description of Artificial Sequence: Synthetic oligonucleotide
  Sense strand starting at position 849 of SEQ ID NO: 2284
gccauacacucgcuuauca

SEQ ID NO: 177127 - RNA, 19 nt, Artificial Sequence
  Description of Artificial Sequence: Synthetic oligonucleotide
  Antisense strand to SEQ ID NO: 177126
ugauaagcgaguguauggc

SEQ ID NO: 177128 - RNA, 19 nt, Artificial Sequence
  Description of Artificial Sequence: Synthetic oligonucleotide
  Sense strand starting at position 864 of SEQ ID NO: 2284
aucagcucugcucggaaga

SEQ ID NO: 177129 - RNA, 19 nt, Artificial Sequence
  Description of Artificial Sequence: Synthetic oligonucleotide
  Antisense strand to SEQ ID NO: 177128
ucuuccgagcagagcugau

SEQ ID NO: 177130 - RNA, 19 nt, Artificial Sequence
  Description of Artificial Sequence: Synthetic oligonucleotide
  Sense strand starting at position 865 of SEQ ID NO: 2284
ucagcucugcucggaagaa

SEQ ID NO: 177131 - RNA, 19 nt, Artificial Sequence
  Description of Artificial Sequence: Synthetic oligonucleotide
  Antisense strand to SEQ ID NO: 177130
uucuuccgagcagagcuga

SEQ ID NO: 177132 - RNA, 19 nt, Artificial Sequence
  Description of Artificial Sequence: Synthetic oligonucleotide
  Sense strand starting at position 866 of SEQ ID NO: 2284
cagcucugcucggaagaaa

SEQ ID NO: 177133 - RNA, 19 nt, Artificial Sequence
  Description of Artificial Sequence: Synthetic oligonucleotide
  Antisense strand to SEQ ID NO: 177132
uuucuuccgagcagagcug

SEQ ID NO: 177134 - RNA, 19 nt, Artificial Sequence
  Description of Artificial Sequence: Synthetic oligonucleotide
  Sense strand starting at position 899 of SEQ ID NO: 2284
ucggcuugcacugaucaca

SEQ ID NO: 177135 - RNA, 19 nt, Artificial Sequence
  Description of Artificial Sequence: Synthetic oligonucleotide
  Antisense strand to SEQ ID NO: 177134
ugugaucagugcaagccga

SEQ ID NO: 177136 - RNA, 19 nt, Artificial Sequence
  Description of Artificial Sequence: Synthetic oligonucleotide
  Sense strand starting at position 923 of SEQ ID NO: 2284
gcaauaaaggccugaaucu

SEQ ID NO: 177137 - RNA, 19 nt, Artificial Sequence
  Description of Artificial Sequence: Synthetic oligonucleotide
  Antisense strand to SEQ ID NO: 177136
agauucaggccuuuauugc

SEQ ID NO: 177138 - RNA, 19 nt, Artificial Sequence
  Description of Artificial Sequence: Synthetic oligonucleotide
  Sense strand starting at position 930 of SEQ ID NO: 2284
aggccugaaucugacagaa

SEQ ID NO: 177139 - RNA, 19 nt, Artificial Sequence
  Description of Artificial Sequence: Synthetic oligonucleotide
  Antisense strand to SEQ ID NO: 177138
uucugucagauucaggccu

SEQ ID NO: 177140 - RNA, 19 nt, Artificial Sequence
  Description of Artificial Sequence: Synthetic oligonucleotide
  Sense strand starting at position 932 of SEQ ID NO: 2284
gccugaaucugacagaagu

SEQ ID NO: 177141 - RNA, 19 nt, Artificial Sequence
  Description of Artificial Sequence: Synthetic oligonucleotide
  Antisense strand to SEQ ID NO: 177140
acuucugucagauucaggc

SEQ ID NO: 177142 - RNA, 19 nt, Artificial Sequence
  Description of Artificial Sequence: Synthetic oligonucleotide
  Sense strand starting at position 942 of SEQ ID NO: 2284
gacagaaguuccugccuuc

SEQ ID NO: 177143 - RNA, 19 nt, Artificial Sequence
  Description of Artificial Sequence: Synthetic oligonucleotide
  Antisense strand to SEQ ID NO: 177142
gaaggcaggaacuucuguc

SEQ ID NO: 177144 - RNA, 19 nt, Artificial Sequence
  Description of Artificial Sequence: Synthetic oligonucleotide
  Sense strand starting at position 990 of SEQ ID NO: 2284
uugguuggcuccuacauuu

SEQ ID NO: 177145 - RNA, 19 nt, Artificial Sequence
  Description of Artificial Sequence: Synthetic oligonucleotide
  Antisense strand to SEQ ID NO: 177144
aaauguaggagccaaccaa

SEQ ID NO: 177146 - RNA, 19 nt, Artificial Sequence
  Description of Artificial Sequence: Synthetic oligonucleotide
  Sense strand starting at position 1007 of SEQ ID NO: 2284
uugcacuaacguugagaga

SEQ ID NO: 177147 - RNA, 19 nt, Artificial Sequence
  Description of Artificial Sequence: Synthetic oligonucleotide
  Antisense strand to SEQ ID NO: 177146
ucucucaacguuagugcaa

SEQ ID NO: 177148 - RNA, 19 nt, Artificial Sequence
  Description of Artificial Sequence: Synthetic oligonucleotide
  Sense strand starting at position 1008 of SEQ ID NO: 2284
ugcacuaacguugagagaa

SEQ ID NO: 177149 - RNA, 19 nt, Artificial Sequence
  Description of Artificial Sequence: Synthetic oligonucleotide
  Antisense strand to SEQ ID NO: 177148
uucucucaacguuagugca

SEQ ID NO: 177150 - RNA, 19 nt, Artificial Sequence
  Description of Artificial Sequence: Synthetic oligonucleotide
  Sense strand starting at position 1010 of SEQ ID NO: 2284
cacuaacguugagagaagu

SEQ ID NO: 177151 - RNA, 19 nt, Artificial Sequence
  Description of Artificial Sequence: Synthetic oligonucleotide
  Antisense strand to SEQ ID NO: 177150
acuucucucaacguuagug

SEQ ID NO: 177152 - RNA, 19 nt, Artificial Sequence
  Description of Artificial Sequence: Synthetic oligonucleotide
  Sense strand starting at position 1016 of SEQ ID NO: 2284
cguugagagaaguacuauc

SEQ ID NO: 177153 - RNA, 19 nt, Artificial Sequence
  Description of Artificial Sequence: Synthetic oligonucleotide
  Antisense strand to SEQ ID NO: 177152
gauaguacuucucucaacg

SEQ ID NO: 177154 - RNA, 19 nt, Artificial Sequence
  Description of Artificial Sequence: Synthetic oligonucleotide
  Sense strand starting at position 1952 of SEQ ID NO: 2284
ccugcuacgcccugaaaua

SEQ ID NO: 177155 - RNA, 19 nt, Artificial Sequence
  Description of Artificial Sequence: Synthetic oligonucleotide
  Antisense strand to SEQ ID NO: 177154
uauuucagggcguagcagg

SEQ ID NO: 177156 - RNA, 19 nt, Artificial Sequence
  Description of Artificial Sequence: Synthetic oligonucleotide
  Sense strand starting at position 2149 of SEQ ID NO: 2284
gagggaguguuaccauggu

SEQ ID NO: 177157 - RNA, 19 nt, Artificial Sequence
  Description of Artificial Sequence: Synthetic oligonucleotide
  Antisense strand to SEQ ID NO: 177156
accaugguaacacucccuc

SEQ ID NO: 177158 - RNA, 19 nt, Artificial Sequence
  Description of Artificial Sequence: Synthetic oligonucleotide
  Sense strand starting at position 2153 of SEQ ID NO: 2284
gaguguuaccaugguaacu

SEQ ID NO: 177159 - RNA, 19 nt, Artificial Sequence
  Description of Artificial Sequence: Synthetic oligonucleotide
  Antisense strand to SEQ ID NO: 177158
aguuaccaugguaacacuc

SEQ ID NO: 177160 - RNA, 19 nt, Artificial Sequence
  Description of Artificial Sequence: Synthetic oligonucleotide
  Sense strand starting at position 2548 of SEQ ID NO: 2284
cauucuauuuggcauggua

SEQ ID NO: 177161 - RNA, 19 nt, Artificial Sequence
  Description of Artificial Sequence: Synthetic oligonucleotide
  Antisense strand to SEQ ID NO: 177160
uaccaugccaaauagaaug

SEQ ID NO: 177162 - RNA, 19 nt, Artificial Sequence
  Description of Artificial Sequence: Synthetic oligonucleotide
  Sense strand starting at position 2561 of SEQ ID NO: 2284
augguaugaacuuaagugu

SEQ ID NO: 177163 - RNA, 19 nt, Artificial Sequence
  Description of Artificial Sequence: Synthetic oligonucleotide
  Antisense strand to SEQ ID NO: 177162
acacuuaaguucauaccau

SEQ ID NO: 177164 - RNA, 19 nt, Artificial Sequence
  Description of Artificial Sequence: Synthetic oligonucleotide
  Sense strand starting at position 2564 of SEQ ID NO: 2284
guaugaacuuaaguguucu

SEQ ID NO: 177165 - RNA, 19 nt, Artificial Sequence
  Description of Artificial Sequence: Synthetic oligonucleotide
  Antisense strand to SEQ ID NO: 177164
agaacacuuaaguucauac

SEQ ID NO: 177166 - RNA, 19 nt, Artificial Sequence
  Description of Artificial Sequence: Synthetic oligonucleotide
  Sense strand starting at position 2570 of SEQ ID NO: 2284
acuuaaguguucuauuuag

SEQ ID NO: 177167 - RNA, 19 nt, Artificial Sequence
  Description of Artificial Sequence: Synthetic oligonucleotide
  Antisense strand to SEQ ID NO: 177166
cuaaauagaacacuuaagu

SEQ ID NO: 177168 - RNA, 19 nt, Artificial Sequence
  Description of Artificial Sequence: Synthetic oligonucleotide
  Sense strand starting at position 2576 of SEQ ID NO: 2284
guguucuauuuagaacaga

SEQ ID NO: 177169 - RNA, 19 nt, Artificial Sequence
  Description of Artificial Sequence: Synthetic oligonucleotide
  Antisense strand to SEQ ID NO: 177168
ucuguucuaaauagaacac

SEQ ID NO: 177170 - RNA, 19 nt, Artificial Sequence
  Description of Artificial Sequence: Synthetic oligonucleotide
  Sense strand starting at position 2766 of SEQ ID NO: 2284
ccgucaggcucccuguuau

SEQ ID NO: 177171 - RNA, 19 nt, Artificial Sequence
  Description of Artificial Sequence: Synthetic oligonucleotide
  Antisense strand to SEQ ID NO: 177170
auaacagggagccugacgg

SEQ ID NO: 177172 - RNA, 19 nt, Artificial Sequence
  Description of Artificial Sequence: Synthetic oligonucleotide
  Sense strand starting at position 3119 of SEQ ID NO: 2284
ccuccaaaccuuggaauga

SEQ ID NO: 177173 - RNA, 19 nt, Artificial Sequence
  Description of Artificial Sequence: Synthetic oligonucleotide
  Antisense strand to SEQ ID NO: 177172
ucauuccaagguuuggagg

SEQ ID NO: 177174 - RNA, 19 nt, Artificial Sequence
  Description of Artificial Sequence: Synthetic oligonucleotide
  Sense strand starting at position 3120 of SEQ ID NO: 2284
cuccaaaccuuggaaugau

SEQ ID NO: 177175 - RNA, 19 nt, Artificial Sequence
  Description of Artificial Sequence: Synthetic oligonucleotide
  Antisense strand to SEQ ID NO: 177174
aucauuccaagguuuggag

SEQ ID NO: 177176 - RNA, 19 nt, Artificial Sequence
  Description of Artificial Sequence: Synthetic oligonucleotide
  Sense strand starting at position 3174 of SEQ ID NO: 2284
guagcucaugucuguaagu

SEQ ID NO: 177177 - RNA, 19 nt, Artificial Sequence
  Description of Artificial Sequence: Synthetic oligonucleotide
  Antisense strand to SEQ ID NO: 177176
acuuacagacaugagcuac

SEQ ID NO: 177178 - RNA, 19 nt, Artificial Sequence
  Description of Artificial Sequence: Synthetic oligonucleotide
  Sense strand starting at position 3176 of SEQ ID NO: 2284
agcucaugucuguaagucu

SEQ ID NO: 177179 - RNA, 19 nt, Artificial Sequence
  Description of Artificial Sequence: Synthetic oligonucleotide
  Antisense strand to SEQ ID NO: 177178
agacuuacagacaugagcu

SEQ ID NO: 177180 - RNA, 19 nt, Artificial Sequence
  Description of Artificial Sequence: Synthetic oligonucleotide
  Sense strand starting at position 3677 of SEQ ID NO: 2284
acagacgacuguuacuaga

SEQ ID NO: 177181 - RNA, 19 nt, Artificial Sequence
  Description of Artificial Sequence: Synthetic oligonucleotide
  Antisense strand to SEQ ID NO: 177180
ucuaguaacagucgucugu

SEQ ID NO: 177182 - RNA, 19 nt, Artificial Sequence
  Description of Artificial Sequence: Synthetic oligonucleotide
  Sense strand starting at position 3679 of SEQ ID NO: 2284
agacgacuguuacuagauc

SEQ ID NO: 177183 - RNA, 19 nt, Artificial Sequence
  Description of Artificial Sequence: Synthetic oligonucleotide
  Antisense strand to SEQ ID NO: 177182
gaucuaguaacagucgucu

SEQ ID NO: 177184 - RNA, 19 nt, Artificial Sequence
  Description of Artificial Sequence: Synthetic oligonucleotide
  Sense strand starting at position 3713 of SEQ ID NO: 2284
agacaugagugccuguaaa

SEQ ID NO: 177185 - RNA, 19 nt, Artificial Sequence
  Description of Artificial Sequence: Synthetic oligonucleotide
  Antisense strand to SEQ ID NO: 177184
uuuacaggcacucaugucu

SEQ ID NO: 177186 - RNA, 19 nt, Artificial Sequence
  Description of Artificial Sequence: Synthetic oligonucleotide
  Sense strand starting at position 3723 of SEQ ID NO: 2284
gccuguaaacuguacuaua

SEQ ID NO: 177187 - RNA, 19 nt, Artificial Sequence
  Description of Artificial Sequence: Synthetic oligonucleotide
  Antisense strand to SEQ ID NO: 177186
uauaguacaguuuacaggc

SEQ ID NO: 177188 - RNA, 19 nt, Artificial Sequence
  Description of Artificial Sequence: Synthetic oligonucleotide
  Sense strand starting at position 3726 of SEQ ID NO: 2284
uguaaacuguacuauagaa

SEQ ID NO: 177189 - RNA, 19 nt, Artificial Sequence
  Description of Artificial Sequence: Synthetic oligonucleotide
  Antisense strand to SEQ ID NO: 177188
uucuauaguacaguuuaca

SEQ ID NO: 177190 - RNA, 19 nt, Artificial Sequence
  Description of Artificial Sequence: Synthetic oligonucleotide
  Sense strand starting at position 3809 of SEQ ID NO: 2284
aggaacuguuuaugaguua

SEQ ID NO: 177191 - RNA, 19 nt, Artificial Sequence
  Description of Artificial Sequence: Synthetic oligonucleotide
  Antisense strand to SEQ ID NO: 177190
uaacucauaaacaguuccu

SEQ ID NO: 177192 - RNA, 19 nt, Artificial Sequence
  Description of Artificial Sequence: Synthetic oligonucleotide
  Sense strand starting at position 3812 of SEQ ID NO: 2284
aacuguuuaugaguuagaa

SEQ ID NO: 177193 - RNA, 19 nt, Artificial Sequence
  Description of Artificial Sequence: Synthetic oligonucleotide
  Antisense strand to SEQ ID NO: 177192
uucuaacucauaaacaguu

SEQ ID NO: 177194 - RNA, 19 nt, Artificial Sequence
  Description of Artificial Sequence: Synthetic oligonucleotide
  Sense strand starting at position 103 of SEQ ID NO: 2285
aggguugacuaccaugaaa

SEQ ID NO: 177195 - RNA, 19 nt, Artificial Sequence
  Description of Artificial Sequence: Synthetic oligonucleotide
  Antisense strand to SEQ ID NO: 177194
uuucaugguagucaacccu

SEQ ID NO: 177196 - RNA, 19 nt, Artificial Sequence
  Description of Artificial Sequence: Synthetic oligonucleotide
  Sense strand starting at position 139 of SEQ ID NO: 2285
gguagaacuugucuuagcu

SEQ ID NO: 177197 - RNA, 19 nt, Artificial Sequence
  Description of Artificial Sequence: Synthetic oligonucleotide
  Antisense strand to SEQ ID NO: 177196
agcuaagacaaguucuacc

SEQ ID NO: 177198 - RNA, 19 nt, Artificial Sequence
  Description of Artificial Sequence: Synthetic oligonucleotide
  Sense strand starting at position 392 of SEQ ID NO: 2285
gucucauccucaguaaccu

SEQ ID NO: 177199 - RNA, 19 nt, Artificial Sequence
  Description of Artificial Sequence: Synthetic oligonucleotide
  Antisense strand to SEQ ID NO: 177198
agguuacugaggaugagac

SEQ ID NO: 177200 - RNA, 19 nt, Artificial Sequence
  Description of Artificial Sequence: Synthetic oligonucleotide
  Sense strand starting at position 819 of SEQ ID NO: 2285
ccguuauuccuaugaucac

SEQ ID NO: 177201 - RNA, 19 nt, Artificial Sequence
  Description of Artificial Sequence: Synthetic oligonucleotide
  Antisense strand to SEQ ID NO: 177200
gugaucauaggaauaacgg

SEQ ID NO: 177202 - RNA, 19 nt, Artificial Sequence
  Description of Artificial Sequence: Synthetic oligonucleotide
  Sense strand starting at position 872 of SEQ ID NO: 2285
gggaaugucuuccagaaua

SEQ ID NO: 177203 - RNA, 19 nt, Artificial Sequence
  Description of Artificial Sequence: Synthetic oligonucleotide
  Antisense strand to SEQ ID NO: 177202
uauucuggaagacauuccc

SEQ ID NO: 177204 - RNA, 19 nt, Artificial Sequence
  Description of Artificial Sequence: Synthetic oligonucleotide
  Sense strand starting at position 874 of SEQ ID NO: 2285
gaaugucuuccagaauagc

SEQ ID NO: 177205 - RNA, 19 nt, Artificial Sequence
  Description of Artificial Sequence: Synthetic oligonucleotide
  Antisense strand to SEQ ID NO: 177204
gcuauucuggaagacauuc

SEQ ID NO: 177206 - RNA, 19 nt, Artificial Sequence
  Description of Artificial Sequence: Synthetic oligonucleotide
  Sense strand starting at position 1016 of SEQ ID NO: 2285
cugcuuugauagcuuuaca

SEQ ID NO: 177207 - RNA, 19 nt, Artificial Sequence
  Description of Artificial Sequence: Synthetic oligonucleotide
  Antisense strand to SEQ ID NO: 177206
uguaaagcuaucaaagcag

SEQ ID NO: 177208 - RNA, 19 nt, Artificial Sequence
  Description of Artificial Sequence: Synthetic oligonucleotide
  Sense strand starting at position 1129 of SEQ ID NO: 2285
ccucuaauacagcgacaau

SEQ ID NO: 177209 - RNA, 19 nt, Artificial Sequence
  Description of Artificial Sequence: Synthetic oligonucleotide
  Antisense strand to SEQ ID NO: 177208
auugucgcuguauuagagg

SEQ ID NO: 177210 - RNA, 19 nt, Artificial Sequence
  Description of Artificial Sequence: Synthetic oligonucleotide
  Sense strand starting at position 1132 of SEQ ID NO: 2285
cuaauacagcgacaaucuu

SEQ ID NO: 177211 - RNA, 19 nt, Artificial Sequence
  Description of Artificial Sequence: Synthetic oligonucleotide
  Antisense strand to SEQ ID NO: 177210
aagauugucgcuguauuag

SEQ ID NO: 177212 - RNA, 19 nt, Artificial Sequence
  Description of Artificial Sequence: Synthetic oligonucleotide
  Sense strand starting at position 1182 of SEQ ID NO: 2285
uagguuagaguccaaguaa

SEQ ID NO: 177213 - RNA, 19 nt, Artificial Sequence
  Description of Artificial Sequence: Synthetic oligonucleotide
  Antisense strand to SEQ ID NO: 177212
uuacuuggacucuaaccua

SEQ ID NO: 177214 - RNA, 19 nt, Artificial Sequence
  Description of Artificial Sequence: Synthetic oligonucleotide
  Sense strand starting at position 1261 of SEQ ID NO: 2285
auggauaaauucuaauggu

SEQ ID NO: 177215 - RNA, 19 nt, Artificial Sequence
  Description of Artificial Sequence: Synthetic oligonucleotide
  Antisense strand to SEQ ID NO: 177214
accauuagaauuuauccau

SEQ ID NO: 177216 - RNA, 19 nt, Artificial Sequence
  Description of Artificial Sequence: Synthetic oligonucleotide
  Sense strand starting at position 1314 of SEQ ID NO: 2285
ccuuuacuggugggaggua

SEQ ID NO: 177217 - RNA, 19 nt, Artificial Sequence
  Description of Artificial Sequence: Synthetic oligonucleotide
  Antisense strand to SEQ ID NO: 177216
uaccucccaccaguaaagg

SEQ ID NO: 177218 - RNA, 19 nt, Artificial Sequence
  Description of Artificial Sequence: Synthetic oligonucleotide
  Sense strand starting at position 1333 of SEQ ID NO: 2285
cccugacugcaacaguaua

SEQ ID NO: 177219 - RNA, 19 nt, Artificial Sequence
  Description of Artificial Sequence: Synthetic oligonucleotide
  Antisense strand to SEQ ID NO: 177218
uauacuguugcagucaggg

SEQ ID NO: 177220 - RNA, 19 nt, Artificial Sequence
  Description of Artificial Sequence: Synthetic oligonucleotide
  Sense strand starting at position 1394 of SEQ ID NO: 2285
uauccaagugccugguaaa

SEQ ID NO: 177221 - RNA, 19 nt, Artificial Sequence
  Description of Artificial Sequence: Synthetic oligonucleotide
  Antisense strand to SEQ ID NO: 177220
uuuaccaggcacuuggaua

SEQ ID NO: 177222 - RNA, 19 nt, Artificial Sequence
  Description of Artificial Sequence: Synthetic oligonucleotide
  Sense strand starting at position 1432 of SEQ ID NO: 2285
cccagauugugccugaauu

SEQ ID NO: 177223 - RNA, 19 nt, Artificial Sequence
  Description of Artificial Sequence: Synthetic oligonucleotide
  Antisense strand to SEQ ID NO: 177222
aauucaggcacaaucuggg

SEQ ID NO: 177224 - RNA, 19 nt, Artificial Sequence
  Description of Artificial Sequence: Synthetic oligonucleotide
  Sense strand starting at position 1433 of SEQ ID NO: 2285
ccagauugugccugaauuc

SEQ ID NO: 177225 - RNA, 19 nt, Artificial Sequence
  Description of Artificial Sequence: Synthetic oligonucleotide
  Antisense strand to SEQ ID NO: 177224
gaauucaggcacaaucugg

SEQ ID NO: 177226 - RNA, 19 nt, Artificial Sequence
  Description of Artificial Sequence: Synthetic oligonucleotide
  Sense strand starting at position 1434 of SEQ ID NO: 2285
cagauugugccugaauucu

SEQ ID NO: 177227 - RNA, 19 nt, Artificial Sequence
  Description of Artificial Sequence: Synthetic oligonucleotide
  Antisense strand to SEQ ID NO: 177226
agaauucaggcacaaucug

SEQ ID NO: 177228 - RNA, 19 nt, Artificial Sequence
  Description of Artificial Sequence: Synthetic oligonucleotide
  Sense strand starting at position 1740 of SEQ ID NO: 2285
agacaaguauucucugcuu

SEQ ID NO: 177229 - RNA, 19 nt, Artificial Sequence
  Description of Artificial Sequence: Synthetic oligonucleotide
  Antisense strand to SEQ ID NO: 177228
aagcagagaauacuugucu

SEQ ID NO: 177230 - RNA, 19 nt, Artificial Sequence
  Description of Artificial Sequence: Synthetic oligonucleotide
  Sense strand starting at position 1755 of SEQ ID NO: 2285
gcuucugccucuuccagaa

SEQ ID NO: 177231 - RNA, 19 nt, Artificial Sequence
  Description of Artificial Sequence: Synthetic oligonucleotide
  Antisense strand to SEQ ID NO: 177230
uucuggaagaggcagaagc

SEQ ID NO: 177232 - RNA, 19 nt, Artificial Sequence
  Description of Artificial Sequence: Synthetic oligonucleotide
  Sense strand starting at position 1776 of SEQ ID NO: 2285
auagauguucucuguaaca

SEQ ID NO: 177233 - RNA, 19 nt, Artificial Sequence
  Description of Artificial Sequence: Synthetic oligonucleotide
  Antisense strand to SEQ ID NO: 177232
uguuacagagaacaucuau

SEQ ID NO: 177234 - RNA, 19 nt, Artificial Sequence
  Description of Artificial Sequence: Synthetic oligonucleotide
  Sense strand starting at position 1778 of SEQ ID NO: 2285
agauguucucuguaacaac

SEQ ID NO: 177235 - RNA, 19 nt, Artificial Sequence
  Description of Artificial Sequence: Synthetic oligonucleotide
  Antisense strand to SEQ ID NO: 177234
guuguuacagagaacaucu

SEQ ID NO: 177236 - RNA, 19 nt, Artificial Sequence
  Description of Artificial Sequence: Synthetic oligonucleotide
  Sense strand starting at position 1865 of SEQ ID NO: 2285
aggagacacugcuaguaaa

SEQ ID NO: 177237 - RNA, 19 nt, Artificial Sequence
  Description of Artificial Sequence: Synthetic oligonucleotide
  Antisense strand to SEQ ID NO: 177236
uuuacuagcagugucuccu

SEQ ID NO: 177238 - RNA, 19 nt, Artificial Sequence
  Description of Artificial Sequence: Synthetic oligonucleotide
  Sense strand starting at position 1960 of SEQ ID NO: 2285
accaguaguuacccaaacu

SEQ ID NO: 177239 - RNA, 19 nt, Artificial Sequence
  Description of Artificial Sequence: Synthetic oligonucleotide
  Antisense strand to SEQ ID NO: 177238
aguuuggguaacuacuggu

SEQ ID NO: 177240 - RNA, 19 nt, Artificial Sequence
  Description of Artificial Sequence: Synthetic oligonucleotide
  Sense strand starting at position 2146 of SEQ ID NO: 2285
ugaacaagccuguaucaaa

SEQ ID NO: 177241 - RNA, 19 nt, Artificial Sequence
  Description of Artificial Sequence: Synthetic oligonucleotide
  Antisense strand to SEQ ID NO: 177240
uuugauacaggcuuguuca

SEQ ID NO: 177242 - RNA, 19 nt, Artificial Sequence
  Description of Artificial Sequence: Synthetic oligonucleotide
  Sense strand starting at position 2266 of SEQ ID NO: 2285
gaggaucaguucucuuuac

SEQ ID NO: 177243 - RNA, 19 nt, Artificial Sequence
  Description of Artificial Sequence: Synthetic oligonucleotide
  Antisense strand to SEQ ID NO: 177242
guaaagagaacugauccuc

SEQ ID NO: 177244 - RNA, 19 nt, Artificial Sequence
  Description of Artificial Sequence: Synthetic oligonucleotide
  Sense strand starting at position 2267 of SEQ ID NO: 2285
aggaucaguucucuuuaca

SEQ ID NO: 177245 - RNA, 19 nt, Artificial Sequence
  Description of Artificial Sequence: Synthetic oligonucleotide
  Antisense strand to SEQ ID NO: 177244
uguaaagagaacugauccu

SEQ ID NO: 177246 - RNA, 19 nt, Artificial Sequence
  Description of Artificial Sequence: Synthetic oligonucleotide
  Sense strand starting at position 2313 of SEQ ID NO: 2285
ucugauacuuuguuuaaag

SEQ ID NO: 177247 - RNA, 19 nt, Artificial Sequence
  Description of Artificial Sequence: Synthetic oligonucleotide
  Antisense strand to SEQ ID NO: 177246
cuuuaaacaaaguaucaga

SEQ ID NO: 177248 - RNA, 19 nt, Artificial Sequence
  Description of Artificial Sequence: Synthetic oligonucleotide
  Sense strand starting at position 2360 of SEQ ID NO: 2285
ucaugagucuaugcacagu

SEQ ID NO: 177249 - RNA, 19 nt, Artificial Sequence
  Description of Artificial Sequence: Synthetic oligonucleotide
  Antisense strand to SEQ ID NO: 177248
acugugcauagacucauga

SEQ ID NO: 177250 - RNA, 19 nt, Artificial Sequence
  Description of Artificial Sequence: Synthetic oligonucleotide
  Sense strand starting at position 2786 of SEQ ID NO: 2285
gguacucucaggcagaaca

SEQ ID NO: 177251 - RNA, 19 nt, Artificial Sequence
  Description of Artificial Sequence: Synthetic oligonucleotide
  Antisense strand to SEQ ID NO: 177250
uguucugccugagaguacc

SEQ ID NO: 177252 - RNA, 19 nt, Artificial Sequence
  Description of Artificial Sequence: Synthetic oligonucleotide
  Sense strand starting at position 2855 of SEQ ID NO: 2285
ggguuucucuuauuagaua

SEQ ID NO: 177253 - RNA, 19 nt, Artificial Sequence
  Description of Artificial Sequence: Synthetic oligonucleotide
  Antisense strand to SEQ ID NO: 177252
uaucuaauaagagaaaccc

SEQ ID NO: 177254 - RNA, 19 nt, Artificial Sequence
  Description of Artificial Sequence: Synthetic oligonucleotide
  Sense strand starting at position 2895 of SEQ ID NO: 2285
augaaagaguaucagaaag

SEQ ID NO: 177255 - RNA, 19 nt, Artificial Sequence
  Description of Artificial Sequence: Synthetic oligonucleotide
  Antisense strand to SEQ ID NO: 177254
cuuucugauacucuuucau

SEQ ID NO: 177256 - RNA, 19 nt, Artificial Sequence
  Description of Artificial Sequence: Synthetic oligonucleotide
  Sense strand starting at position 2897 of SEQ ID NO: 2285
gaaagaguaucagaaaguu

SEQ ID NO: 177257 - RNA, 19 nt, Artificial Sequence
  Description of Artificial Sequence: Synthetic oligonucleotide
  Antisense strand to SEQ ID NO: 177256
aacuuucugauacucuuuc

SEQ ID NO: 177258 - RNA, 19 nt, Artificial Sequence
  Description of Artificial Sequence: Synthetic oligonucleotide
  Sense strand starting at position 2903 of SEQ ID NO: 2285
guaucagaaaguuaggcuu

SEQ ID NO: 177259 - RNA, 19 nt, Artificial Sequence
  Description of Artificial Sequence: Synthetic oligonucleotide
  Antisense strand to SEQ ID NO: 177258
aagccuaacuuucugauac

SEQ ID NO: 177260 - RNA, 19 nt, Artificial Sequence
  Description of Artificial Sequence: Synthetic oligonucleotide
  Sense strand starting at position 2916 of SEQ ID NO: 2285
aggcuugagcccugugagu

SEQ ID NO: 177261 - RNA, 19 nt, Artificial Sequence
  Description of Artificial Sequence: Synthetic oligonucleotide
  Antisense strand to SEQ ID NO: 177260
acucacagggcucaagccu

SEQ ID NO: 177262 - RNA, 19 nt, Artificial Sequence
  Description of Artificial Sequence: Synthetic oligonucleotide
  Sense strand starting at position 2918 of SEQ ID NO: 2285
gcuugagcccugugaguaa

SEQ ID NO: 177263 - RNA, 19 nt, Artificial Sequence
  Description of Artificial Sequence: Synthetic oligonucleotide
  Antisense strand to SEQ ID NO: 177262
uuacucacagggcucaagc

SEQ ID NO: 177264 - RNA, 19 nt, Artificial Sequence
  Description of Artificial Sequence: Synthetic oligonucleotide
  Sense strand starting at position 2922 of SEQ ID NO: 2285
gagcccugugaguaaagga

SEQ ID NO: 177265 - RNA, 19 nt, Artificial Sequence
  Description of Artificial Sequence: Synthetic oligonucleotide
  Antisense strand to SEQ ID NO: 177264
uccuuuacucacagggcuc

SEQ ID NO: 177266 - RNA, 19 nt, Artificial Sequence
  Description of Artificial Sequence: Synthetic oligonucleotide
  Sense strand starting at position 2966 of SEQ ID NO: 2285
augcauuacccagggagau

SEQ ID NO: 177267 - RNA, 19 nt, Artificial Sequence
  Description of Artificial Sequence: Synthetic oligonucleotide
  Antisense strand to SEQ ID NO: 177266
aucucccuggguaaugcau

SEQ ID NO: 177268 - RNA, 19 nt, Artificial Sequence
  Description of Artificial Sequence: Synthetic oligonucleotide
  Sense strand starting at position 2967 of SEQ ID NO: 2285
ugcauuacccagggagaua

SEQ ID NO: 177269 - RNA, 19 nt, Artificial Sequence
  Description of Artificial Sequence: Synthetic oligonucleotide
  Antisense strand to SEQ ID NO: 177268
uaucucccuggguaaugca

SEQ ID NO: 177270 - RNA, 19 nt, Artificial Sequence
  Description of Artificial Sequence: Synthetic oligonucleotide
  Sense strand starting at position 3233 of SEQ ID NO: 2285
uccagagacuaggaauuua

SEQ ID NO: 177271 - RNA, 19 nt, Artificial Sequence
  Description of Artificial Sequence: Synthetic oligonucleotide
  Antisense strand to SEQ ID NO: 177270
uaaauuccuagucucugga

SEQ ID NO: 177272 - RNA, 19 nt, Artificial Sequence
  Description of Artificial Sequence: Synthetic oligonucleotide
  Sense strand starting at position 3846 of SEQ ID NO: 2285
uguuuccauuuagacagaa

SEQ ID NO: 177273 - RNA, 19 nt, Artificial Sequence
  Description of Artificial Sequence: Synthetic oligonucleotide
  Antisense strand to SEQ ID NO: 177272
uucugucuaaauggaaaca

SEQ ID NO: 177274 - RNA, 19 nt, Artificial Sequence
  Description of Artificial Sequence: Synthetic oligonucleotide
  Sense strand starting at position 159 of SEQ ID NO: 2286
cugagaaacuuguuuccac

SEQ ID NO: 177275 - RNA, 19 nt, Artificial Sequence
  Description of Artificial Sequence: Synthetic oligonucleotide
  Antisense strand to SEQ ID NO: 177274
guggaaacaaguuucucag

SEQ ID NO: 177276 - RNA, 19 nt, Artificial Sequence
  Description of Artificial Sequence: Synthetic oligonucleotide
  Sense strand starting at position 174 of SEQ ID NO: 2286
ccaccaauacugggacauu

SEQ ID NO: 177277 - RNA, 19 nt, Artificial Sequence
  Description of Artificial Sequence: Synthetic oligonucleotide
  Antisense strand to SEQ ID NO: 177276
aaugucccaguauuggugg

SEQ ID NO: 177278 - RNA, 19 nt, Artificial Sequence
  Description of Artificial Sequence: Synthetic oligonucleotide
  Sense strand starting at position 203 of SEQ ID NO: 2286
uugguaagauuccuauggu

SEQ ID NO: 177279 - RNA, 19 nt, Artificial Sequence
  Description of Artificial Sequence: Synthetic oligonucleotide
  Antisense strand to SEQ ID NO: 177278
accauaggaaucuuaccaa

SEQ ID NO: 177280 - RNA, 19 nt, Artificial Sequence
  Description of Artificial Sequence: Synthetic oligonucleotide
  Sense strand starting at position 206 of SEQ ID NO: 2286
guaagauuccuaugguacu

SEQ ID NO: 177281 - RNA, 19 nt, Artificial Sequence
  Description of Artificial Sequence: Synthetic oligonucleotide
  Antisense strand to SEQ ID NO: 177280
aguaccauaggaaucuuac

SEQ ID NO: 177282 - RNA, 19 nt, Artificial Sequence
  Description of Artificial Sequence: Synthetic oligonucleotide
  Sense strand starting at position 315 of SEQ ID NO: 2286
gggauaauaugagauggaa

SEQ ID NO: 177283 - RNA, 19 nt, Artificial Sequence
  Description of Artificial Sequence: Synthetic oligonucleotide
  Antisense strand to SEQ ID NO: 177282
uuccaucucauauuauccc

SEQ ID NO: 177284 - RNA, 19 nt, Artificial Sequence
  Description of Artificial Sequence: Synthetic oligonucleotide
  Sense strand starting at position 372 of SEQ ID NO: 2286
ccuagacaagcugaguaau

SEQ ID NO: 177285 - RNA, 19 nt, Artificial Sequence
  Description of Artificial Sequence: Synthetic oligonucleotide
  Antisense strand to SEQ ID NO: 177284
auuacucagcuugucuagg

SEQ ID NO: 177286 - RNA, 19 nt, Artificial Sequence
  Description of Artificial Sequence: Synthetic oligonucleotide
  Sense strand starting at position 374 of SEQ ID NO: 2286
uagacaagcugaguaauua

SEQ ID NO: 177287 - RNA, 19 nt, Artificial Sequence
  Description of Artificial Sequence: Synthetic oligonucleotide
  Antisense strand to SEQ ID NO: 177286
uaauuacucagcuugucua

SEQ ID NO: 177288 - RNA, 19 nt, Artificial Sequence
  Description of Artificial Sequence: Synthetic oligonucleotide
  Sense strand starting at position 383 of SEQ ID NO: 2286
ugaguaauuacucacgguc

SEQ ID NO: 177289 - RNA, 19 nt, Artificial Sequence
  Description of Artificial Sequence: Synthetic oligonucleotide
  Antisense strand to SEQ ID NO: 177288
gaccgugaguaauuacuca

SEQ ID NO: 177290 - RNA, 19 nt, Artificial Sequence
  Description of Artificial Sequence: Synthetic oligonucleotide
  Sense strand starting at position 397 of SEQ ID NO: 2286
cggucauagagugaagucu

SEQ ID NO: 177291 - RNA, 19 nt, Artificial Sequence
  Description of Artificial Sequence: Synthetic oligonucleotide
  Antisense strand to SEQ ID NO: 177290
agacuucacucuaugaccg

SEQ ID NO: 177292 - RNA, 19 nt, Artificial Sequence
  Description of Artificial Sequence: Synthetic oligonucleotide
  Sense strand starting at position 543 of SEQ ID NO: 2286
ugcauuggccaagauaaau

SEQ ID NO: 177293 - RNA, 19 nt, Artificial Sequence
  Description of Artificial Sequence: Synthetic oligonucleotide
  Antisense strand to SEQ ID NO: 177292
auuuaucuuggccaaugca

SEQ ID NO: 177294 - RNA, 19 nt, Artificial Sequence
  Description of Artificial Sequence: Synthetic oligonucleotide
  Sense strand starting at position 642 of SEQ ID NO: 2286
augagagguucccuauuaa

SEQ ID NO: 177295 - RNA, 19 nt, Artificial Sequence
  Description of Artificial Sequence: Synthetic oligonucleotide
  Antisense strand to SEQ ID NO: 177294
uuaauagggaaccucucau

SEQ ID NO: 177296 - RNA, 19 nt, Artificial Sequence
  Description of Artificial Sequence: Synthetic oligonucleotide
  Sense strand starting at position 674 of SEQ ID NO: 2286
augccaagacuuggacaua

SEQ ID NO: 177297 - RNA, 19 nt, Artificial Sequence
  Description of Artificial Sequence: Synthetic oligonucleotide
  Antisense strand to SEQ ID NO: 177296
uauguccaagucuuggcau

SEQ ID NO: 177298 - RNA, 19 nt, Artificial Sequence
  Description of Artificial Sequence: Synthetic oligonucleotide
  Sense strand starting at position 791 of SEQ ID NO: 2286
aauuccuggguuggugaua

SEQ ID NO: 177299 - RNA, 19 nt, Artificial Sequence
  Description of Artificial Sequence: Synthetic oligonucleotide
  Antisense strand to SEQ ID NO: 177298
uaucaccaacccaggaauu

SEQ ID NO: 177300 - RNA, 19 nt, Artificial Sequence
  Description of Artificial Sequence: Synthetic oligonucleotide
  Sense strand starting at position 1000 of SEQ ID NO: 2286
aaagaucuauauguguaga

SEQ ID NO: 177301 - RNA, 19 nt, Artificial Sequence
  Description of Artificial Sequence: Synthetic oligonucleotide
  Antisense strand to SEQ ID NO: 177300
ucuacacauauagaucuuu

SEQ ID NO: 177302 - RNA, 19 nt, Artificial Sequence
  Description of Artificial Sequence: Synthetic oligonucleotide
  Sense strand starting at position 1002 of SEQ ID NO: 2286
agaucuauauguguagauu

SEQ ID NO: 177303 - RNA, 19 nt, Artificial Sequence
  Description of Artificial Sequence: Synthetic oligonucleotide
  Antisense strand to SEQ ID NO: 177302
aaucuacacauauagaucu

SEQ ID NO: 177304 - RNA, 19 nt, Artificial Sequence
  Description of Artificial Sequence: Synthetic oligonucleotide
  Sense strand starting at position 1003 of SEQ ID NO: 2286
gaucuauauguguagauua

SEQ ID NO: 177305 - RNA, 19 nt, Artificial Sequence
  Description of Artificial Sequence: Synthetic oligonucleotide
  Antisense strand to SEQ ID NO: 177304
uaaucuacacauauagauc

SEQ ID NO: 177306 - RNA, 19 nt, Artificial Sequence
  Description of Artificial Sequence: Synthetic oligonucleotide
  Sense strand starting at position 1108 of SEQ ID NO: 2286
agaauacuuguccagcuca

SEQ ID NO: 177307 - RNA, 19 nt, Artificial Sequence
  Description of Artificial Sequence: Synthetic oligonucleotide
  Antisense strand to SEQ ID NO: 177306
ugagcuggacaaguauucu

SEQ ID NO: 177308 - RNA, 19 nt, Artificial Sequence
  Description of Artificial Sequence: Synthetic oligonucleotide
  Sense strand starting at position 1358 of SEQ ID NO: 2286
uguaaucucugauccuaag

SEQ ID NO: 177309 - RNA, 19 nt, Artificial Sequence
  Description of Artificial Sequence: Synthetic oligonucleotide
  Antisense strand to SEQ ID NO: 177308
cuuaggaucagagauuaca

SEQ ID NO: 177310 - RNA, 19 nt, Artificial Sequence
  Description of Artificial Sequence: Synthetic oligonucleotide
  Sense strand starting at position 1442 of SEQ ID NO: 2286
ccgugaugcuauuugagug

SEQ ID NO: 177311 - RNA, 19 nt, Artificial Sequence
  Description of Artificial Sequence: Synthetic oligonucleotide
  Antisense strand to SEQ ID NO: 177310
cacucaaauagcaucacgg

SEQ ID NO: 177312 - RNA, 19 nt, Artificial Sequence
  Description of Artificial Sequence: Synthetic oligonucleotide
  Sense strand starting at position 1443 of SEQ ID NO: 2286
cgugaugcuauuugaguga

SEQ ID NO: 177313 - RNA, 19 nt, Artificial Sequence
  Description of Artificial Sequence: Synthetic oligonucleotide
  Antisense strand to SEQ ID NO: 177312
ucacucaaauagcaucacg

SEQ ID NO: 177314 - RNA, 19 nt, Artificial Sequence
  Description of Artificial Sequence: Synthetic oligonucleotide
  Sense strand starting at position 1502 of SEQ ID NO: 2286
cuagaagucaaggguucuu

SEQ ID NO: 177315 - RNA, 19 nt, Artificial Sequence
  Description of Artificial Sequence: Synthetic oligonucleotide
  Antisense strand to SEQ ID NO: 177314
aagaacccuugacuucuag

SEQ ID NO: 177316 - RNA, 19 nt, Artificial Sequence
  Description of Artificial Sequence: Synthetic oligonucleotide
  Sense strand starting at position 1507 of SEQ ID NO: 2286
agucaaggguucuuccaaa

SEQ ID NO: 177317 - RNA, 19 nt, Artificial Sequence
  Description of Artificial Sequence: Synthetic oligonucleotide
  Antisense strand to SEQ ID NO: 177316
uuuggaagaacccuugacu

SEQ ID NO: 177318 - RNA, 19 nt, Artificial Sequence
  Description of Artificial Sequence: Synthetic oligonucleotide
  Sense strand starting at position 1981 of SEQ ID NO: 2286
agacuugagucuuuaucug

SEQ ID NO: 177319 - RNA, 19 nt, Artificial Sequence
  Description of Artificial Sequence: Synthetic oligonucleotide
  Antisense strand to SEQ ID NO: 177318
cagauaaagacucaagucu

SEQ ID NO: 177320 - RNA, 19 nt, Artificial Sequence
  Description of Artificial Sequence: Synthetic oligonucleotide
  Sense strand starting at position 2269 of SEQ ID NO: 2286
agagaaguguacuuuggca

SEQ ID NO: 177321 - RNA, 19 nt, Artificial Sequence
  Description of Artificial Sequence: Synthetic oligonucleotide
  Antisense strand to SEQ ID NO: 177320
ugccaaaguacacuucucu

SEQ ID NO: 177322 - RNA, 19 nt, Artificial Sequence
  Description of Artificial Sequence: Synthetic oligonucleotide
  Sense strand starting at position 2445 of SEQ ID NO: 2286
gaggucacucaugauccuu

SEQ ID NO: 177323 - RNA, 19 nt, Artificial Sequence
  Description of Artificial Sequence: Synthetic oligonucleotide
  Antisense strand to SEQ ID NO: 177322
aaggaucaugagugaccuc

SEQ ID NO: 177324 - RNA, 19 nt, Artificial Sequence
  Description of Artificial Sequence: Synthetic oligonucleotide
  Sense strand starting at position 2447 of SEQ ID NO: 2286
ggucacucaugauccuuaa

SEQ ID NO: 177325 - RNA, 19 nt, Artificial Sequence
  Description of Artificial Sequence: Synthetic oligonucleotide
  Antisense strand to SEQ ID NO: 177324
uuaaggaucaugagugacc

SEQ ID NO: 177326 - RNA, 19 nt, Artificial Sequence
  Description of Artificial Sequence: Synthetic oligonucleotide
  Sense strand starting at position 2812 of SEQ ID NO: 2286
ucguaaucaucauuaucag

SEQ ID NO: 177327 - RNA, 19 nt, Artificial Sequence
  Description of Artificial Sequence: Synthetic oligonucleotide
  Antisense strand to SEQ ID NO: 177326
cugauaaugaugauuacga

SEQ ID NO: 177328 - RNA, 19 nt, Artificial Sequence
  Description of Artificial Sequence: Synthetic oligonucleotide
  Sense strand starting at position 2844 of SEQ ID NO: 2286
aguuuaguuccagaccaug

SEQ ID NO: 177329 - RNA, 19 nt, Artificial Sequence
  Description of Artificial Sequence: Synthetic oligonucleotide
  Antisense strand to SEQ ID NO: 177328
cauggucuggaacuaaacu

SEQ ID NO: 177330 - RNA, 19 nt, Artificial Sequence
  Description of Artificial Sequence: Synthetic oligonucleotide
  Sense strand starting at position 2991 of SEQ ID NO: 2286
uauaaauggcucuaguuag

SEQ ID NO: 177331 - RNA, 19 nt, Artificial Sequence
  Description of Artificial Sequence: Synthetic oligonucleotide
  Antisense strand to SEQ ID NO: 177330
cuaacuagagccauuuaua

SEQ ID NO: 177332 - RNA, 19 nt, Artificial Sequence
  Description of Artificial Sequence: Synthetic oligonucleotide
  Sense strand starting at position 2998 of SEQ ID NO: 2286
ggcucuaguuagucauuua

SEQ ID NO: 177333 - RNA, 19 nt, Artificial Sequence
  Description of Artificial Sequence: Synthetic oligonucleotide
  Antisense strand to SEQ ID NO: 177332
uaaaugacuaacuagagcc

SEQ ID NO: 177334 - RNA, 19 nt, Artificial Sequence
  Description of Artificial Sequence: Synthetic oligonucleotide
  Sense strand starting at position 3001 of SEQ ID NO: 2286
ucuaguuagucauuuaugu

SEQ ID NO: 177335 - RNA, 19 nt, Artificial Sequence
  Description of Artificial Sequence: Synthetic oligonucleotide
  Antisense strand to SEQ ID NO: 177334
acauaaaugacuaacuaga

SEQ ID NO: 177336 - RNA, 19 nt, Artificial Sequence
  Description of Artificial Sequence: Synthetic oligonucleotide
  Sense strand starting at position 3096 of SEQ ID NO: 2286
gcuggaguccacuauugag

SEQ ID NO: 177337 - RNA, 19 nt, Artificial Sequence
  Description of Artificial Sequence: Synthetic oligonucleotide
  Antisense strand to SEQ ID NO: 177336
cucaauaguggacuccagc

SEQ ID NO: 177338 - RNA, 19 nt, Artificial Sequence
  Description of Artificial Sequence: Synthetic oligonucleotide
  Sense strand starting at position 3120 of SEQ ID NO: 2286
ccagucacuagagguagau

SEQ ID NO: 177339 - RNA, 19 nt, Artificial Sequence
  Description of Artificial Sequence: Synthetic oligonucleotide
  Antisense strand to SEQ ID NO: 177338
aucuaccucuagugacugg

SEQ ID NO: 177340 - RNA, 19 nt, Artificial Sequence
  Description of Artificial Sequence: Synthetic oligonucleotide
  Sense strand starting at position 3189 of SEQ ID NO: 2286
cuccuuucucuggagauua

SEQ ID NO: 177341 - RNA, 19 nt, Artificial Sequence
  Description of Artificial Sequence: Synthetic oligonucleotide
  Antisense strand to SEQ ID NO: 177340
uaaucuccagagaaaggag

SEQ ID NO: 177342 - RNA, 19 nt, Artificial Sequence
  Description of Artificial Sequence: Synthetic oligonucleotide
  Sense strand starting at position 3394 of SEQ ID NO: 2286
gcccucuuagguuaagauu

SEQ ID NO: 177343 - RNA, 19 nt, Artificial Sequence
  Description of Artificial Sequence: Synthetic oligonucleotide
  Antisense strand to SEQ ID NO: 177342
aaucuuaaccuaagagggc

SEQ ID NO: 177344 - RNA, 19 nt, Artificial Sequence
  Description of Artificial Sequence: Synthetic oligonucleotide
  Sense strand starting at position 3548 of SEQ ID NO: 2286
guuugacauuuaguugguu

SEQ ID NO: 177345 - RNA, 19 nt, Artificial Sequence
  Description of Artificial Sequence: Synthetic oligonucleotide
  Antisense strand to SEQ ID NO: 177344
aaccaacuaaaugucaaac

SEQ ID NO: 177346 - RNA, 19 nt, Artificial Sequence
  Description of Artificial Sequence: Synthetic oligonucleotide
  Sense strand starting at position 3560 of SEQ ID NO: 2286
guugguuccuaauuaaaca

SEQ ID NO: 177347 - RNA, 19 nt, Artificial Sequence
  Description of Artificial Sequence: Synthetic oligonucleotide
  Antisense strand to SEQ ID NO: 177346
uguuuaauuaggaaccaac

SEQ ID NO: 177348 - RNA, 19 nt, Artificial Sequence
  Description of Artificial Sequence: Synthetic oligonucleotide
  Sense strand starting at position 3681 of SEQ ID NO: 2286
aaucaugucuagguggaga

SEQ ID NO: 177349 - RNA, 19 nt, Artificial Sequence
  Description of Artificial Sequence: Synthetic oligonucleotide
  Antisense strand to SEQ ID NO: 177348
ucuccaccuagacaugauu

SEQ ID NO: 177350 - RNA, 19 nt, Artificial Sequence
  Description of Artificial Sequence: Synthetic oligonucleotide
  Sense strand starting at position 3697 of SEQ ID NO: 2286
agagccaucuccuugagga

SEQ ID NO: 177351 - RNA, 19 nt, Artificial Sequence
  Description of Artificial Sequence: Synthetic oligonucleotide
  Antisense strand to SEQ ID NO: 177350
uccucaaggagauggcucu

SEQ ID NO: 177352 - RNA, 19 nt, Artificial Sequence
  Description of Artificial Sequence: Synthetic oligonucleotide
  Sense strand starting at position 3698 of SEQ ID NO: 2286
gagccaucuccuugaggaa

SEQ ID NO: 177353 - RNA, 19 nt, Artificial Sequence
  Description of Artificial Sequence: Synthetic oligonucleotide
  Antisense strand to SEQ ID NO: 177352
uuccucaaggagauggcuc

SEQ ID NO: 177354 - RNA, 19 nt, Artificial Sequence
  Description of Artificial Sequence: Synthetic oligonucleotide
  Sense strand starting at position 130 of SEQ ID NO: 2287
acuguuguucuacagcaga

SEQ ID NO: 177355 - RNA, 19 nt, Artificial Sequence
  Description of Artificial Sequence: Synthetic oligonucleotide
  Antisense strand to SEQ ID NO: 177354
ucugcuguagaacaacagu

SEQ ID NO: 177356 - RNA, 19 nt, Artificial Sequence
  Description of Artificial Sequence: Synthetic oligonucleotide
  Sense strand starting at position 133 of SEQ ID NO: 2287
guuguucuacagcagacaa

SEQ ID NO: 177357 - RNA, 19 nt, Artificial Sequence
  Description of Artificial Sequence: Synthetic oligonucleotide
  Antisense strand to SEQ ID NO: 177356
uugucugcuguagaacaac

SEQ ID NO: 177358 - RNA, 19 nt, Artificial Sequence
  Description of Artificial Sequence: Synthetic oligonucleotide
  Sense strand starting at position 180 of SEQ ID NO: 2287
auguacauacauugugaau

SEQ ID NO: 177359 - RNA, 19 nt, Artificial Sequence
  Description of Artificial Sequence: Synthetic oligonucleotide
  Antisense strand to SEQ ID NO: 177358
auucacaauguauguacau

SEQ ID NO: 177360 - RNA, 19 nt, Artificial Sequence
  Description of Artificial Sequence: Synthetic oligonucleotide
  Sense strand starting at position 248 of SEQ ID NO: 2287
uuagaauugugcuccacau

SEQ ID NO: 177361 - RNA, 19 nt, Artificial Sequence
  Description of Artificial Sequence: Synthetic oligonucleotide
  Antisense strand to SEQ ID NO: 177360
auguggagcacaauucuaa

SEQ ID NO: 177362 - RNA, 19 nt, Artificial Sequence
  Description of Artificial Sequence: Synthetic oligonucleotide
  Sense strand starting at position 250 of SEQ ID NO: 2287
agaauugugcuccacauaa

SEQ ID NO: 177363 - RNA, 19 nt, Artificial Sequence
  Description of Artificial Sequence: Synthetic oligonucleotide
  Antisense strand to SEQ ID NO: 177362
uuauguggagcacaauucu

SEQ ID NO: 177364 - RNA, 19 nt, Artificial Sequence
  Description of Artificial Sequence: Synthetic oligonucleotide
  Sense strand starting at position 459 of SEQ ID NO: 2287
aaguauuuauuacacgaga

SEQ ID NO: 177365 - RNA, 19 nt, Artificial Sequence
  Description of Artificial Sequence: Synthetic oligonucleotide
  Antisense strand to SEQ ID NO: 177364
ucucguguaauaaauacuu

SEQ ID NO: 177366 - RNA, 19 nt, Artificial Sequence
  Description of Artificial Sequence: Synthetic oligonucleotide
  Sense strand starting at position 631 of SEQ ID NO: 2287
guaucaggaacauguaaga

SEQ ID NO: 177367 - RNA, 19 nt, Artificial Sequence
  Description of Artificial Sequence: Synthetic oligonucleotide
  Antisense strand to SEQ ID NO: 177366
ucuuacauguuccugauac

SEQ ID NO: 177368 - RNA, 19 nt, Artificial Sequence
  Description of Artificial Sequence: Synthetic oligonucleotide
  Sense strand starting at position 731 of SEQ ID NO: 2287
ggucaauucugcuugacag

SEQ ID NO: 177369 - RNA, 19 nt, Artificial Sequence
  Description of Artificial Sequence: Synthetic oligonucleotide
  Antisense strand to SEQ ID NO: 177368
cugucaagcagaauugacc

SEQ ID NO: 177370 - RNA, 19 nt, Artificial Sequence
  Description of Artificial Sequence: Synthetic oligonucleotide
  Sense strand starting at position 733 of SEQ ID NO: 2287
ucaauucugcuugacaguu

SEQ ID NO: 177371 - RNA, 19 nt, Artificial Sequence
  Description of Artificial Sequence: Synthetic oligonucleotide
  Antisense strand to SEQ ID NO: 177370
aacugucaagcagaauuga

SEQ ID NO: 177372 - RNA, 19 nt, Artificial Sequence
  Description of Artificial Sequence: Synthetic oligonucleotide
  Sense strand starting at position 791 of SEQ ID NO: 2287
ucaacuuagcaagaacagu

SEQ ID NO: 177373 - RNA, 19 nt, Artificial Sequence
  Description of Artificial Sequence: Synthetic oligonucleotide
  Antisense strand to SEQ ID NO: 177372
acuguucuugcuaaguuga

SEQ ID NO: 177374 - RNA, 19 nt, Artificial Sequence
  Description of Artificial Sequence: Synthetic oligonucleotide
  Sense strand starting at position 872 of SEQ ID NO: 2287
ugguaaugacuauauucuu

SEQ ID NO: 177375 - RNA, 19 nt, Artificial Sequence
  Description of Artificial Sequence: Synthetic oligonucleotide
  Antisense strand to SEQ ID NO: 177374
aagaauauagucauuacca

SEQ ID NO: 177376 - RNA, 19 nt, Artificial Sequence
  Description of Artificial Sequence: Synthetic oligonucleotide
  Sense strand starting at position 916 of SEQ ID NO: 2287
ccauuauugucaguaacuu

SEQ ID NO: 177377 - RNA, 19 nt, Artificial Sequence
  Description of Artificial Sequence: Synthetic oligonucleotide
  Antisense strand to SEQ ID NO: 177376
aaguuacugacaauaaugg

SEQ ID NO: 177378 - RNA, 19 nt, Artificial Sequence
  Description of Artificial Sequence: Synthetic oligonucleotide
  Sense strand starting at position 946 of SEQ ID NO: 2287
ggccuacuuuagguaauua

SEQ ID NO: 177379 - RNA, 19 nt, Artificial Sequence
  Description of Artificial Sequence: Synthetic oligonucleotide
  Antisense strand to SEQ ID NO: 177378
uaauuaccuaaaguaggcc

SEQ ID NO: 177380 - RNA, 19 nt, Artificial Sequence
  Description of Artificial Sequence: Synthetic oligonucleotide
  Sense strand starting at position 1048 of SEQ ID NO: 2287
uguguuuccagcgcucuua

SEQ ID NO: 177381 - RNA, 19 nt, Artificial Sequence
  Description of Artificial Sequence: Synthetic oligonucleotide
  Antisense strand to SEQ ID NO: 177380
uaagagcgcuggaaacaca

SEQ ID NO: 177382 - RNA, 19 nt, Artificial Sequence
  Description of Artificial Sequence: Synthetic oligonucleotide
  Sense strand starting at position 1049 of SEQ ID NO: 2287
guguuuccagcgcucuuau

SEQ ID NO: 177383 - RNA, 19 nt, Artificial Sequence
  Description of Artificial Sequence: Synthetic oligonucleotide
  Antisense strand to SEQ ID NO: 177382
auaagagcgcuggaaacac

SEQ ID NO: 177384 - RNA, 19 nt, Artificial Sequence
  Description of Artificial Sequence: Synthetic oligonucleotide
  Sense strand starting at position 1091 of SEQ ID NO: 2287
acaucugauucguucugga

SEQ ID NO: 177385 - RNA, 19 nt, Artificial Sequence
  Description of Artificial Sequence: Synthetic oligonucleotide
  Antisense strand to SEQ ID NO: 177384
uccagaacgaaucagaugu

SEQ ID NO: 177386 - RNA, 19 nt, Artificial Sequence
  Description of Artificial Sequence: Synthetic oligonucleotide
  Sense strand starting at position 1233 of SEQ ID NO: 2287
aagguacucuaggcuuaga

SEQ ID NO: 177387 - RNA, 19 nt, Artificial Sequence
  Description of Artificial Sequence: Synthetic oligonucleotide
  Antisense strand to SEQ ID NO: 177386
ucuaagccuagaguaccuu

SEQ ID NO: 177388 - RNA, 19 nt, Artificial Sequence
  Description of Artificial Sequence: Synthetic oligonucleotide
  Sense strand starting at position 1251 of SEQ ID NO: 2287
agagauggguucgcagacu

SEQ ID NO: 177389 - RNA, 19 nt, Artificial Sequence
  Description of Artificial Sequence: Synthetic oligonucleotide
  Antisense strand to SEQ ID NO: 177388
agucugcgaacccaucucu

SEQ ID NO: 177390 - RNA, 19 nt, Artificial Sequence
  Description of Artificial Sequence: Synthetic oligonucleotide
  Sense strand starting at position 1604 of SEQ ID NO: 2287
auugcugaucagcaaggaa

SEQ ID NO: 177391 - RNA, 19 nt, Artificial Sequence
  Description of Artificial Sequence: Synthetic oligonucleotide
  Antisense strand to SEQ ID NO: 177390
uuccuugcugaucagcaau

SEQ ID NO: 177392 - RNA, 19 nt, Artificial Sequence
  Description of Artificial Sequence: Synthetic oligonucleotide
  Sense strand starting at position 1629 of SEQ ID NO: 2287
aaguuuguucuggacagac

SEQ ID NO: 177393 - RNA, 19 nt, Artificial Sequence
  Description of Artificial Sequence: Synthetic oligonucleotide
  Antisense strand to SEQ ID NO: 177392
gucuguccagaacaaacuu

SEQ ID NO: 177394 - RNA, 19 nt, Artificial Sequence
  Description of Artificial Sequence: Synthetic oligonucleotide
  Sense strand starting at position 1631 of SEQ ID NO: 2287
guuuguucuggacagacuu

SEQ ID NO: 177395 - RNA, 19 nt, Artificial Sequence
  Description of Artificial Sequence: Synthetic oligonucleotide
  Antisense strand to SEQ ID NO: 177394
aagucuguccagaacaaac

SEQ ID NO: 177396 - RNA, 19 nt, Artificial Sequence
  Description of Artificial Sequence: Synthetic oligonucleotide
  Sense strand starting at position 2039 of SEQ ID NO: 2287
cuuguagggcucugggaaa

SEQ ID NO: 177397 - RNA, 19 nt, Artificial Sequence
  Description of Artificial Sequence: Synthetic oligonucleotide
  Antisense strand to SEQ ID NO: 177396
uuucccagagcccuacaag

SEQ ID NO: 177398 - RNA, 19 nt, Artificial Sequence
  Description of Artificial Sequence: Synthetic oligonucleotide
  Sense strand starting at position 2820 of SEQ ID NO: 2287
ggagguggcacugagugau

SEQ ID NO: 177399 - RNA, 19 nt, Artificial Sequence
  Description of Artificial Sequence: Synthetic oligonucleotide
  Antisense strand to SEQ ID NO: 177398
aucacucagugccaccucc

SEQ ID NO: 177400 - RNA, 19 nt, Artificial Sequence
  Description of Artificial Sequence: Synthetic oligonucleotide
  Sense strand starting at position 2823 of SEQ ID NO: 2287
gguggcacugagugauuca

SEQ ID NO: 177401 - RNA, 19 nt, Artificial Sequence
  Description of Artificial Sequence: Synthetic oligonucleotide
  Antisense strand to SEQ ID NO: 177400
ugaaucacucagugccacc

SEQ ID NO: 177402 - RNA, 19 nt, Artificial Sequence
  Description of Artificial Sequence: Synthetic oligonucleotide
  Sense strand starting at position 2826 of SEQ ID NO: 2287
ggcacugagugauucagua

SEQ ID NO: 177403 - RNA, 19 nt, Artificial Sequence
  Description of Artificial Sequence: Synthetic oligonucleotide
  Antisense strand to SEQ ID NO: 177402
uacugaaucacucagugcc

SEQ ID NO: 177404 - RNA, 19 nt, Artificial Sequence
  Description of Artificial Sequence: Synthetic oligonucleotide
  Sense strand starting at position 2862 of SEQ ID NO: 2287
ccggguuaauucuucagga

SEQ ID NO: 177405 - RNA, 19 nt, Artificial Sequence
  Description of Artificial Sequence: Synthetic oligonucleotide
  Antisense strand to SEQ ID NO: 177404
uccugaagaauuaacccgg

SEQ ID NO: 177406 - RNA, 19 nt, Artificial Sequence
  Description of Artificial Sequence: Synthetic oligonucleotide
  Sense strand starting at position 2863 of SEQ ID NO: 2287
cggguuaauucuucaggag

SEQ ID NO: 177407 - RNA, 19 nt, Artificial Sequence
  Description of Artificial Sequence: Synthetic oligonucleotide
  Antisense strand to SEQ ID NO: 177406
cuccugaagaauuaacccg

SEQ ID NO: 177408 - RNA, 19 nt, Artificial Sequence
  Description of Artificial Sequence: Synthetic oligonucleotide
  Sense strand starting at position 2939 of SEQ ID NO: 2287
ugcagaaacgguuaccuaa

SEQ ID NO: 177409 - RNA, 19 nt, Artificial Sequence
  Description of Artificial Sequence: Synthetic oligonucleotide
  Antisense strand to SEQ ID NO: 177408
uuagguaaccguuucugca

SEQ ID NO: 177410 - RNA, 19 nt, Artificial Sequence
  Description of Artificial Sequence: Synthetic oligonucleotide
  Sense strand starting at position 3032 of SEQ ID NO: 2287
gaacuuguaugguuccaga

SEQ ID NO: 177411 - RNA, 19 nt, Artificial Sequence
  Description of Artificial Sequence: Synthetic oligonucleotide
  Antisense strand to SEQ ID NO: 177410
ucuggaaccauacaaguuc

SEQ ID NO: 177412 - RNA, 19 nt, Artificial Sequence
  Description of Artificial Sequence: Synthetic oligonucleotide
  Sense strand starting at position 3069 of SEQ ID NO: 2287
aaagcucaauccguagauu

SEQ ID NO: 177413 - RNA, 19 nt, Artificial Sequence
  Description of Artificial Sequence: Synthetic oligonucleotide
  Antisense strand to SEQ ID NO: 177412
aaucuacggauugagcuuu

SEQ ID NO: 177414 - RNA, 19 nt, Artificial Sequence
  Description of Artificial Sequence: Synthetic oligonucleotide
  Sense strand starting at position 3183 of SEQ ID NO: 2287
ccuucugugaauuggugau

SEQ ID NO: 177415 - RNA, 19 nt, Artificial Sequence
  Description of Artificial Sequence: Synthetic oligonucleotide
  Antisense strand to SEQ ID NO: 177414
aucaccaauucacagaagg

SEQ ID NO: 177416 - RNA, 19 nt, Artificial Sequence
  Description of Artificial Sequence: Synthetic oligonucleotide
  Sense strand starting at position 3257 of SEQ ID NO: 2287
ugugaagccgucuaagaaa

SEQ ID NO: 177417 - RNA, 19 nt, Artificial Sequence
  Description of Artificial Sequence: Synthetic oligonucleotide
  Antisense strand to SEQ ID NO: 177416
uuucuuagacggcuucaca

SEQ ID NO: 177418 - RNA, 19 nt, Artificial Sequence
  Description of Artificial Sequence: Synthetic oligonucleotide
  Sense strand starting at position 3419 of SEQ ID NO: 2287
guccuaagcccacaguauu

SEQ ID NO: 177419 - RNA, 19 nt, Artificial Sequence
  Description of Artificial Sequence: Synthetic oligonucleotide
  Antisense strand to SEQ ID NO: 177418
aauacugugggcuuaggac

SEQ ID NO: 177420 - RNA, 19 nt, Artificial Sequence
  Description of Artificial Sequence: Synthetic oligonucleotide
  Sense strand starting at position 3439 of SEQ ID NO: 2287
ucauacuguugaucuguca

SEQ ID NO: 177421 - RNA, 19 nt, Artificial Sequence
  Description of Artificial Sequence: Synthetic oligonucleotide
  Antisense strand to SEQ ID NO: 177420
ugacagaucaacaguauga

SEQ ID NO: 177422 - RNA, 19 nt, Artificial Sequence
  Description of Artificial Sequence: Synthetic oligonucleotide
  Sense strand starting at position 3611 of SEQ ID NO: 2287
aaaggcuuuggcugauaua

SEQ ID NO: 177423 - RNA, 19 nt, Artificial Sequence
  Description of Artificial Sequence: Synthetic oligonucleotide
  Antisense strand to SEQ ID NO: 177422
uauaucagccaaagccuuu

SEQ ID NO: 177424 - RNA, 19 nt, Artificial Sequence
  Description of Artificial Sequence: Synthetic oligonucleotide
  Sense strand starting at position 3612 of SEQ ID NO: 2287
aaggcuuuggcugauauac

SEQ ID NO: 177425 - RNA, 19 nt, Artificial Sequence
  Description of Artificial Sequence: Synthetic oligonucleotide
  Antisense strand to SEQ ID NO: 177424
guauaucagccaaagccuu

SEQ ID NO: 177426 - RNA, 19 nt, Artificial Sequence
  Description of Artificial Sequence: Synthetic oligonucleotide
  Sense strand starting at position 3749 of SEQ ID NO: 2287
gcuccaguuccuuauauua

SEQ ID NO: 177427 - RNA, 19 nt, Artificial Sequence
  Description of Artificial Sequence: Synthetic oligonucleotide
  Antisense strand to SEQ ID NO: 177426
uaauauaaggaacuggagc

SEQ ID NO: 177428 - RNA, 19 nt, Artificial Sequence
  Description of Artificial Sequence: Synthetic oligonucleotide
  Sense strand starting at position 3763 of SEQ ID NO: 2287
uauuaaaugguguagcauu

SEQ ID NO: 177429 - RNA, 19 nt, Artificial Sequence
  Description of Artificial Sequence: Synthetic oligonucleotide
  Antisense strand to SEQ ID NO: 177428
aaugcuacaccauuuaaua

SEQ ID NO: 177430 - RNA, 19 nt, Artificial Sequence
  Description of Artificial Sequence: Synthetic oligonucleotide
  Sense strand starting at position 3827 of SEQ ID NO: 2287
auguaaaugcuauaguugu

SEQ ID NO: 177431 - RNA, 19 nt, Artificial Sequence
  Description of Artificial Sequence: Synthetic oligonucleotide
  Antisense strand to SEQ ID NO: 177430
acaacuauagcauuuacau

SEQ ID NO: 177432 - RNA, 19 nt, Artificial Sequence
  Description of Artificial Sequence: Synthetic oligonucleotide
  Sense strand starting at position 3973 of SEQ ID NO: 2287
guggaaagcugacuauaua

SEQ ID NO: 177433 - RNA, 19 nt, Artificial Sequence
  Description of Artificial Sequence: Synthetic oligonucleotide
  Antisense strand to SEQ ID NO: 177432
uauauagucagcuuuccac

SEQ ID NO: 177434 - RNA, 19 nt, Artificial Sequence
  Description of Artificial Sequence: Synthetic oligonucleotide
  Sense strand starting at position 3735 of SEQ ID NO: 2288
gcaagcuguagucagugau

SEQ ID NO: 177435 - RNA, 19 nt, Artificial Sequence
  Description of Artificial Sequence: Synthetic oligonucleotide
  Antisense strand to SEQ ID NO: 177434
aucacugacuacagcuugc

SEQ ID NO: 177436 - RNA, 19 nt, Artificial Sequence
  Description of Artificial Sequence: Synthetic oligonucleotide
  Sense strand starting at position 3706 of SEQ ID NO: 2288
ggauguagaugagaaauac

SEQ ID NO: 177437 - RNA, 19 nt, Artificial Sequence
  Description of Artificial Sequence: Synthetic oligonucleotide
  Antisense strand to SEQ ID NO: 177436
guauuucucaucuacaucc

SEQ ID NO: 177438 - RNA, 19 nt, Artificial Sequence
  Description of Artificial Sequence: Synthetic oligonucleotide
  Sense strand starting at position 3618 of SEQ ID NO: 2288
guuagaaauggccgcggau

SEQ ID NO: 177439 - RNA, 19 nt, Artificial Sequence
  Description of Artificial Sequence: Synthetic oligonucleotide
  Antisense strand to SEQ ID NO: 177438
auccgcggccauuucuaac

SEQ ID NO: 177440 - RNA, 19 nt, Artificial Sequence
  Description of Artificial Sequence: Synthetic oligonucleotide
  Sense strand starting at position 3591 of SEQ ID NO: 2288
gaccuugagguccaaguau

SEQ ID NO: 177441 - RNA, 19 nt, Artificial Sequence
  Description of Artificial Sequence: Synthetic oligonucleotide
  Antisense strand to SEQ ID NO: 177440
auacuuggaccucaagguc

SEQ ID NO: 177442 - RNA, 19 nt, Artificial Sequence
  Description of Artificial Sequence: Synthetic oligonucleotide
  Sense strand starting at position 3470 of SEQ ID NO: 2288
aagcacaggcgugagaaau

SEQ ID NO: 177443 - RNA, 19 nt, Artificial Sequence
  Description of Artificial Sequence: Synthetic oligonucleotide
  Antisense strand to SEQ ID NO: 177442
auuucucacgccugugcuu

SEQ ID NO: 177444 - RNA, 19 nt, Artificial Sequence
  Description of Artificial Sequence: Synthetic oligonucleotide
  Sense strand starting at position 3411 of SEQ ID NO: 2288
ggaccaauguggucuuugu

SEQ ID NO: 177445 - RNA, 19 nt, Artificial Sequence
  Description of Artificial Sequence: Synthetic oligonucleotide
  Antisense strand to SEQ ID NO: 177444
acaaagaccacauuggucc

SEQ ID NO: 177446 - RNA, 19 nt, Artificial Sequence
  Description of Artificial Sequence: Synthetic oligonucleotide
  Sense strand starting at position 3200 of SEQ ID NO: 2288
aguguugcccaagaauggu

SEQ ID NO: 177447 - RNA, 19 nt, Artificial Sequence
  Description of Artificial Sequence: Synthetic oligonucleotide
  Antisense strand to SEQ ID NO: 177446
accauucuugggcaacacu

SEQ ID NO: 177448 - RNA, 19 nt, Artificial Sequence
  Description of Artificial Sequence: Synthetic oligonucleotide
  Sense strand starting at position 3197 of SEQ ID NO: 2288
gggaguguugcccaagaau

SEQ ID NO: 177449 - RNA, 19 nt, Artificial Sequence
  Description of Artificial Sequence: Synthetic oligonucleotide
  Antisense strand to SEQ ID NO: 177448
auucuugggcaacacuccc

SEQ ID NO: 177450 - RNA, 19 nt, Artificial Sequence
  Description of Artificial Sequence: Synthetic oligonucleotide
  Sense strand starting at position 3195 of SEQ ID NO: 2288
gagggaguguugcccaaga

SEQ ID NO: 177451 - RNA, 19 nt, Artificial Sequence
  Description of Artificial Sequence: Synthetic oligonucleotide
  Antisense strand to SEQ ID NO: 177450
ucuugggcaacacucccuc

SEQ ID NO: 177452 - RNA, 19 nt, Artificial Sequence
  Description of Artificial Sequence: Synthetic oligonucleotide
  Sense strand starting at position 3145 of SEQ ID NO: 2288
cuggguagcgguggucaaa

SEQ ID NO: 177453 - RNA, 19 nt, Artificial Sequence
  Description of Artificial Sequence: Synthetic oligonucleotide
  Antisense strand to SEQ ID NO: 177452
uuugaccaccgcuacccag

SEQ ID NO: 177454 - RNA, 19 nt, Artificial Sequence
  Description of Artificial Sequence: Synthetic oligonucleotide
  Sense strand starting at position 3133 of SEQ ID NO: 2288
uggaggaguuugcugggua

SEQ ID NO: 177455 - RNA, 19 nt, Artificial Sequence
  Description of Artificial Sequence: Synthetic oligonucleotide
  Antisense strand to SEQ ID NO: 177454
uacccagcaaacuccucca

SEQ ID NO: 177456 - RNA, 19 nt, Artificial Sequence
  Description of Artificial Sequence: Synthetic oligonucleotide
  Sense strand starting at position 3125 of SEQ ID NO: 2288
ggucuagauggaggaguuu

SEQ ID NO: 177457 - RNA, 19 nt, Artificial Sequence
  Description of Artificial Sequence: Synthetic oligonucleotide
  Antisense strand to SEQ ID NO: 177456
aaacuccuccaucuagacc

SEQ ID NO: 177458 - RNA, 19 nt, Artificial Sequence
  Description of Artificial Sequence: Synthetic oligonucleotide
  Sense strand starting at position 3124 of SEQ ID NO: 2288
uggucuagauggaggaguu

SEQ ID NO: 177459 - RNA, 19 nt, Artificial Sequence
  Description of Artificial Sequence: Synthetic oligonucleotide
  Antisense strand to SEQ ID NO: 177458
aacuccuccaucuagacca

SEQ ID NO: 177460 - RNA, 19 nt, Artificial Sequence
  Description of Artificial Sequence: Synthetic oligonucleotide
  Sense strand starting at position 3115 of SEQ ID NO: 2288
aaugcuggcuggucuagau

SEQ ID NO: 177461 - RNA, 19 nt, Artificial Sequence
  Description of Artificial Sequence: Synthetic oligonucleotide
  Antisense strand to SEQ ID NO: 177460
aucuagaccagccagcauu

SEQ ID NO: 177462 - RNA, 19 nt, Artificial Sequence
  Description of Artificial Sequence: Synthetic oligonucleotide
  Sense strand starting at position 2983 of SEQ ID NO: 2288
uagaaucgccgggaugaga

SEQ ID NO: 177463 - RNA, 19 nt, Artificial Sequence
  Description of Artificial Sequence: Synthetic oligonucleotide
  Antisense strand to SEQ ID NO: 177462
ucucaucccggcgauucua

SEQ ID NO: 177464 - RNA, 19 nt, Artificial Sequence
  Description of Artificial Sequence: Synthetic oligonucleotide
  Sense strand starting at position 2981 of SEQ ID NO: 2288
uuuagaaucgccgggauga

SEQ ID NO: 177465 - RNA, 19 nt, Artificial Sequence
  Description of Artificial Sequence: Synthetic oligonucleotide
  Antisense strand to SEQ ID NO: 177464
ucaucccggcgauucuaaa

SEQ ID NO: 177466 - RNA, 19 nt, Artificial Sequence
  Description of Artificial Sequence: Synthetic oligonucleotide
  Sense strand starting at position 2979 of SEQ ID NO: 2288
gguuuagaaucgccgggau

SEQ ID NO: 177467 - RNA, 19 nt, Artificial Sequence
  Description of Artificial Sequence: Synthetic oligonucleotide
  Antisense strand to SEQ ID NO: 177466
aucccggcgauucuaaacc

SEQ ID NO: 177468 - RNA, 19 nt, Artificial Sequence
  Description of Artificial Sequence: Synthetic oligonucleotide
  Sense strand starting at position 2966 of SEQ ID NO: 2288
uguaaagauggacgguuua

SEQ ID NO: 177469 - RNA, 19 nt, Artificial Sequence
  Description of Artificial Sequence: Synthetic oligonucleotide
  Antisense strand to SEQ ID NO: 177468
uaaaccguccaucuuuaca

SEQ ID NO: 177470 - RNA, 19 nt, Artificial Sequence
  Description of Artificial Sequence: Synthetic oligonucleotide
  Sense strand starting at position 2917 of SEQ ID NO: 2288
ggauacaucuguuuacuuc

SEQ ID NO: 177471 - RNA, 19 nt, Artificial Sequence
  Description of Artificial Sequence: Synthetic oligonucleotide
  Antisense strand to SEQ ID NO: 177470
gaaguaaacagauguaucc

SEQ ID NO: 177472 - RNA, 19 nt, Artificial Sequence
  Description of Artificial Sequence: Synthetic oligonucleotide
  Sense strand starting at position 2518 of SEQ ID NO: 2288
cggcuuauucgugacggau

SEQ ID NO: 177473 - RNA, 19 nt, Artificial Sequence
  Description of Artificial Sequence: Synthetic oligonucleotide
  Antisense strand to SEQ ID NO: 177472
auccgucacgaauaagccg

SEQ ID NO: 177474 - RNA, 19 nt, Artificial Sequence
  Description of Artificial Sequence: Synthetic oligonucleotide
  Sense strand starting at position 1320 of SEQ ID NO: 2288
gcugucucgacuuagccaa

SEQ ID NO: 177475 - RNA, 19 nt, Artificial Sequence
  Description of Artificial Sequence: Synthetic oligonucleotide
  Antisense strand to SEQ ID NO: 177474
uuggcuaagucgagacagc

SEQ ID NO: 177476 - RNA, 19 nt, Artificial Sequence
  Description of Artificial Sequence: Synthetic oligonucleotide
  Sense strand starting at position 1100 of SEQ ID NO: 2288
uuacuuguugagcgauuua

SEQ ID NO: 177477 - RNA, 19 nt, Artificial Sequence
  Description of Artificial Sequence: Synthetic oligonucleotide
  Antisense strand to SEQ ID NO: 177476
uaaaucgcucaacaaguaa

SEQ ID NO: 177478 - RNA, 19 nt, Artificial Sequence
  Description of Artificial Sequence: Synthetic oligonucleotide
  Sense strand starting at position 1099 of SEQ ID NO: 2288
cuuacuuguugagcgauuu

SEQ ID NO: 177479 - RNA, 19 nt, Artificial Sequence
  Description of Artificial Sequence: Synthetic oligonucleotide
  Antisense strand to SEQ ID NO: 177478
aaaucgcucaacaaguaag

SEQ ID NO: 177480 - RNA, 19 nt, Artificial Sequence
  Description of Artificial Sequence: Synthetic oligonucleotide
  Sense strand starting at position 1097 of SEQ ID NO: 2288
ggcuuacuuguugagcgau

SEQ ID NO: 177481 - RNA, 19 nt, Artificial Sequence
  Description of Artificial Sequence: Synthetic oligonucleotide
  Antisense strand to SEQ ID NO: 177480
aucgcucaacaaguaagcc

SEQ ID NO: 177482 - RNA, 19 nt, Artificial Sequence
  Description of Artificial Sequence: Synthetic oligonucleotide
  Sense strand starting at position 1063 of SEQ ID NO: 2288
ggugcuuagguccagugau

SEQ ID NO: 177483 - RNA, 19 nt, Artificial Sequence
  Description of Artificial Sequence: Synthetic oligonucleotide
  Antisense strand to SEQ ID NO: 177482
aucacuggaccuaagcacc

SEQ ID NO: 177484 - RNA, 19 nt, Artificial Sequence
  Description of Artificial Sequence: Synthetic oligonucleotide
  Sense strand starting at position 979 of SEQ ID NO: 2288
agccuuugugcuuauaauu

SEQ ID NO: 177485 - RNA, 19 nt, Artificial Sequence
  Description of Artificial Sequence: Synthetic oligonucleotide
  Antisense strand to SEQ ID NO: 177484
aauuauaagcacaaaggcu

SEQ ID NO: 177486 - RNA, 19 nt, Artificial Sequence
  Description of Artificial Sequence: Synthetic oligonucleotide
  Sense strand starting at position 978 of SEQ ID NO: 2288
gagccuuugugcuuauaau

SEQ ID NO: 177487 - RNA, 19 nt, Artificial Sequence
  Description of Artificial Sequence: Synthetic oligonucleotide
  Antisense strand to SEQ ID NO: 177486
auuauaagcacaaaggcuc

SEQ ID NO: 177488 - RNA, 19 nt, Artificial Sequence
  Description of Artificial Sequence: Synthetic oligonucleotide
  Sense strand starting at position 976 of SEQ ID NO: 2288
uggagccuuugugcuuaua

SEQ ID NO: 177489 - RNA, 19 nt, Artificial Sequence
  Description of Artificial Sequence: Synthetic oligonucleotide
  Antisense strand to SEQ ID NO: 177488
uauaagcacaaaggcucca

SEQ ID NO: 177490 - RNA, 19 nt, Artificial Sequence
  Description of Artificial Sequence: Synthetic oligonucleotide
  Sense strand starting at position 951 of SEQ ID NO: 2288
ggaacuucccauugauauu

SEQ ID NO: 177491 - RNA, 19 nt, Artificial Sequence
  Description of Artificial Sequence: Synthetic oligonucleotide
  Antisense strand to SEQ ID NO: 177490
aauaucaaugggaaguucc

SEQ ID NO: 177492 - RNA, 19 nt, Artificial Sequence
  Description of Artificial Sequence: Synthetic oligonucleotide
  Sense strand starting at position 734 of SEQ ID NO: 2288
aagacuugaugugucauau

SEQ ID NO: 177493 - RNA, 19 nt, Artificial Sequence
  Description of Artificial Sequence: Synthetic oligonucleotide
  Antisense strand to SEQ ID NO: 177492
auaugacacaucaagucuu

SEQ ID NO: 177494 - RNA, 19 nt, Artificial Sequence
  Description of Artificial Sequence: Synthetic oligonucleotide
  Sense strand starting at position 638 of SEQ ID NO: 2288
gaaagcuggucauuaaaua

SEQ ID NO: 177495 - RNA, 19 nt, Artificial Sequence
  Description of Artificial Sequence: Synthetic oligonucleotide
  Antisense strand to SEQ ID NO: 177494
uauuuaaugaccagcuuuc

SEQ ID NO: 177496 - RNA, 19 nt, Artificial Sequence
  Description of Artificial Sequence: Synthetic oligonucleotide
  Sense strand starting at position 635 of SEQ ID NO: 2288
ccugaaagcuggucauuaa

SEQ ID NO: 177497 - RNA, 19 nt, Artificial Sequence
  Description of Artificial Sequence: Synthetic oligonucleotide
  Antisense strand to SEQ ID NO: 177496
uuaaugaccagcuuucagg

SEQ ID NO: 177498 - RNA, 19 nt, Artificial Sequence
  Description of Artificial Sequence: Synthetic oligonucleotide
  Sense strand starting at position 565 of SEQ ID NO: 2288
agcuuaacugacuguagua

SEQ ID NO: 177499 - RNA, 19 nt, Artificial Sequence
  Description of Artificial Sequence: Synthetic oligonucleotide
  Antisense strand to SEQ ID NO: 177498
uacuacagucaguuaagcu

SEQ ID NO: 177500 - RNA, 19 nt, Artificial Sequence
  Description of Artificial Sequence: Synthetic oligonucleotide
  Sense strand starting at position 557 of SEQ ID NO: 2288
aguucuacagcuuaacuga

SEQ ID NO: 177501 - RNA, 19 nt, Artificial Sequence
  Description of Artificial Sequence: Synthetic oligonucleotide
  Antisense strand to SEQ ID NO: 177500
ucaguuaagcuguagaacu

SEQ ID NO: 177502 - RNA, 19 nt, Artificial Sequence
  Description of Artificial Sequence: Synthetic oligonucleotide
  Sense strand starting at position 407 of SEQ ID NO: 2288
agggaauaauuauagauag

SEQ ID NO: 177503 - RNA, 19 nt, Artificial Sequence
  Description of Artificial Sequence: Synthetic oligonucleotide
  Antisense strand to SEQ ID NO: 177502
cuaucuauaauuauucccu

SEQ ID NO: 177504 - RNA, 19 nt, Artificial Sequence
  Description of Artificial Sequence: Synthetic oligonucleotide
  Sense strand starting at position 71 of SEQ ID NO: 2288
uuugguaaucuuuacauga

SEQ ID NO: 177505 - RNA, 19 nt, Artificial Sequence
  Description of Artificial Sequence: Synthetic oligonucleotide
  Antisense strand to SEQ ID NO: 177504
ucauguaaagauuaccaaa

SEQ ID NO: 177506 - RNA, 19 nt, Artificial Sequence
  Description of Artificial Sequence: Synthetic oligonucleotide
  Sense strand starting at position 22 of SEQ ID NO: 2288
ggguauaaauaugacaaau

SEQ ID NO: 177507 - RNA, 19 nt, Artificial Sequence
  Description of Artificial Sequence: Synthetic oligonucleotide
  Antisense strand to SEQ ID NO: 177506
auuugucauauuuauaccc

SEQ ID NO: 177508 - RNA, 19 nt, Artificial Sequence
  Description of Artificial Sequence: Synthetic oligonucleotide
  Sense strand starting at position 12 of SEQ ID NO: 2288
uaaauacuguggguauaaa

SEQ ID NO: 177509 - RNA, 19 nt, Artificial Sequence
  Description of Artificial Sequence: Synthetic oligonucleotide
  Antisense strand to SEQ ID NO: 177508
uuuauacccacaguauuua

SEQ ID NO: 177510 - RNA, 19 nt, Artificial Sequence
  Description of Artificial Sequence: Synthetic oligonucleotide
  Sense strand starting at position 11 of SEQ ID NO: 2288
uuaaauacuguggguauaa

SEQ ID NO: 177511 - RNA, 19 nt, Artificial Sequence
  Description of Artificial Sequence: Synthetic oligonucleotide
  Antisense strand to SEQ ID NO: 177510
uuauacccacaguauuuaa

SEQ ID NO: 177512 - RNA, 19 nt, Artificial Sequence
  Description of Artificial Sequence: Synthetic oligonucleotide
  Sense strand starting at position 9 of SEQ ID NO: 2288
cuuuaaauacuguggguau

SEQ ID NO: 177513 - RNA, 19 nt, Artificial Sequence
  Description of Artificial Sequence: Synthetic oligonucleotide
  Antisense strand to SEQ ID NO: 177512
auacccacaguauuuaaag

SEQ ID NO: 177514 - RNA, 19 nt, Artificial Sequence
  Description of Artificial Sequence: Synthetic oligonucleotide
  Sense strand starting at position 11 of SEQ ID NO: 2289
auauuaagcccucagagca

SEQ ID NO: 177515 - RNA, 19 nt, Artificial Sequence
  Description of Artificial Sequence: Synthetic oligonucleotide
  Antisense strand to SEQ ID NO: 177514
ugcucugagggcuuaauau

SEQ ID NO: 177516 - RNA, 19 nt, Artificial Sequence
  Description of Artificial Sequence: Synthetic oligonucleotide
  Sense strand starting at position 60 of SEQ ID NO: 2289
gggaaacucucaugauuag

SEQ ID NO: 177517 - RNA, 19 nt, Artificial Sequence
  Description of Artificial Sequence: Synthetic oligonucleotide
  Antisense strand to SEQ ID NO: 177516
cuaaucaugagaguuuccc

SEQ ID NO: 177518 - RNA, 19 nt, Artificial Sequence
  Description of Artificial Sequence: Synthetic oligonucleotide
  Sense strand starting at position 72 of SEQ ID NO: 2289
ugauuagcguucccuguga

SEQ ID NO: 177519 - RNA, 19 nt, Artificial Sequence
  Description of Artificial Sequence: Synthetic oligonucleotide
  Antisense strand to SEQ ID NO: 177518
ucacagggaacgcuaauca

SEQ ID NO: 177520 - RNA, 19 nt, Artificial Sequence
  Description of Artificial Sequence: Synthetic oligonucleotide
  Sense strand starting at position 444 of SEQ ID NO: 2289
uucagaaucugguuuggga

SEQ ID NO: 177521 - RNA, 19 nt, Artificial Sequence
  Description of Artificial Sequence: Synthetic oligonucleotide
  Antisense strand to SEQ ID NO: 177520
ucccaaaccagauucugaa

SEQ ID NO: 177522 - RNA, 19 nt, Artificial Sequence
  Description of Artificial Sequence: Synthetic oligonucleotide
  Sense strand starting at position 462 of SEQ ID NO: 2289
aggaaaggauuccauuaca

SEQ ID NO: 177523 - RNA, 19 nt, Artificial Sequence
  Description of Artificial Sequence: Synthetic oligonucleotide
  Antisense strand to SEQ ID NO: 177522
uguaauggaauccuuuccu

SEQ ID NO: 177524 - RNA, 19 nt, Artificial Sequence
  Description of Artificial Sequence: Synthetic oligonucleotide
  Sense strand starting at position 497 of SEQ ID NO: 2289
guacauauucuggguacuu

SEQ ID NO: 177525 - RNA, 19 nt, Artificial Sequence
  Description of Artificial Sequence: Synthetic oligonucleotide
  Antisense strand to SEQ ID NO: 177524
aaguacccagaauauguac

SEQ ID NO: 177526 - RNA, 19 nt, Artificial Sequence
  Description of Artificial Sequence: Synthetic oligonucleotide
  Sense strand starting at position 578 of SEQ ID NO: 2289
ugaccuaagcuccgacuua

SEQ ID NO: 177527 - RNA, 19 nt, Artificial Sequence
  Description of Artificial Sequence: Synthetic oligonucleotide
  Antisense strand to SEQ ID NO: 177526
uaagucggagcuuagguca

SEQ ID NO: 177528 - RNA, 19 nt, Artificial Sequence
  Description of Artificial Sequence: Synthetic oligonucleotide
  Sense strand starting at position 849 of SEQ ID NO: 2289
ggagaacaguaccuuacuu

SEQ ID NO: 177529 - RNA, 19 nt, Artificial Sequence
  Description of Artificial Sequence: Synthetic oligonucleotide
  Antisense strand to SEQ ID NO: 177528
aaguaagguacuguucucc

SEQ ID NO: 177530 - RNA, 19 nt, Artificial Sequence
  Description of Artificial Sequence: Synthetic oligonucleotide
  Sense strand starting at position 987 of SEQ ID NO: 2289
cagcgaauuccgggcuaac

SEQ ID NO: 177531 - RNA, 19 nt, Artificial Sequence
  Description of Artificial Sequence: Synthetic oligonucleotide
  Antisense strand to SEQ ID NO: 177530
guuagcccggaauucgcug

SEQ ID NO: 177532 - RNA, 19 nt, Artificial Sequence
  Description of Artificial Sequence: Synthetic oligonucleotide
  Sense strand starting at position 1059 of SEQ ID NO: 2289
gguuacugucaaugcauua

SEQ ID NO: 177533 - RNA, 19 nt, Artificial Sequence
  Description of Artificial Sequence: Synthetic oligonucleotide
  Antisense strand to SEQ ID NO: 177532
uaaugcauugacaguaacc

SEQ ID NO: 177534 - RNA, 19 nt, Artificial Sequence
  Description of Artificial Sequence: Synthetic oligonucleotide
  Sense strand starting at position 1131 of SEQ ID NO: 2289
gaaggaauauuaggagaac

SEQ ID NO: 177535 - RNA, 19 nt, Artificial Sequence
  Description of Artificial Sequence: Synthetic oligonucleotide
  Antisense strand to SEQ ID NO: 177534
guucuccuaauauuccuuc

SEQ ID NO: 177536 - RNA, 19 nt, Artificial Sequence
  Description of Artificial Sequence: Synthetic oligonucleotide
  Sense strand starting at position 1168 of SEQ ID NO: 2289
aagaaauauuaggccagua

SEQ ID NO: 177537 - RNA, 19 nt, Artificial Sequence
  Description of Artificial Sequence: Synthetic oligonucleotide
  Antisense strand to SEQ ID NO: 177536
uacuggccuaauauuucuu

SEQ ID NO: 177538 - RNA, 19 nt, Artificial Sequence
  Description of Artificial Sequence: Synthetic oligonucleotide
  Sense strand starting at position 1307 of SEQ ID NO: 2289
gggagaaaguuugucuuag

SEQ ID NO: 177539 - RNA, 19 nt, Artificial Sequence
  Description of Artificial Sequence: Synthetic oligonucleotide
  Antisense strand to SEQ ID NO: 177538
cuaagacaaacuuucuccc

SEQ ID NO: 177540 - RNA, 19 nt, Artificial Sequence
  Description of Artificial Sequence: Synthetic oligonucleotide
  Sense strand starting at position 1308 of SEQ ID NO: 2289
ggagaaaguuugucuuagg

SEQ ID NO: 177541 - RNA, 19 nt, Artificial Sequence
  Description of Artificial Sequence: Synthetic oligonucleotide
  Antisense strand to SEQ ID NO: 177540
ccuaagacaaacuuucucc

SEQ ID NO: 177542 - RNA, 19 nt, Artificial Sequence
  Description of Artificial Sequence: Synthetic oligonucleotide
  Sense strand starting at position 1309 of SEQ ID NO: 2289
gagaaaguuugucuuaggu

SEQ ID NO: 177543 - RNA, 19 nt, Artificial Sequence
  Description of Artificial Sequence: Synthetic oligonucleotide
  Antisense strand to SEQ ID NO: 177542
accuaagacaaacuuucuc

SEQ ID NO: 177544 - RNA, 19 nt, Artificial Sequence
  Description of Artificial Sequence: Synthetic oligonucleotide
  Sense strand starting at position 1396 of SEQ ID NO: 2289
aggguucgauggaagucaa

SEQ ID NO: 177545 - RNA, 19 nt, Artificial Sequence
  Description of Artificial Sequence: Synthetic oligonucleotide
  Antisense strand to SEQ ID NO: 177544
uugacuuccaucgaacccu

SEQ ID NO: 177546 - RNA, 19 nt, Artificial Sequence
  Description of Artificial Sequence: Synthetic oligonucleotide
  Sense strand starting at position 1977 of SEQ ID NO: 2289
cggaguuuccucuggagca

SEQ ID NO: 177547 - RNA, 19 nt, Artificial Sequence
  Description of Artificial Sequence: Synthetic oligonucleotide
  Antisense strand to SEQ ID NO: 177546
ugcuccagaggaaacuccg

SEQ ID NO: 177548 - RNA, 19 nt, Artificial Sequence
  Description of Artificial Sequence: Synthetic oligonucleotide
  Sense strand starting at position 3124 of SEQ ID NO: 2289
cugggaugcgcuugguaga

SEQ ID NO: 177549 - RNA, 19 nt, Artificial Sequence
  Description of Artificial Sequence: Synthetic oligonucleotide
  Antisense strand to SEQ ID NO: 177548
ucuaccaagcgcaucccag

SEQ ID NO: 177550 - RNA, 19 nt, Artificial Sequence
  Description of Artificial Sequence: Synthetic oligonucleotide
  Sense strand starting at position 3125 of SEQ ID NO: 2289
ugggaugcgcuugguagau

SEQ ID NO: 177551 - RNA, 19 nt, Artificial Sequence
  Description of Artificial Sequence: Synthetic oligonucleotide
  Antisense strand to SEQ ID NO: 177550
aucuaccaagcgcauccca

SEQ ID NO: 177552 - RNA, 19 nt, Artificial Sequence
  Description of Artificial Sequence: Synthetic oligonucleotide
  Sense strand starting at position 3134 of SEQ ID NO: 2289
cuugguagaugcucugcaa

SEQ ID NO: 177553 - RNA, 19 nt, Artificial Sequence
  Description of Artificial Sequence: Synthetic oligonucleotide
  Antisense strand to SEQ ID NO: 177552
uugcagagcaucuaccaag

SEQ ID NO: 177554 - RNA, 19 nt, Artificial Sequence
  Description of Artificial Sequence: Synthetic oligonucleotide
  Sense strand starting at position 3137 of SEQ ID NO: 2289
gguagaugcucugcaaaca

SEQ ID NO: 177555 - RNA, 19 nt, Artificial Sequence
  Description of Artificial Sequence: Synthetic oligonucleotide
  Antisense strand to SEQ ID NO: 177554
uguuugcagagcaucuacc

SEQ ID NO: 177556 - RNA, 19 nt, Artificial Sequence
  Description of Artificial Sequence: Synthetic oligonucleotide
  Sense strand starting at position 3246 of SEQ ID NO: 2289
gcaggaucccugugucugu

SEQ ID NO: 177557 - RNA, 19 nt, Artificial Sequence
  Description of Artificial Sequence: Synthetic oligonucleotide
  Antisense strand to SEQ ID NO: 177556
acagacacagggauccugc

SEQ ID NO: 177558 - RNA, 19 nt, Artificial Sequence
  Description of Artificial Sequence: Synthetic oligonucleotide
  Sense strand starting at position 3256 of SEQ ID NO: 2289
ugugucugucucuggaaga

SEQ ID NO: 177559 - RNA, 19 nt, Artificial Sequence
  Description of Artificial Sequence: Synthetic oligonucleotide
  Antisense strand to SEQ ID NO: 177558
ucuuccagagacagacaca

SEQ ID NO: 177560 - RNA, 19 nt, Artificial Sequence
  Description of Artificial Sequence: Synthetic oligonucleotide
  Sense strand starting at position 3267 of SEQ ID NO: 2289
cuggaagagugagaauuga

SEQ ID NO: 177561 - RNA, 19 nt, Artificial Sequence
  Description of Artificial Sequence: Synthetic oligonucleotide
  Antisense strand to SEQ ID NO: 177560
ucaauucucacucuuccag

SEQ ID NO: 177562 - RNA, 19 nt, Artificial Sequence
  Description of Artificial Sequence: Synthetic oligonucleotide
  Sense strand starting at position 3277 of SEQ ID NO: 2289
gagaauugauaucccaguu

SEQ ID NO: 177563 - RNA, 19 nt, Artificial Sequence
  Description of Artificial Sequence: Synthetic oligonucleotide
  Antisense strand to SEQ ID NO: 177562
aacugggauaucaauucuc

SEQ ID NO: 177564 - RNA, 19 nt, Artificial Sequence
  Description of Artificial Sequence: Synthetic oligonucleotide
  Sense strand starting at position 3397 of SEQ ID NO: 2289
agccguuuccagcaaauga

SEQ ID NO: 177565 - RNA, 19 nt, Artificial Sequence
  Description of Artificial Sequence: Synthetic oligonucleotide
  Antisense strand to SEQ ID NO: 177564
ucauuugcuggaaacggcu

SEQ ID NO: 177566 - RNA, 19 nt, Artificial Sequence
  Description of Artificial Sequence: Synthetic oligonucleotide
  Sense strand starting at position 3438 of SEQ ID NO: 2289
cugcuugguucuguuaaag

SEQ ID NO: 177567 - RNA, 19 nt, Artificial Sequence
  Description of Artificial Sequence: Synthetic oligonucleotide
  Antisense strand to SEQ ID NO: 177566
cuuuaacagaaccaagcag

SEQ ID NO: 177568 - RNA, 19 nt, Artificial Sequence
  Description of Artificial Sequence: Synthetic oligonucleotide
  Sense strand starting at position 3457 of SEQ ID NO: 2289
gagaguuugucgucucuuc

SEQ ID NO: 177569 - RNA, 19 nt, Artificial Sequence
  Description of Artificial Sequence: Synthetic oligonucleotide
  Antisense strand to SEQ ID NO: 177568
gaagagacgacaaacucuc

SEQ ID NO: 177570 - RNA, 19 nt, Artificial Sequence
  Description of Artificial Sequence: Synthetic oligonucleotide
  Sense strand starting at position 3461 of SEQ ID NO: 2289
guuugucgucucuuccuau

SEQ ID NO: 177571 - RNA, 19 nt, Artificial Sequence
  Description of Artificial Sequence: Synthetic oligonucleotide
  Antisense strand to SEQ ID NO: 177570
auaggaagagacgacaaac

SEQ ID NO: 177572 - RNA, 19 nt, Artificial Sequence
  Description of Artificial Sequence: Synthetic oligonucleotide
  Sense strand starting at position 3468 of SEQ ID NO: 2289
gucucuuccuauccugaca

SEQ ID NO: 177573 - RNA, 19 nt, Artificial Sequence
  Description of Artificial Sequence: Synthetic oligonucleotide
  Antisense strand to SEQ ID NO: 177572
ugucaggauaggaagagac

SEQ ID NO: 177574 - RNA, 19 nt, Artificial Sequence
  Description of Artificial Sequence: Synthetic oligonucleotide
  Sense strand starting at position 3562 of SEQ ID NO: 2289
augcaaagacgccauuaaa

SEQ ID NO: 177575 - RNA, 19 nt, Artificial Sequence
  Description of Artificial Sequence: Synthetic oligonucleotide
  Antisense strand to SEQ ID NO: 177574
uuuaauggcgucuuugcau

SEQ ID NO: 177576 - RNA, 19 nt, Artificial Sequence
  Description of Artificial Sequence: Synthetic oligonucleotide
  Sense strand starting at position 3696 of SEQ ID NO: 2289
auaagucagagguagcuua

SEQ ID NO: 177577 - RNA, 19 nt, Artificial Sequence
  Description of Artificial Sequence: Synthetic oligonucleotide
  Antisense strand to SEQ ID NO: 177576
uaagcuaccucugacuuau

SEQ ID NO: 177578 - RNA, 19 nt, Artificial Sequence
  Description of Artificial Sequence: Synthetic oligonucleotide
  Sense strand starting at position 3871 of SEQ ID NO: 2289
gagucuguccguucuaggu

SEQ ID NO: 177579 - RNA, 19 nt, Artificial Sequence
  Description of Artificial Sequence: Synthetic oligonucleotide
  Antisense strand to SEQ ID NO: 177578
accuagaacggacagacuc

SEQ ID NO: 177580 - RNA, 19 nt, Artificial Sequence
  Description of Artificial Sequence: Synthetic oligonucleotide
  Sense strand starting at position 3898 of SEQ ID NO: 2289
auaggaagucacugcaaga

SEQ ID NO: 177581 - RNA, 19 nt, Artificial Sequence
  Description of Artificial Sequence: Synthetic oligonucleotide
  Antisense strand to SEQ ID NO: 177580
ucuugcagugacuuccuau

SEQ ID NO: 177582 - RNA, 19 nt, Artificial Sequence
  Description of Artificial Sequence: Synthetic oligonucleotide
  Sense strand starting at position 3908 of SEQ ID NO: 2289
acugcaagauuugaaguuu

SEQ ID NO: 177583 - RNA, 19 nt, Artificial Sequence
  Description of Artificial Sequence: Synthetic oligonucleotide
  Antisense strand to SEQ ID NO: 177582
aaacuucaaaucuugcagu

SEQ ID NO: 177584 - RNA, 19 nt, Artificial Sequence
  Description of Artificial Sequence: Synthetic oligonucleotide
  Sense strand starting at position 3920 of SEQ ID NO: 2289
gaaguuuaagguggcuaga

SEQ ID NO: 177585 - RNA, 19 nt, Artificial Sequence
  Description of Artificial Sequence: Synthetic oligonucleotide
  Antisense strand to SEQ ID NO: 177584
ucuagccaccuuaaacuuc

SEQ ID NO: 177586 - RNA, 19 nt, Artificial Sequence
  Description of Artificial Sequence: Synthetic oligonucleotide
  Sense strand starting at position 3922 of SEQ ID NO: 2289
aguuuaagguggcuagagu

SEQ ID NO: 177587 - RNA, 19 nt, Artificial Sequence
  Description of Artificial Sequence: Synthetic oligonucleotide
  Antisense strand to SEQ ID NO: 177586
acucuagccaccuuaaacu

SEQ ID NO: 177588 - RNA, 19 nt, Artificial Sequence
  Description of Artificial Sequence: Synthetic oligonucleotide
  Sense strand starting at position 3923 of SEQ ID NO: 2289
guuuaagguggcuagagua

SEQ ID NO: 177589 - RNA, 19 nt, Artificial Sequence
  Description of Artificial Sequence: Synthetic oligonucleotide
  Antisense strand to SEQ ID NO: 177588
uacucuagccaccuuaaac

SEQ ID NO: 177590 - RNA, 19 nt, Artificial Sequence
  Description of Artificial Sequence: Synthetic oligonucleotide
  Sense strand starting at position 3935 of SEQ ID NO: 2289
uagaguagaucugugcuca

SEQ ID NO: 177591 - RNA, 19 nt, Artificial Sequence
  Description of Artificial Sequence: Synthetic oligonucleotide
  Antisense strand to SEQ ID NO: 177590
ugagcacagaucuacucua

SEQ ID NO: 177592 - RNA, 19 nt, Artificial Sequence
  Description of Artificial Sequence: Synthetic oligonucleotide
  Sense strand starting at position 3936 of SEQ ID NO: 2289
agaguagaucugugcucau

SEQ ID NO: 177593 - RNA, 19 nt, Artificial Sequence
  Description of Artificial Sequence: Synthetic oligonucleotide
  Antisense strand to SEQ ID NO: 177592
augagcacagaucuacucu

SEQ ID NO: 177594 - RNA, 19 nt, Artificial Sequence
  Description of Artificial Sequence: Synthetic oligonucleotide
  Sense strand starting at position 3908 of SEQ ID NO: 2291
agguuuccuuccuuuaaag

SEQ ID NO: 177595 - RNA, 19 nt, Artificial Sequence
  Description of Artificial Sequence: Synthetic oligonucleotide
  Antisense strand to SEQ ID NO: 177594
cuuuaaaggaaggaaaccu

SEQ ID NO: 177596 - RNA, 19 nt, Artificial Sequence
  Description of Artificial Sequence: Synthetic oligonucleotide
  Sense strand starting at position 3755 of SEQ ID NO: 2291
gcacgauuacgcucagcua

SEQ ID NO: 177597 - RNA, 19 nt, Artificial Sequence
  Description of Artificial Sequence: Synthetic oligonucleotide
  Antisense strand to SEQ ID NO: 177596
uagcugagcguaaucgugc

SEQ ID NO: 177598 - RNA, 19 nt, Artificial Sequence
  Description of Artificial Sequence: Synthetic oligonucleotide
  Sense strand starting at position 3396 of SEQ ID NO: 2291
ugagauccuuucuuuggua

SEQ ID NO: 177599 - RNA, 19 nt, Artificial Sequence
  Description of Artificial Sequence: Synthetic oligonucleotide
  Antisense strand to SEQ ID NO: 177598
uaccaaagaaaggaucuca

SEQ ID NO: 177600 - RNA, 19 nt, Artificial Sequence
  Description of Artificial Sequence: Synthetic oligonucleotide
  Sense strand starting at position 3395 of SEQ ID NO: 2291
cugagauccuuucuuuggu

SEQ ID NO: 177601 - RNA, 19 nt, Artificial Sequence
  Description of Artificial Sequence: Synthetic oligonucleotide
  Antisense strand to SEQ ID NO: 177600
accaaagaaaggaucucag

SEQ ID NO: 177602 - RNA, 19 nt, Artificial Sequence
  Description of Artificial Sequence: Synthetic oligonucleotide
  Sense strand starting at position 3296 of SEQ ID NO: 2291
auauauggguuuccuuuaa

SEQ ID NO: 177603 - RNA, 19 nt, Artificial Sequence
  Description of Artificial Sequence: Synthetic oligonucleotide
  Antisense strand to SEQ ID NO: 177602
uuaaaggaaacccauauau

SEQ ID NO: 177604 - RNA, 19 nt, Artificial Sequence
  Description of Artificial Sequence: Synthetic oligonucleotide
  Sense strand starting at position 3165 of SEQ ID NO: 2291
gacauugcuaaguguagga

SEQ ID NO: 177605 - RNA, 19 nt, Artificial Sequence
  Description of Artificial Sequence: Synthetic oligonucleotide
  Antisense strand to SEQ ID NO: 177604
uccuacacuuagcaauguc

SEQ ID NO: 177606 - RNA, 19 nt, Artificial Sequence
  Description of Artificial Sequence: Synthetic oligonucleotide
  Sense strand starting at position 3155 of SEQ ID NO: 2291
ggaugagccagacauugcu

SEQ ID NO: 177607 - RNA, 19 nt, Artificial Sequence
  Description of Artificial Sequence: Synthetic oligonucleotide
  Antisense strand to SEQ ID NO: 177606
agcaaugucuggcucaucc

SEQ ID NO: 177608 - RNA, 19 nt, Artificial Sequence
  Description of Artificial Sequence: Synthetic oligonucleotide
  Sense strand starting at position 3128 of SEQ ID NO: 2291
cucagauaguaauugcaua

SEQ ID NO: 177609 - RNA, 19 nt, Artificial Sequence
  Description of Artificial Sequence: Synthetic oligonucleotide
  Antisense strand to SEQ ID NO: 177608
uaugcaauuacuaucugag

SEQ ID NO: 177610 - RNA, 19 nt, Artificial Sequence
  Description of Artificial Sequence: Synthetic oligonucleotide
  Sense strand starting at position 3064 of SEQ ID NO: 2291
cugcauccaguuggaaauu

SEQ ID NO: 177611 - RNA, 19 nt, Artificial Sequence
  Description of Artificial Sequence: Synthetic oligonucleotide
  Antisense strand to SEQ ID NO: 177610
aauuuccaacuggaugcag

SEQ ID NO: 177612 - RNA, 19 nt, Artificial Sequence
  Description of Artificial Sequence: Synthetic oligonucleotide
  Sense strand starting at position 2995 of SEQ ID NO: 2291
uggucuugaucacucaagu

SEQ ID NO: 177613 - RNA, 19 nt, Artificial Sequence
  Description of Artificial Sequence: Synthetic oligonucleotide
  Antisense strand to SEQ ID NO: 177612
acuugagugaucaagacca

SEQ ID NO: 177614 - RNA, 19 nt, Artificial Sequence
  Description of Artificial Sequence: Synthetic oligonucleotide
  Sense strand starting at position 2993 of SEQ ID NO: 2291
gcuggucuugaucacucaa

SEQ ID NO: 177615 - RNA, 19 nt, Artificial Sequence
  Description of Artificial Sequence: Synthetic oligonucleotide
  Antisense strand to SEQ ID NO: 177614
uugagugaucaagaccagc

SEQ ID NO: 177616 - RNA, 19 nt, Artificial Sequence
  Description of Artificial Sequence: Synthetic oligonucleotide
  Sense strand starting at position 2773 of SEQ ID NO: 2291
guuagauaauccuugaacc

SEQ ID NO: 177617 - RNA, 19 nt, Artificial Sequence
  Description of Artificial Sequence: Synthetic oligonucleotide
  Antisense strand to SEQ ID NO: 177616
gguucaaggauuaucuaac

SEQ ID NO: 177618 - RNA, 19 nt, Artificial Sequence
  Description of Artificial Sequence: Synthetic oligonucleotide
  Sense strand starting at position 2755 of SEQ ID NO: 2291
ggguucuuauugcuacaag

SEQ ID NO: 177619 - RNA, 19 nt, Artificial Sequence
  Description of Artificial Sequence: Synthetic oligonucleotide
  Antisense strand to SEQ ID NO: 177618
cuuguagcaauaagaaccc

SEQ ID NO: 177620 - RNA, 19 nt, Artificial Sequence
  Description of Artificial Sequence: Synthetic oligonucleotide
  Sense strand starting at position 2698 of SEQ ID NO: 2291
gugucuuaccugggauauu

SEQ ID NO: 177621 - RNA, 19 nt, Artificial Sequence
  Description of Artificial Sequence: Synthetic oligonucleotide
  Antisense strand to SEQ ID NO: 177620
aauaucccagguaagacac

SEQ ID NO: 177622 - RNA, 19 nt, Artificial Sequence
  Description of Artificial Sequence: Synthetic oligonucleotide
  Sense strand starting at position 2697 of SEQ ID NO: 2291
ugugucuuaccugggauau

SEQ ID NO: 177623 - RNA, 19 nt, Artificial Sequence
  Description of Artificial Sequence: Synthetic oligonucleotide
  Antisense strand to SEQ ID NO: 177622
auaucccagguaagacaca

SEQ ID NO: 177624 - RNA, 19 nt, Artificial Sequence
  Description of Artificial Sequence: Synthetic oligonucleotide
  Sense strand starting at position 2608 of SEQ ID NO: 2291
ugaaacuccuccuuggaga

SEQ ID NO: 177625 - RNA, 19 nt, Artificial Sequence
  Description of Artificial Sequence: Synthetic oligonucleotide
  Antisense strand to SEQ ID NO: 177624
ucuccaaggaggaguuuca

SEQ ID NO: 177626 - RNA, 19 nt, Artificial Sequence
  Description of Artificial Sequence: Synthetic oligonucleotide
  Sense strand starting at position 2430 of SEQ ID NO: 2291
gggaaacaauagcuguuaa

SEQ ID NO: 177627 - RNA, 19 nt, Artificial Sequence
  Description of Artificial Sequence: Synthetic oligonucleotide
  Antisense strand to SEQ ID NO: 177626
uuaacagcuauuguuuccc

SEQ ID NO: 177628 - RNA, 19 nt, Artificial Sequence
  Description of Artificial Sequence: Synthetic oligonucleotide
  Sense strand starting at position 2384 of SEQ ID NO: 2291
ugaggcuuucauggaagag

SEQ ID NO: 177629 - RNA, 19 nt, Artificial Sequence
  Description of Artificial Sequence: Synthetic oligonucleotide
  Antisense strand to SEQ ID NO: 177628
cucuuccaugaaagccuca

SEQ ID NO: 177630 - RNA, 19 nt, Artificial Sequence
  Description of Artificial Sequence: Synthetic oligonucleotide
  Sense strand starting at position 2254 of SEQ ID NO: 2291
gcaugugaaguuggaaauu

SEQ ID NO: 177631 - RNA, 19 nt, Artificial Sequence
  Description of Artificial Sequence: Synthetic oligonucleotide
  Antisense strand to SEQ ID NO: 177630
aauuuccaacuucacaugc

SEQ ID NO: 177632 - RNA, 19 nt, Artificial Sequence
  Description of Artificial Sequence: Synthetic oligonucleotide
  Sense strand starting at position 2245 of SEQ ID NO: 2291
aaguucucagcaugugaag

SEQ ID NO: 177633 - RNA, 19 nt, Artificial Sequence
  Description of Artificial Sequence: Synthetic oligonucleotide
  Antisense strand to SEQ ID NO: 177632
cuucacaugcugagaacuu

SEQ ID NO: 177634 - RNA, 19 nt, Artificial Sequence
  Description of Artificial Sequence: Synthetic oligonucleotide
  Sense strand starting at position 2243 of SEQ ID NO: 2291
guaaguucucagcauguga

SEQ ID NO: 177635 - RNA, 19 nt, Artificial Sequence
  Description of Artificial Sequence: Synthetic oligonucleotide
  Antisense strand to SEQ ID NO: 177634
ucacaugcugagaacuuac

SEQ ID NO: 177636 - RNA, 19 nt, Artificial Sequence
  Description of Artificial Sequence: Synthetic oligonucleotide
  Sense strand starting at position 2220 of SEQ ID NO: 2291
gggauucuaauagggaguu

SEQ ID NO: 177637 - RNA, 19 nt, Artificial Sequence
  Description of Artificial Sequence: Synthetic oligonucleotide
  Antisense strand to SEQ ID NO: 177636
aacucccuauuagaauccc

SEQ ID NO: 177638 - RNA, 19 nt, Artificial Sequence
  Description of Artificial Sequence: Synthetic oligonucleotide
  Sense strand starting at position 2207 of SEQ ID NO: 2291
ggagcugauccuugggauu

SEQ ID NO: 177639 - RNA, 19 nt, Artificial Sequence
  Description of Artificial Sequence: Synthetic oligonucleotide
  Antisense strand to SEQ ID NO: 177638
aaucccaaggaucagcucc

SEQ ID NO: 177640 - RNA, 19 nt, Artificial Sequence
  Description of Artificial Sequence: Synthetic oligonucleotide
  Sense strand starting at position 2206 of SEQ ID NO: 2291
gggagcugauccuugggau

SEQ ID NO: 177641 - RNA, 19 nt, Artificial Sequence
  Description of Artificial Sequence: Synthetic oligonucleotide
  Antisense strand to SEQ ID NO: 177640
aucccaaggaucagcuccc

SEQ ID NO: 177642 - RNA, 19 nt, Artificial Sequence
  Description of Artificial Sequence: Synthetic oligonucleotide
  Sense strand starting at position 2179 of SEQ ID NO: 2291
gagacauccggaggugaag

SEQ ID NO: 177643 - RNA, 19 nt, Artificial Sequence
  Description of Artificial Sequence: Synthetic oligonucleotide
  Antisense strand to SEQ ID NO: 177642
cuucaccuccggaugucuc

SEQ ID NO: 177644 - RNA, 19 nt, Artificial Sequence
  Description of Artificial Sequence: Synthetic oligonucleotide
  Sense strand starting at position 2059 of SEQ ID NO: 2291
uguauugcacaauauugaa

SEQ ID NO: 177645 - RNA, 19 nt, Artificial Sequence
  Description of Artificial Sequence: Synthetic oligonucleotide
  Antisense strand to SEQ ID NO: 177644
uucaauauugugcaauaca

SEQ ID NO: 177646 - RNA, 19 nt, Artificial Sequence
  Description of Artificial Sequence: Synthetic oligonucleotide
  Sense strand starting at position 2005 of SEQ ID NO: 2291
aucuuaauuccaggacgca

SEQ ID NO: 177647 - RNA, 19 nt, Artificial Sequence
  Description of Artificial Sequence: Synthetic oligonucleotide
  Antisense strand to SEQ ID NO: 177646
ugcguccuggaauuaagau

SEQ ID NO: 177648 - RNA, 19 nt, Artificial Sequence
  Description of Artificial Sequence: Synthetic oligonucleotide
  Sense strand starting at position 1736 of SEQ ID NO: 2291
cugacauucuaggcaguua

SEQ ID NO: 177649 - RNA, 19 nt, Artificial Sequence
  Description of Artificial Sequence: Synthetic oligonucleotide
  Antisense strand to SEQ ID NO: 177648
uaacugccuagaaugucag

SEQ ID NO: 177650 - RNA, 19 nt, Artificial Sequence
  Description of Artificial Sequence: Synthetic oligonucleotide
  Sense strand starting at position 1549 of SEQ ID NO: 2291
aagucuggagcuugaauga

SEQ ID NO: 177651 - RNA, 19 nt, Artificial Sequence
  Description of Artificial Sequence: Synthetic oligonucleotide
  Antisense strand to SEQ ID NO: 177650
ucauucaagcuccagacuu

SEQ ID NO: 177652 - RNA, 19 nt, Artificial Sequence
  Description of Artificial Sequence: Synthetic oligonucleotide
  Sense strand starting at position 1414 of SEQ ID NO: 2291
auaguauggcuuuaaucca

SEQ ID NO: 177653 - RNA, 19 nt, Artificial Sequence
  Description of Artificial Sequence: Synthetic oligonucleotide
  Antisense strand to SEQ ID NO: 177652
uggauuaaagccauacuau

SEQ ID NO: 177654 - RNA, 19 nt, Artificial Sequence
  Description of Artificial Sequence: Synthetic oligonucleotide
  Sense strand starting at position 1411 of SEQ ID NO: 2291
uccauaguauggcuuuaau

SEQ ID NO: 177655 - RNA, 19 nt, Artificial Sequence
  Description of Artificial Sequence: Synthetic oligonucleotide
  Antisense strand to SEQ ID NO: 177654
auuaaagccauacuaugga

SEQ ID NO: 177656 - RNA, 19 nt, Artificial Sequence
  Description of Artificial Sequence: Synthetic oligonucleotide
  Sense strand starting at position 1343 of SEQ ID NO: 2291
ggccuaaggcaauauucuu

SEQ ID NO: 177657 - RNA, 19 nt, Artificial Sequence
  Description of Artificial Sequence: Synthetic oligonucleotide
  Antisense strand to SEQ ID NO: 177656
aagaauauugccuuaggcc

SEQ ID NO: 177658 - RNA, 19 nt, Artificial Sequence
  Description of Artificial Sequence: Synthetic oligonucleotide
  Sense strand starting at position 1331 of SEQ ID NO: 2291
gggaauauagcaggccuaa

SEQ ID NO: 177659 - RNA, 19 nt, Artificial Sequence
  Description of Artificial Sequence: Synthetic oligonucleotide
  Antisense strand to SEQ ID NO: 177658
uuaggccugcuauauuccc

SEQ ID NO: 177660 - RNA, 19 nt, Artificial Sequence
  Description of Artificial Sequence: Synthetic oligonucleotide
  Sense strand starting at position 1086 of SEQ ID NO: 2291
ggcuuugggaccgauggaa

SEQ ID NO: 177661 - RNA, 19 nt, Artificial Sequence
  Description of Artificial Sequence: Synthetic oligonucleotide
  Antisense strand to SEQ ID NO: 177660
uuccaucggucccaaagcc

SEQ ID NO: 177662 - RNA, 19 nt, Artificial Sequence
  Description of Artificial Sequence: Synthetic oligonucleotide
  Sense strand starting at position 1027 of SEQ ID NO: 2291
uaacgucucaugugaggga

SEQ ID NO: 177663 - RNA, 19 nt, Artificial Sequence
  Description of Artificial Sequence: Synthetic oligonucleotide
  Antisense strand to SEQ ID NO: 177662
ucccucacaugagacguua

SEQ ID NO: 177664 - RNA, 19 nt, Artificial Sequence
  Description of Artificial Sequence: Synthetic oligonucleotide
  Sense strand starting at position 756 of SEQ ID NO: 2291
acauuuccgguuuguaaug

SEQ ID NO: 177665 - RNA, 19 nt, Artificial Sequence
  Description of Artificial Sequence: Synthetic oligonucleotide
  Antisense strand to SEQ ID NO: 177664
cauuacaaaccggaaaugu

SEQ ID NO: 177666 - RNA, 19 nt, Artificial Sequence
  Description of Artificial Sequence: Synthetic oligonucleotide
  Sense strand starting at position 724 of SEQ ID NO: 2291
gccagauggccuggacauu

SEQ ID NO: 177667 - RNA, 19 nt, Artificial Sequence
  Description of Artificial Sequence: Synthetic oligonucleotide
  Antisense strand to SEQ ID NO: 177666
aauguccaggccaucuggc

SEQ ID NO: 177668 - RNA, 19 nt, Artificial Sequence
  Description of Artificial Sequence: Synthetic oligonucleotide
  Sense strand starting at position 667 of SEQ ID NO: 2291
uugugaggucuugaaauuc

SEQ ID NO: 177669 - RNA, 19 nt, Artificial Sequence
  Description of Artificial Sequence: Synthetic oligonucleotide
  Antisense strand to SEQ ID NO: 177668
gaauuucaagaccucacaa

SEQ ID NO: 177670 - RNA, 19 nt, Artificial Sequence
  Description of Artificial Sequence: Synthetic oligonucleotide
  Sense strand starting at position 577 of SEQ ID NO: 2291
caucaaugagagcaaguuu

SEQ ID NO: 177671 - RNA, 19 nt, Artificial Sequence
  Description of Artificial Sequence: Synthetic oligonucleotide
  Antisense strand to SEQ ID NO: 177670
aaacuugcucucauugaug

SEQ ID NO: 177672 - RNA, 19 nt, Artificial Sequence
  Description of Artificial Sequence: Synthetic oligonucleotide
  Sense strand starting at position 283 of SEQ ID NO: 2291
gggagcuucccagaaaguc

SEQ ID NO: 177673 - RNA, 19 nt, Artificial Sequence
  Description of Artificial Sequence: Synthetic oligonucleotide
  Antisense strand to SEQ ID NO: 177672
gacuuucugggaagcuccc

SEQ ID NO: 177674 - RNA, 19 nt, Artificial Sequence
  Description of Artificial Sequence: Synthetic oligonucleotide
  Sense strand starting at position 3961 of SEQ ID NO: 2290
ucaaaugcccacgagacau

SEQ ID NO: 177675 - RNA, 19 nt, Artificial Sequence
  Description of Artificial Sequence: Synthetic oligonucleotide
  Antisense strand to SEQ ID NO: 177674
augucucgugggcauuuga

SEQ ID NO: 177676 - RNA, 19 nt, Artificial Sequence
  Description of Artificial Sequence: Synthetic oligonucleotide
  Sense strand starting at position 3927 of SEQ ID NO: 2290
acagaacuuugagaauaga

SEQ ID NO: 177677 - RNA, 19 nt, Artificial Sequence
  Description of Artificial Sequence: Synthetic oligonucleotide
  Antisense strand to SEQ ID NO: 177676
ucuauucucaaaguucugu

SEQ ID NO: 177678 - RNA, 19 nt, Artificial Sequence
  Description of Artificial Sequence: Synthetic oligonucleotide
  Sense strand starting at position 3845 of SEQ ID NO: 2290
uuaacauuguguucugaga

SEQ ID NO: 177679 - RNA, 19 nt, Artificial Sequence
  Description of Artificial Sequence: Synthetic oligonucleotide
  Antisense strand to SEQ ID NO: 177678
ucucagaacacaauguuaa

SEQ ID NO: 177680 - RNA, 19 nt, Artificial Sequence
  Description of Artificial Sequence: Synthetic oligonucleotide
  Sense strand starting at position 3815 of SEQ ID NO: 2290
ccagguuugcuugacagua

SEQ ID NO: 177681 - RNA, 19 nt, Artificial Sequence
  Description of Artificial Sequence: Synthetic oligonucleotide
  Antisense strand to SEQ ID NO: 177680
uacugucaagcaaaccugg

SEQ ID NO: 177682 - RNA, 19 nt, Artificial Sequence
  Description of Artificial Sequence: Synthetic oligonucleotide
  Sense strand starting at position 3804 of SEQ ID NO: 2290
aaguguuggacccagguuu

SEQ ID NO: 177683 - RNA, 19 nt, Artificial Sequence
  Description of Artificial Sequence: Synthetic oligonucleotide
  Antisense strand to SEQ ID NO: 177682
aaaccuggguccaacacuu

SEQ ID NO: 177684 - RNA, 19 nt, Artificial Sequence
  Description of Artificial Sequence: Synthetic oligonucleotide
  Sense strand starting at position 3775 of SEQ ID NO: 2290
ggucaaugauaugcucaag

SEQ ID NO: 177685 - RNA, 19 nt, Artificial Sequence
  Description of Artificial Sequence: Synthetic oligonucleotide
  Antisense strand to SEQ ID NO: 177684
cuugagcauaucauugacc

SEQ ID NO: 177686 - RNA, 19 nt, Artificial Sequence
  Description of Artificial Sequence: Synthetic oligonucleotide
  Sense strand starting at position 3753 of SEQ ID NO: 2290
caugauaacugggauuuag

SEQ ID NO: 177687 - RNA, 19 nt, Artificial Sequence
  Description of Artificial Sequence: Synthetic oligonucleotide
  Antisense strand to SEQ ID NO: 177686
cuaaaucccaguuaucaug

SEQ ID NO: 177688 - RNA, 19 nt, Artificial Sequence
  Description of Artificial Sequence: Synthetic oligonucleotide
  Sense strand starting at position 3738 of SEQ ID NO: 2290
uugggauacuaaucccaug

SEQ ID NO: 177689 - RNA, 19 nt, Artificial Sequence
  Description of Artificial Sequence: Synthetic oligonucleotide
  Antisense strand to SEQ ID NO: 177688
caugggauuaguaucccaa

SEQ ID NO: 177690 - RNA, 19 nt, Artificial Sequence
  Description of Artificial Sequence: Synthetic oligonucleotide
  Sense strand starting at position 3628 of SEQ ID NO: 2290
ggcauuagagcguaaagaa

SEQ ID NO: 177691 - RNA, 19 nt, Artificial Sequence
  Description of Artificial Sequence: Synthetic oligonucleotide
  Antisense strand to SEQ ID NO: 177690
uucuuuacgcucuaaugcc

SEQ ID NO: 177692 - RNA, 19 nt, Artificial Sequence
  Description of Artificial Sequence: Synthetic oligonucleotide
  Sense strand starting at position 3616 of SEQ ID NO: 2290
cugggaguucagggcauua

SEQ ID NO: 177693 - RNA, 19 nt, Artificial Sequence
  Description of Artificial Sequence: Synthetic oligonucleotide
  Antisense strand to SEQ ID NO: 177692
uaaugcccugaacucccag

SEQ ID NO: 177694 - RNA, 19 nt, Artificial Sequence
  Description of Artificial Sequence: Synthetic oligonucleotide
  Sense strand starting at position 3588 of SEQ ID NO: 2290
uuuauuggcauagaagagu

SEQ ID NO: 177695 - RNA, 19 nt, Artificial Sequence
  Description of Artificial Sequence: Synthetic oligonucleotide
  Antisense strand to SEQ ID NO: 177694
acucuucuaugccaauaaa

SEQ ID NO: 177696 - RNA, 19 nt, Artificial Sequence
  Description of Artificial Sequence: Synthetic oligonucleotide
  Sense strand starting at position 3569 of SEQ ID NO: 2290
cacgccuggccagagaauu

SEQ ID NO: 177697 - RNA, 19 nt, Artificial Sequence
  Description of Artificial Sequence: Synthetic oligonucleotide
  Antisense strand to SEQ ID NO: 177696
aauucucuggccaggcgug

SEQ ID NO: 177698 - RNA, 19 nt, Artificial Sequence
  Description of Artificial Sequence: Synthetic oligonucleotide
  Sense strand starting at position 2890 of SEQ ID NO: 2290
acugaagacaaguggcauu

SEQ ID NO: 177699 - RNA, 19 nt, Artificial Sequence
  Description of Artificial Sequence: Synthetic oligonucleotide
  Antisense strand to SEQ ID NO: 177698
aaugccacuugucuucagu

SEQ ID NO: 177700 - RNA, 19 nt, Artificial Sequence
  Description of Artificial Sequence: Synthetic oligonucleotide
  Sense strand starting at position 2866 of SEQ ID NO: 2290
gaggauggauucucaagca

SEQ ID NO: 177701 - RNA, 19 nt, Artificial Sequence
  Description of Artificial Sequence: Synthetic oligonucleotide
  Antisense strand to SEQ ID NO: 177700
ugcuugagaauccauccuc

SEQ ID NO: 177702 - RNA, 19 nt, Artificial Sequence
  Description of Artificial Sequence: Synthetic oligonucleotide
  Sense strand starting at position 2815 of SEQ ID NO: 2290
uuucucuguucuuugagga

SEQ ID NO: 177703 - RNA, 19 nt, Artificial Sequence
  Description of Artificial Sequence: Synthetic oligonucleotide
  Antisense strand to SEQ ID NO: 177702
uccucaaagaacagagaaa

SEQ ID NO: 177704 - RNA, 19 nt, Artificial Sequence
  Description of Artificial Sequence: Synthetic oligonucleotide
  Sense strand starting at position 2767 of SEQ ID NO: 2290
uuuauuaacauguggagag

SEQ ID NO: 177705 - RNA, 19 nt, Artificial Sequence
  Description of Artificial Sequence: Synthetic oligonucleotide
  Antisense strand to SEQ ID NO: 177704
cucuccacauguuaauaaa

SEQ ID NO: 177706 - RNA, 19 nt, Artificial Sequence
  Description of Artificial Sequence: Synthetic oligonucleotide
  Sense strand starting at position 2650 of SEQ ID NO: 2290
ucaccuugucuggaugcua

SEQ ID NO: 177707 - RNA, 19 nt, Artificial Sequence
  Description of Artificial Sequence: Synthetic oligonucleotide
  Antisense strand to SEQ ID NO: 177706
uagcauccagacaagguga

SEQ ID NO: 177708 - RNA, 19 nt, Artificial Sequence
  Description of Artificial Sequence: Synthetic oligonucleotide
  Sense strand starting at position 2247 of SEQ ID NO: 2290
uaguucuuuguguaaggau

SEQ ID NO: 177709 - RNA, 19 nt, Artificial Sequence
  Description of Artificial Sequence: Synthetic oligonucleotide
  Antisense strand to SEQ ID NO: 177708
auccuuacacaaagaacua

SEQ ID NO: 177710 - RNA, 19 nt, Artificial Sequence
  Description of Artificial Sequence: Synthetic oligonucleotide
  Sense strand starting at position 2131 of SEQ ID NO: 2290
auaguccucugggucagau

SEQ ID NO: 177711 - RNA, 19 nt, Artificial Sequence
  Description of Artificial Sequence: Synthetic oligonucleotide
  Antisense strand to SEQ ID NO: 177710
aucugacccagaggacuau

SEQ ID NO: 177712 - RNA, 19 nt, Artificial Sequence
  Description of Artificial Sequence: Synthetic oligonucleotide
  Sense strand starting at position 2130 of SEQ ID NO: 2290
gauaguccucugggucaga

SEQ ID NO: 177713 - RNA, 19 nt, Artificial Sequence
  Description of Artificial Sequence: Synthetic oligonucleotide
  Antisense strand to SEQ ID NO: 177712
ucugacccagaggacuauc

SEQ ID NO: 177714 - RNA, 19 nt, Artificial Sequence
  Description of Artificial Sequence: Synthetic oligonucleotide
  Sense strand starting at position 2128 of SEQ ID NO: 2290
aggauaguccucuggguca

SEQ ID NO: 177715 - RNA, 19 nt, Artificial Sequence
  Description of Artificial Sequence: Synthetic oligonucleotide
  Antisense strand to SEQ ID NO: 177714
ugacccagaggacuauccu

SEQ ID NO: 177716 - RNA, 19 nt, Artificial Sequence
  Description of Artificial Sequence: Synthetic oligonucleotide
  Sense strand starting at position 2126 of SEQ ID NO: 2290
aaaggauaguccucugggu

SEQ ID NO: 177717 - RNA, 19 nt, Artificial Sequence
  Description of Artificial Sequence: Synthetic oligonucleotide
  Antisense strand to SEQ ID NO: 177716
acccagaggacuauccuuu

SEQ ID NO: 177718 - RNA, 19 nt, Artificial Sequence
  Description of Artificial Sequence: Synthetic oligonucleotide
  Sense strand starting at position 1570 of SEQ ID NO: 2290
caggauacuuucuugguua

SEQ ID NO: 177719 - RNA, 19 nt, Artificial Sequence
  Description of Artificial Sequence: Synthetic oligonucleotide
  Antisense strand to SEQ ID NO: 177718
uaaccaagaaaguauccug

SEQ ID NO: 177720 - RNA, 19 nt, Artificial Sequence
  Description of Artificial Sequence: Synthetic oligonucleotide
  Sense strand starting at position 1569 of SEQ ID NO: 2290
acaggauacuuucuugguu

SEQ ID NO: 177721 - RNA, 19 nt, Artificial Sequence
  Description of Artificial Sequence: Synthetic oligonucleotide
  Antisense strand to SEQ ID NO: 177720
aaccaagaaaguauccugu

SEQ ID NO: 177722 - RNA, 19 nt, Artificial Sequence
  Description of Artificial Sequence: Synthetic oligonucleotide
  Sense strand starting at position 1516 of SEQ ID NO: 2290
aggaguggugcaagcugua

SEQ ID NO: 177723 - RNA, 19 nt, Artificial Sequence
  Description of Artificial Sequence: Synthetic oligonucleotide
  Antisense strand to SEQ ID NO: 177722
uacagcuugcaccacuccu

SEQ ID NO: 177724 - RNA, 19 nt, Artificial Sequence
  Description of Artificial Sequence: Synthetic oligonucleotide
  Sense strand starting at position 1394 of SEQ ID NO: 2290
ggaucccugcuuugaagaa

SEQ ID NO: 177725 - RNA, 19 nt, Artificial Sequence
  Description of Artificial Sequence: Synthetic oligonucleotide
  Antisense strand to SEQ ID NO: 177724
uucuucaaagcagggaucc

SEQ ID NO: 177726 - RNA, 19 nt, Artificial Sequence
  Description of Artificial Sequence: Synthetic oligonucleotide
  Sense strand starting at position 1392 of SEQ ID NO: 2290
agggaucccugcuuugaag

SEQ ID NO: 177727 - RNA, 19 nt, Artificial Sequence
  Description of Artificial Sequence: Synthetic oligonucleotide
  Antisense strand to SEQ ID NO: 177726
cuucaaagcagggaucccu

SEQ ID NO: 177728 - RNA, 19 nt, Artificial Sequence
  Description of Artificial Sequence: Synthetic oligonucleotide
  Sense strand starting at position 1146 of SEQ ID NO: 2290
aagguuuacuggcugggaa

SEQ ID NO: 177729 - RNA, 19 nt, Artificial Sequence
  Description of Artificial Sequence: Synthetic oligonucleotide
  Antisense strand to SEQ ID NO: 177728
uucccagccaguaaaccuu

SEQ ID NO: 177730 - RNA, 19 nt, Artificial Sequence
  Description of Artificial Sequence: Synthetic oligonucleotide
  Sense strand starting at position 1126 of SEQ ID NO: 2290
cacuuagagcuuggaggaa

SEQ ID NO: 177731 - RNA, 19 nt, Artificial Sequence
  Description of Artificial Sequence: Synthetic oligonucleotide
  Antisense strand to SEQ ID NO: 177730
uuccuccaagcucuaagug

SEQ ID NO: 177732 - RNA, 19 nt, Artificial Sequence
  Description of Artificial Sequence: Synthetic oligonucleotide
  Sense strand starting at position 1125 of SEQ ID NO: 2290
ucacuuagagcuuggagga

SEQ ID NO: 177733 - RNA, 19 nt, Artificial Sequence
  Description of Artificial Sequence: Synthetic oligonucleotide
  Antisense strand to SEQ ID NO: 177732
uccuccaagcucuaaguga

SEQ ID NO: 177734 - RNA, 19 nt, Artificial Sequence
  Description of Artificial Sequence: Synthetic oligonucleotide
  Sense strand starting at position 962 of SEQ ID NO: 2290
ccuacugacuugcuugaaa

SEQ ID NO: 177735 - RNA, 19 nt, Artificial Sequence
  Description of Artificial Sequence: Synthetic oligonucleotide
  Antisense strand to SEQ ID NO: 177734
uuucaagcaagucaguagg

SEQ ID NO: 177736 - RNA, 19 nt, Artificial Sequence
  Description of Artificial Sequence: Synthetic oligonucleotide
  Sense strand starting at position 848 of SEQ ID NO: 2290
ggaaauggcuccuuagaga

SEQ ID NO: 177737 - RNA, 19 nt, Artificial Sequence
  Description of Artificial Sequence: Synthetic oligonucleotide
  Antisense strand to SEQ ID NO: 177736
ucucuaaggagccauuucc

SEQ ID NO: 177738 - RNA, 19 nt, Artificial Sequence
  Description of Artificial Sequence: Synthetic oligonucleotide
  Sense strand starting at position 816 of SEQ ID NO: 2290
ggagccuucuuacccaaga

SEQ ID NO: 177739 - RNA, 19 nt, Artificial Sequence
  Description of Artificial Sequence: Synthetic oligonucleotide
  Antisense strand to SEQ ID NO: 177738
ucuuggguaagaaggcucc

SEQ ID NO: 177740 - RNA, 19 nt, Artificial Sequence
  Description of Artificial Sequence: Synthetic oligonucleotide
  Sense strand starting at position 510 of SEQ ID NO: 2290
cucuguggucuggacauaa

SEQ ID NO: 177741 - RNA, 19 nt, Artificial Sequence
  Description of Artificial Sequence: Synthetic oligonucleotide
  Antisense strand to SEQ ID NO: 177740
uuauguccagaccacagag

SEQ ID NO: 177742 - RNA, 19 nt, Artificial Sequence
  Description of Artificial Sequence: Synthetic oligonucleotide
  Sense strand starting at position 417 of SEQ ID NO: 2290
guauauuguuuaccagauu

SEQ ID NO: 177743 - RNA, 19 nt, Artificial Sequence
  Description of Artificial Sequence: Synthetic oligonucleotide
  Antisense strand to SEQ ID NO: 177742
aaucugguaaacaauauac

SEQ ID NO: 177744 - RNA, 19 nt, Artificial Sequence
  Description of Artificial Sequence: Synthetic oligonucleotide
  Sense strand starting at position 415 of SEQ ID NO: 2290
gaguauauuguuuaccaga

SEQ ID NO: 177745 - RNA, 19 nt, Artificial Sequence
  Description of Artificial Sequence: Synthetic oligonucleotide
  Antisense strand to SEQ ID NO: 177744
ucugguaaacaauauacuc

SEQ ID NO: 177746 - RNA, 19 nt, Artificial Sequence
  Description of Artificial Sequence: Synthetic oligonucleotide
  Sense strand starting at position 414 of SEQ ID NO: 2290
agaguauauuguuuaccag

SEQ ID NO: 177747 - RNA, 19 nt, Artificial Sequence
  Description of Artificial Sequence: Synthetic oligonucleotide
  Antisense strand to SEQ ID NO: 177746
cugguaaacaauauacucu

SEQ ID NO: 177748 - RNA, 19 nt, Artificial Sequence
  Description of Artificial Sequence: Synthetic oligonucleotide
  Sense strand starting at position 300 of SEQ ID NO: 2290
gccgauguuggauauugaa

SEQ ID NO: 177749 - RNA, 19 nt, Artificial Sequence
  Description of Artificial Sequence: Synthetic oligonucleotide
  Antisense strand to SEQ ID NO: 177748
uucaauauccaacaucggc

SEQ ID NO: 177750 - RNA, 19 nt, Artificial Sequence
  Description of Artificial Sequence: Synthetic oligonucleotide
  Sense strand starting at position 273 of SEQ ID NO: 2290
aguaauugcgaauauuauc

SEQ ID NO: 177751 - RNA, 19 nt, Artificial Sequence
  Description of Artificial Sequence: Synthetic oligonucleotide
  Antisense strand to SEQ ID NO: 177750
gauaauauucgcaauuacu

SEQ ID NO: 177752 - RNA, 19 nt, Artificial Sequence
  Description of Artificial Sequence: Synthetic oligonucleotide
  Sense strand starting at position 1 of SEQ ID NO: 2290
cauggauugcaguggagaa

SEQ ID NO: 177753 - RNA, 19 nt, Artificial Sequence
  Description of Artificial Sequence: Synthetic oligonucleotide
  Antisense strand to SEQ ID NO: 177752
uucuccacugcaauccaug

SEQ ID NO: 177754 - RNA, 19 nt, Artificial Sequence
  Description of Artificial Sequence: Synthetic oligonucleotide
  Sense strand starting at position 3974 of SEQ ID NO: 2292
ccugucauugacuguaauu

SEQ ID NO: 177755 - RNA, 19 nt, Artificial Sequence
  Description of Artificial Sequence: Synthetic oligonucleotide
  Antisense strand to SEQ ID NO: 177754
aauuacagucaaugacagg

SEQ ID NO: 177756 - RNA, 19 nt, Artificial Sequence
  Description of Artificial Sequence: Synthetic oligonucleotide
  Sense strand starting at position 3973 of SEQ ID NO: 2292
uccugucauugacuguaau

SEQ ID NO: 177757 - RNA, 19 nt, Artificial Sequence
  Description of Artificial Sequence: Synthetic oligonucleotide
  Antisense strand to SEQ ID NO: 177756
auuacagucaaugacagga

SEQ ID NO: 177758 - RNA, 19 nt, Artificial Sequence
  Description of Artificial Sequence: Synthetic oligonucleotide
  Sense strand starting at position 3971 of SEQ ID NO: 2292
gguccugucauugacugua

SEQ ID NO: 177759 - RNA, 19 nt, Artificial Sequence
  Description of Artificial Sequence: Synthetic oligonucleotide
  Antisense strand to SEQ ID NO: 177758
uacagucaaugacaggacc

SEQ ID NO: 177760 - RNA, 19 nt, Artificial Sequence
  Description of Artificial Sequence: Synthetic oligonucleotide
  Sense strand starting at position 3931 of SEQ ID NO: 2292
gugucuaguaugcauacau

SEQ ID NO: 177761 - RNA, 19 nt, Artificial Sequence
  Description of Artificial Sequence: Synthetic oligonucleotide
  Antisense strand to SEQ ID NO: 177760
auguaugcauacuagacac

SEQ ID NO: 177762 - RNA, 19 nt, Artificial Sequence
  Description of Artificial Sequence: Synthetic oligonucleotide
  Sense strand starting at position 3923 of SEQ ID NO: 2292
gaacaucagugucuaguau

SEQ ID NO: 177763 - RNA, 19 nt, Artificial Sequence
  Description of Artificial Sequence: Synthetic oligonucleotide
  Antisense strand to SEQ ID NO: 177762
auacuagacacugauguuc

SEQ ID NO: 177764 - RNA, 19 nt, Artificial Sequence
  Description of Artificial Sequence: Synthetic oligonucleotide
  Sense strand starting at position 3919 of SEQ ID NO: 2292
gcuggaacaucagugucua

SEQ ID NO: 177765 - RNA, 19 nt, Artificial Sequence
  Description of Artificial Sequence: Synthetic oligonucleotide
  Antisense strand to SEQ ID NO: 177764
uagacacugauguuccagc

SEQ ID NO: 177766 - RNA, 19 nt, Artificial Sequence
  Description of Artificial Sequence: Synthetic oligonucleotide
  Sense strand starting at position 3788 of SEQ ID NO: 2292
ggauuaaaugugcaagcca

SEQ ID NO: 177767 - RNA, 19 nt, Artificial Sequence
  Description of Artificial Sequence: Synthetic oligonucleotide
  Antisense strand to SEQ ID NO: 177766
uggcuugcacauuuaaucc

SEQ ID NO: 177768 - RNA, 19 nt, Artificial Sequence
  Description of Artificial Sequence: Synthetic oligonucleotide
  Sense strand starting at position 3467 of SEQ ID NO: 2292
ccuguucugccauacacua

SEQ ID NO: 177769 - RNA, 19 nt, Artificial Sequence
  Description of Artificial Sequence: Synthetic oligonucleotide
  Antisense strand to SEQ ID NO: 177768
uaguguauggcagaacagg

SEQ ID NO: 177770 - RNA, 19 nt, Artificial Sequence
  Description of Artificial Sequence: Synthetic oligonucleotide
  Sense strand starting at position 3433 of SEQ ID NO: 2292
cagaguaggugcuuaguga

SEQ ID NO: 177771 - RNA, 19 nt, Artificial Sequence
  Description of Artificial Sequence: Synthetic oligonucleotide
  Antisense strand to SEQ ID NO: 177770
ucacuaagcaccuacucug

SEQ ID NO: 177772 - RNA, 19 nt, Artificial Sequence
  Description of Artificial Sequence: Synthetic oligonucleotide
  Sense strand starting at position 3366 of SEQ ID NO: 2292
gacuguagaucugucucau

SEQ ID NO: 177773 - RNA, 19 nt, Artificial Sequence
  Description of Artificial Sequence: Synthetic oligonucleotide
  Antisense strand to SEQ ID NO: 177772
augagacagaucuacaguc

SEQ ID NO: 177774 - RNA, 19 nt, Artificial Sequence
  Description of Artificial Sequence: Synthetic oligonucleotide
  Sense strand starting at position 3304 of SEQ ID NO: 2292
uuugguuggugaguuagau

SEQ ID NO: 177775 - RNA, 19 nt, Artificial Sequence
  Description of Artificial Sequence: Synthetic oligonucleotide
  Antisense strand to SEQ ID NO: 177774
aucuaacucaccaaccaaa

SEQ ID NO: 177776 - RNA, 19 nt, Artificial Sequence
  Description of Artificial Sequence: Synthetic oligonucleotide
  Sense strand starting at position 3248 of SEQ ID NO: 2292
auuguuaccugaucucuua

SEQ ID NO: 177777 - RNA, 19 nt, Artificial Sequence
  Description of Artificial Sequence: Synthetic oligonucleotide
  Antisense strand to SEQ ID NO: 177776
uaagagaucagguaacaau

SEQ ID NO: 177778 - RNA, 19 nt, Artificial Sequence
  Description of Artificial Sequence: Synthetic oligonucleotide
  Sense strand starting at position 3158 of SEQ ID NO: 2292
gguuguggucauggagaaa

SEQ ID NO: 177779 - RNA, 19 nt, Artificial Sequence
  Description of Artificial Sequence: Synthetic oligonucleotide
  Antisense strand to SEQ ID NO: 177778
uuucuccaugaccacaacc

SEQ ID NO: 177780 - RNA, 19 nt, Artificial Sequence
  Description of Artificial Sequence: Synthetic oligonucleotide
  Sense strand starting at position 3056 of SEQ ID NO: 2292
uaccguccucgucaauaaa

SEQ ID NO: 177781 - RNA, 19 nt, Artificial Sequence
  Description of Artificial Sequence: Synthetic oligonucleotide
  Antisense strand to SEQ ID NO: 177780
uuuauugacgaggacggua

SEQ ID NO: 177782 - RNA, 19 nt, Artificial Sequence
  Description of Artificial Sequence: Synthetic oligonucleotide
  Sense strand starting at position 3054 of SEQ ID NO: 2292
guuaccguccucgucaaua

SEQ ID NO: 177783 - RNA, 19 nt, Artificial Sequence
  Description of Artificial Sequence: Synthetic oligonucleotide
  Antisense strand to SEQ ID NO: 177782
uauugacgaggacgguaac

SEQ ID NO: 177784 - RNA, 19 nt, Artificial Sequence
  Description of Artificial Sequence: Synthetic oligonucleotide
  Sense strand starting at position 2913 of SEQ ID NO: 2292
acgggcucuuucuuacaau

SEQ ID NO: 177785 - RNA, 19 nt, Artificial Sequence
  Description of Artificial Sequence: Synthetic oligonucleotide
  Antisense strand to SEQ ID NO: 177784
auuguaagaaagagcccgu

SEQ ID NO: 177786 - RNA, 19 nt, Artificial Sequence
  Description of Artificial Sequence: Synthetic oligonucleotide
  Sense strand starting at position 2507 of SEQ ID NO: 2292
ugacguacccaagguuaga

SEQ ID NO: 177787 - RNA, 19 nt, Artificial Sequence
  Description of Artificial Sequence: Synthetic oligonucleotide
  Antisense strand to SEQ ID NO: 177786
ucuaaccuuggguacguca

SEQ ID NO: 177788 - RNA, 19 nt, Artificial Sequence
  Description of Artificial Sequence: Synthetic oligonucleotide
  Sense strand starting at position 2504 of SEQ ID NO: 2292
gagugacguacccaagguu

SEQ ID NO: 177789 - RNA, 19 nt, Artificial Sequence
  Description of Artificial Sequence: Synthetic oligonucleotide
  Antisense strand to SEQ ID NO: 177788
aaccuuggguacgucacuc

SEQ ID NO: 177790 - RNA, 19 nt, Artificial Sequence
  Description of Artificial Sequence: Synthetic oligonucleotide
  Sense strand starting at position 2372 of SEQ ID NO: 2292
aucucugagaguuguagag

SEQ ID NO: 177791 - RNA, 19 nt, Artificial Sequence
  Description of Artificial Sequence: Synthetic oligonucleotide
  Antisense strand to SEQ ID NO: 177790
cucuacaacucucagagau

SEQ ID NO: 177792 - RNA, 19 nt, Artificial Sequence
  Description of Artificial Sequence: Synthetic oligonucleotide
  Sense strand starting at position 2365 of SEQ ID NO: 2292
accagcaaucucugagagu

SEQ ID NO: 177793 - RNA, 19 nt, Artificial Sequence
  Description of Artificial Sequence: Synthetic oligonucleotide
  Antisense strand to SEQ ID NO: 177792
acucucagagauugcuggu

SEQ ID NO: 177794 - RNA, 19 nt, Artificial Sequence
  Description of Artificial Sequence: Synthetic oligonucleotide
  Sense strand starting at position 2179 of SEQ ID NO: 2292
ccucacgugcgucugaauu

SEQ ID NO: 177795 - RNA, 19 nt, Artificial Sequence
  Description of Artificial Sequence: Synthetic oligonucleotide
  Antisense strand to SEQ ID NO: 177794
aauucagacgcacgugagg

SEQ ID NO: 177796 - RNA, 19 nt, Artificial Sequence
  Description of Artificial Sequence: Synthetic oligonucleotide
  Sense strand starting at position 2178 of SEQ ID NO: 2292
cccucacgugcgucugaau

SEQ ID NO: 177797 - RNA, 19 nt, Artificial Sequence
  Description of Artificial Sequence: Synthetic oligonucleotide
  Antisense strand to SEQ ID NO: 177796
auucagacgcacgugaggg

SEQ ID NO: 177798 - RNA, 19 nt, Artificial Sequence
  Description of Artificial Sequence: Synthetic oligonucleotide
  Sense strand starting at position 1809 of SEQ ID NO: 2292
gcgcuuucgguuucaaagu

SEQ ID NO: 177799 - RNA, 19 nt, Artificial Sequence
  Description of Artificial Sequence: Synthetic oligonucleotide
  Antisense strand to SEQ ID NO: 177798
acuuugaaaccgaaagcgc

SEQ ID NO: 177800 - RNA, 19 nt, Artificial Sequence
  Description of Artificial Sequence: Synthetic oligonucleotide
  Sense strand starting at position 1808 of SEQ ID NO: 2292
ggcgcuuucgguuucaaag

SEQ ID NO: 177801 - RNA, 19 nt, Artificial Sequence
  Description of Artificial Sequence: Synthetic oligonucleotide
  Antisense strand to SEQ ID NO: 177800
cuuugaaaccgaaagcgcc

SEQ ID NO: 177802 - RNA, 19 nt, Artificial Sequence
  Description of Artificial Sequence: Synthetic oligonucleotide
  Sense strand starting at position 1807 of SEQ ID NO: 2292
aggcgcuuucgguuucaaa

SEQ ID NO: 177803 - RNA, 19 nt, Artificial Sequence
  Description of Artificial Sequence: Synthetic oligonucleotide
  Antisense strand to SEQ ID NO: 177802
uuugaaaccgaaagcgccu

SEQ ID NO: 177804 - RNA, 19 nt, Artificial Sequence
  Description of Artificial Sequence: Synthetic oligonucleotide
  Sense strand starting at position 1432 of SEQ ID NO: 2292
aguugcuuugauuggaaag

SEQ ID NO: 177805 - RNA, 19 nt, Artificial Sequence
  Description of Artificial Sequence: Synthetic oligonucleotide
  Antisense strand to SEQ ID NO: 177804
cuuuccaaucaaagcaacu

SEQ ID NO: 177806 - RNA, 19 nt, Artificial Sequence
  Description of Artificial Sequence: Synthetic oligonucleotide
  Sense strand starting at position 1405 of SEQ ID NO: 2292
ccuugcaauccugaaguuu

SEQ ID NO: 177807 - RNA, 19 nt, Artificial Sequence
  Description of Artificial Sequence: Synthetic oligonucleotide
  Antisense strand to SEQ ID NO: 177806
aaacuucaggauugcaagg

SEQ ID NO: 177808 - RNA, 19 nt, Artificial Sequence
  Description of Artificial Sequence: Synthetic oligonucleotide
  Sense strand starting at position 1052 of SEQ ID NO: 2292
cugaguucucaugaaagua

SEQ ID NO: 177809 - RNA, 19 nt, Artificial Sequence
  Description of Artificial Sequence: Synthetic oligonucleotide
  Antisense strand to SEQ ID NO: 177808
uacuuucaugagaacucag

SEQ ID NO: 177810 - RNA, 19 nt, Artificial Sequence
  Description of Artificial Sequence: Synthetic oligonucleotide
  Sense strand starting at position 1048 of SEQ ID NO: 2292
auaacugaguucucaugaa

SEQ ID NO: 177811 - RNA, 19 nt, Artificial Sequence
  Description of Artificial Sequence: Synthetic oligonucleotide
  Antisense strand to SEQ ID NO: 177810
uucaugagaacucaguuau

SEQ ID NO: 177812 - RNA, 19 nt, Artificial Sequence
  Description of Artificial Sequence: Synthetic oligonucleotide
  Sense strand starting at position 1044 of SEQ ID NO: 2292
cgagauaacugaguucuca

SEQ ID NO: 177813 - RNA, 19 nt, Artificial Sequence
  Description of Artificial Sequence: Synthetic oligonucleotide
  Antisense strand to SEQ ID NO: 177812
ugagaacucaguuaucucg

SEQ ID NO: 177814 - RNA, 19 nt, Artificial Sequence
  Description of Artificial Sequence: Synthetic oligonucleotide
  Sense strand starting at position 891 of SEQ ID NO: 2292
gaauuaaacugguuaccag

SEQ ID NO: 177815 - RNA, 19 nt, Artificial Sequence
  Description of Artificial Sequence: Synthetic oligonucleotide
  Antisense strand to SEQ ID NO: 177814
cugguaaccaguuuaauuc

SEQ ID NO: 177816 - RNA, 19 nt, Artificial Sequence
  Description of Artificial Sequence: Synthetic oligonucleotide
  Sense strand starting at position 642 of SEQ ID NO: 2292
cagcuuugugaguacauaa

SEQ ID NO: 177817 - RNA, 19 nt, Artificial Sequence
  Description of Artificial Sequence: Synthetic oligonucleotide
  Antisense strand to SEQ ID NO: 177816
uuauguacucacaaagcug

SEQ ID NO: 177818 - RNA, 19 nt, Artificial Sequence
  Description of Artificial Sequence: Synthetic oligonucleotide
  Sense strand starting at position 582 of SEQ ID NO: 2292
uagaguuagggauggaagu

SEQ ID NO: 177819 - RNA, 19 nt, Artificial Sequence
  Description of Artificial Sequence: Synthetic oligonucleotide
  Antisense strand to SEQ ID NO: 177818
acuuccaucccuaacucua

SEQ ID NO: 177820 - RNA, 19 nt, Artificial Sequence
  Description of Artificial Sequence: Synthetic oligonucleotide
  Sense strand starting at position 449 of SEQ ID NO: 2292
ugauccauuccauagaguu

SEQ ID NO: 177821 - RNA, 19 nt, Artificial Sequence
  Description of Artificial Sequence: Synthetic oligonucleotide
  Antisense strand to SEQ ID NO: 177820
aacucuauggaauggauca

SEQ ID NO: 177822 - RNA, 19 nt, Artificial Sequence
  Description of Artificial Sequence: Synthetic oligonucleotide
  Sense strand starting at position 437 of SEQ ID NO: 2292
ggaucugagaggugaucca

SEQ ID NO: 177823 - RNA, 19 nt, Artificial Sequence
  Description of Artificial Sequence: Synthetic oligonucleotide
  Antisense strand to SEQ ID NO: 177822
uggaucaccucucagaucc

SEQ ID NO: 177824 - RNA, 19 nt, Artificial Sequence
  Description of Artificial Sequence: Synthetic oligonucleotide
  Sense strand starting at position 96 of SEQ ID NO: 2292
agguuugucuaaguacuga

SEQ ID NO: 177825 - RNA, 19 nt, Artificial Sequence
  Description of Artificial Sequence: Synthetic oligonucleotide
  Antisense strand to SEQ ID NO: 177824
ucaguacuuagacaaaccu

SEQ ID NO: 177826 - RNA, 19 nt, Artificial Sequence
  Description of Artificial Sequence: Synthetic oligonucleotide
  Sense strand starting at position 91 of SEQ ID NO: 2292
agaggagguuugucuaagu

SEQ ID NO: 177827 - RNA, 19 nt, Artificial Sequence
  Description of Artificial Sequence: Synthetic oligonucleotide
  Antisense strand to SEQ ID NO: 177826
acuuagacaaaccuccucu

SEQ ID NO: 177828 - RNA, 19 nt, Artificial Sequence
  Description of Artificial Sequence: Synthetic oligonucleotide
  Sense strand starting at position 82 of SEQ ID NO: 2292
gagcuaaucagaggagguu

SEQ ID NO: 177829 - RNA, 19 nt, Artificial Sequence
  Description of Artificial Sequence: Synthetic oligonucleotide
  Antisense strand to SEQ ID NO: 177828
aaccuccucugauuagcuc

SEQ ID NO: 177830 - RNA, 19 nt, Artificial Sequence
  Description of Artificial Sequence: Synthetic oligonucleotide
  Sense strand starting at position 72 of SEQ ID NO: 2292
caguaaagcugagcuaauc

SEQ ID NO: 177831 - RNA, 19 nt, Artificial Sequence
  Description of Artificial Sequence: Synthetic oligonucleotide
  Antisense strand to SEQ ID NO: 177830
gauuagcucagcuuuacug

SEQ ID NO: 177832 - RNA, 19 nt, Artificial Sequence
  Description of Artificial Sequence: Synthetic oligonucleotide
  Sense strand starting at position 70 of SEQ ID NO: 2292
cccaguaaagcugagcuaa

SEQ ID NO: 177833 - RNA, 19 nt, Artificial Sequence
  Description of Artificial Sequence: Synthetic oligonucleotide
  Antisense strand to SEQ ID NO: 177832
uuagcucagcuuuacuggg

SEQ ID NO: 177834 - RNA, 19 nt, Artificial Sequence
  Description of Artificial Sequence: Synthetic oligonucleotide
  Sense strand starting at position 3916 of SEQ ID NO: 2294
uuuauuguggugggaaaug

SEQ ID NO: 177835 - RNA, 19 nt, Artificial Sequence
  Description of Artificial Sequence: Synthetic oligonucleotide
  Antisense strand to SEQ ID NO: 177834
cauuucccaccacaauaaa

SEQ ID NO: 177836 - RNA, 19 nt, Artificial Sequence
  Description of Artificial Sequence: Synthetic oligonucleotide
  Sense strand starting at position 3915 of SEQ ID NO: 2294
cuuuauuguggugggaaau

SEQ ID NO: 177837 - RNA, 19 nt, Artificial Sequence
  Description of Artificial Sequence: Synthetic oligonucleotide
  Antisense strand to SEQ ID NO: 177836
auuucccaccacaauaaag

SEQ ID NO: 177838 - RNA, 19 nt, Artificial Sequence
  Description of Artificial Sequence: Synthetic oligonucleotide
  Sense strand starting at position 3905 of SEQ ID NO: 2294
agagguggaucuuuauugu

SEQ ID NO: 177839 - RNA, 19 nt, Artificial Sequence
  Description of Artificial Sequence: Synthetic oligonucleotide
  Antisense strand to SEQ ID NO: 177838
acaauaaagauccaccucu

SEQ ID NO: 177840 - RNA, 19 nt, Artificial Sequence
  Description of Artificial Sequence: Synthetic oligonucleotide
  Sense strand starting at position 3841 of SEQ ID NO: 2294
agcagucaauuguuccaaa

SEQ ID NO: 177841 - RNA, 19 nt, Artificial Sequence
  Description of Artificial Sequence: Synthetic oligonucleotide
  Antisense strand to SEQ ID NO: 177840
uuuggaacaauugacugcu

SEQ ID NO: 177842 - RNA, 19 nt, Artificial Sequence
  Description of Artificial Sequence: Synthetic oligonucleotide
  Sense strand starting at position 3783 of SEQ ID NO: 2294
ccugucauugacuguaauu

SEQ ID NO: 177843 - RNA, 19 nt, Artificial Sequence
  Description of Artificial Sequence: Synthetic oligonucleotide
  Antisense strand to SEQ ID NO: 177842
aauuacagucaaugacagg

SEQ ID NO: 177844 - RNA, 19 nt, Artificial Sequence
  Description of Artificial Sequence: Synthetic oligonucleotide
  Sense strand starting at position 3782 of SEQ ID NO: 2294
uccugucauugacuguaau

SEQ ID NO: 177845 - RNA, 19 nt, Artificial Sequence
  Description of Artificial Sequence: Synthetic oligonucleotide
  Antisense strand to SEQ ID NO: 177844
auuacagucaaugacagga

SEQ ID NO: 177846 - RNA, 19 nt, Artificial Sequence
  Description of Artificial Sequence: Synthetic oligonucleotide
  Sense strand starting at position 3780 of SEQ ID NO: 2294
gguccugucauugacugua

SEQ ID NO: 177847 - RNA, 19 nt, Artificial Sequence
  Description of Artificial Sequence: Synthetic oligonucleotide
  Antisense strand to SEQ ID NO: 177846
uacagucaaugacaggacc

SEQ ID NO: 177848 - RNA, 19 nt, Artificial Sequence
  Description of Artificial Sequence: Synthetic oligonucleotide
  Sense strand starting at position 3740 of SEQ ID NO: 2294
gugucuaguaugcauacau

SEQ ID NO: 177849 - RNA, 19 nt, Artificial Sequence
  Description of Artificial Sequence: Synthetic oligonucleotide
  Antisense strand to SEQ ID NO: 177848
auguaugcauacuagacac

SEQ ID NO: 177850 - RNA, 19 nt, Artificial Sequence
  Description of Artificial Sequence: Synthetic oligonucleotide
  Sense strand starting at position 3732 of SEQ ID NO: 2294
gaacaucagugucuaguau

SEQ ID NO: 177851 - RNA, 19 nt, Artificial Sequence
  Description of Artificial Sequence: Synthetic oligonucleotide
  Antisense strand to SEQ ID NO: 177850
auacuagacacugauguuc

SEQ ID NO: 177852 - RNA, 19 nt, Artificial Sequence
  Description of Artificial Sequence: Synthetic oligonucleotide
  Sense strand starting at position 3728 of SEQ ID NO: 2294
gcuggaacaucagugucua

SEQ ID NO: 177853 - RNA, 19 nt, Artificial Sequence
  Description of Artificial Sequence: Synthetic oligonucleotide
  Antisense strand to SEQ ID NO: 177852
uagacacugauguuccagc

SEQ ID NO: 177854 - RNA, 19 nt, Artificial Sequence
  Description of Artificial Sequence: Synthetic oligonucleotide
  Sense strand starting at position 3597 of SEQ ID NO: 2294
ggauuaaaugugcaagcca

SEQ ID NO: 177855 - RNA, 19 nt, Artificial Sequence
  Description of Artificial Sequence: Synthetic oligonucleotide
  Antisense strand to SEQ ID NO: 177854
uggcuugcacauuuaaucc

SEQ ID NO: 177856 - RNA, 19 nt, Artificial Sequence
  Description of Artificial Sequence: Synthetic oligonucleotide
  Sense strand starting at position 3276 of SEQ ID NO: 2294
ccuguucugccauacacua

SEQ ID NO: 177857 - RNA, 19 nt, Artificial Sequence
  Description of Artificial Sequence: Synthetic oligonucleotide
  Antisense strand to SEQ ID NO: 177856
uaguguauggcagaacagg

SEQ ID NO: 177858 - RNA, 19 nt, Artificial Sequence
  Description of Artificial Sequence: Synthetic oligonucleotide
  Sense strand starting at position 3242 of SEQ ID NO: 2294
cagaguaggugcuuaguga

SEQ ID NO: 177859 - RNA, 19 nt, Artificial Sequence
  Description of Artificial Sequence: Synthetic oligonucleotide
  Antisense strand to SEQ ID NO: 177858
ucacuaagcaccuacucug

SEQ ID NO: 177860 - RNA, 19 nt, Artificial Sequence
  Description of Artificial Sequence: Synthetic oligonucleotide
  Sense strand starting at position 3175 of SEQ ID NO: 2294
gacuguagaucugucucau

SEQ ID NO: 177861 - RNA, 19 nt, Artificial Sequence
  Description of Artificial Sequence: Synthetic oligonucleotide
  Antisense strand to SEQ ID NO: 177860
augagacagaucuacaguc

SEQ ID NO: 177862 - RNA, 19 nt, Artificial Sequence
  Description of Artificial Sequence: Synthetic oligonucleotide
  Sense strand starting at position 3113 of SEQ ID NO: 2294
uuugguuggugaguuagau

SEQ ID NO: 177863 - RNA, 19 nt, Artificial Sequence
  Description of Artificial Sequence: Synthetic oligonucleotide
  Antisense strand to SEQ ID NO: 177862
aucuaacucaccaaccaaa

SEQ ID NO: 177864 - RNA, 19 nt, Artificial Sequence
  Description of Artificial Sequence: Synthetic oligonucleotide
  Sense strand starting at position 3057 of SEQ ID NO: 2294
auuguuaccugaucucuua

SEQ ID NO: 177865 - RNA, 19 nt, Artificial Sequence
  Description of Artificial Sequence: Synthetic oligonucleotide
  Antisense strand to SEQ ID NO: 177864
uaagagaucagguaacaau

SEQ ID NO: 177866 - RNA, 19 nt, Artificial Sequence
  Description of Artificial Sequence: Synthetic oligonucleotide
  Sense strand starting at position 2967 of SEQ ID NO: 2294
gguuguggucauggagaaa

SEQ ID NO: 177867 - RNA, 19 nt, Artificial Sequence
  Description of Artificial Sequence: Synthetic oligonucleotide
  Antisense strand to SEQ ID NO: 177866
uuucuccaugaccacaacc

SEQ ID NO: 177868 - RNA, 19 nt, Artificial Sequence
  Description of Artificial Sequence: Synthetic oligonucleotide
  Sense strand starting at position 2865 of SEQ ID NO: 2294
uaccguccucgucaauaaa

SEQ ID NO: 177869 - RNA, 19 nt, Artificial Sequence
  Description of Artificial Sequence: Synthetic oligonucleotide
  Antisense strand to SEQ ID NO: 177868
uuuauugacgaggacggua

SEQ ID NO: 177870 - RNA, 19 nt, Artificial Sequence
  Description of Artificial Sequence: Synthetic oligonucleotide
  Sense strand starting at position 2863 of SEQ ID NO: 2294
guuaccguccucgucaaua

SEQ ID NO: 177871 - RNA, 19 nt, Artificial Sequence
  Description of Artificial Sequence: Synthetic oligonucleotide
  Antisense strand to SEQ ID NO: 177870
uauugacgaggacgguaac

SEQ ID NO: 177872 - RNA, 19 nt, Artificial Sequence
  Description of Artificial Sequence: Synthetic oligonucleotide
  Sense strand starting at position 2722 of SEQ ID NO: 2294
acgggcucuuucuuacaau

SEQ ID NO: 177873 - RNA, 19 nt, Artificial Sequence
  Description of Artificial Sequence: Synthetic oligonucleotide
  Antisense strand to SEQ ID NO: 177872
auuguaagaaagagcccgu

SEQ ID NO: 177874 - RNA, 19 nt, Artificial Sequence
  Description of Artificial Sequence: Synthetic oligonucleotide
  Sense strand starting at position 2316 of SEQ ID NO: 2294
ugacguacccaagguuaga

SEQ ID NO: 177875 - RNA, 19 nt, Artificial Sequence
  Description of Artificial Sequence: Synthetic oligonucleotide
  Antisense strand to SEQ ID NO: 177874
ucuaaccuuggguacguca

SEQ ID NO: 177876 - RNA, 19 nt, Artificial Sequence
  Description of Artificial Sequence: Synthetic oligonucleotide
  Sense strand starting at position 2313 of SEQ ID NO: 2294
gagugacguacccaagguu

SEQ ID NO: 177877 - RNA, 19 nt, Artificial Sequence
  Description of Artificial Sequence: Synthetic oligonucleotide
  Antisense strand to SEQ ID NO: 177876
aaccuuggguacgucacuc

SEQ ID NO: 177878 - RNA, 19 nt, Artificial Sequence
  Description of Artificial Sequence: Synthetic oligonucleotide
  Sense strand starting at position 2181 of SEQ ID NO: 2294
aucucugagaguuguagag

SEQ ID NO: 177879 - RNA, 19 nt, Artificial Sequence
  Description of Artificial Sequence: Synthetic oligonucleotide
  Antisense strand to SEQ ID NO: 177878
cucuacaacucucagagau

SEQ ID NO: 177880 - RNA, 19 nt, Artificial Sequence
  Description of Artificial Sequence: Synthetic oligonucleotide
  Sense strand starting at position 2174 of SEQ ID NO: 2294
accagcaaucucugagagu

SEQ ID NO: 177881 - RNA, 19 nt, Artificial Sequence
  Description of Artificial Sequence: Synthetic oligonucleotide
  Antisense strand to SEQ ID NO: 177880
acucucagagauugcuggu

SEQ ID NO: 177882 - RNA, 19 nt, Artificial Sequence
  Description of Artificial Sequence: Synthetic oligonucleotide
  Sense strand starting at position 1988 of SEQ ID NO: 2294
ccucacgugcgucugaauu

SEQ ID NO: 177883 - RNA, 19 nt, Artificial Sequence
  Description of Artificial Sequence: Synthetic oligonucleotide
  Antisense strand to SEQ ID NO: 177882
aauucagacgcacgugagg

SEQ ID NO: 177884 - RNA, 19 nt, Artificial Sequence
  Description of Artificial Sequence: Synthetic oligonucleotide
  Sense strand starting at position 1987 of SEQ ID NO: 2294
cccucacgugcgucugaau

SEQ ID NO: 177885 - RNA, 19 nt, Artificial Sequence
  Description of Artificial Sequence: Synthetic oligonucleotide
  Antisense strand to SEQ ID NO: 177884
auucagacgcacgugaggg

SEQ ID NO: 177886 - RNA, 19 nt, Artificial Sequence
  Description of Artificial Sequence: Synthetic oligonucleotide
  Sense strand starting at position 1618 of SEQ ID NO: 2294
gcgcuuucgguuucaaagu

SEQ ID NO: 177887 - RNA, 19 nt, Artificial Sequence
  Description of Artificial Sequence: Synthetic oligonucleotide
  Antisense strand to SEQ ID NO: 177886
acuuugaaaccgaaagcgc

SEQ ID NO: 177888 - RNA, 19 nt, Artificial Sequence
  Description of Artificial Sequence: Synthetic oligonucleotide
  Sense strand starting at position 1617 of SEQ ID NO: 2294
ggcgcuuucgguuucaaag

SEQ ID NO: 177889 - RNA, 19 nt, Artificial Sequence
  Description of Artificial Sequence: Synthetic oligonucleotide
  Antisense strand to SEQ ID NO: 177888
cuuugaaaccgaaagcgcc

SEQ ID NO: 177890 - RNA, 19 nt, Artificial Sequence
  Description of Artificial Sequence: Synthetic oligonucleotide
  Sense strand starting at position 1616 of SEQ ID NO: 2294
aggcgcuuucgguuucaaa

SEQ ID NO: 177891 - RNA, 19 nt, Artificial Sequence
  Description of Artificial Sequence: Synthetic oligonucleotide
  Antisense strand to SEQ ID NO: 177890
uuugaaaccgaaagcgccu

SEQ ID NO: 177892 - RNA, 19 nt, Artificial Sequence
  Description of Artificial Sequence: Synthetic oligonucleotide
  Sense strand starting at position 1241 of SEQ ID NO: 2294
aguugcuuugauuggaaag

SEQ ID NO: 177893 - RNA, 19 nt, Artificial Sequence
  Description of Artificial Sequence: Synthetic oligonucleotide
  Antisense strand to SEQ ID NO: 177892
cuuuccaaucaaagcaacu

SEQ ID NO: 177894 - RNA, 19 nt, Artificial Sequence
  Description of Artificial Sequence: Synthetic oligonucleotide
  Sense strand starting at position 1214 of SEQ ID NO: 2294
ccuugcaauccugaaguuu

SEQ ID NO: 177895 - RNA, 19 nt, Artificial Sequence
  Description of Artificial Sequence: Synthetic oligonucleotide
  Antisense strand to SEQ ID NO: 177894
aaacuucaggauugcaagg

SEQ ID NO: 177896 - RNA, 19 nt, Artificial Sequence
  Description of Artificial Sequence: Synthetic oligonucleotide
  Sense strand starting at position 861 of SEQ ID NO: 2294
cugaguucucaugaaagua

SEQ ID NO: 177897 - RNA, 19 nt, Artificial Sequence
  Description of Artificial Sequence: Synthetic oligonucleotide
  Antisense strand to SEQ ID NO: 177896
uacuuucaugagaacucag

SEQ ID NO: 177898 - RNA, 19 nt, Artificial Sequence
  Description of Artificial Sequence: Synthetic oligonucleotide
  Sense strand starting at position 857 of SEQ ID NO: 2294
auaacugaguucucaugaa

SEQ ID NO: 177899 - RNA, 19 nt, Artificial Sequence
  Description of Artificial Sequence: Synthetic oligonucleotide
  Antisense strand to SEQ ID NO: 177898
uucaugagaacucaguuau

SEQ ID NO: 177900 - RNA, 19 nt, Artificial Sequence
  Description of Artificial Sequence: Synthetic oligonucleotide
  Sense strand starting at position 853 of SEQ ID NO: 2294
cgagauaacugaguucuca

SEQ ID NO: 177901 - RNA, 19 nt, Artificial Sequence
  Description of Artificial Sequence: Synthetic oligonucleotide
  Antisense strand to SEQ ID NO: 177900
ugagaacucaguuaucucg

SEQ ID NO: 177902 - RNA, 19 nt, Artificial Sequence
  Description of Artificial Sequence: Synthetic oligonucleotide
  Sense strand starting at position 700 of SEQ ID NO: 2294
gaauuaaacugguuaccag

SEQ ID NO: 177903 - RNA, 19 nt, Artificial Sequence
  Description of Artificial Sequence: Synthetic oligonucleotide
  Antisense strand to SEQ ID NO: 177902
cugguaaccaguuuaauuc

SEQ ID NO: 177904 - RNA, 19 nt, Artificial Sequence
  Description of Artificial Sequence: Synthetic oligonucleotide
  Sense strand starting at position 451 of SEQ ID NO: 2294
cagcuuugugaguacauaa

SEQ ID NO: 177905 - RNA, 19 nt, Artificial Sequence
  Description of Artificial Sequence: Synthetic oligonucleotide
  Antisense strand to SEQ ID NO: 177904
uuauguacucacaaagcug

SEQ ID NO: 177906 - RNA, 19 nt, Artificial Sequence
  Description of Artificial Sequence: Synthetic oligonucleotide
  Sense strand starting at position 450 of SEQ ID NO: 2294
ucagcuuugugaguacaua

SEQ ID NO: 177907 - RNA, 19 nt, Artificial Sequence
  Description of Artificial Sequence: Synthetic oligonucleotide
  Antisense strand to SEQ ID NO: 177906
uauguacucacaaagcuga

SEQ ID NO: 177908 - RNA, 19 nt, Artificial Sequence
  Description of Artificial Sequence: Synthetic oligonucleotide
  Sense strand starting at position 391 of SEQ ID NO: 2294
uagaguuagggauggaagu

SEQ ID NO: 177909 - RNA, 19 nt, Artificial Sequence
  Description of Artificial Sequence: Synthetic oligonucleotide
  Antisense strand to SEQ ID NO: 177908
acuuccaucccuaacucua

SEQ ID NO: 177910 - RNA, 19 nt, Artificial Sequence
  Description of Artificial Sequence: Synthetic oligonucleotide
  Sense strand starting at position 258 of SEQ ID NO: 2294
ugauccauuccauagaguu

SEQ ID NO: 177911 - RNA, 19 nt, Artificial Sequence
  Description of Artificial Sequence: Synthetic oligonucleotide
  Antisense strand to SEQ ID NO: 177910
aacucuauggaauggauca

SEQ ID NO: 177912 - RNA, 19 nt, Artificial Sequence
  Description of Artificial Sequence: Synthetic oligonucleotide
  Sense strand starting at position 246 of SEQ ID NO: 2294
ggaucugagaggugaucca

SEQ ID NO: 177913 - RNA, 19 nt, Artificial Sequence
  Description of Artificial Sequence: Synthetic oligonucleotide
  Antisense strand to SEQ ID NO: 177912
uggaucaccucucagaucc

SEQ ID NO: 177914 - RNA, 19 nt, Artificial Sequence
  Description of Artificial Sequence: Synthetic oligonucleotide
  Sense strand starting at position 3919 of SEQ ID NO: 2293
caggaugacuggcuuugau

SEQ ID NO: 177915 - RNA, 19 nt, Artificial Sequence
  Description of Artificial Sequence: Synthetic oligonucleotide
  Antisense strand to SEQ ID NO: 177914
aucaaagccagucauccug

SEQ ID NO: 177916 - RNA, 19 nt, Artificial Sequence
  Description of Artificial Sequence: Synthetic oligonucleotide
  Sense strand starting at position 3776 of SEQ ID NO: 2293
gacgaaggccuuggagaaa

SEQ ID NO: 177917 - RNA, 19 nt, Artificial Sequence
  Description of Artificial Sequence: Synthetic oligonucleotide
  Antisense strand to SEQ ID NO: 177916
uuucuccaaggccuucguc

SEQ ID NO: 177918 - RNA, 19 nt, Artificial Sequence
  Description of Artificial Sequence: Synthetic oligonucleotide
  Sense strand starting at position 3775 of SEQ ID NO: 2293
agacgaaggccuuggagaa

SEQ ID NO: 177919 - RNA, 19 nt, Artificial Sequence
  Description of Artificial Sequence: Synthetic oligonucleotide
  Antisense strand to SEQ ID NO: 177918
uucuccaaggccuucgucu

SEQ ID NO: 177920 - RNA, 19 nt, Artificial Sequence
  Description of Artificial Sequence: Synthetic oligonucleotide
  Sense strand starting at position 3626 of SEQ ID NO: 2293
gagaaagcacuuuaucugu

SEQ ID NO: 177921 - RNA, 19 nt, Artificial Sequence
  Description of Artificial Sequence: Synthetic oligonucleotide
  Antisense strand to SEQ ID NO: 177920
acagauaaagugcuuucuc

SEQ ID NO: 177922 - RNA, 19 nt, Artificial Sequence
  Description of Artificial Sequence: Synthetic oligonucleotide
  Sense strand starting at position 2946 of SEQ ID NO: 2293
ucugcucuuccaggaagaa

SEQ ID NO: 177923 - RNA, 19 nt, Artificial Sequence
  Description of Artificial Sequence: Synthetic oligonucleotide
  Antisense strand to SEQ ID NO: 177922
uucuuccuggaagagcaga

SEQ ID NO: 177924 - RNA, 19 nt, Artificial Sequence
  Description of Artificial Sequence: Synthetic oligonucleotide
  Sense strand starting at position 2786 of SEQ ID NO: 2293
gagacuguggcuggugaua

SEQ ID NO: 177925 - RNA, 19 nt, Artificial Sequence
  Description of Artificial Sequence: Synthetic oligonucleotide
  Antisense strand to SEQ ID NO: 177924
uaucaccagccacagucuc

SEQ ID NO: 177926 - RNA, 19 nt, Artificial Sequence
  Description of Artificial Sequence: Synthetic oligonucleotide
  Sense strand starting at position 2319 of SEQ ID NO: 2293
guagcugaaguggaauuaa

SEQ ID NO: 177927 - RNA, 19 nt, Artificial Sequence
  Description of Artificial Sequence: Synthetic oligonucleotide
  Antisense strand to SEQ ID NO: 177926
uuaauuccacuucagcuac

SEQ ID NO: 177928 - RNA, 19 nt, Artificial Sequence
  Description of Artificial Sequence: Synthetic oligonucleotide
  Sense strand starting at position 2308 of SEQ ID NO: 2293
agcaauuaacuguagcuga

SEQ ID NO: 177929 - RNA, 19 nt, Artificial Sequence
  Description of Artificial Sequence: Synthetic oligonucleotide
  Antisense strand to SEQ ID NO: 177928
ucagcuacaguuaauugcu

SEQ ID NO: 177930 - RNA, 19 nt, Artificial Sequence
  Description of Artificial Sequence: Synthetic oligonucleotide
  Sense strand starting at position 2297 of SEQ ID NO: 2293
cuagaaugguuagcaauua

SEQ ID NO: 177931 - RNA, 19 nt, Artificial Sequence
  Description of Artificial Sequence: Synthetic oligonucleotide
  Antisense strand to SEQ ID NO: 177930
uaauugcuaaccauucuag

SEQ ID NO: 177932 - RNA, 19 nt, Artificial Sequence
  Description of Artificial Sequence: Synthetic oligonucleotide
  Sense strand starting at position 2294 of SEQ ID NO: 2293
guucuagaaugguuagcaa

SEQ ID NO: 177933 - RNA, 19 nt, Artificial Sequence
  Description of Artificial Sequence: Synthetic oligonucleotide
  Antisense strand to SEQ ID NO: 177932
uugcuaaccauucuagaac

SEQ ID NO: 177934 - RNA, 19 nt, Artificial Sequence
  Description of Artificial Sequence: Synthetic oligonucleotide
  Sense strand starting at position 2222 of SEQ ID NO: 2293
ucagcuggucuugaagaaa

SEQ ID NO: 177935 - RNA, 19 nt, Artificial Sequence
  Description of Artificial Sequence: Synthetic oligonucleotide
  Antisense strand to SEQ ID NO: 177934
uuucuucaagaccagcuga

SEQ ID NO: 177936 - RNA, 19 nt, Artificial Sequence
  Description of Artificial Sequence: Synthetic oligonucleotide
  Sense strand starting at position 2187 of SEQ ID NO: 2293
ggugucugugcugauuuca

SEQ ID NO: 177937 - RNA, 19 nt, Artificial Sequence
  Description of Artificial Sequence: Synthetic oligonucleotide
  Antisense strand to SEQ ID NO: 177936
ugaaaucagcacagacacc

SEQ ID NO: 177938 - RNA, 19 nt, Artificial Sequence
  Description of Artificial Sequence: Synthetic oligonucleotide
  Sense strand starting at position 2127 of SEQ ID NO: 2293
aacagagauuucgacaaag

SEQ ID NO: 177939 - RNA, 19 nt, Artificial Sequence
  Description of Artificial Sequence: Synthetic oligonucleotide
  Antisense strand to SEQ ID NO: 177938
cuuugucgaaaucucuguu

SEQ ID NO: 177940 - RNA, 19 nt, Artificial Sequence
  Description of Artificial Sequence: Synthetic oligonucleotide
  Sense strand starting at position 2040 of SEQ ID NO: 2293
guugcaucugcccuugagu

SEQ ID NO: 177941 - RNA, 19 nt, Artificial Sequence
  Description of Artificial Sequence: Synthetic oligonucleotide
  Antisense strand to SEQ ID NO: 177940
acucaagggcagaugcaac

SEQ ID NO: 177942 - RNA, 19 nt, Artificial Sequence
  Description of Artificial Sequence: Synthetic oligonucleotide
  Sense strand starting at position 1998 of SEQ ID NO: 2293
cacugauccuggguuaggu

SEQ ID NO: 177943 - RNA, 19 nt, Artificial Sequence
  Description of Artificial Sequence: Synthetic oligonucleotide
  Antisense strand to SEQ ID NO: 177942
accuaacccaggaucagug

SEQ ID NO: 177944 - RNA, 19 nt, Artificial Sequence
  Description of Artificial Sequence: Synthetic oligonucleotide
  Sense strand starting at position 1795 of SEQ ID NO: 2293
uguuauagugcauaagaca

SEQ ID NO: 177945 - RNA, 19 nt, Artificial Sequence
  Description of Artificial Sequence: Synthetic oligonucleotide
  Antisense strand to SEQ ID NO: 177944
ugucuuaugcacuauaaca

SEQ ID NO: 177946 - RNA, 19 nt, Artificial Sequence
  Description of Artificial Sequence: Synthetic oligonucleotide
  Sense strand starting at position 1793 of SEQ ID NO: 2293
uauguuauagugcauaaga

SEQ ID NO: 177947 - RNA, 19 nt, Artificial Sequence
  Description of Artificial Sequence: Synthetic oligonucleotide
  Antisense strand to SEQ ID NO: 177946
ucuuaugcacuauaacaua

SEQ ID NO: 177948 - RNA, 19 nt, Artificial Sequence
  Description of Artificial Sequence: Synthetic oligonucleotide
  Sense strand starting at position 1585 of SEQ ID NO: 2293
uggagaacauaugacaaau

SEQ ID NO: 177949 - RNA, 19 nt, Artificial Sequence
  Description of Artificial Sequence: Synthetic oligonucleotide
  Antisense strand to SEQ ID NO: 177948
auuugucauauguucucca

SEQ ID NO: 177950 - RNA, 19 nt, Artificial Sequence
  Description of Artificial Sequence: Synthetic oligonucleotide
  Sense strand starting at position 1444 of SEQ ID NO: 2293
uguugaguuucuuugaaau

SEQ ID NO: 177951 - RNA, 19 nt, Artificial Sequence
  Description of Artificial Sequence: Synthetic oligonucleotide
  Antisense strand to SEQ ID NO: 177950
auuucaaagaaacucaaca

SEQ ID NO: 177952 - RNA, 19 nt, Artificial Sequence
  Description of Artificial Sequence: Synthetic oligonucleotide
  Sense strand starting at position 1434 of SEQ ID NO: 2293
uaagaacucuuguugaguu

SEQ ID NO: 177953 - RNA, 19 nt, Artificial Sequence
  Description of Artificial Sequence: Synthetic oligonucleotide
  Antisense strand to SEQ ID NO: 177952
aacucaacaagaguucuua

SEQ ID NO: 177954 - RNA, 19 nt, Artificial Sequence
  Description of Artificial Sequence: Synthetic oligonucleotide
  Sense strand starting at position 1373 of SEQ ID NO: 2293
acugaagaguuguuaacuc

SEQ ID NO: 177955 - RNA, 19 nt, Artificial Sequence
  Description of Artificial Sequence: Synthetic oligonucleotide
  Antisense strand to SEQ ID NO: 177954
gaguuaacaacucuucagu

SEQ ID NO: 177956 - RNA, 19 nt, Artificial Sequence
  Description of Artificial Sequence: Synthetic oligonucleotide
  Sense strand starting at position 1364 of SEQ ID NO: 2293
gguacuccuacugaagagu

SEQ ID NO: 177957 - RNA, 19 nt, Artificial Sequence
  Description of Artificial Sequence: Synthetic oligonucleotide
  Antisense strand to SEQ ID NO: 177956
acucuucaguaggaguacc

SEQ ID NO: 177958 - RNA, 19 nt, Artificial Sequence
  Description of Artificial Sequence: Synthetic oligonucleotide
  Sense strand starting at position 1339 of SEQ ID NO: 2293
uugccaucaaugggaugua

SEQ ID NO: 177959 - RNA, 19 nt, Artificial Sequence
  Description of Artificial Sequence: Synthetic oligonucleotide
  Antisense strand to SEQ ID NO: 177958
uacaucccauugauggcaa

SEQ ID NO: 177960 - RNA, 19 nt, Artificial Sequence
  Description of Artificial Sequence: Synthetic oligonucleotide
  Sense strand starting at position 1248 of SEQ ID NO: 2293
guucuugcaagucaggaaa

SEQ ID NO: 177961 - RNA, 19 nt, Artificial Sequence
  Description of Artificial Sequence: Synthetic oligonucleotide
  Antisense strand to SEQ ID NO: 177960
uuuccugacuugcaagaac

SEQ ID NO: 177962 - RNA, 19 nt, Artificial Sequence
  Description of Artificial Sequence: Synthetic oligonucleotide
  Sense strand starting at position 1208 of SEQ ID NO: 2293
uguauaacagcuuacguaa

SEQ ID NO: 177963 - RNA, 19 nt, Artificial Sequence
  Description of Artificial Sequence: Synthetic oligonucleotide
  Antisense strand to SEQ ID NO: 177962
uuacguaagcuguuauaca

SEQ ID NO: 177964 - RNA, 19 nt, Artificial Sequence
  Description of Artificial Sequence: Synthetic oligonucleotide
  Sense strand starting at position 913 of SEQ ID NO: 2293
ggccaugagauguggacuu

SEQ ID NO: 177965 - RNA, 19 nt, Artificial Sequence
  Description of Artificial Sequence: Synthetic oligonucleotide
  Antisense strand to SEQ ID NO: 177964
aaguccacaucucauggcc

SEQ ID NO: 177966 - RNA, 19 nt, Artificial Sequence
  Description of Artificial Sequence: Synthetic oligonucleotide
  Sense strand starting at position 902 of SEQ ID NO: 2293
cauuuauguucggccauga

SEQ ID NO: 177967 - RNA, 19 nt, Artificial Sequence
  Description of Artificial Sequence: Synthetic oligonucleotide
  Antisense strand to SEQ ID NO: 177966
ucauggccgaacauaaaug

SEQ ID NO: 177968 - RNA, 19 nt, Artificial Sequence
  Description of Artificial Sequence: Synthetic oligonucleotide
  Sense strand starting at position 900 of SEQ ID NO: 2293
agcauuuauguucggccau

SEQ ID NO: 177969 - RNA, 19 nt, Artificial Sequence
  Description of Artificial Sequence: Synthetic oligonucleotide
  Antisense strand to SEQ ID NO: 177968
auggccgaacauaaaugcu

SEQ ID NO: 177970 - RNA, 19 nt, Artificial Sequence
  Description of Artificial Sequence: Synthetic oligonucleotide
  Sense strand starting at position 834 of SEQ ID NO: 2293
ugucuuguccacuauuugu

SEQ ID NO: 177971 - RNA, 19 nt, Artificial Sequence
  Description of Artificial Sequence: Synthetic oligonucleotide
  Antisense strand to SEQ ID NO: 177970
acaaauaguggacaagaca

SEQ ID NO: 177972 - RNA, 19 nt, Artificial Sequence
  Description of Artificial Sequence: Synthetic oligonucleotide
  Sense strand starting at position 612 of SEQ ID NO: 2293
ggaaaccacugcucuauua

SEQ ID NO: 177973 - RNA, 19 nt, Artificial Sequence
  Description of Artificial Sequence: Synthetic oligonucleotide
  Antisense strand to SEQ ID NO: 177972
uaauagagcagugguuucc

SEQ ID NO: 177974 - RNA, 19 nt, Artificial Sequence
  Description of Artificial Sequence: Synthetic oligonucleotide
  Sense strand starting at position 553 of SEQ ID NO: 2293
uuaagugacuuccuaguaa

SEQ ID NO: 177975 - RNA, 19 nt, Artificial Sequence
  Description of Artificial Sequence: Synthetic oligonucleotide
  Antisense strand to SEQ ID NO: 177974
uuacuaggaagucacuuaa

SEQ ID NO: 177976 - RNA, 19 nt, Artificial Sequence
  Description of Artificial Sequence: Synthetic oligonucleotide
  Sense strand starting at position 542 of SEQ ID NO: 2293
guaagaguccauuaaguga

SEQ ID NO: 177977 - RNA, 19 nt, Artificial Sequence
  Description of Artificial Sequence: Synthetic oligonucleotide
  Antisense strand to SEQ ID NO: 177976
ucacuuaauggacucuuac

SEQ ID NO: 177978 - RNA, 19 nt, Artificial Sequence
  Description of Artificial Sequence: Synthetic oligonucleotide
  Sense strand starting at position 420 of SEQ ID NO: 2293
ugccgauuucugugguuaa

SEQ ID NO: 177979 - RNA, 19 nt, Artificial Sequence
  Description of Artificial Sequence: Synthetic oligonucleotide
  Antisense strand to SEQ ID NO: 177978
uuaaccacagaaaucggca

SEQ ID NO: 177980 - RNA, 19 nt, Artificial Sequence
  Description of Artificial Sequence: Synthetic oligonucleotide
  Sense strand starting at position 353 of SEQ ID NO: 2293
agcagugcugugcuaguaa

SEQ ID NO: 177981 - RNA, 19 nt, Artificial Sequence
  Description of Artificial Sequence: Synthetic oligonucleotide
  Antisense strand to SEQ ID NO: 177980
uuacuagcacagcacugcu

SEQ ID NO: 177982 - RNA, 19 nt, Artificial Sequence
  Description of Artificial Sequence: Synthetic oligonucleotide
  Sense strand starting at position 281 of SEQ ID NO: 2293
aaacgaugucaguacuauu

SEQ ID NO: 177983 - RNA, 19 nt, Artificial Sequence
  Description of Artificial Sequence: Synthetic oligonucleotide
  Antisense strand to SEQ ID NO: 177982
aauaguacugacaucguuu

SEQ ID NO: 177984 - RNA, 19 nt, Artificial Sequence
  Description of Artificial Sequence: Synthetic oligonucleotide
  Sense strand starting at position 239 of SEQ ID NO: 2293
ggaaacaucucugugcauu

SEQ ID NO: 177985 - RNA, 19 nt, Artificial Sequence
  Description of Artificial Sequence: Synthetic oligonucleotide
  Antisense strand to SEQ ID NO: 177984
aaugcacagagauguuucc

SEQ ID NO: 177986 - RNA, 19 nt, Artificial Sequence
  Description of Artificial Sequence: Synthetic oligonucleotide
  Sense strand starting at position 238 of SEQ ID NO: 2293
gggaaacaucucugugcau

SEQ ID NO: 177987 - RNA, 19 nt, Artificial Sequence
  Description of Artificial Sequence: Synthetic oligonucleotide
  Antisense strand to SEQ ID NO: 177986
augcacagagauguuuccc

SEQ ID NO: 177988 - RNA, 19 nt, Artificial Sequence
  Description of Artificial Sequence: Synthetic oligonucleotide
  Sense strand starting at position 237 of SEQ ID NO: 2293
agggaaacaucucugugca

SEQ ID NO: 177989 - RNA, 19 nt, Artificial Sequence
  Description of Artificial Sequence: Synthetic oligonucleotide
  Antisense strand to SEQ ID NO: 177988
ugcacagagauguuucccu

SEQ ID NO: 177990 - RNA, 19 nt, Artificial Sequence
  Description of Artificial Sequence: Synthetic oligonucleotide
  Sense strand starting at position 152 of SEQ ID NO: 2293
uaauguguugcuuaauaga

SEQ ID NO: 177991 - RNA, 19 nt, Artificial Sequence
  Description of Artificial Sequence: Synthetic oligonucleotide
  Antisense strand to SEQ ID NO: 177990
ucuauuaagcaacacauua

SEQ ID NO: 177992 - RNA, 19 nt, Artificial Sequence
  Description of Artificial Sequence: Synthetic oligonucleotide
  Sense strand starting at position 2 of SEQ ID NO: 2293
gagucaaauugaggaauuu

SEQ ID NO: 177993 - RNA, 19 nt, Artificial Sequence
  Description of Artificial Sequence: Synthetic oligonucleotide
  Antisense strand to SEQ ID NO: 177992
aaauuccucaauuugacuc

SEQ ID NO: 177994 - RNA, 19 nt, Artificial Sequence
  Description of Artificial Sequence: Synthetic oligonucleotide
  Sense strand starting at position 66 of SEQ ID NO: 2296
cuggaugagccucaaucau

SEQ ID NO: 177995 - RNA, 19 nt, Artificial Sequence
  Description of Artificial Sequence: Synthetic oligonucleotide
  Antisense strand to SEQ ID NO: 177994
augauugaggcucauccag

SEQ ID NO: 177996 - RNA, 19 nt, Artificial Sequence
  Description of Artificial Sequence: Synthetic oligonucleotide
  Sense strand starting at position 125 of SEQ ID NO: 2296
uagacagugcuaugaagac

SEQ ID NO: 177997 - RNA, 19 nt, Artificial Sequence
  Description of Artificial Sequence: Synthetic oligonucleotide
  Antisense strand to SEQ ID NO: 177996
gucuucauagcacugucua

SEQ ID NO: 177998 - RNA, 19 nt, Artificial Sequence
  Description of Artificial Sequence: Synthetic oligonucleotide
  Sense strand starting at position 146 of SEQ ID NO: 2296
ccagcauagaguuagaggu

SEQ ID NO: 177999 - RNA, 19 nt, Artificial Sequence
  Description of Artificial Sequence: Synthetic oligonucleotide
  Antisense strand to SEQ ID NO: 177998
accucuaacucuaugcugg

SEQ ID NO: 178000 - RNA, 19 nt, Artificial Sequence
  Description of Artificial Sequence: Synthetic oligonucleotide
  Sense strand starting at position 150 of SEQ ID NO: 2296
cauagaguuagagguuaga

SEQ ID NO: 178001 - RNA, 19 nt, Artificial Sequence
  Description of Artificial Sequence: Synthetic oligonucleotide
  Antisense strand to SEQ ID NO: 178000
ucuaaccucuaacucuaug

SEQ ID NO: 178002 - RNA, 19 nt, Artificial Sequence
  Description of Artificial Sequence: Synthetic oligonucleotide
  Sense strand starting at position 167 of SEQ ID NO: 2296
gagaauuaggcagguaauc

SEQ ID NO: 178003 - RNA, 19 nt, Artificial Sequence
  Description of Artificial Sequence: Synthetic oligonucleotide
  Antisense strand to SEQ ID NO: 178002
gauuaccugccuaauucuc

SEQ ID NO: 178004 - RNA, 19 nt, Artificial Sequence
  Description of Artificial Sequence: Synthetic oligonucleotide
  Sense strand starting at position 199 of SEQ ID NO: 2296
ucucaaaggaggugacauu

SEQ ID NO: 178005 - RNA, 19 nt, Artificial Sequence
  Description of Artificial Sequence: Synthetic oligonucleotide
  Antisense strand to SEQ ID NO: 178004
aaugucaccuccuuugaga

SEQ ID NO: 178006 - RNA, 19 nt, Artificial Sequence
  Description of Artificial Sequence: Synthetic oligonucleotide
  Sense strand starting at position 244 of SEQ ID NO: 2296
ugggcuaagugacuaucua

SEQ ID NO: 178007 - RNA, 19 nt, Artificial Sequence
  Description of Artificial Sequence: Synthetic oligonucleotide
  Antisense strand to SEQ ID NO: 178006
uagauagucacuuagccca

SEQ ID NO: 178008 - RNA, 19 nt, Artificial Sequence
  Description of Artificial Sequence: Synthetic oligonucleotide
  Sense strand starting at position 248 of SEQ ID NO: 2296
cuaagugacuaucuagaag

SEQ ID NO: 178009 - RNA, 19 nt, Artificial Sequence
  Description of Artificial Sequence: Synthetic oligonucleotide
  Antisense strand to SEQ ID NO: 178008
cuucuagauagucacuuag

SEQ ID NO: 178010 - RNA, 19 nt, Artificial Sequence
  Description of Artificial Sequence: Synthetic oligonucleotide
  Sense strand starting at position 602 of SEQ ID NO: 2296
aaccaagguccauguguuu

SEQ ID NO: 178011 - RNA, 19 nt, Artificial Sequence
  Description of Artificial Sequence: Synthetic oligonucleotide
  Antisense strand to SEQ ID NO: 178010
aaacacauggaccuugguu

SEQ ID NO: 178012 - RNA, 19 nt, Artificial Sequence
  Description of Artificial Sequence: Synthetic oligonucleotide
  Sense strand starting at position 1156 of SEQ ID NO: 2296
ccauaugguguccaaacua

SEQ ID NO: 178013 - RNA, 19 nt, Artificial Sequence
  Description of Artificial Sequence: Synthetic oligonucleotide
  Antisense strand to SEQ ID NO: 178012
uaguuuggacaccauaugg

SEQ ID NO: 178014 - RNA, 19 nt, Artificial Sequence
  Description of Artificial Sequence: Synthetic oligonucleotide
  Sense strand starting at position 1171 of SEQ ID NO: 2296
acuauucccugggaaagaa

SEQ ID NO: 178015 - RNA, 19 nt, Artificial Sequence
  Description of Artificial Sequence: Synthetic oligonucleotide
  Antisense strand to SEQ ID NO: 178014
uucuuucccagggaauagu

SEQ ID NO: 178016 - RNA, 19 nt, Artificial Sequence
  Description of Artificial Sequence: Synthetic oligonucleotide
  Sense strand starting at position 1325 of SEQ ID NO: 2296
gacacuguagccuaagagu

SEQ ID NO: 178017 - RNA, 19 nt, Artificial Sequence
  Description of Artificial Sequence: Synthetic oligonucleotide
  Antisense strand to SEQ ID NO: 178016
acucuuaggcuacaguguc

SEQ ID NO: 178018 - RNA, 19 nt, Artificial Sequence
  Description of Artificial Sequence: Synthetic oligonucleotide
  Sense strand starting at position 1338 of SEQ ID NO: 2296
aagaguaaagccuaacagu

SEQ ID NO: 178019 - RNA, 19 nt, Artificial Sequence
  Description of Artificial Sequence: Synthetic oligonucleotide
  Antisense strand to SEQ ID NO: 178018
acuguuaggcuuuacucuu

SEQ ID NO: 178020 - RNA, 19 nt, Artificial Sequence
  Description of Artificial Sequence: Synthetic oligonucleotide
  Sense strand starting at position 1399 of SEQ ID NO: 2296
ccuaacuucccagguguaa

SEQ ID NO: 178021 - RNA, 19 nt, Artificial Sequence
  Description of Artificial Sequence: Synthetic oligonucleotide
  Antisense strand to SEQ ID NO: 178020
uuacaccugggaaguuagg

SEQ ID NO: 178022 - RNA, 19 nt, Artificial Sequence
  Description of Artificial Sequence: Synthetic oligonucleotide
  Sense strand starting at position 1403 of SEQ ID NO: 2296
acuucccagguguaaauau

SEQ ID NO: 178023 - RNA, 19 nt, Artificial Sequence
  Description of Artificial Sequence: Synthetic oligonucleotide
  Antisense strand to SEQ ID NO: 178022
auauuuacaccugggaagu

SEQ ID NO: 178024 - RNA, 19 nt, Artificial Sequence
  Description of Artificial Sequence: Synthetic oligonucleotide
  Sense strand starting at position 1411 of SEQ ID NO: 2296
gguguaaauaugggcaaau

SEQ ID NO: 178025 - RNA, 19 nt, Artificial Sequence
  Description of Artificial Sequence: Synthetic oligonucleotide
  Antisense strand to SEQ ID NO: 178024
auuugcccauauuuacacc

SEQ ID NO: 178026 - RNA, 19 nt, Artificial Sequence
  Description of Artificial Sequence: Synthetic oligonucleotide
  Sense strand starting at position 1412 of SEQ ID NO: 2296
guguaaauaugggcaaauu

SEQ ID NO: 178027 - RNA, 19 nt, Artificial Sequence
  Description of Artificial Sequence: Synthetic oligonucleotide
  Antisense strand to SEQ ID NO: 178026
aauuugcccauauuuacac

SEQ ID NO: 178028 - RNA, 19 nt, Artificial Sequence
  Description of Artificial Sequence: Synthetic oligonucleotide
  Sense strand starting at position 1422 of SEQ ID NO: 2296
gggcaaauuacguaagcuc

SEQ ID NO: 178029 - RNA, 19 nt, Artificial Sequence
  Description of Artificial Sequence: Synthetic oligonucleotide
  Antisense strand to SEQ ID NO: 178028
gagcuuacguaauuugccc

SEQ ID NO: 178030 - RNA, 19 nt, Artificial Sequence
  Description of Artificial Sequence: Synthetic oligonucleotide
  Sense strand starting at position 1479 of SEQ ID NO: 2296
ggcuacucugcagauuaac

SEQ ID NO: 178031 - RNA, 19 nt, Artificial Sequence
  Description of Artificial Sequence: Synthetic oligonucleotide
  Antisense strand to SEQ ID NO: 178030
guuaaucugcagaguagcc

SEQ ID NO: 178032 - RNA, 19 nt, Artificial Sequence
  Description of Artificial Sequence: Synthetic oligonucleotide
  Sense strand starting at position 1543 of SEQ ID NO: 2296
agagaaguuaaguggcagu

SEQ ID NO: 178033 - RNA, 19 nt, Artificial Sequence
  Description of Artificial Sequence: Synthetic oligonucleotide
  Antisense strand to SEQ ID NO: 178032
acugccacuuaacuucucu

SEQ ID NO: 178034 - RNA, 19 nt, Artificial Sequence
  Description of Artificial Sequence: Synthetic oligonucleotide
  Sense strand starting at position 1554 of SEQ ID NO: 2296
guggcaguuauugguauuu

SEQ ID NO: 178035 - RNA, 19 nt, Artificial Sequence
  Description of Artificial Sequence: Synthetic oligonucleotide
  Antisense strand to SEQ ID NO: 178034
aaauaccaauaacugccac

SEQ ID NO: 178036 - RNA, 19 nt, Artificial Sequence
  Description of Artificial Sequence: Synthetic oligonucleotide
  Sense strand starting at position 2204 of SEQ ID NO: 2296
ucgguaauccugggucaca

SEQ ID NO: 178037 - RNA, 19 nt, Artificial Sequence
  Description of Artificial Sequence: Synthetic oligonucleotide
  Antisense strand to SEQ ID NO: 178036
ugugacccaggauuaccga

SEQ ID NO: 178038 - RNA, 19 nt, Artificial Sequence
  Description of Artificial Sequence: Synthetic oligonucleotide
  Sense strand starting at position 2447 of SEQ ID NO: 2296
ccaagcauuucgcuagugu

SEQ ID NO: 178039 - RNA, 19 nt, Artificial Sequence
  Description of Artificial Sequence: Synthetic oligonucleotide
  Antisense strand to SEQ ID NO: 178038
acacuagcgaaaugcuugg

SEQ ID NO: 178040 - RNA, 19 nt, Artificial Sequence
  Description of Artificial Sequence: Synthetic oligonucleotide
  Sense strand starting at position 2448 of SEQ ID NO: 2296
caagcauuucgcuaguguc

SEQ ID NO: 178041 - RNA, 19 nt, Artificial Sequence
  Description of Artificial Sequence: Synthetic oligonucleotide
  Antisense strand to SEQ ID NO: 178040
gacacuagcgaaaugcuug

SEQ ID NO: 178042 - RNA, 19 nt, Artificial Sequence
  Description of Artificial Sequence: Synthetic oligonucleotide
  Sense strand starting at position 2523 of SEQ ID NO: 2296
uggccucgugauggaauau

SEQ ID NO: 178043 - RNA, 19 nt, Artificial Sequence
  Description of Artificial Sequence: Synthetic oligonucleotide
  Antisense strand to SEQ ID NO: 178042
auauuccaucacgaggcca

SEQ ID NO: 178044 - RNA, 19 nt, Artificial Sequence
  Description of Artificial Sequence: Synthetic oligonucleotide
  Sense strand starting at position 2602 of SEQ ID NO: 2296
acugccugguucccagaaa

SEQ ID NO: 178045 - RNA, 19 nt, Artificial Sequence
  Description of Artificial Sequence: Synthetic oligonucleotide
  Antisense strand to SEQ ID NO: 178044
uuucugggaaccaggcagu

SEQ ID NO: 178046 - RNA, 19 nt, Artificial Sequence
  Description of Artificial Sequence: Synthetic oligonucleotide
  Sense strand starting at position 2870 of SEQ ID NO: 2296
ggaagucuauagucccuga

SEQ ID NO: 178047 - RNA, 19 nt, Artificial Sequence
  Description of Artificial Sequence: Synthetic oligonucleotide
  Antisense strand to SEQ ID NO: 178046
ucagggacuauagacuucc

SEQ ID NO: 178048 - RNA, 19 nt, Artificial Sequence
  Description of Artificial Sequence: Synthetic oligonucleotide
  Sense strand starting at position 2873 of SEQ ID NO: 2296
agucuauagucccugacca

SEQ ID NO: 178049 - RNA, 19 nt, Artificial Sequence
  Description of Artificial Sequence: Synthetic oligonucleotide
  Antisense strand to SEQ ID NO: 178048
uggucagggacuauagacu

SEQ ID NO: 178050 - RNA, 19 nt, Artificial Sequence
  Description of Artificial Sequence: Synthetic oligonucleotide
  Sense strand starting at position 2875 of SEQ ID NO: 2296
ucuauagucccugaccaca

SEQ ID NO: 178051 - RNA, 19 nt, Artificial Sequence
  Description of Artificial Sequence: Synthetic oligonucleotide
  Antisense strand to SEQ ID NO: 178050
uguggucagggacuauaga

SEQ ID NO: 178052 - RNA, 19 nt, Artificial Sequence
  Description of Artificial Sequence: Synthetic oligonucleotide
  Sense strand starting at position 2925 of SEQ ID NO: 2296
gcuggucaacucugaggaa

SEQ ID NO: 178053 - RNA, 19 nt, Artificial Sequence
  Description of Artificial Sequence: Synthetic oligonucleotide
  Antisense strand to SEQ ID NO: 178052
uuccucagaguugaccagc

SEQ ID NO: 178054 - RNA, 19 nt, Artificial Sequence
  Description of Artificial Sequence: Synthetic oligonucleotide
  Sense strand starting at position 3210 of SEQ ID NO: 2296
cucuccauccuguguaaug

SEQ ID NO: 178055 - RNA, 19 nt, Artificial Sequence
  Description of Artificial Sequence: Synthetic oligonucleotide
  Antisense strand to SEQ ID NO: 178054
cauuacacaggauggagag

SEQ ID NO: 178056 - RNA, 19 nt, Artificial Sequence
  Description of Artificial Sequence: Synthetic oligonucleotide
  Sense strand starting at position 3350 of SEQ ID NO: 2296
ucugcauucccaggacaga

SEQ ID NO: 178057 - RNA, 19 nt, Artificial Sequence
  Description of Artificial Sequence: Synthetic oligonucleotide
  Antisense strand to SEQ ID NO: 178056
ucuguccugggaaugcaga

SEQ ID NO: 178058 - RNA, 19 nt, Artificial Sequence
  Description of Artificial Sequence: Synthetic oligonucleotide
  Sense strand starting at position 3628 of SEQ ID NO: 2296
cagugucauuaguccugaa

SEQ ID NO: 178059 - RNA, 19 nt, Artificial Sequence
  Description of Artificial Sequence: Synthetic oligonucleotide
  Antisense strand to SEQ ID NO: 178058
uucaggacuaaugacacug

SEQ ID NO: 178060 - RNA, 19 nt, Artificial Sequence
  Description of Artificial Sequence: Synthetic oligonucleotide
  Sense strand starting at position 3632 of SEQ ID NO: 2296
gucauuaguccugaaugaa

SEQ ID NO: 178061 - RNA, 19 nt, Artificial Sequence
  Description of Artificial Sequence: Synthetic oligonucleotide
  Antisense strand to SEQ ID NO: 178060
uucauucaggacuaaugac

SEQ ID NO: 178062 - RNA, 19 nt, Artificial Sequence
  Description of Artificial Sequence: Synthetic oligonucleotide
  Sense strand starting at position 3665 of SEQ ID NO: 2296
gccaucucagguugaucua

SEQ ID NO: 178063 - RNA, 19 nt, Artificial Sequence
  Description of Artificial Sequence: Synthetic oligonucleotide
  Antisense strand to SEQ ID NO: 178062
uagaucaaccugagauggc

SEQ ID NO: 178064 - RNA, 19 nt, Artificial Sequence
  Description of Artificial Sequence: Synthetic oligonucleotide
  Sense strand starting at position 3666 of SEQ ID NO: 2296
ccaucucagguugaucuau

SEQ ID NO: 178065 - RNA, 19 nt, Artificial Sequence
  Description of Artificial Sequence: Synthetic oligonucleotide
  Antisense strand to SEQ ID NO: 178064
auagaucaaccugagaugg

SEQ ID NO: 178066 - RNA, 19 nt, Artificial Sequence
  Description of Artificial Sequence: Synthetic oligonucleotide
  Sense strand starting at position 3668 of SEQ ID NO: 2296
aucucagguugaucuauau

SEQ ID NO: 178067 - RNA, 19 nt, Artificial Sequence
  Description of Artificial Sequence: Synthetic oligonucleotide
  Antisense strand to SEQ ID NO: 178066
auauagaucaaccugagau

SEQ ID NO: 178068 - RNA, 19 nt, Artificial Sequence
  Description of Artificial Sequence: Synthetic oligonucleotide
  Sense strand starting at position 3697 of SEQ ID NO: 2296
ucacucagauagguucuua

SEQ ID NO: 178069 - RNA, 19 nt, Artificial Sequence
  Description of Artificial Sequence: Synthetic oligonucleotide
  Antisense strand to SEQ ID NO: 178068
uaagaaccuaucugaguga

SEQ ID NO: 178070 - RNA, 19 nt, Artificial Sequence
  Description of Artificial Sequence: Synthetic oligonucleotide
  Sense strand starting at position 3701 of SEQ ID NO: 2296
ucagauagguucuuaaagg

SEQ ID NO: 178071 - RNA, 19 nt, Artificial Sequence
  Description of Artificial Sequence: Synthetic oligonucleotide
  Antisense strand to SEQ ID NO: 178070
ccuuuaagaaccuaucuga

SEQ ID NO: 178072 - RNA, 19 nt, Artificial Sequence
  Description of Artificial Sequence: Synthetic oligonucleotide
  Sense strand starting at position 3863 of SEQ ID NO: 2296
aaaggcuguucuguuauga

SEQ ID NO: 178073 - RNA, 19 nt, Artificial Sequence
  Description of Artificial Sequence: Synthetic oligonucleotide
  Antisense strand to SEQ ID NO: 178072
ucauaacagaacagccuuu

SEQ ID NO: 178074 - RNA, 19 nt, Artificial Sequence
  Description of Artificial Sequence: Synthetic oligonucleotide
  Sense strand starting at position 253 of SEQ ID NO: 2295
agucuugagccguagccaa

SEQ ID NO: 178075 - RNA, 19 nt, Artificial Sequence
  Description of Artificial Sequence: Synthetic oligonucleotide
  Antisense strand to SEQ ID NO: 178074
uuggcuacggcucaagacu

SEQ ID NO: 178076 - RNA, 19 nt, Artificial Sequence
  Description of Artificial Sequence: Synthetic oligonucleotide
  Sense strand starting at position 382 of SEQ ID NO: 2295
ccauacguguuccugaauu

SEQ ID NO: 178077 - RNA, 19 nt, Artificial Sequence
  Description of Artificial Sequence: Synthetic oligonucleotide
  Antisense strand to SEQ ID NO: 178076
aauucaggaacacguaugg

SEQ ID NO: 178078 - RNA, 19 nt, Artificial Sequence
  Description of Artificial Sequence: Synthetic oligonucleotide
  Sense strand starting at position 384 of SEQ ID NO: 2295
auacguguuccugaauucu

SEQ ID NO: 178079 - RNA, 19 nt, Artificial Sequence
  Description of Artificial Sequence: Synthetic oligonucleotide
  Antisense strand to SEQ ID NO: 178078
agaauucaggaacacguau

SEQ ID NO: 178080 - RNA, 19 nt, Artificial Sequence
  Description of Artificial Sequence: Synthetic oligonucleotide
  Sense strand starting at position 393 of SEQ ID NO: 2295
ccugaauucuccugagucu

SEQ ID NO: 178081 - RNA, 19 nt, Artificial Sequence
  Description of Artificial Sequence: Synthetic oligonucleotide
  Antisense strand to SEQ ID NO: 178080
agacucaggagaauucagg

SEQ ID NO: 178082 - RNA, 19 nt, Artificial Sequence
  Description of Artificial Sequence: Synthetic oligonucleotide
  Sense strand starting at position 394 of SEQ ID NO: 2295
cugaauucuccugagucug

SEQ ID NO: 178083 - RNA, 19 nt, Artificial Sequence
  Description of Artificial Sequence: Synthetic oligonucleotide
  Antisense strand to SEQ ID NO: 178082
cagacucaggagaauucag

SEQ ID NO: 178084 - RNA, 19 nt, Artificial Sequence
  Description of Artificial Sequence: Synthetic oligonucleotide
  Sense strand starting at position 482 of SEQ ID NO: 2295
aaaggacugucaugaacuc

SEQ ID NO: 178085 - RNA, 19 nt, Artificial Sequence
  Description of Artificial Sequence: Synthetic oligonucleotide
  Antisense strand to SEQ ID NO: 178084
gaguucaugacaguccuuu

SEQ ID NO: 178086 - RNA, 19 nt, Artificial Sequence
  Description of Artificial Sequence: Synthetic oligonucleotide
  Sense strand starting at position 603 of SEQ ID NO: 2295
ccauuauacuuguuuacug

SEQ ID NO: 178087 - RNA, 19 nt, Artificial Sequence
  Description of Artificial Sequence: Synthetic oligonucleotide
  Antisense strand to SEQ ID NO: 178086
caguaaacaaguauaaugg

SEQ ID NO: 178088 - RNA, 19 nt, Artificial Sequence
  Description of Artificial Sequence: Synthetic oligonucleotide
  Sense strand starting at position 973 of SEQ ID NO: 2295
gcuuucuggagcugcuuaa

SEQ ID NO: 178089 - RNA, 19 nt, Artificial Sequence
  Description of Artificial Sequence: Synthetic oligonucleotide
  Antisense strand to SEQ ID NO: 178088
uuaagcagcuccagaaagc

SEQ ID NO: 178090 - RNA, 19 nt, Artificial Sequence
  Description of Artificial Sequence: Synthetic oligonucleotide
  Sense strand starting at position 1041 of SEQ ID NO: 2295
gggccuaaucucuggacaa

SEQ ID NO: 178091 - RNA, 19 nt, Artificial Sequence
  Description of Artificial Sequence: Synthetic oligonucleotide
  Antisense strand to SEQ ID NO: 178090
uuguccagagauuaggccc

SEQ ID NO: 178092 - RNA, 19 nt, Artificial Sequence
  Description of Artificial Sequence: Synthetic oligonucleotide
  Sense strand starting at position 1042 of SEQ ID NO: 2295
ggccuaaucucuggacaau

SEQ ID NO: 178093 - RNA, 19 nt, Artificial Sequence
  Description of Artificial Sequence: Synthetic oligonucleotide
  Antisense strand to SEQ ID NO: 178092
auuguccagagauuaggcc

SEQ ID NO: 178094 - RNA, 19 nt, Artificial Sequence
  Description of Artificial Sequence: Synthetic oligonucleotide
  Sense strand starting at position 1043 of SEQ ID NO: 2295
gccuaaucucuggacaaug

SEQ ID NO: 178095 - RNA, 19 nt, Artificial Sequence
  Description of Artificial Sequence: Synthetic oligonucleotide
  Antisense strand to SEQ ID NO: 178094
cauuguccagagauuaggc

SEQ ID NO: 178096 - RNA, 19 nt, Artificial Sequence
  Description of Artificial Sequence: Synthetic oligonucleotide
  Sense strand starting at position 1485 of SEQ ID NO: 2295
cugcgcagggcuguaauua

SEQ ID NO: 178097 - RNA, 19 nt, Artificial Sequence
  Description of Artificial Sequence: Synthetic oligonucleotide
  Antisense strand to SEQ ID NO: 178096
uaauuacagcccugcgcag

SEQ ID NO: 178098 - RNA, 19 nt, Artificial Sequence
  Description of Artificial Sequence: Synthetic oligonucleotide
  Sense strand starting at position 1680 of SEQ ID NO: 2295
gguggguuugagcgagaau

SEQ ID NO: 178099 - RNA, 19 nt, Artificial Sequence
  Description of Artificial Sequence: Synthetic oligonucleotide
  Antisense strand to SEQ ID NO: 178098
auucucgcucaaacccacc

SEQ ID NO: 178100 - RNA, 19 nt, Artificial Sequence
  Description of Artificial Sequence: Synthetic oligonucleotide
  Sense strand starting at position 1681 of SEQ ID NO: 2295
guggguuugagcgagaauu

SEQ ID NO: 178101 - RNA, 19 nt, Artificial Sequence
  Description of Artificial Sequence: Synthetic oligonucleotide
  Antisense strand to SEQ ID NO: 178100
aauucucgcucaaacccac

SEQ ID NO: 178102 - RNA, 19 nt, Artificial Sequence
  Description of Artificial Sequence: Synthetic oligonucleotide
  Sense strand starting at position 2572 of SEQ ID NO: 2295
cgcgaugcauccucugaca

SEQ ID NO: 178103 - RNA, 19 nt, Artificial Sequence
  Description of Artificial Sequence: Synthetic oligonucleotide
  Antisense strand to SEQ ID NO: 178102
ugucagaggaugcaucgcg

SEQ ID NO: 178104 - RNA, 19 nt, Artificial Sequence
  Description of Artificial Sequence: Synthetic oligonucleotide
  Sense strand starting at position 2744 of SEQ ID NO: 2295
ugaagauccucuucuacug

SEQ ID NO: 178105 - RNA, 19 nt, Artificial Sequence
  Description of Artificial Sequence: Synthetic oligonucleotide
  Antisense strand to SEQ ID NO: 178104
caguagaagaggaucuuca

SEQ ID NO: 178106 - RNA, 19 nt, Artificial Sequence
  Description of Artificial Sequence: Synthetic oligonucleotide
  Sense strand starting at position 3022 of SEQ ID NO: 2295
caaguaacccgccggauaa

SEQ ID NO: 178107 - RNA, 19 nt, Artificial Sequence
  Description of Artificial Sequence: Synthetic oligonucleotide
  Antisense strand to SEQ ID NO: 178106
uuauccggcggguuacuug

SEQ ID NO: 178108 - RNA, 19 nt, Artificial Sequence
  Description of Artificial Sequence: Synthetic oligonucleotide
  Sense strand starting at position 3023 of SEQ ID NO: 2295
aaguaacccgccggauaaa

SEQ ID NO: 178109 - RNA, 19 nt, Artificial Sequence
  Description of Artificial Sequence: Synthetic oligonucleotide
  Antisense strand to SEQ ID NO: 178108
uuuauccggcggguuacuu

SEQ ID NO: 178110 - RNA, 19 nt, Artificial Sequence
  Description of Artificial Sequence: Synthetic oligonucleotide
  Sense strand starting at position 3286 of SEQ ID NO: 2295
gccugaggcuuugauaccu

SEQ ID NO: 178111 - RNA, 19 nt, Artificial Sequence
  Description of Artificial Sequence: Synthetic oligonucleotide
  Antisense strand to SEQ ID NO: 178110
agguaucaaagccucaggc

SEQ ID NO: 178112 - RNA, 19 nt, Artificial Sequence
  Description of Artificial Sequence: Synthetic oligonucleotide
  Sense strand starting at position 3542 of SEQ ID NO: 2295
uucuguucccauugacuca

SEQ ID NO: 178113 - RNA, 19 nt, Artificial Sequence
  Description of Artificial Sequence: Synthetic oligonucleotide
  Antisense strand to SEQ ID NO: 178112
ugagucaaugggaacagaa

SEQ ID NO: 178114 - RNA, 19 nt, Artificial Sequence
  Description of Artificial Sequence: Synthetic oligonucleotide
  Sense strand starting at position 3788 of SEQ ID NO: 2295
ccaucagacugguggguuu

SEQ ID NO: 178115 - RNA, 19 nt, Artificial Sequence
  Description of Artificial Sequence: Synthetic oligonucleotide
  Antisense strand to SEQ ID NO: 178114
aaacccaccagucugaugg

SEQ ID NO: 178116 - RNA, 19 nt, Artificial Sequence
  Description of Artificial Sequence: Synthetic oligonucleotide
  Sense strand starting at position 3972 of SEQ ID NO: 2295
ggguggugacugggauaca

SEQ ID NO: 178117 - RNA, 19 nt, Artificial Sequence
  Description of Artificial Sequence: Synthetic oligonucleotide
  Antisense strand to SEQ ID NO: 178116
uguaucccagucaccaccc

SEQ ID NO: 178118 - RNA, 19 nt, Artificial Sequence
  Description of Artificial Sequence: Synthetic oligonucleotide
  Sense strand starting at position 44 of SEQ ID NO: 2297
gaaguucuugugcauguga

SEQ ID NO: 178119 - RNA, 19 nt, Artificial Sequence
  Description of Artificial Sequence: Synthetic oligonucleotide
  Antisense strand to SEQ ID NO: 178118
ucacaugcacaagaacuuc

SEQ ID NO: 178120 - RNA, 19 nt, Artificial Sequence
  Description of Artificial Sequence: Synthetic oligonucleotide
  Sense strand starting at position 200 of SEQ ID NO: 2297
agugcuaucccaugaaacu

SEQ ID NO: 178121 - RNA, 19 nt, Artificial Sequence
  Description of Artificial Sequence: Synthetic oligonucleotide
  Antisense strand to SEQ ID NO: 178120
aguuucaugggauagcacu

SEQ ID NO: 178122 - RNA, 19 nt, Artificial Sequence
  Description of Artificial Sequence: Synthetic oligonucleotide
  Sense strand starting at position 201 of SEQ ID NO: 2297
gugcuaucccaugaaacua

SEQ ID NO: 178123 - RNA, 19 nt, Artificial Sequence
  Description of Artificial Sequence: Synthetic oligonucleotide
  Antisense strand to SEQ ID NO: 178122
uaguuucaugggauagcac

SEQ ID NO: 178124 - RNA, 19 nt, Artificial Sequence
  Description of Artificial Sequence: Synthetic oligonucleotide
  Sense strand starting at position 222 of SEQ ID NO: 2297
ucgagucaacucuauagag

SEQ ID NO: 178125 - RNA, 19 nt, Artificial Sequence
  Description of Artificial Sequence: Synthetic oligonucleotide
  Antisense strand to SEQ ID NO: 178124
cucuauagaguugacucga

SEQ ID NO: 178126 - RNA, 19 nt, Artificial Sequence
  Description of Artificial Sequence: Synthetic oligonucleotide
  Sense strand starting at position 224 of SEQ ID NO: 2297
gagucaacucuauagagcu

SEQ ID NO: 178127 - RNA, 19 nt, Artificial Sequence
  Description of Artificial Sequence: Synthetic oligonucleotide
  Antisense strand to SEQ ID NO: 178126
agcucuauagaguugacuc

SEQ ID NO: 178128 - RNA, 19 nt, Artificial Sequence
  Description of Artificial Sequence: Synthetic oligonucleotide
  Sense strand starting at position 274 of SEQ ID NO: 2297
uggugucacaaggguaauu

SEQ ID NO: 178129 - RNA, 19 nt, Artificial Sequence
  Description of Artificial Sequence: Synthetic oligonucleotide
  Antisense strand to SEQ ID NO: 178128
aauuacccuugugacacca

SEQ ID NO: 178130 - RNA, 19 nt, Artificial Sequence
  Description of Artificial Sequence: Synthetic oligonucleotide
  Sense strand starting at position 298 of SEQ ID NO: 2297
gggcuaacauguuucaggu

SEQ ID NO: 178131 - RNA, 19 nt, Artificial Sequence
  Description of Artificial Sequence: Synthetic oligonucleotide
  Antisense strand to SEQ ID NO: 178130
accugaaacauguuagccc

SEQ ID NO: 178132 - RNA, 19 nt, Artificial Sequence
  Description of Artificial Sequence: Synthetic oligonucleotide
  Sense strand starting at position 320 of SEQ ID NO: 2297
gacauuccugcaugggcaa

SEQ ID NO: 178133 - RNA, 19 nt, Artificial Sequence
  Description of Artificial Sequence: Synthetic oligonucleotide
  Antisense strand to SEQ ID NO: 178132
uugcccaugcaggaauguc

SEQ ID NO: 178134 - RNA, 19 nt, Artificial Sequence
  Description of Artificial Sequence: Synthetic oligonucleotide
  Sense strand starting at position 353 of SEQ ID NO: 2297
aaaugaaucugugucugaa

SEQ ID NO: 178135 - RNA, 19 nt, Artificial Sequence
  Description of Artificial Sequence: Synthetic oligonucleotide
  Antisense strand to SEQ ID NO: 178134
uucagacacagauucauuu

SEQ ID NO: 178136 - RNA, 19 nt, Artificial Sequence
  Description of Artificial Sequence: Synthetic oligonucleotide
  Sense strand starting at position 355 of SEQ ID NO: 2297
augaaucugugucugaaca

SEQ ID NO: 178137 - RNA, 19 nt, Artificial Sequence
  Description of Artificial Sequence: Synthetic oligonucleotide
  Antisense strand to SEQ ID NO: 178136
uguucagacacagauucau

SEQ ID NO: 178138 - RNA, 19 nt, Artificial Sequence
  Description of Artificial Sequence: Synthetic oligonucleotide
  Sense strand starting at position 356 of SEQ ID NO: 2297
ugaaucugugucugaacaa

SEQ ID NO: 178139 - RNA, 19 nt, Artificial Sequence
  Description of Artificial Sequence: Synthetic oligonucleotide
  Antisense strand to SEQ ID NO: 178138
uuguucagacacagauuca

SEQ ID NO: 178140 - RNA, 19 nt, Artificial Sequence
  Description of Artificial Sequence: Synthetic oligonucleotide
  Sense strand starting at position 380 of SEQ ID NO: 2297
cggauauggcucuaaacca

SEQ ID NO: 178141 - RNA, 19 nt, Artificial Sequence
  Description of Artificial Sequence: Synthetic oligonucleotide
  Antisense strand to SEQ ID NO: 178140
ugguuuagagccauauccg

SEQ ID NO: 178142 - RNA, 19 nt, Artificial Sequence
  Description of Artificial Sequence: Synthetic oligonucleotide
  Sense strand starting at position 435 of SEQ ID NO: 2297
ucagauuuauucuaguauc

SEQ ID NO: 178143 - RNA, 19 nt, Artificial Sequence
  Description of Artificial Sequence: Synthetic oligonucleotide
  Antisense strand to SEQ ID NO: 178142
gauacuagaauaaaucuga

SEQ ID NO: 178144 - RNA, 19 nt, Artificial Sequence
  Description of Artificial Sequence: Synthetic oligonucleotide
  Sense strand starting at position 445 of SEQ ID NO: 2297
ucuaguaucccagaaguuu

SEQ ID NO: 178145 - RNA, 19 nt, Artificial Sequence
  Description of Artificial Sequence: Synthetic oligonucleotide
  Antisense strand to SEQ ID NO: 178144
aaacuucugggauacuaga

SEQ ID NO: 178146 - RNA, 19 nt, Artificial Sequence
  Description of Artificial Sequence: Synthetic oligonucleotide
  Sense strand starting at position 456 of SEQ ID NO: 2297
agaaguuugcucugugaua

SEQ ID NO: 178147 - RNA, 19 nt, Artificial Sequence
  Description of Artificial Sequence: Synthetic oligonucleotide
  Antisense strand to SEQ ID NO: 178146
uaucacagagcaaacuucu

SEQ ID NO: 178148 - RNA, 19 nt, Artificial Sequence
  Description of Artificial Sequence: Synthetic oligonucleotide
  Sense strand starting at position 457 of SEQ ID NO: 2297
gaaguuugcucugugauag

SEQ ID NO: 178149 - RNA, 19 nt, Artificial Sequence
  Description of Artificial Sequence: Synthetic oligonucleotide
  Antisense strand to SEQ ID NO: 178148
cuaucacagagcaaacuuc

SEQ ID NO: 178150 - RNA, 19 nt, Artificial Sequence
  Description of Artificial Sequence: Synthetic oligonucleotide
  Sense strand starting at position 458 of SEQ ID NO: 2297
aaguuugcucugugauagg

SEQ ID NO: 178151 - RNA, 19 nt, Artificial Sequence
  Description of Artificial Sequence: Synthetic oligonucleotide
  Antisense strand to SEQ ID NO: 178150
ccuaucacagagcaaacuu

SEQ ID NO: 178152 - RNA, 19 nt, Artificial Sequence
  Description of Artificial Sequence: Synthetic oligonucleotide
  Sense strand starting at position 480 of SEQ ID NO: 2297
agaucaagcucaguacuga

SEQ ID NO: 178153 - RNA, 19 nt, Artificial Sequence
  Description of Artificial Sequence: Synthetic oligonucleotide
  Antisense strand to SEQ ID NO: 178152
ucaguacugagcuugaucu

SEQ ID NO: 178154 - RNA, 19 nt, Artificial Sequence
  Description of Artificial Sequence: Synthetic oligonucleotide
  Sense strand starting at position 481 of SEQ ID NO: 2297
gaucaagcucaguacugau

SEQ ID NO: 178155 - RNA, 19 nt, Artificial Sequence
  Description of Artificial Sequence: Synthetic oligonucleotide
  Antisense strand to SEQ ID NO: 178154
aucaguacugagcuugauc

SEQ ID NO: 178156 - RNA, 19 nt, Artificial Sequence
  Description of Artificial Sequence: Synthetic oligonucleotide
  Sense strand starting at position 758 of SEQ ID NO: 2297
uggcaucucagauggcaga

SEQ ID NO: 178157 - RNA, 19 nt, Artificial Sequence
  Description of Artificial Sequence: Synthetic oligonucleotide
  Antisense strand to SEQ ID NO: 178156
ucugccaucugagaugcca

SEQ ID NO: 178158 - RNA, 19 nt, Artificial Sequence
  Description of Artificial Sequence: Synthetic oligonucleotide
  Sense strand starting at position 871 of SEQ ID NO: 2297
gggcuuucccaggacuuaa

SEQ ID NO: 178159 - RNA, 19 nt, Artificial Sequence
  Description of Artificial Sequence: Synthetic oligonucleotide
  Antisense strand to SEQ ID NO: 178158
uuaaguccugggaaagccc

SEQ ID NO: 178160 - RNA, 19 nt, Artificial Sequence
  Description of Artificial Sequence: Synthetic oligonucleotide
  Sense strand starting at position 1233 of SEQ ID NO: 2297
gagacagauuacucccgga

SEQ ID NO: 178161 - RNA, 19 nt, Artificial Sequence
  Description of Artificial Sequence: Synthetic oligonucleotide
  Antisense strand to SEQ ID NO: 178160
uccgggaguaaucugucuc

SEQ ID NO: 178162 - RNA, 19 nt, Artificial Sequence
  Description of Artificial Sequence: Synthetic oligonucleotide
  Sense strand starting at position 1238 of SEQ ID NO: 2297
agauuacucccggagcagu

SEQ ID NO: 178163 - RNA, 19 nt, Artificial Sequence
  Description of Artificial Sequence: Synthetic oligonucleotide
  Antisense strand to SEQ ID NO: 178162
acugcuccgggaguaaucu

SEQ ID NO: 178164 - RNA, 19 nt, Artificial Sequence
  Description of Artificial Sequence: Synthetic oligonucleotide
  Sense strand starting at position 1676 of SEQ ID NO: 2297
ugaaguagucgaggcagau

SEQ ID NO: 178165 - RNA, 19 nt, Artificial Sequence
  Description of Artificial Sequence: Synthetic oligonucleotide
  Antisense strand to SEQ ID NO: 178164
aucugccucgacuacuuca

SEQ ID NO: 178166 - RNA, 19 nt, Artificial Sequence
  Description of Artificial Sequence: Synthetic oligonucleotide
  Sense strand starting at position 2147 of SEQ ID NO: 2297
gacggaauuggagagcuuu

SEQ ID NO: 178167 - RNA, 19 nt, Artificial Sequence
  Description of Artificial Sequence: Synthetic oligonucleotide
  Antisense strand to SEQ ID NO: 178166
aaagcucuccaauuccguc

SEQ ID NO: 178168 - RNA, 19 nt, Artificial Sequence
  Description of Artificial Sequence: Synthetic oligonucleotide
  Sense strand starting at position 2514 of SEQ ID NO: 2297
aggucagaaugauuggagu

SEQ ID NO: 178169 - RNA, 19 nt, Artificial Sequence
  Description of Artificial Sequence: Synthetic oligonucleotide
  Antisense strand to SEQ ID NO: 178168
acuccaaucauucugaccu

SEQ ID NO: 178170 - RNA, 19 nt, Artificial Sequence
  Description of Artificial Sequence: Synthetic oligonucleotide
  Sense strand starting at position 2516 of SEQ ID NO: 2297
gucagaaugauuggaguug

SEQ ID NO: 178171 - RNA, 19 nt, Artificial Sequence
  Description of Artificial Sequence: Synthetic oligonucleotide
  Antisense strand to SEQ ID NO: 178170
caacuccaaucauucugac

SEQ ID NO: 178172 - RNA, 19 nt, Artificial Sequence
  Description of Artificial Sequence: Synthetic oligonucleotide
  Sense strand starting at position 2582 of SEQ ID NO: 2297
cacauucuuucugcgggaa

SEQ ID NO: 178173 - RNA, 19 nt, Artificial Sequence
  Description of Artificial Sequence: Synthetic oligonucleotide
  Antisense strand to SEQ ID NO: 178172
uucccgcagaaagaaugug

SEQ ID NO: 178174 - RNA, 19 nt, Artificial Sequence
  Description of Artificial Sequence: Synthetic oligonucleotide
  Sense strand starting at position 2585 of SEQ ID NO: 2297
auucuuucugcgggaacca

SEQ ID NO: 178175 - RNA, 19 nt, Artificial Sequence
  Description of Artificial Sequence: Synthetic oligonucleotide
  Antisense strand to SEQ ID NO: 178174
ugguucccgcagaaagaau

SEQ ID NO: 178176 - RNA, 19 nt, Artificial Sequence
  Description of Artificial Sequence: Synthetic oligonucleotide
  Sense strand starting at position 2667 of SEQ ID NO: 2297
gaguacgcuuacucuggaa

SEQ ID NO: 178177 - RNA, 19 nt, Artificial Sequence
  Description of Artificial Sequence: Synthetic oligonucleotide
  Antisense strand to SEQ ID NO: 178176
uuccagaguaagcguacuc

SEQ ID NO: 178178 - RNA, 19 nt, Artificial Sequence
  Description of Artificial Sequence: Synthetic oligonucleotide
  Sense strand starting at position 2671 of SEQ ID NO: 2297
acgcuuacucuggaauucu

SEQ ID NO: 178179 - RNA, 19 nt, Artificial Sequence
  Description of Artificial Sequence: Synthetic oligonucleotide
  Antisense strand to SEQ ID NO: 178178
agaauuccagaguaagcgu

SEQ ID NO: 178180 - RNA, 19 nt, Artificial Sequence
  Description of Artificial Sequence: Synthetic oligonucleotide
  Sense strand starting at position 2798 of SEQ ID NO: 2297
auccuaaucucuuugggau

SEQ ID NO: 178181 - RNA, 19 nt, Artificial Sequence
  Description of Artificial Sequence: Synthetic oligonucleotide
  Antisense strand to SEQ ID NO: 178180
aucccaaagagauuaggau

SEQ ID NO: 178182 - RNA, 19 nt, Artificial Sequence
  Description of Artificial Sequence: Synthetic oligonucleotide
  Sense strand starting at position 2799 of SEQ ID NO: 2297
uccuaaucucuuugggauu

SEQ ID NO: 178183 - RNA, 19 nt, Artificial Sequence
  Description of Artificial Sequence: Synthetic oligonucleotide
  Antisense strand to SEQ ID NO: 178182
aaucccaaagagauuagga

SEQ ID NO: 178184 - RNA, 19 nt, Artificial Sequence
  Description of Artificial Sequence: Synthetic oligonucleotide
  Sense strand starting at position 2923 of SEQ ID NO: 2297
auaggaugcauaggacauu

SEQ ID NO: 178185 - RNA, 19 nt, Artificial Sequence
  Description of Artificial Sequence: Synthetic oligonucleotide
  Antisense strand to SEQ ID NO: 178184
aauguccuaugcauccuau

SEQ ID NO: 178186 - RNA, 19 nt, Artificial Sequence
  Description of Artificial Sequence: Synthetic oligonucleotide
  Sense strand starting at position 3178 of SEQ ID NO: 2297
aaguuuccucuaggaagca

SEQ ID NO: 178187 - RNA, 19 nt, Artificial Sequence
  Description of Artificial Sequence: Synthetic oligonucleotide
  Antisense strand to SEQ ID NO: 178186
ugcuuccuagaggaaacuu

SEQ ID NO: 178188 - RNA, 19 nt, Artificial Sequence
  Description of Artificial Sequence: Synthetic oligonucleotide
  Sense strand starting at position 3187 of SEQ ID NO: 2297
cuaggaagcaucugucagu

SEQ ID NO: 178189 - RNA, 19 nt, Artificial Sequence
  Description of Artificial Sequence: Synthetic oligonucleotide
  Antisense strand to SEQ ID NO: 178188
acugacagaugcuuccuag

SEQ ID NO: 178190 - RNA, 19 nt, Artificial Sequence
  Description of Artificial Sequence: Synthetic oligonucleotide
  Sense strand starting at position 3188 of SEQ ID NO: 2297
uaggaagcaucugucagua

SEQ ID NO: 178191 - RNA, 19 nt, Artificial Sequence
  Description of Artificial Sequence: Synthetic oligonucleotide
  Antisense strand to SEQ ID NO: 178190
uacugacagaugcuuccua

SEQ ID NO: 178192 - RNA, 19 nt, Artificial Sequence
  Description of Artificial Sequence: Synthetic oligonucleotide
  Sense strand starting at position 3210 of SEQ ID NO: 2297
ccucuuaauguuugacagu

SEQ ID NO: 178193 - RNA, 19 nt, Artificial Sequence
  Description of Artificial Sequence: Synthetic oligonucleotide
  Antisense strand to SEQ ID NO: 178192
acugucaaacauuaagagg

SEQ ID NO: 178194 - RNA, 19 nt, Artificial Sequence
  Description of Artificial Sequence: Synthetic oligonucleotide
  Sense strand starting at position 3510 of SEQ ID NO: 2297
caucgcuuacacuguagaa

SEQ ID NO: 178195 - RNA, 19 nt, Artificial Sequence
  Description of Artificial Sequence: Synthetic oligonucleotide
  Antisense strand to SEQ ID NO: 178194
uucuacaguguaagcgaug

SEQ ID NO: 178196 - RNA, 19 nt, Artificial Sequence
  Description of Artificial Sequence: Synthetic oligonucleotide
  Sense strand starting at position 3543 of SEQ ID NO: 2297
cuucgaaguccaggaagau

SEQ ID NO: 178197 - RNA, 19 nt, Artificial Sequence
  Description of Artificial Sequence: Synthetic oligonucleotide
  Antisense strand to SEQ ID NO: 178196
aucuuccuggacuucgaag

SEQ ID NO: 178198 - RNA, 19 nt, Artificial Sequence
  Description of Artificial Sequence: Synthetic oligonucleotide
  Sense strand starting at position 114 of SEQ ID NO: 2298
gggucugugaaguaaucca

SEQ ID NO: 178199 - RNA, 19 nt, Artificial Sequence
  Description of Artificial Sequence: Synthetic oligonucleotide
  Antisense strand to SEQ ID NO: 178198
uggauuacuucacagaccc

SEQ ID NO: 178200 - RNA, 19 nt, Artificial Sequence
  Description of Artificial Sequence: Synthetic oligonucleotide
  Sense strand starting at position 612 of SEQ ID NO: 2298
cuuggagccuucccuuaau

SEQ ID NO: 178201 - RNA, 19 nt, Artificial Sequence
  Description of Artificial Sequence: Synthetic oligonucleotide
  Antisense strand to SEQ ID NO: 178200
auuaagggaaggcuccaag

SEQ ID NO: 178202 - RNA, 19 nt, Artificial Sequence
  Description of Artificial Sequence: Synthetic oligonucleotide
  Sense strand starting at position 615 of SEQ ID NO: 2298
ggagccuucccuuaaucac

SEQ ID NO: 178203 - RNA, 19 nt, Artificial Sequence
  Description of Artificial Sequence: Synthetic oligonucleotide
  Antisense strand to SEQ ID NO: 178202
gugauuaagggaaggcucc

SEQ ID NO: 178204 - RNA, 19 nt, Artificial Sequence
  Description of Artificial Sequence: Synthetic oligonucleotide
  Sense strand starting at position 719 of SEQ ID NO: 2298
caaguagccugacuaaaga

SEQ ID NO: 178205 - RNA, 19 nt, Artificial Sequence
  Description of Artificial Sequence: Synthetic oligonucleotide
  Antisense strand to SEQ ID NO: 178204
ucuuuagucaggcuacuug

SEQ ID NO: 178206 - RNA, 19 nt, Artificial Sequence
  Description of Artificial Sequence: Synthetic oligonucleotide
  Sense strand starting at position 1017 of SEQ ID NO: 2298
agaugcacauaucgguaaa

SEQ ID NO: 178207 - RNA, 19 nt, Artificial Sequence
  Description of Artificial Sequence: Synthetic oligonucleotide
  Antisense strand to SEQ ID NO: 178206
uuuaccgauaugugcaucu

SEQ ID NO: 178208 - RNA, 19 nt, Artificial Sequence
  Description of Artificial Sequence: Synthetic oligonucleotide
  Sense strand starting at position 1019 of SEQ ID NO: 2298
augcacauaucgguaaaca

SEQ ID NO: 178209 - RNA, 19 nt, Artificial Sequence
  Description of Artificial Sequence: Synthetic oligonucleotide
  Antisense strand to SEQ ID NO: 178208
uguuuaccgauaugugcau

SEQ ID NO: 178210 - RNA, 19 nt, Artificial Sequence
  Description of Artificial Sequence: Synthetic oligonucleotide
  Sense strand starting at position 1020 of SEQ ID NO: 2298
ugcacauaucgguaaacau

SEQ ID NO: 178211 - RNA, 19 nt, Artificial Sequence
  Description of Artificial Sequence: Synthetic oligonucleotide
  Antisense strand to SEQ ID NO: 178210
auguuuaccgauaugugca

SEQ ID NO: 178212 - RNA, 19 nt, Artificial Sequence
  Description of Artificial Sequence: Synthetic oligonucleotide
  Sense strand starting at position 1307 of SEQ ID NO: 2298
uccaguuucucggagcuuu

SEQ ID NO: 178213 - RNA, 19 nt, Artificial Sequence
  Description of Artificial Sequence: Synthetic oligonucleotide
  Antisense strand to SEQ ID NO: 178212
aaagcuccgagaaacugga

SEQ ID NO: 178214 - RNA, 19 nt, Artificial Sequence
  Description of Artificial Sequence: Synthetic oligonucleotide
  Sense strand starting at position 1319 of SEQ ID NO: 2298
gagcuuucugcacgccaac

SEQ ID NO: 178215 - RNA, 19 nt, Artificial Sequence
  Description of Artificial Sequence: Synthetic oligonucleotide
  Antisense strand to SEQ ID NO: 178214
guuggcgugcagaaagcuc

SEQ ID NO: 178216 - RNA, 19 nt, Artificial Sequence
  Description of Artificial Sequence: Synthetic oligonucleotide
  Sense strand starting at position 1492 of SEQ ID NO: 2298
ccgguagaguuaccuuguu

SEQ ID NO: 178217 - RNA, 19 nt, Artificial Sequence
  Description of Artificial Sequence: Synthetic oligonucleotide
  Antisense strand to SEQ ID NO: 178216
aacaagguaacucuaccgg

SEQ ID NO: 178218 - RNA, 19 nt, Artificial Sequence
  Description of Artificial Sequence: Synthetic oligonucleotide
  Sense strand starting at position 2017 of SEQ ID NO: 2298
ggaggagucuuguuggccu

SEQ ID NO: 178219 - RNA, 19 nt, Artificial Sequence
  Description of Artificial Sequence: Synthetic oligonucleotide
  Antisense strand to SEQ ID NO: 178218
aggccaacaagacuccucc

SEQ ID NO: 178220 - RNA, 19 nt, Artificial Sequence
  Description of Artificial Sequence: Synthetic oligonucleotide
  Sense strand starting at position 2317 of SEQ ID NO: 2298
gcgagugccuguugagaag

SEQ ID NO: 178221 - RNA, 19 nt, Artificial Sequence
  Description of Artificial Sequence: Synthetic oligonucleotide
  Antisense strand to SEQ ID NO: 178220
cuucucaacaggcacucgc

SEQ ID NO: 178222 - RNA, 19 nt, Artificial Sequence
  Description of Artificial Sequence: Synthetic oligonucleotide
  Sense strand starting at position 2574 of SEQ ID NO: 2298
uuuggaucuugggcaagaa

SEQ ID NO: 178223 - RNA, 19 nt, Artificial Sequence
  Description of Artificial Sequence: Synthetic oligonucleotide
  Antisense strand to SEQ ID NO: 178222
uucuugcccaagauccaaa

SEQ ID NO: 178224 - RNA, 19 nt, Artificial Sequence
  Description of Artificial Sequence: Synthetic oligonucleotide
  Sense strand starting at position 2711 of SEQ ID NO: 2298
auggcuauuuacugauuau

SEQ ID NO: 178225 - RNA, 19 nt, Artificial Sequence
  Description of Artificial Sequence: Synthetic oligonucleotide
  Antisense strand to SEQ ID NO: 178224
auaaucaguaaauagccau

SEQ ID NO: 178226 - RNA, 19 nt, Artificial Sequence
  Description of Artificial Sequence: Synthetic oligonucleotide
  Sense strand starting at position 2847 of SEQ ID NO: 2298
ucuguaaacuguuguggca

SEQ ID NO: 178227 - RNA, 19 nt, Artificial Sequence
  Description of Artificial Sequence: Synthetic oligonucleotide
  Antisense strand to SEQ ID NO: 178226
ugccacaacaguuuacaga

SEQ ID NO: 178228 - RNA, 19 nt, Artificial Sequence
  Description of Artificial Sequence: Synthetic oligonucleotide
  Sense strand starting at position 2871 of SEQ ID NO: 2298
gaggguaucucauagcaug

SEQ ID NO: 178229 - RNA, 19 nt, Artificial Sequence
  Description of Artificial Sequence: Synthetic oligonucleotide
  Antisense strand to SEQ ID NO: 178228
caugcuaugagauacccuc

SEQ ID NO: 178230 - RNA, 19 nt, Artificial Sequence
  Description of Artificial Sequence: Synthetic oligonucleotide
  Sense strand starting at position 2874 of SEQ ID NO: 2298
gguaucucauagcaugcua

SEQ ID NO: 178231 - RNA, 19 nt, Artificial Sequence
  Description of Artificial Sequence: Synthetic oligonucleotide
  Antisense strand to SEQ ID NO: 178230
uagcaugcuaugagauacc

SEQ ID NO: 178232 - RNA, 19 nt, Artificial Sequence
  Description of Artificial Sequence: Synthetic oligonucleotide
  Sense strand starting at position 2882 of SEQ ID NO: 2298
auagcaugcuaacguauua

SEQ ID NO: 178233 - RNA, 19 nt, Artificial Sequence
  Description of Artificial Sequence: Synthetic oligonucleotide
  Antisense strand to SEQ ID NO: 178232
uaauacguuagcaugcuau

SEQ ID NO: 178234 - RNA, 19 nt, Artificial Sequence
  Description of Artificial Sequence: Synthetic oligonucleotide
  Sense strand starting at position 2907 of SEQ ID NO: 2298
gcauauaaugagcagucau

SEQ ID NO: 178235 - RNA, 19 nt, Artificial Sequence
  Description of Artificial Sequence: Synthetic oligonucleotide
  Antisense strand to SEQ ID NO: 178234
augacugcucauuauaugc

SEQ ID NO: 178236 - RNA, 19 nt, Artificial Sequence
  Description of Artificial Sequence: Synthetic oligonucleotide
  Sense strand starting at position 2935 of SEQ ID NO: 2298
agguuauucuggucgccau

SEQ ID NO: 178237 - RNA, 19 nt, Artificial Sequence
  Description of Artificial Sequence: Synthetic oligonucleotide
  Antisense strand to SEQ ID NO: 178236
auggcgaccagaauaaccu

SEQ ID NO: 178238 - RNA, 19 nt, Artificial Sequence
  Description of Artificial Sequence: Synthetic oligonucleotide
  Sense strand starting at position 2938 of SEQ ID NO: 2298
uuauucuggucgccaucua

SEQ ID NO: 178239 - RNA, 19 nt, Artificial Sequence
  Description of Artificial Sequence: Synthetic oligonucleotide
  Antisense strand to SEQ ID NO: 178238
uagauggcgaccagaauaa

SEQ ID NO: 178240 - RNA, 19 nt, Artificial Sequence
  Description of Artificial Sequence: Synthetic oligonucleotide
  Sense strand starting at position 3087 of SEQ ID NO: 2298
cccagcaggucucagaauu

SEQ ID NO: 178241 - RNA, 19 nt, Artificial Sequence
  Description of Artificial Sequence: Synthetic oligonucleotide
  Antisense strand to SEQ ID NO: 178240
aauucugagaccugcuggg

SEQ ID NO: 178242 - RNA, 19 nt, Artificial Sequence
  Description of Artificial Sequence: Synthetic oligonucleotide
  Sense strand starting at position 3451 of SEQ ID NO: 2298
ucugcaaucuccugggugu

SEQ ID NO: 178243 - RNA, 19 nt, Artificial Sequence
  Description of Artificial Sequence: Synthetic oligonucleotide
  Antisense strand to SEQ ID NO: 178242
acacccaggagauugcaga

SEQ ID NO: 178244 - RNA, 19 nt, Artificial Sequence
  Description of Artificial Sequence: Synthetic oligonucleotide
  Sense strand starting at position 3493 of SEQ ID NO: 2298
ggcauagauggcuggcuuu

SEQ ID NO: 178245 - RNA, 19 nt, Artificial Sequence
  Description of Artificial Sequence: Synthetic oligonucleotide
  Antisense strand to SEQ ID NO: 178244
aaagccagccaucuaugcc

SEQ ID NO: 178246 - RNA, 19 nt, Artificial Sequence
  Description of Artificial Sequence: Synthetic oligonucleotide
  Sense strand starting at position 3526 of SEQ ID NO: 2298
gguagaguguuucuucugu

SEQ ID NO: 178247 - RNA, 19 nt, Artificial Sequence
  Description of Artificial Sequence: Synthetic oligonucleotide
  Antisense strand to SEQ ID NO: 178246
acagaagaaacacucuacc

SEQ ID NO: 178248 - RNA, 19 nt, Artificial Sequence
  Description of Artificial Sequence: Synthetic oligonucleotide
  Sense strand starting at position 3530 of SEQ ID NO: 2298
gaguguuucuucugugguc

SEQ ID NO: 178249 - RNA, 19 nt, Artificial Sequence
  Description of Artificial Sequence: Synthetic oligonucleotide
  Antisense strand to SEQ ID NO: 178248
gaccacagaagaaacacuc

SEQ ID NO: 178250 - RNA, 19 nt, Artificial Sequence
  Description of Artificial Sequence: Synthetic oligonucleotide
  Sense strand starting at position 3612 of SEQ ID NO: 2298
ggccgauuaagugaauuac

SEQ ID NO: 178251 - RNA, 19 nt, Artificial Sequence
  Description of Artificial Sequence: Synthetic oligonucleotide
  Antisense strand to SEQ ID NO: 178250
guaauucacuuaaucggcc

SEQ ID NO: 178252 - RNA, 19 nt, Artificial Sequence
  Description of Artificial Sequence: Synthetic oligonucleotide
  Sense strand starting at position 3622 of SEQ ID NO: 2298
gugaauuacccuugugaac

SEQ ID NO: 178253 - RNA, 19 nt, Artificial Sequence
  Description of Artificial Sequence: Synthetic oligonucleotide
  Antisense strand to SEQ ID NO: 178252
guucacaaggguaauucac

SEQ ID NO: 178254 - RNA, 19 nt, Artificial Sequence
  Description of Artificial Sequence: Synthetic oligonucleotide
  Sense strand starting at position 3640 of SEQ ID NO: 2298
cccagaauaucugaggcua

SEQ ID NO: 178255 - RNA, 19 nt, Artificial Sequence
  Description of Artificial Sequence: Synthetic oligonucleotide
  Antisense strand to SEQ ID NO: 178254
uagccucagauauucuggg

SEQ ID NO: 178256 - RNA, 19 nt, Artificial Sequence
  Description of Artificial Sequence: Synthetic oligonucleotide
  Sense strand starting at position 3642 of SEQ ID NO: 2298
cagaauaucugaggcuagu

SEQ ID NO: 178257 - RNA, 19 nt, Artificial Sequence
  Description of Artificial Sequence: Synthetic oligonucleotide
  Antisense strand to SEQ ID NO: 178256
acuagccucagauauucug

SEQ ID NO: 178258 - RNA, 19 nt, Artificial Sequence
  Description of Artificial Sequence: Synthetic oligonucleotide
  Sense strand starting at position 3645 of SEQ ID NO: 2298
aauaucugaggcuaguuua

SEQ ID NO: 178259 - RNA, 19 nt, Artificial Sequence
  Description of Artificial Sequence: Synthetic oligonucleotide
  Antisense strand to SEQ ID NO: 178258
uaaacuagccucagauauu

SEQ ID NO: 178260 - RNA, 19 nt, Artificial Sequence
  Description of Artificial Sequence: Synthetic oligonucleotide
  Sense strand starting at position 3648 of SEQ ID NO: 2298
aucugaggcuaguuuaagu

SEQ ID NO: 178261 - RNA, 19 nt, Artificial Sequence
  Description of Artificial Sequence: Synthetic oligonucleotide
  Antisense strand to SEQ ID NO: 178260
acuuaaacuagccucagau

SEQ ID NO: 178262 - RNA, 19 nt, Artificial Sequence
  Description of Artificial Sequence: Synthetic oligonucleotide
  Sense strand starting at position 3653 of SEQ ID NO: 2298
aggcuaguuuaagucaauu

SEQ ID NO: 178263 - RNA, 19 nt, Artificial Sequence
  Description of Artificial Sequence: Synthetic oligonucleotide
  Antisense strand to SEQ ID NO: 178262
aauugacuuaaacuagccu

SEQ ID NO: 178264 - RNA, 19 nt, Artificial Sequence
  Description of Artificial Sequence: Synthetic oligonucleotide
  Sense strand starting at position 3661 of SEQ ID NO: 2298
uuaagucaauuaggaaguu

SEQ ID NO: 178265 - RNA, 19 nt, Artificial Sequence
  Description of Artificial Sequence: Synthetic oligonucleotide
  Antisense strand to SEQ ID NO: 178264
aacuuccuaauugacuuaa

SEQ ID NO: 178266 - RNA, 19 nt, Artificial Sequence
  Description of Artificial Sequence: Synthetic oligonucleotide
  Sense strand starting at position 3662 of SEQ ID NO: 2298
uaagucaauuaggaaguuu

SEQ ID NO: 178267 - RNA, 19 nt, Artificial Sequence
  Description of Artificial Sequence: Synthetic oligonucleotide
  Antisense strand to SEQ ID NO: 178266
aaacuuccuaauugacuua

SEQ ID NO: 178268 - RNA, 19 nt, Artificial Sequence
  Description of Artificial Sequence: Synthetic oligonucleotide
  Sense strand starting at position 3940 of SEQ ID NO: 2298
uaucucagugagcagagau

SEQ ID NO: 178269 - RNA, 19 nt, Artificial Sequence
  Description of Artificial Sequence: Synthetic oligonucleotide
  Antisense strand to SEQ ID NO: 178268
aucucugcucacugagaua

SEQ ID NO: 178270 - RNA, 19 nt, Artificial Sequence
  Description of Artificial Sequence: Synthetic oligonucleotide
  Sense strand starting at position 3948 of SEQ ID NO: 2298
ugagcagagauaugacuuu

SEQ ID NO: 178271 - RNA, 19 nt, Artificial Sequence
  Description of Artificial Sequence: Synthetic oligonucleotide
  Antisense strand to SEQ ID NO: 178270
aaagucauaucucugcuca

SEQ ID NO: 178272 - RNA, 19 nt, Artificial Sequence
  Description of Artificial Sequence: Synthetic oligonucleotide
  Sense strand starting at position 3955 of SEQ ID NO: 2298
agauaugacuuugaauaga

SEQ ID NO: 178273 - RNA, 19 nt, Artificial Sequence
  Description of Artificial Sequence: Synthetic oligonucleotide
  Antisense strand to SEQ ID NO: 178272
ucuauucaaagucauaucu

SEQ ID NO: 178274 - RNA, 19 nt, Artificial Sequence
  Description of Artificial Sequence: Synthetic oligonucleotide
  Sense strand starting at position 42 of SEQ ID NO: 2299
guccacaaugucgaggaua

SEQ ID NO: 178275 - RNA, 19 nt, Artificial Sequence
  Description of Artificial Sequence: Synthetic oligonucleotide
  Antisense strand to SEQ ID NO: 178274
uauccucgacauuguggac

SEQ ID NO: 178276 - RNA, 19 nt, Artificial Sequence
  Description of Artificial Sequence: Synthetic oligonucleotide
  Sense strand starting at position 44 of SEQ ID NO: 2299
ccacaaugucgaggauaca

SEQ ID NO: 178277 - RNA, 19 nt, Artificial Sequence
  Description of Artificial Sequence: Synthetic oligonucleotide
  Antisense strand to SEQ ID NO: 178276
uguauccucgacauugugg

SEQ ID NO: 178278 - RNA, 19 nt, Artificial Sequence
  Description of Artificial Sequence: Synthetic oligonucleotide
  Sense strand starting at position 178 of SEQ ID NO: 2299
cugugaaugcugggagguu

SEQ ID NO: 178279 - RNA, 19 nt, Artificial Sequence
  Description of Artificial Sequence: Synthetic oligonucleotide
  Antisense strand to SEQ ID NO: 178278
aaccucccagcauucacag

SEQ ID NO: 178280 - RNA, 19 nt, Artificial Sequence
  Description of Artificial Sequence: Synthetic oligonucleotide
  Sense strand starting at position 193 of SEQ ID NO: 2299
gguuauuuaucgucuaucc

SEQ ID NO: 178281 - RNA, 19 nt, Artificial Sequence
  Description of Artificial Sequence: Synthetic oligonucleotide
  Antisense strand to SEQ ID NO: 178280
ggauagacgauaaauaacc

SEQ ID NO: 178282 - RNA, 19 nt, Artificial Sequence
  Description of Artificial Sequence: Synthetic oligonucleotide
  Sense strand starting at position 198 of SEQ ID NO: 2299
uuuaucgucuaucccauua

SEQ ID NO: 178283 - RNA, 19 nt, Artificial Sequence
  Description of Artificial Sequence: Synthetic oligonucleotide
  Antisense strand to SEQ ID NO: 178282
uaaugggauagacgauaaa

SEQ ID NO: 178284 - RNA, 19 nt, Artificial Sequence
  Description of Artificial Sequence: Synthetic oligonucleotide
  Sense strand starting at position 208 of SEQ ID NO: 2299
aucccauuagcgugacauu

SEQ ID NO: 178285 - RNA, 19 nt, Artificial Sequence
  Description of Artificial Sequence: Synthetic oligonucleotide
  Antisense strand to SEQ ID NO: 178284
aaugucacgcuaaugggau

SEQ ID NO: 178286 - RNA, 19 nt, Artificial Sequence
  Description of Artificial Sequence: Synthetic oligonucleotide
  Sense strand starting at position 246 of SEQ ID NO: 2299
acauuaacguguuugauag

SEQ ID NO: 178287 - RNA, 19 nt, Artificial Sequence
  Description of Artificial Sequence: Synthetic oligonucleotide
  Antisense strand to SEQ ID NO: 178286
cuaucaaacacguuaaugu

SEQ ID NO: 178288 - RNA, 19 nt, Artificial Sequence
  Description of Artificial Sequence: Synthetic oligonucleotide
  Sense strand starting at position 247 of SEQ ID NO: 2299
cauuaacguguuugauaga

SEQ ID NO: 178289 - RNA, 19 nt, Artificial Sequence
  Description of Artificial Sequence: Synthetic oligonucleotide
  Antisense strand to SEQ ID NO: 178288
ucuaucaaacacguuaaug

SEQ ID NO: 178290 - RNA, 19 nt, Artificial Sequence
  Description of Artificial Sequence: Synthetic oligonucleotide
  Sense strand starting at position 252 of SEQ ID NO: 2299
acguguuugauagaguuaa

SEQ ID NO: 178291 - RNA, 19 nt, Artificial Sequence
  Description of Artificial Sequence: Synthetic oligonucleotide
  Antisense strand to SEQ ID NO: 178290
uuaacucuaucaaacacgu

SEQ ID NO: 178292 - RNA, 19 nt, Artificial Sequence
  Description of Artificial Sequence: Synthetic oligonucleotide
  Sense strand starting at position 363 of SEQ ID NO: 2299
aguuuaagagacugugaaa

SEQ ID NO: 178293 - RNA, 19 nt, Artificial Sequence
  Description of Artificial Sequence: Synthetic oligonucleotide
  Antisense strand to SEQ ID NO: 178292
uuucacagucucuuaaacu

SEQ ID NO: 178294 - RNA, 19 nt, Artificial Sequence
  Description of Artificial Sequence: Synthetic oligonucleotide
  Sense strand starting at position 438 of SEQ ID NO: 2299
ucuuuaguuccagggaugu

SEQ ID NO: 178295 - RNA, 19 nt, Artificial Sequence
  Description of Artificial Sequence: Synthetic oligonucleotide
  Antisense strand to SEQ ID NO: 178294
acaucccuggaacuaaaga

SEQ ID NO: 178296 - RNA, 19 nt, Artificial Sequence
  Description of Artificial Sequence: Synthetic oligonucleotide
  Sense strand starting at position 440 of SEQ ID NO: 2299
uuuaguuccagggauguag

SEQ ID NO: 178297 - RNA, 19 nt, Artificial Sequence
  Description of Artificial Sequence: Synthetic oligonucleotide
  Antisense strand to SEQ ID NO: 178296
cuacaucccuggaacuaaa

SEQ ID NO: 178298 - RNA, 19 nt, Artificial Sequence
  Description of Artificial Sequence: Synthetic oligonucleotide
  Sense strand starting at position 612 of SEQ ID NO: 2299
guuauauguuucuccuguu

SEQ ID NO: 178299 - RNA, 19 nt, Artificial Sequence
  Description of Artificial Sequence: Synthetic oligonucleotide
  Antisense strand to SEQ ID NO: 178298
aacaggagaaacauauaac

SEQ ID NO: 178300 - RNA, 19 nt, Artificial Sequence
  Description of Artificial Sequence: Synthetic oligonucleotide
  Sense strand starting at position 625 of SEQ ID NO: 2299
ccuguuagacugugaauga

SEQ ID NO: 178301 - RNA, 19 nt, Artificial Sequence
  Description of Artificial Sequence: Synthetic oligonucleotide
  Antisense strand to SEQ ID NO: 178300
ucauucacagucuaacagg

SEQ ID NO: 178302 - RNA, 19 nt, Artificial Sequence
  Description of Artificial Sequence: Synthetic oligonucleotide
  Sense strand starting at position 1224 of SEQ ID NO: 2299
gguccagcuucucuggaaa

SEQ ID NO: 178303 - RNA, 19 nt, Artificial Sequence
  Description of Artificial Sequence: Synthetic oligonucleotide
  Antisense strand to SEQ ID NO: 178302
uuuccagagaagcuggacc

SEQ ID NO: 178304 - RNA, 19 nt, Artificial Sequence
  Description of Artificial Sequence: Synthetic oligonucleotide
  Sense strand starting at position 2217 of SEQ ID NO: 2299
gcucuuuaacccgaaggga

SEQ ID NO: 178305 - RNA, 19 nt, Artificial Sequence
  Description of Artificial Sequence: Synthetic oligonucleotide
  Antisense strand to SEQ ID NO: 178304
ucccuucggguuaaagagc

SEQ ID NO: 178306 - RNA, 19 nt, Artificial Sequence
  Description of Artificial Sequence: Synthetic oligonucleotide
  Sense strand starting at position 2291 of SEQ ID NO: 2299
gguuaugaacuccgacaca

SEQ ID NO: 178307 - RNA, 19 nt, Artificial Sequence
  Description of Artificial Sequence: Synthetic oligonucleotide
  Antisense strand to SEQ ID NO: 178306
ugugucggaguucauaacc

SEQ ID NO: 178308 - RNA, 19 nt, Artificial Sequence
  Description of Artificial Sequence: Synthetic oligonucleotide
  Sense strand starting at position 2549 of SEQ ID NO: 2299
gaggaucuaucagaaauag

SEQ ID NO: 178309 - RNA, 19 nt, Artificial Sequence
  Description of Artificial Sequence: Synthetic oligonucleotide
  Antisense strand to SEQ ID NO: 178308
cuauuucugauagauccuc

SEQ ID NO: 178310 - RNA, 19 nt, Artificial Sequence
  Description of Artificial Sequence: Synthetic oligonucleotide
  Sense strand starting at position 2613 of SEQ ID NO: 2299
ggcaucuuaaggugauucu

SEQ ID NO: 178311 - RNA, 19 nt, Artificial Sequence
  Description of Artificial Sequence: Synthetic oligonucleotide
  Antisense strand to SEQ ID NO: 178310
agaaucaccuuaagaugcc

SEQ ID NO: 178312 - RNA, 19 nt, Artificial Sequence
  Description of Artificial Sequence: Synthetic oligonucleotide
  Sense strand starting at position 2634 of SEQ ID NO: 2299
ggaguugcuacguaucaga

SEQ ID NO: 178313 - RNA, 19 nt, Artificial Sequence
  Description of Artificial Sequence: Synthetic oligonucleotide
  Antisense strand to SEQ ID NO: 178312
ucugauacguagcaacucc

SEQ ID NO: 178314 - RNA, 19 nt, Artificial Sequence
  Description of Artificial Sequence: Synthetic oligonucleotide
  Sense strand starting at position 2650 of SEQ ID NO: 2299
agaaucaacggaggaguuu

SEQ ID NO: 178315 - RNA, 19 nt, Artificial Sequence
  Description of Artificial Sequence: Synthetic oligonucleotide
  Antisense strand to SEQ ID NO: 178314
aaacuccuccguugauucu

SEQ ID NO: 178316 - RNA, 19 nt, Artificial Sequence
  Description of Artificial Sequence: Synthetic oligonucleotide
  Sense strand starting at position 2757 of SEQ ID NO: 2299
gauucuuauguaugucagu

SEQ ID NO: 178317 - RNA, 19 nt, Artificial Sequence
  Description of Artificial Sequence: Synthetic oligonucleotide
  Antisense strand to SEQ ID NO: 178316
acugacauacauaagaauc

SEQ ID NO: 178318 - RNA, 19 nt, Artificial Sequence
  Description of Artificial Sequence: Synthetic oligonucleotide
  Sense strand starting at position 2758 of SEQ ID NO: 2299
auucuuauguaugucaguu

SEQ ID NO: 178319 - RNA, 19 nt, Artificial Sequence
  Description of Artificial Sequence: Synthetic oligonucleotide
  Antisense strand to SEQ ID NO: 178318
aacugacauacauaagaau

SEQ ID NO: 178320 - RNA, 19 nt, Artificial Sequence
  Description of Artificial Sequence: Synthetic oligonucleotide
  Sense strand starting at position 2762 of SEQ ID NO: 2299
uuauguaugucaguuugga

SEQ ID NO: 178321 - RNA, 19 nt, Artificial Sequence
  Description of Artificial Sequence: Synthetic oligonucleotide
  Antisense strand to SEQ ID NO: 178320
uccaaacugacauacauaa

SEQ ID NO: 178322 - RNA, 19 nt, Artificial Sequence
  Description of Artificial Sequence: Synthetic oligonucleotide
  Sense strand starting at position 2775 of SEQ ID NO: 2299
uuuggagagccacggauau

SEQ ID NO: 178323 - RNA, 19 nt, Artificial Sequence
  Description of Artificial Sequence: Synthetic oligonucleotide
  Antisense strand to SEQ ID NO: 178322
auauccguggcucuccaaa

SEQ ID NO: 178324 - RNA, 19 nt, Artificial Sequence
  Description of Artificial Sequence: Synthetic oligonucleotide
  Sense strand starting at position 2837 of SEQ ID NO: 2299
gguugagcugggugacaaa

SEQ ID NO: 178325 - RNA, 19 nt, Artificial Sequence
  Description of Artificial Sequence: Synthetic oligonucleotide
  Antisense strand to SEQ ID NO: 178324
uuugucacccagcucaacc

SEQ ID NO: 178326 - RNA, 19 nt, Artificial Sequence
  Description of Artificial Sequence: Synthetic oligonucleotide
  Sense strand starting at position 3299 of SEQ ID NO: 2299
uccuguuaguguucccaag

SEQ ID NO: 178327 - RNA, 19 nt, Artificial Sequence
  Description of Artificial Sequence: Synthetic oligonucleotide
  Antisense strand to SEQ ID NO: 178326
cuugggaacacuaacagga

SEQ ID NO: 178328 - RNA, 19 nt, Artificial Sequence
  Description of Artificial Sequence: Synthetic oligonucleotide
  Sense strand starting at position 3301 of SEQ ID NO: 2299
cuguuaguguucccaagaa

SEQ ID NO: 178329 - RNA, 19 nt, Artificial Sequence
  Description of Artificial Sequence: Synthetic oligonucleotide
  Antisense strand to SEQ ID NO: 178328
uucuugggaacacuaacag

SEQ ID NO: 178330 - RNA, 19 nt, Artificial Sequence
  Description of Artificial Sequence: Synthetic oligonucleotide
  Sense strand starting at position 3305 of SEQ ID NO: 2299
uaguguucccaagaaaggu

SEQ ID NO: 178331 - RNA, 19 nt, Artificial Sequence
  Description of Artificial Sequence: Synthetic oligonucleotide
  Antisense strand to SEQ ID NO: 178330
accuuucuugggaacacua

SEQ ID NO: 178332 - RNA, 19 nt, Artificial Sequence
  Description of Artificial Sequence: Synthetic oligonucleotide
  Sense strand starting at position 3324 of SEQ ID NO: 2299
gcuguaaguccuuaaacca

SEQ ID NO: 178333 - RNA, 19 nt, Artificial Sequence
  Description of Artificial Sequence: Synthetic oligonucleotide
  Antisense strand to SEQ ID NO: 178332
ugguuuaaggacuuacagc

SEQ ID NO: 178334 - RNA, 19 nt, Artificial Sequence
  Description of Artificial Sequence: Synthetic oligonucleotide
  Sense strand starting at position 3331 of SEQ ID NO: 2299
guccuuaaaccacgugaaa

SEQ ID NO: 178335 - RNA, 19 nt, Artificial Sequence
  Description of Artificial Sequence: Synthetic oligonucleotide
  Antisense strand to SEQ ID NO: 178334
uuucacgugguuuaaggac

SEQ ID NO: 178336 - RNA, 19 nt, Artificial Sequence
  Description of Artificial Sequence: Synthetic oligonucleotide
  Sense strand starting at position 3679 of SEQ ID NO: 2299
accucuuuauugucauagu

SEQ ID NO: 178337 - RNA, 19 nt, Artificial Sequence
  Description of Artificial Sequence: Synthetic oligonucleotide
  Antisense strand to SEQ ID NO: 178336
acuaugacaauaaagaggu

SEQ ID NO: 178338 - RNA, 19 nt, Artificial Sequence
  Description of Artificial Sequence: Synthetic oligonucleotide
  Sense strand starting at position 3704 of SEQ ID NO: 2299
gagauacacugggauuaca

SEQ ID NO: 178339 - RNA, 19 nt, Artificial Sequence
  Description of Artificial Sequence: Synthetic oligonucleotide
  Antisense strand to SEQ ID NO: 178338
uguaaucccaguguaucuc

SEQ ID NO: 178340 - RNA, 19 nt, Artificial Sequence
  Description of Artificial Sequence: Synthetic oligonucleotide
  Sense strand starting at position 3842 of SEQ ID NO: 2299
guuagaggugauugaagaa

SEQ ID NO: 178341 - RNA, 19 nt, Artificial Sequence
  Description of Artificial Sequence: Synthetic oligonucleotide
  Antisense strand to SEQ ID NO: 178340
uucuucaaucaccucuaac

SEQ ID NO: 178342 - RNA, 19 nt, Artificial Sequence
  Description of Artificial Sequence: Synthetic oligonucleotide
  Sense strand starting at position 3883 of SEQ ID NO: 2299
gaaccugucuuggagaaga

SEQ ID NO: 178343 - RNA, 19 nt, Artificial Sequence
  Description of Artificial Sequence: Synthetic oligonucleotide
  Antisense strand to SEQ ID NO: 178342
ucuucuccaagacagguuc

SEQ ID NO: 178344 - RNA, 19 nt, Artificial Sequence
  Description of Artificial Sequence: Synthetic oligonucleotide
  Sense strand starting at position 3943 of SEQ ID NO: 2299
aacggauucuuggcuuguu

SEQ ID NO: 178345 - RNA, 19 nt, Artificial Sequence
  Description of Artificial Sequence: Synthetic oligonucleotide
  Antisense strand to SEQ ID NO: 178344
aacaagccaagaauccguu

SEQ ID NO: 178346 - RNA, 19 nt, Artificial Sequence
  Description of Artificial Sequence: Synthetic oligonucleotide
  Sense strand starting at position 3944 of SEQ ID NO: 2299
acggauucuuggcuuguua

SEQ ID NO: 178347 - RNA, 19 nt, Artificial Sequence
  Description of Artificial Sequence: Synthetic oligonucleotide
  Antisense strand to SEQ ID NO: 178346
uaacaagccaagaauccgu

SEQ ID NO: 178348 - RNA, 19 nt, Artificial Sequence
  Description of Artificial Sequence: Synthetic oligonucleotide
  Sense strand starting at position 3946 of SEQ ID NO: 2299
ggauucuuggcuuguuaga

SEQ ID NO: 178349 - RNA, 19 nt, Artificial Sequence
  Description of Artificial Sequence: Synthetic oligonucleotide
  Antisense strand to SEQ ID NO: 178348
ucuaacaagccaagaaucc

SEQ ID NO: 178350 - RNA, 19 nt, Artificial Sequence
  Description of Artificial Sequence: Synthetic oligonucleotide
  Sense strand starting at position 3954 of SEQ ID NO: 2299
ggcuuguuagaggaggagu

SEQ ID NO: 178351 - RNA, 19 nt, Artificial Sequence
  Description of Artificial Sequence: Synthetic oligonucleotide
  Antisense strand to SEQ ID NO: 178350
acuccuccucuaacaagcc

SEQ ID NO: 178352 - RNA, 19 nt, Artificial Sequence
  Description of Artificial Sequence: Synthetic oligonucleotide
  Sense strand starting at position 3980 of SEQ ID NO: 2299
gcuggaguggcuugaacaa

SEQ ID NO: 178353 - RNA, 19 nt, Artificial Sequence
  Description of Artificial Sequence: Synthetic oligonucleotide
  Antisense strand to SEQ ID NO: 178352
uuguucaagccacuccagc

SEQ ID NO: 178354 - RNA, 19 nt, Artificial Sequence
  Description of Artificial Sequence: Synthetic oligonucleotide
  Sense strand starting at position 107 of SEQ ID NO: 2300
cuacaaacuuguucuguua

SEQ ID NO: 178355 - RNA, 19 nt, Artificial Sequence
  Description of Artificial Sequence: Synthetic oligonucleotide
  Antisense strand to SEQ ID NO: 178354
uaacagaacaaguuuguag

SEQ ID NO: 178356 - RNA, 19 nt, Artificial Sequence
  Description of Artificial Sequence: Synthetic oligonucleotide
  Sense strand starting at position 110 of SEQ ID NO: 2300
caaacuuguucuguuagug

SEQ ID NO: 178357 - RNA, 19 nt, Artificial Sequence
  Description of Artificial Sequence: Synthetic oligonucleotide
  Antisense strand to SEQ ID NO: 178356
cacuaacagaacaaguuug

SEQ ID NO: 178358 - RNA, 19 nt, Artificial Sequence
  Description of Artificial Sequence: Synthetic oligonucleotide
  Sense strand starting at position 120 of SEQ ID NO: 2300
cuguuaguguagccagaaa

SEQ ID NO: 178359 - RNA, 19 nt, Artificial Sequence
  Description of Artificial Sequence: Synthetic oligonucleotide
  Antisense strand to SEQ ID NO: 178358
uuucuggcuacacuaacag

SEQ ID NO: 178360 - RNA, 19 nt, Artificial Sequence
  Description of Artificial Sequence: Synthetic oligonucleotide
  Sense strand starting at position 476 of SEQ ID NO: 2300
acuguaggaccuuggcaaa

SEQ ID NO: 178361 - RNA, 19 nt, Artificial Sequence
  Description of Artificial Sequence: Synthetic oligonucleotide
  Antisense strand to SEQ ID NO: 178360
uuugccaagguccuacagu

SEQ ID NO: 178362 - RNA, 19 nt, Artificial Sequence
  Description of Artificial Sequence: Synthetic oligonucleotide
  Sense strand starting at position 689 of SEQ ID NO: 2300
uguaaauugaaaggguuua

SEQ ID NO: 178363 - RNA, 19 nt, Artificial Sequence
  Description of Artificial Sequence: Synthetic oligonucleotide
  Antisense strand to SEQ ID NO: 178362
uaaacccuuucaauuuaca

SEQ ID NO: 178364 - RNA, 19 nt, Artificial Sequence
  Description of Artificial Sequence: Synthetic oligonucleotide
  Sense strand starting at position 690 of SEQ ID NO: 2300
guaaauugaaaggguuuau

SEQ ID NO: 178365 - RNA, 19 nt, Artificial Sequence
  Description of Artificial Sequence: Synthetic oligonucleotide
  Antisense strand to SEQ ID NO: 178364
auaaacccuuucaauuuac

SEQ ID NO: 178366 - RNA, 19 nt, Artificial Sequence
  Description of Artificial Sequence: Synthetic oligonucleotide
  Sense strand starting at position 726 of SEQ ID NO: 2300
gcuauauauuagguacuau

SEQ ID NO: 178367 - RNA, 19 nt, Artificial Sequence
  Description of Artificial Sequence: Synthetic oligonucleotide
  Antisense strand to SEQ ID NO: 178366
auaguaccuaauauauagc

SEQ ID NO: 178368 - RNA, 19 nt, Artificial Sequence
  Description of Artificial Sequence: Synthetic oligonucleotide
  Sense strand starting at position 763 of SEQ ID NO: 2300
acuguuguacuggaguauu

SEQ ID NO: 178369 - RNA, 19 nt, Artificial Sequence
  Description of Artificial Sequence: Synthetic oligonucleotide
  Antisense strand to SEQ ID NO: 178368
aauacuccaguacaacagu

SEQ ID NO: 178370 - RNA, 19 nt, Artificial Sequence
  Description of Artificial Sequence: Synthetic oligonucleotide
  Sense strand starting at position 792 of SEQ ID NO: 2300
uuguuauauugcucuuuga

SEQ ID NO: 178371 - RNA, 19 nt, Artificial Sequence
  Description of Artificial Sequence: Synthetic oligonucleotide
  Antisense strand to SEQ ID NO: 178370
ucaaagagcaauauaacaa

SEQ ID NO: 178372 - RNA, 19 nt, Artificial Sequence
  Description of Artificial Sequence: Synthetic oligonucleotide
  Sense strand starting at position 816 of SEQ ID NO: 2300
cacgguauuugagaaggcu

SEQ ID NO: 178373 - RNA, 19 nt, Artificial Sequence
  Description of Artificial Sequence: Synthetic oligonucleotide
  Antisense strand to SEQ ID NO: 178372
agccuucucaaauaccgug

SEQ ID NO: 178374 - RNA, 19 nt, Artificial Sequence
  Description of Artificial Sequence: Synthetic oligonucleotide
  Sense strand starting at position 856 of SEQ ID NO: 2300
agggauuugucuugacacc

SEQ ID NO: 178375 - RNA, 19 nt, Artificial Sequence
  Description of Artificial Sequence: Synthetic oligonucleotide
  Antisense strand to SEQ ID NO: 178374
ggugucaagacaaaucccu

SEQ ID NO: 178376 - RNA, 19 nt, Artificial Sequence
  Description of Artificial Sequence: Synthetic oligonucleotide
  Sense strand starting at position 877 of SEQ ID NO: 2300
uuuguaaucugcucuuaag

SEQ ID NO: 178377 - RNA, 19 nt, Artificial Sequence
  Description of Artificial Sequence: Synthetic oligonucleotide
  Antisense strand to SEQ ID NO: 178376
cuuaagagcagauuacaaa

SEQ ID NO: 178378 - RNA, 19 nt, Artificial Sequence
  Description of Artificial Sequence: Synthetic oligonucleotide
  Sense strand starting at position 912 of SEQ ID NO: 2300
gucccaucuuuaccuauga

SEQ ID NO: 178379 - RNA, 19 nt, Artificial Sequence
  Description of Artificial Sequence: Synthetic oligonucleotide
  Antisense strand to SEQ ID NO: 178378
ucauagguaaagaugggac

SEQ ID NO: 178380 - RNA, 19 nt, Artificial Sequence
  Description of Artificial Sequence: Synthetic oligonucleotide
  Sense strand starting at position 1064 of SEQ ID NO: 2300
ccagguggucuaugguuaa

SEQ ID NO: 178381 - RNA, 19 nt, Artificial Sequence
  Description of Artificial Sequence: Synthetic oligonucleotide
  Antisense strand to SEQ ID NO: 178380
uuaaccauagaccaccugg

SEQ ID NO: 178382 - RNA, 19 nt, Artificial Sequence
  Description of Artificial Sequence: Synthetic oligonucleotide
  Sense strand starting at position 1164 of SEQ ID NO: 2300
uggcuugaguuccuggaau

SEQ ID NO: 178383 - RNA, 19 nt, Artificial Sequence
  Description of Artificial Sequence: Synthetic oligonucleotide
  Antisense strand to SEQ ID NO: 178382
auuccaggaacucaagcca

SEQ ID NO: 178384 - RNA, 19 nt, Artificial Sequence
  Description of Artificial Sequence: Synthetic oligonucleotide
  Sense strand starting at position 1166 of SEQ ID NO: 2300
gcuugaguuccuggaauau

SEQ ID NO: 178385 - RNA, 19 nt, Artificial Sequence
  Description of Artificial Sequence: Synthetic oligonucleotide
  Antisense strand to SEQ ID NO: 178384
auauuccaggaacucaagc

SEQ ID NO: 178386 - RNA, 19 nt, Artificial Sequence
  Description of Artificial Sequence: Synthetic oligonucleotide
  Sense strand starting at position 1362 of SEQ ID NO: 2300
acuagugaguuugcuuaca

SEQ ID NO: 178387 - RNA, 19 nt, Artificial Sequence
  Description of Artificial Sequence: Synthetic oligonucleotide
  Antisense strand to SEQ ID NO: 178386
uguaagcaaacucacuagu

SEQ ID NO: 178388 - RNA, 19 nt, Artificial Sequence
  Description of Artificial Sequence: Synthetic oligonucleotide
  Sense strand starting at position 1364 of SEQ ID NO: 2300
uagugaguuugcuuacaaa

SEQ ID NO: 178389 - RNA, 19 nt, Artificial Sequence
  Description of Artificial Sequence: Synthetic oligonucleotide
  Antisense strand to SEQ ID NO: 178388
uuuguaagcaaacucacua

SEQ ID NO: 178390 - RNA, 19 nt, Artificial Sequence
  Description of Artificial Sequence: Synthetic oligonucleotide
  Sense strand starting at position 1406 of SEQ ID NO: 2300
cugacauacuccucacguu

SEQ ID NO: 178391 - RNA, 19 nt, Artificial Sequence
  Description of Artificial Sequence: Synthetic oligonucleotide
  Antisense strand to SEQ ID NO: 178390
aacgugaggaguaugucag

SEQ ID NO: 178392 - RNA, 19 nt, Artificial Sequence
  Description of Artificial Sequence: Synthetic oligonucleotide
  Sense strand starting at position 1407 of SEQ ID NO: 2300
ugacauacuccucacguuu

SEQ ID NO: 178393 - RNA, 19 nt, Artificial Sequence
  Description of Artificial Sequence: Synthetic oligonucleotide
  Antisense strand to SEQ ID NO: 178392
aaacgugaggaguauguca

SEQ ID NO: 178394 - RNA, 19 nt, Artificial Sequence
  Description of Artificial Sequence: Synthetic oligonucleotide
  Sense strand starting at position 1418 of SEQ ID NO: 2300
ucacguuugugaccaauau

SEQ ID NO: 178395 - RNA, 19 nt, Artificial Sequence
  Description of Artificial Sequence: Synthetic oligonucleotide
  Antisense strand to SEQ ID NO: 178394
auauuggucacaaacguga

SEQ ID NO: 178396 - RNA, 19 nt, Artificial Sequence
  Description of Artificial Sequence: Synthetic oligonucleotide
  Sense strand starting at position 1419 of SEQ ID NO: 2300
cacguuugugaccaauauu

SEQ ID NO: 178397 - RNA, 19 nt, Artificial Sequence
  Description of Artificial Sequence: Synthetic oligonucleotide
  Antisense strand to SEQ ID NO: 178396
aauauuggucacaaacgug

SEQ ID NO: 178398 - RNA, 19 nt, Artificial Sequence
  Description of Artificial Sequence: Synthetic oligonucleotide
  Sense strand starting at position 1422 of SEQ ID NO: 2300
guuugugaccaauauuaga

SEQ ID NO: 178399 - RNA, 19 nt, Artificial Sequence
  Description of Artificial Sequence: Synthetic oligonucleotide
  Antisense strand to SEQ ID NO: 178398
ucuaauauuggucacaaac

SEQ ID NO: 178400 - RNA, 19 nt, Artificial Sequence
  Description of Artificial Sequence: Synthetic oligonucleotide
  Sense strand starting at position 1449 of SEQ ID NO: 2300
ugggcaguucuacgauuua

SEQ ID NO: 178401 - RNA, 19 nt, Artificial Sequence
  Description of Artificial Sequence: Synthetic oligonucleotide
  Antisense strand to SEQ ID NO: 178400
uaaaucguagaacugccca

SEQ ID NO: 178402 - RNA, 19 nt, Artificial Sequence
  Description of Artificial Sequence: Synthetic oligonucleotide
  Sense strand starting at position 1464 of SEQ ID NO: 2300
uuuaguagcaggugauuaa

SEQ ID NO: 178403 - RNA, 19 nt, Artificial Sequence
  Description of Artificial Sequence: Synthetic oligonucleotide
  Antisense strand to SEQ ID NO: 178402
uuaaucaccugcuacuaaa

SEQ ID NO: 178404 - RNA, 19 nt, Artificial Sequence
  Description of Artificial Sequence: Synthetic oligonucleotide
  Sense strand starting at position 1474 of SEQ ID NO: 2300
ggugauuaagcccacccaa

SEQ ID NO: 178405 - RNA, 19 nt, Artificial Sequence
  Description of Artificial Sequence: Synthetic oligonucleotide
  Antisense strand to SEQ ID NO: 178404
uugggugggcuuaaucacc

SEQ ID NO: 178406 - RNA, 19 nt, Artificial Sequence
  Description of Artificial Sequence: Synthetic oligonucleotide
  Sense strand starting at position 1527 of SEQ ID NO: 2300
gggacucccucgcugacaa

SEQ ID NO: 178407 - RNA, 19 nt, Artificial Sequence
  Description of Artificial Sequence: Synthetic oligonucleotide
  Antisense strand to SEQ ID NO: 178406
uugucagcgagggaguccc

SEQ ID NO: 178408 - RNA, 19 nt, Artificial Sequence
  Description of Artificial Sequence: Synthetic oligonucleotide
  Sense strand starting at position 1528 of SEQ ID NO: 2300
ggacucccucgcugacaaa

SEQ ID NO: 178409 - RNA, 19 nt, Artificial Sequence
  Description of Artificial Sequence: Synthetic oligonucleotide
  Antisense strand to SEQ ID NO: 178408
uuugucagcgagggagucc

SEQ ID NO: 178410 - RNA, 19 nt, Artificial Sequence
  Description of Artificial Sequence: Synthetic oligonucleotide
  Sense strand starting at position 1567 of SEQ ID NO: 2300
cgaggcguccucgaaggaa

SEQ ID NO: 178411 - RNA, 19 nt, Artificial Sequence
  Description of Artificial Sequence: Synthetic oligonucleotide
  Antisense strand to SEQ ID NO: 178410
uuccuucgaggacgccucg

SEQ ID NO: 178412 - RNA, 19 nt, Artificial Sequence
  Description of Artificial Sequence: Synthetic oligonucleotide
  Sense strand starting at position 2057 of SEQ ID NO: 2300
gagugacgccacuaagcau

SEQ ID NO: 178413 - RNA, 19 nt, Artificial Sequence
  Description of Artificial Sequence: Synthetic oligonucleotide
  Antisense strand to SEQ ID NO: 178412
augcuuaguggcgucacuc

SEQ ID NO: 178414 - RNA, 19 nt, Artificial Sequence
  Description of Artificial Sequence: Synthetic oligonucleotide
  Sense strand starting at position 2358 of SEQ ID NO: 2300
ggguucucccauuggugga

SEQ ID NO: 178415 - RNA, 19 nt, Artificial Sequence
  Description of Artificial Sequence: Synthetic oligonucleotide
  Antisense strand to SEQ ID NO: 178414
uccaccaaugggagaaccc

SEQ ID NO: 178416 - RNA, 19 nt, Artificial Sequence
  Description of Artificial Sequence: Synthetic oligonucleotide
  Sense strand starting at position 2763 of SEQ ID NO: 2300
uugaaugucacccgggauu

SEQ ID NO: 178417 - RNA, 19 nt, Artificial Sequence
  Description of Artificial Sequence: Synthetic oligonucleotide
  Antisense strand to SEQ ID NO: 178416
aaucccgggugacauucaa

SEQ ID NO: 178418 - RNA, 19 nt, Artificial Sequence
  Description of Artificial Sequence: Synthetic oligonucleotide
  Sense strand starting at position 2781 of SEQ ID NO: 2300
uccacaguccuguguaaca

SEQ ID NO: 178419 - RNA, 19 nt, Artificial Sequence
  Description of Artificial Sequence: Synthetic oligonucleotide
  Antisense strand to SEQ ID NO: 178418
uguuacacaggacugugga

SEQ ID NO: 178420 - RNA, 19 nt, Artificial Sequence
  Description of Artificial Sequence: Synthetic oligonucleotide
  Sense strand starting at position 2783 of SEQ ID NO: 2300
cacaguccuguguaacaga

SEQ ID NO: 178421 - RNA, 19 nt, Artificial Sequence
  Description of Artificial Sequence: Synthetic oligonucleotide
  Antisense strand to SEQ ID NO: 178420
ucuguuacacaggacugug

SEQ ID NO: 178422 - RNA, 19 nt, Artificial Sequence
  Description of Artificial Sequence: Synthetic oligonucleotide
  Sense strand starting at position 3054 of SEQ ID NO: 2300
uuguuaucuccaguugcgu

SEQ ID NO: 178423 - RNA, 19 nt, Artificial Sequence
  Description of Artificial Sequence: Synthetic oligonucleotide
  Antisense strand to SEQ ID NO: 178422
acgcaacuggagauaacaa

SEQ ID NO: 178424 - RNA, 19 nt, Artificial Sequence
  Description of Artificial Sequence: Synthetic oligonucleotide
  Sense strand starting at position 3285 of SEQ ID NO: 2300
aaaugaaauguuuggccau

SEQ ID NO: 178425 - RNA, 19 nt, Artificial Sequence
  Description of Artificial Sequence: Synthetic oligonucleotide
  Antisense strand to SEQ ID NO: 178424
auggccaaacauuucauuu

SEQ ID NO: 178426 - RNA, 19 nt, Artificial Sequence
  Description of Artificial Sequence: Synthetic oligonucleotide
  Sense strand starting at position 3458 of SEQ ID NO: 2300
ggcauucgccucuccagua

SEQ ID NO: 178427 - RNA, 19 nt, Artificial Sequence
  Description of Artificial Sequence: Synthetic oligonucleotide
  Antisense strand to SEQ ID NO: 178426
uacuggagaggcgaaugcc

SEQ ID NO: 178428 - RNA, 19 nt, Artificial Sequence
  Description of Artificial Sequence: Synthetic oligonucleotide
  Sense strand starting at position 3503 of SEQ ID NO: 2300
uggacuuggguuugcuaua

SEQ ID NO: 178429 - RNA, 19 nt, Artificial Sequence
  Description of Artificial Sequence: Synthetic oligonucleotide
  Antisense strand to SEQ ID NO: 178428
uauagcaaacccaagucca

SEQ ID NO: 178430 - RNA, 19 nt, Artificial Sequence
  Description of Artificial Sequence: Synthetic oligonucleotide
  Sense strand starting at position 3504 of SEQ ID NO: 2300
ggacuuggguuugcuauau

SEQ ID NO: 178431 - RNA, 19 nt, Artificial Sequence
  Description of Artificial Sequence: Synthetic oligonucleotide
  Antisense strand to SEQ ID NO: 178430
auauagcaaacccaagucc

SEQ ID NO: 178432 - RNA, 19 nt, Artificial Sequence
  Description of Artificial Sequence: Synthetic oligonucleotide
  Sense strand starting at position 3508 of SEQ ID NO: 2300
uuggguuugcuauauauuc

SEQ ID NO: 178433 - RNA, 19 nt, Artificial Sequence
  Description of Artificial Sequence: Synthetic oligonucleotide
  Antisense strand to SEQ ID NO: 178432
gaauauauagcaaacccaa

SEQ ID NO: 178434 - RNA, 19 nt, Artificial Sequence
  Description of Artificial Sequence: Synthetic oligonucleotide
  Sense strand starting at position 3948 of SEQ ID NO: 2301
ggcuuuacucugucgccua

SEQ ID NO: 178435 - RNA, 19 nt, Artificial Sequence
  Description of Artificial Sequence: Synthetic oligonucleotide
  Antisense strand to SEQ ID NO: 178434
uaggcgacagaguaaagcc

SEQ ID NO: 178436 - RNA, 19 nt, Artificial Sequence
  Description of Artificial Sequence: Synthetic oligonucleotide
  Sense strand starting at position 3891 of SEQ ID NO: 2301
cuaucaugguugcccuuaa

SEQ ID NO: 178437 - RNA, 19 nt, Artificial Sequence
  Description of Artificial Sequence: Synthetic oligonucleotide
  Antisense strand to SEQ ID NO: 178436
uuaagggcaaccaugauag

SEQ ID NO: 178438 - RNA, 19 nt, Artificial Sequence
  Description of Artificial Sequence: Synthetic oligonucleotide
  Sense strand starting at position 3822 of SEQ ID NO: 2301
augccacgugcucagaaau

SEQ ID NO: 178439 - RNA, 19 nt, Artificial Sequence
  Description of Artificial Sequence: Synthetic oligonucleotide
  Antisense strand to SEQ ID NO: 178438
auuucugagcacguggcau

SEQ ID NO: 178440 - RNA, 19 nt, Artificial Sequence
  Description of Artificial Sequence: Synthetic oligonucleotide
  Sense strand starting at position 3803 of SEQ ID NO: 2301
aggccagauuacuuaagga

SEQ ID NO: 178441 - RNA, 19 nt, Artificial Sequence
  Description of Artificial Sequence: Synthetic oligonucleotide
  Antisense strand to SEQ ID NO: 178440
uccuuaaguaaucuggccu

SEQ ID NO: 178442 - RNA, 19 nt, Artificial Sequence
  Description of Artificial Sequence: Synthetic oligonucleotide
  Sense strand starting at position 3797 of SEQ ID NO: 2301
gugucaaggccagauuacu

SEQ ID NO: 178443 - RNA, 19 nt, Artificial Sequence
  Description of Artificial Sequence: Synthetic oligonucleotide
  Antisense strand to SEQ ID NO: 178442
aguaaucuggccuugacac

SEQ ID NO: 178444 - RNA, 19 nt, Artificial Sequence
  Description of Artificial Sequence: Synthetic oligonucleotide
  Sense strand starting at position 3795 of SEQ ID NO: 2301
aagugucaaggccagauua

SEQ ID NO: 178445 - RNA, 19 nt, Artificial Sequence
  Description of Artificial Sequence: Synthetic oligonucleotide
  Antisense strand to SEQ ID NO: 178444
uaaucuggccuugacacuu

SEQ ID NO: 178446 - RNA, 19 nt, Artificial Sequence
  Description of Artificial Sequence: Synthetic oligonucleotide
  Sense strand starting at position 3757 of SEQ ID NO: 2301
ucaguuauuuauggagaau

SEQ ID NO: 178447 - RNA, 19 nt, Artificial Sequence
  Description of Artificial Sequence: Synthetic oligonucleotide
  Antisense strand to SEQ ID NO: 178446
auucuccauaaauaacuga

SEQ ID NO: 178448 - RNA, 19 nt, Artificial Sequence
  Description of Artificial Sequence: Synthetic oligonucleotide
  Sense strand starting at position 3730 of SEQ ID NO: 2301
uugcucauguaaucaagaa

SEQ ID NO: 178449 - RNA, 19 nt, Artificial Sequence
  Description of Artificial Sequence: Synthetic oligonucleotide
  Antisense strand to SEQ ID NO: 178448
uucuugauuacaugagcaa

SEQ ID NO: 178450 - RNA, 19 nt, Artificial Sequence
  Description of Artificial Sequence: Synthetic oligonucleotide
  Sense strand starting at position 3704 of SEQ ID NO: 2301
uccuguuuggaauaauucu

SEQ ID NO: 178451 - RNA, 19 nt, Artificial Sequence
  Description of Artificial Sequence: Synthetic oligonucleotide
  Antisense strand to SEQ ID NO: 178450
agaauuauuccaaacagga

SEQ ID NO: 178452 - RNA, 19 nt, Artificial Sequence
  Description of Artificial Sequence: Synthetic oligonucleotide
  Sense strand starting at position 3701 of SEQ ID NO: 2301
auuuccuguuuggaauaau

SEQ ID NO: 178453 - RNA, 19 nt, Artificial Sequence
  Description of Artificial Sequence: Synthetic oligonucleotide
  Antisense strand to SEQ ID NO: 178452
auuauuccaaacaggaaau

SEQ ID NO: 178454 - RNA, 19 nt, Artificial Sequence
  Description of Artificial Sequence: Synthetic oligonucleotide
  Sense strand starting at position 3693 of SEQ ID NO: 2301
guuagauuauuuccuguuu

SEQ ID NO: 178455 - RNA, 19 nt, Artificial Sequence
  Description of Artificial Sequence: Synthetic oligonucleotide
  Antisense strand to SEQ ID NO: 178454
aaacaggaaauaaucuaac

SEQ ID NO: 178456 - RNA, 19 nt, Artificial Sequence
  Description of Artificial Sequence: Synthetic oligonucleotide
  Sense strand starting at position 3691 of SEQ ID NO: 2301
cuguuagauuauuuccugu

SEQ ID NO: 178457 - RNA, 19 nt, Artificial Sequence
  Description of Artificial Sequence: Synthetic oligonucleotide
  Antisense strand to SEQ ID NO: 178456
acaggaaauaaucuaacag

SEQ ID NO: 178458 - RNA, 19 nt, Artificial Sequence
  Description of Artificial Sequence: Synthetic oligonucleotide
  Sense strand starting at position 3653 of SEQ ID NO: 2301
uaucuauggcagcaggaau

SEQ ID NO: 178459 - RNA, 19 nt, Artificial Sequence
  Description of Artificial Sequence: Synthetic oligonucleotide
  Antisense strand to SEQ ID NO: 178458
auuccugcugccauagaua

SEQ ID NO: 178460 - RNA, 19 nt, Artificial Sequence
  Description of Artificial Sequence: Synthetic oligonucleotide
  Sense strand starting at position 3604 of SEQ ID NO: 2301
cuacuuauuugagggaauu

SEQ ID NO: 178461 - RNA, 19 nt, Artificial Sequence
  Description of Artificial Sequence: Synthetic oligonucleotide
  Antisense strand to SEQ ID NO: 178460
aauucccucaaauaaguag

SEQ ID NO: 178462 - RNA, 19 nt, Artificial Sequence
  Description of Artificial Sequence: Synthetic oligonucleotide
  Sense strand starting at position 3602 of SEQ ID NO: 2301
uucuacuuauuugagggaa

SEQ ID NO: 178463 - RNA, 19 nt, Artificial Sequence
  Description of Artificial Sequence: Synthetic oligonucleotide
  Antisense strand to SEQ ID NO: 178462
uucccucaaauaaguagaa

SEQ ID NO: 178464 - RNA, 19 nt, Artificial Sequence
  Description of Artificial Sequence: Synthetic oligonucleotide
  Sense strand starting at position 3575 of SEQ ID NO: 2301
augugaaguuaacucaaua

SEQ ID NO: 178465 - RNA, 19 nt, Artificial Sequence
  Description of Artificial Sequence: Synthetic oligonucleotide
  Antisense strand to SEQ ID NO: 178464
uauugaguuaacuucacau

SEQ ID NO: 178466 - RNA, 19 nt, Artificial Sequence
  Description of Artificial Sequence: Synthetic oligonucleotide
  Sense strand starting at position 3566 of SEQ ID NO: 2301
ggaguucugaugugaaguu

SEQ ID NO: 178467 - RNA, 19 nt, Artificial Sequence
  Description of Artificial Sequence: Synthetic oligonucleotide
  Antisense strand to SEQ ID NO: 178466
aacuucacaucagaacucc

SEQ ID NO: 178468 - RNA, 19 nt, Artificial Sequence
  Description of Artificial Sequence: Synthetic oligonucleotide
  Sense strand starting at position 3524 of SEQ ID NO: 2301
ccuuguucccaccagaaga

SEQ ID NO: 178469 - RNA, 19 nt, Artificial Sequence
  Description of Artificial Sequence: Synthetic oligonucleotide
  Antisense strand to SEQ ID NO: 178468
ucuucuggugggaacaagg

SEQ ID NO: 178470 - RNA, 19 nt, Artificial Sequence
  Description of Artificial Sequence: Synthetic oligonucleotide
  Sense strand starting at position 3480 of SEQ ID NO: 2301
gcaaauuugggcugauguu

SEQ ID NO: 178471 - RNA, 19 nt, Artificial Sequence
  Description of Artificial Sequence: Synthetic oligonucleotide
  Antisense strand to SEQ ID NO: 178470
aacaucagcccaaauuugc

SEQ ID NO: 178472 - RNA, 19 nt, Artificial Sequence
  Description of Artificial Sequence: Synthetic oligonucleotide
  Sense strand starting at position 3335 of SEQ ID NO: 2301
uacugaagcugucugaaga

SEQ ID NO: 178473 - RNA, 19 nt, Artificial Sequence
  Description of Artificial Sequence: Synthetic oligonucleotide
  Antisense strand to SEQ ID NO: 178472
ucuucagacagcuucagua

SEQ ID NO: 178474 - RNA, 19 nt, Artificial Sequence
  Description of Artificial Sequence: Synthetic oligonucleotide
  Sense strand starting at position 3306 of SEQ ID NO: 2301
ggugaaagguuguuaagga

SEQ ID NO: 178475 - RNA, 19 nt, Artificial Sequence
  Description of Artificial Sequence: Synthetic oligonucleotide
  Antisense strand to SEQ ID NO: 178474
uccuuaacaaccuuucacc

SEQ ID NO: 178476 - RNA, 19 nt, Artificial Sequence
  Description of Artificial Sequence: Synthetic oligonucleotide
  Sense strand starting at position 3292 of SEQ ID NO: 2301
uuuccagaugcuuagguga

SEQ ID NO: 178477 - RNA, 19 nt, Artificial Sequence
  Description of Artificial Sequence: Synthetic oligonucleotide
  Antisense strand to SEQ ID NO: 178476
ucaccuaagcaucuggaaa

SEQ ID NO: 178478 - RNA, 19 nt, Artificial Sequence
  Description of Artificial Sequence: Synthetic oligonucleotide
  Sense strand starting at position 3273 of SEQ ID NO: 2301
ccugaaacaugauauugaa

SEQ ID NO: 178479 - RNA, 19 nt, Artificial Sequence
  Description of Artificial Sequence: Synthetic oligonucleotide
  Antisense strand to SEQ ID NO: 178478
uucaauaucauguuucagg

SEQ ID NO: 178480 - RNA, 19 nt, Artificial Sequence
  Description of Artificial Sequence: Synthetic oligonucleotide
  Sense strand starting at position 3231 of SEQ ID NO: 2301
aauauuggagcuugaguau

SEQ ID NO: 178481 - RNA, 19 nt, Artificial Sequence
  Description of Artificial Sequence: Synthetic oligonucleotide
  Antisense strand to SEQ ID NO: 178480
auacucaagcuccaauauu

SEQ ID NO: 178482 - RNA, 19 nt, Artificial Sequence
  Description of Artificial Sequence: Synthetic oligonucleotide
  Sense strand starting at position 3216 of SEQ ID NO: 2301
cccugagaguaagugaaua

SEQ ID NO: 178483 - RNA, 19 nt, Artificial Sequence
  Description of Artificial Sequence: Synthetic oligonucleotide
  Antisense strand to SEQ ID NO: 178482
uauucacuuacucucaggg

SEQ ID NO: 178484 - RNA, 19 nt, Artificial Sequence
  Description of Artificial Sequence: Synthetic oligonucleotide
  Sense strand starting at position 3207 of SEQ ID NO: 2301
aaagaucuucccugagagu

SEQ ID NO: 178485 - RNA, 19 nt, Artificial Sequence
  Description of Artificial Sequence: Synthetic oligonucleotide
  Antisense strand to SEQ ID NO: 178484
acucucagggaagaucuuu

SEQ ID NO: 178486 - RNA, 19 nt, Artificial Sequence
  Description of Artificial Sequence: Synthetic oligonucleotide
  Sense strand starting at position 3177 of SEQ ID NO: 2301
gaaucuugucuuuggcaaa

SEQ ID NO: 178487 - RNA, 19 nt, Artificial Sequence
  Description of Artificial Sequence: Synthetic oligonucleotide
  Antisense strand to SEQ ID NO: 178486
uuugccaaagacaagauuc

SEQ ID NO: 178488 - RNA, 19 nt, Artificial Sequence
  Description of Artificial Sequence: Synthetic oligonucleotide
  Sense strand starting at position 3176 of SEQ ID NO: 2301
agaaucuugucuuuggcaa

SEQ ID NO: 178489 - RNA, 19 nt, Artificial Sequence
  Description of Artificial Sequence: Synthetic oligonucleotide
  Antisense strand to SEQ ID NO: 178488
uugccaaagacaagauucu

SEQ ID NO: 178490 - RNA, 19 nt, Artificial Sequence
  Description of Artificial Sequence: Synthetic oligonucleotide
  Sense strand starting at position 3034 of SEQ ID NO: 2301
ucguguucucgcucacugu

SEQ ID NO: 178491 - RNA, 19 nt, Artificial Sequence
  Description of Artificial Sequence: Synthetic oligonucleotide
  Antisense strand to SEQ ID NO: 178490
acagugagcgagaacacga

SEQ ID NO: 178492 - RNA, 19 nt, Artificial Sequence
  Description of Artificial Sequence: Synthetic oligonucleotide
  Sense strand starting at position 2215 of SEQ ID NO: 2301
gugcacuagagaugaaaga

SEQ ID NO: 178493 - RNA, 19 nt, Artificial Sequence
  Description of Artificial Sequence: Synthetic oligonucleotide
  Antisense strand to SEQ ID NO: 178492
ucuuucaucucuagugcac

SEQ ID NO: 178494 - RNA, 19 nt, Artificial Sequence
  Description of Artificial Sequence: Synthetic oligonucleotide
  Sense strand starting at position 2213 of SEQ ID NO: 2301
acgugcacuagagaugaaa

SEQ ID NO: 178495 - RNA, 19 nt, Artificial Sequence
  Description of Artificial Sequence: Synthetic oligonucleotide
  Antisense strand to SEQ ID NO: 178494
uuucaucucuagugcacgu

SEQ ID NO: 178496 - RNA, 19 nt, Artificial Sequence
  Description of Artificial Sequence: Synthetic oligonucleotide
  Sense strand starting at position 2211 of SEQ ID NO: 2301
gaacgugcacuagagauga

SEQ ID NO: 178497 - RNA, 19 nt, Artificial Sequence
  Description of Artificial Sequence: Synthetic oligonucleotide
  Antisense strand to SEQ ID NO: 178496
ucaucucuagugcacguuc

SEQ ID NO: 178498 - RNA, 19 nt, Artificial Sequence
  Description of Artificial Sequence: Synthetic oligonucleotide
  Sense strand starting at position 2209 of SEQ ID NO: 2301
aggaacgugcacuagagau

SEQ ID NO: 178499 - RNA, 19 nt, Artificial Sequence
  Description of Artificial Sequence: Synthetic oligonucleotide
  Antisense strand to SEQ ID NO: 178498
aucucuagugcacguuccu

SEQ ID NO: 178500 - RNA, 19 nt, Artificial Sequence
  Description of Artificial Sequence: Synthetic oligonucleotide
  Sense strand starting at position 2148 of SEQ ID NO: 2301
ccugguugggagcacuaaa

SEQ ID NO: 178501 - RNA, 19 nt, Artificial Sequence
  Description of Artificial Sequence: Synthetic oligonucleotide
  Antisense strand to SEQ ID NO: 178500
uuuagugcucccaaccagg

SEQ ID NO: 178502 - RNA, 19 nt, Artificial Sequence
  Description of Artificial Sequence: Synthetic oligonucleotide
  Sense strand starting at position 2062 of SEQ ID NO: 2301
ggagccauuucuuacauuc

SEQ ID NO: 178503 - RNA, 19 nt, Artificial Sequence
  Description of Artificial Sequence: Synthetic oligonucleotide
  Antisense strand to SEQ ID NO: 178502
gaauguaagaaauggcucc

SEQ ID NO: 178504 - RNA, 19 nt, Artificial Sequence
  Description of Artificial Sequence: Synthetic oligonucleotide
  Sense strand starting at position 1430 of SEQ ID NO: 2301
acacgucccucuucucaua

SEQ ID NO: 178505 - RNA, 19 nt, Artificial Sequence
  Description of Artificial Sequence: Synthetic oligonucleotide
  Antisense strand to SEQ ID NO: 178504
uaugagaagagggacgugu

SEQ ID NO: 178506 - RNA, 19 nt, Artificial Sequence
  Description of Artificial Sequence: Synthetic oligonucleotide
  Sense strand starting at position 91 of SEQ ID NO: 2301
ugaugaauagcucagcguu

SEQ ID NO: 178507 - RNA, 19 nt, Artificial Sequence
  Description of Artificial Sequence: Synthetic oligonucleotide
  Antisense strand to SEQ ID NO: 178506
aacgcugagcuauucauca

SEQ ID NO: 178508 - RNA, 19 nt, Artificial Sequence
  Description of Artificial Sequence: Synthetic oligonucleotide
  Sense strand starting at position 57 of SEQ ID NO: 2301
gccucugaccagugaugga

SEQ ID NO: 178509 - RNA, 19 nt, Artificial Sequence
  Description of Artificial Sequence: Synthetic oligonucleotide
  Antisense strand to SEQ ID NO: 178508
uccaucacuggucagaggc

SEQ ID NO: 178510 - RNA, 19 nt, Artificial Sequence
  Description of Artificial Sequence: Synthetic oligonucleotide
  Sense strand starting at position 54 of SEQ ID NO: 2301
gaugccucugaccagugau

SEQ ID NO: 178511 - RNA, 19 nt, Artificial Sequence
  Description of Artificial Sequence: Synthetic oligonucleotide
  Antisense strand to SEQ ID NO: 178510
aucacuggucagaggcauc

SEQ ID NO: 178512 - RNA, 19 nt, Artificial Sequence
  Description of Artificial Sequence: Synthetic oligonucleotide
  Sense strand starting at position 50 of SEQ ID NO: 2301
gacagaugccucugaccag

SEQ ID NO: 178513 - RNA, 19 nt, Artificial Sequence
  Description of Artificial Sequence: Synthetic oligonucleotide
  Antisense strand to SEQ ID NO: 178512
cuggucagaggcaucuguc

SEQ ID NO: 178514 - RNA, 19 nt, Artificial Sequence
  Description of Artificial Sequence: Synthetic oligonucleotide
  Sense strand starting at position 3911 of SEQ ID NO: 2302
ugcucuuugcugggaugca

SEQ ID NO: 178515 - RNA, 19 nt, Artificial Sequence
  Description of Artificial Sequence: Synthetic oligonucleotide
  Antisense strand to SEQ ID NO: 178514
ugcaucccagcaaagagca

SEQ ID NO: 178516 - RNA, 19 nt, Artificial Sequence
  Description of Artificial Sequence: Synthetic oligonucleotide
  Sense strand starting at position 3182 of SEQ ID NO: 2302
gugcacuagagaugaaaga

SEQ ID NO: 178517 - RNA, 19 nt, Artificial Sequence
  Description of Artificial Sequence: Synthetic oligonucleotide
  Antisense strand to SEQ ID NO: 178516
ucuuucaucucuagugcac

SEQ ID NO: 178518 - RNA, 19 nt, Artificial Sequence
  Description of Artificial Sequence: Synthetic oligonucleotide
  Sense strand starting at position 3180 of SEQ ID NO: 2302
acgugcacuagagaugaaa

SEQ ID NO: 178519 - RNA, 19 nt, Artificial Sequence
  Description of Artificial Sequence: Synthetic oligonucleotide
  Antisense strand to SEQ ID NO: 178518
uuucaucucuagugcacgu

SEQ ID NO: 178520 - RNA, 19 nt, Artificial Sequence
  Description of Artificial Sequence: Synthetic oligonucleotide
  Sense strand starting at position 3178 of SEQ ID NO: 2302
gaacgugcacuagagauga

SEQ ID NO: 178521 - RNA, 19 nt, Artificial Sequence
  Description of Artificial Sequence: Synthetic oligonucleotide
  Antisense strand to SEQ ID NO: 178520
ucaucucuagugcacguuc

SEQ ID NO: 178522 - RNA, 19 nt, Artificial Sequence
  Description of Artificial Sequence: Synthetic oligonucleotide
  Sense strand starting at position 3176 of SEQ ID NO: 2302
aggaacgugcacuagagau

SEQ ID NO: 178523 - RNA, 19 nt, Artificial Sequence
  Description of Artificial Sequence: Synthetic oligonucleotide
  Antisense strand to SEQ ID NO: 178522
aucucuagugcacguuccu

SEQ ID NO: 178524 - RNA, 19 nt, Artificial Sequence
  Description of Artificial Sequence: Synthetic oligonucleotide
  Sense strand starting at position 3115 of SEQ ID NO: 2302
ccugguugggagcacuaaa

SEQ ID NO: 178525 - RNA, 19 nt, Artificial Sequence
  Description of Artificial Sequence: Synthetic oligonucleotide
  Antisense strand to SEQ ID NO: 178524
uuuagugcucccaaccagg

SEQ ID NO: 178526 - RNA, 19 nt, Artificial Sequence
  Description of Artificial Sequence: Synthetic oligonucleotide
  Sense strand starting at position 3089 of SEQ ID NO: 2302
ggauuaguuucggaggaaa

SEQ ID NO: 178527 - RNA, 19 nt, Artificial Sequence
  Description of Artificial Sequence: Synthetic oligonucleotide
  Antisense strand to SEQ ID NO: 178526
uuuccuccgaaacuaaucc

SEQ ID NO: 178528 - RNA, 19 nt, Artificial Sequence
  Description of Artificial Sequence: Synthetic oligonucleotide
  Sense strand starting at position 3088 of SEQ ID NO: 2302
gggauuaguuucggaggaa

SEQ ID NO: 178529 - RNA, 19 nt, Artificial Sequence
  Description of Artificial Sequence: Synthetic oligonucleotide
  Antisense strand to SEQ ID NO: 178528
uuccuccgaaacuaauccc

SEQ ID NO: 178530 - RNA, 19 nt, Artificial Sequence
  Description of Artificial Sequence: Synthetic oligonucleotide
  Sense strand starting at position 3029 of SEQ ID NO: 2302
ggagccauuucuuacauuc

SEQ ID NO: 178531 - RNA, 19 nt, Artificial Sequence
  Description of Artificial Sequence: Synthetic oligonucleotide
  Antisense strand to SEQ ID NO: 178530
gaauguaagaaauggcucc

SEQ ID NO: 178532 - RNA, 19 nt, Artificial Sequence
  Description of Artificial Sequence: Synthetic oligonucleotide
  Sense strand starting at position 2547 of SEQ ID NO: 2302
cgggcugcucccgggauua

SEQ ID NO: 178533 - RNA, 19 nt, Artificial Sequence
  Description of Artificial Sequence: Synthetic oligonucleotide
  Antisense strand to SEQ ID NO: 178532
uaaucccgggagcagcccg

SEQ ID NO: 178534 - RNA, 19 nt, Artificial Sequence
  Description of Artificial Sequence: Synthetic oligonucleotide
  Sense strand starting at position 2397 of SEQ ID NO: 2302
acacgucccucuucucaua

SEQ ID NO: 178535 - RNA, 19 nt, Artificial Sequence
  Description of Artificial Sequence: Synthetic oligonucleotide
  Antisense strand to SEQ ID NO: 178534
uaugagaagagggacgugu

SEQ ID NO: 178536 - RNA, 19 nt, Artificial Sequence
  Description of Artificial Sequence: Synthetic oligonucleotide
  Sense strand starting at position 1784 of SEQ ID NO: 2302
ugccgugauuccucccgau

SEQ ID NO: 178537 - RNA, 19 nt, Artificial Sequence
  Description of Artificial Sequence: Synthetic oligonucleotide
  Antisense strand to SEQ ID NO: 178536
aucgggaggaaucacggca

SEQ ID NO: 178538 - RNA, 19 nt, Artificial Sequence
  Description of Artificial Sequence: Synthetic oligonucleotide
  Sense strand starting at position 1058 of SEQ ID NO: 2302
ugaugaauagcucagcguu

SEQ ID NO: 178539 - RNA, 19 nt, Artificial Sequence
  Description of Artificial Sequence: Synthetic oligonucleotide
  Antisense strand to SEQ ID NO: 178538
aacgcugagcuauucauca

SEQ ID NO: 178540 - RNA, 19 nt, Artificial Sequence
  Description of Artificial Sequence: Synthetic oligonucleotide
  Sense strand starting at position 1049 of SEQ ID NO: 2302
ccaucuuccugaugaauag

SEQ ID NO: 178541 - RNA, 19 nt, Artificial Sequence
  Description of Artificial Sequence: Synthetic oligonucleotide
  Antisense strand to SEQ ID NO: 178540
cuauucaucaggaagaugg

SEQ ID NO: 178542 - RNA, 19 nt, Artificial Sequence
  Description of Artificial Sequence: Synthetic oligonucleotide
  Sense strand starting at position 1024 of SEQ ID NO: 2302
gccucugaccagugaugga

SEQ ID NO: 178543 - RNA, 19 nt, Artificial Sequence
  Description of Artificial Sequence: Synthetic oligonucleotide
  Antisense strand to SEQ ID NO: 178542
uccaucacuggucagaggc

SEQ ID NO: 178544 - RNA, 19 nt, Artificial Sequence
  Description of Artificial Sequence: Synthetic oligonucleotide
  Sense strand starting at position 1021 of SEQ ID NO: 2302
gaugccucugaccagugau

SEQ ID NO: 178545 - RNA, 19 nt, Artificial Sequence
  Description of Artificial Sequence: Synthetic oligonucleotide
  Antisense strand to SEQ ID NO: 178544
aucacuggucagaggcauc

SEQ ID NO: 178546 - RNA, 19 nt, Artificial Sequence
  Description of Artificial Sequence: Synthetic oligonucleotide
  Sense strand starting at position 1017 of SEQ ID NO: 2302
gacagaugccucugaccag

SEQ ID NO: 178547 - RNA, 19 nt, Artificial Sequence
  Description of Artificial Sequence: Synthetic oligonucleotide
  Antisense strand to SEQ ID NO: 178546
cuggucagaggcaucuguc

SEQ ID NO: 178548 - RNA, 19 nt, Artificial Sequence
  Description of Artificial Sequence: Synthetic oligonucleotide
  Sense strand starting at position 971 of SEQ ID NO: 2302
cucauuagagccugcguaa

SEQ ID NO: 178549 - RNA, 19 nt, Artificial Sequence
  Description of Artificial Sequence: Synthetic oligonucleotide
  Antisense strand to SEQ ID NO: 178548
uuacgcaggcucuaaugag

SEQ ID NO: 178550 - RNA, 19 nt, Artificial Sequence
  Description of Artificial Sequence: Synthetic oligonucleotide
  Sense strand starting at position 961 of SEQ ID NO: 2302
gagcucagcucucauuaga

SEQ ID NO: 178551 - RNA, 19 nt, Artificial Sequence
  Description of Artificial Sequence: Synthetic oligonucleotide
  Antisense strand to SEQ ID NO: 178550
ucuaaugagagcugagcuc

SEQ ID NO: 178552 - RNA, 19 nt, Artificial Sequence
  Description of Artificial Sequence: Synthetic oligonucleotide
  Sense strand starting at position 400 of SEQ ID NO: 2302
gagauaggugcuuagcauu

SEQ ID NO: 178553 - RNA, 19 nt, Artificial Sequence
  Description of Artificial Sequence: Synthetic oligonucleotide
  Antisense strand to SEQ ID NO: 178552
aaugcuaagcaccuaucuc

SEQ ID NO: 178554 - RNA, 19 nt, Artificial Sequence
  Description of Artificial Sequence: Synthetic oligonucleotide
  Sense strand starting at position 399 of SEQ ID NO: 2302
agagauaggugcuuagcau

SEQ ID NO: 178555 - RNA, 19 nt, Artificial Sequence
  Description of Artificial Sequence: Synthetic oligonucleotide
  Antisense strand to SEQ ID NO: 178554
augcuaagcaccuaucucu

SEQ ID NO: 178556 - RNA, 19 nt, Artificial Sequence
  Description of Artificial Sequence: Synthetic oligonucleotide
  Sense strand starting at position 379 of SEQ ID NO: 2302
gugacuuugugacagauua

SEQ ID NO: 178557 - RNA, 19 nt, Artificial Sequence
  Description of Artificial Sequence: Synthetic oligonucleotide
  Antisense strand to SEQ ID NO: 178556
uaaucugucacaaagucac

SEQ ID NO: 178558 - RNA, 19 nt, Artificial Sequence
  Description of Artificial Sequence: Synthetic oligonucleotide
  Sense strand starting at position 377 of SEQ ID NO: 2302
cagugacuuugugacagau

SEQ ID NO: 178559 - RNA, 19 nt, Artificial Sequence
  Description of Artificial Sequence: Synthetic oligonucleotide
  Antisense strand to SEQ ID NO: 178558
aucugucacaaagucacug

SEQ ID NO: 178560 - RNA, 19 nt, Artificial Sequence
  Description of Artificial Sequence: Synthetic oligonucleotide
  Sense strand starting at position 353 of SEQ ID NO: 2302
cccaaaguuguugaaugau

SEQ ID NO: 178561 - RNA, 19 nt, Artificial Sequence
  Description of Artificial Sequence: Synthetic oligonucleotide
  Antisense strand to SEQ ID NO: 178560
aucauucaacaacuuuggg

SEQ ID NO: 178562 - RNA, 19 nt, Artificial Sequence
  Description of Artificial Sequence: Synthetic oligonucleotide
  Sense strand starting at position 352 of SEQ ID NO: 2302
gcccaaaguuguugaauga

SEQ ID NO: 178563 - RNA, 19 nt, Artificial Sequence
  Description of Artificial Sequence: Synthetic oligonucleotide
  Antisense strand to SEQ ID NO: 178562
ucauucaacaacuuugggc

SEQ ID NO: 178564 - RNA, 19 nt, Artificial Sequence
  Description of Artificial Sequence: Synthetic oligonucleotide
  Sense strand starting at position 351 of SEQ ID NO: 2302
ggcccaaaguuguugaaug

SEQ ID NO: 178565 - RNA, 19 nt, Artificial Sequence
  Description of Artificial Sequence: Synthetic oligonucleotide
  Antisense strand to SEQ ID NO: 178564
cauucaacaacuuugggcc

SEQ ID NO: 178566 - RNA, 19 nt, Artificial Sequence
  Description of Artificial Sequence: Synthetic oligonucleotide
  Sense strand starting at position 285 of SEQ ID NO: 2302
cccuuuagguauggacauu

SEQ ID NO: 178567 - RNA, 19 nt, Artificial Sequence
  Description of Artificial Sequence: Synthetic oligonucleotide
  Antisense strand to SEQ ID NO: 178566
aauguccauaccuaaaggg

SEQ ID NO: 178568 - RNA, 19 nt, Artificial Sequence
  Description of Artificial Sequence: Synthetic oligonucleotide
  Sense strand starting at position 284 of SEQ ID NO: 2302
acccuuuagguauggacau

SEQ ID NO: 178569 - RNA, 19 nt, Artificial Sequence
  Description of Artificial Sequence: Synthetic oligonucleotide
  Antisense strand to SEQ ID NO: 178568
auguccauaccuaaagggu

SEQ ID NO: 178570 - RNA, 19 nt, Artificial Sequence
  Description of Artificial Sequence: Synthetic oligonucleotide
  Sense strand starting at position 278 of SEQ ID NO: 2302
ucagcaacccuuuagguau

SEQ ID NO: 178571 - RNA, 19 nt, Artificial Sequence
  Description of Artificial Sequence: Synthetic oligonucleotide
  Antisense strand to SEQ ID NO: 178570
auaccuaaaggguugcuga

SEQ ID NO: 178572 - RNA, 19 nt, Artificial Sequence
  Description of Artificial Sequence: Synthetic oligonucleotide
  Sense strand starting at position 101 of SEQ ID NO: 2302
ccugguaguuaauaauuaa

SEQ ID NO: 178573 - RNA, 19 nt, Artificial Sequence
  Description of Artificial Sequence: Synthetic oligonucleotide
  Antisense strand to SEQ ID NO: 178572
uuaauuauuaacuaccagg

SEQ ID NO: 178574 - RNA, 19 nt, Artificial Sequence
  Description of Artificial Sequence: Synthetic oligonucleotide
  Sense strand starting at position 97 of SEQ ID NO: 2302
uuugccugguaguuaauaa

SEQ ID NO: 178575 - RNA, 19 nt, Artificial Sequence
  Description of Artificial Sequence: Synthetic oligonucleotide
  Antisense strand to SEQ ID NO: 178574
uuauuaacuaccaggcaaa

SEQ ID NO: 178576 - RNA, 19 nt, Artificial Sequence
  Description of Artificial Sequence: Synthetic oligonucleotide
  Sense strand starting at position 94 of SEQ ID NO: 2302
aucuuugccugguaguuaa

SEQ ID NO: 178577 - RNA, 19 nt, Artificial Sequence
  Description of Artificial Sequence: Synthetic oligonucleotide
  Antisense strand to SEQ ID NO: 178576
uuaacuaccaggcaaagau

SEQ ID NO: 178578 - RNA, 19 nt, Artificial Sequence
  Description of Artificial Sequence: Synthetic oligonucleotide
  Sense strand starting at position 92 of SEQ ID NO: 2302
uaaucuuugccugguaguu

SEQ ID NO: 178579 - RNA, 19 nt, Artificial Sequence
  Description of Artificial Sequence: Synthetic oligonucleotide
  Antisense strand to SEQ ID NO: 178578
aacuaccaggcaaagauua

SEQ ID NO: 178580 - RNA, 19 nt, Artificial Sequence
  Description of Artificial Sequence: Synthetic oligonucleotide
  Sense strand starting at position 91 of SEQ ID NO: 2302
uuaaucuuugccugguagu

SEQ ID NO: 178581 - RNA, 19 nt, Artificial Sequence
  Description of Artificial Sequence: Synthetic oligonucleotide
  Antisense strand to SEQ ID NO: 178580
acuaccaggcaaagauuaa

SEQ ID NO: 178582 - RNA, 19 nt, Artificial Sequence
  Description of Artificial Sequence: Synthetic oligonucleotide
  Sense strand starting at position 58 of SEQ ID NO: 2302
gauauaugguaauaacagu

SEQ ID NO: 178583 - RNA, 19 nt, Artificial Sequence
  Description of Artificial Sequence: Synthetic oligonucleotide
  Antisense strand to SEQ ID NO: 178582
acuguuauuaccauauauc

SEQ ID NO: 178584 - RNA, 19 nt, Artificial Sequence
  Description of Artificial Sequence: Synthetic oligonucleotide
  Sense strand starting at position 55 of SEQ ID NO: 2302
ugggauauaugguaauaac

SEQ ID NO: 178585 - RNA, 19 nt, Artificial Sequence
  Description of Artificial Sequence: Synthetic oligonucleotide
  Antisense strand to SEQ ID NO: 178584
guuauuaccauauauccca

SEQ ID NO: 178586 - RNA, 19 nt, Artificial Sequence
  Description of Artificial Sequence: Synthetic oligonucleotide
  Sense strand starting at position 46 of SEQ ID NO: 2302
cucucucauugggauauau

SEQ ID NO: 178587 - RNA, 19 nt, Artificial Sequence
  Description of Artificial Sequence: Synthetic oligonucleotide
  Antisense strand to SEQ ID NO: 178586
auauaucccaaugagagag

SEQ ID NO: 178588 - RNA, 19 nt, Artificial Sequence
  Description of Artificial Sequence: Synthetic oligonucleotide
  Sense strand starting at position 3963 of SEQ ID NO: 2303
gcgaauagauucuuggaga

SEQ ID NO: 178589 - RNA, 19 nt, Artificial Sequence
  Description of Artificial Sequence: Synthetic oligonucleotide
  Antisense strand to SEQ ID NO: 178588
ucuccaagaaucuauucgc

SEQ ID NO: 178590 - RNA, 19 nt, Artificial Sequence
  Description of Artificial Sequence: Synthetic oligonucleotide
  Sense strand starting at position 3953 of SEQ ID NO: 2303
cgcaauuaaagcgaauaga

SEQ ID NO: 178591 - RNA, 19 nt, Artificial Sequence
  Description of Artificial Sequence: Synthetic oligonucleotide
  Antisense strand to SEQ ID NO: 178590
ucuauucgcuuuaauugcg

SEQ ID NO: 178592 - RNA, 19 nt, Artificial Sequence
  Description of Artificial Sequence: Synthetic oligonucleotide
  Sense strand starting at position 3943 of SEQ ID NO: 2303
agguuaagugcgcaauuaa

SEQ ID NO: 178593 - RNA, 19 nt, Artificial Sequence
  Description of Artificial Sequence: Synthetic oligonucleotide
  Antisense strand to SEQ ID NO: 178592
uuaauugcgcacuuaaccu

SEQ ID NO: 178594 - RNA, 19 nt, Artificial Sequence
  Description of Artificial Sequence: Synthetic oligonucleotide
  Sense strand starting at position 3928 of SEQ ID NO: 2303
gaucuugaggccuaaaggu

SEQ ID NO: 178595 - RNA, 19 nt, Artificial Sequence
  Description of Artificial Sequence: Synthetic oligonucleotide
  Antisense strand to SEQ ID NO: 178594
accuuuaggccucaagauc

SEQ ID NO: 178596 - RNA, 19 nt, Artificial Sequence
  Description of Artificial Sequence: Synthetic oligonucleotide
  Sense strand starting at position 3613 of SEQ ID NO: 2303
accugaggucucugagcaa

SEQ ID NO: 178597 - RNA, 19 nt, Artificial Sequence
  Description of Artificial Sequence: Synthetic oligonucleotide
  Antisense strand to SEQ ID NO: 178596
uugcucagagaccucaggu

SEQ ID NO: 178598 - RNA, 19 nt, Artificial Sequence
  Description of Artificial Sequence: Synthetic oligonucleotide
  Sense strand starting at position 3554 of SEQ ID NO: 2303
ccaguccugcaggaauaua

SEQ ID NO: 178599 - RNA, 19 nt, Artificial Sequence
  Description of Artificial Sequence: Synthetic oligonucleotide
  Antisense strand to SEQ ID NO: 178598
uauauuccugcaggacugg

SEQ ID NO: 178600 - RNA, 19 nt, Artificial Sequence
  Description of Artificial Sequence: Synthetic oligonucleotide
  Sense strand starting at position 3553 of SEQ ID NO: 2303
accaguccugcaggaauau

SEQ ID NO: 178601 - RNA, 19 nt, Artificial Sequence
  Description of Artificial Sequence: Synthetic oligonucleotide
  Antisense strand to SEQ ID NO: 178600
auauuccugcaggacuggu

SEQ ID NO: 178602 - RNA, 19 nt, Artificial Sequence
  Description of Artificial Sequence: Synthetic oligonucleotide
  Sense strand starting at position 3395 of SEQ ID NO: 2303
aggagucucagacauugca

SEQ ID NO: 178603 - RNA, 19 nt, Artificial Sequence
  Description of Artificial Sequence: Synthetic oligonucleotide
  Antisense strand to SEQ ID NO: 178602
ugcaaugucugagacuccu

SEQ ID NO: 178604 - RNA, 19 nt, Artificial Sequence
  Description of Artificial Sequence: Synthetic oligonucleotide
  Sense strand starting at position 3258 of SEQ ID NO: 2303
ccagaaagucgacaagucu

SEQ ID NO: 178605 - RNA, 19 nt, Artificial Sequence
  Description of Artificial Sequence: Synthetic oligonucleotide
  Antisense strand to SEQ ID NO: 178604
agacuugucgacuuucugg

SEQ ID NO: 178606 - RNA, 19 nt, Artificial Sequence
  Description of Artificial Sequence: Synthetic oligonucleotide
  Sense strand starting at position 3249 of SEQ ID NO: 2303
uaaugucguccagaaaguc

SEQ ID NO: 178607 - RNA, 19 nt, Artificial Sequence
  Description of Artificial Sequence: Synthetic oligonucleotide
  Antisense strand to SEQ ID NO: 178606
gacuuucuggacgacauua

SEQ ID NO: 178608 - RNA, 19 nt, Artificial Sequence
  Description of Artificial Sequence: Synthetic oligonucleotide
  Sense strand starting at position 3247 of SEQ ID NO: 2303
ucuaaugucguccagaaag

SEQ ID NO: 178609 - RNA, 19 nt, Artificial Sequence
  Description of Artificial Sequence: Synthetic oligonucleotide
  Antisense strand to SEQ ID NO: 178608
cuuucuggacgacauuaga

SEQ ID NO: 178610 - RNA, 19 nt, Artificial Sequence
  Description of Artificial Sequence: Synthetic oligonucleotide
  Sense strand starting at position 3236 of SEQ ID NO: 2303
acauuaaagucucuaaugu

SEQ ID NO: 178611 - RNA, 19 nt, Artificial Sequence
  Description of Artificial Sequence: Synthetic oligonucleotide
  Antisense strand to SEQ ID NO: 178610
acauuagagacuuuaaugu

SEQ ID NO: 178612 - RNA, 19 nt, Artificial Sequence
  Description of Artificial Sequence: Synthetic oligonucleotide
  Sense strand starting at position 3100 of SEQ ID NO: 2303
agauacucaucagaggaau

SEQ ID NO: 178613 - RNA, 19 nt, Artificial Sequence
  Description of Artificial Sequence: Synthetic oligonucleotide
  Antisense strand to SEQ ID NO: 178612
auuccucugaugaguaucu

SEQ ID NO: 178614 - RNA, 19 nt, Artificial Sequence
  Description of Artificial Sequence: Synthetic oligonucleotide
  Sense strand starting at position 3072 of SEQ ID NO: 2303
gccagucuuggagaugaca

SEQ ID NO: 178615 - RNA, 19 nt, Artificial Sequence
  Description of Artificial Sequence: Synthetic oligonucleotide
  Antisense strand to SEQ ID NO: 178614
ugucaucuccaagacuggc

SEQ ID NO: 178616 - RNA, 19 nt, Artificial Sequence
  Description of Artificial Sequence: Synthetic oligonucleotide
  Sense strand starting at position 3014 of SEQ ID NO: 2303
ggccuaguucaaugaggau

SEQ ID NO: 178617 - RNA, 19 nt, Artificial Sequence
  Description of Artificial Sequence: Synthetic oligonucleotide
  Antisense strand to SEQ ID NO: 178616
auccucauugaacuaggcc

SEQ ID NO: 178618 - RNA, 19 nt, Artificial Sequence
  Description of Artificial Sequence: Synthetic oligonucleotide
  Sense strand starting at position 3004 of SEQ ID NO: 2303
auaaauaucuggccuaguu

SEQ ID NO: 178619 - RNA, 19 nt, Artificial Sequence
  Description of Artificial Sequence: Synthetic oligonucleotide
  Antisense strand to SEQ ID NO: 178618
aacuaggccagauauuuau

SEQ ID NO: 178620 - RNA, 19 nt, Artificial Sequence
  Description of Artificial Sequence: Synthetic oligonucleotide
  Sense strand starting at position 2955 of SEQ ID NO: 2303
guguaacuauagguuuaca

SEQ ID NO: 178621 - RNA, 19 nt, Artificial Sequence
  Description of Artificial Sequence: Synthetic oligonucleotide
  Antisense strand to SEQ ID NO: 178620
uguaaaccuauaguuacac

SEQ ID NO: 178622 - RNA, 19 nt, Artificial Sequence
  Description of Artificial Sequence: Synthetic oligonucleotide
  Sense strand starting at position 2934 of SEQ ID NO: 2303
ggaagaugccugcauaggu

SEQ ID NO: 178623 - RNA, 19 nt, Artificial Sequence
  Description of Artificial Sequence: Synthetic oligonucleotide
  Antisense strand to SEQ ID NO: 178622
accuaugcaggcaucuucc

SEQ ID NO: 178624 - RNA, 19 nt, Artificial Sequence
  Description of Artificial Sequence: Synthetic oligonucleotide
  Sense strand starting at position 2931 of SEQ ID NO: 2303
acgggaagaugccugcaua

SEQ ID NO: 178625 - RNA, 19 nt, Artificial Sequence
  Description of Artificial Sequence: Synthetic oligonucleotide
  Antisense strand to SEQ ID NO: 178624
uaugcaggcaucuucccgu

SEQ ID NO: 178626 - RNA, 19 nt, Artificial Sequence
  Description of Artificial Sequence: Synthetic oligonucleotide
  Sense strand starting at position 2716 of SEQ ID NO: 2303
cucauuaggugaucucuca

SEQ ID NO: 178627 - RNA, 19 nt, Artificial Sequence
  Description of Artificial Sequence: Synthetic oligonucleotide
  Antisense strand to SEQ ID NO: 178626
ugagagaucaccuaaugag

SEQ ID NO: 178628 - RNA, 19 nt, Artificial Sequence
  Description of Artificial Sequence: Synthetic oligonucleotide
  Sense strand starting at position 2709 of SEQ ID NO: 2303
aauuguucucauuagguga

SEQ ID NO: 178629 - RNA, 19 nt, Artificial Sequence
  Description of Artificial Sequence: Synthetic oligonucleotide
  Antisense strand to SEQ ID NO: 178628
ucaccuaaugagaacaauu

SEQ ID NO: 178630 - RNA, 19 nt, Artificial Sequence
  Description of Artificial Sequence: Synthetic oligonucleotide
  Sense strand starting at position 2694 of SEQ ID NO: 2303
cgcugugauagcguaaauu

SEQ ID NO: 178631 - RNA, 19 nt, Artificial Sequence
  Description of Artificial Sequence: Synthetic oligonucleotide
  Antisense strand to SEQ ID NO: 178630
aauuuacgcuaucacagcg

SEQ ID NO: 178632 - RNA, 19 nt, Artificial Sequence
  Description of Artificial Sequence: Synthetic oligonucleotide
  Sense strand starting at position 2692 of SEQ ID NO: 2303
aucgcugugauagcguaaa

SEQ ID NO: 178633 - RNA, 19 nt, Artificial Sequence
  Description of Artificial Sequence: Synthetic oligonucleotide
  Antisense strand to SEQ ID NO: 178632
uuuacgcuaucacagcgau

SEQ ID NO: 178634 - RNA, 19 nt, Artificial Sequence
  Description of Artificial Sequence: Synthetic oligonucleotide
  Sense strand starting at position 2246 of SEQ ID NO: 2303
ucuggagaauugcuaaauu

SEQ ID NO: 178635 - RNA, 19 nt, Artificial Sequence
  Description of Artificial Sequence: Synthetic oligonucleotide
  Antisense strand to SEQ ID NO: 178634
aauuuagcaauucuccaga

SEQ ID NO: 178636 - RNA, 19 nt, Artificial Sequence
  Description of Artificial Sequence: Synthetic oligonucleotide
  Sense strand starting at position 2207 of SEQ ID NO: 2303
uggaaucccuccucauaug

SEQ ID NO: 178637 - RNA, 19 nt, Artificial Sequence
  Description of Artificial Sequence: Synthetic oligonucleotide
  Antisense strand to SEQ ID NO: 178636
cauaugaggagggauucca

SEQ ID NO: 178638 - RNA, 19 nt, Artificial Sequence
  Description of Artificial Sequence: Synthetic oligonucleotide
  Sense strand starting at position 1176 of SEQ ID NO: 2303
guacaauuguuaccaagaa

SEQ ID NO: 178639 - RNA, 19 nt, Artificial Sequence
  Description of Artificial Sequence: Synthetic oligonucleotide
  Antisense strand to SEQ ID NO: 178638
uucuugguaacaauuguac

SEQ ID NO: 178640 - RNA, 19 nt, Artificial Sequence
  Description of Artificial Sequence: Synthetic oligonucleotide
  Sense strand starting at position 1173 of SEQ ID NO: 2303
gacguacaauuguuaccaa

SEQ ID NO: 178641 - RNA, 19 nt, Artificial Sequence
  Description of Artificial Sequence: Synthetic oligonucleotide
  Antisense strand to SEQ ID NO: 178640
uugguaacaauuguacguc

SEQ ID NO: 178642 - RNA, 19 nt, Artificial Sequence
  Description of Artificial Sequence: Synthetic oligonucleotide
  Sense strand starting at position 1167 of SEQ ID NO: 2303
gauauagacguacaauugu

SEQ ID NO: 178643 - RNA, 19 nt, Artificial Sequence
  Description of Artificial Sequence: Synthetic oligonucleotide
  Antisense strand to SEQ ID NO: 178642
acaauuguacgucuauauc

SEQ ID NO: 178644 - RNA, 19 nt, Artificial Sequence
  Description of Artificial Sequence: Synthetic oligonucleotide
  Sense strand starting at position 1165 of SEQ ID NO: 2303
acgauauagacguacaauu

SEQ ID NO: 178645 - RNA, 19 nt, Artificial Sequence
  Description of Artificial Sequence: Synthetic oligonucleotide
  Antisense strand to SEQ ID NO: 178644
aauuguacgucuauaucgu

SEQ ID NO: 178646 - RNA, 19 nt, Artificial Sequence
  Description of Artificial Sequence: Synthetic oligonucleotide
  Sense strand starting at position 1163 of SEQ ID NO: 2303
uuacgauauagacguacaa

SEQ ID NO: 178647 - RNA, 19 nt, Artificial Sequence
  Description of Artificial Sequence: Synthetic oligonucleotide
  Antisense strand to SEQ ID NO: 178646
uuguacgucuauaucguaa

SEQ ID NO: 178648 - RNA, 19 nt, Artificial Sequence
  Description of Artificial Sequence: Synthetic oligonucleotide
  Sense strand starting at position 1157 of SEQ ID NO: 2303
gcaaguuuacgauauagac

SEQ ID NO: 178649 - RNA, 19 nt, Artificial Sequence
  Description of Artificial Sequence: Synthetic oligonucleotide
  Antisense strand to SEQ ID NO: 178648
gucuauaucguaaacuugc

SEQ ID NO: 178650 - RNA, 19 nt, Artificial Sequence
  Description of Artificial Sequence: Synthetic oligonucleotide
  Sense strand starting at position 1080 of SEQ ID NO: 2303
gguugcuuugcugacaaca

SEQ ID NO: 178651 - RNA, 19 nt, Artificial Sequence
  Description of Artificial Sequence: Synthetic oligonucleotide
  Antisense strand to SEQ ID NO: 178650
uguugucagcaaagcaacc

SEQ ID NO: 178652 - RNA, 19 nt, Artificial Sequence
  Description of Artificial Sequence: Synthetic oligonucleotide
  Sense strand starting at position 932 of SEQ ID NO: 2303
cauugaggauguucgaauc

SEQ ID NO: 178653 - RNA, 19 nt, Artificial Sequence
  Description of Artificial Sequence: Synthetic oligonucleotide
  Antisense strand to SEQ ID NO: 178652
gauucgaacauccucaaug

SEQ ID NO: 178654 - RNA, 19 nt, Artificial Sequence
  Description of Artificial Sequence: Synthetic oligonucleotide
  Sense strand starting at position 704 of SEQ ID NO: 2303
uuaaaucugucaguaaaga

SEQ ID NO: 178655 - RNA, 19 nt, Artificial Sequence
  Description of Artificial Sequence: Synthetic oligonucleotide
  Antisense strand to SEQ ID NO: 178654
ucuuuacugacagauuuaa

SEQ ID NO: 178656 - RNA, 19 nt, Artificial Sequence
  Description of Artificial Sequence: Synthetic oligonucleotide
  Sense strand starting at position 700 of SEQ ID NO: 2303
uugguuaaaucugucagua

SEQ ID NO: 178657 - RNA, 19 nt, Artificial Sequence
  Description of Artificial Sequence: Synthetic oligonucleotide
  Antisense strand to SEQ ID NO: 178656
uacugacagauuuaaccaa

SEQ ID NO: 178658 - RNA, 19 nt, Artificial Sequence
  Description of Artificial Sequence: Synthetic oligonucleotide
  Sense strand starting at position 692 of SEQ ID NO: 2303
acaguccuuugguuaaauc

SEQ ID NO: 178659 - RNA, 19 nt, Artificial Sequence
  Description of Artificial Sequence: Synthetic oligonucleotide
  Antisense strand to SEQ ID NO: 178658
gauuuaaccaaaggacugu

SEQ ID NO: 178660 - RNA, 19 nt, Artificial Sequence
  Description of Artificial Sequence: Synthetic oligonucleotide
  Sense strand starting at position 691 of SEQ ID NO: 2303
gacaguccuuugguuaaau

SEQ ID NO: 178661 - RNA, 19 nt, Artificial Sequence
  Description of Artificial Sequence: Synthetic oligonucleotide
  Antisense strand to SEQ ID NO: 178660
auuuaaccaaaggacuguc

SEQ ID NO: 178662 - RNA, 19 nt, Artificial Sequence
  Description of Artificial Sequence: Synthetic oligonucleotide
  Sense strand starting at position 689 of SEQ ID NO: 2303
cugacaguccuuugguuaa

SEQ ID NO: 178663 - RNA, 19 nt, Artificial Sequence
  Description of Artificial Sequence: Synthetic oligonucleotide
  Antisense strand to SEQ ID NO: 178662
uuaaccaaaggacugucag

SEQ ID NO: 178664 - RNA, 19 nt, Artificial Sequence
  Description of Artificial Sequence: Synthetic oligonucleotide
  Sense strand starting at position 687 of SEQ ID NO: 2303
gacugacaguccuuugguu

SEQ ID NO: 178665 - RNA, 19 nt, Artificial Sequence
  Description of Artificial Sequence: Synthetic oligonucleotide
  Antisense strand to SEQ ID NO: 178664
aaccaaaggacugucaguc

SEQ ID NO: 178666 - RNA, 19 nt, Artificial Sequence
  Description of Artificial Sequence: Synthetic oligonucleotide
  Sense strand starting at position 510 of SEQ ID NO: 2303
gcuagaaauuaccuaguac

SEQ ID NO: 178667 - RNA, 19 nt, Artificial Sequence
  Description of Artificial Sequence: Synthetic oligonucleotide
  Antisense strand to SEQ ID NO: 178666
guacuagguaauuucuagc

SEQ ID NO: 178668 - RNA, 19 nt, Artificial Sequence
  Description of Artificial Sequence: Synthetic oligonucleotide
  Sense strand starting at position 3 of SEQ ID NO: 2304
ugaguaggaguuugucagu

SEQ ID NO: 178669 - RNA, 19 nt, Artificial Sequence
  Description of Artificial Sequence: Synthetic oligonucleotide
  Antisense strand to SEQ ID NO: 178668
acugacaaacuccuacuca

SEQ ID NO: 178670 - RNA, 19 nt, Artificial Sequence
  Description of Artificial Sequence: Synthetic oligonucleotide
  Sense strand starting at position 8 of SEQ ID NO: 2304
aggaguuugucagugaaga

SEQ ID NO: 178671 - RNA, 19 nt, Artificial Sequence
  Description of Artificial Sequence: Synthetic oligonucleotide
  Antisense strand to SEQ ID NO: 178670
ucuucacugacaaacuccu

SEQ ID NO: 178672 - RNA, 19 nt, Artificial Sequence
  Description of Artificial Sequence: Synthetic oligonucleotide
  Sense strand starting at position 9 of SEQ ID NO: 2304
ggaguuugucagugaagac

SEQ ID NO: 178673 - RNA, 19 nt, Artificial Sequence
  Description of Artificial Sequence: Synthetic oligonucleotide
  Antisense strand to SEQ ID NO: 178672
gucuucacugacaaacucc

SEQ ID NO: 178674 - RNA, 19 nt, Artificial Sequence
  Description of Artificial Sequence: Synthetic oligonucleotide
  Sense strand starting at position 10 of SEQ ID NO: 2304
gaguuugucagugaagaca

SEQ ID NO: 178675 - RNA, 19 nt, Artificial Sequence
  Description of Artificial Sequence: Synthetic oligonucleotide
  Antisense strand to SEQ ID NO: 178674
ugucuucacugacaaacuc

SEQ ID NO: 178676 - RNA, 19 nt, Artificial Sequence
  Description of Artificial Sequence: Synthetic oligonucleotide
  Sense strand starting at position 49 of SEQ ID NO: 2304
auuagaguucuaugccaac

SEQ ID NO: 178677 - RNA, 19 nt, Artificial Sequence
  Description of Artificial Sequence: Synthetic oligonucleotide
  Antisense strand to SEQ ID NO: 178676
guuggcauagaacucuaau

SEQ ID NO: 178678 - RNA, 19 nt, Artificial Sequence
  Description of Artificial Sequence: Synthetic oligonucleotide
  Sense strand starting at position 207 of SEQ ID NO: 2304
ugggccuuauucuccaaau

SEQ ID NO: 178679 - RNA, 19 nt, Artificial Sequence
  Description of Artificial Sequence: Synthetic oligonucleotide
  Antisense strand to SEQ ID NO: 178678
auuuggagaauaaggccca

SEQ ID NO: 178680 - RNA, 19 nt, Artificial Sequence
  Description of Artificial Sequence: Synthetic oligonucleotide
  Sense strand starting at position 208 of SEQ ID NO: 2304
gggccuuauucuccaaauc

SEQ ID NO: 178681 - RNA, 19 nt, Artificial Sequence
  Description of Artificial Sequence: Synthetic oligonucleotide
  Antisense strand to SEQ ID NO: 178680
gauuuggagaauaaggccc

SEQ ID NO: 178682 - RNA, 19 nt, Artificial Sequence
  Description of Artificial Sequence: Synthetic oligonucleotide
  Sense strand starting at position 1053 of SEQ ID NO: 2304
ggcagaagagcuugaccuu

SEQ ID NO: 178683 - RNA, 19 nt, Artificial Sequence
  Description of Artificial Sequence: Synthetic oligonucleotide
  Antisense strand to SEQ ID NO: 178682
aaggucaagcucuucugcc

SEQ ID NO: 178684 - RNA, 19 nt, Artificial Sequence
  Description of Artificial Sequence: Synthetic oligonucleotide
  Sense strand starting at position 1836 of SEQ ID NO: 2304
ggcugugaccggcagagaa

SEQ ID NO: 178685 - RNA, 19 nt, Artificial Sequence
  Description of Artificial Sequence: Synthetic oligonucleotide
  Antisense strand to SEQ ID NO: 178684
uucucugccggucacagcc

SEQ ID NO: 178686 - RNA, 19 nt, Artificial Sequence
  Description of Artificial Sequence: Synthetic oligonucleotide
  Sense strand starting at position 2256 of SEQ ID NO: 2304
gaucaucgauuugaagaug

SEQ ID NO: 178687 - RNA, 19 nt, Artificial Sequence
  Description of Artificial Sequence: Synthetic oligonucleotide
  Antisense strand to SEQ ID NO: 178686
caucuucaaaucgaugauc

SEQ ID NO: 178688 - RNA, 19 nt, Artificial Sequence
  Description of Artificial Sequence: Synthetic oligonucleotide
  Sense strand starting at position 2459 of SEQ ID NO: 2304
uuuggaaagcccuggcuaa

SEQ ID NO: 178689 - RNA, 19 nt, Artificial Sequence
  Description of Artificial Sequence: Synthetic oligonucleotide
  Antisense strand to SEQ ID NO: 178688
uuagccagggcuuuccaaa

SEQ ID NO: 178690 - RNA, 19 nt, Artificial Sequence
  Description of Artificial Sequence: Synthetic oligonucleotide
  Sense strand starting at position 2510 of SEQ ID NO: 2304
acaauucuggagugcugua

SEQ ID NO: 178691 - RNA, 19 nt, Artificial Sequence
  Description of Artificial Sequence: Synthetic oligonucleotide
  Antisense strand to SEQ ID NO: 178690
uacagcacuccagaauugu

SEQ ID NO: 178692 - RNA, 19 nt, Artificial Sequence
  Description of Artificial Sequence: Synthetic oligonucleotide
  Sense strand starting at position 2515 of SEQ ID NO: 2304
ucuggagugcuguauuugu

SEQ ID NO: 178693 - RNA, 19 nt, Artificial Sequence
  Description of Artificial Sequence: Synthetic oligonucleotide
  Antisense strand to SEQ ID NO: 178692
acaaauacagcacuccaga

SEQ ID NO: 178694 - RNA, 19 nt, Artificial Sequence
  Description of Artificial Sequence: Synthetic oligonucleotide
  Sense strand starting at position 2519 of SEQ ID NO: 2304
gagugcuguauuugugugu

SEQ ID NO: 178695 - RNA, 19 nt, Artificial Sequence
  Description of Artificial Sequence: Synthetic oligonucleotide
  Antisense strand to SEQ ID NO: 178694
acacacaaauacagcacuc

SEQ ID NO: 178696 - RNA, 19 nt, Artificial Sequence
  Description of Artificial Sequence: Synthetic oligonucleotide
  Sense strand starting at position 2609 of SEQ ID NO: 2304
aggagaacuugucuugugu

SEQ ID NO: 178697 - RNA, 19 nt, Artificial Sequence
  Description of Artificial Sequence: Synthetic oligonucleotide
  Antisense strand to SEQ ID NO: 178696
acacaagacaaguucuccu

SEQ ID NO: 178698 - RNA, 19 nt, Artificial Sequence
  Description of Artificial Sequence: Synthetic oligonucleotide
  Sense strand starting at position 2680 of SEQ ID NO: 2304
aaagcauagaggcgugaaa

SEQ ID NO: 178699 - RNA, 19 nt, Artificial Sequence
  Description of Artificial Sequence: Synthetic oligonucleotide
  Antisense strand to SEQ ID NO: 178698
uuucacgccucuaugcuuu

SEQ ID NO: 178700 - RNA, 19 nt, Artificial Sequence
  Description of Artificial Sequence: Synthetic oligonucleotide
  Sense strand starting at position 2723 of SEQ ID NO: 2304
cuaguaauucuguacuguu

SEQ ID NO: 178701 - RNA, 19 nt, Artificial Sequence
  Description of Artificial Sequence: Synthetic oligonucleotide
  Antisense strand to SEQ ID NO: 178700
aacaguacagaauuacuag

SEQ ID NO: 178702 - RNA, 19 nt, Artificial Sequence
  Description of Artificial Sequence: Synthetic oligonucleotide
  Sense strand starting at position 2779 of SEQ ID NO: 2304
ggcauugugggucauggua

SEQ ID NO: 178703 - RNA, 19 nt, Artificial Sequence
  Description of Artificial Sequence: Synthetic oligonucleotide
  Antisense strand to SEQ ID NO: 178702
uaccaugacccacaaugcc

SEQ ID NO: 178704 - RNA, 19 nt, Artificial Sequence
  Description of Artificial Sequence: Synthetic oligonucleotide
  Sense strand starting at position 2956 of SEQ ID NO: 2304
aaagguguguagcugaaua

SEQ ID NO: 178705 - RNA, 19 nt, Artificial Sequence
  Description of Artificial Sequence: Synthetic oligonucleotide
  Antisense strand to SEQ ID NO: 178704
uauucagcuacacaccuuu

SEQ ID NO: 178706 - RNA, 19 nt, Artificial Sequence
  Description of Artificial Sequence: Synthetic oligonucleotide
  Sense strand starting at position 2958 of SEQ ID NO: 2304
agguguguagcugaauaac

SEQ ID NO: 178707 - RNA, 19 nt, Artificial Sequence
  Description of Artificial Sequence: Synthetic oligonucleotide
  Antisense strand to SEQ ID NO: 178706
guuauucagcuacacaccu

SEQ ID NO: 178708 - RNA, 19 nt, Artificial Sequence
  Description of Artificial Sequence: Synthetic oligonucleotide
  Sense strand starting at position 2967 of SEQ ID NO: 2304
gcugaauaaccgcaucaac

SEQ ID NO: 178709 - RNA, 19 nt, Artificial Sequence
  Description of Artificial Sequence: Synthetic oligonucleotide
  Antisense strand to SEQ ID NO: 178708
guugaugcgguuauucagc

SEQ ID NO: 178710 - RNA, 19 nt, Artificial Sequence
  Description of Artificial Sequence: Synthetic oligonucleotide
  Sense strand starting at position 3216 of SEQ ID NO: 2304
gguguuaaacuuuauugag

SEQ ID NO: 178711 - RNA, 19 nt, Artificial Sequence
  Description of Artificial Sequence: Synthetic oligonucleotide
  Antisense strand to SEQ ID NO: 178710
cucaauaaaguuuaacacc

SEQ ID NO: 178712 - RNA, 19 nt, Artificial Sequence
  Description of Artificial Sequence: Synthetic oligonucleotide
  Sense strand starting at position 3218 of SEQ ID NO: 2304
uguuaaacuuuauugaggu

SEQ ID NO: 178713 - RNA, 19 nt, Artificial Sequence
  Description of Artificial Sequence: Synthetic oligonucleotide
  Antisense strand to SEQ ID NO: 178712
accucaauaaaguuuaaca

SEQ ID NO: 178714 - RNA, 19 nt, Artificial Sequence
  Description of Artificial Sequence: Synthetic oligonucleotide
  Sense strand starting at position 3253 of SEQ ID NO: 2304
cucucaguuuaguucucua

SEQ ID NO: 178715 - RNA, 19 nt, Artificial Sequence
  Description of Artificial Sequence: Synthetic oligonucleotide
  Antisense strand to SEQ ID NO: 178714
uagagaacuaaacugagag

SEQ ID NO: 178716 - RNA, 19 nt, Artificial Sequence
  Description of Artificial Sequence: Synthetic oligonucleotide
  Sense strand starting at position 3258 of SEQ ID NO: 2304
aguuuaguucucuaugguu

SEQ ID NO: 178717 - RNA, 19 nt, Artificial Sequence
  Description of Artificial Sequence: Synthetic oligonucleotide
  Antisense strand to SEQ ID NO: 178716
aaccauagagaacuaaacu

SEQ ID NO: 178718 - RNA, 19 nt, Artificial Sequence
  Description of Artificial Sequence: Synthetic oligonucleotide
  Sense strand starting at position 3260 of SEQ ID NO: 2304
uuuaguucucuaugguuaa

SEQ ID NO: 178719 - RNA, 19 nt, Artificial Sequence
  Description of Artificial Sequence: Synthetic oligonucleotide
  Antisense strand to SEQ ID NO: 178718
uuaaccauagagaacuaaa

SEQ ID NO: 178720 - RNA, 19 nt, Artificial Sequence
  Description of Artificial Sequence: Synthetic oligonucleotide
  Sense strand starting at position 3264 of SEQ ID NO: 2304
guucucuaugguuaacacu

SEQ ID NO: 178721 - RNA, 19 nt, Artificial Sequence
  Description of Artificial Sequence: Synthetic oligonucleotide
  Antisense strand to SEQ ID NO: 178720
aguguuaaccauagagaac

SEQ ID NO: 178722 - RNA, 19 nt, Artificial Sequence
  Description of Artificial Sequence: Synthetic oligonucleotide
  Sense strand starting at position 3304 of SEQ ID NO: 2304
ggcccagaaucuccaucau

SEQ ID NO: 178723 - RNA, 19 nt, Artificial Sequence
  Description of Artificial Sequence: Synthetic oligonucleotide
  Antisense strand to SEQ ID NO: 178722
augauggagauucugggcc

SEQ ID NO: 178724 - RNA, 19 nt, Artificial Sequence
  Description of Artificial Sequence: Synthetic oligonucleotide
  Sense strand starting at position 3459 of SEQ ID NO: 2304
gagucuuguuugguccaag

SEQ ID NO: 178725 - RNA, 19 nt, Artificial Sequence
  Description of Artificial Sequence: Synthetic oligonucleotide
  Antisense strand to SEQ ID NO: 178724
cuuggaccaaacaagacuc

SEQ ID NO: 178726 - RNA, 19 nt, Artificial Sequence
  Description of Artificial Sequence: Synthetic oligonucleotide
  Sense strand starting at position 3477 of SEQ ID NO: 2304
guccauuaugguggucuca

SEQ ID NO: 178727 - RNA, 19 nt, Artificial Sequence
  Description of Artificial Sequence: Synthetic oligonucleotide
  Antisense strand to SEQ ID NO: 178726
ugagaccaccauaauggac

SEQ ID NO: 178728 - RNA, 19 nt, Artificial Sequence
  Description of Artificial Sequence: Synthetic oligonucleotide
  Sense strand starting at position 3479 of SEQ ID NO: 2304
ccauuaugguggucucaug

SEQ ID NO: 178729 - RNA, 19 nt, Artificial Sequence
  Description of Artificial Sequence: Synthetic oligonucleotide
  Antisense strand to SEQ ID NO: 178728
caugagaccaccauaaugg

SEQ ID NO: 178730 - RNA, 19 nt, Artificial Sequence
  Description of Artificial Sequence: Synthetic oligonucleotide
  Sense strand starting at position 3522 of SEQ ID NO: 2304
ccauuaugguggucucauu

SEQ ID NO: 178731 - RNA, 19 nt, Artificial Sequence
  Description of Artificial Sequence: Synthetic oligonucleotide
  Antisense strand to SEQ ID NO: 178730
aaugagaccaccauaaugg

SEQ ID NO: 178732 - RNA, 19 nt, Artificial Sequence
  Description of Artificial Sequence: Synthetic oligonucleotide
  Sense strand starting at position 3536 of SEQ ID NO: 2304
ucauuccucuugccaguga

SEQ ID NO: 178733 - RNA, 19 nt, Artificial Sequence
  Description of Artificial Sequence: Synthetic oligonucleotide
  Antisense strand to SEQ ID NO: 178732
ucacuggcaagaggaauga

SEQ ID NO: 178734 - RNA, 19 nt, Artificial Sequence
  Description of Artificial Sequence: Synthetic oligonucleotide
  Sense strand starting at position 3616 of SEQ ID NO: 2304
aggaaauggucucuuuacu

SEQ ID NO: 178735 - RNA, 19 nt, Artificial Sequence
  Description of Artificial Sequence: Synthetic oligonucleotide
  Antisense strand to SEQ ID NO: 178734
aguaaagagaccauuuccu

SEQ ID NO: 178736 - RNA, 19 nt, Artificial Sequence
  Description of Artificial Sequence: Synthetic oligonucleotide
  Sense strand starting at position 3622 of SEQ ID NO: 2304
uggucucuuuacuuugcaa

SEQ ID NO: 178737 - RNA, 19 nt, Artificial Sequence
  Description of Artificial Sequence: Synthetic oligonucleotide
  Antisense strand to SEQ ID NO: 178736
uugcaaaguaaagagacca

SEQ ID NO: 178738 - RNA, 19 nt, Artificial Sequence
  Description of Artificial Sequence: Synthetic oligonucleotide
  Sense strand starting at position 3661 of SEQ ID NO: 2304
gggauauguuugguggcaa

SEQ ID NO: 178739 - RNA, 19 nt, Artificial Sequence
  Description of Artificial Sequence: Synthetic oligonucleotide
  Antisense strand to SEQ ID NO: 178738
uugccaccaaacauauccc

SEQ ID NO: 178740 - RNA, 19 nt, Artificial Sequence
  Description of Artificial Sequence: Synthetic oligonucleotide
  Sense strand starting at position 3672 of SEQ ID NO: 2304
gguggcaaugcuuggaauu

SEQ ID NO: 178741 - RNA, 19 nt, Artificial Sequence
  Description of Artificial Sequence: Synthetic oligonucleotide
  Antisense strand to SEQ ID NO: 178740
aauuccaagcauugccacc

SEQ ID NO: 178742 - RNA, 19 nt, Artificial Sequence
  Description of Artificial Sequence: Synthetic oligonucleotide
  Sense strand starting at position 3804 of SEQ ID NO: 2304
ggauaugugagauggucca

SEQ ID NO: 178743 - RNA, 19 nt, Artificial Sequence
  Description of Artificial Sequence: Synthetic oligonucleotide
  Antisense strand to SEQ ID NO: 178742
uggaccaucucacauaucc

SEQ ID NO: 178744 - RNA, 19 nt, Artificial Sequence
  Description of Artificial Sequence: Synthetic oligonucleotide
  Sense strand starting at position 3816 of SEQ ID NO: 2304
ugguccaucuuauugcaua

SEQ ID NO: 178745 - RNA, 19 nt, Artificial Sequence
  Description of Artificial Sequence: Synthetic oligonucleotide
  Antisense strand to SEQ ID NO: 178744
uaugcaauaagauggacca

SEQ ID NO: 178746 - RNA, 19 nt, Artificial Sequence
  Description of Artificial Sequence: Synthetic oligonucleotide
  Sense strand starting at position 3982 of SEQ ID NO: 2304
aggcuugaugauggaugaa

SEQ ID NO: 178747 - RNA, 19 nt, Artificial Sequence
  Description of Artificial Sequence: Synthetic oligonucleotide
  Antisense strand to SEQ ID NO: 178746
uucauccaucaucaagccu

SEQ ID NO: 178748 - RNA, 19 nt, Artificial Sequence
  Description of Artificial Sequence: Synthetic oligonucleotide
  Sense strand starting at position 20 of SEQ ID NO: 2305
acauucugccuaugaauga

SEQ ID NO: 178749 - RNA, 19 nt, Artificial Sequence
  Description of Artificial Sequence: Synthetic oligonucleotide
  Antisense strand to SEQ ID NO: 178748
ucauucauaggcagaaugu

SEQ ID NO: 178750 - RNA, 19 nt, Artificial Sequence
  Description of Artificial Sequence: Synthetic oligonucleotide
  Sense strand starting at position 69 of SEQ ID NO: 2305
gcuagauugacugggucaa

SEQ ID NO: 178751 - RNA, 19 nt, Artificial Sequence
  Description of Artificial Sequence: Synthetic oligonucleotide
  Antisense strand to SEQ ID NO: 178750
uugacccagucaaucuagc

SEQ ID NO: 178752 - RNA, 19 nt, Artificial Sequence
  Description of Artificial Sequence: Synthetic oligonucleotide
  Sense strand starting at position 70 of SEQ ID NO: 2305
cuagauugacugggucaac

SEQ ID NO: 178753 - RNA, 19 nt, Artificial Sequence
  Description of Artificial Sequence: Synthetic oligonucleotide
  Antisense strand to SEQ ID NO: 178752
guugacccagucaaucuag

SEQ ID NO: 178754 - RNA, 19 nt, Artificial Sequence
  Description of Artificial Sequence: Synthetic oligonucleotide
  Sense strand starting at position 71 of SEQ ID NO: 2305
uagauugacugggucaacu

SEQ ID NO: 178755 - RNA, 19 nt, Artificial Sequence
  Description of Artificial Sequence: Synthetic oligonucleotide
  Antisense strand to SEQ ID NO: 178754
aguugacccagucaaucua

SEQ ID NO: 178756 - RNA, 19 nt, Artificial Sequence
  Description of Artificial Sequence: Synthetic oligonucleotide
  Sense strand starting at position 112 of SEQ ID NO: 2305
ugggaaaccuuagcuaauu

SEQ ID NO: 178757 - RNA, 19 nt, Artificial Sequence
  Description of Artificial Sequence: Synthetic oligonucleotide
  Antisense strand to SEQ ID NO: 178756
aauuagcuaagguuuccca

SEQ ID NO: 178758 - RNA, 19 nt, Artificial Sequence
  Description of Artificial Sequence: Synthetic oligonucleotide
  Sense strand starting at position 200 of SEQ ID NO: 2305
gaguuauugggagguacuu

SEQ ID NO: 178759 - RNA, 19 nt, Artificial Sequence
  Description of Artificial Sequence: Synthetic oligonucleotide
  Antisense strand to SEQ ID NO: 178758
aaguaccucccaauaacuc

SEQ ID NO: 178760 - RNA, 19 nt, Artificial Sequence
  Description of Artificial Sequence: Synthetic oligonucleotide
  Sense strand starting at position 274 of SEQ ID NO: 2305
uguugcuauccuuauagac

SEQ ID NO: 178761 - RNA, 19 nt, Artificial Sequence
  Description of Artificial Sequence: Synthetic oligonucleotide
  Antisense strand to SEQ ID NO: 178760
gucuauaaggauagcaaca

SEQ ID NO: 178762 - RNA, 19 nt, Artificial Sequence
  Description of Artificial Sequence: Synthetic oligonucleotide
  Sense strand starting at position 439 of SEQ ID NO: 2305
uucccauccgcugagcaau

SEQ ID NO: 178763 - RNA, 19 nt, Artificial Sequence
  Description of Artificial Sequence: Synthetic oligonucleotide
  Antisense strand to SEQ ID NO: 178762
auugcucagcggaugggaa

SEQ ID NO: 178764 - RNA, 19 nt, Artificial Sequence
  Description of Artificial Sequence: Synthetic oligonucleotide
  Sense strand starting at position 449 of SEQ ID NO: 2305
cugagcaauccugagagcu

SEQ ID NO: 178765 - RNA, 19 nt, Artificial Sequence
  Description of Artificial Sequence: Synthetic oligonucleotide
  Antisense strand to SEQ ID NO: 178764
agcucucaggauugcucag

SEQ ID NO: 178766 - RNA, 19 nt, Artificial Sequence
  Description of Artificial Sequence: Synthetic oligonucleotide
  Sense strand starting at position 648 of SEQ ID NO: 2305
uuuguagaugucgaugaug

SEQ ID NO: 178767 - RNA, 19 nt, Artificial Sequence
  Description of Artificial Sequence: Synthetic oligonucleotide
  Antisense strand to SEQ ID NO: 178766
caucaucgacaucuacaaa

SEQ ID NO: 178768 - RNA, 19 nt, Artificial Sequence
  Description of Artificial Sequence: Synthetic oligonucleotide
  Sense strand starting at position 1007 of SEQ ID NO: 2305
gcaggagaccuggguucaa

SEQ ID NO: 178769 - RNA, 19 nt, Artificial Sequence
  Description of Artificial Sequence: Synthetic oligonucleotide
  Antisense strand to SEQ ID NO: 178768
uugaacccaggucuccugc

SEQ ID NO: 178770 - RNA, 19 nt, Artificial Sequence
  Description of Artificial Sequence: Synthetic oligonucleotide
  Sense strand starting at position 1025 of SEQ ID NO: 2305
agucauguuuauucucuga

SEQ ID NO: 178771 - RNA, 19 nt, Artificial Sequence
  Description of Artificial Sequence: Synthetic oligonucleotide
  Antisense strand to SEQ ID NO: 178770
ucagagaauaaacaugacu

SEQ ID NO: 178772 - RNA, 19 nt, Artificial Sequence
  Description of Artificial Sequence: Synthetic oligonucleotide
  Sense strand starting at position 1029 of SEQ ID NO: 2305
auguuuauucucugaguga

SEQ ID NO: 178773 - RNA, 19 nt, Artificial Sequence
  Description of Artificial Sequence: Synthetic oligonucleotide
  Antisense strand to SEQ ID NO: 178772
ucacucagagaauaaacau

SEQ ID NO: 178774 - RNA, 19 nt, Artificial Sequence
  Description of Artificial Sequence: Synthetic oligonucleotide
  Sense strand starting at position 1100 of SEQ ID NO: 2305
uagguauuacaaugagagc

SEQ ID NO: 178775 - RNA, 19 nt, Artificial Sequence
  Description of Artificial Sequence: Synthetic oligonucleotide
  Antisense strand to SEQ ID NO: 178774
gcucucauuguaauaccua

SEQ ID NO: 178776 - RNA, 19 nt, Artificial Sequence
  Description of Artificial Sequence: Synthetic oligonucleotide
  Sense strand starting at position 1408 of SEQ ID NO: 2305
cgcuuaucacuugaggcau

SEQ ID NO: 178777 - RNA, 19 nt, Artificial Sequence
  Description of Artificial Sequence: Synthetic oligonucleotide
  Antisense strand to SEQ ID NO: 178776
augccucaagugauaagcg

SEQ ID NO: 178778 - RNA, 19 nt, Artificial Sequence
  Description of Artificial Sequence: Synthetic oligonucleotide
  Sense strand starting at position 1426 of SEQ ID NO: 2305
uuugacucuugauuggaga

SEQ ID NO: 178779 - RNA, 19 nt, Artificial Sequence
  Description of Artificial Sequence: Synthetic oligonucleotide
  Antisense strand to SEQ ID NO: 178778
ucuccaaucaagagucaaa

SEQ ID NO: 178780 - RNA, 19 nt, Artificial Sequence
  Description of Artificial Sequence: Synthetic oligonucleotide
  Sense strand starting at position 1428 of SEQ ID NO: 2305
ugacucuugauuggagagu

SEQ ID NO: 178781 - RNA, 19 nt, Artificial Sequence
  Description of Artificial Sequence: Synthetic oligonucleotide
  Antisense strand to SEQ ID NO: 178780
acucuccaaucaagaguca

SEQ ID NO: 178782 - RNA, 19 nt, Artificial Sequence
  Description of Artificial Sequence: Synthetic oligonucleotide
  Sense strand starting at position 1691 of SEQ ID NO: 2305
ccggcacuuaccuggaaga

SEQ ID NO: 178783 - RNA, 19 nt, Artificial Sequence
  Description of Artificial Sequence: Synthetic oligonucleotide
  Antisense strand to SEQ ID NO: 178782
ucuuccagguaagugccgg

SEQ ID NO: 178784 - RNA, 19 nt, Artificial Sequence
  Description of Artificial Sequence: Synthetic oligonucleotide
  Sense strand starting at position 1692 of SEQ ID NO: 2305
cggcacuuaccuggaagau

SEQ ID NO: 178785 - RNA, 19 nt, Artificial Sequence
  Description of Artificial Sequence: Synthetic oligonucleotide
  Antisense strand to SEQ ID NO: 178784
aucuuccagguaagugccg

SEQ ID NO: 178786 - RNA, 19 nt, Artificial Sequence
  Description of Artificial Sequence: Synthetic oligonucleotide
  Sense strand starting at position 1755 of SEQ ID NO: 2305
ugaccacuggcuugguaaa

SEQ ID NO: 178787 - RNA, 19 nt, Artificial Sequence
  Description of Artificial Sequence: Synthetic oligonucleotide
  Antisense strand to SEQ ID NO: 178786
uuuaccaagccagugguca

SEQ ID NO: 178788 - RNA, 19 nt, Artificial Sequence
  Description of Artificial Sequence: Synthetic oligonucleotide
  Sense strand starting at position 1807 of SEQ ID NO: 2305
cuccaaguucuccauggga

SEQ ID NO: 178789 - RNA, 19 nt, Artificial Sequence
  Description of Artificial Sequence: Synthetic oligonucleotide
  Antisense strand to SEQ ID NO: 178788
ucccauggagaacuuggag

SEQ ID NO: 178790 - RNA, 19 nt, Artificial Sequence
  Description of Artificial Sequence: Synthetic oligonucleotide
  Sense strand starting at position 1809 of SEQ ID NO: 2305
ccaaguucuccaugggauu

SEQ ID NO: 178791 - RNA, 19 nt, Artificial Sequence
  Description of Artificial Sequence: Synthetic oligonucleotide
  Antisense strand to SEQ ID NO: 178790
aaucccauggagaacuugg

SEQ ID NO: 178792 - RNA, 19 nt, Artificial Sequence
  Description of Artificial Sequence: Synthetic oligonucleotide
  Sense strand starting at position 1810 of SEQ ID NO: 2305
caaguucuccaugggauuc

SEQ ID NO: 178793 - RNA, 19 nt, Artificial Sequence
  Description of Artificial Sequence: Synthetic oligonucleotide
  Antisense strand to SEQ ID NO: 178792
gaaucccauggagaacuug

SEQ ID NO: 178794 - RNA, 19 nt, Artificial Sequence
  Description of Artificial Sequence: Synthetic oligonucleotide
  Sense strand starting at position 1834 of SEQ ID NO: 2305
cuggaucaggcucgacuua

SEQ ID NO: 178795 - RNA, 19 nt, Artificial Sequence
  Description of Artificial Sequence: Synthetic oligonucleotide
  Antisense strand to SEQ ID NO: 178794
uaagucgagccugauccag

SEQ ID NO: 178796 - RNA, 19 nt, Artificial Sequence
  Description of Artificial Sequence: Synthetic oligonucleotide
  Sense strand starting at position 1835 of SEQ ID NO: 2305
uggaucaggcucgacuuau

SEQ ID NO: 178797 - RNA, 19 nt, Artificial Sequence
  Description of Artificial Sequence: Synthetic oligonucleotide
  Antisense strand to SEQ ID NO: 178796
auaagucgagccugaucca

SEQ ID NO: 178798 - RNA, 19 nt, Artificial Sequence
  Description of Artificial Sequence: Synthetic oligonucleotide
  Sense strand starting at position 1852 of SEQ ID NO: 2305
auaauccauucugugggaa

SEQ ID NO: 178799 - RNA, 19 nt, Artificial Sequence
  Description of Artificial Sequence: Synthetic oligonucleotide
  Antisense strand to SEQ ID NO: 178798
uucccacagaauggauuau

SEQ ID NO: 178800 - RNA, 19 nt, Artificial Sequence
  Description of Artificial Sequence: Synthetic oligonucleotide
  Sense strand starting at position 1855 of SEQ ID NO: 2305
auccauucugugggaagga

SEQ ID NO: 178801 - RNA, 19 nt, Artificial Sequence
  Description of Artificial Sequence: Synthetic oligonucleotide
  Antisense strand to SEQ ID NO: 178800
uccuucccacagaauggau

SEQ ID NO: 178802 - RNA, 19 nt, Artificial Sequence
  Description of Artificial Sequence: Synthetic oligonucleotide
  Sense strand starting at position 1903 of SEQ ID NO: 2305
cuaacuuugcucuaaguag

SEQ ID NO: 178803 - RNA, 19 nt, Artificial Sequence
  Description of Artificial Sequence: Synthetic oligonucleotide
  Antisense strand to SEQ ID NO: 178802
cuacuuagagcaaaguuag

SEQ ID NO: 178804 - RNA, 19 nt, Artificial Sequence
  Description of Artificial Sequence: Synthetic oligonucleotide
  Sense strand starting at position 1990 of SEQ ID NO: 2305
gaauucugucuuggucuga

SEQ ID NO: 178805 - RNA, 19 nt, Artificial Sequence
  Description of Artificial Sequence: Synthetic oligonucleotide
  Antisense strand to SEQ ID NO: 178804
ucagaccaagacagaauuc

SEQ ID NO: 178806 - RNA, 19 nt, Artificial Sequence
  Description of Artificial Sequence: Synthetic oligonucleotide
  Sense strand starting at position 2014 of SEQ ID NO: 2305
cucugauauuuauagcuag

SEQ ID NO: 178807 - RNA, 19 nt, Artificial Sequence
  Description of Artificial Sequence: Synthetic oligonucleotide
  Antisense strand to SEQ ID NO: 178806
cuagcuauaaauaucagag

SEQ ID NO: 178808 - RNA, 19 nt, Artificial Sequence
  Description of Artificial Sequence: Synthetic oligonucleotide
  Sense strand starting at position 2026 of SEQ ID NO: 2305
uagcuagaucuuggucaca

SEQ ID NO: 178809 - RNA, 19 nt, Artificial Sequence
  Description of Artificial Sequence: Synthetic oligonucleotide
  Antisense strand to SEQ ID NO: 178808
ugugaccaagaucuagcua

SEQ ID NO: 178810 - RNA, 19 nt, Artificial Sequence
  Description of Artificial Sequence: Synthetic oligonucleotide
  Sense strand starting at position 2028 of SEQ ID NO: 2305
gcuagaucuuggucacaug

SEQ ID NO: 178811 - RNA, 19 nt, Artificial Sequence
  Description of Artificial Sequence: Synthetic oligonucleotide
  Antisense strand to SEQ ID NO: 178810
caugugaccaagaucuagc

SEQ ID NO: 178812 - RNA, 19 nt, Artificial Sequence
  Description of Artificial Sequence: Synthetic oligonucleotide
  Sense strand starting at position 2101 of SEQ ID NO: 2305
gaguuuccuccaggccuga

SEQ ID NO: 178813 - RNA, 19 nt, Artificial Sequence
  Description of Artificial Sequence: Synthetic oligonucleotide
  Antisense strand to SEQ ID NO: 178812
ucaggccuggaggaaacuc

SEQ ID NO: 178814 - RNA, 19 nt, Artificial Sequence
  Description of Artificial Sequence: Synthetic oligonucleotide
  Sense strand starting at position 2391 of SEQ ID NO: 2305
ugaguacuaguauauacau

SEQ ID NO: 178815 - RNA, 19 nt, Artificial Sequence
  Description of Artificial Sequence: Synthetic oligonucleotide
  Antisense strand to SEQ ID NO: 178814
auguauauacuaguacuca

SEQ ID NO: 178816 - RNA, 19 nt, Artificial Sequence
  Description of Artificial Sequence: Synthetic oligonucleotide
  Sense strand starting at position 2430 of SEQ ID NO: 2305
caacgugacagauggauga

SEQ ID NO: 178817 - RNA, 19 nt, Artificial Sequence
  Description of Artificial Sequence: Synthetic oligonucleotide
  Antisense strand to SEQ ID NO: 178816
ucauccaucugucacguug

SEQ ID NO: 178818 - RNA, 19 nt, Artificial Sequence
  Description of Artificial Sequence: Synthetic oligonucleotide
  Sense strand starting at position 2434 of SEQ ID NO: 2305
gugacagauggaugaguga

SEQ ID NO: 178819 - RNA, 19 nt, Artificial Sequence
  Description of Artificial Sequence: Synthetic oligonucleotide
  Antisense strand to SEQ ID NO: 178818
ucacucauccaucugucac

SEQ ID NO: 178820 - RNA, 19 nt, Artificial Sequence
  Description of Artificial Sequence: Synthetic oligonucleotide
  Sense strand starting at position 2441 of SEQ ID NO: 2305
auggaugagugaucuguuu

SEQ ID NO: 178821 - RNA, 19 nt, Artificial Sequence
  Description of Artificial Sequence: Synthetic oligonucleotide
  Antisense strand to SEQ ID NO: 178820
aaacagaucacucauccau

SEQ ID NO: 178822 - RNA, 19 nt, Artificial Sequence
  Description of Artificial Sequence: Synthetic oligonucleotide
  Sense strand starting at position 2443 of SEQ ID NO: 2305
ggaugagugaucuguuucc

SEQ ID NO: 178823 - RNA, 19 nt, Artificial Sequence
  Description of Artificial Sequence: Synthetic oligonucleotide
  Antisense strand to SEQ ID NO: 178822
ggaaacagaucacucaucc

SEQ ID NO: 178824 - RNA, 19 nt, Artificial Sequence
  Description of Artificial Sequence: Synthetic oligonucleotide
  Sense strand starting at position 3277 of SEQ ID NO: 2305
ugaguacuaguauacauca

SEQ ID NO: 178825 - RNA, 19 nt, Artificial Sequence
  Description of Artificial Sequence: Synthetic oligonucleotide
  Antisense strand to SEQ ID NO: 178824
ugauguauacuaguacuca

SEQ ID NO: 178826 - RNA, 19 nt, Artificial Sequence
  Description of Artificial Sequence: Synthetic oligonucleotide
  Sense strand starting at position 3831 of SEQ ID NO: 2305
gcaaguagaagucauuaga

SEQ ID NO: 178827 - RNA, 19 nt, Artificial Sequence
  Description of Artificial Sequence: Synthetic oligonucleotide
  Antisense strand to SEQ ID NO: 178826
ucuaaugacuucuacuugc

SEQ ID NO: 178828 - RNA, 19 nt, Artificial Sequence
  Description of Artificial Sequence: Synthetic oligonucleotide
  Sense strand starting at position 3775 of SEQ ID NO: 2306
cgauaugaauauugaaguc

SEQ ID NO: 178829 - RNA, 19 nt, Artificial Sequence
  Description of Artificial Sequence: Synthetic oligonucleotide
  Antisense strand to SEQ ID NO: 178828
gacuucaauauucauaucg

SEQ ID NO: 178830 - RNA, 19 nt, Artificial Sequence
  Description of Artificial Sequence: Synthetic oligonucleotide
  Sense strand starting at position 3760 of SEQ ID NO: 2306
ucguuuauuuaacaacgau

SEQ ID NO: 178831 - RNA, 19 nt, Artificial Sequence
  Description of Artificial Sequence: Synthetic oligonucleotide
  Antisense strand to SEQ ID NO: 178830
aucguuguuaaauaaacga

SEQ ID NO: 178832 - RNA, 19 nt, Artificial Sequence
  Description of Artificial Sequence: Synthetic oligonucleotide
  Sense strand starting at position 3183 of SEQ ID NO: 2306
gccugacagucgcuuccua

SEQ ID NO: 178833 - RNA, 19 nt, Artificial Sequence
  Description of Artificial Sequence: Synthetic oligonucleotide
  Antisense strand to SEQ ID NO: 178832
uaggaagcgacugucaggc

SEQ ID NO: 178834 - RNA, 19 nt, Artificial Sequence
  Description of Artificial Sequence: Synthetic oligonucleotide
  Sense strand starting at position 3156 of SEQ ID NO: 2306
gucguuuagaaauggauag

SEQ ID NO: 178835 - RNA, 19 nt, Artificial Sequence
  Description of Artificial Sequence: Synthetic oligonucleotide
  Antisense strand to SEQ ID NO: 178834
cuauccauuucuaaacgac

SEQ ID NO: 178836 - RNA, 19 nt, Artificial Sequence
  Description of Artificial Sequence: Synthetic oligonucleotide
  Sense strand starting at position 3150 of SEQ ID NO: 2306
aagccagucguuuagaaau

SEQ ID NO: 178837 - RNA, 19 nt, Artificial Sequence
  Description of Artificial Sequence: Synthetic oligonucleotide
  Antisense strand to SEQ ID NO: 178836
auuucuaaacgacuggcuu

SEQ ID NO: 178838 - RNA, 19 nt, Artificial Sequence
  Description of Artificial Sequence: Synthetic oligonucleotide
  Sense strand starting at position 3118 of SEQ ID NO: 2306
ccgccauagaagggugaaa

SEQ ID NO: 178839 - RNA, 19 nt, Artificial Sequence
  Description of Artificial Sequence: Synthetic oligonucleotide
  Antisense strand to SEQ ID NO: 178838
uuucacccuucuauggcgg

SEQ ID NO: 178840 - RNA, 19 nt, Artificial Sequence
  Description of Artificial Sequence: Synthetic oligonucleotide
  Sense strand starting at position 3022 of SEQ ID NO: 2306
gagauuguaucuugaauca

SEQ ID NO: 178841 - RNA, 19 nt, Artificial Sequence
  Description of Artificial Sequence: Synthetic oligonucleotide
  Antisense strand to SEQ ID NO: 178840
ugauucaagauacaaucuc

SEQ ID NO: 178842 - RNA, 19 nt, Artificial Sequence
  Description of Artificial Sequence: Synthetic oligonucleotide
  Sense strand starting at position 3020 of SEQ ID NO: 2306
uggagauuguaucuugaau

SEQ ID NO: 178843 - RNA, 19 nt, Artificial Sequence
  Description of Artificial Sequence: Synthetic oligonucleotide
  Antisense strand to SEQ ID NO: 178842
auucaagauacaaucucca

SEQ ID NO: 178844 - RNA, 19 nt, Artificial Sequence
  Description of Artificial Sequence: Synthetic oligonucleotide
  Sense strand starting at position 2986 of SEQ ID NO: 2306
gaggaucauuguuaauaac

SEQ ID NO: 178845 - RNA, 19 nt, Artificial Sequence
  Description of Artificial Sequence: Synthetic oligonucleotide
  Antisense strand to SEQ ID NO: 178844
guuauuaacaaugauccuc

SEQ ID NO: 178846 - RNA, 19 nt, Artificial Sequence
  Description of Artificial Sequence: Synthetic oligonucleotide
  Sense strand starting at position 2866 of SEQ ID NO: 2306
aguuguaauuuccagagca

SEQ ID NO: 178847 - RNA, 19 nt, Artificial Sequence
  Description of Artificial Sequence: Synthetic oligonucleotide
  Antisense strand to SEQ ID NO: 178846
ugcucuggaaauuacaacu

SEQ ID NO: 178848 - RNA, 19 nt, Artificial Sequence
  Description of Artificial Sequence: Synthetic oligonucleotide
  Sense strand starting at position 2431 of SEQ ID NO: 2306
gggugauagcgaggugaga

SEQ ID NO: 178849 - RNA, 19 nt, Artificial Sequence
  Description of Artificial Sequence: Synthetic oligonucleotide
  Antisense strand to SEQ ID NO: 178848
ucucaccucgcuaucaccc

SEQ ID NO: 178850 - RNA, 19 nt, Artificial Sequence
  Description of Artificial Sequence: Synthetic oligonucleotide
  Sense strand starting at position 2264 of SEQ ID NO: 2306
agcuuuaggugaugaauca

SEQ ID NO: 178851 - RNA, 19 nt, Artificial Sequence
  Description of Artificial Sequence: Synthetic oligonucleotide
  Antisense strand to SEQ ID NO: 178850
ugauucaucaccuaaagcu

SEQ ID NO: 178852 - RNA, 19 nt, Artificial Sequence
  Description of Artificial Sequence: Synthetic oligonucleotide
  Sense strand starting at position 2262 of SEQ ID NO: 2306
ggagcuuuaggugaugaau

SEQ ID NO: 178853 - RNA, 19 nt, Artificial Sequence
  Description of Artificial Sequence: Synthetic oligonucleotide
  Antisense strand to SEQ ID NO: 178852
auucaucaccuaaagcucc

SEQ ID NO: 178854 - RNA, 19 nt, Artificial Sequence
  Description of Artificial Sequence: Synthetic oligonucleotide
  Sense strand starting at position 2261 of SEQ ID NO: 2306
aggagcuuuaggugaugaa

SEQ ID NO: 178855 - RNA, 19 nt, Artificial Sequence
  Description of Artificial Sequence: Synthetic oligonucleotide
  Antisense strand to SEQ ID NO: 178854
uucaucaccuaaagcuccu

SEQ ID NO: 178856 - RNA, 19 nt, Artificial Sequence
  Description of Artificial Sequence: Synthetic oligonucleotide
  Sense strand starting at position 783 of SEQ ID NO: 2306
uggcuaaugagugagguaa

SEQ ID NO: 178857 - RNA, 19 nt, Artificial Sequence
  Description of Artificial Sequence: Synthetic oligonucleotide
  Antisense strand to SEQ ID NO: 178856
uuaccucacucauuagcca

SEQ ID NO: 178858 - RNA, 19 nt, Artificial Sequence
  Description of Artificial Sequence: Synthetic oligonucleotide
  Sense strand starting at position 782 of SEQ ID NO: 2306
auggcuaaugagugaggua

SEQ ID NO: 178859 - RNA, 19 nt, Artificial Sequence
  Description of Artificial Sequence: Synthetic oligonucleotide
  Antisense strand to SEQ ID NO: 178858
uaccucacucauuagccau

SEQ ID NO: 178860 - RNA, 19 nt, Artificial Sequence
  Description of Artificial Sequence: Synthetic oligonucleotide
  Sense strand starting at position 762 of SEQ ID NO: 2306
augacuaucugauggaaug

SEQ ID NO: 178861 - RNA, 19 nt, Artificial Sequence
  Description of Artificial Sequence: Synthetic oligonucleotide
  Antisense strand to SEQ ID NO: 178860
cauuccaucagauagucau

SEQ ID NO: 178862 - RNA, 19 nt, Artificial Sequence
  Description of Artificial Sequence: Synthetic oligonucleotide
  Sense strand starting at position 747 of SEQ ID NO: 2306
uuaccuguuugucaaauga

SEQ ID NO: 178863 - RNA, 19 nt, Artificial Sequence
  Description of Artificial Sequence: Synthetic oligonucleotide
  Antisense strand to SEQ ID NO: 178862
ucauuugacaaacagguaa

SEQ ID NO: 178864 - RNA, 19 nt, Artificial Sequence
  Description of Artificial Sequence: Synthetic oligonucleotide
  Sense strand starting at position 745 of SEQ ID NO: 2306
ccuuaccuguuugucaaau

SEQ ID NO: 178865 - RNA, 19 nt, Artificial Sequence
  Description of Artificial Sequence: Synthetic oligonucleotide
  Antisense strand to SEQ ID NO: 178864
auuugacaaacagguaagg

SEQ ID NO: 178866 - RNA, 19 nt, Artificial Sequence
  Description of Artificial Sequence: Synthetic oligonucleotide
  Sense strand starting at position 637 of SEQ ID NO: 2306
gugcccugugccuacauaa

SEQ ID NO: 178867 - RNA, 19 nt, Artificial Sequence
  Description of Artificial Sequence: Synthetic oligonucleotide
  Antisense strand to SEQ ID NO: 178866
uuauguaggcacagggcac

SEQ ID NO: 178868 - RNA, 19 nt, Artificial Sequence
  Description of Artificial Sequence: Synthetic oligonucleotide
  Sense strand starting at position 595 of SEQ ID NO: 2306
gucagacguugggaguaaa

SEQ ID NO: 178869 - RNA, 19 nt, Artificial Sequence
  Description of Artificial Sequence: Synthetic oligonucleotide
  Antisense strand to SEQ ID NO: 178868
uuuacucccaacgucugac

SEQ ID NO: 178870 - RNA, 19 nt, Artificial Sequence
  Description of Artificial Sequence: Synthetic oligonucleotide
  Sense strand starting at position 593 of SEQ ID NO: 2306
uagucagacguugggagua

SEQ ID NO: 178871 - RNA, 19 nt, Artificial Sequence
  Description of Artificial Sequence: Synthetic oligonucleotide
  Antisense strand to SEQ ID NO: 178870
uacucccaacgucugacua

SEQ ID NO: 178872 - RNA, 19 nt, Artificial Sequence
  Description of Artificial Sequence: Synthetic oligonucleotide
  Sense strand starting at position 545 of SEQ ID NO: 2306
ggagauccugcaugccuua

SEQ ID NO: 178873 - RNA, 19 nt, Artificial Sequence
  Description of Artificial Sequence: Synthetic oligonucleotide
  Antisense strand to SEQ ID NO: 178872
uaaggcaugcaggaucucc

SEQ ID NO: 178874 - RNA, 19 nt, Artificial Sequence
  Description of Artificial Sequence: Synthetic oligonucleotide
  Sense strand starting at position 480 of SEQ ID NO: 2306
cucgcaguaucagauacaa

SEQ ID NO: 178875 - RNA, 19 nt, Artificial Sequence
  Description of Artificial Sequence: Synthetic oligonucleotide
  Antisense strand to SEQ ID NO: 178874
uuguaucugauacugcgag

SEQ ID NO: 178876 - RNA, 19 nt, Artificial Sequence
  Description of Artificial Sequence: Synthetic oligonucleotide
  Sense strand starting at position 475 of SEQ ID NO: 2306
ucuuucucgcaguaucaga

SEQ ID NO: 178877 - RNA, 19 nt, Artificial Sequence
  Description of Artificial Sequence: Synthetic oligonucleotide
  Antisense strand to SEQ ID NO: 178876
ucugauacugcgagaaaga

SEQ ID NO: 178878 - RNA, 19 nt, Artificial Sequence
  Description of Artificial Sequence: Synthetic oligonucleotide
  Sense strand starting at position 435 of SEQ ID NO: 2306
gggucugaucaaggaccua

SEQ ID NO: 178879 - RNA, 19 nt, Artificial Sequence
  Description of Artificial Sequence: Synthetic oligonucleotide
  Antisense strand to SEQ ID NO: 178878
uagguccuugaucagaccc

SEQ ID NO: 178880 - RNA, 19 nt, Artificial Sequence
  Description of Artificial Sequence: Synthetic oligonucleotide
  Sense strand starting at position 386 of SEQ ID NO: 2306
augggaaauuuaggugaau

SEQ ID NO: 178881 - RNA, 19 nt, Artificial Sequence
  Description of Artificial Sequence: Synthetic oligonucleotide
  Antisense strand to SEQ ID NO: 178880
auucaccuaaauuucccau

SEQ ID NO: 178882 - RNA, 19 nt, Artificial Sequence
  Description of Artificial Sequence: Synthetic oligonucleotide
  Sense strand starting at position 298 of SEQ ID NO: 2306
ggguccuucccacaagauu

SEQ ID NO: 178883 - RNA, 19 nt, Artificial Sequence
  Description of Artificial Sequence: Synthetic oligonucleotide
  Antisense strand to SEQ ID NO: 178882
aaucuugugggaaggaccc

SEQ ID NO: 178884 - RNA, 19 nt, Artificial Sequence
  Description of Artificial Sequence: Synthetic oligonucleotide
  Sense strand starting at position 265 of SEQ ID NO: 2306
auaauuggugucugaaguu

SEQ ID NO: 178885 - RNA, 19 nt, Artificial Sequence
  Description of Artificial Sequence: Synthetic oligonucleotide
  Antisense strand to SEQ ID NO: 178884
aacuucagacaccaauuau

SEQ ID NO: 178886 - RNA, 19 nt, Artificial Sequence
  Description of Artificial Sequence: Synthetic oligonucleotide
  Sense strand starting at position 264 of SEQ ID NO: 2306
aauaauuggugucugaagu

SEQ ID NO: 178887 - RNA, 19 nt, Artificial Sequence
  Description of Artificial Sequence: Synthetic oligonucleotide
  Antisense strand to SEQ ID NO: 178886
acuucagacaccaauuauu

SEQ ID NO: 178888 - RNA, 19 nt, Artificial Sequence
  Description of Artificial Sequence: Synthetic oligonucleotide
  Sense strand starting at position 261 of SEQ ID NO: 2306
aggaauaauuggugucuga

SEQ ID NO: 178889 - RNA, 19 nt, Artificial Sequence
  Description of Artificial Sequence: Synthetic oligonucleotide
  Antisense strand to SEQ ID NO: 178888
ucagacaccaauuauuccu

SEQ ID NO: 178890 - RNA, 19 nt, Artificial Sequence
  Description of Artificial Sequence: Synthetic oligonucleotide
  Sense strand starting at position 239 of SEQ ID NO: 2306
acuguuuacugguaagacu

SEQ ID NO: 178891 - RNA, 19 nt, Artificial Sequence
  Description of Artificial Sequence: Synthetic oligonucleotide
  Antisense strand to SEQ ID NO: 178890
agucuuaccaguaaacagu

SEQ ID NO: 178892 - RNA, 19 nt, Artificial Sequence
  Description of Artificial Sequence: Synthetic oligonucleotide
  Sense strand starting at position 235 of SEQ ID NO: 2306
ggugacuguuuacugguaa

SEQ ID NO: 178893 - RNA, 19 nt, Artificial Sequence
  Description of Artificial Sequence: Synthetic oligonucleotide
  Antisense strand to SEQ ID NO: 178892
uuaccaguaaacagucacc

SEQ ID NO: 178894 - RNA, 19 nt, Artificial Sequence
  Description of Artificial Sequence: Synthetic oligonucleotide
  Sense strand starting at position 148 of SEQ ID NO: 2306
uggauagccuuggccaauu

SEQ ID NO: 178895 - RNA, 19 nt, Artificial Sequence
  Description of Artificial Sequence: Synthetic oligonucleotide
  Antisense strand to SEQ ID NO: 178894
aauuggccaaggcuaucca

SEQ ID NO: 178896 - RNA, 19 nt, Artificial Sequence
  Description of Artificial Sequence: Synthetic oligonucleotide
  Sense strand starting at position 147 of SEQ ID NO: 2306
uuggauagccuuggccaau

SEQ ID NO: 178897 - RNA, 19 nt, Artificial Sequence
  Description of Artificial Sequence: Synthetic oligonucleotide
  Antisense strand to SEQ ID NO: 178896
auuggccaaggcuauccaa

SEQ ID NO: 178898 - RNA, 19 nt, Artificial Sequence
  Description of Artificial Sequence: Synthetic oligonucleotide
  Sense strand starting at position 146 of SEQ ID NO: 2306
guuggauagccuuggccaa

SEQ ID NO: 178899 - RNA, 19 nt, Artificial Sequence
  Description of Artificial Sequence: Synthetic oligonucleotide
  Antisense strand to SEQ ID NO: 178898
uuggccaaggcuauccaac

SEQ ID NO: 178900 - RNA, 19 nt, Artificial Sequence
  Description of Artificial Sequence: Synthetic oligonucleotide
  Sense strand starting at position 85 of SEQ ID NO: 2306
aggaaugguuagucucuua

SEQ ID NO: 178901 - RNA, 19 nt, Artificial Sequence
  Description of Artificial Sequence: Synthetic oligonucleotide
  Antisense strand to SEQ ID NO: 178900
uaagagacuaaccauuccu

SEQ ID NO: 178902 - RNA, 19 nt, Artificial Sequence
  Description of Artificial Sequence: Synthetic oligonucleotide
  Sense strand starting at position 79 of SEQ ID NO: 2306
cuauauaggaaugguuagu

SEQ ID NO: 178903 - RNA, 19 nt, Artificial Sequence
  Description of Artificial Sequence: Synthetic oligonucleotide
  Antisense strand to SEQ ID NO: 178902
acuaaccauuccuauauag

SEQ ID NO: 178904 - RNA, 19 nt, Artificial Sequence
  Description of Artificial Sequence: Synthetic oligonucleotide
  Sense strand starting at position 28 of SEQ ID NO: 2306
ugcucauuauagcagauaa

SEQ ID NO: 178905 - RNA, 19 nt, Artificial Sequence
  Description of Artificial Sequence: Synthetic oligonucleotide
  Antisense strand to SEQ ID NO: 178904
uuaucugcuauaaugagca

SEQ ID NO: 178906 - RNA, 19 nt, Artificial Sequence
  Description of Artificial Sequence: Synthetic oligonucleotide
  Sense strand starting at position 23 of SEQ ID NO: 2306
acguaugcucauuauagca

SEQ ID NO: 178907 - RNA, 19 nt, Artificial Sequence
  Description of Artificial Sequence: Synthetic oligonucleotide
  Antisense strand to SEQ ID NO: 178906
ugcuauaaugagcauacgu

SEQ ID NO: 178908 - RNA, 19 nt, Artificial Sequence
  Description of Artificial Sequence: Synthetic oligonucleotide
  Sense strand starting at position 109 of SEQ ID NO: 2307
gggaguuccaucuguaacu

SEQ ID NO: 178909 - RNA, 19 nt, Artificial Sequence
  Description of Artificial Sequence: Synthetic oligonucleotide
  Antisense strand to SEQ ID NO: 178908
aguuacagauggaacuccc

SEQ ID NO: 178910 - RNA, 19 nt, Artificial Sequence
  Description of Artificial Sequence: Synthetic oligonucleotide
  Sense strand starting at position 277 of SEQ ID NO: 2307
ucgauaauuucuccugucu

SEQ ID NO: 178911 - RNA, 19 nt, Artificial Sequence
  Description of Artificial Sequence: Synthetic oligonucleotide
  Antisense strand to SEQ ID NO: 178910
agacaggagaaauuaucga

SEQ ID NO: 178912 - RNA, 19 nt, Artificial Sequence
  Description of Artificial Sequence: Synthetic oligonucleotide
  Sense strand starting at position 463 of SEQ ID NO: 2307
uagggccucgcagaagaua

SEQ ID NO: 178913 - RNA, 19 nt, Artificial Sequence
  Description of Artificial Sequence: Synthetic oligonucleotide
  Antisense strand to SEQ ID NO: 178912
uaucuucugcgaggcccua

SEQ ID NO: 178914 - RNA, 19 nt, Artificial Sequence
  Description of Artificial Sequence: Synthetic oligonucleotide
  Sense strand starting at position 501 of SEQ ID NO: 2307
cucuuauuaugugccauau

SEQ ID NO: 178915 - RNA, 19 nt, Artificial Sequence
  Description of Artificial Sequence: Synthetic oligonucleotide
  Antisense strand to SEQ ID NO: 178914
auauggcacauaauaagag

SEQ ID NO: 178916 - RNA, 19 nt, Artificial Sequence
  Description of Artificial Sequence: Synthetic oligonucleotide
  Sense strand starting at position 563 of SEQ ID NO: 2307
caauaauguuguguuauug

SEQ ID NO: 178917 - RNA, 19 nt, Artificial Sequence
  Description of Artificial Sequence: Synthetic oligonucleotide
  Antisense strand to SEQ ID NO: 178916
caauaacacaacauuauug

SEQ ID NO: 178918 - RNA, 19 nt, Artificial Sequence
  Description of Artificial Sequence: Synthetic oligonucleotide
  Sense strand starting at position 619 of SEQ ID NO: 2307
gcaugaagagguuaggcua

SEQ ID NO: 178919 - RNA, 19 nt, Artificial Sequence
  Description of Artificial Sequence: Synthetic oligonucleotide
  Antisense strand to SEQ ID NO: 178918
uagccuaaccucuucaugc

SEQ ID NO: 178920 - RNA, 19 nt, Artificial Sequence
  Description of Artificial Sequence: Synthetic oligonucleotide
  Sense strand starting at position 672 of SEQ ID NO: 2307
gagguaaauugucuucuga

SEQ ID NO: 178921 - RNA, 19 nt, Artificial Sequence
  Description of Artificial Sequence: Synthetic oligonucleotide
  Antisense strand to SEQ ID NO: 178920
ucagaagacaauuuaccuc

SEQ ID NO: 178922 - RNA, 19 nt, Artificial Sequence
  Description of Artificial Sequence: Synthetic oligonucleotide
  Sense strand starting at position 674 of SEQ ID NO: 2307
gguaaauugucuucugaag

SEQ ID NO: 178923 - RNA, 19 nt, Artificial Sequence
  Description of Artificial Sequence: Synthetic oligonucleotide
  Antisense strand to SEQ ID NO: 178922
cuucagaagacaauuuacc

SEQ ID NO: 178924 - RNA, 19 nt, Artificial Sequence
  Description of Artificial Sequence: Synthetic oligonucleotide
  Sense strand starting at position 838 of SEQ ID NO: 2307
cuucuuugcugaguacuca

SEQ ID NO: 178925 - RNA, 19 nt, Artificial Sequence
  Description of Artificial Sequence: Synthetic oligonucleotide
  Antisense strand to SEQ ID NO: 178924
ugaguacucagcaaagaag

SEQ ID NO: 178926 - RNA, 19 nt, Artificial Sequence
  Description of Artificial Sequence: Synthetic oligonucleotide
  Sense strand starting at position 839 of SEQ ID NO: 2307
uucuuugcugaguacucau

SEQ ID NO: 178927 - RNA, 19 nt, Artificial Sequence
  Description of Artificial Sequence: Synthetic oligonucleotide
  Antisense strand to SEQ ID NO: 178926
augaguacucagcaaagaa

SEQ ID NO: 178928 - RNA, 19 nt, Artificial Sequence
  Description of Artificial Sequence: Synthetic oligonucleotide
  Sense strand starting at position 949 of SEQ ID NO: 2307
ugcuguaguuccuccauca

SEQ ID NO: 178929 - RNA, 19 nt, Artificial Sequence
  Description of Artificial Sequence: Synthetic oligonucleotide
  Antisense strand to SEQ ID NO: 178928
ugauggaggaacuacagca

SEQ ID NO: 178930 - RNA, 19 nt, Artificial Sequence
  Description of Artificial Sequence: Synthetic oligonucleotide
  Sense strand starting at position 956 of SEQ ID NO: 2307
guuccuccaucagagauuu

SEQ ID NO: 178931 - RNA, 19 nt, Artificial Sequence
  Description of Artificial Sequence: Synthetic oligonucleotide
  Antisense strand to SEQ ID NO: 178930
aaaucucugauggaggaac

SEQ ID NO: 178932 - RNA, 19 nt, Artificial Sequence
  Description of Artificial Sequence: Synthetic oligonucleotide
  Sense strand starting at position 1133 of SEQ ID NO: 2307
ccacaagucuggccuuauu

SEQ ID NO: 178933 - RNA, 19 nt, Artificial Sequence
  Description of Artificial Sequence: Synthetic oligonucleotide
  Antisense strand to SEQ ID NO: 178932
aauaaggccagacuugugg

SEQ ID NO: 178934 - RNA, 19 nt, Artificial Sequence
  Description of Artificial Sequence: Synthetic oligonucleotide
  Sense strand starting at position 1268 of SEQ ID NO: 2307
aauaaacgacauuguugau

SEQ ID NO: 178935 - RNA, 19 nt, Artificial Sequence
  Description of Artificial Sequence: Synthetic oligonucleotide
  Antisense strand to SEQ ID NO: 178934
aucaacaaugucguuuauu

SEQ ID NO: 178936 - RNA, 19 nt, Artificial Sequence
  Description of Artificial Sequence: Synthetic oligonucleotide
  Sense strand starting at position 1274 of SEQ ID NO: 2307
cgacauuguugauccgaag

SEQ ID NO: 178937 - RNA, 19 nt, Artificial Sequence
  Description of Artificial Sequence: Synthetic oligonucleotide
  Antisense strand to SEQ ID NO: 178936
cuucggaucaacaaugucg

SEQ ID NO: 178938 - RNA, 19 nt, Artificial Sequence
  Description of Artificial Sequence: Synthetic oligonucleotide
  Sense strand starting at position 1327 of SEQ ID NO: 2307
caggucuccugacugucaa

SEQ ID NO: 178939 - RNA, 19 nt, Artificial Sequence
  Description of Artificial Sequence: Synthetic oligonucleotide
  Antisense strand to SEQ ID NO: 178938
uugacagucaggagaccug

SEQ ID NO: 178940 - RNA, 19 nt, Artificial Sequence
  Description of Artificial Sequence: Synthetic oligonucleotide
  Sense strand starting at position 1392 of SEQ ID NO: 2307
uccugaucucgcuggguua

SEQ ID NO: 178941 - RNA, 19 nt, Artificial Sequence
  Description of Artificial Sequence: Synthetic oligonucleotide
  Antisense strand to SEQ ID NO: 178940
uaacccagcgagaucagga

SEQ ID NO: 178942 - RNA, 19 nt, Artificial Sequence
  Description of Artificial Sequence: Synthetic oligonucleotide
  Sense strand starting at position 1403 of SEQ ID NO: 2307
cuggguuaggguuagaguu

SEQ ID NO: 178943 - RNA, 19 nt, Artificial Sequence
  Description of Artificial Sequence: Synthetic oligonucleotide
  Antisense strand to SEQ ID NO: 178942
aacucuaacccuaacccag

SEQ ID NO: 178944 - RNA, 19 nt, Artificial Sequence
  Description of Artificial Sequence: Synthetic oligonucleotide
  Sense strand starting at position 1411 of SEQ ID NO: 2307
ggguuagaguuacaacaaa

SEQ ID NO: 178945 - RNA, 19 nt, Artificial Sequence
  Description of Artificial Sequence: Synthetic oligonucleotide
  Antisense strand to SEQ ID NO: 178944
uuuguuguaacucuaaccc

SEQ ID NO: 178946 - RNA, 19 nt, Artificial Sequence
  Description of Artificial Sequence: Synthetic oligonucleotide
  Sense strand starting at position 1511 of SEQ ID NO: 2307
acuuauucgcuaugugaca

SEQ ID NO: 178947 - RNA, 19 nt, Artificial Sequence
  Description of Artificial Sequence: Synthetic oligonucleotide
  Antisense strand to SEQ ID NO: 178946
ugucacauagcgaauaagu

SEQ ID NO: 178948 - RNA, 19 nt, Artificial Sequence
  Description of Artificial Sequence: Synthetic oligonucleotide
  Sense strand starting at position 1512 of SEQ ID NO: 2307
cuuauucgcuaugugacau

SEQ ID NO: 178949 - RNA, 19 nt, Artificial Sequence
  Description of Artificial Sequence: Synthetic oligonucleotide
  Antisense strand to SEQ ID NO: 178948
augucacauagcgaauaag

SEQ ID NO: 178950 - RNA, 19 nt, Artificial Sequence
  Description of Artificial Sequence: Synthetic oligonucleotide
  Sense strand starting at position 1579 of SEQ ID NO: 2307
aggagauaauaguaucuac

SEQ ID NO: 178951 - RNA, 19 nt, Artificial Sequence
  Description of Artificial Sequence: Synthetic oligonucleotide
  Antisense strand to SEQ ID NO: 178950
guagauacuauuaucuccu

SEQ ID NO: 178952 - RNA, 19 nt, Artificial Sequence
  Description of Artificial Sequence: Synthetic oligonucleotide
  Sense strand starting at position 1602 of SEQ ID NO: 2307
uaguaacgucgugagaagu

SEQ ID NO: 178953 - RNA, 19 nt, Artificial Sequence
  Description of Artificial Sequence: Synthetic oligonucleotide
  Antisense strand to SEQ ID NO: 178952
acuucucacgacguuacua

SEQ ID NO: 178954 - RNA, 19 nt, Artificial Sequence
  Description of Artificial Sequence: Synthetic oligonucleotide
  Sense strand starting at position 1603 of SEQ ID NO: 2307
aguaacgucgugagaaguu

SEQ ID NO: 178955 - RNA, 19 nt, Artificial Sequence
  Description of Artificial Sequence: Synthetic oligonucleotide
  Antisense strand to SEQ ID NO: 178954
aacuucucacgacguuacu

SEQ ID NO: 178956 - RNA, 19 nt, Artificial Sequence
  Description of Artificial Sequence: Synthetic oligonucleotide
  Sense strand starting at position 1610 of SEQ ID NO: 2307
ucgugagaaguugaugaga

SEQ ID NO: 178957 - RNA, 19 nt, Artificial Sequence
  Description of Artificial Sequence: Synthetic oligonucleotide
  Antisense strand to SEQ ID NO: 178956
ucucaucaacuucucacga

SEQ ID NO: 178958 - RNA, 19 nt, Artificial Sequence
  Description of Artificial Sequence: Synthetic oligonucleotide
  Sense strand starting at position 2110 of SEQ ID NO: 2307
cgugacugcagucaacuaa

SEQ ID NO: 178959 - RNA, 19 nt, Artificial Sequence
  Description of Artificial Sequence: Synthetic oligonucleotide
  Antisense strand to SEQ ID NO: 178958
uuaguugacugcagucacg

SEQ ID NO: 178960 - RNA, 19 nt, Artificial Sequence
  Description of Artificial Sequence: Synthetic oligonucleotide
  Sense strand starting at position 2468 of SEQ ID NO: 2307
ugccgucuuaaaugguaga

SEQ ID NO: 178961 - RNA, 19 nt, Artificial Sequence
  Description of Artificial Sequence: Synthetic oligonucleotide
  Antisense strand to SEQ ID NO: 178960
ucuaccauuuaagacggca

SEQ ID NO: 178962 - RNA, 19 nt, Artificial Sequence
  Description of Artificial Sequence: Synthetic oligonucleotide
  Sense strand starting at position 2469 of SEQ ID NO: 2307
gccgucuuaaaugguagau

SEQ ID NO: 178963 - RNA, 19 nt, Artificial Sequence
  Description of Artificial Sequence: Synthetic oligonucleotide
  Antisense strand to SEQ ID NO: 178962
aucuaccauuuaagacggc

SEQ ID NO: 178964 - RNA, 19 nt, Artificial Sequence
  Description of Artificial Sequence: Synthetic oligonucleotide
  Sense strand starting at position 2499 of SEQ ID NO: 2307
cuaaauagauccgucccua

SEQ ID NO: 178965 - RNA, 19 nt, Artificial Sequence
  Description of Artificial Sequence: Synthetic oligonucleotide
  Antisense strand to SEQ ID NO: 178964
uagggacggaucuauuuag

SEQ ID NO: 178966 - RNA, 19 nt, Artificial Sequence
  Description of Artificial Sequence: Synthetic oligonucleotide
  Sense strand starting at position 2503 of SEQ ID NO: 2307
auagauccgucccuauuau

SEQ ID NO: 178967 - RNA, 19 nt, Artificial Sequence
  Description of Artificial Sequence: Synthetic oligonucleotide
  Antisense strand to SEQ ID NO: 178966
auaauagggacggaucuau

SEQ ID NO: 178968 - RNA, 19 nt, Artificial Sequence
  Description of Artificial Sequence: Synthetic oligonucleotide
  Sense strand starting at position 2577 of SEQ ID NO: 2307
auaaauaggucucuuguuu

SEQ ID NO: 178969 - RNA, 19 nt, Artificial Sequence
  Description of Artificial Sequence: Synthetic oligonucleotide
  Antisense strand to SEQ ID NO: 178968
aaacaagagaccuauuuau

SEQ ID NO: 178970 - RNA, 19 nt, Artificial Sequence
  Description of Artificial Sequence: Synthetic oligonucleotide
  Sense strand starting at position 2600 of SEQ ID NO: 2307
gucugacuuauugggacaa

SEQ ID NO: 178971 - RNA, 19 nt, Artificial Sequence
  Description of Artificial Sequence: Synthetic oligonucleotide
  Antisense strand to SEQ ID NO: 178970
uugucccaauaagucagac

SEQ ID NO: 178972 - RNA, 19 nt, Artificial Sequence
  Description of Artificial Sequence: Synthetic oligonucleotide
  Sense strand starting at position 2602 of SEQ ID NO: 2307
cugacuuauugggacaaau

SEQ ID NO: 178973 - RNA, 19 nt, Artificial Sequence
  Description of Artificial Sequence: Synthetic oligonucleotide
  Antisense strand to SEQ ID NO: 178972
auuugucccaauaagucag

SEQ ID NO: 178974 - RNA, 19 nt, Artificial Sequence
  Description of Artificial Sequence: Synthetic oligonucleotide
  Sense strand starting at position 2612 of SEQ ID NO: 2307
gggacaaauucugccuaga

SEQ ID NO: 178975 - RNA, 19 nt, Artificial Sequence
  Description of Artificial Sequence: Synthetic oligonucleotide
  Antisense strand to SEQ ID NO: 178974
ucuaggcagaauuuguccc

SEQ ID NO: 178976 - RNA, 19 nt, Artificial Sequence
  Description of Artificial Sequence: Synthetic oligonucleotide
  Sense strand starting at position 2623 of SEQ ID NO: 2307
ugccuagaucauugcugua

SEQ ID NO: 178977 - RNA, 19 nt, Artificial Sequence
  Description of Artificial Sequence: Synthetic oligonucleotide
  Antisense strand to SEQ ID NO: 178976
uacagcaaugaucuaggca

SEQ ID NO: 178978 - RNA, 19 nt, Artificial Sequence
  Description of Artificial Sequence: Synthetic oligonucleotide
  Sense strand starting at position 2625 of SEQ ID NO: 2307
ccuagaucauugcuguauc

SEQ ID NO: 178979 - RNA, 19 nt, Artificial Sequence
  Description of Artificial Sequence: Synthetic oligonucleotide
  Antisense strand to SEQ ID NO: 178978
gauacagcaaugaucuagg

SEQ ID NO: 178980 - RNA, 19 nt, Artificial Sequence
  Description of Artificial Sequence: Synthetic oligonucleotide
  Sense strand starting at position 2739 of SEQ ID NO: 2307
agcucagagguguggcauu

SEQ ID NO: 178981 - RNA, 19 nt, Artificial Sequence
  Description of Artificial Sequence: Synthetic oligonucleotide
  Antisense strand to SEQ ID NO: 178980
aaugccacaccucugagcu

SEQ ID NO: 178982 - RNA, 19 nt, Artificial Sequence
  Description of Artificial Sequence: Synthetic oligonucleotide
  Sense strand starting at position 2749 of SEQ ID NO: 2307
uguggcauucuccagaaug

SEQ ID NO: 178983 - RNA, 19 nt, Artificial Sequence
  Description of Artificial Sequence: Synthetic oligonucleotide
  Antisense strand to SEQ ID NO: 178982
cauucuggagaaugccaca

SEQ ID NO: 178984 - RNA, 19 nt, Artificial Sequence
  Description of Artificial Sequence: Synthetic oligonucleotide
  Sense strand starting at position 2789 of SEQ ID NO: 2307
cagggcagcugcucuaaua

SEQ ID NO: 178985 - RNA, 19 nt, Artificial Sequence
  Description of Artificial Sequence: Synthetic oligonucleotide
  Antisense strand to SEQ ID NO: 178984
uauuagagcagcugcccug

SEQ ID NO: 178986 - RNA, 19 nt, Artificial Sequence
  Description of Artificial Sequence: Synthetic oligonucleotide
  Sense strand starting at position 3901 of SEQ ID NO: 2307
uguagcaacccugagguua

SEQ ID NO: 178987 - RNA, 19 nt, Artificial Sequence
  Description of Artificial Sequence: Synthetic oligonucleotide
  Antisense strand to SEQ ID NO: 178986
uaaccucaggguugcuaca

SEQ ID NO: 178988 - RNA, 19 nt, Artificial Sequence
  Description of Artificial Sequence: Synthetic oligonucleotide
  Sense strand starting at position 3863 of SEQ ID NO: 2308
gagccuaagcuugagguua

SEQ ID NO: 178989 - RNA, 19 nt, Artificial Sequence
  Description of Artificial Sequence: Synthetic oligonucleotide
  Antisense strand to SEQ ID NO: 178988
uaaccucaagcuuaggcuc

SEQ ID NO: 178990 - RNA, 19 nt, Artificial Sequence
  Description of Artificial Sequence: Synthetic oligonucleotide
  Sense strand starting at position 3550 of SEQ ID NO: 2308
gccacaugugguuauuaga

SEQ ID NO: 178991 - RNA, 19 nt, Artificial Sequence
  Description of Artificial Sequence: Synthetic oligonucleotide
  Antisense strand to SEQ ID NO: 178990
ucuaauaaccacauguggc

SEQ ID NO: 178992 - RNA, 19 nt, Artificial Sequence
  Description of Artificial Sequence: Synthetic oligonucleotide
  Sense strand starting at position 3503 of SEQ ID NO: 2308
gguuuaguugaucauucuu

SEQ ID NO: 178993 - RNA, 19 nt, Artificial Sequence
  Description of Artificial Sequence: Synthetic oligonucleotide
  Antisense strand to SEQ ID NO: 178992
aagaaugaucaacuaaacc

SEQ ID NO: 178994 - RNA, 19 nt, Artificial Sequence
  Description of Artificial Sequence: Synthetic oligonucleotide
  Sense strand starting at position 3500 of SEQ ID NO: 2308
guagguuuaguugaucauu

SEQ ID NO: 178995 - RNA, 19 nt, Artificial Sequence
  Description of Artificial Sequence: Synthetic oligonucleotide
  Antisense strand to SEQ ID NO: 178994
aaugaucaacuaaaccuac

SEQ ID NO: 178996 - RNA, 19 nt, Artificial Sequence
  Description of Artificial Sequence: Synthetic oligonucleotide
  Sense strand starting at position 3491 of SEQ ID NO: 2308
uggagaucuguagguuuag

SEQ ID NO: 178997 - RNA, 19 nt, Artificial Sequence
  Description of Artificial Sequence: Synthetic oligonucleotide
  Antisense strand to SEQ ID NO: 178996
cuaaaccuacagaucucca

SEQ ID NO: 178998 - RNA, 19 nt, Artificial Sequence
  Description of Artificial Sequence: Synthetic oligonucleotide
  Sense strand starting at position 3489 of SEQ ID NO: 2308
uauggagaucuguagguuu

SEQ ID NO: 178999 - RNA, 19 nt, Artificial Sequence
  Description of Artificial Sequence: Synthetic oligonucleotide
  Antisense strand to SEQ ID NO: 178998
aaaccuacagaucuccaua

SEQ ID NO: 179000 - RNA, 19 nt, Artificial Sequence
  Description of Artificial Sequence: Synthetic oligonucleotide
  Sense strand starting at position 3338 of SEQ ID NO: 2308
aacuaagugguguacaaau

SEQ ID NO: 179001 - RNA, 19 nt, Artificial Sequence
  Description of Artificial Sequence: Synthetic oligonucleotide
  Antisense strand to SEQ ID NO: 179000
auuuguacaccacuuaguu

SEQ ID NO: 179002 - RNA, 19 nt, Artificial Sequence
  Description of Artificial Sequence: Synthetic oligonucleotide
  Sense strand starting at position 3266 of SEQ ID NO: 2308
gaggaucaggugugaaauc

SEQ ID NO: 179003 - RNA, 19 nt, Artificial Sequence
  Description of Artificial Sequence: Synthetic oligonucleotide
  Antisense strand to SEQ ID NO: 179002
gauuucacaccugauccuc

SEQ ID NO: 179004 - RNA, 19 nt, Artificial Sequence
  Description of Artificial Sequence: Synthetic oligonucleotide
  Sense strand starting at position 3246 of SEQ ID NO: 2308
cguauucacguguuuguaa

SEQ ID NO: 179005 - RNA, 19 nt, Artificial Sequence
  Description of Artificial Sequence: Synthetic oligonucleotide
  Antisense strand to SEQ ID NO: 179004
uuacaaacacgugaauacg

SEQ ID NO: 179006 - RNA, 19 nt, Artificial Sequence
  Description of Artificial Sequence: Synthetic oligonucleotide
  Sense strand starting at position 3245 of SEQ ID NO: 2308
gcguauucacguguuugua

SEQ ID NO: 179007 - RNA, 19 nt, Artificial Sequence
  Description of Artificial Sequence: Synthetic oligonucleotide
  Antisense strand to SEQ ID NO: 179006
uacaaacacgugaauacgc

SEQ ID NO: 179008 - RNA, 19 nt, Artificial Sequence
  Description of Artificial Sequence: Synthetic oligonucleotide
  Sense strand starting at position 3212 of SEQ ID NO: 2308
guucuuuccucauuuguaa

SEQ ID NO: 179009 - RNA, 19 nt, Artificial Sequence
  Description of Artificial Sequence: Synthetic oligonucleotide
  Antisense strand to SEQ ID NO: 179008
uuacaaaugaggaaagaac

SEQ ID NO: 179010 - RNA, 19 nt, Artificial Sequence
  Description of Artificial Sequence: Synthetic oligonucleotide
  Sense strand starting at position 3126 of SEQ ID NO: 2308
guaaauagauuugaccaga

SEQ ID NO: 179011 - RNA, 19 nt, Artificial Sequence
  Description of Artificial Sequence: Synthetic oligonucleotide
  Antisense strand to SEQ ID NO: 179010
ucuggucaaaucuauuuac

SEQ ID NO: 179012 - RNA, 19 nt, Artificial Sequence
  Description of Artificial Sequence: Synthetic oligonucleotide
  Sense strand starting at position 3100 of SEQ ID NO: 2308
gauuaaggaggugguauua

SEQ ID NO: 179013 - RNA, 19 nt, Artificial Sequence
  Description of Artificial Sequence: Synthetic oligonucleotide
  Antisense strand to SEQ ID NO: 179012
uaauaccaccuccuuaauc

SEQ ID NO: 179014 - RNA, 19 nt, Artificial Sequence
  Description of Artificial Sequence: Synthetic oligonucleotide
  Sense strand starting at position 3099 of SEQ ID NO: 2308
ugauuaaggaggugguauu

SEQ ID NO: 179015 - RNA, 19 nt, Artificial Sequence
  Description of Artificial Sequence: Synthetic oligonucleotide
  Antisense strand to SEQ ID NO: 179014
aauaccaccuccuuaauca

SEQ ID NO: 179016 - RNA, 19 nt, Artificial Sequence
  Description of Artificial Sequence: Synthetic oligonucleotide
  Sense strand starting at position 3097 of SEQ ID NO: 2308
uuugauuaaggagguggua

SEQ ID NO: 179017 - RNA, 19 nt, Artificial Sequence
  Description of Artificial Sequence: Synthetic oligonucleotide
  Antisense strand to SEQ ID NO: 179016
uaccaccuccuuaaucaaa

SEQ ID NO: 179018 - RNA, 19 nt, Artificial Sequence
  Description of Artificial Sequence: Synthetic oligonucleotide
  Sense strand starting at position 3090 of SEQ ID NO: 2308
gugcaacuuugauuaagga

SEQ ID NO: 179019 - RNA, 19 nt, Artificial Sequence
  Description of Artificial Sequence: Synthetic oligonucleotide
  Antisense strand to SEQ ID NO: 179018
uccuuaaucaaaguugcac

SEQ ID NO: 179020 - RNA, 19 nt, Artificial Sequence
  Description of Artificial Sequence: Synthetic oligonucleotide
  Sense strand starting at position 3071 of SEQ ID NO: 2308
agaccagucgcacagagaa

SEQ ID NO: 179021 - RNA, 19 nt, Artificial Sequence
  Description of Artificial Sequence: Synthetic oligonucleotide
  Antisense strand to SEQ ID NO: 179020
uucucugugcgacuggucu

SEQ ID NO: 179022 - RNA, 19 nt, Artificial Sequence
  Description of Artificial Sequence: Synthetic oligonucleotide
  Sense strand starting at position 3047 of SEQ ID NO: 2308
guuuacaaucacuggagga

SEQ ID NO: 179023 - RNA, 19 nt, Artificial Sequence
  Description of Artificial Sequence: Synthetic oligonucleotide
  Antisense strand to SEQ ID NO: 179022
uccuccagugauuguaaac

SEQ ID NO: 179024 - RNA, 19 nt, Artificial Sequence
  Description of Artificial Sequence: Synthetic oligonucleotide
  Sense strand starting at position 2667 of SEQ ID NO: 2308
ugaagauuauagcccuacu

SEQ ID NO: 179025 - RNA, 19 nt, Artificial Sequence
  Description of Artificial Sequence: Synthetic oligonucleotide
  Antisense strand to SEQ ID NO: 179024
aguagggcuauaaucuuca

SEQ ID NO: 179026 - RNA, 19 nt, Artificial Sequence
  Description of Artificial Sequence: Synthetic oligonucleotide
  Sense strand starting at position 2659 of SEQ ID NO: 2308
cggaaucgugaagauuaua

SEQ ID NO: 179027 - RNA, 19 nt, Artificial Sequence
  Description of Artificial Sequence: Synthetic oligonucleotide
  Antisense strand to SEQ ID NO: 179026
uauaaucuucacgauuccg

SEQ ID NO: 179028 - RNA, 19 nt, Artificial Sequence
  Description of Artificial Sequence: Synthetic oligonucleotide
  Sense strand starting at position 2139 of SEQ ID NO: 2308
uccgcagaaccggaagaau

SEQ ID NO: 179029 - RNA, 19 nt, Artificial Sequence
  Description of Artificial Sequence: Synthetic oligonucleotide
  Antisense strand to SEQ ID NO: 179028
auucuuccgguucugcgga

SEQ ID NO: 179030 - RNA, 19 nt, Artificial Sequence
  Description of Artificial Sequence: Synthetic oligonucleotide
  Sense strand starting at position 2098 of SEQ ID NO: 2308
gguuaauacccggaacuac

SEQ ID NO: 179031 - RNA, 19 nt, Artificial Sequence
  Description of Artificial Sequence: Synthetic oligonucleotide
  Antisense strand to SEQ ID NO: 179030
guaguuccggguauuaacc

SEQ ID NO: 179032 - RNA, 19 nt, Artificial Sequence
  Description of Artificial Sequence: Synthetic oligonucleotide
  Sense strand starting at position 2097 of SEQ ID NO: 2308
agguuaauacccggaacua

SEQ ID NO: 179033 - RNA, 19 nt, Artificial Sequence
  Description of Artificial Sequence: Synthetic oligonucleotide
  Antisense strand to SEQ ID NO: 179032
uaguuccggguauuaaccu

SEQ ID NO: 179034 - RNA, 19 nt, Artificial Sequence
  Description of Artificial Sequence: Synthetic oligonucleotide
  Sense strand starting at position 1700 of SEQ ID NO: 2308
gguuuauuaaagugaaagc

SEQ ID NO: 179035 - RNA, 19 nt, Artificial Sequence
  Description of Artificial Sequence: Synthetic oligonucleotide
  Antisense strand to SEQ ID NO: 179034
gcuuucacuuuaauaaacc

SEQ ID NO: 179036 - RNA, 19 nt, Artificial Sequence
  Description of Artificial Sequence: Synthetic oligonucleotide
  Sense strand starting at position 1579 of SEQ ID NO: 2308
augaguuaagaucgagaua

SEQ ID NO: 179037 - RNA, 19 nt, Artificial Sequence
  Description of Artificial Sequence: Synthetic oligonucleotide
  Antisense strand to SEQ ID NO: 179036
uaucucgaucuuaacucau

SEQ ID NO: 179038 - RNA, 19 nt, Artificial Sequence
  Description of Artificial Sequence: Synthetic oligonucleotide
  Sense strand starting at position 1571 of SEQ ID NO: 2308
gcauuaccaugaguuaaga

SEQ ID NO: 179039 - RNA, 19 nt, Artificial Sequence
  Description of Artificial Sequence: Synthetic oligonucleotide
  Antisense strand to SEQ ID NO: 179038
ucuuaacucaugguaaugc

SEQ ID NO: 179040 - RNA, 19 nt, Artificial Sequence
  Description of Artificial Sequence: Synthetic oligonucleotide
  Sense strand starting at position 1475 of SEQ ID NO: 2308
uagugaaaccuuugggacu

SEQ ID NO: 179041 - RNA, 19 nt, Artificial Sequence
  Description of Artificial Sequence: Synthetic oligonucleotide
  Antisense strand to SEQ ID NO: 179040
agucccaaagguuucacua

SEQ ID NO: 179042 - RNA, 19 nt, Artificial Sequence
  Description of Artificial Sequence: Synthetic oligonucleotide
  Sense strand starting at position 983 of SEQ ID NO: 2308
aaaggucaauucguauaua

SEQ ID NO: 179043 - RNA, 19 nt, Artificial Sequence
  Description of Artificial Sequence: Synthetic oligonucleotide
  Antisense strand to SEQ ID NO: 179042
uauauacgaauugaccuuu

SEQ ID NO: 179044 - RNA, 19 nt, Artificial Sequence
  Description of Artificial Sequence: Synthetic oligonucleotide
  Sense strand starting at position 821 of SEQ ID NO: 2308
aggacaugcucucuuccua

SEQ ID NO: 179045 - RNA, 19 nt, Artificial Sequence
  Description of Artificial Sequence: Synthetic oligonucleotide
  Antisense strand to SEQ ID NO: 179044
uaggaagagagcauguccu

SEQ ID NO: 179046 - RNA, 19 nt, Artificial Sequence
  Description of Artificial Sequence: Synthetic oligonucleotide
  Sense strand starting at position 801 of SEQ ID NO: 2308
uauaguucuguggaacuau

SEQ ID NO: 179047 - RNA, 19 nt, Artificial Sequence
  Description of Artificial Sequence: Synthetic oligonucleotide
  Antisense strand to SEQ ID NO: 179046
auaguuccacagaacuaua

SEQ ID NO: 179048 - RNA, 19 nt, Artificial Sequence
  Description of Artificial Sequence: Synthetic oligonucleotide
  Sense strand starting at position 694 of SEQ ID NO: 2308
acuggauauugucuagaag

SEQ ID NO: 179049 - RNA, 19 nt, Artificial Sequence
  Description of Artificial Sequence: Synthetic oligonucleotide
  Antisense strand to SEQ ID NO: 179048
cuucuagacaauauccagu

SEQ ID NO: 179050 - RNA, 19 nt, Artificial Sequence
  Description of Artificial Sequence: Synthetic oligonucleotide
  Sense strand starting at position 684 of SEQ ID NO: 2308
acugaucugcacuggauau

SEQ ID NO: 179051 - RNA, 19 nt, Artificial Sequence
  Description of Artificial Sequence: Synthetic oligonucleotide
  Antisense strand to SEQ ID NO: 179050
auauccagugcagaucagu

SEQ ID NO: 179052 - RNA, 19 nt, Artificial Sequence
  Description of Artificial Sequence: Synthetic oligonucleotide
  Sense strand starting at position 573 of SEQ ID NO: 2308
acaagaauguccuuguuuc

SEQ ID NO: 179053 - RNA, 19 nt, Artificial Sequence
  Description of Artificial Sequence: Synthetic oligonucleotide
  Antisense strand to SEQ ID NO: 179052
gaaacaaggacauucuugu

SEQ ID NO: 179054 - RNA, 19 nt, Artificial Sequence
  Description of Artificial Sequence: Synthetic oligonucleotide
  Sense strand starting at position 552 of SEQ ID NO: 2308
ucacgucucccauauucca

SEQ ID NO: 179055 - RNA, 19 nt, Artificial Sequence
  Description of Artificial Sequence: Synthetic oligonucleotide
  Antisense strand to SEQ ID NO: 179054
uggaauaugggagacguga

SEQ ID NO: 179056 - RNA, 19 nt, Artificial Sequence
  Description of Artificial Sequence: Synthetic oligonucleotide
  Sense strand starting at position 341 of SEQ ID NO: 2308
gucguuccucuauaggaau

SEQ ID NO: 179057 - RNA, 19 nt, Artificial Sequence
  Description of Artificial Sequence: Synthetic oligonucleotide
  Antisense strand to SEQ ID NO: 179056
auuccuauagaggaacgac

SEQ ID NO: 179058 - RNA, 19 nt, Artificial Sequence
  Description of Artificial Sequence: Synthetic oligonucleotide
  Sense strand starting at position 268 of SEQ ID NO: 2308
acgagauaguagucaauaa

SEQ ID NO: 179059 - RNA, 19 nt, Artificial Sequence
  Description of Artificial Sequence: Synthetic oligonucleotide
  Antisense strand to SEQ ID NO: 179058
uuauugacuacuaucucgu

SEQ ID NO: 179060 - RNA, 19 nt, Artificial Sequence
  Description of Artificial Sequence: Synthetic oligonucleotide
  Sense strand starting at position 141 of SEQ ID NO: 2308
ucgagaaccacuggguaaa

SEQ ID NO: 179061 - RNA, 19 nt, Artificial Sequence
  Description of Artificial Sequence: Synthetic oligonucleotide
  Antisense strand to SEQ ID NO: 179060
uuuacccagugguucucga

SEQ ID NO: 179062 - RNA, 19 nt, Artificial Sequence
  Description of Artificial Sequence: Synthetic oligonucleotide
  Sense strand starting at position 66 of SEQ ID NO: 2308
agugauacuccucaguuug

SEQ ID NO: 179063 - RNA, 19 nt, Artificial Sequence
  Description of Artificial Sequence: Synthetic oligonucleotide
  Antisense strand to SEQ ID NO: 179062
caaacugaggaguaucacu

SEQ ID NO: 179064 - RNA, 19 nt, Artificial Sequence
  Description of Artificial Sequence: Synthetic oligonucleotide
  Sense strand starting at position 56 of SEQ ID NO: 2308
auuagaugucagugauacu

SEQ ID NO: 179065 - RNA, 19 nt, Artificial Sequence
  Description of Artificial Sequence: Synthetic oligonucleotide
  Antisense strand to SEQ ID NO: 179064
aguaucacugacaucuaau

SEQ ID NO: 179066 - RNA, 19 nt, Artificial Sequence
  Description of Artificial Sequence: Synthetic oligonucleotide
  Sense strand starting at position 9 of SEQ ID NO: 2308
uguccugugauuuguagga

SEQ ID NO: 179067 - RNA, 19 nt, Artificial Sequence
  Description of Artificial Sequence: Synthetic oligonucleotide
  Antisense strand to SEQ ID NO: 179066
uccuacaaaucacaggaca

SEQ ID NO: 179068 - RNA, 19 nt, Artificial Sequence
  Description of Artificial Sequence: Synthetic oligonucleotide
  Sense strand starting at position 180 of SEQ ID NO: 2309
acaacuucgaagugaggua

SEQ ID NO: 179069 - RNA, 19 nt, Artificial Sequence
  Description of Artificial Sequence: Synthetic oligonucleotide
  Antisense strand to SEQ ID NO: 179068
uaccucacuucgaaguugu

SEQ ID NO: 179070 - RNA, 19 nt, Artificial Sequence
  Description of Artificial Sequence: Synthetic oligonucleotide
  Sense strand starting at position 269 of SEQ ID NO: 2309
agaaacaacuggccuuauu

SEQ ID NO: 179071 - RNA, 19 nt, Artificial Sequence
  Description of Artificial Sequence: Synthetic oligonucleotide
  Antisense strand to SEQ ID NO: 179070
aauaaggccaguuguuucu

SEQ ID NO: 179072 - RNA, 19 nt, Artificial Sequence
  Description of Artificial Sequence: Synthetic oligonucleotide
  Sense strand starting at position 525 of SEQ ID NO: 2309
gcacauaaaggucaacuua

SEQ ID NO: 179073 - RNA, 19 nt, Artificial Sequence
  Description of Artificial Sequence: Synthetic oligonucleotide
  Antisense strand to SEQ ID NO: 179072
uaaguugaccuuuaugugc

SEQ ID NO: 179074 - RNA, 19 nt, Artificial Sequence
  Description of Artificial Sequence: Synthetic oligonucleotide
  Sense strand starting at position 707 of SEQ ID NO: 2309
acaauaauaugggccauua

SEQ ID NO: 179075 - RNA, 19 nt, Artificial Sequence
  Description of Artificial Sequence: Synthetic oligonucleotide
  Antisense strand to SEQ ID NO: 179074
uaauggcccauauuauugu

SEQ ID NO: 179076 - RNA, 19 nt, Artificial Sequence
  Description of Artificial Sequence: Synthetic oligonucleotide
  Sense strand starting at position 718 of SEQ ID NO: 2309
ggccauuaauucucaacag

SEQ ID NO: 179077 - RNA, 19 nt, Artificial Sequence
  Description of Artificial Sequence: Synthetic oligonucleotide
  Antisense strand to SEQ ID NO: 179076
cuguugagaauuaauggcc

SEQ ID NO: 179078 - RNA, 19 nt, Artificial Sequence
  Description of Artificial Sequence: Synthetic oligonucleotide
  Sense strand starting at position 734 of SEQ ID NO: 2309
cagucuauuucugauggaa

SEQ ID NO: 179079 - RNA, 19 nt, Artificial Sequence
  Description of Artificial Sequence: Synthetic oligonucleotide
  Antisense strand to SEQ ID NO: 179078
uuccaucagaaauagacug

SEQ ID NO: 179080 - RNA, 19 nt, Artificial Sequence
  Description of Artificial Sequence: Synthetic oligonucleotide
  Sense strand starting at position 797 of SEQ ID NO: 2309
ccguaaauuuagucgacuc

SEQ ID NO: 179081 - RNA, 19 nt, Artificial Sequence
  Description of Artificial Sequence: Synthetic oligonucleotide
  Antisense strand to SEQ ID NO: 179080
gagucgacuaaauuuacgg

SEQ ID NO: 179082 - RNA, 19 nt, Artificial Sequence
  Description of Artificial Sequence: Synthetic oligonucleotide
  Sense strand starting at position 798 of SEQ ID NO: 2309
cguaaauuuagucgacucu

SEQ ID NO: 179083 - RNA, 19 nt, Artificial Sequence
  Description of Artificial Sequence: Synthetic oligonucleotide
  Antisense strand to SEQ ID NO: 179082
agagucgacuaaauuuacg

SEQ ID NO: 179084 - RNA, 19 nt, Artificial Sequence
  Description of Artificial Sequence: Synthetic oligonucleotide
  Sense strand starting at position 928 of SEQ ID NO: 2309
gcuaguugacaguaauggu

SEQ ID NO: 179085 - RNA, 19 nt, Artificial Sequence
  Description of Artificial Sequence: Synthetic oligonucleotide
  Antisense strand to SEQ ID NO: 179084
accauuacugucaacuagc

SEQ ID NO: 179086 - RNA, 19 nt, Artificial Sequence
  Description of Artificial Sequence: Synthetic oligonucleotide
  Sense strand starting at position 967 of SEQ ID NO: 2309
gaucuacuaccguaaacag

SEQ ID NO: 179087 - RNA, 19 nt, Artificial Sequence
  Description of Artificial Sequence: Synthetic oligonucleotide
  Antisense strand to SEQ ID NO: 179086
cuguuuacgguaguagauc

SEQ ID NO: 179088 - RNA, 19 nt, Artificial Sequence
  Description of Artificial Sequence: Synthetic oligonucleotide
  Sense strand starting at position 1019 of SEQ ID NO: 2309
cuuaguuaaccauggcaga

SEQ ID NO: 179089 - RNA, 19 nt, Artificial Sequence
  Description of Artificial Sequence: Synthetic oligonucleotide
  Antisense strand to SEQ ID NO: 179088
ucugccaugguuaacuaag

SEQ ID NO: 179090 - RNA, 19 nt, Artificial Sequence
  Description of Artificial Sequence: Synthetic oligonucleotide
  Sense strand starting at position 1055 of SEQ ID NO: 2309
accaaauuauguguaacuu

SEQ ID NO: 179091 - RNA, 19 nt, Artificial Sequence
  Description of Artificial Sequence: Synthetic oligonucleotide
  Antisense strand to SEQ ID NO: 179090
aaguuacacauaauuuggu

SEQ ID NO: 179092 - RNA, 19 nt, Artificial Sequence
  Description of Artificial Sequence: Synthetic oligonucleotide
  Sense strand starting at position 1056 of SEQ ID NO: 2309
ccaaauuauguguaacuuc

SEQ ID NO: 179093 - RNA, 19 nt, Artificial Sequence
  Description of Artificial Sequence: Synthetic oligonucleotide
  Antisense strand to SEQ ID NO: 179092
gaaguuacacauaauuugg

SEQ ID NO: 179094 - RNA, 19 nt, Artificial Sequence
  Description of Artificial Sequence: Synthetic oligonucleotide
  Sense strand starting at position 1200 of SEQ ID NO: 2309
ugccgucucccauucugua

SEQ ID NO: 179095 - RNA, 19 nt, Artificial Sequence
  Description of Artificial Sequence: Synthetic oligonucleotide
  Antisense strand to SEQ ID NO: 179094
uacagaaugggagacggca

SEQ ID NO: 179096 - RNA, 19 nt, Artificial Sequence
  Description of Artificial Sequence: Synthetic oligonucleotide
  Sense strand starting at position 1342 of SEQ ID NO: 2309
ucuucugcagcagaaagau

SEQ ID NO: 179097 - RNA, 19 nt, Artificial Sequence
  Description of Artificial Sequence: Synthetic oligonucleotide
  Antisense strand to SEQ ID NO: 179096
aucuuucugcugcagaaga

SEQ ID NO: 179098 - RNA, 19 nt, Artificial Sequence
  Description of Artificial Sequence: Synthetic oligonucleotide
  Sense strand starting at position 2508 of SEQ ID NO: 2309
uccagcugacuuggaauua

SEQ ID NO: 179099 - RNA, 19 nt, Artificial Sequence
  Description of Artificial Sequence: Synthetic oligonucleotide
  Antisense strand to SEQ ID NO: 179098
uaauuccaagucagcugga

SEQ ID NO: 179100 - RNA, 19 nt, Artificial Sequence
  Description of Artificial Sequence: Synthetic oligonucleotide
  Sense strand starting at position 2633 of SEQ ID NO: 2309
gcgguguggccaguggaua

SEQ ID NO: 179101 - RNA, 19 nt, Artificial Sequence
  Description of Artificial Sequence: Synthetic oligonucleotide
  Antisense strand to SEQ ID NO: 179100
uauccacuggccacaccgc

SEQ ID NO: 179102 - RNA, 19 nt, Artificial Sequence
  Description of Artificial Sequence: Synthetic oligonucleotide
  Sense strand starting at position 2638 of SEQ ID NO: 2309
guggccaguggauagaaau

SEQ ID NO: 179103 - RNA, 19 nt, Artificial Sequence
  Description of Artificial Sequence: Synthetic oligonucleotide
  Antisense strand to SEQ ID NO: 179102
auuucuauccacuggccac

SEQ ID NO: 179104 - RNA, 19 nt, Artificial Sequence
  Description of Artificial Sequence: Synthetic oligonucleotide
  Sense strand starting at position 2808 of SEQ ID NO: 2309
acucuuagugccuacuuga

SEQ ID NO: 179105 - RNA, 19 nt, Artificial Sequence
  Description of Artificial Sequence: Synthetic oligonucleotide
  Antisense strand to SEQ ID NO: 179104
ucaaguaggcacuaagagu

SEQ ID NO: 179106 - RNA, 19 nt, Artificial Sequence
  Description of Artificial Sequence: Synthetic oligonucleotide
  Sense strand starting at position 2865 of SEQ ID NO: 2309
cgauaaauccacugggaca

SEQ ID NO: 179107 - RNA, 19 nt, Artificial Sequence
  Description of Artificial Sequence: Synthetic oligonucleotide
  Antisense strand to SEQ ID NO: 179106
ugucccaguggauuuaucg

SEQ ID NO: 179108 - RNA, 19 nt, Artificial Sequence
  Description of Artificial Sequence: Synthetic oligonucleotide
  Sense strand starting at position 3025 of SEQ ID NO: 2309
guugauaaacgccaaucuu

SEQ ID NO: 179109 - RNA, 19 nt, Artificial Sequence
  Description of Artificial Sequence: Synthetic oligonucleotide
  Antisense strand to SEQ ID NO: 179108
aagauuggcguuuaucaac

SEQ ID NO: 179110 - RNA, 19 nt, Artificial Sequence
  Description of Artificial Sequence: Synthetic oligonucleotide
  Sense strand starting at position 3045 of SEQ ID NO: 2309
uuggucuauuuguuuccua

SEQ ID NO: 179111 - RNA, 19 nt, Artificial Sequence
  Description of Artificial Sequence: Synthetic oligonucleotide
  Antisense strand to SEQ ID NO: 179110
uaggaaacaaauagaccaa

SEQ ID NO: 179112 - RNA, 19 nt, Artificial Sequence
  Description of Artificial Sequence: Synthetic oligonucleotide
  Sense strand starting at position 3048 of SEQ ID NO: 2309
gucuauuuguuuccuacuu

SEQ ID NO: 179113 - RNA, 19 nt, Artificial Sequence
  Description of Artificial Sequence: Synthetic oligonucleotide
  Antisense strand to SEQ ID NO: 179112
aaguaggaaacaaauagac

SEQ ID NO: 179114 - RNA, 19 nt, Artificial Sequence
  Description of Artificial Sequence: Synthetic oligonucleotide
  Sense strand starting at position 3209 of SEQ ID NO: 2309
aacagauuaucccugugga

SEQ ID NO: 179115 - RNA, 19 nt, Artificial Sequence
  Description of Artificial Sequence: Synthetic oligonucleotide
  Antisense strand to SEQ ID NO: 179114
uccacagggauaaucuguu

SEQ ID NO: 179116 - RNA, 19 nt, Artificial Sequence
  Description of Artificial Sequence: Synthetic oligonucleotide
  Sense strand starting at position 3210 of SEQ ID NO: 2309
acagauuaucccuguggag

SEQ ID NO: 179117 - RNA, 19 nt, Artificial Sequence
  Description of Artificial Sequence: Synthetic oligonucleotide
  Antisense strand to SEQ ID NO: 179116
cuccacagggauaaucugu

SEQ ID NO: 179118 - RNA, 19 nt, Artificial Sequence
  Description of Artificial Sequence: Synthetic oligonucleotide
  Sense strand starting at position 3284 of SEQ ID NO: 2309
ucuaguauuccugaaugug

SEQ ID NO: 179119 - RNA, 19 nt, Artificial Sequence
  Description of Artificial Sequence: Synthetic oligonucleotide
  Antisense strand to SEQ ID NO: 179118
cacauucaggaauacuaga

SEQ ID NO: 179120 - RNA, 19 nt, Artificial Sequence
  Description of Artificial Sequence: Synthetic oligonucleotide
  Sense strand starting at position 3296 of SEQ ID NO: 2309
gaauguguaguugacucau

SEQ ID NO: 179121 - RNA, 19 nt, Artificial Sequence
  Description of Artificial Sequence: Synthetic oligonucleotide
  Antisense strand to SEQ ID NO: 179120
augagucaacuacacauuc

SEQ ID NO: 179122 - RNA, 19 nt, Artificial Sequence
  Description of Artificial Sequence: Synthetic oligonucleotide
  Sense strand starting at position 3305 of SEQ ID NO: 2309
guugacucauggcucaaca

SEQ ID NO: 179123 - RNA, 19 nt, Artificial Sequence
  Description of Artificial Sequence: Synthetic oligonucleotide
  Antisense strand to SEQ ID NO: 179122
uguugagccaugagucaac

SEQ ID NO: 179124 - RNA, 19 nt, Artificial Sequence
  Description of Artificial Sequence: Synthetic oligonucleotide
  Sense strand starting at position 3307 of SEQ ID NO: 2309
ugacucauggcucaacagu

SEQ ID NO: 179125 - RNA, 19 nt, Artificial Sequence
  Description of Artificial Sequence: Synthetic oligonucleotide
  Antisense strand to SEQ ID NO: 179124
acuguugagccaugaguca

SEQ ID NO: 179126 - RNA, 19 nt, Artificial Sequence
  Description of Artificial Sequence: Synthetic oligonucleotide
  Sense strand starting at position 3371 of SEQ ID NO: 2309
acuauaucugugcaucauc

SEQ ID NO: 179127 - RNA, 19 nt, Artificial Sequence
  Description of Artificial Sequence: Synthetic oligonucleotide
  Antisense strand to SEQ ID NO: 179126
gaugaugcacagauauagu

SEQ ID NO: 179128 - RNA, 19 nt, Artificial Sequence
  Description of Artificial Sequence: Synthetic oligonucleotide
  Sense strand starting at position 3610 of SEQ ID NO: 2309
ugaagaaggaaucgucaau

SEQ ID NO: 179129 - RNA, 19 nt, Artificial Sequence
  Description of Artificial Sequence: Synthetic oligonucleotide
  Antisense strand to SEQ ID NO: 179128
auugacgauuccuucuuca

SEQ ID NO: 179130 - RNA, 19 nt, Artificial Sequence
  Description of Artificial Sequence: Synthetic oligonucleotide
  Sense strand starting at position 3616 of SEQ ID NO: 2309
aggaaucgucaauguuuga

SEQ ID NO: 179131 - RNA, 19 nt, Artificial Sequence
  Description of Artificial Sequence: Synthetic oligonucleotide
  Antisense strand to SEQ ID NO: 179130
ucaaacauugacgauuccu

SEQ ID NO: 179132 - RNA, 19 nt, Artificial Sequence
  Description of Artificial Sequence: Synthetic oligonucleotide
  Sense strand starting at position 3619 of SEQ ID NO: 2309
aaucgucaauguuugaaga

SEQ ID NO: 179133 - RNA, 19 nt, Artificial Sequence
  Description of Artificial Sequence: Synthetic oligonucleotide
  Antisense strand to SEQ ID NO: 179132
ucuucaaacauugacgauu

SEQ ID NO: 179134 - RNA, 19 nt, Artificial Sequence
  Description of Artificial Sequence: Synthetic oligonucleotide
  Sense strand starting at position 3620 of SEQ ID NO: 2309
aucgucaauguuugaagaa

SEQ ID NO: 179135 - RNA, 19 nt, Artificial Sequence
  Description of Artificial Sequence: Synthetic oligonucleotide
  Antisense strand to SEQ ID NO: 179134
uucuucaaacauugacgau

SEQ ID NO: 179136 - RNA, 19 nt, Artificial Sequence
  Description of Artificial Sequence: Synthetic oligonucleotide
  Sense strand starting at position 3659 of SEQ ID NO: 2309
auugcuacugcauaaguua

SEQ ID NO: 179137 - RNA, 19 nt, Artificial Sequence
  Description of Artificial Sequence: Synthetic oligonucleotide
  Antisense strand to SEQ ID NO: 179136
uaacuuaugcaguagcaau

SEQ ID NO: 179138 - RNA, 19 nt, Artificial Sequence
  Description of Artificial Sequence: Synthetic oligonucleotide
  Sense strand starting at position 3748 of SEQ ID NO: 2309
agaaaugacuuucuggguu

SEQ ID NO: 179139 - RNA, 19 nt, Artificial Sequence
  Description of Artificial Sequence: Synthetic oligonucleotide
  Antisense strand to SEQ ID NO: 179138
aacccagaaagucauuucu

SEQ ID NO: 179140 - RNA, 19 nt, Artificial Sequence
  Description of Artificial Sequence: Synthetic oligonucleotide
  Sense strand starting at position 3751 of SEQ ID NO: 2309
aaugacuuucuggguugau

SEQ ID NO: 179141 - RNA, 19 nt, Artificial Sequence
  Description of Artificial Sequence: Synthetic oligonucleotide
  Antisense strand to SEQ ID NO: 179140
aucaacccagaaagucauu

SEQ ID NO: 179142 - RNA, 19 nt, Artificial Sequence
  Description of Artificial Sequence: Synthetic oligonucleotide
  Sense strand starting at position 3752 of SEQ ID NO: 2309
augacuuucuggguugauc

SEQ ID NO: 179143 - RNA, 19 nt, Artificial Sequence
  Description of Artificial Sequence: Synthetic oligonucleotide
  Antisense strand to SEQ ID NO: 179142
gaucaacccagaaagucau

SEQ ID NO: 179144 - RNA, 19 nt, Artificial Sequence
  Description of Artificial Sequence: Synthetic oligonucleotide
  Sense strand starting at position 3786 of SEQ ID NO: 2309
ugagguugcagugaagaua

SEQ ID NO: 179145 - RNA, 19 nt, Artificial Sequence
  Description of Artificial Sequence: Synthetic oligonucleotide
  Antisense strand to SEQ ID NO: 179144
uaucuucacugcaaccuca

SEQ ID NO: 179146 - RNA, 19 nt, Artificial Sequence
  Description of Artificial Sequence: Synthetic oligonucleotide
  Sense strand starting at position 3971 of SEQ ID NO: 2309
cucugacuuucccuagagu

SEQ ID NO: 179147 - RNA, 19 nt, Artificial Sequence
  Description of Artificial Sequence: Synthetic oligonucleotide
  Antisense strand to SEQ ID NO: 179146
acucuagggaaagucagag

SEQ ID NO: 179148 - RNA, 19 nt, Artificial Sequence
  Description of Artificial Sequence: Synthetic oligonucleotide
  Sense strand starting at position 294 of SEQ ID NO: 2310
acaacuucgaagugaggua

SEQ ID NO: 179149 - RNA, 19 nt, Artificial Sequence
  Description of Artificial Sequence: Synthetic oligonucleotide
  Antisense strand to SEQ ID NO: 179148
uaccucacuucgaaguugu

SEQ ID NO: 179150 - RNA, 19 nt, Artificial Sequence
  Description of Artificial Sequence: Synthetic oligonucleotide
  Sense strand starting at position 383 of SEQ ID NO: 2310
agaaacaacuggccuuauu

SEQ ID NO: 179151 - RNA, 19 nt, Artificial Sequence
  Description of Artificial Sequence: Synthetic oligonucleotide
  Antisense strand to SEQ ID NO: 179150
aauaaggccaguuguuucu

SEQ ID NO: 179152 - RNA, 19 nt, Artificial Sequence
  Description of Artificial Sequence: Synthetic oligonucleotide
  Sense strand starting at position 639 of SEQ ID NO: 2310
gcacauaaaggucaacuua

SEQ ID NO: 179153 - RNA, 19 nt, Artificial Sequence
  Description of Artificial Sequence: Synthetic oligonucleotide
  Antisense strand to SEQ ID NO: 179152
uaaguugaccuuuaugugc

SEQ ID NO: 179154 - RNA, 19 nt, Artificial Sequence
  Description of Artificial Sequence: Synthetic oligonucleotide
  Sense strand starting at position 821 of SEQ ID NO: 2310
acaauaauaugggccauua

SEQ ID NO: 179155 - RNA, 19 nt, Artificial Sequence
  Description of Artificial Sequence: Synthetic oligonucleotide
  Antisense strand to SEQ ID NO: 179154
uaauggcccauauuauugu

SEQ ID NO: 179156 - RNA, 19 nt, Artificial Sequence
  Description of Artificial Sequence: Synthetic oligonucleotide
  Sense strand starting at position 832 of SEQ ID NO: 2310
ggccauuaauucucaacag

SEQ ID NO: 179157 - RNA, 19 nt, Artificial Sequence
  Description of Artificial Sequence: Synthetic oligonucleotide
  Antisense strand to SEQ ID NO: 179156
cuguugagaauuaauggcc

SEQ ID NO: 179158 - RNA, 19 nt, Artificial Sequence
  Description of Artificial Sequence: Synthetic oligonucleotide
  Sense strand starting at position 848 of SEQ ID NO: 2310
cagucuauuucugauggaa

SEQ ID NO: 179159 - RNA, 19 nt, Artificial Sequence
  Description of Artificial Sequence: Synthetic oligonucleotide
  Antisense strand to SEQ ID NO: 179158
uuccaucagaaauagacug

SEQ ID NO: 179160 - RNA, 19 nt, Artificial Sequence
  Description of Artificial Sequence: Synthetic oligonucleotide
  Sense strand starting at position 911 of SEQ ID NO: 2310
ccguaaauuuagucgacuc

SEQ ID NO: 179161 - RNA, 19 nt, Artificial Sequence
  Description of Artificial Sequence: Synthetic oligonucleotide
  Antisense strand to SEQ ID NO: 179160
gagucgacuaaauuuacgg

SEQ ID NO: 179162 - RNA, 19 nt, Artificial Sequence
  Description of Artificial Sequence: Synthetic oligonucleotide
  Sense strand starting at position 912 of SEQ ID NO: 2310
cguaaauuuagucgacucu

SEQ ID NO: 179163 - RNA, 19 nt, Artificial Sequence
  Description of Artificial Sequence: Synthetic oligonucleotide
  Antisense strand to SEQ ID NO: 179162
agagucgacuaaauuuacg

SEQ ID NO: 179164 - RNA, 19 nt, Artificial Sequence
  Description of Artificial Sequence: Synthetic oligonucleotide
  Sense strand starting at position 1042 of SEQ ID NO: 2310
gcuaguugacaguaauggu

SEQ ID NO: 179165 - RNA, 19 nt, Artificial Sequence
  Description of Artificial Sequence: Synthetic oligonucleotide
  Antisense strand to SEQ ID NO: 179164
accauuacugucaacuagc

SEQ ID NO: 179166 - RNA, 19 nt, Artificial Sequence
  Description of Artificial Sequence: Synthetic oligonucleotide
  Sense strand starting at position 1081 of SEQ ID NO: 2310
gaucuacuaccguaaacag

SEQ ID NO: 179167 - RNA, 19 nt, Artificial Sequence
  Description of Artificial Sequence: Synthetic oligonucleotide
  Antisense strand to SEQ ID NO: 179166
cuguuuacgguaguagauc

SEQ ID NO: 179168 - RNA, 19 nt, Artificial Sequence
  Description of Artificial Sequence: Synthetic oligonucleotide
  Sense strand starting at position 1133 of SEQ ID NO: 2310
cuuaguuaaccauggcaga

SEQ ID NO: 179169 - RNA, 19 nt, Artificial Sequence
  Description of Artificial Sequence: Synthetic oligonucleotide
  Antisense strand to SEQ ID NO: 179168
ucugccaugguuaacuaag

SEQ ID NO: 179170 - RNA, 19 nt, Artificial Sequence
  Description of Artificial Sequence: Synthetic oligonucleotide
  Sense strand starting at position 1169 of SEQ ID NO: 2310
accaaauuauguguaacuu

SEQ ID NO: 179171 - RNA, 19 nt, Artificial Sequence
  Description of Artificial Sequence: Synthetic oligonucleotide
  Antisense strand to SEQ ID NO: 179170
aaguuacacauaauuuggu

SEQ ID NO: 179172 - RNA, 19 nt, Artificial Sequence
  Description of Artificial Sequence: Synthetic oligonucleotide
  Sense strand starting at position 1170 of SEQ ID NO: 2310
ccaaauuauguguaacuuc

SEQ ID NO: 179173 - RNA, 19 nt, Artificial Sequence
  Description of Artificial Sequence: Synthetic oligonucleotide
  Antisense strand to SEQ ID NO: 179172
gaaguuacacauaauuugg

SEQ ID NO: 179174 - RNA, 19 nt, Artificial Sequence
  Description of Artificial Sequence: Synthetic oligonucleotide
  Sense strand starting at position 1314 of SEQ ID NO: 2310
ugccgucucccauucugua

SEQ ID NO: 179175 - RNA, 19 nt, Artificial Sequence
  Description of Artificial Sequence: Synthetic oligonucleotide
  Antisense strand to SEQ ID NO: 179174
uacagaaugggagacggca

SEQ ID NO: 179176 - RNA, 19 nt, Artificial Sequence
  Description of Artificial Sequence: Synthetic oligonucleotide
  Sense strand starting at position 1456 of SEQ ID NO: 2310
ucuucugcagcagaaagau

SEQ ID NO: 179177 - RNA, 19 nt, Artificial Sequence
  Description of Artificial Sequence: Synthetic oligonucleotide
  Antisense strand to SEQ ID NO: 179176
aucuuucugcugcagaaga

SEQ ID NO: 179178 - RNA, 19 nt, Artificial Sequence
  Description of Artificial Sequence: Synthetic oligonucleotide
  Sense strand starting at position 2622 of SEQ ID NO: 2310
uccagcugacuuggaauua

SEQ ID NO: 179179 - RNA, 19 nt, Artificial Sequence
  Description of Artificial Sequence: Synthetic oligonucleotide
  Antisense strand to SEQ ID NO: 179178
uaauuccaagucagcugga

SEQ ID NO: 179180 - RNA, 19 nt, Artificial Sequence
  Description of Artificial Sequence: Synthetic oligonucleotide
  Sense strand starting at position 2634 of SEQ ID NO: 2310
ggaauuagggucuguucuu

SEQ ID NO: 179181 - RNA, 19 nt, Artificial Sequence
  Description of Artificial Sequence: Synthetic oligonucleotide
  Antisense strand to SEQ ID NO: 179180
aagaacagacccuaauucc

SEQ ID NO: 179182 - RNA, 19 nt, Artificial Sequence
  Description of Artificial Sequence: Synthetic oligonucleotide
  Sense strand starting at position 2747 of SEQ ID NO: 2310
gcgguguggccaguggaua

SEQ ID NO: 179183 - RNA, 19 nt, Artificial Sequence
  Description of Artificial Sequence: Synthetic oligonucleotide
  Antisense strand to SEQ ID NO: 179182
uauccacuggccacaccgc

SEQ ID NO: 179184 - RNA, 19 nt, Artificial Sequence
  Description of Artificial Sequence: Synthetic oligonucleotide
  Sense strand starting at position 2752 of SEQ ID NO: 2310
guggccaguggauagaaau

SEQ ID NO: 179185 - RNA, 19 nt, Artificial Sequence
  Description of Artificial Sequence: Synthetic oligonucleotide
  Antisense strand to SEQ ID NO: 179184
auuucuauccacuggccac

SEQ ID NO: 179186 - RNA, 19 nt, Artificial Sequence
  Description of Artificial Sequence: Synthetic oligonucleotide
  Sense strand starting at position 2922 of SEQ ID NO: 2310
acucuuagugccuacuuga

SEQ ID NO: 179187 - RNA, 19 nt, Artificial Sequence
  Description of Artificial Sequence: Synthetic oligonucleotide
  Antisense strand to SEQ ID NO: 179186
ucaaguaggcacuaagagu

SEQ ID NO: 179188 - RNA, 19 nt, Artificial Sequence
  Description of Artificial Sequence: Synthetic oligonucleotide
  Sense strand starting at position 2979 of SEQ ID NO: 2310
cgauaaauccacugggaca

SEQ ID NO: 179189 - RNA, 19 nt, Artificial Sequence
  Description of Artificial Sequence: Synthetic oligonucleotide
  Antisense strand to SEQ ID NO: 179188
ugucccaguggauuuaucg

SEQ ID NO: 179190 - RNA, 19 nt, Artificial Sequence
  Description of Artificial Sequence: Synthetic oligonucleotide
  Sense strand starting at position 3139 of SEQ ID NO: 2310
guugauaaacgccaaucuu

SEQ ID NO: 179191 - RNA, 19 nt, Artificial Sequence
  Description of Artificial Sequence: Synthetic oligonucleotide
  Antisense strand to SEQ ID NO: 179190
aagauuggcguuuaucaac

SEQ ID NO: 179192 - RNA, 19 nt, Artificial Sequence
  Description of Artificial Sequence: Synthetic oligonucleotide
  Sense strand starting at position 3159 of SEQ ID NO: 2310
uuggucuauuuguuuccua

SEQ ID NO: 179193 - RNA, 19 nt, Artificial Sequence
  Description of Artificial Sequence: Synthetic oligonucleotide
  Antisense strand to SEQ ID NO: 179192
uaggaaacaaauagaccaa

SEQ ID NO: 179194 - RNA, 19 nt, Artificial Sequence
  Description of Artificial Sequence: Synthetic oligonucleotide
  Sense strand starting at position 3162 of SEQ ID NO: 2310
gucuauuuguuuccuacuu

SEQ ID NO: 179195 - RNA, 19 nt, Artificial Sequence
  Description of Artificial Sequence: Synthetic oligonucleotide
  Antisense strand to SEQ ID NO: 179194
aaguaggaaacaaauagac

SEQ ID NO: 179196 - RNA, 19 nt, Artificial Sequence
  Description of Artificial Sequence: Synthetic oligonucleotide
  Sense strand starting at position 3323 of SEQ ID NO: 2310
aacagauuaucccugugga

SEQ ID NO: 179197 - RNA, 19 nt, Artificial Sequence
  Description of Artificial Sequence: Synthetic oligonucleotide
  Antisense strand to SEQ ID NO: 179196
uccacagggauaaucuguu

SEQ ID NO: 179198 - RNA, 19 nt, Artificial Sequence
  Description of Artificial Sequence: Synthetic oligonucleotide
  Sense strand starting at position 3324 of SEQ ID NO: 2310
acagauuaucccuguggag

SEQ ID NO: 179199 - RNA, 19 nt, Artificial Sequence
  Description of Artificial Sequence: Synthetic oligonucleotide
  Antisense strand to SEQ ID NO: 179198
cuccacagggauaaucugu

SEQ ID NO: 179200 - RNA, 19 nt, Artificial Sequence
  Description of Artificial Sequence: Synthetic oligonucleotide
  Sense strand starting at position 3398 of SEQ ID NO: 2310
ucuaguauuccugaaugug

SEQ ID NO: 179201 - RNA, 19 nt, Artificial Sequence
  Description of Artificial Sequence: Synthetic oligonucleotide
  Antisense strand to SEQ ID NO: 179200
cacauucaggaauacuaga

SEQ ID NO: 179202 - RNA, 19 nt, Artificial Sequence
  Description of Artificial Sequence: Synthetic oligonucleotide
  Sense strand starting at position 3410 of SEQ ID NO: 2310
gaauguguaguugacucau

SEQ ID NO: 179203 - RNA, 19 nt, Artificial Sequence
  Description of Artificial Sequence: Synthetic oligonucleotide
  Antisense strand to SEQ ID NO: 179202
augagucaacuacacauuc

SEQ ID NO: 179204 - RNA, 19 nt, Artificial Sequence
  Description of Artificial Sequence: Synthetic oligonucleotide
  Sense strand starting at position 3419 of SEQ ID NO: 2310
guugacucauggcucaaca

SEQ ID NO: 179205 - RNA, 19 nt, Artificial Sequence
  Description of Artificial Sequence: Synthetic oligonucleotide
  Antisense strand to SEQ ID NO: 179204
uguugagccaugagucaac

SEQ ID NO: 179206 - RNA, 19 nt, Artificial Sequence
  Description of Artificial Sequence: Synthetic oligonucleotide
  Sense strand starting at position 3421 of SEQ ID NO: 2310
ugacucauggcucaacagu

SEQ ID NO: 179207 - RNA, 19 nt, Artificial Sequence
  Description of Artificial Sequence: Synthetic oligonucleotide
  Antisense strand to SEQ ID NO: 179206
acuguugagccaugaguca

SEQ ID NO: 179208 - RNA, 19 nt, Artificial Sequence
  Description of Artificial Sequence: Synthetic oligonucleotide
  Sense strand starting at position 3485 of SEQ ID NO: 2310
acuauaucugugcaucauc

SEQ ID NO: 179209 - RNA, 19 nt, Artificial Sequence
  Description of Artificial Sequence: Synthetic oligonucleotide
  Antisense strand to SEQ ID NO: 179208
gaugaugcacagauauagu

SEQ ID NO: 179210 - RNA, 19 nt, Artificial Sequence
  Description of Artificial Sequence: Synthetic oligonucleotide
  Sense strand starting at position 3724 of SEQ ID NO: 2310
ugaagaaggaaucgucaau

SEQ ID NO: 179211 - RNA, 19 nt, Artificial Sequence
  Description of Artificial Sequence: Synthetic oligonucleotide
  Antisense strand to SEQ ID NO: 179210
auugacgauuccuucuuca

SEQ ID NO: 179212 - RNA, 19 nt, Artificial Sequence
  Description of Artificial Sequence: Synthetic oligonucleotide
  Sense strand starting at position 3730 of SEQ ID NO: 2310
aggaaucgucaauguuuga

SEQ ID NO: 179213 - RNA, 19 nt, Artificial Sequence
  Description of Artificial Sequence: Synthetic oligonucleotide
  Antisense strand to SEQ ID NO: 179212
ucaaacauugacgauuccu

SEQ ID NO: 179214 - RNA, 19 nt, Artificial Sequence
  Description of Artificial Sequence: Synthetic oligonucleotide
  Sense strand starting at position 3733 of SEQ ID NO: 2310
aaucgucaauguuugaaga

SEQ ID NO: 179215 - RNA, 19 nt, Artificial Sequence
  Description of Artificial Sequence: Synthetic oligonucleotide
  Antisense strand to SEQ ID NO: 179214
ucuucaaacauugacgauu

SEQ ID NO: 179216 - RNA, 19 nt, Artificial Sequence
  Description of Artificial Sequence: Synthetic oligonucleotide
  Sense strand starting at position 3734 of SEQ ID NO: 2310
aucgucaauguuugaagaa

SEQ ID NO: 179217 - RNA, 19 nt, Artificial Sequence
  Description of Artificial Sequence: Synthetic oligonucleotide
  Antisense strand to SEQ ID NO: 179216
uucuucaaacauugacgau

SEQ ID NO: 179218 - RNA, 19 nt, Artificial Sequence
  Description of Artificial Sequence: Synthetic oligonucleotide
  Sense strand starting at position 3773 of SEQ ID NO: 2310
auugcuacugcauaaguua

SEQ ID NO: 179219 - RNA, 19 nt, Artificial Sequence
  Description of Artificial Sequence: Synthetic oligonucleotide
  Antisense strand to SEQ ID NO: 179218
uaacuuaugcaguagcaau

SEQ ID NO: 179220 - RNA, 19 nt, Artificial Sequence
  Description of Artificial Sequence: Synthetic oligonucleotide
  Sense strand starting at position 3862 of SEQ ID NO: 2310
agaaaugacuuucuggguu

SEQ ID NO: 179221 - RNA, 19 nt, Artificial Sequence
  Description of Artificial Sequence: Synthetic oligonucleotide
  Antisense strand to SEQ ID NO: 179220
aacccagaaagucauuucu

SEQ ID NO: 179222 - RNA, 19 nt, Artificial Sequence
  Description of Artificial Sequence: Synthetic oligonucleotide
  Sense strand starting at position 3865 of SEQ ID NO: 2310
aaugacuuucuggguugau

SEQ ID NO: 179223 - RNA, 19 nt, Artificial Sequence
  Description of Artificial Sequence: Synthetic oligonucleotide
  Antisense strand to SEQ ID NO: 179222
aucaacccagaaagucauu

SEQ ID NO: 179224 - RNA, 19 nt, Artificial Sequence
  Description of Artificial Sequence: Synthetic oligonucleotide
  Sense strand starting at position 3866 of SEQ ID NO: 2310
augacuuucuggguugauc

SEQ ID NO: 179225 - RNA, 19 nt, Artificial Sequence
  Description of Artificial Sequence: Synthetic oligonucleotide
  Antisense strand to SEQ ID NO: 179224
gaucaacccagaaagucau

SEQ ID NO: 179226 - RNA, 19 nt, Artificial Sequence
  Description of Artificial Sequence: Synthetic oligonucleotide
  Sense strand starting at position 3900 of SEQ ID NO: 2310
ugagguugcagugaagaua

SEQ ID NO: 179227 - RNA, 19 nt, Artificial Sequence
  Description of Artificial Sequence: Synthetic oligonucleotide
  Antisense strand to SEQ ID NO: 179226
uaucuucacugcaaccuca

SEQ ID NO: 179228 - RNA, 19 nt, Artificial Sequence
  Description of Artificial Sequence: Synthetic oligonucleotide
  Sense strand starting at position 3912 of SEQ ID NO: 2311
acaaccuugguuggauaau

SEQ ID NO: 179229 - RNA, 19 nt, Artificial Sequence
  Description of Artificial Sequence: Synthetic oligonucleotide
  Antisense strand to SEQ ID NO: 179228
auuauccaaccaagguugu

SEQ ID NO: 179230 - RNA, 19 nt, Artificial Sequence
  Description of Artificial Sequence: Synthetic oligonucleotide
  Sense strand starting at position 3910 of SEQ ID NO: 2311
ccacaaccuugguuggaua

SEQ ID NO: 179231 - RNA, 19 nt, Artificial Sequence
  Description of Artificial Sequence: Synthetic oligonucleotide
  Antisense strand to SEQ ID NO: 179230
uauccaaccaagguugugg

SEQ ID NO: 179232 - RNA, 19 nt, Artificial Sequence
  Description of Artificial Sequence: Synthetic oligonucleotide
  Sense strand starting at position 3887 of SEQ ID NO: 2311
auuucuuccugagaugaga

SEQ ID NO: 179233 - RNA, 19 nt, Artificial Sequence
  Description of Artificial Sequence: Synthetic oligonucleotide
  Antisense strand to SEQ ID NO: 179232
ucucaucucaggaagaaau

SEQ ID NO: 179234 - RNA, 19 nt, Artificial Sequence
  Description of Artificial Sequence: Synthetic oligonucleotide
  Sense strand starting at position 3884 of SEQ ID NO: 2311
agcauuucuuccugagaug

SEQ ID NO: 179235 - RNA, 19 nt, Artificial Sequence
  Description of Artificial Sequence: Synthetic oligonucleotide
  Antisense strand to SEQ ID NO: 179234
caucucaggaagaaaugcu

SEQ ID NO: 179236 - RNA, 19 nt, Artificial Sequence
  Description of Artificial Sequence: Synthetic oligonucleotide
  Sense strand starting at position 3811 of SEQ ID NO: 2311
gccaaugauuaucuuuagu

SEQ ID NO: 179237 - RNA, 19 nt, Artificial Sequence
  Description of Artificial Sequence: Synthetic oligonucleotide
  Antisense strand to SEQ ID NO: 179236
acuaaagauaaucauuggc

SEQ ID NO: 179238 - RNA, 19 nt, Artificial Sequence
  Description of Artificial Sequence: Synthetic oligonucleotide
  Sense strand starting at position 3575 of SEQ ID NO: 2311
ggcucagaauagcuagaau

SEQ ID NO: 179239 - RNA, 19 nt, Artificial Sequence
  Description of Artificial Sequence: Synthetic oligonucleotide
  Antisense strand to SEQ ID NO: 179238
auucuagcuauucugagcc

SEQ ID NO: 179240 - RNA, 19 nt, Artificial Sequence
  Description of Artificial Sequence: Synthetic oligonucleotide
  Sense strand starting at position 3567 of SEQ ID NO: 2311
acaaucucggcucagaaua

SEQ ID NO: 179241 - RNA, 19 nt, Artificial Sequence
  Description of Artificial Sequence: Synthetic oligonucleotide
  Antisense strand to SEQ ID NO: 179240
uauucugagccgagauugu

SEQ ID NO: 179242 - RNA, 19 nt, Artificial Sequence
  Description of Artificial Sequence: Synthetic oligonucleotide
  Sense strand starting at position 3471 of SEQ ID NO: 2311
ggguaugaaggucagcaua

SEQ ID NO: 179243 - RNA, 19 nt, Artificial Sequence
  Description of Artificial Sequence: Synthetic oligonucleotide
  Antisense strand to SEQ ID NO: 179242
uaugcugaccuucauaccc

SEQ ID NO: 179244 - RNA, 19 nt, Artificial Sequence
  Description of Artificial Sequence: Synthetic oligonucleotide
  Sense strand starting at position 3410 of SEQ ID NO: 2311
cacggaaagugauaucaag

SEQ ID NO: 179245 - RNA, 19 nt, Artificial Sequence
  Description of Artificial Sequence: Synthetic oligonucleotide
  Antisense strand to SEQ ID NO: 179244
cuugauaucacuuuccgug

SEQ ID NO: 179246 - RNA, 19 nt, Artificial Sequence
  Description of Artificial Sequence: Synthetic oligonucleotide
  Sense strand starting at position 3355 of SEQ ID NO: 2311
cgagaauucccugacucuc

SEQ ID NO: 179247 - RNA, 19 nt, Artificial Sequence
  Description of Artificial Sequence: Synthetic oligonucleotide
  Antisense strand to SEQ ID NO: 179246
gagagucagggaauucucg

SEQ ID NO: 179248 - RNA, 19 nt, Artificial Sequence
  Description of Artificial Sequence: Synthetic oligonucleotide
  Sense strand starting at position 3354 of SEQ ID NO: 2311
gcgagaauucccugacucu

SEQ ID NO: 179249 - RNA, 19 nt, Artificial Sequence
  Description of Artificial Sequence: Synthetic oligonucleotide
  Antisense strand to SEQ ID NO: 179248
agagucagggaauucucgc

SEQ ID NO: 179250 - RNA, 19 nt, Artificial Sequence
  Description of Artificial Sequence: Synthetic oligonucleotide
  Sense strand starting at position 3352 of SEQ ID NO: 2311
gagcgagaauucccugacu

SEQ ID NO: 179251 - RNA, 19 nt, Artificial Sequence
  Description of Artificial Sequence: Synthetic oligonucleotide
  Antisense strand to SEQ ID NO: 179250
agucagggaauucucgcuc

SEQ ID NO: 179252 - RNA, 19 nt, Artificial Sequence
  Description of Artificial Sequence: Synthetic oligonucleotide
  Sense strand starting at position 3344 of SEQ ID NO: 2311
gcacaagagagcgagaauu

SEQ ID NO: 179253 - RNA, 19 nt, Artificial Sequence
  Description of Artificial Sequence: Synthetic oligonucleotide
  Antisense strand to SEQ ID NO: 179252
aauucucgcucucuugugc

SEQ ID NO: 179254 - RNA, 19 nt, Artificial Sequence
  Description of Artificial Sequence: Synthetic oligonucleotide
  Sense strand starting at position 3316 of SEQ ID NO: 2311
gagcuuaugccuggguaua

SEQ ID NO: 179255 - RNA, 19 nt, Artificial Sequence
  Description of Artificial Sequence: Synthetic oligonucleotide
  Antisense strand to SEQ ID NO: 179254
uauacccaggcauaagcuc

SEQ ID NO: 179256 - RNA, 19 nt, Artificial Sequence
  Description of Artificial Sequence: Synthetic oligonucleotide
  Sense strand starting at position 3315 of SEQ ID NO: 2311
ggagcuuaugccuggguau

SEQ ID NO: 179257 - RNA, 19 nt, Artificial Sequence
  Description of Artificial Sequence: Synthetic oligonucleotide
  Antisense strand to SEQ ID NO: 179256
auacccaggcauaagcucc

SEQ ID NO: 179258 - RNA, 19 nt, Artificial Sequence
  Description of Artificial Sequence: Synthetic oligonucleotide
  Sense strand starting at position 3141 of SEQ ID NO: 2311
uuaauauaugcucguugua

SEQ ID NO: 179259 - RNA, 19 nt, Artificial Sequence
  Description of Artificial Sequence: Synthetic oligonucleotide
  Antisense strand to SEQ ID NO: 179258
uacaacgagcauauauuaa

SEQ ID NO: 179260 - RNA, 19 nt, Artificial Sequence
  Description of Artificial Sequence: Synthetic oligonucleotide
  Sense strand starting at position 2748 of SEQ ID NO: 2311
ggguuaauuucugacuuua

SEQ ID NO: 179261 - RNA, 19 nt, Artificial Sequence
  Description of Artificial Sequence: Synthetic oligonucleotide
  Antisense strand to SEQ ID NO: 179260
uaaagucagaaauuaaccc

SEQ ID NO: 179262 - RNA, 19 nt, Artificial Sequence
  Description of Artificial Sequence: Synthetic oligonucleotide
  Sense strand starting at position 2747 of SEQ ID NO: 2311
uggguuaauuucugacuuu

SEQ ID NO: 179263 - RNA, 19 nt, Artificial Sequence
  Description of Artificial Sequence: Synthetic oligonucleotide
  Antisense strand to SEQ ID NO: 179262
aaagucagaaauuaaccca

SEQ ID NO: 179264 - RNA, 19 nt, Artificial Sequence
  Description of Artificial Sequence: Synthetic oligonucleotide
  Sense strand starting at position 2738 of SEQ ID NO: 2311
cucguuacuuggguuaauu

SEQ ID NO: 179265 - RNA, 19 nt, Artificial Sequence
  Description of Artificial Sequence: Synthetic oligonucleotide
  Antisense strand to SEQ ID NO: 179264
aauuaacccaaguaacgag

SEQ ID NO: 179266 - RNA, 19 nt, Artificial Sequence
  Description of Artificial Sequence: Synthetic oligonucleotide
  Sense strand starting at position 2301 of SEQ ID NO: 2311
uuaauauaugcucguuagg

SEQ ID NO: 179267 - RNA, 19 nt, Artificial Sequence
  Description of Artificial Sequence: Synthetic oligonucleotide
  Antisense strand to SEQ ID NO: 179266
ccuaacgagcauauauuaa

SEQ ID NO: 179268 - RNA, 19 nt, Artificial Sequence
  Description of Artificial Sequence: Synthetic oligonucleotide
  Sense strand starting at position 2238 of SEQ ID NO: 2311
acacucgucugacuuuaua

SEQ ID NO: 179269 - RNA, 19 nt, Artificial Sequence
  Description of Artificial Sequence: Synthetic oligonucleotide
  Antisense strand to SEQ ID NO: 179268
uauaaagucagacgagugu

SEQ ID NO: 179270 - RNA, 19 nt, Artificial Sequence
  Description of Artificial Sequence: Synthetic oligonucleotide
  Sense strand starting at position 2187 of SEQ ID NO: 2311
ggguuuauuucugacuuua

SEQ ID NO: 179271 - RNA, 19 nt, Artificial Sequence
  Description of Artificial Sequence: Synthetic oligonucleotide
  Antisense strand to SEQ ID NO: 179270
uaaagucagaaauaaaccc

SEQ ID NO: 179272 - RNA, 19 nt, Artificial Sequence
  Description of Artificial Sequence: Synthetic oligonucleotide
  Sense strand starting at position 2177 of SEQ ID NO: 2311
uggguuacuuggguuuauu

SEQ ID NO: 179273 - RNA, 19 nt, Artificial Sequence
  Description of Artificial Sequence: Synthetic oligonucleotide
  Antisense strand to SEQ ID NO: 179272
aauaaacccaaguaaccca

SEQ ID NO: 179274 - RNA, 19 nt, Artificial Sequence
  Description of Artificial Sequence: Synthetic oligonucleotide
  Sense strand starting at position 1834 of SEQ ID NO: 2311
cgagaugcuuccuugucuu

SEQ ID NO: 179275 - RNA, 19 nt, Artificial Sequence
  Description of Artificial Sequence: Synthetic oligonucleotide
  Antisense strand to SEQ ID NO: 179274
aagacaaggaagcaucucg

SEQ ID NO: 179276 - RNA, 19 nt, Artificial Sequence
  Description of Artificial Sequence: Synthetic oligonucleotide
  Sense strand starting at position 1825 of SEQ ID NO: 2311
ucgcgaaaccgagaugcuu

SEQ ID NO: 179277 - RNA, 19 nt, Artificial Sequence
  Description of Artificial Sequence: Synthetic oligonucleotide
  Antisense strand to SEQ ID NO: 179276
aagcaucucgguuucgcga

SEQ ID NO: 179278 - RNA, 19 nt, Artificial Sequence
  Description of Artificial Sequence: Synthetic oligonucleotide
  Sense strand starting at position 1238 of SEQ ID NO: 2311
gcugcaacgagauguauua

SEQ ID NO: 179279 - RNA, 19 nt, Artificial Sequence
  Description of Artificial Sequence: Synthetic oligonucleotide
  Antisense strand to SEQ ID NO: 179278
uaauacaucucguugcagc

SEQ ID NO: 179280 - RNA, 19 nt, Artificial Sequence
  Description of Artificial Sequence: Synthetic oligonucleotide
  Sense strand starting at position 1214 of SEQ ID NO: 2311
auguuuacauucucguaca

SEQ ID NO: 179281 - RNA, 19 nt, Artificial Sequence
  Description of Artificial Sequence: Synthetic oligonucleotide
  Antisense strand to SEQ ID NO: 179280
uguacgagaauguaaacau

SEQ ID NO: 179282 - RNA, 19 nt, Artificial Sequence
  Description of Artificial Sequence: Synthetic oligonucleotide
  Sense strand starting at position 1206 of SEQ ID NO: 2311
ugacuacgauguuuacauu

SEQ ID NO: 179283 - RNA, 19 nt, Artificial Sequence
  Description of Artificial Sequence: Synthetic oligonucleotide
  Antisense strand to SEQ ID NO: 179282
aauguaaacaucguaguca

SEQ ID NO: 179284 - RNA, 19 nt, Artificial Sequence
  Description of Artificial Sequence: Synthetic oligonucleotide
  Sense strand starting at position 657 of SEQ ID NO: 2311
accauaacucuaggaggua

SEQ ID NO: 179285 - RNA, 19 nt, Artificial Sequence
  Description of Artificial Sequence: Synthetic oligonucleotide
  Antisense strand to SEQ ID NO: 179284
uaccuccuagaguuauggu

SEQ ID NO: 179286 - RNA, 19 nt, Artificial Sequence
  Description of Artificial Sequence: Synthetic oligonucleotide
  Sense strand starting at position 621 of SEQ ID NO: 2311
ccuaaugaugaaugugaau

SEQ ID NO: 179287 - RNA, 19 nt, Artificial Sequence
  Description of Artificial Sequence: Synthetic oligonucleotide
  Antisense strand to SEQ ID NO: 179286
auucacauucaucauuagg

SEQ ID NO: 179288 - RNA, 19 nt, Artificial Sequence
  Description of Artificial Sequence: Synthetic oligonucleotide
  Sense strand starting at position 609 of SEQ ID NO: 2311
gccauacacuguccuaaug

SEQ ID NO: 179289 - RNA, 19 nt, Artificial Sequence
  Description of Artificial Sequence: Synthetic oligonucleotide
  Antisense strand to SEQ ID NO: 179288
cauuaggacaguguauggc

SEQ ID NO: 179290 - RNA, 19 nt, Artificial Sequence
  Description of Artificial Sequence: Synthetic oligonucleotide
  Sense strand starting at position 594 of SEQ ID NO: 2311
gagcauaugcuauaugcca

SEQ ID NO: 179291 - RNA, 19 nt, Artificial Sequence
  Description of Artificial Sequence: Synthetic oligonucleotide
  Antisense strand to SEQ ID NO: 179290
uggcauauagcauaugcuc

SEQ ID NO: 179292 - RNA, 19 nt, Artificial Sequence
  Description of Artificial Sequence: Synthetic oligonucleotide
  Sense strand starting at position 580 of SEQ ID NO: 2311
ugacuauacuuacugagca

SEQ ID NO: 179293 - RNA, 19 nt, Artificial Sequence
  Description of Artificial Sequence: Synthetic oligonucleotide
  Antisense strand to SEQ ID NO: 179292
ugcucaguaaguauaguca

SEQ ID NO: 179294 - RNA, 19 nt, Artificial Sequence
  Description of Artificial Sequence: Synthetic oligonucleotide
  Sense strand starting at position 572 of SEQ ID NO: 2311
ucguaaucugacuauacuu

SEQ ID NO: 179295 - RNA, 19 nt, Artificial Sequence
  Description of Artificial Sequence: Synthetic oligonucleotide
  Antisense strand to SEQ ID NO: 179294
aaguauagucagauuacga

SEQ ID NO: 179296 - RNA, 19 nt, Artificial Sequence
  Description of Artificial Sequence: Synthetic oligonucleotide
  Sense strand starting at position 571 of SEQ ID NO: 2311
aucguaaucugacuauacu

SEQ ID NO: 179297 - RNA, 19 nt, Artificial Sequence
  Description of Artificial Sequence: Synthetic oligonucleotide
  Antisense strand to SEQ ID NO: 179296
aguauagucagauuacgau

SEQ ID NO: 179298 - RNA, 19 nt, Artificial Sequence
  Description of Artificial Sequence: Synthetic oligonucleotide
  Sense strand starting at position 566 of SEQ ID NO: 2311
agcagaucguaaucugacu

SEQ ID NO: 179299 - RNA, 19 nt, Artificial Sequence
  Description of Artificial Sequence: Synthetic oligonucleotide
  Antisense strand to SEQ ID NO: 179298
agucagauuacgaucugcu

SEQ ID NO: 179300 - RNA, 19 nt, Artificial Sequence
  Description of Artificial Sequence: Synthetic oligonucleotide
  Sense strand starting at position 555 of SEQ ID NO: 2311
gcuuauuacucagcagauc

SEQ ID NO: 179301 - RNA, 19 nt, Artificial Sequence
  Description of Artificial Sequence: Synthetic oligonucleotide
  Antisense strand to SEQ ID NO: 179300
gaucugcugaguaauaagc

SEQ ID NO: 179302 - RNA, 19 nt, Artificial Sequence
  Description of Artificial Sequence: Synthetic oligonucleotide
  Sense strand starting at position 455 of SEQ ID NO: 2311
ggcuauuuauuguaacucu

SEQ ID NO: 179303 - RNA, 19 nt, Artificial Sequence
  Description of Artificial Sequence: Synthetic oligonucleotide
  Antisense strand to SEQ ID NO: 179302
agaguuacaauaaauagcc

SEQ ID NO: 179304 - RNA, 19 nt, Artificial Sequence
  Description of Artificial Sequence: Synthetic oligonucleotide
  Sense strand starting at position 113 of SEQ ID NO: 2311
ucaggauagacucgaauuc

SEQ ID NO: 179305 - RNA, 19 nt, Artificial Sequence
  Description of Artificial Sequence: Synthetic oligonucleotide
  Antisense strand to SEQ ID NO: 179304
gaauucgagucuauccuga

SEQ ID NO: 179306 - RNA, 19 nt, Artificial Sequence
  Description of Artificial Sequence: Synthetic oligonucleotide
  Sense strand starting at position 73 of SEQ ID NO: 2311
uuaaaugaauggcauaaga

SEQ ID NO: 179307 - RNA, 19 nt, Artificial Sequence
  Description of Artificial Sequence: Synthetic oligonucleotide
  Antisense strand to SEQ ID NO: 179306
ucuuaugccauucauuuaa

SEQ ID NO: 179308 - RNA, 19 nt, Artificial Sequence
  Description of Artificial Sequence: Synthetic oligonucleotide
  Sense strand starting at position 3977 of SEQ ID NO: 2312
ggugucuuagagugaguga

SEQ ID NO: 179309 - RNA, 19 nt, Artificial Sequence
  Description of Artificial Sequence: Synthetic oligonucleotide
  Antisense strand to SEQ ID NO: 179308
ucacucacucuaagacacc

SEQ ID NO: 179310 - RNA, 19 nt, Artificial Sequence
  Description of Artificial Sequence: Synthetic oligonucleotide
  Sense strand starting at position 3908 of SEQ ID NO: 2312
gcaugaugugcaggaugau

SEQ ID NO: 179311 - RNA, 19 nt, Artificial Sequence
  Description of Artificial Sequence: Synthetic oligonucleotide
  Antisense strand to SEQ ID NO: 179310
aucauccugcacaucaugc

SEQ ID NO: 179312 - RNA, 19 nt, Artificial Sequence
  Description of Artificial Sequence: Synthetic oligonucleotide
  Sense strand starting at position 3855 of SEQ ID NO: 2312
agguauggccagugugacu

SEQ ID NO: 179313 - RNA, 19 nt, Artificial Sequence
  Description of Artificial Sequence: Synthetic oligonucleotide
  Antisense strand to SEQ ID NO: 179312
agucacacuggccauaccu

SEQ ID NO: 179314 - RNA, 19 nt, Artificial Sequence
  Description of Artificial Sequence: Synthetic oligonucleotide
  Sense strand starting at position 3608 of SEQ ID NO: 2312
cucaucuggcccugacaaa

SEQ ID NO: 179315 - RNA, 19 nt, Artificial Sequence
  Description of Artificial Sequence: Synthetic oligonucleotide
  Antisense strand to SEQ ID NO: 179314
uuugucagggccagaugag

SEQ ID NO: 179316 - RNA, 19 nt, Artificial Sequence
  Description of Artificial Sequence: Synthetic oligonucleotide
  Sense strand starting at position 3589 of SEQ ID NO: 2312
gggacuuuaucugacacuu

SEQ ID NO: 179317 - RNA, 19 nt, Artificial Sequence
  Description of Artificial Sequence: Synthetic oligonucleotide
  Antisense strand to SEQ ID NO: 179316
aagugucagauaaaguccc

SEQ ID NO: 179318 - RNA, 19 nt, Artificial Sequence
  Description of Artificial Sequence: Synthetic oligonucleotide
  Sense strand starting at position 3579 of SEQ ID NO: 2312
uucuuuaugugggacuuua

SEQ ID NO: 179319 - RNA, 19 nt, Artificial Sequence
  Description of Artificial Sequence: Synthetic oligonucleotide
  Antisense strand to SEQ ID NO: 179318
uaaagucccacauaaagaa

SEQ ID NO: 179320 - RNA, 19 nt, Artificial Sequence
  Description of Artificial Sequence: Synthetic oligonucleotide
  Sense strand starting at position 3578 of SEQ ID NO: 2312
guucuuuaugugggacuuu

SEQ ID NO: 179321 - RNA, 19 nt, Artificial Sequence
  Description of Artificial Sequence: Synthetic oligonucleotide
  Antisense strand to SEQ ID NO: 179320
aaagucccacauaaagaac

SEQ ID NO: 179322 - RNA, 19 nt, Artificial Sequence
  Description of Artificial Sequence: Synthetic oligonucleotide
  Sense strand starting at position 3571 of SEQ ID NO: 2312
gagggacguucuuuaugug

SEQ ID NO: 179323 - RNA, 19 nt, Artificial Sequence
  Description of Artificial Sequence: Synthetic oligonucleotide
  Antisense strand to SEQ ID NO: 179322
cacauaaagaacgucccuc

SEQ ID NO: 179324 - RNA, 19 nt, Artificial Sequence
  Description of Artificial Sequence: Synthetic oligonucleotide
  Sense strand starting at position 3542 of SEQ ID NO: 2312
ucagauaccugggucuagu

SEQ ID NO: 179325 - RNA, 19 nt, Artificial Sequence
  Description of Artificial Sequence: Synthetic oligonucleotide
  Antisense strand to SEQ ID NO: 179324
acuagacccagguaucuga

SEQ ID NO: 179326 - RNA, 19 nt, Artificial Sequence
  Description of Artificial Sequence: Synthetic oligonucleotide
  Sense strand starting at position 3451 of SEQ ID NO: 2312
cccaaugucuuauugacga

SEQ ID NO: 179327 - RNA, 19 nt, Artificial Sequence
  Description of Artificial Sequence: Synthetic oligonucleotide
  Antisense strand to SEQ ID NO: 179326
ucgucaauaagacauuggg

SEQ ID NO: 179328 - RNA, 19 nt, Artificial Sequence
  Description of Artificial Sequence: Synthetic oligonucleotide
  Sense strand starting at position 3444 of SEQ ID NO: 2312
ugcuuugcccaaugucuua

SEQ ID NO: 179329 - RNA, 19 nt, Artificial Sequence
  Description of Artificial Sequence: Synthetic oligonucleotide
  Antisense strand to SEQ ID NO: 179328
uaagacauugggcaaagca

SEQ ID NO: 179330 - RNA, 19 nt, Artificial Sequence
  Description of Artificial Sequence: Synthetic oligonucleotide
  Sense strand starting at position 3437 of SEQ ID NO: 2312
gcaguagugcuuugcccaa

SEQ ID NO: 179331 - RNA, 19 nt, Artificial Sequence
  Description of Artificial Sequence: Synthetic oligonucleotide
  Antisense strand to SEQ ID NO: 179330
uugggcaaagcacuacugc

SEQ ID NO: 179332 - RNA, 19 nt, Artificial Sequence
  Description of Artificial Sequence: Synthetic oligonucleotide
  Sense strand starting at position 3436 of SEQ ID NO: 2312
ggcaguagugcuuugccca

SEQ ID NO: 179333 - RNA, 19 nt, Artificial Sequence
  Description of Artificial Sequence: Synthetic oligonucleotide
  Antisense strand to SEQ ID NO: 179332
ugggcaaagcacuacugcc

SEQ ID NO: 179334 - RNA, 19 nt, Artificial Sequence
  Description of Artificial Sequence: Synthetic oligonucleotide
  Sense strand starting at position 2590 of SEQ ID NO: 2312
gcuuuauucgcagaacaaa

SEQ ID NO: 179335 - RNA, 19 nt, Artificial Sequence
  Description of Artificial Sequence: Synthetic oligonucleotide
  Antisense strand to SEQ ID NO: 179334
uuuguucugcgaauaaagc

SEQ ID NO: 179336 - RNA, 19 nt, Artificial Sequence
  Description of Artificial Sequence: Synthetic oligonucleotide
  Sense strand starting at position 2587 of SEQ ID NO: 2312
agcgcuuuauucgcagaac

SEQ ID NO: 179337 - RNA, 19 nt, Artificial Sequence
  Description of Artificial Sequence: Synthetic oligonucleotide
  Antisense strand to SEQ ID NO: 179336
guucugcgaauaaagcgcu

SEQ ID NO: 179338 - RNA, 19 nt, Artificial Sequence
  Description of Artificial Sequence: Synthetic oligonucleotide
  Sense strand starting at position 2586 of SEQ ID NO: 2312
gagcgcuuuauucgcagaa

SEQ ID NO: 179339 - RNA, 19 nt, Artificial Sequence
  Description of Artificial Sequence: Synthetic oligonucleotide
  Antisense strand to SEQ ID NO: 179338
uucugcgaauaaagcgcuc

SEQ ID NO: 179340 - RNA, 19 nt, Artificial Sequence
  Description of Artificial Sequence: Synthetic oligonucleotide
  Sense strand starting at position 2566 of SEQ ID NO: 2312
gacugauuccacgauaggu

SEQ ID NO: 179341 - RNA, 19 nt, Artificial Sequence
  Description of Artificial Sequence: Synthetic oligonucleotide
  Antisense strand to SEQ ID NO: 179340
accuaucguggaaucaguc

SEQ ID NO: 179342 - RNA, 19 nt, Artificial Sequence
  Description of Artificial Sequence: Synthetic oligonucleotide
  Sense strand starting at position 2563 of SEQ ID NO: 2312
cuggacugauuccacgaua

SEQ ID NO: 179343 - RNA, 19 nt, Artificial Sequence
  Description of Artificial Sequence: Synthetic oligonucleotide
  Antisense strand to SEQ ID NO: 179342
uaucguggaaucaguccag

SEQ ID NO: 179344 - RNA, 19 nt, Artificial Sequence
  Description of Artificial Sequence: Synthetic oligonucleotide
  Sense strand starting at position 2452 of SEQ ID NO: 2312
cggucucuccugggccaua

SEQ ID NO: 179345 - RNA, 19 nt, Artificial Sequence
  Description of Artificial Sequence: Synthetic oligonucleotide
  Antisense strand to SEQ ID NO: 179344
uauggcccaggagagaccg

SEQ ID NO: 179346 - RNA, 19 nt, Artificial Sequence
  Description of Artificial Sequence: Synthetic oligonucleotide
  Sense strand starting at position 2288 of SEQ ID NO: 2312
gguagcugguguuuagaaa

SEQ ID NO: 179347 - RNA, 19 nt, Artificial Sequence
  Description of Artificial Sequence: Synthetic oligonucleotide
  Antisense strand to SEQ ID NO: 179346
uuucuaaacaccagcuacc

SEQ ID NO: 179348 - RNA, 19 nt, Artificial Sequence
  Description of Artificial Sequence: Synthetic oligonucleotide
  Sense strand starting at position 895 of SEQ ID NO: 2312
guccaacucuuauaaugga

SEQ ID NO: 179349 - RNA, 19 nt, Artificial Sequence
  Description of Artificial Sequence: Synthetic oligonucleotide
  Antisense strand to SEQ ID NO: 179348
uccauuauaagaguuggac

SEQ ID NO: 179350 - RNA, 19 nt, Artificial Sequence
  Description of Artificial Sequence: Synthetic oligonucleotide
  Sense strand starting at position 833 of SEQ ID NO: 2312
gcagguuccaagugguaaa

SEQ ID NO: 179351 - RNA, 19 nt, Artificial Sequence
  Description of Artificial Sequence: Synthetic oligonucleotide
  Antisense strand to SEQ ID NO: 179350
uuuaccacuuggaaccugc

SEQ ID NO: 179352 - RNA, 19 nt, Artificial Sequence
  Description of Artificial Sequence: Synthetic oligonucleotide
  Sense strand starting at position 693 of SEQ ID NO: 2312
auuauucuguccucccgaa

SEQ ID NO: 179353 - RNA, 19 nt, Artificial Sequence
  Description of Artificial Sequence: Synthetic oligonucleotide
  Antisense strand to SEQ ID NO: 179352
uucgggaggacagaauaau

SEQ ID NO: 179354 - RNA, 19 nt, Artificial Sequence
  Description of Artificial Sequence: Synthetic oligonucleotide
  Sense strand starting at position 590 of SEQ ID NO: 2312
ccuaaaccucucugggauu

SEQ ID NO: 179355 - RNA, 19 nt, Artificial Sequence
  Description of Artificial Sequence: Synthetic oligonucleotide
  Antisense strand to SEQ ID NO: 179354
aaucccagagagguuuagg

SEQ ID NO: 179356 - RNA, 19 nt, Artificial Sequence
  Description of Artificial Sequence: Synthetic oligonucleotide
  Sense strand starting at position 589 of SEQ ID NO: 2312
uccuaaaccucucugggau

SEQ ID NO: 179357 - RNA, 19 nt, Artificial Sequence
  Description of Artificial Sequence: Synthetic oligonucleotide
  Antisense strand to SEQ ID NO: 179356
aucccagagagguuuagga

SEQ ID NO: 179358 - RNA, 19 nt, Artificial Sequence
  Description of Artificial Sequence: Synthetic oligonucleotide
  Sense strand starting at position 565 of SEQ ID NO: 2312
gggccuaaguaugaagaga

SEQ ID NO: 179359 - RNA, 19 nt, Artificial Sequence
  Description of Artificial Sequence: Synthetic oligonucleotide
  Antisense strand to SEQ ID NO: 179358
ucucuucauacuuaggccc

SEQ ID NO: 179360 - RNA, 19 nt, Artificial Sequence
  Description of Artificial Sequence: Synthetic oligonucleotide
  Sense strand starting at position 544 of SEQ ID NO: 2312
agcugucuccuagaagaag

SEQ ID NO: 179361 - RNA, 19 nt, Artificial Sequence
  Description of Artificial Sequence: Synthetic oligonucleotide
  Antisense strand to SEQ ID NO: 179360
cuucuucuaggagacagcu

SEQ ID NO: 179362 - RNA, 19 nt, Artificial Sequence
  Description of Artificial Sequence: Synthetic oligonucleotide
  Sense strand starting at position 542 of SEQ ID NO: 2312
aaagcugucuccuagaaga

SEQ ID NO: 179363 - RNA, 19 nt, Artificial Sequence
  Description of Artificial Sequence: Synthetic oligonucleotide
  Antisense strand to SEQ ID NO: 179362
ucuucuaggagacagcuuu

SEQ ID NO: 179364 - RNA, 19 nt, Artificial Sequence
  Description of Artificial Sequence: Synthetic oligonucleotide
  Sense strand starting at position 482 of SEQ ID NO: 2312
uccuguccugguuauguga

SEQ ID NO: 179365 - RNA, 19 nt, Artificial Sequence
  Description of Artificial Sequence: Synthetic oligonucleotide
  Antisense strand to SEQ ID NO: 179364
ucacauaaccaggacagga

SEQ ID NO: 179366 - RNA, 19 nt, Artificial Sequence
  Description of Artificial Sequence: Synthetic oligonucleotide
  Sense strand starting at position 439 of SEQ ID NO: 2312
gguucugcuauguaaggau

SEQ ID NO: 179367 - RNA, 19 nt, Artificial Sequence
  Description of Artificial Sequence: Synthetic oligonucleotide
  Antisense strand to SEQ ID NO: 179366
auccuuacauagcagaacc

SEQ ID NO: 179368 - RNA, 19 nt, Artificial Sequence
  Description of Artificial Sequence: Synthetic oligonucleotide
  Sense strand starting at position 438 of SEQ ID NO: 2312
agguucugcuauguaagga

SEQ ID NO: 179369 - RNA, 19 nt, Artificial Sequence
  Description of Artificial Sequence: Synthetic oligonucleotide
  Antisense strand to SEQ ID NO: 179368
uccuuacauagcagaaccu

SEQ ID NO: 179370 - RNA, 19 nt, Artificial Sequence
  Description of Artificial Sequence: Synthetic oligonucleotide
  Sense strand starting at position 425 of SEQ ID NO: 2312
gaguuaagccucuagguuc

SEQ ID NO: 179371 - RNA, 19 nt, Artificial Sequence
  Description of Artificial Sequence: Synthetic oligonucleotide
  Antisense strand to SEQ ID NO: 179370
gaaccuagaggcuuaacuc

SEQ ID NO: 179372 - RNA, 19 nt, Artificial Sequence
  Description of Artificial Sequence: Synthetic oligonucleotide
  Sense strand starting at position 413 of SEQ ID NO: 2312
guaacagguugggaguuaa

SEQ ID NO: 179373 - RNA, 19 nt, Artificial Sequence
  Description of Artificial Sequence: Synthetic oligonucleotide
  Antisense strand to SEQ ID NO: 179372
uuaacucccaaccuguuac

SEQ ID NO: 179374 - RNA, 19 nt, Artificial Sequence
  Description of Artificial Sequence: Synthetic oligonucleotide
  Sense strand starting at position 191 of SEQ ID NO: 2312
gagugaaauuaacucagcu

SEQ ID NO: 179375 - RNA, 19 nt, Artificial Sequence
  Description of Artificial Sequence: Synthetic oligonucleotide
  Antisense strand to SEQ ID NO: 179374
agcugaguuaauuucacuc

SEQ ID NO: 179376 - RNA, 19 nt, Artificial Sequence
  Description of Artificial Sequence: Synthetic oligonucleotide
  Sense strand starting at position 179 of SEQ ID NO: 2312
acugauaagugagagugaa

SEQ ID NO: 179377 - RNA, 19 nt, Artificial Sequence
  Description of Artificial Sequence: Synthetic oligonucleotide
  Antisense strand to SEQ ID NO: 179376
uucacucucacuuaucagu

SEQ ID NO: 179378 - RNA, 19 nt, Artificial Sequence
  Description of Artificial Sequence: Synthetic oligonucleotide
  Sense strand starting at position 176 of SEQ ID NO: 2312
cagacugauaagugagagu

SEQ ID NO: 179379 - RNA, 19 nt, Artificial Sequence
  Description of Artificial Sequence: Synthetic oligonucleotide
  Antisense strand to SEQ ID NO: 179378
acucucacuuaucagucug

SEQ ID NO: 179380 - RNA, 19 nt, Artificial Sequence
  Description of Artificial Sequence: Synthetic oligonucleotide
  Sense strand starting at position 126 of SEQ ID NO: 2312
cuggguuaacgucaccaca

SEQ ID NO: 179381 - RNA, 19 nt, Artificial Sequence
  Description of Artificial Sequence: Synthetic oligonucleotide
  Antisense strand to SEQ ID NO: 179380
uguggugacguuaacccag

SEQ ID NO: 179382 - RNA, 19 nt, Artificial Sequence
  Description of Artificial Sequence: Synthetic oligonucleotide
  Sense strand starting at position 116 of SEQ ID NO: 2312
gaccucugcccuggguuaa

SEQ ID NO: 179383 - RNA, 19 nt, Artificial Sequence
  Description of Artificial Sequence: Synthetic oligonucleotide
  Antisense strand to SEQ ID NO: 179382
uuaacccagggcagagguc

SEQ ID NO: 179384 - RNA, 19 nt, Artificial Sequence
  Description of Artificial Sequence: Synthetic oligonucleotide
  Sense strand starting at position 115 of SEQ ID NO: 2312
ggaccucugcccuggguua

SEQ ID NO: 179385 - RNA, 19 nt, Artificial Sequence
  Description of Artificial Sequence: Synthetic oligonucleotide
  Antisense strand to SEQ ID NO: 179384
uaacccagggcagaggucc

SEQ ID NO: 179386 - RNA, 19 nt, Artificial Sequence
  Description of Artificial Sequence: Synthetic oligonucleotide
  Sense strand starting at position 93 of SEQ ID NO: 2312
augauuuagugaggaagaa

SEQ ID NO: 179387 - RNA, 19 nt, Artificial Sequence
  Description of Artificial Sequence: Synthetic oligonucleotide
  Antisense strand to SEQ ID NO: 179386
uucuuccucacuaaaucau

SEQ ID NO: 179388 - RNA, 19 nt, Artificial Sequence
  Description of Artificial Sequence: Synthetic oligonucleotide
  Sense strand starting at position 3963 of SEQ ID NO: 2314
ugcuguuucgaauaauuga

SEQ ID NO: 179389 - RNA, 19 nt, Artificial Sequence
  Description of Artificial Sequence: Synthetic oligonucleotide
  Antisense strand to SEQ ID NO: 179388
ucaauuauucgaaacagca

SEQ ID NO: 179390 - RNA, 19 nt, Artificial Sequence
  Description of Artificial Sequence: Synthetic oligonucleotide
  Sense strand starting at position 3614 of SEQ ID NO: 2314
gugguaaggauugggaaau

SEQ ID NO: 179391 - RNA, 19 nt, Artificial Sequence
  Description of Artificial Sequence: Synthetic oligonucleotide
  Antisense strand to SEQ ID NO: 179390
auuucccaauccuuaccac

SEQ ID NO: 179392 - RNA, 19 nt, Artificial Sequence
  Description of Artificial Sequence: Synthetic oligonucleotide
  Sense strand starting at position 3514 of SEQ ID NO: 2314
caauuaaacguugauguag

SEQ ID NO: 179393 - RNA, 19 nt, Artificial Sequence
  Description of Artificial Sequence: Synthetic oligonucleotide
  Antisense strand to SEQ ID NO: 179392
cuacaucaacguuuaauug

SEQ ID NO: 179394 - RNA, 19 nt, Artificial Sequence
  Description of Artificial Sequence: Synthetic oligonucleotide
  Sense strand starting at position 3513 of SEQ ID NO: 2314
acaauuaaacguugaugua

SEQ ID NO: 179395 - RNA, 19 nt, Artificial Sequence
  Description of Artificial Sequence: Synthetic oligonucleotide
  Antisense strand to SEQ ID NO: 179394
uacaucaacguuuaauugu

SEQ ID NO: 179396 - RNA, 19 nt, Artificial Sequence
  Description of Artificial Sequence: Synthetic oligonucleotide
  Sense strand starting at position 3477 of SEQ ID NO: 2314
uugacucuacgauguuaaa

SEQ ID NO: 179397 - RNA, 19 nt, Artificial Sequence
  Description of Artificial Sequence: Synthetic oligonucleotide
  Antisense strand to SEQ ID NO: 179396
uuuaacaucguagagucaa

SEQ ID NO: 179398 - RNA, 19 nt, Artificial Sequence
  Description of Artificial Sequence: Synthetic oligonucleotide
  Sense strand starting at position 3472 of SEQ ID NO: 2314
uguuauugacucuacgaug

SEQ ID NO: 179399 - RNA, 19 nt, Artificial Sequence
  Description of Artificial Sequence: Synthetic oligonucleotide
  Antisense strand to SEQ ID NO: 179398
caucguagagucaauaaca

SEQ ID NO: 179400 - RNA, 19 nt, Artificial Sequence
  Description of Artificial Sequence: Synthetic oligonucleotide
  Sense strand starting at position 3429 of SEQ ID NO: 2314
uuagucucuucuuuggaca

SEQ ID NO: 179401 - RNA, 19 nt, Artificial Sequence
  Description of Artificial Sequence: Synthetic oligonucleotide
  Antisense strand to SEQ ID NO: 179400
uguccaaagaagagacuaa

SEQ ID NO: 179402 - RNA, 19 nt, Artificial Sequence
  Description of Artificial Sequence: Synthetic oligonucleotide
  Sense strand starting at position 3330 of SEQ ID NO: 2314
acaugcuuuccucacaguu

SEQ ID NO: 179403 - RNA, 19 nt, Artificial Sequence
  Description of Artificial Sequence: Synthetic oligonucleotide
  Antisense strand to SEQ ID NO: 179402
aacugugaggaaagcaugu

SEQ ID NO: 179404 - RNA, 19 nt, Artificial Sequence
  Description of Artificial Sequence: Synthetic oligonucleotide
  Sense strand starting at position 3307 of SEQ ID NO: 2314
gcuaguguucuagacuaga

SEQ ID NO: 179405 - RNA, 19 nt, Artificial Sequence
  Description of Artificial Sequence: Synthetic oligonucleotide
  Antisense strand to SEQ ID NO: 179404
ucuagucuagaacacuagc

SEQ ID NO: 179406 - RNA, 19 nt, Artificial Sequence
  Description of Artificial Sequence: Synthetic oligonucleotide
  Sense strand starting at position 2998 of SEQ ID NO: 2314
gcacguauugcccuuugca

SEQ ID NO: 179407 - RNA, 19 nt, Artificial Sequence
  Description of Artificial Sequence: Synthetic oligonucleotide
  Antisense strand to SEQ ID NO: 179406
ugcaaagggcaauacgugc

SEQ ID NO: 179408 - RNA, 19 nt, Artificial Sequence
  Description of Artificial Sequence: Synthetic oligonucleotide
  Sense strand starting at position 2865 of SEQ ID NO: 2314
gcguuuccacaguaauuug

SEQ ID NO: 179409 - RNA, 19 nt, Artificial Sequence
  Description of Artificial Sequence: Synthetic oligonucleotide
  Antisense strand to SEQ ID NO: 179408
caaauuacuguggaaacgc

SEQ ID NO: 179410 - RNA, 19 nt, Artificial Sequence
  Description of Artificial Sequence: Synthetic oligonucleotide
  Sense strand starting at position 2822 of SEQ ID NO: 2314
gggaaauguagauguucug

SEQ ID NO: 179411 - RNA, 19 nt, Artificial Sequence
  Description of Artificial Sequence: Synthetic oligonucleotide
  Antisense strand to SEQ ID NO: 179410
cagaacaucuacauuuccc

SEQ ID NO: 179412 - RNA, 19 nt, Artificial Sequence
  Description of Artificial Sequence: Synthetic oligonucleotide
  Sense strand starting at position 2668 of SEQ ID NO: 2314
caccgagcucauuaaagga

SEQ ID NO: 179413 - RNA, 19 nt, Artificial Sequence
  Description of Artificial Sequence: Synthetic oligonucleotide
  Antisense strand to SEQ ID NO: 179412
uccuuuaaugagcucggug

SEQ ID NO: 179414 - RNA, 19 nt, Artificial Sequence
  Description of Artificial Sequence: Synthetic oligonucleotide
  Sense strand starting at position 2525 of SEQ ID NO: 2314
gcggguuugcugagaucug

SEQ ID NO: 179415 - RNA, 19 nt, Artificial Sequence
  Description of Artificial Sequence: Synthetic oligonucleotide
  Antisense strand to SEQ ID NO: 179414
cagaucucagcaaacccgc

SEQ ID NO: 179416 - RNA, 19 nt, Artificial Sequence
  Description of Artificial Sequence: Synthetic oligonucleotide
  Sense strand starting at position 2025 of SEQ ID NO: 2314
gaggacuggucagaauuug

SEQ ID NO: 179417 - RNA, 19 nt, Artificial Sequence
  Description of Artificial Sequence: Synthetic oligonucleotide
  Antisense strand to SEQ ID NO: 179416
caaauucugaccaguccuc

SEQ ID NO: 179418 - RNA, 19 nt, Artificial Sequence
  Description of Artificial Sequence: Synthetic oligonucleotide
  Sense strand starting at position 1521 of SEQ ID NO: 2314
gguuuaacucaucauccag

SEQ ID NO: 179419 - RNA, 19 nt, Artificial Sequence
  Description of Artificial Sequence: Synthetic oligonucleotide
  Antisense strand to SEQ ID NO: 179418
cuggaugaugaguuaaacc

SEQ ID NO: 179420 - RNA, 19 nt, Artificial Sequence
  Description of Artificial Sequence: Synthetic oligonucleotide
  Sense strand starting at position 1489 of SEQ ID NO: 2314
agggcaauuuaguaaauau

SEQ ID NO: 179421 - RNA, 19 nt, Artificial Sequence
  Description of Artificial Sequence: Synthetic oligonucleotide
  Antisense strand to SEQ ID NO: 179420
auauuuacuaaauugcccu

SEQ ID NO: 179422 - RNA, 19 nt, Artificial Sequence
  Description of Artificial Sequence: Synthetic oligonucleotide
  Sense strand starting at position 1468 of SEQ ID NO: 2314
ucuauaagagccugcugaa

SEQ ID NO: 179423 - RNA, 19 nt, Artificial Sequence
  Description of Artificial Sequence: Synthetic oligonucleotide
  Antisense strand to SEQ ID NO: 179422
uucagcaggcucuuauaga

SEQ ID NO: 179424 - RNA, 19 nt, Artificial Sequence
  Description of Artificial Sequence: Synthetic oligonucleotide
  Sense strand starting at position 1373 of SEQ ID NO: 2314
aaggucuuucuuggaauau

SEQ ID NO: 179425 - RNA, 19 nt, Artificial Sequence
  Description of Artificial Sequence: Synthetic oligonucleotide
  Antisense strand to SEQ ID NO: 179424
auauuccaagaaagaccuu

SEQ ID NO: 179426 - RNA, 19 nt, Artificial Sequence
  Description of Artificial Sequence: Synthetic oligonucleotide
  Sense strand starting at position 1307 of SEQ ID NO: 2314
ucaccuauuugagaaggaa

SEQ ID NO: 179427 - RNA, 19 nt, Artificial Sequence
  Description of Artificial Sequence: Synthetic oligonucleotide
  Antisense strand to SEQ ID NO: 179426
uuccuucucaaauagguga

SEQ ID NO: 179428 - RNA, 19 nt, Artificial Sequence
  Description of Artificial Sequence: Synthetic oligonucleotide
  Sense strand starting at position 1099 of SEQ ID NO: 2314
aguuuccggagauaaacuu

SEQ ID NO: 179429 - RNA, 19 nt, Artificial Sequence
  Description of Artificial Sequence: Synthetic oligonucleotide
  Antisense strand to SEQ ID NO: 179428
aaguuuaucuccggaaacu

SEQ ID NO: 179430 - RNA, 19 nt, Artificial Sequence
  Description of Artificial Sequence: Synthetic oligonucleotide
  Sense strand starting at position 1063 of SEQ ID NO: 2314
uguacagaauccuccuagu

SEQ ID NO: 179431 - RNA, 19 nt, Artificial Sequence
  Description of Artificial Sequence: Synthetic oligonucleotide
  Antisense strand to SEQ ID NO: 179430
acuaggaggauucuguaca

SEQ ID NO: 179432 - RNA, 19 nt, Artificial Sequence
  Description of Artificial Sequence: Synthetic oligonucleotide
  Sense strand starting at position 881 of SEQ ID NO: 2314
uaauuaaguuggguaucaa

SEQ ID NO: 179433 - RNA, 19 nt, Artificial Sequence
  Description of Artificial Sequence: Synthetic oligonucleotide
  Antisense strand to SEQ ID NO: 179432
uugauacccaacuuaauua

SEQ ID NO: 179434 - RNA, 19 nt, Artificial Sequence
  Description of Artificial Sequence: Synthetic oligonucleotide
  Sense strand starting at position 878 of SEQ ID NO: 2314
uguuaauuaaguuggguau

SEQ ID NO: 179435 - RNA, 19 nt, Artificial Sequence
  Description of Artificial Sequence: Synthetic oligonucleotide
  Antisense strand to SEQ ID NO: 179434
auacccaacuuaauuaaca

SEQ ID NO: 179436 - RNA, 19 nt, Artificial Sequence
  Description of Artificial Sequence: Synthetic oligonucleotide
  Sense strand starting at position 872 of SEQ ID NO: 2314
guaccauguuaauuaaguu

SEQ ID NO: 179437 - RNA, 19 nt, Artificial Sequence
  Description of Artificial Sequence: Synthetic oligonucleotide
  Antisense strand to SEQ ID NO: 179436
aacuuaauuaacaugguac

SEQ ID NO: 179438 - RNA, 19 nt, Artificial Sequence
  Description of Artificial Sequence: Synthetic oligonucleotide
  Sense strand starting at position 702 of SEQ ID NO: 2314
ggaacuaguaguugccaga

SEQ ID NO: 179439 - RNA, 19 nt, Artificial Sequence
  Description of Artificial Sequence: Synthetic oligonucleotide
  Antisense strand to SEQ ID NO: 179438
ucuggcaacuacuaguucc

SEQ ID NO: 179440 - RNA, 19 nt, Artificial Sequence
  Description of Artificial Sequence: Synthetic oligonucleotide
  Sense strand starting at position 695 of SEQ ID NO: 2314
gugguauggaacuaguagu

SEQ ID NO: 179441 - RNA, 19 nt, Artificial Sequence
  Description of Artificial Sequence: Synthetic oligonucleotide
  Antisense strand to SEQ ID NO: 179440
acuacuaguuccauaccac

SEQ ID NO: 179442 - RNA, 19 nt, Artificial Sequence
  Description of Artificial Sequence: Synthetic oligonucleotide
  Sense strand starting at position 597 of SEQ ID NO: 2314
uccacugaucaaugugaug

SEQ ID NO: 179443 - RNA, 19 nt, Artificial Sequence
  Description of Artificial Sequence: Synthetic oligonucleotide
  Antisense strand to SEQ ID NO: 179442
caucacauugaucagugga

SEQ ID NO: 179444 - RNA, 19 nt, Artificial Sequence
  Description of Artificial Sequence: Synthetic oligonucleotide
  Sense strand starting at position 593 of SEQ ID NO: 2314
ugaauccacugaucaaugu

SEQ ID NO: 179445 - RNA, 19 nt, Artificial Sequence
  Description of Artificial Sequence: Synthetic oligonucleotide
  Antisense strand to SEQ ID NO: 179444
acauugaucaguggauuca

SEQ ID NO: 179446 - RNA, 19 nt, Artificial Sequence
  Description of Artificial Sequence: Synthetic oligonucleotide
  Sense strand starting at position 569 of SEQ ID NO: 2314
uuguuuacccaugauacag

SEQ ID NO: 179447 - RNA, 19 nt, Artificial Sequence
  Description of Artificial Sequence: Synthetic oligonucleotide
  Antisense strand to SEQ ID NO: 179446
cuguaucauggguaaacaa

SEQ ID NO: 179448 - RNA, 19 nt, Artificial Sequence
  Description of Artificial Sequence: Synthetic oligonucleotide
  Sense strand starting at position 568 of SEQ ID NO: 2314
uuuguuuacccaugauaca

SEQ ID NO: 179449 - RNA, 19 nt, Artificial Sequence
  Description of Artificial Sequence: Synthetic oligonucleotide
  Antisense strand to SEQ ID NO: 179448
uguaucauggguaaacaaa

SEQ ID NO: 179450 - RNA, 19 nt, Artificial Sequence
  Description of Artificial Sequence: Synthetic oligonucleotide
  Sense strand starting at position 565 of SEQ ID NO: 2314
agguuuguuuacccaugau

SEQ ID NO: 179451 - RNA, 19 nt, Artificial Sequence
  Description of Artificial Sequence: Synthetic oligonucleotide
  Antisense strand to SEQ ID NO: 179450
aucauggguaaacaaaccu

SEQ ID NO: 179452 - RNA, 19 nt, Artificial Sequence
  Description of Artificial Sequence: Synthetic oligonucleotide
  Sense strand starting at position 564 of SEQ ID NO: 2314
gagguuuguuuacccauga

SEQ ID NO: 179453 - RNA, 19 nt, Artificial Sequence
  Description of Artificial Sequence: Synthetic oligonucleotide
  Antisense strand to SEQ ID NO: 179452
ucauggguaaacaaaccuc

SEQ ID NO: 179454 - RNA, 19 nt, Artificial Sequence
  Description of Artificial Sequence: Synthetic oligonucleotide
  Sense strand starting at position 558 of SEQ ID NO: 2314
augauagagguuuguuuac

SEQ ID NO: 179455 - RNA, 19 nt, Artificial Sequence
  Description of Artificial Sequence: Synthetic oligonucleotide
  Antisense strand to SEQ ID NO: 179454
guaaacaaaccucuaucau

SEQ ID NO: 179456 - RNA, 19 nt, Artificial Sequence
  Description of Artificial Sequence: Synthetic oligonucleotide
  Sense strand starting at position 515 of SEQ ID NO: 2314
gugcaugacaaauguaaag

SEQ ID NO: 179457 - RNA, 19 nt, Artificial Sequence
  Description of Artificial Sequence: Synthetic oligonucleotide
  Antisense strand to SEQ ID NO: 179456
cuuuacauuugucaugcac

SEQ ID NO: 179458 - RNA, 19 nt, Artificial Sequence
  Description of Artificial Sequence: Synthetic oligonucleotide
  Sense strand starting at position 504 of SEQ ID NO: 2314
uaucuaugagagugcauga

SEQ ID NO: 179459 - RNA, 19 nt, Artificial Sequence
  Description of Artificial Sequence: Synthetic oligonucleotide
  Antisense strand to SEQ ID NO: 179458
ucaugcacucucauagaua

SEQ ID NO: 179460 - RNA, 19 nt, Artificial Sequence
  Description of Artificial Sequence: Synthetic oligonucleotide
  Sense strand starting at position 498 of SEQ ID NO: 2314
cugacauaucuaugagagu

SEQ ID NO: 179461 - RNA, 19 nt, Artificial Sequence
  Description of Artificial Sequence: Synthetic oligonucleotide
  Antisense strand to SEQ ID NO: 179460
acucucauagauaugucag

SEQ ID NO: 179462 - RNA, 19 nt, Artificial Sequence
  Description of Artificial Sequence: Synthetic oligonucleotide
  Sense strand starting at position 347 of SEQ ID NO: 2314
auguguuauuuccaaggaa

SEQ ID NO: 179463 - RNA, 19 nt, Artificial Sequence
  Description of Artificial Sequence: Synthetic oligonucleotide
  Antisense strand to SEQ ID NO: 179462
uuccuuggaaauaacacau

SEQ ID NO: 179464 - RNA, 19 nt, Artificial Sequence
  Description of Artificial Sequence: Synthetic oligonucleotide
  Sense strand starting at position 186 of SEQ ID NO: 2314
uauuaaauugguuguggau

SEQ ID NO: 179465 - RNA, 19 nt, Artificial Sequence
  Description of Artificial Sequence: Synthetic oligonucleotide
  Antisense strand to SEQ ID NO: 179464
auccacaaccaauuuaaua

SEQ ID NO: 179466 - RNA, 19 nt, Artificial Sequence
  Description of Artificial Sequence: Synthetic oligonucleotide
  Sense strand starting at position 185 of SEQ ID NO: 2314
auauuaaauugguugugga

SEQ ID NO: 179467 - RNA, 19 nt, Artificial Sequence
  Description of Artificial Sequence: Synthetic oligonucleotide
  Antisense strand to SEQ ID NO: 179466
uccacaaccaauuuaauau

SEQ ID NO: 179468 - RNA, 19 nt, Artificial Sequence
  Description of Artificial Sequence: Synthetic oligonucleotide
  Sense strand starting at position 3933 of SEQ ID NO: 2313
cgagaugauuggcuaaacu

SEQ ID NO: 179469 - RNA, 19 nt, Artificial Sequence
  Description of Artificial Sequence: Synthetic oligonucleotide
  Antisense strand to SEQ ID NO: 179468
aguuuagccaaucaucucg

SEQ ID NO: 179470 - RNA, 19 nt, Artificial Sequence
  Description of Artificial Sequence: Synthetic oligonucleotide
  Sense strand starting at position 3932 of SEQ ID NO: 2313
ccgagaugauuggcuaaac

SEQ ID NO: 179471 - RNA, 19 nt, Artificial Sequence
  Description of Artificial Sequence: Synthetic oligonucleotide
  Antisense strand to SEQ ID NO: 179470
guuuagccaaucaucucgg

SEQ ID NO: 179472 - RNA, 19 nt, Artificial Sequence
  Description of Artificial Sequence: Synthetic oligonucleotide
  Sense strand starting at position 3924 of SEQ ID NO: 2313
guuggaguccgagaugauu

SEQ ID NO: 179473 - RNA, 19 nt, Artificial Sequence
  Description of Artificial Sequence: Synthetic oligonucleotide
  Antisense strand to SEQ ID NO: 179472
aaucaucucggacuccaac

SEQ ID NO: 179474 - RNA, 19 nt, Artificial Sequence
  Description of Artificial Sequence: Synthetic oligonucleotide
  Sense strand starting at position 3648 of SEQ ID NO: 2313
aaguauauggguuagccaa

SEQ ID NO: 179475 - RNA, 19 nt, Artificial Sequence
  Description of Artificial Sequence: Synthetic oligonucleotide
  Antisense strand to SEQ ID NO: 179474
uuggcuaacccauauacuu

SEQ ID NO: 179476 - RNA, 19 nt, Artificial Sequence
  Description of Artificial Sequence: Synthetic oligonucleotide
  Sense strand starting at position 3629 of SEQ ID NO: 2313
auaaacaguagugauguua

SEQ ID NO: 179477 - RNA, 19 nt, Artificial Sequence
  Description of Artificial Sequence: Synthetic oligonucleotide
  Antisense strand to SEQ ID NO: 179476
uaacaucacuacuguuuau

SEQ ID NO: 179478 - RNA, 19 nt, Artificial Sequence
  Description of Artificial Sequence: Synthetic oligonucleotide
  Sense strand starting at position 3625 of SEQ ID NO: 2313
aagcauaaacaguagugau

SEQ ID NO: 179479 - RNA, 19 nt, Artificial Sequence
  Description of Artificial Sequence: Synthetic oligonucleotide
  Antisense strand to SEQ ID NO: 179478
aucacuacuguuuaugcuu

SEQ ID NO: 179480 - RNA, 19 nt, Artificial Sequence
  Description of Artificial Sequence: Synthetic oligonucleotide
  Sense strand starting at position 3511 of SEQ ID NO: 2313
ugcuguuucgaauaauuga

SEQ ID NO: 179481 - RNA, 19 nt, Artificial Sequence
  Description of Artificial Sequence: Synthetic oligonucleotide
  Antisense strand to SEQ ID NO: 179480
ucaauuauucgaaacagca

SEQ ID NO: 179482 - RNA, 19 nt, Artificial Sequence
  Description of Artificial Sequence: Synthetic oligonucleotide
  Sense strand starting at position 3162 of SEQ ID NO: 2313
gugguaaggauugggaaau

SEQ ID NO: 179483 - RNA, 19 nt, Artificial Sequence
  Description of Artificial Sequence: Synthetic oligonucleotide
  Antisense strand to SEQ ID NO: 179482
auuucccaauccuuaccac

SEQ ID NO: 179484 - RNA, 19 nt, Artificial Sequence
  Description of Artificial Sequence: Synthetic oligonucleotide
  Sense strand starting at position 3062 of SEQ ID NO: 2313
caauuaaacguugauguag

SEQ ID NO: 179485 - RNA, 19 nt, Artificial Sequence
  Description of Artificial Sequence: Synthetic oligonucleotide
  Antisense strand to SEQ ID NO: 179484
cuacaucaacguuuaauug

SEQ ID NO: 179486 - RNA, 19 nt, Artificial Sequence
  Description of Artificial Sequence: Synthetic oligonucleotide
  Sense strand starting at position 3061 of SEQ ID NO: 2313
acaauuaaacguugaugua

SEQ ID NO: 179487 - RNA, 19 nt, Artificial Sequence
  Description of Artificial Sequence: Synthetic oligonucleotide
  Antisense strand to SEQ ID NO: 179486
uacaucaacguuuaauugu

SEQ ID NO: 179488 - RNA, 19 nt, Artificial Sequence
  Description of Artificial Sequence: Synthetic oligonucleotide
  Sense strand starting at position 3025 of SEQ ID NO: 2313
uugacucuacgauguuaaa

SEQ ID NO: 179489 - RNA, 19 nt, Artificial Sequence
  Description of Artificial Sequence: Synthetic oligonucleotide
  Antisense strand to SEQ ID NO: 179488
uuuaacaucguagagucaa

SEQ ID NO: 179490 - RNA, 19 nt, Artificial Sequence
  Description of Artificial Sequence: Synthetic oligonucleotide
  Sense strand starting at position 3020 of SEQ ID NO: 2313
uguuauugacucuacgaug

SEQ ID NO: 179491 - RNA, 19 nt, Artificial Sequence
  Description of Artificial Sequence: Synthetic oligonucleotide
  Antisense strand to SEQ ID NO: 179490
caucguagagucaauaaca

SEQ ID NO: 179492 - RNA, 19 nt, Artificial Sequence
  Description of Artificial Sequence: Synthetic oligonucleotide
  Sense strand starting at position 2977 of SEQ ID NO: 2313
uuagucucuucuuuggaca

SEQ ID NO: 179493 - RNA, 19 nt, Artificial Sequence
  Description of Artificial Sequence: Synthetic oligonucleotide
  Antisense strand to SEQ ID NO: 179492
uguccaaagaagagacuaa

SEQ ID NO: 179494 - RNA, 19 nt, Artificial Sequence
  Description of Artificial Sequence: Synthetic oligonucleotide
  Sense strand starting at position 2878 of SEQ ID NO: 2313
acaugcuuuccucacaguu

SEQ ID NO: 179495 - RNA, 19 nt, Artificial Sequence
  Description of Artificial Sequence: Synthetic oligonucleotide
  Antisense strand to SEQ ID NO: 179494
aacugugaggaaagcaugu

SEQ ID NO: 179496 - RNA, 19 nt, Artificial Sequence
  Description of Artificial Sequence: Synthetic oligonucleotide
  Sense strand starting at position 2855 of SEQ ID NO: 2313
gcuaguguucuagacuaga

SEQ ID NO: 179497 - RNA, 19 nt, Artificial Sequence
  Description of Artificial Sequence: Synthetic oligonucleotide
  Antisense strand to SEQ ID NO: 179496
ucuagucuagaacacuagc

SEQ ID NO: 179498 - RNA, 19 nt, Artificial Sequence
  Description of Artificial Sequence: Synthetic oligonucleotide
  Sense strand starting at position 2546 of SEQ ID NO: 2313
gcacguauugcccuuugca

SEQ ID NO: 179499 - RNA, 19 nt, Artificial Sequence
  Description of Artificial Sequence: Synthetic oligonucleotide
  Antisense strand to SEQ ID NO: 179498
ugcaaagggcaauacgugc

SEQ ID NO: 179500 - RNA, 19 nt, Artificial Sequence
  Description of Artificial Sequence: Synthetic oligonucleotide
  Sense strand starting at position 2413 of SEQ ID NO: 2313
gcguuuccacaguaauuug

SEQ ID NO: 179501 - RNA, 19 nt, Artificial Sequence
  Description of Artificial Sequence: Synthetic oligonucleotide
  Antisense strand to SEQ ID NO: 179500
caaauuacuguggaaacgc

SEQ ID NO: 179502 - RNA, 19 nt, Artificial Sequence
  Description of Artificial Sequence: Synthetic oligonucleotide
  Sense strand starting at position 2370 of SEQ ID NO: 2313
gggaaauguagauguucug

SEQ ID NO: 179503 - RNA, 19 nt, Artificial Sequence
  Description of Artificial Sequence: Synthetic oligonucleotide
  Antisense strand to SEQ ID NO: 179502
cagaacaucuacauuuccc

SEQ ID NO: 179504 - RNA, 19 nt, Artificial Sequence
  Description of Artificial Sequence: Synthetic oligonucleotide
  Sense strand starting at position 2216 of SEQ ID NO: 2313
caccgagcucauuaaagga

SEQ ID NO: 179505 - RNA, 19 nt, Artificial Sequence
  Description of Artificial Sequence: Synthetic oligonucleotide
  Antisense strand to SEQ ID NO: 179504
uccuuuaaugagcucggug

SEQ ID NO: 179506 - RNA, 19 nt, Artificial Sequence
  Description of Artificial Sequence: Synthetic oligonucleotide
  Sense strand starting at position 2073 of SEQ ID NO: 2313
gcggguuugcugagaucug

SEQ ID NO: 179507 - RNA, 19 nt, Artificial Sequence
  Description of Artificial Sequence: Synthetic oligonucleotide
  Antisense strand to SEQ ID NO: 179506
cagaucucagcaaacccgc

SEQ ID NO: 179508 - RNA, 19 nt, Artificial Sequence
  Description of Artificial Sequence: Synthetic oligonucleotide
  Sense strand starting at position 1573 of SEQ ID NO: 2313
gaggacuggucagaauuug

SEQ ID NO: 179509 - RNA, 19 nt, Artificial Sequence
  Description of Artificial Sequence: Synthetic oligonucleotide
  Antisense strand to SEQ ID NO: 179508
caaauucugaccaguccuc

SEQ ID NO: 179510 - RNA, 19 nt, Artificial Sequence
  Description of Artificial Sequence: Synthetic oligonucleotide
  Sense strand starting at position 1069 of SEQ ID NO: 2313
gguuuaacucaucauccag

SEQ ID NO: 179511 - RNA, 19 nt, Artificial Sequence
  Description of Artificial Sequence: Synthetic oligonucleotide
  Antisense strand to SEQ ID NO: 179510
cuggaugaugaguuaaacc

SEQ ID NO: 179512 - RNA, 19 nt, Artificial Sequence
  Description of Artificial Sequence: Synthetic oligonucleotide
  Sense strand starting at position 1037 of SEQ ID NO: 2313
agggcaauuuaguaaauau

SEQ ID NO: 179513 - RNA, 19 nt, Artificial Sequence
  Description of Artificial Sequence: Synthetic oligonucleotide
  Antisense strand to SEQ ID NO: 179512
auauuuacuaaauugcccu

SEQ ID NO: 179514 - RNA, 19 nt, Artificial Sequence
  Description of Artificial Sequence: Synthetic oligonucleotide
  Sense strand starting at position 1016 of SEQ ID NO: 2313
ucuauaagagccugcugaa

SEQ ID NO: 179515 - RNA, 19 nt, Artificial Sequence
  Description of Artificial Sequence: Synthetic oligonucleotide
  Antisense strand to SEQ ID NO: 179514
uucagcaggcucuuauaga

SEQ ID NO: 179516 - RNA, 19 nt, Artificial Sequence
  Description of Artificial Sequence: Synthetic oligonucleotide
  Sense strand starting at position 921 of SEQ ID NO: 2313
aaggucuuucuuggaauau

SEQ ID NO: 179517 - RNA, 19 nt, Artificial Sequence
  Description of Artificial Sequence: Synthetic oligonucleotide
  Antisense strand to SEQ ID NO: 179516
auauuccaagaaagaccuu

SEQ ID NO: 179518 - RNA, 19 nt, Artificial Sequence
  Description of Artificial Sequence: Synthetic oligonucleotide
  Sense strand starting at position 855 of SEQ ID NO: 2313
ucaccuauuugagaaggaa

SEQ ID NO: 179519 - RNA, 19 nt, Artificial Sequence
  Description of Artificial Sequence: Synthetic oligonucleotide
  Antisense strand to SEQ ID NO: 179518
uuccuucucaaauagguga

SEQ ID NO: 179520 - RNA, 19 nt, Artificial Sequence
  Description of Artificial Sequence: Synthetic oligonucleotide
  Sense strand starting at position 647 of SEQ ID NO: 2313
aguuuccggagauaaacuu

SEQ ID NO: 179521 - RNA, 19 nt, Artificial Sequence
  Description of Artificial Sequence: Synthetic oligonucleotide
  Antisense strand to SEQ ID NO: 179520
aaguuuaucuccggaaacu

SEQ ID NO: 179522 - RNA, 19 nt, Artificial Sequence
  Description of Artificial Sequence: Synthetic oligonucleotide
  Sense strand starting at position 611 of SEQ ID NO: 2313
uguacagaauccuccuagu

SEQ ID NO: 179523 - RNA, 19 nt, Artificial Sequence
  Description of Artificial Sequence: Synthetic oligonucleotide
  Antisense strand to SEQ ID NO: 179522
acuaggaggauucuguaca

SEQ ID NO: 179524 - RNA, 19 nt, Artificial Sequence
  Description of Artificial Sequence: Synthetic oligonucleotide
  Sense strand starting at position 429 of SEQ ID NO: 2313
uaauuaaguuggguaucaa

SEQ ID NO: 179525 - RNA, 19 nt, Artificial Sequence
  Description of Artificial Sequence: Synthetic oligonucleotide
  Antisense strand to SEQ ID NO: 179524
uugauacccaacuuaauua

SEQ ID NO: 179526 - RNA, 19 nt, Artificial Sequence
  Description of Artificial Sequence: Synthetic oligonucleotide
  Sense strand starting at position 250 of SEQ ID NO: 2313
ggaacuaguaguugccaga

SEQ ID NO: 179527 - RNA, 19 nt, Artificial Sequence
  Description of Artificial Sequence: Synthetic oligonucleotide
  Antisense strand to SEQ ID NO: 179526
ucuggcaacuacuaguucc

SEQ ID NO: 179528 - RNA, 19 nt, Artificial Sequence
  Description of Artificial Sequence: Synthetic oligonucleotide
  Sense strand starting at position 243 of SEQ ID NO: 2313
gugguauggaacuaguagu

SEQ ID NO: 179529 - RNA, 19 nt, Artificial Sequence
  Description of Artificial Sequence: Synthetic oligonucleotide
  Antisense strand to SEQ ID NO: 179528
acuacuaguuccauaccac

SEQ ID NO: 179530 - RNA, 19 nt, Artificial Sequence
  Description of Artificial Sequence: Synthetic oligonucleotide
  Sense strand starting at position 145 of SEQ ID NO: 2313
uccacugaucaaugugaug

SEQ ID NO: 179531 - RNA, 19 nt, Artificial Sequence
  Description of Artificial Sequence: Synthetic oligonucleotide
  Antisense strand to SEQ ID NO: 179530
caucacauugaucagugga

SEQ ID NO: 179532 - RNA, 19 nt, Artificial Sequence
  Description of Artificial Sequence: Synthetic oligonucleotide
  Sense strand starting at position 141 of SEQ ID NO: 2313
ugaauccacugaucaaugu

SEQ ID NO: 179533 - RNA, 19 nt, Artificial Sequence
  Description of Artificial Sequence: Synthetic oligonucleotide
  Antisense strand to SEQ ID NO: 179532
acauugaucaguggauuca

SEQ ID NO: 179534 - RNA, 19 nt, Artificial Sequence
  Description of Artificial Sequence: Synthetic oligonucleotide
  Sense strand starting at position 117 of SEQ ID NO: 2313
uuguuuacccaugauacag

SEQ ID NO: 179535 - RNA, 19 nt, Artificial Sequence
  Description of Artificial Sequence: Synthetic oligonucleotide
  Antisense strand to SEQ ID NO: 179534
cuguaucauggguaaacaa

SEQ ID NO: 179536 - RNA, 19 nt, Artificial Sequence
  Description of Artificial Sequence: Synthetic oligonucleotide
  Sense strand starting at position 116 of SEQ ID NO: 2313
uuuguuuacccaugauaca

SEQ ID NO: 179537 - RNA, 19 nt, Artificial Sequence
  Description of Artificial Sequence: Synthetic oligonucleotide
  Antisense strand to SEQ ID NO: 179536
uguaucauggguaaacaaa

SEQ ID NO: 179538 - RNA, 19 nt, Artificial Sequence
  Description of Artificial Sequence: Synthetic oligonucleotide
  Sense strand starting at position 112 of SEQ ID NO: 2313
gagguuuguuuacccauga

SEQ ID NO: 179539 - RNA, 19 nt, Artificial Sequence
  Description of Artificial Sequence: Synthetic oligonucleotide
  Antisense strand to SEQ ID NO: 179538
ucauggguaaacaaaccuc

SEQ ID NO: 179540 - RNA, 19 nt, Artificial Sequence
  Description of Artificial Sequence: Synthetic oligonucleotide
  Sense strand starting at position 106 of SEQ ID NO: 2313
augauagagguuuguuuac

SEQ ID NO: 179541 - RNA, 19 nt, Artificial Sequence
  Description of Artificial Sequence: Synthetic oligonucleotide
  Antisense strand to SEQ ID NO: 179540
guaaacaaaccucuaucau

SEQ ID NO: 179542 - RNA, 19 nt, Artificial Sequence
  Description of Artificial Sequence: Synthetic oligonucleotide
  Sense strand starting at position 63 of SEQ ID NO: 2313
gugcaugacaaauguaaag

SEQ ID NO: 179543 - RNA, 19 nt, Artificial Sequence
  Description of Artificial Sequence: Synthetic oligonucleotide
  Antisense strand to SEQ ID NO: 179542
cuuuacauuugucaugcac

SEQ ID NO: 179544 - RNA, 19 nt, Artificial Sequence
  Description of Artificial Sequence: Synthetic oligonucleotide
  Sense strand starting at position 52 of SEQ ID NO: 2313
uaucuaugagagugcauga

SEQ ID NO: 179545 - RNA, 19 nt, Artificial Sequence
  Description of Artificial Sequence: Synthetic oligonucleotide
  Antisense strand to SEQ ID NO: 179544
ucaugcacucucauagaua

SEQ ID NO: 179546 - RNA, 19 nt, Artificial Sequence
  Description of Artificial Sequence: Synthetic oligonucleotide
  Sense strand starting at position 46 of SEQ ID NO: 2313
cugacauaucuaugagagu

SEQ ID NO: 179547 - RNA, 19 nt, Artificial Sequence
  Description of Artificial Sequence: Synthetic oligonucleotide
  Antisense strand to SEQ ID NO: 179546
acucucauagauaugucag

SEQ ID NO: 179548 - RNA, 19 nt, Artificial Sequence
  Description of Artificial Sequence: Synthetic oligonucleotide
  Sense strand starting at position 3904 of SEQ ID NO: 2315
gccaccgucauggaaagaa

SEQ ID NO: 179549 - RNA, 19 nt, Artificial Sequence
  Description of Artificial Sequence: Synthetic oligonucleotide
  Antisense strand to SEQ ID NO: 179548
uucuuuccaugacgguggc

SEQ ID NO: 179550 - RNA, 19 nt, Artificial Sequence
  Description of Artificial Sequence: Synthetic oligonucleotide
  Sense strand starting at position 3866 of SEQ ID NO: 2315
gugaaauagccuuauaucu

SEQ ID NO: 179551 - RNA, 19 nt, Artificial Sequence
  Description of Artificial Sequence: Synthetic oligonucleotide
  Antisense strand to SEQ ID NO: 179550
agauauaaggcuauuucac

SEQ ID NO: 179552 - RNA, 19 nt, Artificial Sequence
  Description of Artificial Sequence: Synthetic oligonucleotide
  Sense strand starting at position 3832 of SEQ ID NO: 2315
auagauauucgguaaaugu

SEQ ID NO: 179553 - RNA, 19 nt, Artificial Sequence
  Description of Artificial Sequence: Synthetic oligonucleotide
  Antisense strand to SEQ ID NO: 179552
acauuuaccgaauaucuau

SEQ ID NO: 179554 - RNA, 19 nt, Artificial Sequence
  Description of Artificial Sequence: Synthetic oligonucleotide
  Sense strand starting at position 3831 of SEQ ID NO: 2315
gauagauauucgguaaaug

SEQ ID NO: 179555 - RNA, 19 nt, Artificial Sequence
  Description of Artificial Sequence: Synthetic oligonucleotide
  Antisense strand to SEQ ID NO: 179554
cauuuaccgaauaucuauc

SEQ ID NO: 179556 - RNA, 19 nt, Artificial Sequence
  Description of Artificial Sequence: Synthetic oligonucleotide
  Sense strand starting at position 3829 of SEQ ID NO: 2315
uggauagauauucgguaaa

SEQ ID NO: 179557 - RNA, 19 nt, Artificial Sequence
  Description of Artificial Sequence: Synthetic oligonucleotide
  Antisense strand to SEQ ID NO: 179556
uuuaccgaauaucuaucca

SEQ ID NO: 179558 - RNA, 19 nt, Artificial Sequence
  Description of Artificial Sequence: Synthetic oligonucleotide
  Sense strand starting at position 3828 of SEQ ID NO: 2315
uuggauagauauucgguaa

SEQ ID NO: 179559 - RNA, 19 nt, Artificial Sequence
  Description of Artificial Sequence: Synthetic oligonucleotide
  Antisense strand to SEQ ID NO: 179558
uuaccgaauaucuauccaa

SEQ ID NO: 179560 - RNA, 19 nt, Artificial Sequence
  Description of Artificial Sequence: Synthetic oligonucleotide
  Sense strand starting at position 3818 of SEQ ID NO: 2315
accguagaucuuggauaga

SEQ ID NO: 179561 - RNA, 19 nt, Artificial Sequence
  Description of Artificial Sequence: Synthetic oligonucleotide
  Antisense strand to SEQ ID NO: 179560
ucuauccaagaucuacggu

SEQ ID NO: 179562 - RNA, 19 nt, Artificial Sequence
  Description of Artificial Sequence: Synthetic oligonucleotide
  Sense strand starting at position 3748 of SEQ ID NO: 2315
guuugucucccauacuaaa

SEQ ID NO: 179563 - RNA, 19 nt, Artificial Sequence
  Description of Artificial Sequence: Synthetic oligonucleotide
  Antisense strand to SEQ ID NO: 179562
uuuaguaugggagacaaac

SEQ ID NO: 179564 - RNA, 19 nt, Artificial Sequence
  Description of Artificial Sequence: Synthetic oligonucleotide
  Sense strand starting at position 3742 of SEQ ID NO: 2315
auuuguguuugucucccau

SEQ ID NO: 179565 - RNA, 19 nt, Artificial Sequence
  Description of Artificial Sequence: Synthetic oligonucleotide
  Antisense strand to SEQ ID NO: 179564
augggagacaaacacaaau

SEQ ID NO: 179566 - RNA, 19 nt, Artificial Sequence
  Description of Artificial Sequence: Synthetic oligonucleotide
  Sense strand starting at position 3703 of SEQ ID NO: 2315
ugcauuauucuguugcugu

SEQ ID NO: 179567 - RNA, 19 nt, Artificial Sequence
  Description of Artificial Sequence: Synthetic oligonucleotide
  Antisense strand to SEQ ID NO: 179566
acagcaacagaauaaugca

SEQ ID NO: 179568 - RNA, 19 nt, Artificial Sequence
  Description of Artificial Sequence: Synthetic oligonucleotide
  Sense strand starting at position 3667 of SEQ ID NO: 2315
cugaguuaggacugauaau

SEQ ID NO: 179569 - RNA, 19 nt, Artificial Sequence
  Description of Artificial Sequence: Synthetic oligonucleotide
  Antisense strand to SEQ ID NO: 179568
auuaucaguccuaacucag

SEQ ID NO: 179570 - RNA, 19 nt, Artificial Sequence
  Description of Artificial Sequence: Synthetic oligonucleotide
  Sense strand starting at position 3578 of SEQ ID NO: 2315
uuuauagaguaggcaaaua

SEQ ID NO: 179571 - RNA, 19 nt, Artificial Sequence
  Description of Artificial Sequence: Synthetic oligonucleotide
  Antisense strand to SEQ ID NO: 179570
uauuugccuacucuauaaa

SEQ ID NO: 179572 - RNA, 19 nt, Artificial Sequence
  Description of Artificial Sequence: Synthetic oligonucleotide
  Sense strand starting at position 3577 of SEQ ID NO: 2315
cuuuauagaguaggcaaau

SEQ ID NO: 179573 - RNA, 19 nt, Artificial Sequence
  Description of Artificial Sequence: Synthetic oligonucleotide
  Antisense strand to SEQ ID NO: 179572
auuugccuacucuauaaag

SEQ ID NO: 179574 - RNA, 19 nt, Artificial Sequence
  Description of Artificial Sequence: Synthetic oligonucleotide
  Sense strand starting at position 3528 of SEQ ID NO: 2315
gcuaucuuuccugguauuu

SEQ ID NO: 179575 - RNA, 19 nt, Artificial Sequence
  Description of Artificial Sequence: Synthetic oligonucleotide
  Antisense strand to SEQ ID NO: 179574
aaauaccaggaaagauagc

SEQ ID NO: 179576 - RNA, 19 nt, Artificial Sequence
  Description of Artificial Sequence: Synthetic oligonucleotide
  Sense strand starting at position 3360 of SEQ ID NO: 2315
ggaaauaaauagcuugugu

SEQ ID NO: 179577 - RNA, 19 nt, Artificial Sequence
  Description of Artificial Sequence: Synthetic oligonucleotide
  Antisense strand to SEQ ID NO: 179576
acacaagcuauuuauuucc

SEQ ID NO: 179578 - RNA, 19 nt, Artificial Sequence
  Description of Artificial Sequence: Synthetic oligonucleotide
  Sense strand starting at position 3289 of SEQ ID NO: 2315
aaguguagaguuugauaag

SEQ ID NO: 179579 - RNA, 19 nt, Artificial Sequence
  Description of Artificial Sequence: Synthetic oligonucleotide
  Antisense strand to SEQ ID NO: 179578
cuuaucaaacucuacacuu

SEQ ID NO: 179580 - RNA, 19 nt, Artificial Sequence
  Description of Artificial Sequence: Synthetic oligonucleotide
  Sense strand starting at position 3250 of SEQ ID NO: 2315
uugagauaugguugacaua

SEQ ID NO: 179581 - RNA, 19 nt, Artificial Sequence
  Description of Artificial Sequence: Synthetic oligonucleotide
  Antisense strand to SEQ ID NO: 179580
uaugucaaccauaucucaa

SEQ ID NO: 179582 - RNA, 19 nt, Artificial Sequence
  Description of Artificial Sequence: Synthetic oligonucleotide
  Sense strand starting at position 3229 of SEQ ID NO: 2315
aggacauauguuuacaguu

SEQ ID NO: 179583 - RNA, 19 nt, Artificial Sequence
  Description of Artificial Sequence: Synthetic oligonucleotide
  Antisense strand to SEQ ID NO: 179582
aacuguaaacauauguccu

SEQ ID NO: 179584 - RNA, 19 nt, Artificial Sequence
  Description of Artificial Sequence: Synthetic oligonucleotide
  Sense strand starting at position 3228 of SEQ ID NO: 2315
aaggacauauguuuacagu

SEQ ID NO: 179585 - RNA, 19 nt, Artificial Sequence
  Description of Artificial Sequence: Synthetic oligonucleotide
  Antisense strand to SEQ ID NO: 179584
acuguaaacauauguccuu

SEQ ID NO: 179586 - RNA, 19 nt, Artificial Sequence
  Description of Artificial Sequence: Synthetic oligonucleotide
  Sense strand starting at position 3057 of SEQ ID NO: 2315
acauaaucucagggaguuc

SEQ ID NO: 179587 - RNA, 19 nt, Artificial Sequence
  Description of Artificial Sequence: Synthetic oligonucleotide
  Antisense strand to SEQ ID NO: 179586
gaacucccugagauuaugu

SEQ ID NO: 179588 - RNA, 19 nt, Artificial Sequence
  Description of Artificial Sequence: Synthetic oligonucleotide
  Sense strand starting at position 3034 of SEQ ID NO: 2315
auugcaguaucucucauuu

SEQ ID NO: 179589 - RNA, 19 nt, Artificial Sequence
  Description of Artificial Sequence: Synthetic oligonucleotide
  Antisense strand to SEQ ID NO: 179588
aaaugagagauacugcaau

SEQ ID NO: 179590 - RNA, 19 nt, Artificial Sequence
  Description of Artificial Sequence: Synthetic oligonucleotide
  Sense strand starting at position 3007 of SEQ ID NO: 2315
uggauccucuuuccggaaa

SEQ ID NO: 179591 - RNA, 19 nt, Artificial Sequence
  Description of Artificial Sequence: Synthetic oligonucleotide
  Antisense strand to SEQ ID NO: 179590
uuuccggaaagaggaucca

SEQ ID NO: 179592 - RNA, 19 nt, Artificial Sequence
  Description of Artificial Sequence: Synthetic oligonucleotide
  Sense strand starting at position 2993 of SEQ ID NO: 2315
ucugauaauaguuguggau

SEQ ID NO: 179593 - RNA, 19 nt, Artificial Sequence
  Description of Artificial Sequence: Synthetic oligonucleotide
  Antisense strand to SEQ ID NO: 179592
auccacaacuauuaucaga

SEQ ID NO: 179594 - RNA, 19 nt, Artificial Sequence
  Description of Artificial Sequence: Synthetic oligonucleotide
  Sense strand starting at position 2975 of SEQ ID NO: 2315
ucaccagcccuuugagaau

SEQ ID NO: 179595 - RNA, 19 nt, Artificial Sequence
  Description of Artificial Sequence: Synthetic oligonucleotide
  Antisense strand to SEQ ID NO: 179594
auucucaaagggcugguga

SEQ ID NO: 179596 - RNA, 19 nt, Artificial Sequence
  Description of Artificial Sequence: Synthetic oligonucleotide
  Sense strand starting at position 2747 of SEQ ID NO: 2315
agugaugguaaauggguua

SEQ ID NO: 179597 - RNA, 19 nt, Artificial Sequence
  Description of Artificial Sequence: Synthetic oligonucleotide
  Antisense strand to SEQ ID NO: 179596
uaacccauuuaccaucacu

SEQ ID NO: 179598 - RNA, 19 nt, Artificial Sequence
  Description of Artificial Sequence: Synthetic oligonucleotide
  Sense strand starting at position 2738 of SEQ ID NO: 2315
ucaguucuuagugauggua

SEQ ID NO: 179599 - RNA, 19 nt, Artificial Sequence
  Description of Artificial Sequence: Synthetic oligonucleotide
  Antisense strand to SEQ ID NO: 179598
uaccaucacuaagaacuga

SEQ ID NO: 179600 - RNA, 19 nt, Artificial Sequence
  Description of Artificial Sequence: Synthetic oligonucleotide
  Sense strand starting at position 2528 of SEQ ID NO: 2315
uugaaagauuuacagacuu

SEQ ID NO: 179601 - RNA, 19 nt, Artificial Sequence
  Description of Artificial Sequence: Synthetic oligonucleotide
  Antisense strand to SEQ ID NO: 179600
aagucuguaaaucuuucaa

SEQ ID NO: 179602 - RNA, 19 nt, Artificial Sequence
  Description of Artificial Sequence: Synthetic oligonucleotide
  Sense strand starting at position 2351 of SEQ ID NO: 2315
aucucuguaccugggaaau

SEQ ID NO: 179603 - RNA, 19 nt, Artificial Sequence
  Description of Artificial Sequence: Synthetic oligonucleotide
  Antisense strand to SEQ ID NO: 179602
auuucccagguacagagau

SEQ ID NO: 179604 - RNA, 19 nt, Artificial Sequence
  Description of Artificial Sequence: Synthetic oligonucleotide
  Sense strand starting at position 1676 of SEQ ID NO: 2315
agguaauauccuuggucac

SEQ ID NO: 179605 - RNA, 19 nt, Artificial Sequence
  Description of Artificial Sequence: Synthetic oligonucleotide
  Antisense strand to SEQ ID NO: 179604
gugaccaaggauauuaccu

SEQ ID NO: 179606 - RNA, 19 nt, Artificial Sequence
  Description of Artificial Sequence: Synthetic oligonucleotide
  Sense strand starting at position 1675 of SEQ ID NO: 2315
uagguaauauccuugguca

SEQ ID NO: 179607 - RNA, 19 nt, Artificial Sequence
  Description of Artificial Sequence: Synthetic oligonucleotide
  Antisense strand to SEQ ID NO: 179606
ugaccaaggauauuaccua

SEQ ID NO: 179608 - RNA, 19 nt, Artificial Sequence
  Description of Artificial Sequence: Synthetic oligonucleotide
  Sense strand starting at position 1666 of SEQ ID NO: 2315
ucugguaaauagguaauau

SEQ ID NO: 179609 - RNA, 19 nt, Artificial Sequence
  Description of Artificial Sequence: Synthetic oligonucleotide
  Antisense strand to SEQ ID NO: 179608
auauuaccuauuuaccaga

SEQ ID NO: 179610 - RNA, 19 nt, Artificial Sequence
  Description of Artificial Sequence: Synthetic oligonucleotide
  Sense strand starting at position 1663 of SEQ ID NO: 2315
gggucugguaaauagguaa

SEQ ID NO: 179611 - RNA, 19 nt, Artificial Sequence
  Description of Artificial Sequence: Synthetic oligonucleotide
  Antisense strand to SEQ ID NO: 179610
uuaccuauuuaccagaccc

SEQ ID NO: 179612 - RNA, 19 nt, Artificial Sequence
  Description of Artificial Sequence: Synthetic oligonucleotide
  Sense strand starting at position 1588 of SEQ ID NO: 2315
guauuacggaguuaacagu

SEQ ID NO: 179613 - RNA, 19 nt, Artificial Sequence
  Description of Artificial Sequence: Synthetic oligonucleotide
  Antisense strand to SEQ ID NO: 179612
acuguuaacuccguaauac

SEQ ID NO: 179614 - RNA, 19 nt, Artificial Sequence
  Description of Artificial Sequence: Synthetic oligonucleotide
  Sense strand starting at position 1584 of SEQ ID NO: 2315
aucuguauuacggaguuaa

SEQ ID NO: 179615 - RNA, 19 nt, Artificial Sequence
  Description of Artificial Sequence: Synthetic oligonucleotide
  Antisense strand to SEQ ID NO: 179614
uuaacuccguaauacagau

SEQ ID NO: 179616 - RNA, 19 nt, Artificial Sequence
  Description of Artificial Sequence: Synthetic oligonucleotide
  Sense strand starting at position 1386 of SEQ ID NO: 2315
cgugugcucgucuugggaa

SEQ ID NO: 179617 - RNA, 19 nt, Artificial Sequence
  Description of Artificial Sequence: Synthetic oligonucleotide
  Antisense strand to SEQ ID NO: 179616
uucccaagacgagcacacg

SEQ ID NO: 179618 - RNA, 19 nt, Artificial Sequence
  Description of Artificial Sequence: Synthetic oligonucleotide
  Sense strand starting at position 1385 of SEQ ID NO: 2315
acgugugcucgucuuggga

SEQ ID NO: 179619 - RNA, 19 nt, Artificial Sequence
  Description of Artificial Sequence: Synthetic oligonucleotide
  Antisense strand to SEQ ID NO: 179618
ucccaagacgagcacacgu

SEQ ID NO: 179620 - RNA, 19 nt, Artificial Sequence
  Description of Artificial Sequence: Synthetic oligonucleotide
  Sense strand starting at position 992 of SEQ ID NO: 2315
ggcgacuaccuugagagua

SEQ ID NO: 179621 - RNA, 19 nt, Artificial Sequence
  Description of Artificial Sequence: Synthetic oligonucleotide
  Antisense strand to SEQ ID NO: 179620
uacucucaagguagucgcc

SEQ ID NO: 179622 - RNA, 19 nt, Artificial Sequence
  Description of Artificial Sequence: Synthetic oligonucleotide
  Sense strand starting at position 887 of SEQ ID NO: 2315
gugcgcucucugucuaacu

SEQ ID NO: 179623 - RNA, 19 nt, Artificial Sequence
  Description of Artificial Sequence: Synthetic oligonucleotide
  Antisense strand to SEQ ID NO: 179622
aguuagacagagagcgcac

SEQ ID NO: 179624 - RNA, 19 nt, Artificial Sequence
  Description of Artificial Sequence: Synthetic oligonucleotide
  Sense strand starting at position 419 of SEQ ID NO: 2315
agcauuuccuaagaaggga

SEQ ID NO: 179625 - RNA, 19 nt, Artificial Sequence
  Description of Artificial Sequence: Synthetic oligonucleotide
  Antisense strand to SEQ ID NO: 179624
ucccuucuuaggaaaugcu

SEQ ID NO: 179626 - RNA, 19 nt, Artificial Sequence
  Description of Artificial Sequence: Synthetic oligonucleotide
  Sense strand starting at position 330 of SEQ ID NO: 2315
ggcggaaauacuugggaaa

SEQ ID NO: 179627 - RNA, 19 nt, Artificial Sequence
  Description of Artificial Sequence: Synthetic oligonucleotide
  Antisense strand to SEQ ID NO: 179626
uuucccaaguauuuccgcc

SEQ ID NO: 179628 - RNA, 19 nt, Artificial Sequence
  Description of Artificial Sequence: Synthetic oligonucleotide
  Sense strand starting at position 3899 of SEQ ID NO: 2316
agaagucuacauuguaaua

SEQ ID NO: 179629 - RNA, 19 nt, Artificial Sequence
  Description of Artificial Sequence: Synthetic oligonucleotide
  Antisense strand to SEQ ID NO: 179628
uauuacaauguagacuucu

SEQ ID NO: 179630 - RNA, 19 nt, Artificial Sequence
  Description of Artificial Sequence: Synthetic oligonucleotide
  Sense strand starting at position 3809 of SEQ ID NO: 2316
aagagugguggccagaauu

SEQ ID NO: 179631 - RNA, 19 nt, Artificial Sequence
  Description of Artificial Sequence: Synthetic oligonucleotide
  Antisense strand to SEQ ID NO: 179630
aauucuggccaccacucuu

SEQ ID NO: 179632 - RNA, 19 nt, Artificial Sequence
  Description of Artificial Sequence: Synthetic oligonucleotide
  Sense strand starting at position 3756 of SEQ ID NO: 2316
gcauguaaacaacagaagu

SEQ ID NO: 179633 - RNA, 19 nt, Artificial Sequence
  Description of Artificial Sequence: Synthetic oligonucleotide
  Antisense strand to SEQ ID NO: 179632
acuucuguuguuuacaugc

SEQ ID NO: 179634 - RNA, 19 nt, Artificial Sequence
  Description of Artificial Sequence: Synthetic oligonucleotide
  Sense strand starting at position 3599 of SEQ ID NO: 2316
gggugaauuuaacagccaa

SEQ ID NO: 179635 - RNA, 19 nt, Artificial Sequence
  Description of Artificial Sequence: Synthetic oligonucleotide
  Antisense strand to SEQ ID NO: 179634
uuggcuguuaaauucaccc

SEQ ID NO: 179636 - RNA, 19 nt, Artificial Sequence
  Description of Artificial Sequence: Synthetic oligonucleotide
  Sense strand starting at position 3366 of SEQ ID NO: 2316
ucgcauacucuagagauca

SEQ ID NO: 179637 - RNA, 19 nt, Artificial Sequence
  Description of Artificial Sequence: Synthetic oligonucleotide
  Antisense strand to SEQ ID NO: 179636
ugaucucuagaguaugcga

SEQ ID NO: 179638 - RNA, 19 nt, Artificial Sequence
  Description of Artificial Sequence: Synthetic oligonucleotide
  Sense strand starting at position 3364 of SEQ ID NO: 2316
gaucgcauacucuagagau

SEQ ID NO: 179639 - RNA, 19 nt, Artificial Sequence
  Description of Artificial Sequence: Synthetic oligonucleotide
  Antisense strand to SEQ ID NO: 179638
aucucuagaguaugcgauc

SEQ ID NO: 179640 - RNA, 19 nt, Artificial Sequence
  Description of Artificial Sequence: Synthetic oligonucleotide
  Sense strand starting at position 2781 of SEQ ID NO: 2316
gcaagcuugcuugaagauc

SEQ ID NO: 179641 - RNA, 19 nt, Artificial Sequence
  Description of Artificial Sequence: Synthetic oligonucleotide
  Antisense strand to SEQ ID NO: 179640
gaucuucaagcaagcuugc

SEQ ID NO: 179642 - RNA, 19 nt, Artificial Sequence
  Description of Artificial Sequence: Synthetic oligonucleotide
  Sense strand starting at position 2740 of SEQ ID NO: 2316
gcugaauauacuggaaugu

SEQ ID NO: 179643 - RNA, 19 nt, Artificial Sequence
  Description of Artificial Sequence: Synthetic oligonucleotide
  Antisense strand to SEQ ID NO: 179642
acauuccaguauauucagc

SEQ ID NO: 179644 - RNA, 19 nt, Artificial Sequence
  Description of Artificial Sequence: Synthetic oligonucleotide
  Sense strand starting at position 2533 of SEQ ID NO: 2316
gaucacucugacugauaug

SEQ ID NO: 179645 - RNA, 19 nt, Artificial Sequence
  Description of Artificial Sequence: Synthetic oligonucleotide
  Antisense strand to SEQ ID NO: 179644
cauaucagucagagugauc

SEQ ID NO: 179646 - RNA, 19 nt, Artificial Sequence
  Description of Artificial Sequence: Synthetic oligonucleotide
  Sense strand starting at position 2532 of SEQ ID NO: 2316
ggaucacucugacugauau

SEQ ID NO: 179647 - RNA, 19 nt, Artificial Sequence
  Description of Artificial Sequence: Synthetic oligonucleotide
  Antisense strand to SEQ ID NO: 179646
auaucagucagagugaucc

SEQ ID NO: 179648 - RNA, 19 nt, Artificial Sequence
  Description of Artificial Sequence: Synthetic oligonucleotide
  Sense strand starting at position 2477 of SEQ ID NO: 2316
uuaauuuacugugagugaa

SEQ ID NO: 179649 - RNA, 19 nt, Artificial Sequence
  Description of Artificial Sequence: Synthetic oligonucleotide
  Antisense strand to SEQ ID NO: 179648
uucacucacaguaaauuaa

SEQ ID NO: 179650 - RNA, 19 nt, Artificial Sequence
  Description of Artificial Sequence: Synthetic oligonucleotide
  Sense strand starting at position 2411 of SEQ ID NO: 2316
gcaugugaucuggaagcca

SEQ ID NO: 179651 - RNA, 19 nt, Artificial Sequence
  Description of Artificial Sequence: Synthetic oligonucleotide
  Antisense strand to SEQ ID NO: 179650
uggcuuccagaucacaugc

SEQ ID NO: 179652 - RNA, 19 nt, Artificial Sequence
  Description of Artificial Sequence: Synthetic oligonucleotide
  Sense strand starting at position 2407 of SEQ ID NO: 2316
auaagcaugugaucuggaa

SEQ ID NO: 179653 - RNA, 19 nt, Artificial Sequence
  Description of Artificial Sequence: Synthetic oligonucleotide
  Antisense strand to SEQ ID NO: 179652
uuccagaucacaugcuuau

SEQ ID NO: 179654 - RNA, 19 nt, Artificial Sequence
  Description of Artificial Sequence: Synthetic oligonucleotide
  Sense strand starting at position 2404 of SEQ ID NO: 2316
agcauaagcaugugaucug

SEQ ID NO: 179655 - RNA, 19 nt, Artificial Sequence
  Description of Artificial Sequence: Synthetic oligonucleotide
  Antisense strand to SEQ ID NO: 179654
cagaucacaugcuuaugcu

SEQ ID NO: 179656 - RNA, 19 nt, Artificial Sequence
  Description of Artificial Sequence: Synthetic oligonucleotide
  Sense strand starting at position 2370 of SEQ ID NO: 2316
cugaacgaguguucagaaa

SEQ ID NO: 179657 - RNA, 19 nt, Artificial Sequence
  Description of Artificial Sequence: Synthetic oligonucleotide
  Antisense strand to SEQ ID NO: 179656
uuucugaacacucguucag

SEQ ID NO: 179658 - RNA, 19 nt, Artificial Sequence
  Description of Artificial Sequence: Synthetic oligonucleotide
  Sense strand starting at position 2189 of SEQ ID NO: 2316
ccgauaacucucugagaaa

SEQ ID NO: 179659 - RNA, 19 nt, Artificial Sequence
  Description of Artificial Sequence: Synthetic oligonucleotide
  Antisense strand to SEQ ID NO: 179658
uuucucagagaguuaucgg

SEQ ID NO: 179660 - RNA, 19 nt, Artificial Sequence
  Description of Artificial Sequence: Synthetic oligonucleotide
  Sense strand starting at position 2188 of SEQ ID NO: 2316
gccgauaacucucugagaa

SEQ ID NO: 179661 - RNA, 19 nt, Artificial Sequence
  Description of Artificial Sequence: Synthetic oligonucleotide
  Antisense strand to SEQ ID NO: 179660
uucucagagaguuaucggc

SEQ ID NO: 179662 - RNA, 19 nt, Artificial Sequence
  Description of Artificial Sequence: Synthetic oligonucleotide
  Sense strand starting at position 2071 of SEQ ID NO: 2316
gcgcgaacgcucucuaguu

SEQ ID NO: 179663 - RNA, 19 nt, Artificial Sequence
  Description of Artificial Sequence: Synthetic oligonucleotide
  Antisense strand to SEQ ID NO: 179662
aacuagagagcguucgcgc

SEQ ID NO: 179664 - RNA, 19 nt, Artificial Sequence
  Description of Artificial Sequence: Synthetic oligonucleotide
  Sense strand starting at position 1663 of SEQ ID NO: 2316
ucagucucccacugaggaa

SEQ ID NO: 179665 - RNA, 19 nt, Artificial Sequence
  Description of Artificial Sequence: Synthetic oligonucleotide
  Antisense strand to SEQ ID NO: 179664
uuccucagugggagacuga

SEQ ID NO: 179666 - RNA, 19 nt, Artificial Sequence
  Description of Artificial Sequence: Synthetic oligonucleotide
  Sense strand starting at position 1574 of SEQ ID NO: 2316
gugcaacuuguuuaaacaa

SEQ ID NO: 179667 - RNA, 19 nt, Artificial Sequence
  Description of Artificial Sequence: Synthetic oligonucleotide
  Antisense strand to SEQ ID NO: 179666
uuguuuaaacaaguugcac

SEQ ID NO: 179668 - RNA, 19 nt, Artificial Sequence
  Description of Artificial Sequence: Synthetic oligonucleotide
  Sense strand starting at position 1573 of SEQ ID NO: 2316
agugcaacuuguuuaaaca

SEQ ID NO: 179669 - RNA, 19 nt, Artificial Sequence
  Description of Artificial Sequence: Synthetic oligonucleotide
  Antisense strand to SEQ ID NO: 179668
uguuuaaacaaguugcacu

SEQ ID NO: 179670 - RNA, 19 nt, Artificial Sequence
  Description of Artificial Sequence: Synthetic oligonucleotide
  Sense strand starting at position 1416 of SEQ ID NO: 2316
caugguuaccgugaggauu

SEQ ID NO: 179671 - RNA, 19 nt, Artificial Sequence
  Description of Artificial Sequence: Synthetic oligonucleotide
  Antisense strand to SEQ ID NO: 179670
aauccucacgguaaccaug

SEQ ID NO: 179672 - RNA, 19 nt, Artificial Sequence
  Description of Artificial Sequence: Synthetic oligonucleotide
  Sense strand starting at position 1243 of SEQ ID NO: 2316
ugcuuugagcaagaaccua

SEQ ID NO: 179673 - RNA, 19 nt, Artificial Sequence
  Description of Artificial Sequence: Synthetic oligonucleotide
  Antisense strand to SEQ ID NO: 179672
uagguucuugcucaaagca

SEQ ID NO: 179674 - RNA, 19 nt, Artificial Sequence
  Description of Artificial Sequence: Synthetic oligonucleotide
  Sense strand starting at position 1158 of SEQ ID NO: 2316
augucucaagcagaaguaa

SEQ ID NO: 179675 - RNA, 19 nt, Artificial Sequence
  Description of Artificial Sequence: Synthetic oligonucleotide
  Antisense strand to SEQ ID NO: 179674
uuacuucugcuugagacau

SEQ ID NO: 179676 - RNA, 19 nt, Artificial Sequence
  Description of Artificial Sequence: Synthetic oligonucleotide
  Sense strand starting at position 1060 of SEQ ID NO: 2316
uaaaguaccguagagacua

SEQ ID NO: 179677 - RNA, 19 nt, Artificial Sequence
  Description of Artificial Sequence: Synthetic oligonucleotide
  Antisense strand to SEQ ID NO: 179676
uagucucuacgguacuuua

SEQ ID NO: 179678 - RNA, 19 nt, Artificial Sequence
  Description of Artificial Sequence: Synthetic oligonucleotide
  Sense strand starting at position 1046 of SEQ ID NO: 2316
gagugcaauucuguuaaag

SEQ ID NO: 179679 - RNA, 19 nt, Artificial Sequence
  Description of Artificial Sequence: Synthetic oligonucleotide
  Antisense strand to SEQ ID NO: 179678
cuuuaacagaauugcacuc

SEQ ID NO: 179680 - RNA, 19 nt, Artificial Sequence
  Description of Artificial Sequence: Synthetic oligonucleotide
  Sense strand starting at position 1037 of SEQ ID NO: 2316
cuagcagaagagugcaauu

SEQ ID NO: 179681 - RNA, 19 nt, Artificial Sequence
  Description of Artificial Sequence: Synthetic oligonucleotide
  Antisense strand to SEQ ID NO: 179680
aauugcacucuucugcuag

SEQ ID NO: 179682 - RNA, 19 nt, Artificial Sequence
  Description of Artificial Sequence: Synthetic oligonucleotide
  Sense strand starting at position 1031 of SEQ ID NO: 2316
ugcucucuagcagaagagu

SEQ ID NO: 179683 - RNA, 19 nt, Artificial Sequence
  Description of Artificial Sequence: Synthetic oligonucleotide
  Antisense strand to SEQ ID NO: 179682
acucuucugcuagagagca

SEQ ID NO: 179684 - RNA, 19 nt, Artificial Sequence
  Description of Artificial Sequence: Synthetic oligonucleotide
  Sense strand starting at position 1026 of SEQ ID NO: 2316
auuauugcucucuagcaga

SEQ ID NO: 179685 - RNA, 19 nt, Artificial Sequence
  Description of Artificial Sequence: Synthetic oligonucleotide
  Antisense strand to SEQ ID NO: 179684
ucugcuagagagcaauaau

SEQ ID NO: 179686 - RNA, 19 nt, Artificial Sequence
  Description of Artificial Sequence: Synthetic oligonucleotide
  Sense strand starting at position 1022 of SEQ ID NO: 2316
augaauuauugcucucuag

SEQ ID NO: 179687 - RNA, 19 nt, Artificial Sequence
  Description of Artificial Sequence: Synthetic oligonucleotide
  Antisense strand to SEQ ID NO: 179686
cuagagagcaauaauucau

SEQ ID NO: 179688 - RNA, 19 nt, Artificial Sequence
  Description of Artificial Sequence: Synthetic oligonucleotide
  Sense strand starting at position 752 of SEQ ID NO: 2316
cccaaaucacaagguugau

SEQ ID NO: 179689 - RNA, 19 nt, Artificial Sequence
  Description of Artificial Sequence: Synthetic oligonucleotide
  Antisense strand to SEQ ID NO: 179688
aucaaccuugugauuuggg

SEQ ID NO: 179690 - RNA, 19 nt, Artificial Sequence
  Description of Artificial Sequence: Synthetic oligonucleotide
  Sense strand starting at position 665 of SEQ ID NO: 2316
guaacaaccguauaaguaa

SEQ ID NO: 179691 - RNA, 19 nt, Artificial Sequence
  Description of Artificial Sequence: Synthetic oligonucleotide
  Antisense strand to SEQ ID NO: 179690
uuacuuauacgguuguuac

SEQ ID NO: 179692 - RNA, 19 nt, Artificial Sequence
  Description of Artificial Sequence: Synthetic oligonucleotide
  Sense strand starting at position 663 of SEQ ID NO: 2316
cuguaacaaccguauaagu

SEQ ID NO: 179693 - RNA, 19 nt, Artificial Sequence
  Description of Artificial Sequence: Synthetic oligonucleotide
  Antisense strand to SEQ ID NO: 179692
acuuauacgguuguuacag

SEQ ID NO: 179694 - RNA, 19 nt, Artificial Sequence
  Description of Artificial Sequence: Synthetic oligonucleotide
  Sense strand starting at position 626 of SEQ ID NO: 2316
uauguugaauggcuuacaa

SEQ ID NO: 179695 - RNA, 19 nt, Artificial Sequence
  Description of Artificial Sequence: Synthetic oligonucleotide
  Antisense strand to SEQ ID NO: 179694
uuguaagccauucaacaua

SEQ ID NO: 179696 - RNA, 19 nt, Artificial Sequence
  Description of Artificial Sequence: Synthetic oligonucleotide
  Sense strand starting at position 582 of SEQ ID NO: 2316
guuacugguguuucgcuua

SEQ ID NO: 179697 - RNA, 19 nt, Artificial Sequence
  Description of Artificial Sequence: Synthetic oligonucleotide
  Antisense strand to SEQ ID NO: 179696
uaagcgaaacaccaguaac

SEQ ID NO: 179698 - RNA, 19 nt, Artificial Sequence
  Description of Artificial Sequence: Synthetic oligonucleotide
  Sense strand starting at position 478 of SEQ ID NO: 2316
uuugauggucaagguguau

SEQ ID NO: 179699 - RNA, 19 nt, Artificial Sequence
  Description of Artificial Sequence: Synthetic oligonucleotide
  Antisense strand to SEQ ID NO: 179698
auacaccuugaccaucaaa

SEQ ID NO: 179700 - RNA, 19 nt, Artificial Sequence
  Description of Artificial Sequence: Synthetic oligonucleotide
  Sense strand starting at position 51 of SEQ ID NO: 2316
uaaugcugaguugaauuau

SEQ ID NO: 179701 - RNA, 19 nt, Artificial Sequence
  Description of Artificial Sequence: Synthetic oligonucleotide
  Antisense strand to SEQ ID NO: 179700
auaauucaacucagcauua

SEQ ID NO: 179702 - RNA, 19 nt, Artificial Sequence
  Description of Artificial Sequence: Synthetic oligonucleotide
  Sense strand starting at position 48 of SEQ ID NO: 2316
ggcuaaugcugaguugaau

SEQ ID NO: 179703 - RNA, 19 nt, Artificial Sequence
  Description of Artificial Sequence: Synthetic oligonucleotide
  Antisense strand to SEQ ID NO: 179702
auucaacucagcauuagcc

SEQ ID NO: 179704 - RNA, 19 nt, Artificial Sequence
  Description of Artificial Sequence: Synthetic oligonucleotide
  Sense strand starting at position 46 of SEQ ID NO: 2316
agggcuaaugcugaguuga

SEQ ID NO: 179705 - RNA, 19 nt, Artificial Sequence
  Description of Artificial Sequence: Synthetic oligonucleotide
  Antisense strand to SEQ ID NO: 179704
ucaacucagcauuagcccu

SEQ ID NO: 179706 - RNA, 19 nt, Artificial Sequence
  Description of Artificial Sequence: Synthetic oligonucleotide
  Sense strand starting at position 35 of SEQ ID NO: 2316
gguggauaugcagggcuaa

SEQ ID NO: 179707 - RNA, 19 nt, Artificial Sequence
  Description of Artificial Sequence: Synthetic oligonucleotide
  Antisense strand to SEQ ID NO: 179706
uuagcccugcauauccacc

SEQ ID NO: 179708 - RNA, 19 nt, Artificial Sequence
  Description of Artificial Sequence: Synthetic oligonucleotide
  Sense strand starting at position 3912 of SEQ ID NO: 2318
uguguacauauguaaugga

SEQ ID NO: 179709 - RNA, 19 nt, Artificial Sequence
  Description of Artificial Sequence: Synthetic oligonucleotide
  Antisense strand to SEQ ID NO: 179708
uccauuacauauguacaca

SEQ ID NO: 179710 - RNA, 19 nt, Artificial Sequence
  Description of Artificial Sequence: Synthetic oligonucleotide
  Sense strand starting at position 3886 of SEQ ID NO: 2318
cugggagauauauguaugu

SEQ ID NO: 179711 - RNA, 19 nt, Artificial Sequence
  Description of Artificial Sequence: Synthetic oligonucleotide
  Antisense strand to SEQ ID NO: 179710
acauacauauaucucccag

SEQ ID NO: 179712 - RNA, 19 nt, Artificial Sequence
  Description of Artificial Sequence: Synthetic oligonucleotide
  Sense strand starting at position 3877 of SEQ ID NO: 2318
uaccuaucccugggagaua

SEQ ID NO: 179713 - RNA, 19 nt, Artificial Sequence
  Description of Artificial Sequence: Synthetic oligonucleotide
  Antisense strand to SEQ ID NO: 179712
uaucucccagggauaggua

SEQ ID NO: 179714 - RNA, 19 nt, Artificial Sequence
  Description of Artificial Sequence: Synthetic oligonucleotide
  Sense strand starting at position 3876 of SEQ ID NO: 2318
auaccuaucccugggagau

SEQ ID NO: 179715 - RNA, 19 nt, Artificial Sequence
  Description of Artificial Sequence: Synthetic oligonucleotide
  Antisense strand to SEQ ID NO: 179714
aucucccagggauagguau

SEQ ID NO: 179716 - RNA, 19 nt, Artificial Sequence
  Description of Artificial Sequence: Synthetic oligonucleotide
  Sense strand starting at position 3875 of SEQ ID NO: 2318
uauaccuaucccugggaga

SEQ ID NO: 179717 - RNA, 19 nt, Artificial Sequence
  Description of Artificial Sequence: Synthetic oligonucleotide
  Antisense strand to SEQ ID NO: 179716
ucucccagggauagguaua

SEQ ID NO: 179718 - RNA, 19 nt, Artificial Sequence
  Description of Artificial Sequence: Synthetic oligonucleotide
  Sense strand starting at position 3804 of SEQ ID NO: 2318
guguuucuaauggaauuag

SEQ ID NO: 179719 - RNA, 19 nt, Artificial Sequence
  Description of Artificial Sequence: Synthetic oligonucleotide
  Antisense strand to SEQ ID NO: 179718
cuaauuccauuagaaacac

SEQ ID NO: 179720 - RNA, 19 nt, Artificial Sequence
  Description of Artificial Sequence: Synthetic oligonucleotide
  Sense strand starting at position 3680 of SEQ ID NO: 2318
gggaaugugagcuacuaug

SEQ ID NO: 179721 - RNA, 19 nt, Artificial Sequence
  Description of Artificial Sequence: Synthetic oligonucleotide
  Antisense strand to SEQ ID NO: 179720
cauaguagcucacauuccc

SEQ ID NO: 179722 - RNA, 19 nt, Artificial Sequence
  Description of Artificial Sequence: Synthetic oligonucleotide
  Sense strand starting at position 3668 of SEQ ID NO: 2318
guccaaggucuugggaaug

SEQ ID NO: 179723 - RNA, 19 nt, Artificial Sequence
  Description of Artificial Sequence: Synthetic oligonucleotide
  Antisense strand to SEQ ID NO: 179722
cauucccaagaccuuggac

SEQ ID NO: 179724 - RNA, 19 nt, Artificial Sequence
  Description of Artificial Sequence: Synthetic oligonucleotide
  Sense strand starting at position 3550 of SEQ ID NO: 2318
ucagguaguguacauacua

SEQ ID NO: 179725 - RNA, 19 nt, Artificial Sequence
  Description of Artificial Sequence: Synthetic oligonucleotide
  Antisense strand to SEQ ID NO: 179724
uaguauguacacuaccuga

SEQ ID NO: 179726 - RNA, 19 nt, Artificial Sequence
  Description of Artificial Sequence: Synthetic oligonucleotide
  Sense strand starting at position 3493 of SEQ ID NO: 2318
cugugaugagcugaaauuc

SEQ ID NO: 179727 - RNA, 19 nt, Artificial Sequence
  Description of Artificial Sequence: Synthetic oligonucleotide
  Antisense strand to SEQ ID NO: 179726
gaauuucagcucaucacag

SEQ ID NO: 179728 - RNA, 19 nt, Artificial Sequence
  Description of Artificial Sequence: Synthetic oligonucleotide
  Sense strand starting at position 3445 of SEQ ID NO: 2318
gacaaagucugaucagcug

SEQ ID NO: 179729 - RNA, 19 nt, Artificial Sequence
  Description of Artificial Sequence: Synthetic oligonucleotide
  Antisense strand to SEQ ID NO: 179728
cagcugaucagacuuuguc

SEQ ID NO: 179730 - RNA, 19 nt, Artificial Sequence
  Description of Artificial Sequence: Synthetic oligonucleotide
  Sense strand starting at position 3166 of SEQ ID NO: 2318
uucuauaugguguagggaa

SEQ ID NO: 179731 - RNA, 19 nt, Artificial Sequence
  Description of Artificial Sequence: Synthetic oligonucleotide
  Antisense strand to SEQ ID NO: 179730
uucccuacaccauauagaa

SEQ ID NO: 179732 - RNA, 19 nt, Artificial Sequence
  Description of Artificial Sequence: Synthetic oligonucleotide
  Sense strand starting at position 2961 of SEQ ID NO: 2318
gaaaguuucugggccauaa

SEQ ID NO: 179733 - RNA, 19 nt, Artificial Sequence
  Description of Artificial Sequence: Synthetic oligonucleotide
  Antisense strand to SEQ ID NO: 179732
uuauggcccagaaacuuuc

SEQ ID NO: 179734 - RNA, 19 nt, Artificial Sequence
  Description of Artificial Sequence: Synthetic oligonucleotide
  Sense strand starting at position 2656 of SEQ ID NO: 2318
ugauuuguggugugagcau

SEQ ID NO: 179735 - RNA, 19 nt, Artificial Sequence
  Description of Artificial Sequence: Synthetic oligonucleotide
  Antisense strand to SEQ ID NO: 179734
augcucacaccacaaauca

SEQ ID NO: 179736 - RNA, 19 nt, Artificial Sequence
  Description of Artificial Sequence: Synthetic oligonucleotide
  Sense strand starting at position 2581 of SEQ ID NO: 2318
gccauuuacuugccauaug

SEQ ID NO: 179737 - RNA, 19 nt, Artificial Sequence
  Description of Artificial Sequence: Synthetic oligonucleotide
  Antisense strand to SEQ ID NO: 179736
cauauggcaaguaaauggc

SEQ ID NO: 179738 - RNA, 19 nt, Artificial Sequence
  Description of Artificial Sequence: Synthetic oligonucleotide
  Sense strand starting at position 2037 of SEQ ID NO: 2318
ggauaaucccucugaucuu

SEQ ID NO: 179739 - RNA, 19 nt, Artificial Sequence
  Description of Artificial Sequence: Synthetic oligonucleotide
  Antisense strand to SEQ ID NO: 179738
aagaucagagggauuaucc

SEQ ID NO: 179740 - RNA, 19 nt, Artificial Sequence
  Description of Artificial Sequence: Synthetic oligonucleotide
  Sense strand starting at position 2034 of SEQ ID NO: 2318
ucaggauaaucccucugau

SEQ ID NO: 179741 - RNA, 19 nt, Artificial Sequence
  Description of Artificial Sequence: Synthetic oligonucleotide
  Antisense strand to SEQ ID NO: 179740
aucagagggauuauccuga

SEQ ID NO: 179742 - RNA, 19 nt, Artificial Sequence
  Description of Artificial Sequence: Synthetic oligonucleotide
  Sense strand starting at position 1939 of SEQ ID NO: 2318
agagccuucucacuauaga

SEQ ID NO: 179743 - RNA, 19 nt, Artificial Sequence
  Description of Artificial Sequence: Synthetic oligonucleotide
  Antisense strand to SEQ ID NO: 179742
ucuauagugagaaggcucu

SEQ ID NO: 179744 - RNA, 19 nt, Artificial Sequence
  Description of Artificial Sequence: Synthetic oligonucleotide
  Sense strand starting at position 1719 of SEQ ID NO: 2318
gggaacuaaucaguuguuu

SEQ ID NO: 179745 - RNA, 19 nt, Artificial Sequence
  Description of Artificial Sequence: Synthetic oligonucleotide
  Antisense strand to SEQ ID NO: 179744
aaacaacugauuaguuccc

SEQ ID NO: 179746 - RNA, 19 nt, Artificial Sequence
  Description of Artificial Sequence: Synthetic oligonucleotide
  Sense strand starting at position 1608 of SEQ ID NO: 2318
ccauuaguacaguaauuga

SEQ ID NO: 179747 - RNA, 19 nt, Artificial Sequence
  Description of Artificial Sequence: Synthetic oligonucleotide
  Antisense strand to SEQ ID NO: 179746
ucaauuacuguacuaaugg

SEQ ID NO: 179748 - RNA, 19 nt, Artificial Sequence
  Description of Artificial Sequence: Synthetic oligonucleotide
  Sense strand starting at position 1605 of SEQ ID NO: 2318
uggccauuaguacaguaau

SEQ ID NO: 179749 - RNA, 19 nt, Artificial Sequence
  Description of Artificial Sequence: Synthetic oligonucleotide
  Antisense strand to SEQ ID NO: 179748
auuacuguacuaauggcca

SEQ ID NO: 179750 - RNA, 19 nt, Artificial Sequence
  Description of Artificial Sequence: Synthetic oligonucleotide
  Sense strand starting at position 1572 of SEQ ID NO: 2318
cuaacauucccggaaguac

SEQ ID NO: 179751 - RNA, 19 nt, Artificial Sequence
  Description of Artificial Sequence: Synthetic oligonucleotide
  Antisense strand to SEQ ID NO: 179750
guacuuccgggaauguuag

SEQ ID NO: 179752 - RNA, 19 nt, Artificial Sequence
  Description of Artificial Sequence: Synthetic oligonucleotide
  Sense strand starting at position 1487 of SEQ ID NO: 2318
aaaggagguuuagcuauua

SEQ ID NO: 179753 - RNA, 19 nt, Artificial Sequence
  Description of Artificial Sequence: Synthetic oligonucleotide
  Antisense strand to SEQ ID NO: 179752
uaauagcuaaaccuccuuu

SEQ ID NO: 179754 - RNA, 19 nt, Artificial Sequence
  Description of Artificial Sequence: Synthetic oligonucleotide
  Sense strand starting at position 1471 of SEQ ID NO: 2318
uguguugaacacuaucaaa

SEQ ID NO: 179755 - RNA, 19 nt, Artificial Sequence
  Description of Artificial Sequence: Synthetic oligonucleotide
  Antisense strand to SEQ ID NO: 179754
uuugauaguguucaacaca

SEQ ID NO: 179756 - RNA, 19 nt, Artificial Sequence
  Description of Artificial Sequence: Synthetic oligonucleotide
  Sense strand starting at position 1195 of SEQ ID NO: 2318
ggacauauaugucccuacu

SEQ ID NO: 179757 - RNA, 19 nt, Artificial Sequence
  Description of Artificial Sequence: Synthetic oligonucleotide
  Antisense strand to SEQ ID NO: 179756
aguagggacauauaugucc

SEQ ID NO: 179758 - RNA, 19 nt, Artificial Sequence
  Description of Artificial Sequence: Synthetic oligonucleotide
  Sense strand starting at position 1003 of SEQ ID NO: 2318
guacaaauccgcguuaguu

SEQ ID NO: 179759 - RNA, 19 nt, Artificial Sequence
  Description of Artificial Sequence: Synthetic oligonucleotide
  Antisense strand to SEQ ID NO: 179758
aacuaacgcggauuuguac

SEQ ID NO: 179760 - RNA, 19 nt, Artificial Sequence
  Description of Artificial Sequence: Synthetic oligonucleotide
  Sense strand starting at position 960 of SEQ ID NO: 2318
cuuggcucucuauauaaga

SEQ ID NO: 179761 - RNA, 19 nt, Artificial Sequence
  Description of Artificial Sequence: Synthetic oligonucleotide
  Antisense strand to SEQ ID NO: 179760
ucuuauauagagagccaag

SEQ ID NO: 179762 - RNA, 19 nt, Artificial Sequence
  Description of Artificial Sequence: Synthetic oligonucleotide
  Sense strand starting at position 865 of SEQ ID NO: 2318
gugugcaacugagcaauuu

SEQ ID NO: 179763 - RNA, 19 nt, Artificial Sequence
  Description of Artificial Sequence: Synthetic oligonucleotide
  Antisense strand to SEQ ID NO: 179762
aaauugcucaguugcacac

SEQ ID NO: 179764 - RNA, 19 nt, Artificial Sequence
  Description of Artificial Sequence: Synthetic oligonucleotide
  Sense strand starting at position 821 of SEQ ID NO: 2318
aagaguuagugaucuaaau

SEQ ID NO: 179765 - RNA, 19 nt, Artificial Sequence
  Description of Artificial Sequence: Synthetic oligonucleotide
  Antisense strand to SEQ ID NO: 179764
auuuagaucacuaacucuu

SEQ ID NO: 179766 - RNA, 19 nt, Artificial Sequence
  Description of Artificial Sequence: Synthetic oligonucleotide
  Sense strand starting at position 817 of SEQ ID NO: 2318
gauuaagaguuagugaucu

SEQ ID NO: 179767 - RNA, 19 nt, Artificial Sequence
  Description of Artificial Sequence: Synthetic oligonucleotide
  Antisense strand to SEQ ID NO: 179766
agaucacuaacucuuaauc

SEQ ID NO: 179768 - RNA, 19 nt, Artificial Sequence
  Description of Artificial Sequence: Synthetic oligonucleotide
  Sense strand starting at position 800 of SEQ ID NO: 2318
gucagaucugauugauuga

SEQ ID NO: 179769 - RNA, 19 nt, Artificial Sequence
  Description of Artificial Sequence: Synthetic oligonucleotide
  Antisense strand to SEQ ID NO: 179768
ucaaucaaucagaucugac

SEQ ID NO: 179770 - RNA, 19 nt, Artificial Sequence
  Description of Artificial Sequence: Synthetic oligonucleotide
  Sense strand starting at position 766 of SEQ ID NO: 2318
acaaauagucuguaauucu

SEQ ID NO: 179771 - RNA, 19 nt, Artificial Sequence
  Description of Artificial Sequence: Synthetic oligonucleotide
  Antisense strand to SEQ ID NO: 179770
agaauuacagacuauuugu

SEQ ID NO: 179772 - RNA, 19 nt, Artificial Sequence
  Description of Artificial Sequence: Synthetic oligonucleotide
  Sense strand starting at position 727 of SEQ ID NO: 2318
ggcuuagagccagaagaug

SEQ ID NO: 179773 - RNA, 19 nt, Artificial Sequence
  Description of Artificial Sequence: Synthetic oligonucleotide
  Antisense strand to SEQ ID NO: 179772
caucuucuggcucuaagcc

SEQ ID NO: 179774 - RNA, 19 nt, Artificial Sequence
  Description of Artificial Sequence: Synthetic oligonucleotide
  Sense strand starting at position 656 of SEQ ID NO: 2318
cuuuauugcgaauaguaaa

SEQ ID NO: 179775 - RNA, 19 nt, Artificial Sequence
  Description of Artificial Sequence: Synthetic oligonucleotide
  Antisense strand to SEQ ID NO: 179774
uuuacuauucgcaauaaag

SEQ ID NO: 179776 - RNA, 19 nt, Artificial Sequence
  Description of Artificial Sequence: Synthetic oligonucleotide
  Sense strand starting at position 608 of SEQ ID NO: 2318
caacuuugugggcauaaag

SEQ ID NO: 179777 - RNA, 19 nt, Artificial Sequence
  Description of Artificial Sequence: Synthetic oligonucleotide
  Antisense strand to SEQ ID NO: 179776
cuuuaugcccacaaaguug

SEQ ID NO: 179778 - RNA, 19 nt, Artificial Sequence
  Description of Artificial Sequence: Synthetic oligonucleotide
  Sense strand starting at position 607 of SEQ ID NO: 2318
acaacuuugugggcauaaa

SEQ ID NO: 179779 - RNA, 19 nt, Artificial Sequence
  Description of Artificial Sequence: Synthetic oligonucleotide
  Antisense strand to SEQ ID NO: 179778
uuuaugcccacaaaguugu

SEQ ID NO: 179780 - RNA, 19 nt, Artificial Sequence
  Description of Artificial Sequence: Synthetic oligonucleotide
  Sense strand starting at position 596 of SEQ ID NO: 2318
acaguaucuguacaacuuu

SEQ ID NO: 179781 - RNA, 19 nt, Artificial Sequence
  Description of Artificial Sequence: Synthetic oligonucleotide
  Antisense strand to SEQ ID NO: 179780
aaaguuguacagauacugu

SEQ ID NO: 179782 - RNA, 19 nt, Artificial Sequence
  Description of Artificial Sequence: Synthetic oligonucleotide
  Sense strand starting at position 491 of SEQ ID NO: 2318
uugucauacuaacuaugga

SEQ ID NO: 179783 - RNA, 19 nt, Artificial Sequence
  Description of Artificial Sequence: Synthetic oligonucleotide
  Antisense strand to SEQ ID NO: 179782
uccauaguuaguaugacaa

SEQ ID NO: 179784 - RNA, 19 nt, Artificial Sequence
  Description of Artificial Sequence: Synthetic oligonucleotide
  Sense strand starting at position 128 of SEQ ID NO: 2318
ugaugauccucuguaggau

SEQ ID NO: 179785 - RNA, 19 nt, Artificial Sequence
  Description of Artificial Sequence: Synthetic oligonucleotide
  Antisense strand to SEQ ID NO: 179784
auccuacagaggaucauca

SEQ ID NO: 179786 - RNA, 19 nt, Artificial Sequence
  Description of Artificial Sequence: Synthetic oligonucleotide
  Sense strand starting at position 81 of SEQ ID NO: 2318
cccucuaugguacagaguu

SEQ ID NO: 179787 - RNA, 19 nt, Artificial Sequence
  Description of Artificial Sequence: Synthetic oligonucleotide
  Antisense strand to SEQ ID NO: 179786
aacucuguaccauagaggg

SEQ ID NO: 179788 - RNA, 19 nt, Artificial Sequence
  Description of Artificial Sequence: Synthetic oligonucleotide
  Sense strand starting at position 3719 of SEQ ID NO: 2317
uccagagaucaguggucau

SEQ ID NO: 179789 - RNA, 19 nt, Artificial Sequence
  Description of Artificial Sequence: Synthetic oligonucleotide
  Antisense strand to SEQ ID NO: 179788
augaccacugaucucugga

SEQ ID NO: 179790 - RNA, 19 nt, Artificial Sequence
  Description of Artificial Sequence: Synthetic oligonucleotide
  Sense strand starting at position 3542 of SEQ ID NO: 2317
ccaaaucugucaguuauau

SEQ ID NO: 179791 - RNA, 19 nt, Artificial Sequence
  Description of Artificial Sequence: Synthetic oligonucleotide
  Antisense strand to SEQ ID NO: 179790
auauaacugacagauuugg

SEQ ID NO: 179792 - RNA, 19 nt, Artificial Sequence
  Description of Artificial Sequence: Synthetic oligonucleotide
  Sense strand starting at position 3444 of SEQ ID NO: 2317
uauuguggucuaugaacau

SEQ ID NO: 179793 - RNA, 19 nt, Artificial Sequence
  Description of Artificial Sequence: Synthetic oligonucleotide
  Antisense strand to SEQ ID NO: 179792
auguucauagaccacaaua

SEQ ID NO: 179794 - RNA, 19 nt, Artificial Sequence
  Description of Artificial Sequence: Synthetic oligonucleotide
  Sense strand starting at position 3442 of SEQ ID NO: 2317
aguauuguggucuaugaac

SEQ ID NO: 179795 - RNA, 19 nt, Artificial Sequence
  Description of Artificial Sequence: Synthetic oligonucleotide
  Antisense strand to SEQ ID NO: 179794
guucauagaccacaauacu

SEQ ID NO: 179796 - RNA, 19 nt, Artificial Sequence
  Description of Artificial Sequence: Synthetic oligonucleotide
  Sense strand starting at position 3429 of SEQ ID NO: 2317
accuuaauggaguaguauu

SEQ ID NO: 179797 - RNA, 19 nt, Artificial Sequence
  Description of Artificial Sequence: Synthetic oligonucleotide
  Antisense strand to SEQ ID NO: 179796
aauacuacuccauuaaggu

SEQ ID NO: 179798 - RNA, 19 nt, Artificial Sequence
  Description of Artificial Sequence: Synthetic oligonucleotide
  Sense strand starting at position 3402 of SEQ ID NO: 2317
guaucauugucaguaaaga

SEQ ID NO: 179799 - RNA, 19 nt, Artificial Sequence
  Description of Artificial Sequence: Synthetic oligonucleotide
  Antisense strand to SEQ ID NO: 179798
ucuuuacugacaaugauac

SEQ ID NO: 179800 - RNA, 19 nt, Artificial Sequence
  Description of Artificial Sequence: Synthetic oligonucleotide
  Sense strand starting at position 3370 of SEQ ID NO: 2317
gcuagauguguuuggauuu

SEQ ID NO: 179801 - RNA, 19 nt, Artificial Sequence
  Description of Artificial Sequence: Synthetic oligonucleotide
  Antisense strand to SEQ ID NO: 179800
aaauccaaacacaucuagc

SEQ ID NO: 179802 - RNA, 19 nt, Artificial Sequence
  Description of Artificial Sequence: Synthetic oligonucleotide
  Sense strand starting at position 3311 of SEQ ID NO: 2317
aguugaucaccuugaagau

SEQ ID NO: 179803 - RNA, 19 nt, Artificial Sequence
  Description of Artificial Sequence: Synthetic oligonucleotide
  Antisense strand to SEQ ID NO: 179802
aucuucaaggugaucaacu

SEQ ID NO: 179804 - RNA, 19 nt, Artificial Sequence
  Description of Artificial Sequence: Synthetic oligonucleotide
  Sense strand starting at position 3308 of SEQ ID NO: 2317
guaaguugaucaccuugaa

SEQ ID NO: 179805 - RNA, 19 nt, Artificial Sequence
  Description of Artificial Sequence: Synthetic oligonucleotide
  Antisense strand to SEQ ID NO: 179804
uucaaggugaucaacuuac

SEQ ID NO: 179806 - RNA, 19 nt, Artificial Sequence
  Description of Artificial Sequence: Synthetic oligonucleotide
  Sense strand starting at position 2988 of SEQ ID NO: 2317
uggguuagccaggaauauu

SEQ ID NO: 179807 - RNA, 19 nt, Artificial Sequence
  Description of Artificial Sequence: Synthetic oligonucleotide
  Antisense strand to SEQ ID NO: 179806
aauauuccuggcuaaccca

SEQ ID NO: 179808 - RNA, 19 nt, Artificial Sequence
  Description of Artificial Sequence: Synthetic oligonucleotide
  Sense strand starting at position 2987 of SEQ ID NO: 2317
auggguuagccaggaauau

SEQ ID NO: 179809 - RNA, 19 nt, Artificial Sequence
  Description of Artificial Sequence: Synthetic oligonucleotide
  Antisense strand to SEQ ID NO: 179808
auauuccuggcuaacccau

SEQ ID NO: 179810 - RNA, 19 nt, Artificial Sequence
  Description of Artificial Sequence: Synthetic oligonucleotide
  Sense strand starting at position 2895 of SEQ ID NO: 2317
guauguaauuuguucucaa

SEQ ID NO: 179811 - RNA, 19 nt, Artificial Sequence
  Description of Artificial Sequence: Synthetic oligonucleotide
  Antisense strand to SEQ ID NO: 179810
uugagaacaaauuacauac

SEQ ID NO: 179812 - RNA, 19 nt, Artificial Sequence
  Description of Artificial Sequence: Synthetic oligonucleotide
  Sense strand starting at position 2886 of SEQ ID NO: 2317
acagaacagguauguaauu

SEQ ID NO: 179813 - RNA, 19 nt, Artificial Sequence
  Description of Artificial Sequence: Synthetic oligonucleotide
  Antisense strand to SEQ ID NO: 179812
aauuacauaccuguucugu

SEQ ID NO: 179814 - RNA, 19 nt, Artificial Sequence
  Description of Artificial Sequence: Synthetic oligonucleotide
  Sense strand starting at position 2843 of SEQ ID NO: 2317
gguggaaauauguacagcu

SEQ ID NO: 179815 - RNA, 19 nt, Artificial Sequence
  Description of Artificial Sequence: Synthetic oligonucleotide
  Antisense strand to SEQ ID NO: 179814
agcuguacauauuuccacc

SEQ ID NO: 179816 - RNA, 19 nt, Artificial Sequence
  Description of Artificial Sequence: Synthetic oligonucleotide
  Sense strand starting at position 2834 of SEQ ID NO: 2317
ucccuuuaagguggaaaua

SEQ ID NO: 179817 - RNA, 19 nt, Artificial Sequence
  Description of Artificial Sequence: Synthetic oligonucleotide
  Antisense strand to SEQ ID NO: 179816
uauuuccaccuuaaaggga

SEQ ID NO: 179818 - RNA, 19 nt, Artificial Sequence
  Description of Artificial Sequence: Synthetic oligonucleotide
  Sense strand starting at position 2323 of SEQ ID NO: 2317
aaaugagguugugauuuau

SEQ ID NO: 179819 - RNA, 19 nt, Artificial Sequence
  Description of Artificial Sequence: Synthetic oligonucleotide
  Antisense strand to SEQ ID NO: 179818
auaaaucacaaccucauuu

SEQ ID NO: 179820 - RNA, 19 nt, Artificial Sequence
  Description of Artificial Sequence: Synthetic oligonucleotide
  Sense strand starting at position 2320 of SEQ ID NO: 2317
gggaaaugagguugugauu

SEQ ID NO: 179821 - RNA, 19 nt, Artificial Sequence
  Description of Artificial Sequence: Synthetic oligonucleotide
  Antisense strand to SEQ ID NO: 179820
aaucacaaccucauuuccc

SEQ ID NO: 179822 - RNA, 19 nt, Artificial Sequence
  Description of Artificial Sequence: Synthetic oligonucleotide
  Sense strand starting at position 2309 of SEQ ID NO: 2317
ccauuagauuugggaaaug

SEQ ID NO: 179823 - RNA, 19 nt, Artificial Sequence
  Description of Artificial Sequence: Synthetic oligonucleotide
  Antisense strand to SEQ ID NO: 179822
cauuucccaaaucuaaugg

SEQ ID NO: 179824 - RNA, 19 nt, Artificial Sequence
  Description of Artificial Sequence: Synthetic oligonucleotide
  Sense strand starting at position 2308 of SEQ ID NO: 2317
accauuagauuugggaaau

SEQ ID NO: 179825 - RNA, 19 nt, Artificial Sequence
  Description of Artificial Sequence: Synthetic oligonucleotide
  Antisense strand to SEQ ID NO: 179824
auuucccaaaucuaauggu

SEQ ID NO: 179826 - RNA, 19 nt, Artificial Sequence
  Description of Artificial Sequence: Synthetic oligonucleotide
  Sense strand starting at position 2242 of SEQ ID NO: 2317
auccauugugcugaguaga

SEQ ID NO: 179827 - RNA, 19 nt, Artificial Sequence
  Description of Artificial Sequence: Synthetic oligonucleotide
  Antisense strand to SEQ ID NO: 179826
ucuacucagcacaauggau

SEQ ID NO: 179828 - RNA, 19 nt, Artificial Sequence
  Description of Artificial Sequence: Synthetic oligonucleotide
  Sense strand starting at position 2172 of SEQ ID NO: 2317
aucguugaucaugggaaca

SEQ ID NO: 179829 - RNA, 19 nt, Artificial Sequence
  Description of Artificial Sequence: Synthetic oligonucleotide
  Antisense strand to SEQ ID NO: 179828
uguucccaugaucaacgau

SEQ ID NO: 179830 - RNA, 19 nt, Artificial Sequence
  Description of Artificial Sequence: Synthetic oligonucleotide
  Sense strand starting at position 2129 of SEQ ID NO: 2317
cguugaauucuacagagac

SEQ ID NO: 179831 - RNA, 19 nt, Artificial Sequence
  Description of Artificial Sequence: Synthetic oligonucleotide
  Antisense strand to SEQ ID NO: 179830
gucucuguagaauucaacg

SEQ ID NO: 179832 - RNA, 19 nt, Artificial Sequence
  Description of Artificial Sequence: Synthetic oligonucleotide
  Sense strand starting at position 2117 of SEQ ID NO: 2317
ccaacuuaaccacguugaa

SEQ ID NO: 179833 - RNA, 19 nt, Artificial Sequence
  Description of Artificial Sequence: Synthetic oligonucleotide
  Antisense strand to SEQ ID NO: 179832
uucaacgugguuaaguugg

SEQ ID NO: 179834 - RNA, 19 nt, Artificial Sequence
  Description of Artificial Sequence: Synthetic oligonucleotide
  Sense strand starting at position 1601 of SEQ ID NO: 2317
uagguauggguauggauua

SEQ ID NO: 179835 - RNA, 19 nt, Artificial Sequence
  Description of Artificial Sequence: Synthetic oligonucleotide
  Antisense strand to SEQ ID NO: 179834
uaauccauacccauaccua

SEQ ID NO: 179836 - RNA, 19 nt, Artificial Sequence
  Description of Artificial Sequence: Synthetic oligonucleotide
  Sense strand starting at position 1440 of SEQ ID NO: 2317
aggagagacuguucaaggu

SEQ ID NO: 179837 - RNA, 19 nt, Artificial Sequence
  Description of Artificial Sequence: Synthetic oligonucleotide
  Antisense strand to SEQ ID NO: 179836
accuugaacagucucuccu

SEQ ID NO: 179838 - RNA, 19 nt, Artificial Sequence
  Description of Artificial Sequence: Synthetic oligonucleotide
  Sense strand starting at position 1313 of SEQ ID NO: 2317
aguagaugucuccaguauc

SEQ ID NO: 179839 - RNA, 19 nt, Artificial Sequence
  Description of Artificial Sequence: Synthetic oligonucleotide
  Antisense strand to SEQ ID NO: 179838
gauacuggagacaucuacu

SEQ ID NO: 179840 - RNA, 19 nt, Artificial Sequence
  Description of Artificial Sequence: Synthetic oligonucleotide
  Sense strand starting at position 1310 of SEQ ID NO: 2317
ggaaguagaugucuccagu

SEQ ID NO: 179841 - RNA, 19 nt, Artificial Sequence
  Description of Artificial Sequence: Synthetic oligonucleotide
  Antisense strand to SEQ ID NO: 179840
acuggagacaucuacuucc

SEQ ID NO: 179842 - RNA, 19 nt, Artificial Sequence
  Description of Artificial Sequence: Synthetic oligonucleotide
  Sense strand starting at position 1180 of SEQ ID NO: 2317
uuccuagacucuucugagu

SEQ ID NO: 179843 - RNA, 19 nt, Artificial Sequence
  Description of Artificial Sequence: Synthetic oligonucleotide
  Antisense strand to SEQ ID NO: 179842
acucagaagagucuaggaa

SEQ ID NO: 179844 - RNA, 19 nt, Artificial Sequence
  Description of Artificial Sequence: Synthetic oligonucleotide
  Sense strand starting at position 1151 of SEQ ID NO: 2317
gcaccagaguaauuaauua

SEQ ID NO: 179845 - RNA, 19 nt, Artificial Sequence
  Description of Artificial Sequence: Synthetic oligonucleotide
  Antisense strand to SEQ ID NO: 179844
uaauuaauuacucuggugc

SEQ ID NO: 179846 - RNA, 19 nt, Artificial Sequence
  Description of Artificial Sequence: Synthetic oligonucleotide
  Sense strand starting at position 1148 of SEQ ID NO: 2317
ggugcaccagaguaauuaa

SEQ ID NO: 179847 - RNA, 19 nt, Artificial Sequence
  Description of Artificial Sequence: Synthetic oligonucleotide
  Antisense strand to SEQ ID NO: 179846
uuaauuacucuggugcacc

SEQ ID NO: 179848 - RNA, 19 nt, Artificial Sequence
  Description of Artificial Sequence: Synthetic oligonucleotide
  Sense strand starting at position 1145 of SEQ ID NO: 2317
cuuggugcaccagaguaau

SEQ ID NO: 179849 - RNA, 19 nt, Artificial Sequence
  Description of Artificial Sequence: Synthetic oligonucleotide
  Antisense strand to SEQ ID NO: 179848
auuacucuggugcaccaag

SEQ ID NO: 179850 - RNA, 19 nt, Artificial Sequence
  Description of Artificial Sequence: Synthetic oligonucleotide
  Sense strand starting at position 803 of SEQ ID NO: 2317
gugucuaaggaaggagaau

SEQ ID NO: 179851 - RNA, 19 nt, Artificial Sequence
  Description of Artificial Sequence: Synthetic oligonucleotide
  Antisense strand to SEQ ID NO: 179850
auucuccuuccuuagacac

SEQ ID NO: 179852 - RNA, 19 nt, Artificial Sequence
  Description of Artificial Sequence: Synthetic oligonucleotide
  Sense strand starting at position 614 of SEQ ID NO: 2317
uuaacugguggcuauagaa

SEQ ID NO: 179853 - RNA, 19 nt, Artificial Sequence
  Description of Artificial Sequence: Synthetic oligonucleotide
  Antisense strand to SEQ ID NO: 179852
uucuauagccaccaguuaa

SEQ ID NO: 179854 - RNA, 19 nt, Artificial Sequence
  Description of Artificial Sequence: Synthetic oligonucleotide
  Sense strand starting at position 401 of SEQ ID NO: 2317
ccuagauuaauauguggag

SEQ ID NO: 179855 - RNA, 19 nt, Artificial Sequence
  Description of Artificial Sequence: Synthetic oligonucleotide
  Antisense strand to SEQ ID NO: 179854
cuccacauauuaaucuagg

SEQ ID NO: 179856 - RNA, 19 nt, Artificial Sequence
  Description of Artificial Sequence: Synthetic oligonucleotide
  Sense strand starting at position 371 of SEQ ID NO: 2317
auguuaucagcugauauga

SEQ ID NO: 179857 - RNA, 19 nt, Artificial Sequence
  Description of Artificial Sequence: Synthetic oligonucleotide
  Antisense strand to SEQ ID NO: 179856
ucauaucagcugauaacau

SEQ ID NO: 179858 - RNA, 19 nt, Artificial Sequence
  Description of Artificial Sequence: Synthetic oligonucleotide
  Sense strand starting at position 358 of SEQ ID NO: 2317
gcuuuaaauguccauguua

SEQ ID NO: 179859 - RNA, 19 nt, Artificial Sequence
  Description of Artificial Sequence: Synthetic oligonucleotide
  Antisense strand to SEQ ID NO: 179858
uaacauggacauuuaaagc

SEQ ID NO: 179860 - RNA, 19 nt, Artificial Sequence
  Description of Artificial Sequence: Synthetic oligonucleotide
  Sense strand starting at position 336 of SEQ ID NO: 2317
cauacaguuuaagugguau

SEQ ID NO: 179861 - RNA, 19 nt, Artificial Sequence
  Description of Artificial Sequence: Synthetic oligonucleotide
  Antisense strand to SEQ ID NO: 179860
auaccacuuaaacuguaug

SEQ ID NO: 179862 - RNA, 19 nt, Artificial Sequence
  Description of Artificial Sequence: Synthetic oligonucleotide
  Sense strand starting at position 180 of SEQ ID NO: 2317
aguggaaguuaacuuuaua

SEQ ID NO: 179863 - RNA, 19 nt, Artificial Sequence
  Description of Artificial Sequence: Synthetic oligonucleotide
  Antisense strand to SEQ ID NO: 179862
uauaaaguuaacuuccacu

SEQ ID NO: 179864 - RNA, 19 nt, Artificial Sequence
  Description of Artificial Sequence: Synthetic oligonucleotide
  Sense strand starting at position 103 of SEQ ID NO: 2317
gagauagaguugucuuaua

SEQ ID NO: 179865 - RNA, 19 nt, Artificial Sequence
  Description of Artificial Sequence: Synthetic oligonucleotide
  Antisense strand to SEQ ID NO: 179864
uauaagacaacucuaucuc

SEQ ID NO: 179866 - RNA, 19 nt, Artificial Sequence
  Description of Artificial Sequence: Synthetic oligonucleotide
  Sense strand starting at position 101 of SEQ ID NO: 2317
gugagauagaguugucuua

SEQ ID NO: 179867 - RNA, 19 nt, Artificial Sequence
  Description of Artificial Sequence: Synthetic oligonucleotide
  Antisense strand to SEQ ID NO: 179866
uaagacaacucuaucucac

SEQ ID NO: 179868 - RNA, 19 nt, Artificial Sequence
  Description of Artificial Sequence: Synthetic oligonucleotide
  Sense strand starting at position 3868 of SEQ ID NO: 2319
ggugaaucccaggagcacu

SEQ ID NO: 179869 - RNA, 19 nt, Artificial Sequence
  Description of Artificial Sequence: Synthetic oligonucleotide
  Antisense strand to SEQ ID NO: 179868
agugcuccugggauucacc

SEQ ID NO: 179870 - RNA, 19 nt, Artificial Sequence
  Description of Artificial Sequence: Synthetic oligonucleotide
  Sense strand starting at position 3630 of SEQ ID NO: 2319
uguaccauagucgaggaaa

SEQ ID NO: 179871 - RNA, 19 nt, Artificial Sequence
  Description of Artificial Sequence: Synthetic oligonucleotide
  Antisense strand to SEQ ID NO: 179870
uuuccucgacuaugguaca

SEQ ID NO: 179872 - RNA, 19 nt, Artificial Sequence
  Description of Artificial Sequence: Synthetic oligonucleotide
  Sense strand starting at position 3620 of SEQ ID NO: 2319
cuuacuguacuguaccaua

SEQ ID NO: 179873 - RNA, 19 nt, Artificial Sequence
  Description of Artificial Sequence: Synthetic oligonucleotide
  Antisense strand to SEQ ID NO: 179872
uaugguacaguacaguaag

SEQ ID NO: 179874 - RNA, 19 nt, Artificial Sequence
  Description of Artificial Sequence: Synthetic oligonucleotide
  Sense strand starting at position 3612 of SEQ ID NO: 2319
agucaauacuuacuguacu

SEQ ID NO: 179875 - RNA, 19 nt, Artificial Sequence
  Description of Artificial Sequence: Synthetic oligonucleotide
  Antisense strand to SEQ ID NO: 179874
aguacaguaaguauugacu

SEQ ID NO: 179876 - RNA, 19 nt, Artificial Sequence
  Description of Artificial Sequence: Synthetic oligonucleotide
  Sense strand starting at position 3503 of SEQ ID NO: 2319
augacuugaccaugccaaa

SEQ ID NO: 179877 - RNA, 19 nt, Artificial Sequence
  Description of Artificial Sequence: Synthetic oligonucleotide
  Antisense strand to SEQ ID NO: 179876
uuuggcauggucaagucau

SEQ ID NO: 179878 - RNA, 19 nt, Artificial Sequence
  Description of Artificial Sequence: Synthetic oligonucleotide
  Sense strand starting at position 3364 of SEQ ID NO: 2319
uaagcagauuccuugagga

SEQ ID NO: 179879 - RNA, 19 nt, Artificial Sequence
  Description of Artificial Sequence: Synthetic oligonucleotide
  Antisense strand to SEQ ID NO: 179878
uccucaaggaaucugcuua

SEQ ID NO: 179880 - RNA, 19 nt, Artificial Sequence
  Description of Artificial Sequence: Synthetic oligonucleotide
  Sense strand starting at position 3355 of SEQ ID NO: 2319
ucaauugacuaagcagauu

SEQ ID NO: 179881 - RNA, 19 nt, Artificial Sequence
  Description of Artificial Sequence: Synthetic oligonucleotide
  Antisense strand to SEQ ID NO: 179880
aaucugcuuagucaauuga

SEQ ID NO: 179882 - RNA, 19 nt, Artificial Sequence
  Description of Artificial Sequence: Synthetic oligonucleotide
  Sense strand starting at position 3344 of SEQ ID NO: 2319
cugugaauacgucaauuga

SEQ ID NO: 179883 - RNA, 19 nt, Artificial Sequence
  Description of Artificial Sequence: Synthetic oligonucleotide
  Antisense strand to SEQ ID NO: 179882
ucaauugacguauucacag

SEQ ID NO: 179884 - RNA, 19 nt, Artificial Sequence
  Description of Artificial Sequence: Synthetic oligonucleotide
  Sense strand starting at position 3261 of SEQ ID NO: 2319
guaacuuggcuagaauaug

SEQ ID NO: 179885 - RNA, 19 nt, Artificial Sequence
  Description of Artificial Sequence: Synthetic oligonucleotide
  Antisense strand to SEQ ID NO: 179884
cauauucuagccaaguuac

SEQ ID NO: 179886 - RNA, 19 nt, Artificial Sequence
  Description of Artificial Sequence: Synthetic oligonucleotide
  Sense strand starting at position 3258 of SEQ ID NO: 2319
ggaguaacuuggcuagaau

SEQ ID NO: 179887 - RNA, 19 nt, Artificial Sequence
  Description of Artificial Sequence: Synthetic oligonucleotide
  Antisense strand to SEQ ID NO: 179886
auucuagccaaguuacucc

SEQ ID NO: 179888 - RNA, 19 nt, Artificial Sequence
  Description of Artificial Sequence: Synthetic oligonucleotide
  Sense strand starting at position 3257 of SEQ ID NO: 2319
uggaguaacuuggcuagaa

SEQ ID NO: 179889 - RNA, 19 nt, Artificial Sequence
  Description of Artificial Sequence: Synthetic oligonucleotide
  Antisense strand to SEQ ID NO: 179888
uucuagccaaguuacucca

SEQ ID NO: 179890 - RNA, 19 nt, Artificial Sequence
  Description of Artificial Sequence: Synthetic oligonucleotide
  Sense strand starting at position 3195 of SEQ ID NO: 2319
uggucauguguugaacaca

SEQ ID NO: 179891 - RNA, 19 nt, Artificial Sequence
  Description of Artificial Sequence: Synthetic oligonucleotide
  Antisense strand to SEQ ID NO: 179890
uguguucaacacaugacca

SEQ ID NO: 179892 - RNA, 19 nt, Artificial Sequence
  Description of Artificial Sequence: Synthetic oligonucleotide
  Sense strand starting at position 3055 of SEQ ID NO: 2319
gugucagaauagguaacua

SEQ ID NO: 179893 - RNA, 19 nt, Artificial Sequence
  Description of Artificial Sequence: Synthetic oligonucleotide
  Antisense strand to SEQ ID NO: 179892
uaguuaccuauucugacac

SEQ ID NO: 179894 - RNA, 19 nt, Artificial Sequence
  Description of Artificial Sequence: Synthetic oligonucleotide
  Sense strand starting at position 3038 of SEQ ID NO: 2319
gaagaaucauguuccuggu

SEQ ID NO: 179895 - RNA, 19 nt, Artificial Sequence
  Description of Artificial Sequence: Synthetic oligonucleotide
  Antisense strand to SEQ ID NO: 179894
accaggaacaugauucuuc

SEQ ID NO: 179896 - RNA, 19 nt, Artificial Sequence
  Description of Artificial Sequence: Synthetic oligonucleotide
  Sense strand starting at position 3029 of SEQ ID NO: 2319
auguuuguugaagaaucau

SEQ ID NO: 179897 - RNA, 19 nt, Artificial Sequence
  Description of Artificial Sequence: Synthetic oligonucleotide
  Antisense strand to SEQ ID NO: 179896
augauucuucaacaaacau

SEQ ID NO: 179898 - RNA, 19 nt, Artificial Sequence
  Description of Artificial Sequence: Synthetic oligonucleotide
  Sense strand starting at position 2996 of SEQ ID NO: 2319
cgcugugauccggucccau

SEQ ID NO: 179899 - RNA, 19 nt, Artificial Sequence
  Description of Artificial Sequence: Synthetic oligonucleotide
  Antisense strand to SEQ ID NO: 179898
augggaccggaucacagcg

SEQ ID NO: 179900 - RNA, 19 nt, Artificial Sequence
  Description of Artificial Sequence: Synthetic oligonucleotide
  Sense strand starting at position 2763 of SEQ ID NO: 2319
aggguuauuugaggaugaa

SEQ ID NO: 179901 - RNA, 19 nt, Artificial Sequence
  Description of Artificial Sequence: Synthetic oligonucleotide
  Antisense strand to SEQ ID NO: 179900
uucauccucaaauaacccu

SEQ ID NO: 179902 - RNA, 19 nt, Artificial Sequence
  Description of Artificial Sequence: Synthetic oligonucleotide
  Sense strand starting at position 2680 of SEQ ID NO: 2319
uugugugaccuugaugaag

SEQ ID NO: 179903 - RNA, 19 nt, Artificial Sequence
  Description of Artificial Sequence: Synthetic oligonucleotide
  Antisense strand to SEQ ID NO: 179902
cuucaucaaggucacacaa

SEQ ID NO: 179904 - RNA, 19 nt, Artificial Sequence
  Description of Artificial Sequence: Synthetic oligonucleotide
  Sense strand starting at position 2514 of SEQ ID NO: 2319
gagucaaucaguggauggu

SEQ ID NO: 179905 - RNA, 19 nt, Artificial Sequence
  Description of Artificial Sequence: Synthetic oligonucleotide
  Antisense strand to SEQ ID NO: 179904
accauccacugauugacuc

SEQ ID NO: 179906 - RNA, 19 nt, Artificial Sequence
  Description of Artificial Sequence: Synthetic oligonucleotide
  Sense strand starting at position 2501 of SEQ ID NO: 2319
gauggaaauaugcgaguca

SEQ ID NO: 179907 - RNA, 19 nt, Artificial Sequence
  Description of Artificial Sequence: Synthetic oligonucleotide
  Antisense strand to SEQ ID NO: 179906
ugacucgcauauuuccauc

SEQ ID NO: 179908 - RNA, 19 nt, Artificial Sequence
  Description of Artificial Sequence: Synthetic oligonucleotide
  Sense strand starting at position 2492 of SEQ ID NO: 2319
gcuuuaagugauggaaaua

SEQ ID NO: 179909 - RNA, 19 nt, Artificial Sequence
  Description of Artificial Sequence: Synthetic oligonucleotide
  Antisense strand to SEQ ID NO: 179908
uauuuccaucacuuaaagc

SEQ ID NO: 179910 - RNA, 19 nt, Artificial Sequence
  Description of Artificial Sequence: Synthetic oligonucleotide
  Sense strand starting at position 2488 of SEQ ID NO: 2319
aggagcuuuaagugaugga

SEQ ID NO: 179911 - RNA, 19 nt, Artificial Sequence
  Description of Artificial Sequence: Synthetic oligonucleotide
  Antisense strand to SEQ ID NO: 179910
uccaucacuuaaagcuccu

SEQ ID NO: 179912 - RNA, 19 nt, Artificial Sequence
  Description of Artificial Sequence: Synthetic oligonucleotide
  Sense strand starting at position 2358 of SEQ ID NO: 2319
gggccagggaugugagaaa

SEQ ID NO: 179913 - RNA, 19 nt, Artificial Sequence
  Description of Artificial Sequence: Synthetic oligonucleotide
  Antisense strand to SEQ ID NO: 179912
uuucucacaucccuggccc

SEQ ID NO: 179914 - RNA, 19 nt, Artificial Sequence
  Description of Artificial Sequence: Synthetic oligonucleotide
  Sense strand starting at position 2194 of SEQ ID NO: 2319
ggaccugagaucuguguga

SEQ ID NO: 179915 - RNA, 19 nt, Artificial Sequence
  Description of Artificial Sequence: Synthetic oligonucleotide
  Antisense strand to SEQ ID NO: 179914
ucacacagaucucaggucc

SEQ ID NO: 179916 - RNA, 19 nt, Artificial Sequence
  Description of Artificial Sequence: Synthetic oligonucleotide
  Sense strand starting at position 1231 of SEQ ID NO: 2319
gcauaaccauggcuaaaua

SEQ ID NO: 179917 - RNA, 19 nt, Artificial Sequence
  Description of Artificial Sequence: Synthetic oligonucleotide
  Antisense strand to SEQ ID NO: 179916
uauuuagccaugguuaugc

SEQ ID NO: 179918 - RNA, 19 nt, Artificial Sequence
  Description of Artificial Sequence: Synthetic oligonucleotide
  Sense strand starting at position 1086 of SEQ ID NO: 2319
ucauguuuaccugauuacu

SEQ ID NO: 179919 - RNA, 19 nt, Artificial Sequence
  Description of Artificial Sequence: Synthetic oligonucleotide
  Antisense strand to SEQ ID NO: 179918
aguaaucagguaaacauga

SEQ ID NO: 179920 - RNA, 19 nt, Artificial Sequence
  Description of Artificial Sequence: Synthetic oligonucleotide
  Sense strand starting at position 1081 of SEQ ID NO: 2319
uuaagucauguuuaccuga

SEQ ID NO: 179921 - RNA, 19 nt, Artificial Sequence
  Description of Artificial Sequence: Synthetic oligonucleotide
  Antisense strand to SEQ ID NO: 179920
ucagguaaacaugacuuaa

SEQ ID NO: 179922 - RNA, 19 nt, Artificial Sequence
  Description of Artificial Sequence: Synthetic oligonucleotide
  Sense strand starting at position 1027 of SEQ ID NO: 2319
auucuugaguaugugacau

SEQ ID NO: 179923 - RNA, 19 nt, Artificial Sequence
  Description of Artificial Sequence: Synthetic oligonucleotide
  Antisense strand to SEQ ID NO: 179922
augucacauacucaagaau

SEQ ID NO: 179924 - RNA, 19 nt, Artificial Sequence
  Description of Artificial Sequence: Synthetic oligonucleotide
  Sense strand starting at position 1026 of SEQ ID NO: 2319
aauucuugaguaugugaca

SEQ ID NO: 179925 - RNA, 19 nt, Artificial Sequence
  Description of Artificial Sequence: Synthetic oligonucleotide
  Antisense strand to SEQ ID NO: 179924
ugucacauacucaagaauu

SEQ ID NO: 179926 - RNA, 19 nt, Artificial Sequence
  Description of Artificial Sequence: Synthetic oligonucleotide
  Sense strand starting at position 1024 of SEQ ID NO: 2319
acaauucuugaguauguga

SEQ ID NO: 179927 - RNA, 19 nt, Artificial Sequence
  Description of Artificial Sequence: Synthetic oligonucleotide
  Antisense strand to SEQ ID NO: 179926
ucacauacucaagaauugu

SEQ ID NO: 179928 - RNA, 19 nt, Artificial Sequence
  Description of Artificial Sequence: Synthetic oligonucleotide
  Sense strand starting at position 1019 of SEQ ID NO: 2319
gguacacaauucuugagua

SEQ ID NO: 179929 - RNA, 19 nt, Artificial Sequence
  Description of Artificial Sequence: Synthetic oligonucleotide
  Antisense strand to SEQ ID NO: 179928
uacucaagaauuguguacc

SEQ ID NO: 179930 - RNA, 19 nt, Artificial Sequence
  Description of Artificial Sequence: Synthetic oligonucleotide
  Sense strand starting at position 1004 of SEQ ID NO: 2319
gaguaaauauuaucaggua

SEQ ID NO: 179931 - RNA, 19 nt, Artificial Sequence
  Description of Artificial Sequence: Synthetic oligonucleotide
  Antisense strand to SEQ ID NO: 179930
uaccugauaauauuuacuc

SEQ ID NO: 179932 - RNA, 19 nt, Artificial Sequence
  Description of Artificial Sequence: Synthetic oligonucleotide
  Sense strand starting at position 854 of SEQ ID NO: 2319
guauauagauaugcgagau

SEQ ID NO: 179933 - RNA, 19 nt, Artificial Sequence
  Description of Artificial Sequence: Synthetic oligonucleotide
  Antisense strand to SEQ ID NO: 179932
aucucgcauaucuauauac

SEQ ID NO: 179934 - RNA, 19 nt, Artificial Sequence
  Description of Artificial Sequence: Synthetic oligonucleotide
  Sense strand starting at position 853 of SEQ ID NO: 2319
uguauauagauaugcgaga

SEQ ID NO: 179935 - RNA, 19 nt, Artificial Sequence
  Description of Artificial Sequence: Synthetic oligonucleotide
  Antisense strand to SEQ ID NO: 179934
ucucgcauaucuauauaca

SEQ ID NO: 179936 - RNA, 19 nt, Artificial Sequence
  Description of Artificial Sequence: Synthetic oligonucleotide
  Sense strand starting at position 813 of SEQ ID NO: 2319
ccaaguuaauaugcugaga

SEQ ID NO: 179937 - RNA, 19 nt, Artificial Sequence
  Description of Artificial Sequence: Synthetic oligonucleotide
  Antisense strand to SEQ ID NO: 179936
ucucagcauauuaacuugg

SEQ ID NO: 179938 - RNA, 19 nt, Artificial Sequence
  Description of Artificial Sequence: Synthetic oligonucleotide
  Sense strand starting at position 801 of SEQ ID NO: 2319
ggaauaacuuguccaaguu

SEQ ID NO: 179939 - RNA, 19 nt, Artificial Sequence
  Description of Artificial Sequence: Synthetic oligonucleotide
  Antisense strand to SEQ ID NO: 179938
aacuuggacaaguuauucc

SEQ ID NO: 179940 - RNA, 19 nt, Artificial Sequence
  Description of Artificial Sequence: Synthetic oligonucleotide
  Sense strand starting at position 800 of SEQ ID NO: 2319
aggaauaacuuguccaagu

SEQ ID NO: 179941 - RNA, 19 nt, Artificial Sequence
  Description of Artificial Sequence: Synthetic oligonucleotide
  Antisense strand to SEQ ID NO: 179940
acuuggacaaguuauuccu

SEQ ID NO: 179942 - RNA, 19 nt, Artificial Sequence
  Description of Artificial Sequence: Synthetic oligonucleotide
  Sense strand starting at position 483 of SEQ ID NO: 2319
ggacauagagauugugguu

SEQ ID NO: 179943 - RNA, 19 nt, Artificial Sequence
  Description of Artificial Sequence: Synthetic oligonucleotide
  Antisense strand to SEQ ID NO: 179942
aaccacaaucucuaugucc

SEQ ID NO: 179944 - RNA, 19 nt, Artificial Sequence
  Description of Artificial Sequence: Synthetic oligonucleotide
  Sense strand starting at position 120 of SEQ ID NO: 2319
cuuuauuagagucaggguu

SEQ ID NO: 179945 - RNA, 19 nt, Artificial Sequence
  Description of Artificial Sequence: Synthetic oligonucleotide
  Antisense strand to SEQ ID NO: 179944
aacccugacucuaauaaag

SEQ ID NO: 179946 - RNA, 19 nt, Artificial Sequence
  Description of Artificial Sequence: Synthetic oligonucleotide
  Sense strand starting at position 111 of SEQ ID NO: 2319
caccguguacuuuauuaga

SEQ ID NO: 179947 - RNA, 19 nt, Artificial Sequence
  Description of Artificial Sequence: Synthetic oligonucleotide
  Antisense strand to SEQ ID NO: 179946
ucuaauaaaguacacggug

SEQ ID NO: 179948 - RNA, 19 nt, Artificial Sequence
  Description of Artificial Sequence: Synthetic oligonucleotide
  Sense strand starting at position 3849 of SEQ ID NO: 2320
uuccuucucccauagguga

SEQ ID NO: 179949 - RNA, 19 nt, Artificial Sequence
  Description of Artificial Sequence: Synthetic oligonucleotide
  Antisense strand to SEQ ID NO: 179948
ucaccuaugggagaaggaa

SEQ ID NO: 179950 - RNA, 19 nt, Artificial Sequence
  Description of Artificial Sequence: Synthetic oligonucleotide
  Sense strand starting at position 3785 of SEQ ID NO: 2320
gaggucucugaguacuugu

SEQ ID NO: 179951 - RNA, 19 nt, Artificial Sequence
  Description of Artificial Sequence: Synthetic oligonucleotide
  Antisense strand to SEQ ID NO: 179950
acaaguacucagagaccuc

SEQ ID NO: 179952 - RNA, 19 nt, Artificial Sequence
  Description of Artificial Sequence: Synthetic oligonucleotide
  Sense strand starting at position 3784 of SEQ ID NO: 2320
ggaggucucugaguacuug

SEQ ID NO: 179953 - RNA, 19 nt, Artificial Sequence
  Description of Artificial Sequence: Synthetic oligonucleotide
  Antisense strand to SEQ ID NO: 179952
caaguacucagagaccucc

SEQ ID NO: 179954 - RNA, 19 nt, Artificial Sequence
  Description of Artificial Sequence: Synthetic oligonucleotide
  Sense strand starting at position 3781 of SEQ ID NO: 2320
ugaggaggucucugaguac

SEQ ID NO: 179955 - RNA, 19 nt, Artificial Sequence
  Description of Artificial Sequence: Synthetic oligonucleotide
  Antisense strand to SEQ ID NO: 179954
guacucagagaccuccuca

SEQ ID NO: 179956 - RNA, 19 nt, Artificial Sequence
  Description of Artificial Sequence: Synthetic oligonucleotide
  Sense strand starting at position 3724 of SEQ ID NO: 2320
aauuauagcucagugagag

SEQ ID NO: 179957 - RNA, 19 nt, Artificial Sequence
  Description of Artificial Sequence: Synthetic oligonucleotide
  Antisense strand to SEQ ID NO: 179956
cucucacugagcuauaauu

SEQ ID NO: 179958 - RNA, 19 nt, Artificial Sequence
  Description of Artificial Sequence: Synthetic oligonucleotide
  Sense strand starting at position 3720 of SEQ ID NO: 2320
gaggaauuauagcucagug

SEQ ID NO: 179959 - RNA, 19 nt, Artificial Sequence
  Description of Artificial Sequence: Synthetic oligonucleotide
  Antisense strand to SEQ ID NO: 179958
cacugagcuauaauuccuc

SEQ ID NO: 179960 - RNA, 19 nt, Artificial Sequence
  Description of Artificial Sequence: Synthetic oligonucleotide
  Sense strand starting at position 3705 of SEQ ID NO: 2320
gggaguucuuucccagagg

SEQ ID NO: 179961 - RNA, 19 nt, Artificial Sequence
  Description of Artificial Sequence: Synthetic oligonucleotide
  Antisense strand to SEQ ID NO: 179960
ccucugggaaagaacuccc

SEQ ID NO: 179962 - RNA, 19 nt, Artificial Sequence
  Description of Artificial Sequence: Synthetic oligonucleotide
  Sense strand starting at position 3261 of SEQ ID NO: 2320
uguguguuugugcucgagu

SEQ ID NO: 179963 - RNA, 19 nt, Artificial Sequence
  Description of Artificial Sequence: Synthetic oligonucleotide
  Antisense strand to SEQ ID NO: 179962
acucgagcacaaacacaca

SEQ ID NO: 179964 - RNA, 19 nt, Artificial Sequence
  Description of Artificial Sequence: Synthetic oligonucleotide
  Sense strand starting at position 3239 of SEQ ID NO: 2320
uguguaucugugucuguga

SEQ ID NO: 179965 - RNA, 19 nt, Artificial Sequence
  Description of Artificial Sequence: Synthetic oligonucleotide
  Antisense strand to SEQ ID NO: 179964
ucacagacacagauacaca

SEQ ID NO: 179966 - RNA, 19 nt, Artificial Sequence
  Description of Artificial Sequence: Synthetic oligonucleotide
  Sense strand starting at position 2626 of SEQ ID NO: 2320
gggaaagugaauugugcuu

SEQ ID NO: 179967 - RNA, 19 nt, Artificial Sequence
  Description of Artificial Sequence: Synthetic oligonucleotide
  Antisense strand to SEQ ID NO: 179966
aagcacaauucacuuuccc

SEQ ID NO: 179968 - RNA, 19 nt, Artificial Sequence
  Description of Artificial Sequence: Synthetic oligonucleotide
  Sense strand starting at position 2443 of SEQ ID NO: 2320
ggacucugucucgaauaug

SEQ ID NO: 179969 - RNA, 19 nt, Artificial Sequence
  Description of Artificial Sequence: Synthetic oligonucleotide
  Antisense strand to SEQ ID NO: 179968
cauauucgagacagagucc

SEQ ID NO: 179970 - RNA, 19 nt, Artificial Sequence
  Description of Artificial Sequence: Synthetic oligonucleotide
  Sense strand starting at position 2295 of SEQ ID NO: 2320
gacugaguuugagcccaga

SEQ ID NO: 179971 - RNA, 19 nt, Artificial Sequence
  Description of Artificial Sequence: Synthetic oligonucleotide
  Antisense strand to SEQ ID NO: 179970
ucugggcucaaacucaguc

SEQ ID NO: 179972 - RNA, 19 nt, Artificial Sequence
  Description of Artificial Sequence: Synthetic oligonucleotide
  Sense strand starting at position 2113 of SEQ ID NO: 2320
gacaucagcccugguaaga

SEQ ID NO: 179973 - RNA, 19 nt, Artificial Sequence
  Description of Artificial Sequence: Synthetic oligonucleotide
  Antisense strand to SEQ ID NO: 179972
ucuuaccagggcugauguc

SEQ ID NO: 179974 - RNA, 19 nt, Artificial Sequence
  Description of Artificial Sequence: Synthetic oligonucleotide
  Sense strand starting at position 2112 of SEQ ID NO: 2320
ggacaucagcccugguaag

SEQ ID NO: 179975 - RNA, 19 nt, Artificial Sequence
  Description of Artificial Sequence: Synthetic oligonucleotide
  Antisense strand to SEQ ID NO: 179974
cuuaccagggcugaugucc

SEQ ID NO: 179976 - RNA, 19 nt, Artificial Sequence
  Description of Artificial Sequence: Synthetic oligonucleotide
  Sense strand starting at position 2060 of SEQ ID NO: 2320
gacugacugugagugucaa

SEQ ID NO: 179977 - RNA, 19 nt, Artificial Sequence
  Description of Artificial Sequence: Synthetic oligonucleotide
  Antisense strand to SEQ ID NO: 179976
uugacacucacagucaguc

SEQ ID NO: 179978 - RNA, 19 nt, Artificial Sequence
  Description of Artificial Sequence: Synthetic oligonucleotide
  Sense strand starting at position 2032 of SEQ ID NO: 2320
gugccuuugugauuuaaug

SEQ ID NO: 179979 - RNA, 19 nt, Artificial Sequence
  Description of Artificial Sequence: Synthetic oligonucleotide
  Antisense strand to SEQ ID NO: 179978
cauuaaaucacaaaggcac

SEQ ID NO: 179980 - RNA, 19 nt, Artificial Sequence
  Description of Artificial Sequence: Synthetic oligonucleotide
  Sense strand starting at position 2028 of SEQ ID NO: 2320
gaaugugccuuugugauuu

SEQ ID NO: 179981 - RNA, 19 nt, Artificial Sequence
  Description of Artificial Sequence: Synthetic oligonucleotide
  Antisense strand to SEQ ID NO: 179980
aaaucacaaaggcacauuc

SEQ ID NO: 179982 - RNA, 19 nt, Artificial Sequence
  Description of Artificial Sequence: Synthetic oligonucleotide
  Sense strand starting at position 2004 of SEQ ID NO: 2320
auaggaguaucaguagaug

SEQ ID NO: 179983 - RNA, 19 nt, Artificial Sequence
  Description of Artificial Sequence: Synthetic oligonucleotide
  Antisense strand to SEQ ID NO: 179982
caucuacugauacuccuau

SEQ ID NO: 179984 - RNA, 19 nt, Artificial Sequence
  Description of Artificial Sequence: Synthetic oligonucleotide
  Sense strand starting at position 1988 of SEQ ID NO: 2320
gucugaggccgggagaaua

SEQ ID NO: 179985 - RNA, 19 nt, Artificial Sequence
  Description of Artificial Sequence: Synthetic oligonucleotide
  Antisense strand to SEQ ID NO: 179984
uauucucccggccucagac

SEQ ID NO: 179986 - RNA, 19 nt, Artificial Sequence
  Description of Artificial Sequence: Synthetic oligonucleotide
  Sense strand starting at position 1647 of SEQ ID NO: 2320
aggguuauggcugaauacu

SEQ ID NO: 179987 - RNA, 19 nt, Artificial Sequence
  Description of Artificial Sequence: Synthetic oligonucleotide
  Antisense strand to SEQ ID NO: 179986
aguauucagccauaacccu

SEQ ID NO: 179988 - RNA, 19 nt, Artificial Sequence
  Description of Artificial Sequence: Synthetic oligonucleotide
  Sense strand starting at position 1646 of SEQ ID NO: 2320
gaggguuauggcugaauac

SEQ ID NO: 179989 - RNA, 19 nt, Artificial Sequence
  Description of Artificial Sequence: Synthetic oligonucleotide
  Antisense strand to SEQ ID NO: 179988
guauucagccauaacccuc

SEQ ID NO: 179990 - RNA, 19 nt, Artificial Sequence
  Description of Artificial Sequence: Synthetic oligonucleotide
  Sense strand starting at position 1609 of SEQ ID NO: 2320
agagguguuaaccagcuga

SEQ ID NO: 179991 - RNA, 19 nt, Artificial Sequence
  Description of Artificial Sequence: Synthetic oligonucleotide
  Antisense strand to SEQ ID NO: 179990
ucagcugguuaacaccucu

SEQ ID NO: 179992 - RNA, 19 nt, Artificial Sequence
  Description of Artificial Sequence: Synthetic oligonucleotide
  Sense strand starting at position 1440 of SEQ ID NO: 2320
ucuccucaguucucagaca

SEQ ID NO: 179993 - RNA, 19 nt, Artificial Sequence
  Description of Artificial Sequence: Synthetic oligonucleotide
  Antisense strand to SEQ ID NO: 179992
ugucugagaacugaggaga

SEQ ID NO: 179994 - RNA, 19 nt, Artificial Sequence
  Description of Artificial Sequence: Synthetic oligonucleotide
  Sense strand starting at position 1320 of SEQ ID NO: 2320
ugcugacagccuuaaugga

SEQ ID NO: 179995 - RNA, 19 nt, Artificial Sequence
  Description of Artificial Sequence: Synthetic oligonucleotide
  Antisense strand to SEQ ID NO: 179994
uccauuaaggcugucagca

SEQ ID NO: 179996 - RNA, 19 nt, Artificial Sequence
  Description of Artificial Sequence: Synthetic oligonucleotide
  Sense strand starting at position 1255 of SEQ ID NO: 2320
ggaugaucucugugaaaua

SEQ ID NO: 179997 - RNA, 19 nt, Artificial Sequence
  Description of Artificial Sequence: Synthetic oligonucleotide
  Antisense strand to SEQ ID NO: 179996
uauuucacagagaucaucc

SEQ ID NO: 179998 - RNA, 19 nt, Artificial Sequence
  Description of Artificial Sequence: Synthetic oligonucleotide
  Sense strand starting at position 713 of SEQ ID NO: 2320
aguguagccgcagaagaua

SEQ ID NO: 179999 - RNA, 19 nt, Artificial Sequence
  Description of Artificial Sequence: Synthetic oligonucleotide
  Antisense strand to SEQ ID NO: 179998
uaucuucugcggcuacacu

SEQ ID NO: 180000 - RNA, 19 nt, Artificial Sequence
  Description of Artificial Sequence: Synthetic oligonucleotide
  Sense strand starting at position 259 of SEQ ID NO: 2320
gagauaacguugguaaagu

SEQ ID NO: 180001 - RNA, 19 nt, Artificial Sequence
  Description of Artificial Sequence: Synthetic oligonucleotide
  Antisense strand to SEQ ID NO: 180000
acuuuaccaacguuaucuc

SEQ ID NO: 180002 - RNA, 19 nt, Artificial Sequence
  Description of Artificial Sequence: Synthetic oligonucleotide
  Sense strand starting at position 258 of SEQ ID NO: 2320
ugagauaacguugguaaag

SEQ ID NO: 180003 - RNA, 19 nt, Artificial Sequence
  Description of Artificial Sequence: Synthetic oligonucleotide
  Antisense strand to SEQ ID NO: 180002
cuuuaccaacguuaucuca

SEQ ID NO: 180004 - RNA, 19 nt, Artificial Sequence
  Description of Artificial Sequence: Synthetic oligonucleotide
  Sense strand starting at position 257 of SEQ ID NO: 2320
augagauaacguugguaaa

SEQ ID NO: 180005 - RNA, 19 nt, Artificial Sequence
  Description of Artificial Sequence: Synthetic oligonucleotide
  Antisense strand to SEQ ID NO: 180004
uuuaccaacguuaucucau

SEQ ID NO: 180006 - RNA, 19 nt, Artificial Sequence
  Description of Artificial Sequence: Synthetic oligonucleotide
  Sense strand starting at position 237 of SEQ ID NO: 2320
uguaaaguagcugagauua

SEQ ID NO: 180007 - RNA, 19 nt, Artificial Sequence
  Description of Artificial Sequence: Synthetic oligonucleotide
  Antisense strand to SEQ ID NO: 180006
uaaucucagcuacuuuaca

SEQ ID NO: 180008 - RNA, 19 nt, Artificial Sequence
  Description of Artificial Sequence: Synthetic oligonucleotide
  Sense strand starting at position 236 of SEQ ID NO: 2320
uuguaaaguagcugagauu

SEQ ID NO: 180009 - RNA, 19 nt, Artificial Sequence
  Description of Artificial Sequence: Synthetic oligonucleotide
  Antisense strand to SEQ ID NO: 180008
aaucucagcuacuuuacaa

SEQ ID NO: 180010 - RNA, 19 nt, Artificial Sequence
  Description of Artificial Sequence: Synthetic oligonucleotide
  Sense strand starting at position 235 of SEQ ID NO: 2320
cuuguaaaguagcugagau

SEQ ID NO: 180011 - RNA, 19 nt, Artificial Sequence
  Description of Artificial Sequence: Synthetic oligonucleotide
  Antisense strand to SEQ ID NO: 180010
aucucagcuacuuuacaag

SEQ ID NO: 180012 - RNA, 19 nt, Artificial Sequence
  Description of Artificial Sequence: Synthetic oligonucleotide
  Sense strand starting at position 225 of SEQ ID NO: 2320
auggcauauccuuguaaag

SEQ ID NO: 180013 - RNA, 19 nt, Artificial Sequence
  Description of Artificial Sequence: Synthetic oligonucleotide
  Antisense strand to SEQ ID NO: 180012
cuuuacaaggauaugccau

SEQ ID NO: 180014 - RNA, 19 nt, Artificial Sequence
  Description of Artificial Sequence: Synthetic oligonucleotide
  Sense strand starting at position 224 of SEQ ID NO: 2320
gauggcauauccuuguaaa

SEQ ID NO: 180015 - RNA, 19 nt, Artificial Sequence
  Description of Artificial Sequence: Synthetic oligonucleotide
  Antisense strand to SEQ ID NO: 180014
uuuacaaggauaugccauc

SEQ ID NO: 180016 - RNA, 19 nt, Artificial Sequence
  Description of Artificial Sequence: Synthetic oligonucleotide
  Sense strand starting at position 215 of SEQ ID NO: 2320
agguauaaugauggcauau

SEQ ID NO: 180017 - RNA, 19 nt, Artificial Sequence
  Description of Artificial Sequence: Synthetic oligonucleotide
  Antisense strand to SEQ ID NO: 180016
auaugccaucauuauaccu

SEQ ID NO: 180018 - RNA, 19 nt, Artificial Sequence
  Description of Artificial Sequence: Synthetic oligonucleotide
  Sense strand starting at position 184 of SEQ ID NO: 2320
ugggaauaaugagaauuga

SEQ ID NO: 180019 - RNA, 19 nt, Artificial Sequence
  Description of Artificial Sequence: Synthetic oligonucleotide
  Antisense strand to SEQ ID NO: 180018
ucaauucucauuauuccca

SEQ ID NO: 180020 - RNA, 19 nt, Artificial Sequence
  Description of Artificial Sequence: Synthetic oligonucleotide
  Sense strand starting at position 163 of SEQ ID NO: 2320
ggcgacuuuauagaacauu

SEQ ID NO: 180021 - RNA, 19 nt, Artificial Sequence
  Description of Artificial Sequence: Synthetic oligonucleotide
  Antisense strand to SEQ ID NO: 180020
aauguucuauaaagucgcc

SEQ ID NO: 180022 - RNA, 19 nt, Artificial Sequence
  Description of Artificial Sequence: Synthetic oligonucleotide
  Sense strand starting at position 73 of SEQ ID NO: 2320
auguauagaucaguugaca

SEQ ID NO: 180023 - RNA, 19 nt, Artificial Sequence
  Description of Artificial Sequence: Synthetic oligonucleotide
  Antisense strand to SEQ ID NO: 180022
ugucaacugaucuauacau

SEQ ID NO: 180024 - RNA, 19 nt, Artificial Sequence
  Description of Artificial Sequence: Synthetic oligonucleotide
  Sense strand starting at position 68 of SEQ ID NO: 2320
guuauauguauagaucagu

SEQ ID NO: 180025 - RNA, 19 nt, Artificial Sequence
  Description of Artificial Sequence: Synthetic oligonucleotide
  Antisense strand to SEQ ID NO: 180024
acugaucuauacauauaac

SEQ ID NO: 180026 - RNA, 19 nt, Artificial Sequence
  Description of Artificial Sequence: Synthetic oligonucleotide
  Sense strand starting at position 16 of SEQ ID NO: 2320
augccuggccaacaauaua

SEQ ID NO: 180027 - RNA, 19 nt, Artificial Sequence
  Description of Artificial Sequence: Synthetic oligonucleotide
  Antisense strand to SEQ ID NO: 180026
uauauuguuggccaggcau

SEQ ID NO: 180028 - RNA, 19 nt, Artificial Sequence
  Description of Artificial Sequence: Synthetic oligonucleotide
  Sense strand starting at position 183 of SEQ ID NO: 2321
gugaucuuaggugacuuaa

SEQ ID NO: 180029 - RNA, 19 nt, Artificial Sequence
  Description of Artificial Sequence: Synthetic oligonucleotide
  Antisense strand to SEQ ID NO: 180028
uuaagucaccuaagaucac

SEQ ID NO: 180030 - RNA, 19 nt, Artificial Sequence
  Description of Artificial Sequence: Synthetic oligonucleotide
  Sense strand starting at position 272 of SEQ ID NO: 2321
ugaggauuauguguaauaa

SEQ ID NO: 180031 - RNA, 19 nt, Artificial Sequence
  Description of Artificial Sequence: Synthetic oligonucleotide
  Antisense strand to SEQ ID NO: 180030
uuauuacacauaauccuca

SEQ ID NO: 180032 - RNA, 19 nt, Artificial Sequence
  Description of Artificial Sequence: Synthetic oligonucleotide
  Sense strand starting at position 307 of SEQ ID NO: 2321
agcacugucccugacacau

SEQ ID NO: 180033 - RNA, 19 nt, Artificial Sequence
  Description of Artificial Sequence: Synthetic oligonucleotide
  Antisense strand to SEQ ID NO: 180032
augugucagggacagugcu

SEQ ID NO: 180034 - RNA, 19 nt, Artificial Sequence
  Description of Artificial Sequence: Synthetic oligonucleotide
  Sense strand starting at position 347 of SEQ ID NO: 2321
uccagcuaucacuggaaag

SEQ ID NO: 180035 - RNA, 19 nt, Artificial Sequence
  Description of Artificial Sequence: Synthetic oligonucleotide
  Antisense strand to SEQ ID NO: 180034
cuuuccagugauagcugga

SEQ ID NO: 180036 - RNA, 19 nt, Artificial Sequence
  Description of Artificial Sequence: Synthetic oligonucleotide
  Sense strand starting at position 484 of SEQ ID NO: 2321
gcgugacaucuauaauuaa

SEQ ID NO: 180037 - RNA, 19 nt, Artificial Sequence
  Description of Artificial Sequence: Synthetic oligonucleotide
  Antisense strand to SEQ ID NO: 180036
uuaauuauagaugucacgc

SEQ ID NO: 180038 - RNA, 19 nt, Artificial Sequence
  Description of Artificial Sequence: Synthetic oligonucleotide
  Sense strand starting at position 507 of SEQ ID NO: 2321
uucugaaauuaagccagau

SEQ ID NO: 180039 - RNA, 19 nt, Artificial Sequence
  Description of Artificial Sequence: Synthetic oligonucleotide
  Antisense strand to SEQ ID NO: 180038
aucuggcuuaauuucagaa

SEQ ID NO: 180040 - RNA, 19 nt, Artificial Sequence
  Description of Artificial Sequence: Synthetic oligonucleotide
  Sense strand starting at position 570 of SEQ ID NO: 2321
uauaguaugcuugauguaa

SEQ ID NO: 180041 - RNA, 19 nt, Artificial Sequence
  Description of Artificial Sequence: Synthetic oligonucleotide
  Antisense strand to SEQ ID NO: 180040
uuacaucaagcauacuaua

SEQ ID NO: 180042 - RNA, 19 nt, Artificial Sequence
  Description of Artificial Sequence: Synthetic oligonucleotide
  Sense strand starting at position 717 of SEQ ID NO: 2321
gggcuaauggauugacaga

SEQ ID NO: 180043 - RNA, 19 nt, Artificial Sequence
  Description of Artificial Sequence: Synthetic oligonucleotide
  Antisense strand to SEQ ID NO: 180042
ucugucaauccauuagccc

SEQ ID NO: 180044 - RNA, 19 nt, Artificial Sequence
  Description of Artificial Sequence: Synthetic oligonucleotide
  Sense strand starting at position 765 of SEQ ID NO: 2321
auuaguugcaaucauggga

SEQ ID NO: 180045 - RNA, 19 nt, Artificial Sequence
  Description of Artificial Sequence: Synthetic oligonucleotide
  Antisense strand to SEQ ID NO: 180044
ucccaugauugcaacuaau

SEQ ID NO: 180046 - RNA, 19 nt, Artificial Sequence
  Description of Artificial Sequence: Synthetic oligonucleotide
  Sense strand starting at position 768 of SEQ ID NO: 2321
aguugcaaucaugggaaga

SEQ ID NO: 180047 - RNA, 19 nt, Artificial Sequence
  Description of Artificial Sequence: Synthetic oligonucleotide
  Antisense strand to SEQ ID NO: 180046
ucuucccaugauugcaacu

SEQ ID NO: 180048 - RNA, 19 nt, Artificial Sequence
  Description of Artificial Sequence: Synthetic oligonucleotide
  Sense strand starting at position 769 of SEQ ID NO: 2321
guugcaaucaugggaagac

SEQ ID NO: 180049 - RNA, 19 nt, Artificial Sequence
  Description of Artificial Sequence: Synthetic oligonucleotide
  Antisense strand to SEQ ID NO: 180048
gucuucccaugauugcaac

SEQ ID NO: 180050 - RNA, 19 nt, Artificial Sequence
  Description of Artificial Sequence: Synthetic oligonucleotide
  Sense strand starting at position 916 of SEQ ID NO: 2321
ggcugacauucucuuaaga

SEQ ID NO: 180051 - RNA, 19 nt, Artificial Sequence
  Description of Artificial Sequence: Synthetic oligonucleotide
  Antisense strand to SEQ ID NO: 180050
ucuuaagagaaugucagcc

SEQ ID NO: 180052 - RNA, 19 nt, Artificial Sequence
  Description of Artificial Sequence: Synthetic oligonucleotide
  Sense strand starting at position 1004 of SEQ ID NO: 2321
caggguauccagggaugua

SEQ ID NO: 180053 - RNA, 19 nt, Artificial Sequence
  Description of Artificial Sequence: Synthetic oligonucleotide
  Antisense strand to SEQ ID NO: 180052
uacaucccuggauacccug

SEQ ID NO: 180054 - RNA, 19 nt, Artificial Sequence
  Description of Artificial Sequence: Synthetic oligonucleotide
  Sense strand starting at position 1034 of SEQ ID NO: 2321
gcuguaucccugucucgau

SEQ ID NO: 180055 - RNA, 19 nt, Artificial Sequence
  Description of Artificial Sequence: Synthetic oligonucleotide
  Antisense strand to SEQ ID NO: 180054
aucgagacagggauacagc

SEQ ID NO: 180056 - RNA, 19 nt, Artificial Sequence
  Description of Artificial Sequence: Synthetic oligonucleotide
  Sense strand starting at position 1131 of SEQ ID NO: 2321
ugcaaaguugaaugagauc

SEQ ID NO: 180057 - RNA, 19 nt, Artificial Sequence
  Description of Artificial Sequence: Synthetic oligonucleotide
  Antisense strand to SEQ ID NO: 180056
gaucucauucaacuuugca

SEQ ID NO: 180058 - RNA, 19 nt, Artificial Sequence
  Description of Artificial Sequence: Synthetic oligonucleotide
  Sense strand starting at position 1570 of SEQ ID NO: 2321
ggucacuagcugggagaua

SEQ ID NO: 180059 - RNA, 19 nt, Artificial Sequence
  Description of Artificial Sequence: Synthetic oligonucleotide
  Antisense strand to SEQ ID NO: 180058
uaucucccagcuagugacc

SEQ ID NO: 180060 - RNA, 19 nt, Artificial Sequence
  Description of Artificial Sequence: Synthetic oligonucleotide
  Sense strand starting at position 1606 of SEQ ID NO: 2321
ggguuccuuccaggaaaga

SEQ ID NO: 180061 - RNA, 19 nt, Artificial Sequence
  Description of Artificial Sequence: Synthetic oligonucleotide
  Antisense strand to SEQ ID NO: 180060
ucuuuccuggaaggaaccc

SEQ ID NO: 180062 - RNA, 19 nt, Artificial Sequence
  Description of Artificial Sequence: Synthetic oligonucleotide
  Sense strand starting at position 2323 of SEQ ID NO: 2321
gcacuuggucucguggcua

SEQ ID NO: 180063 - RNA, 19 nt, Artificial Sequence
  Description of Artificial Sequence: Synthetic oligonucleotide
  Antisense strand to SEQ ID NO: 180062
uagccacgagaccaagugc

SEQ ID NO: 180064 - RNA, 19 nt, Artificial Sequence
  Description of Artificial Sequence: Synthetic oligonucleotide
  Sense strand starting at position 2353 of SEQ ID NO: 2321
gaaggugaccucggguaga

SEQ ID NO: 180065 - RNA, 19 nt, Artificial Sequence
  Description of Artificial Sequence: Synthetic oligonucleotide
  Antisense strand to SEQ ID NO: 180064
ucuacccgaggucaccuuc

SEQ ID NO: 180066 - RNA, 19 nt, Artificial Sequence
  Description of Artificial Sequence: Synthetic oligonucleotide
  Sense strand starting at position 2356 of SEQ ID NO: 2321
ggugaccucggguagaaga

SEQ ID NO: 180067 - RNA, 19 nt, Artificial Sequence
  Description of Artificial Sequence: Synthetic oligonucleotide
  Antisense strand to SEQ ID NO: 180066
ucuucuacccgaggucacc

SEQ ID NO: 180068 - RNA, 19 nt, Artificial Sequence
  Description of Artificial Sequence: Synthetic oligonucleotide
  Sense strand starting at position 2530 of SEQ ID NO: 2321
uuaccuuaauaggcaagaa

SEQ ID NO: 180069 - RNA, 19 nt, Artificial Sequence
  Description of Artificial Sequence: Synthetic oligonucleotide
  Antisense strand to SEQ ID NO: 180068
uucuugccuauuaagguaa

SEQ ID NO: 180070 - RNA, 19 nt, Artificial Sequence
  Description of Artificial Sequence: Synthetic oligonucleotide
  Sense strand starting at position 2615 of SEQ ID NO: 2321
gagggagucugacuucuca

SEQ ID NO: 180071 - RNA, 19 nt, Artificial Sequence
  Description of Artificial Sequence: Synthetic oligonucleotide
  Antisense strand to SEQ ID NO: 180070
ugagaagucagacucccuc

SEQ ID NO: 180072 - RNA, 19 nt, Artificial Sequence
  Description of Artificial Sequence: Synthetic oligonucleotide
  Sense strand starting at position 2664 of SEQ ID NO: 2321
uuggaaggaucccaaauuu

SEQ ID NO: 180073 - RNA, 19 nt, Artificial Sequence
  Description of Artificial Sequence: Synthetic oligonucleotide
  Antisense strand to SEQ ID NO: 180072
aaauuugggauccuuccaa

SEQ ID NO: 180074 - RNA, 19 nt, Artificial Sequence
  Description of Artificial Sequence: Synthetic oligonucleotide
  Sense strand starting at position 2683 of SEQ ID NO: 2321
ucgggaucuuaauuaugau

SEQ ID NO: 180075 - RNA, 19 nt, Artificial Sequence
  Description of Artificial Sequence: Synthetic oligonucleotide
  Antisense strand to SEQ ID NO: 180074
aucauaauuaagaucccga

SEQ ID NO: 180076 - RNA, 19 nt, Artificial Sequence
  Description of Artificial Sequence: Synthetic oligonucleotide
  Sense strand starting at position 2691 of SEQ ID NO: 2321
uuaauuaugauguggagau

SEQ ID NO: 180077 - RNA, 19 nt, Artificial Sequence
  Description of Artificial Sequence: Synthetic oligonucleotide
  Antisense strand to SEQ ID NO: 180076
aucuccacaucauaauuaa

SEQ ID NO: 180078 - RNA, 19 nt, Artificial Sequence
  Description of Artificial Sequence: Synthetic oligonucleotide
  Sense strand starting at position 2797 of SEQ ID NO: 2321
ugacuaagugucuacaaua

SEQ ID NO: 180079 - RNA, 19 nt, Artificial Sequence
  Description of Artificial Sequence: Synthetic oligonucleotide
  Antisense strand to SEQ ID NO: 180078
uauuguagacacuuaguca

SEQ ID NO: 180080 - RNA, 19 nt, Artificial Sequence
  Description of Artificial Sequence: Synthetic oligonucleotide
  Sense strand starting at position 2860 of SEQ ID NO: 2321
agagcuuaugcauaaauuc

SEQ ID NO: 180081 - RNA, 19 nt, Artificial Sequence
  Description of Artificial Sequence: Synthetic oligonucleotide
  Antisense strand to SEQ ID NO: 180080
gaauuuaugcauaagcucu

SEQ ID NO: 180082 - RNA, 19 nt, Artificial Sequence
  Description of Artificial Sequence: Synthetic oligonucleotide
  Sense strand starting at position 2895 of SEQ ID NO: 2321
ccuauuauaggccagacau

SEQ ID NO: 180083 - RNA, 19 nt, Artificial Sequence
  Description of Artificial Sequence: Synthetic oligonucleotide
  Antisense strand to SEQ ID NO: 180082
augucuggccuauaauagg

SEQ ID NO: 180084 - RNA, 19 nt, Artificial Sequence
  Description of Artificial Sequence: Synthetic oligonucleotide
  Sense strand starting at position 2971 of SEQ ID NO: 2321
ucugguguuggagacagau

SEQ ID NO: 180085 - RNA, 19 nt, Artificial Sequence
  Description of Artificial Sequence: Synthetic oligonucleotide
  Antisense strand to SEQ ID NO: 180084
aucugucuccaacaccaga

SEQ ID NO: 180086 - RNA, 19 nt, Artificial Sequence
  Description of Artificial Sequence: Synthetic oligonucleotide
  Sense strand starting at position 2980 of SEQ ID NO: 2321
ggagacagaucuguaagca

SEQ ID NO: 180087 - RNA, 19 nt, Artificial Sequence
  Description of Artificial Sequence: Synthetic oligonucleotide
  Antisense strand to SEQ ID NO: 180086
ugcuuacagaucugucucc

SEQ ID NO: 180088 - RNA, 19 nt, Artificial Sequence
  Description of Artificial Sequence: Synthetic oligonucleotide
  Sense strand starting at position 2984 of SEQ ID NO: 2321
acagaucuguaagcaaaua

SEQ ID NO: 180089 - RNA, 19 nt, Artificial Sequence
  Description of Artificial Sequence: Synthetic oligonucleotide
  Antisense strand to SEQ ID NO: 180088
uauuugcuuacagaucugu

SEQ ID NO: 180090 - RNA, 19 nt, Artificial Sequence
  Description of Artificial Sequence: Synthetic oligonucleotide
  Sense strand starting at position 3200 of SEQ ID NO: 2321
gcaguuagcccgagugaag

SEQ ID NO: 180091 - RNA, 19 nt, Artificial Sequence
  Description of Artificial Sequence: Synthetic oligonucleotide
  Antisense strand to SEQ ID NO: 180090
cuucacucgggcuaacugc

SEQ ID NO: 180092 - RNA, 19 nt, Artificial Sequence
  Description of Artificial Sequence: Synthetic oligonucleotide
  Sense strand starting at position 3321 of SEQ ID NO: 2321
gcaacauggagguaauagu

SEQ ID NO: 180093 - RNA, 19 nt, Artificial Sequence
  Description of Artificial Sequence: Synthetic oligonucleotide
  Antisense strand to SEQ ID NO: 180092
acuauuaccuccauguugc

SEQ ID NO: 180094 - RNA, 19 nt, Artificial Sequence
  Description of Artificial Sequence: Synthetic oligonucleotide
  Sense strand starting at position 3356 of SEQ ID NO: 2321
ugugaagauaaaugaguua

SEQ ID NO: 180095 - RNA, 19 nt, Artificial Sequence
  Description of Artificial Sequence: Synthetic oligonucleotide
  Antisense strand to SEQ ID NO: 180094
uaacucauuuaucuucaca

SEQ ID NO: 180096 - RNA, 19 nt, Artificial Sequence
  Description of Artificial Sequence: Synthetic oligonucleotide
  Sense strand starting at position 3369 of SEQ ID NO: 2321
gaguuaguauuugugaagu

SEQ ID NO: 180097 - RNA, 19 nt, Artificial Sequence
  Description of Artificial Sequence: Synthetic oligonucleotide
  Antisense strand to SEQ ID NO: 180096
acuucacaaauacuaacuc

SEQ ID NO: 180098 - RNA, 19 nt, Artificial Sequence
  Description of Artificial Sequence: Synthetic oligonucleotide
  Sense strand starting at position 3375 of SEQ ID NO: 2321
guauuugugaagugccuag

SEQ ID NO: 180099 - RNA, 19 nt, Artificial Sequence
  Description of Artificial Sequence: Synthetic oligonucleotide
  Antisense strand to SEQ ID NO: 180098
cuaggcacuucacaaauac

SEQ ID NO: 180100 - RNA, 19 nt, Artificial Sequence
  Description of Artificial Sequence: Synthetic oligonucleotide
  Sense strand starting at position 3563 of SEQ ID NO: 2321
aaugaaagugcugauucua

SEQ ID NO: 180101 - RNA, 19 nt, Artificial Sequence
  Description of Artificial Sequence: Synthetic oligonucleotide
  Antisense strand to SEQ ID NO: 180100
uagaaucagcacuuucauu

SEQ ID NO: 180102 - RNA, 19 nt, Artificial Sequence
  Description of Artificial Sequence: Synthetic oligonucleotide
  Sense strand starting at position 3631 of SEQ ID NO: 2321
uagguaugcagagagaagu

SEQ ID NO: 180103 - RNA, 19 nt, Artificial Sequence
  Description of Artificial Sequence: Synthetic oligonucleotide
  Antisense strand to SEQ ID NO: 180102
acuucucucugcauaccua

SEQ ID NO: 180104 - RNA, 19 nt, Artificial Sequence
  Description of Artificial Sequence: Synthetic oligonucleotide
  Sense strand starting at position 3644 of SEQ ID NO: 2321
agaagugaaucauuagcuu

SEQ ID NO: 180105 - RNA, 19 nt, Artificial Sequence
  Description of Artificial Sequence: Synthetic oligonucleotide
  Antisense strand to SEQ ID NO: 180104
aagcuaaugauucacuucu

SEQ ID NO: 180106 - RNA, 19 nt, Artificial Sequence
  Description of Artificial Sequence: Synthetic oligonucleotide
  Sense strand starting at position 3747 of SEQ ID NO: 2321
auagaaggcguucaguaaa

SEQ ID NO: 180107 - RNA, 19 nt, Artificial Sequence
  Description of Artificial Sequence: Synthetic oligonucleotide
  Antisense strand to SEQ ID NO: 180106
uuuacugaacgccuucuau

SEQ ID NO: 180108 - RNA, 19 nt, Artificial Sequence
  Description of Artificial Sequence: Synthetic oligonucleotide
  Sense strand starting at position 3690 of SEQ ID NO: 2322
ccaggacugaagugaucau

SEQ ID NO: 180109 - RNA, 19 nt, Artificial Sequence
  Description of Artificial Sequence: Synthetic oligonucleotide
  Antisense strand to SEQ ID NO: 180108
augaucacuucaguccugg

SEQ ID NO: 180110 - RNA, 19 nt, Artificial Sequence
  Description of Artificial Sequence: Synthetic oligonucleotide
  Sense strand starting at position 3681 of SEQ ID NO: 2322
ugguuucucccaggacuga

SEQ ID NO: 180111 - RNA, 19 nt, Artificial Sequence
  Description of Artificial Sequence: Synthetic oligonucleotide
  Antisense strand to SEQ ID NO: 180110
ucaguccugggagaaacca

SEQ ID NO: 180112 - RNA, 19 nt, Artificial Sequence
  Description of Artificial Sequence: Synthetic oligonucleotide
  Sense strand starting at position 3588 of SEQ ID NO: 2322
gacaaaguucugcgacuug

SEQ ID NO: 180113 - RNA, 19 nt, Artificial Sequence
  Description of Artificial Sequence: Synthetic oligonucleotide
  Antisense strand to SEQ ID NO: 180112
caagucgcagaacuuuguc

SEQ ID NO: 180114 - RNA, 19 nt, Artificial Sequence
  Description of Artificial Sequence: Synthetic oligonucleotide
  Sense strand starting at position 3587 of SEQ ID NO: 2322
cgacaaaguucugcgacuu

SEQ ID NO: 180115 - RNA, 19 nt, Artificial Sequence
  Description of Artificial Sequence: Synthetic oligonucleotide
  Antisense strand to SEQ ID NO: 180114
aagucgcagaacuuugucg

SEQ ID NO: 180116 - RNA, 19 nt, Artificial Sequence
  Description of Artificial Sequence: Synthetic oligonucleotide
  Sense strand starting at position 3586 of SEQ ID NO: 2322
gcgacaaaguucugcgacu

SEQ ID NO: 180117 - RNA, 19 nt, Artificial Sequence
  Description of Artificial Sequence: Synthetic oligonucleotide
  Antisense strand to SEQ ID NO: 180116
agucgcagaacuuugucgc

SEQ ID NO: 180118 - RNA, 19 nt, Artificial Sequence
  Description of Artificial Sequence: Synthetic oligonucleotide
  Sense strand starting at position 3578 of SEQ ID NO: 2322
gaaguucugcgacaaaguu

SEQ ID NO: 180119 - RNA, 19 nt, Artificial Sequence
  Description of Artificial Sequence: Synthetic oligonucleotide
  Antisense strand to SEQ ID NO: 180118
aacuuugucgcagaacuuc

SEQ ID NO: 180120 - RNA, 19 nt, Artificial Sequence
  Description of Artificial Sequence: Synthetic oligonucleotide
  Sense strand starting at position 3575 of SEQ ID NO: 2322
cgagaaguucugcgacaaa

SEQ ID NO: 180121 - RNA, 19 nt, Artificial Sequence
  Description of Artificial Sequence: Synthetic oligonucleotide
  Antisense strand to SEQ ID NO: 180120
uuugucgcagaacuucucg

SEQ ID NO: 180122 - RNA, 19 nt, Artificial Sequence
  Description of Artificial Sequence: Synthetic oligonucleotide
  Sense strand starting at position 3574 of SEQ ID NO: 2322
gcgagaaguucugcgacaa

SEQ ID NO: 180123 - RNA, 19 nt, Artificial Sequence
  Description of Artificial Sequence: Synthetic oligonucleotide
  Antisense strand to SEQ ID NO: 180122
uugucgcagaacuucucgc

SEQ ID NO: 180124 - RNA, 19 nt, Artificial Sequence
  Description of Artificial Sequence: Synthetic oligonucleotide
  Sense strand starting at position 3409 of SEQ ID NO: 2322
cuaucuaugagauggaguc

SEQ ID NO: 180125 - RNA, 19 nt, Artificial Sequence
  Description of Artificial Sequence: Synthetic oligonucleotide
  Antisense strand to SEQ ID NO: 180124
gacuccaucucauagauag

SEQ ID NO: 180126 - RNA, 19 nt, Artificial Sequence
  Description of Artificial Sequence: Synthetic oligonucleotide
  Sense strand starting at position 3404 of SEQ ID NO: 2322
ucuaucuaucuaugagaug

SEQ ID NO: 180127 - RNA, 19 nt, Artificial Sequence
  Description of Artificial Sequence: Synthetic oligonucleotide
  Antisense strand to SEQ ID NO: 180126
caucucauagauagauaga

SEQ ID NO: 180128 - RNA, 19 nt, Artificial Sequence
  Description of Artificial Sequence: Synthetic oligonucleotide
  Sense strand starting at position 3219 of SEQ ID NO: 2322
ugauucuccggugaaauuc

SEQ ID NO: 180129 - RNA, 19 nt, Artificial Sequence
  Description of Artificial Sequence: Synthetic oligonucleotide
  Antisense strand to SEQ ID NO: 180128
gaauuucaccggagaauca

SEQ ID NO: 180130 - RNA, 19 nt, Artificial Sequence
  Description of Artificial Sequence: Synthetic oligonucleotide
  Sense strand starting at position 3218 of SEQ ID NO: 2322
gugauucuccggugaaauu

SEQ ID NO: 180131 - RNA, 19 nt, Artificial Sequence
  Description of Artificial Sequence: Synthetic oligonucleotide
  Antisense strand to SEQ ID NO: 180130
aauuucaccggagaaucac

SEQ ID NO: 180132 - RNA, 19 nt, Artificial Sequence
  Description of Artificial Sequence: Synthetic oligonucleotide
  Sense strand starting at position 3216 of SEQ ID NO: 2322
uggugauucuccggugaaa

SEQ ID NO: 180133 - RNA, 19 nt, Artificial Sequence
  Description of Artificial Sequence: Synthetic oligonucleotide
  Antisense strand to SEQ ID NO: 180132
uuucaccggagaaucacca

SEQ ID NO: 180134 - RNA, 19 nt, Artificial Sequence
  Description of Artificial Sequence: Synthetic oligonucleotide
  Sense strand starting at position 3214 of SEQ ID NO: 2322
ucuggugauucuccgguga

SEQ ID NO: 180135 - RNA, 19 nt, Artificial Sequence
  Description of Artificial Sequence: Synthetic oligonucleotide
  Antisense strand to SEQ ID NO: 180134
ucaccggagaaucaccaga

SEQ ID NO: 180136 - RNA, 19 nt, Artificial Sequence
  Description of Artificial Sequence: Synthetic oligonucleotide
  Sense strand starting at position 3205 of SEQ ID NO: 2322
cucuaacccucuggugauu

SEQ ID NO: 180137 - RNA, 19 nt, Artificial Sequence
  Description of Artificial Sequence: Synthetic oligonucleotide
  Antisense strand to SEQ ID NO: 180136
aaucaccagaggguuagag

SEQ ID NO: 180138 - RNA, 19 nt, Artificial Sequence
  Description of Artificial Sequence: Synthetic oligonucleotide
  Sense strand starting at position 3204 of SEQ ID NO: 2322
ucucuaacccucuggugau

SEQ ID NO: 180139 - RNA, 19 nt, Artificial Sequence
  Description of Artificial Sequence: Synthetic oligonucleotide
  Antisense strand to SEQ ID NO: 180138
aucaccagaggguuagaga

SEQ ID NO: 180140 - RNA, 19 nt, Artificial Sequence
  Description of Artificial Sequence: Synthetic oligonucleotide
  Sense strand starting at position 2702 of SEQ ID NO: 2322
cccugucgcgcgucaauuu

SEQ ID NO: 180141 - RNA, 19 nt, Artificial Sequence
  Description of Artificial Sequence: Synthetic oligonucleotide
  Antisense strand to SEQ ID NO: 180140
aaauugacgcgcgacaggg

SEQ ID NO: 180142 - RNA, 19 nt, Artificial Sequence
  Description of Artificial Sequence: Synthetic oligonucleotide
  Sense strand starting at position 2125 of SEQ ID NO: 2322
ggaggaacgugcucuguga

SEQ ID NO: 180143 - RNA, 19 nt, Artificial Sequence
  Description of Artificial Sequence: Synthetic oligonucleotide
  Antisense strand to SEQ ID NO: 180142
ucacagagcacguuccucc

SEQ ID NO: 180144 - RNA, 19 nt, Artificial Sequence
  Description of Artificial Sequence: Synthetic oligonucleotide
  Sense strand starting at position 1328 of SEQ ID NO: 2322
aucgaaugaucguucuaac

SEQ ID NO: 180145 - RNA, 19 nt, Artificial Sequence
  Description of Artificial Sequence: Synthetic oligonucleotide
  Antisense strand to SEQ ID NO: 180144
guuagaacgaucauucgau

SEQ ID NO: 180146 - RNA, 19 nt, Artificial Sequence
  Description of Artificial Sequence: Synthetic oligonucleotide
  Sense strand starting at position 1323 of SEQ ID NO: 2322
gaaugaucgaaugaucguu

SEQ ID NO: 180147 - RNA, 19 nt, Artificial Sequence
  Description of Artificial Sequence: Synthetic oligonucleotide
  Antisense strand to SEQ ID NO: 180146
aacgaucauucgaucauuc

SEQ ID NO: 180148 - RNA, 19 nt, Artificial Sequence
  Description of Artificial Sequence: Synthetic oligonucleotide
  Sense strand starting at position 1226 of SEQ ID NO: 2322
guguaauguuccuggacuc

SEQ ID NO: 180149 - RNA, 19 nt, Artificial Sequence
  Description of Artificial Sequence: Synthetic oligonucleotide
  Antisense strand to SEQ ID NO: 180148
gaguccaggaacauuacac

SEQ ID NO: 180150 - RNA, 19 nt, Artificial Sequence
  Description of Artificial Sequence: Synthetic oligonucleotide
  Sense strand starting at position 1225 of SEQ ID NO: 2322
gguguaauguuccuggacu

SEQ ID NO: 180151 - RNA, 19 nt, Artificial Sequence
  Description of Artificial Sequence: Synthetic oligonucleotide
  Antisense strand to SEQ ID NO: 180150
aguccaggaacauuacacc

SEQ ID NO: 180152 - RNA, 19 nt, Artificial Sequence
  Description of Artificial Sequence: Synthetic oligonucleotide
  Sense strand starting at position 920 of SEQ ID NO: 2322
uggauaucaaggugcuuua

SEQ ID NO: 180153 - RNA, 19 nt, Artificial Sequence
  Description of Artificial Sequence: Synthetic oligonucleotide
  Antisense strand to SEQ ID NO: 180152
uaaagcaccuugauaucca

SEQ ID NO: 180154 - RNA, 19 nt, Artificial Sequence
  Description of Artificial Sequence: Synthetic oligonucleotide
  Sense strand starting at position 918 of SEQ ID NO: 2322
acuggauaucaaggugcuu

SEQ ID NO: 180155 - RNA, 19 nt, Artificial Sequence
  Description of Artificial Sequence: Synthetic oligonucleotide
  Antisense strand to SEQ ID NO: 180154
aagcaccuugauauccagu

SEQ ID NO: 180156 - RNA, 19 nt, Artificial Sequence
  Description of Artificial Sequence: Synthetic oligonucleotide
  Sense strand starting at position 909 of SEQ ID NO: 2322
gucugugagacuggauauc

SEQ ID NO: 180157 - RNA, 19 nt, Artificial Sequence
  Description of Artificial Sequence: Synthetic oligonucleotide
  Antisense strand to SEQ ID NO: 180156
gauauccagucucacagac

SEQ ID NO: 180158 - RNA, 19 nt, Artificial Sequence
  Description of Artificial Sequence: Synthetic oligonucleotide
  Sense strand starting at position 902 of SEQ ID NO: 2322
gugagcagucugugagacu

SEQ ID NO: 180159 - RNA, 19 nt, Artificial Sequence
  Description of Artificial Sequence: Synthetic oligonucleotide
  Antisense strand to SEQ ID NO: 180158
agucucacagacugcucac

SEQ ID NO: 180160 - RNA, 19 nt, Artificial Sequence
  Description of Artificial Sequence: Synthetic oligonucleotide
  Sense strand starting at position 900 of SEQ ID NO: 2322
uugugagcagucugugaga

SEQ ID NO: 180161 - RNA, 19 nt, Artificial Sequence
  Description of Artificial Sequence: Synthetic oligonucleotide
  Antisense strand to SEQ ID NO: 180160
ucucacagacugcucacaa

SEQ ID NO: 180162 - RNA, 19 nt, Artificial Sequence
  Description of Artificial Sequence: Synthetic oligonucleotide
  Sense strand starting at position 791 of SEQ ID NO: 2322
gucuuaagugugucuagcu

SEQ ID NO: 180163 - RNA, 19 nt, Artificial Sequence
  Description of Artificial Sequence: Synthetic oligonucleotide
  Antisense strand to SEQ ID NO: 180162
agcuagacacacuuaagac

SEQ ID NO: 180164 - RNA, 19 nt, Artificial Sequence
  Description of Artificial Sequence: Synthetic oligonucleotide
  Sense strand starting at position 783 of SEQ ID NO: 2322
ucuuaauggucuuaagugu

SEQ ID NO: 180165 - RNA, 19 nt, Artificial Sequence
  Description of Artificial Sequence: Synthetic oligonucleotide
  Antisense strand to SEQ ID NO: 180164
acacuuaagaccauuaaga

SEQ ID NO: 180166 - RNA, 19 nt, Artificial Sequence
  Description of Artificial Sequence: Synthetic oligonucleotide
  Sense strand starting at position 780 of SEQ ID NO: 2322
cuuucuuaauggucuuaag

SEQ ID NO: 180167 - RNA, 19 nt, Artificial Sequence
  Description of Artificial Sequence: Synthetic oligonucleotide
  Antisense strand to SEQ ID NO: 180166
cuuaagaccauuaagaaag

SEQ ID NO: 180168 - RNA, 19 nt, Artificial Sequence
  Description of Artificial Sequence: Synthetic oligonucleotide
  Sense strand starting at position 766 of SEQ ID NO: 2322
gucuuauuucuuggcuuuc

SEQ ID NO: 180169 - RNA, 19 nt, Artificial Sequence
  Description of Artificial Sequence: Synthetic oligonucleotide
  Antisense strand to SEQ ID NO: 180168
gaaagccaagaaauaagac

SEQ ID NO: 180170 - RNA, 19 nt, Artificial Sequence
  Description of Artificial Sequence: Synthetic oligonucleotide
  Sense strand starting at position 765 of SEQ ID NO: 2322
ggucuuauuucuuggcuuu

SEQ ID NO: 180171 - RNA, 19 nt, Artificial Sequence
  Description of Artificial Sequence: Synthetic oligonucleotide
  Antisense strand to SEQ ID NO: 180170
aaagccaagaaauaagacc

SEQ ID NO: 180172 - RNA, 19 nt, Artificial Sequence
  Description of Artificial Sequence: Synthetic oligonucleotide
  Sense strand starting at position 764 of SEQ ID NO: 2322
gggucuuauuucuuggcuu

SEQ ID NO: 180173 - RNA, 19 nt, Artificial Sequence
  Description of Artificial Sequence: Synthetic oligonucleotide
  Antisense strand to SEQ ID NO: 180172
aagccaagaaauaagaccc

SEQ ID NO: 180174 - RNA, 19 nt, Artificial Sequence
  Description of Artificial Sequence: Synthetic oligonucleotide
  Sense strand starting at position 754 of SEQ ID NO: 2322
caccuugucugggucuuau

SEQ ID NO: 180175 - RNA, 19 nt, Artificial Sequence
  Description of Artificial Sequence: Synthetic oligonucleotide
  Antisense strand to SEQ ID NO: 180174
auaagacccagacaaggug

SEQ ID NO: 180176 - RNA, 19 nt, Artificial Sequence
  Description of Artificial Sequence: Synthetic oligonucleotide
  Sense strand starting at position 753 of SEQ ID NO: 2322
ccaccuugucugggucuua

SEQ ID NO: 180177 - RNA, 19 nt, Artificial Sequence
  Description of Artificial Sequence: Synthetic oligonucleotide
  Antisense strand to SEQ ID NO: 180176
uaagacccagacaaggugg

SEQ ID NO: 180178 - RNA, 19 nt, Artificial Sequence
  Description of Artificial Sequence: Synthetic oligonucleotide
  Sense strand starting at position 686 of SEQ ID NO: 2322
gagagaugggcuggcagau

SEQ ID NO: 180179 - RNA, 19 nt, Artificial Sequence
  Description of Artificial Sequence: Synthetic oligonucleotide
  Antisense strand to SEQ ID NO: 180178
aucugccagcccaucucuc

SEQ ID NO: 180180 - RNA, 19 nt, Artificial Sequence
  Description of Artificial Sequence: Synthetic oligonucleotide
  Sense strand starting at position 660 of SEQ ID NO: 2322
gauaaacucugaggaagua

SEQ ID NO: 180181 - RNA, 19 nt, Artificial Sequence
  Description of Artificial Sequence: Synthetic oligonucleotide
  Antisense strand to SEQ ID NO: 180180
uacuuccucagaguuuauc

SEQ ID NO: 180182 - RNA, 19 nt, Artificial Sequence
  Description of Artificial Sequence: Synthetic oligonucleotide
  Sense strand starting at position 135 of SEQ ID NO: 2323
accuguaaucugugcauga

SEQ ID NO: 180183 - RNA, 19 nt, Artificial Sequence
  Description of Artificial Sequence: Synthetic oligonucleotide
  Antisense strand to SEQ ID NO: 180182
ucaugcacagauuacaggu

SEQ ID NO: 180184 - RNA, 19 nt, Artificial Sequence
  Description of Artificial Sequence: Synthetic oligonucleotide
  Sense strand starting at position 136 of SEQ ID NO: 2323
ccuguaaucugugcaugac

SEQ ID NO: 180185 - RNA, 19 nt, Artificial Sequence
  Description of Artificial Sequence: Synthetic oligonucleotide
  Antisense strand to SEQ ID NO: 180184
gucaugcacagauuacagg

SEQ ID NO: 180186 - RNA, 19 nt, Artificial Sequence
  Description of Artificial Sequence: Synthetic oligonucleotide
  Sense strand starting at position 137 of SEQ ID NO: 2323
cuguaaucugugcaugaca

SEQ ID NO: 180187 - RNA, 19 nt, Artificial Sequence
  Description of Artificial Sequence: Synthetic oligonucleotide
  Antisense strand to SEQ ID NO: 180186
ugucaugcacagauuacag

SEQ ID NO: 180188 - RNA, 19 nt, Artificial Sequence
  Description of Artificial Sequence: Synthetic oligonucleotide
  Sense strand starting at position 139 of SEQ ID NO: 2323
guaaucugugcaugacaca

SEQ ID NO: 180189 - RNA, 19 nt, Artificial Sequence
  Description of Artificial Sequence: Synthetic oligonucleotide
  Antisense strand to SEQ ID NO: 180188
ugugucaugcacagauuac

SEQ ID NO: 180190 - RNA, 19 nt, Artificial Sequence
  Description of Artificial Sequence: Synthetic oligonucleotide
  Sense strand starting at position 325 of SEQ ID NO: 2323
ugcuucuggcuguauauga

SEQ ID NO: 180191 - RNA, 19 nt, Artificial Sequence
  Description of Artificial Sequence: Synthetic oligonucleotide
  Antisense strand to SEQ ID NO: 180190
ucauauacagccagaagca

SEQ ID NO: 180192 - RNA, 19 nt, Artificial Sequence
  Description of Artificial Sequence: Synthetic oligonucleotide
  Sense strand starting at position 329 of SEQ ID NO: 2323
ucuggcuguauaugagaau

SEQ ID NO: 180193 - RNA, 19 nt, Artificial Sequence
  Description of Artificial Sequence: Synthetic oligonucleotide
  Antisense strand to SEQ ID NO: 180192
auucucauauacagccaga

SEQ ID NO: 180194 - RNA, 19 nt, Artificial Sequence
  Description of Artificial Sequence: Synthetic oligonucleotide
  Sense strand starting at position 446 of SEQ ID NO: 2323
augugcauucugggcugaa

SEQ ID NO: 180195 - RNA, 19 nt, Artificial Sequence
  Description of Artificial Sequence: Synthetic oligonucleotide
  Antisense strand to SEQ ID NO: 180194
uucagcccagaaugcacau

SEQ ID NO: 180196 - RNA, 19 nt, Artificial Sequence
  Description of Artificial Sequence: Synthetic oligonucleotide
  Sense strand starting at position 447 of SEQ ID NO: 2323
ugugcauucugggcugaaa

SEQ ID NO: 180197 - RNA, 19 nt, Artificial Sequence
  Description of Artificial Sequence: Synthetic oligonucleotide
  Antisense strand to SEQ ID NO: 180196
uuucagcccagaaugcaca

SEQ ID NO: 180198 - RNA, 19 nt, Artificial Sequence
  Description of Artificial Sequence: Synthetic oligonucleotide
  Sense strand starting at position 469 of SEQ ID NO: 2323
gcuauucuagaagaacugu

SEQ ID NO: 180199 - RNA, 19 nt, Artificial Sequence
  Description of Artificial Sequence: Synthetic oligonucleotide
  Antisense strand to SEQ ID NO: 180198
acaguucuucuagaauagc

SEQ ID NO: 180200 - RNA, 19 nt, Artificial Sequence
  Description of Artificial Sequence: Synthetic oligonucleotide
  Sense strand starting at position 548 of SEQ ID NO: 2323
agaugaaugcugcgaaaug

SEQ ID NO: 180201 - RNA, 19 nt, Artificial Sequence
  Description of Artificial Sequence: Synthetic oligonucleotide
  Antisense strand to SEQ ID NO: 180200
cauuucgcagcauucaucu

SEQ ID NO: 180202 - RNA, 19 nt, Artificial Sequence
  Description of Artificial Sequence: Synthetic oligonucleotide
  Sense strand starting at position 563 of SEQ ID NO: 2323
aaugaugauccagggcuga

SEQ ID NO: 180203 - RNA, 19 nt, Artificial Sequence
  Description of Artificial Sequence: Synthetic oligonucleotide
  Antisense strand to SEQ ID NO: 180202
ucagcccuggaucaucauu

SEQ ID NO: 180204 - RNA, 19 nt, Artificial Sequence
  Description of Artificial Sequence: Synthetic oligonucleotide
  Sense strand starting at position 735 of SEQ ID NO: 2323
uaguuaagguggccauuaa

SEQ ID NO: 180205 - RNA, 19 nt, Artificial Sequence
  Description of Artificial Sequence: Synthetic oligonucleotide
  Antisense strand to SEQ ID NO: 180204
uuaauggccaccuuaacua

SEQ ID NO: 180206 - RNA, 19 nt, Artificial Sequence
  Description of Artificial Sequence: Synthetic oligonucleotide
  Sense strand starting at position 850 of SEQ ID NO: 2323
gacaaagaagcgugagaga

SEQ ID NO: 180207 - RNA, 19 nt, Artificial Sequence
  Description of Artificial Sequence: Synthetic oligonucleotide
  Antisense strand to SEQ ID NO: 180206
ucucucacgcuucuuuguc

SEQ ID NO: 180208 - RNA, 19 nt, Artificial Sequence
  Description of Artificial Sequence: Synthetic oligonucleotide
  Sense strand starting at position 861 of SEQ ID NO: 2323
gugagagacugacaggaau

SEQ ID NO: 180209 - RNA, 19 nt, Artificial Sequence
  Description of Artificial Sequence: Synthetic oligonucleotide
  Antisense strand to SEQ ID NO: 180208
auuccugucagucucucac

SEQ ID NO: 180210 - RNA, 19 nt, Artificial Sequence
  Description of Artificial Sequence: Synthetic oligonucleotide
  Sense strand starting at position 998 of SEQ ID NO: 2323
acgagaugcucaucuucca

SEQ ID NO: 180211 - RNA, 19 nt, Artificial Sequence
  Description of Artificial Sequence: Synthetic oligonucleotide
  Antisense strand to SEQ ID NO: 180210
uggaagaugagcaucucgu

SEQ ID NO: 180212 - RNA, 19 nt, Artificial Sequence
  Description of Artificial Sequence: Synthetic oligonucleotide
  Sense strand starting at position 1019 of SEQ ID NO: 2323
uuuggcuucucagcagaau

SEQ ID NO: 180213 - RNA, 19 nt, Artificial Sequence
  Description of Artificial Sequence: Synthetic oligonucleotide
  Antisense strand to SEQ ID NO: 180212
auucugcugagaagccaaa

SEQ ID NO: 180214 - RNA, 19 nt, Artificial Sequence
  Description of Artificial Sequence: Synthetic oligonucleotide
  Sense strand starting at position 1020 of SEQ ID NO: 2323
uuggcuucucagcagaaua

SEQ ID NO: 180215 - RNA, 19 nt, Artificial Sequence
  Description of Artificial Sequence: Synthetic oligonucleotide
  Antisense strand to SEQ ID NO: 180214
uauucugcugagaagccaa

SEQ ID NO: 180216 - RNA, 19 nt, Artificial Sequence
  Description of Artificial Sequence: Synthetic oligonucleotide
  Sense strand starting at position 1022 of SEQ ID NO: 2323
ggcuucucagcagaauaua

SEQ ID NO: 180217 - RNA, 19 nt, Artificial Sequence
  Description of Artificial Sequence: Synthetic oligonucleotide
  Antisense strand to SEQ ID NO: 180216
uauauucugcugagaagcc

SEQ ID NO: 180218 - RNA, 19 nt, Artificial Sequence
  Description of Artificial Sequence: Synthetic oligonucleotide
  Sense strand starting at position 1558 of SEQ ID NO: 2323
acccuauacccgggauguu

SEQ ID NO: 180219 - RNA, 19 nt, Artificial Sequence
  Description of Artificial Sequence: Synthetic oligonucleotide
  Antisense strand to SEQ ID NO: 180218
aacaucccggguauagggu

SEQ ID NO: 180220 - RNA, 19 nt, Artificial Sequence
  Description of Artificial Sequence: Synthetic oligonucleotide
  Sense strand starting at position 2075 of SEQ ID NO: 2323
cgcagaagcccuuaacauu

SEQ ID NO: 180221 - RNA, 19 nt, Artificial Sequence
  Description of Artificial Sequence: Synthetic oligonucleotide
  Antisense strand to SEQ ID NO: 180220
aauguuaagggcuucugcg

SEQ ID NO: 180222 - RNA, 19 nt, Artificial Sequence
  Description of Artificial Sequence: Synthetic oligonucleotide
  Sense strand starting at position 2190 of SEQ ID NO: 2323
agcccuuacuggucgaaga

SEQ ID NO: 180223 - RNA, 19 nt, Artificial Sequence
  Description of Artificial Sequence: Synthetic oligonucleotide
  Antisense strand to SEQ ID NO: 180222
ucuucgaccaguaagggcu

SEQ ID NO: 180224 - RNA, 19 nt, Artificial Sequence
  Description of Artificial Sequence: Synthetic oligonucleotide
  Sense strand starting at position 2191 of SEQ ID NO: 2323
gcccuuacuggucgaagag

SEQ ID NO: 180225 - RNA, 19 nt, Artificial Sequence
  Description of Artificial Sequence: Synthetic oligonucleotide
  Antisense strand to SEQ ID NO: 180224
cucuucgaccaguaagggc

SEQ ID NO: 180226 - RNA, 19 nt, Artificial Sequence
  Description of Artificial Sequence: Synthetic oligonucleotide
  Sense strand starting at position 2258 of SEQ ID NO: 2323
agacaacuguggcuuugaa

SEQ ID NO: 180227 - RNA, 19 nt, Artificial Sequence
  Description of Artificial Sequence: Synthetic oligonucleotide
  Antisense strand to SEQ ID NO: 180226
uucaaagccacaguugucu

SEQ ID NO: 180228 - RNA, 19 nt, Artificial Sequence
  Description of Artificial Sequence: Synthetic oligonucleotide
  Sense strand starting at position 2391 of SEQ ID NO: 2323
uccagagaugucugcauag

SEQ ID NO: 180229 - RNA, 19 nt, Artificial Sequence
  Description of Artificial Sequence: Synthetic oligonucleotide
  Antisense strand to SEQ ID NO: 180228
cuaugcagacaucucugga

SEQ ID NO: 180230 - RNA, 19 nt, Artificial Sequence
  Description of Artificial Sequence: Synthetic oligonucleotide
  Sense strand starting at position 2474 of SEQ ID NO: 2323
ucacuucuuguguaagcuu

SEQ ID NO: 180231 - RNA, 19 nt, Artificial Sequence
  Description of Artificial Sequence: Synthetic oligonucleotide
  Antisense strand to SEQ ID NO: 180230
aagcuuacacaagaaguga

SEQ ID NO: 180232 - RNA, 19 nt, Artificial Sequence
  Description of Artificial Sequence: Synthetic oligonucleotide
  Sense strand starting at position 2899 of SEQ ID NO: 2323
ugcaguucuugggcccaaa

SEQ ID NO: 180233 - RNA, 19 nt, Artificial Sequence
  Description of Artificial Sequence: Synthetic oligonucleotide
  Antisense strand to SEQ ID NO: 180232
uuugggcccaagaacugca

SEQ ID NO: 180234 - RNA, 19 nt, Artificial Sequence
  Description of Artificial Sequence: Synthetic oligonucleotide
  Sense strand starting at position 3126 of SEQ ID NO: 2323
agccuucuccauggagaac

SEQ ID NO: 180235 - RNA, 19 nt, Artificial Sequence
  Description of Artificial Sequence: Synthetic oligonucleotide
  Antisense strand to SEQ ID NO: 180234
guucuccauggagaaggcu

SEQ ID NO: 180236 - RNA, 19 nt, Artificial Sequence
  Description of Artificial Sequence: Synthetic oligonucleotide
  Sense strand starting at position 3144 of SEQ ID NO: 2323
caaaguagagggugucaaa

SEQ ID NO: 180237 - RNA, 19 nt, Artificial Sequence
  Description of Artificial Sequence: Synthetic oligonucleotide
  Antisense strand to SEQ ID NO: 180236
uuugacacccucuacuuug

SEQ ID NO: 180238 - RNA, 19 nt, Artificial Sequence
  Description of Artificial Sequence: Synthetic oligonucleotide
  Sense strand starting at position 3205 of SEQ ID NO: 2323
guaggagucugaccuguug

SEQ ID NO: 180239 - RNA, 19 nt, Artificial Sequence
  Description of Artificial Sequence: Synthetic oligonucleotide
  Antisense strand to SEQ ID NO: 180238
caacaggucagacuccuac

SEQ ID NO: 180240 - RNA, 19 nt, Artificial Sequence
  Description of Artificial Sequence: Synthetic oligonucleotide
  Sense strand starting at position 3283 of SEQ ID NO: 2323
ggugguuacucugccgaag

SEQ ID NO: 180241 - RNA, 19 nt, Artificial Sequence
  Description of Artificial Sequence: Synthetic oligonucleotide
  Antisense strand to SEQ ID NO: 180240
cuucggcagaguaaccacc

SEQ ID NO: 180242 - RNA, 19 nt, Artificial Sequence
  Description of Artificial Sequence: Synthetic oligonucleotide
  Sense strand starting at position 3295 of SEQ ID NO: 2323
gccgaagcuccuggauaua

SEQ ID NO: 180243 - RNA, 19 nt, Artificial Sequence
  Description of Artificial Sequence: Synthetic oligonucleotide
  Antisense strand to SEQ ID NO: 180242
uauauccaggagcuucggc

SEQ ID NO: 180244 - RNA, 19 nt, Artificial Sequence
  Description of Artificial Sequence: Synthetic oligonucleotide
  Sense strand starting at position 3440 of SEQ ID NO: 2323
uaaggaaggugguauaaua

SEQ ID NO: 180245 - RNA, 19 nt, Artificial Sequence
  Description of Artificial Sequence: Synthetic oligonucleotide
  Antisense strand to SEQ ID NO: 180244
uauuauaccaccuuccuua

SEQ ID NO: 180246 - RNA, 19 nt, Artificial Sequence
  Description of Artificial Sequence: Synthetic oligonucleotide
  Sense strand starting at position 3603 of SEQ ID NO: 2323
uggugcucuccauagagca

SEQ ID NO: 180247 - RNA, 19 nt, Artificial Sequence
  Description of Artificial Sequence: Synthetic oligonucleotide
  Antisense strand to SEQ ID NO: 180246
ugcucuauggagagcacca

SEQ ID NO: 180248 - RNA, 19 nt, Artificial Sequence
  Description of Artificial Sequence: Synthetic oligonucleotide
  Sense strand starting at position 3613 of SEQ ID NO: 2323
cauagagcagucugggauu

SEQ ID NO: 180249 - RNA, 19 nt, Artificial Sequence
  Description of Artificial Sequence: Synthetic oligonucleotide
  Antisense strand to SEQ ID NO: 180248
aaucccagacugcucuaug

SEQ ID NO: 180250 - RNA, 19 nt, Artificial Sequence
  Description of Artificial Sequence: Synthetic oligonucleotide
  Sense strand starting at position 3615 of SEQ ID NO: 2323
uagagcagucugggauuau

SEQ ID NO: 180251 - RNA, 19 nt, Artificial Sequence
  Description of Artificial Sequence: Synthetic oligonucleotide
  Antisense strand to SEQ ID NO: 180250
auaaucccagacugcucua

SEQ ID NO: 180252 - RNA, 19 nt, Artificial Sequence
  Description of Artificial Sequence: Synthetic oligonucleotide
  Sense strand starting at position 3625 of SEQ ID NO: 2323
ugggauuaucuuggagagc

SEQ ID NO: 180253 - RNA, 19 nt, Artificial Sequence
  Description of Artificial Sequence: Synthetic oligonucleotide
  Antisense strand to SEQ ID NO: 180252
gcucuccaagauaauccca

SEQ ID NO: 180254 - RNA, 19 nt, Artificial Sequence
  Description of Artificial Sequence: Synthetic oligonucleotide
  Sense strand starting at position 3730 of SEQ ID NO: 2323
ccacaagucccaggguaaa

SEQ ID NO: 180255 - RNA, 19 nt, Artificial Sequence
  Description of Artificial Sequence: Synthetic oligonucleotide
  Antisense strand to SEQ ID NO: 180254
uuuacccugggacuugugg

SEQ ID NO: 180256 - RNA, 19 nt, Artificial Sequence
  Description of Artificial Sequence: Synthetic oligonucleotide
  Sense strand starting at position 3848 of SEQ ID NO: 2323
ugcguuucucaucccgagu

SEQ ID NO: 180257 - RNA, 19 nt, Artificial Sequence
  Description of Artificial Sequence: Synthetic oligonucleotide
  Antisense strand to SEQ ID NO: 180256
acucgggaugagaaacgca

SEQ ID NO: 180258 - RNA, 19 nt, Artificial Sequence
  Description of Artificial Sequence: Synthetic oligonucleotide
  Sense strand starting at position 3877 of SEQ ID NO: 2323
gcuucugacuuccugacaa

SEQ ID NO: 180259 - RNA, 19 nt, Artificial Sequence
  Description of Artificial Sequence: Synthetic oligonucleotide
  Antisense strand to SEQ ID NO: 180258
uugucaggaagucagaagc

SEQ ID NO: 180260 - RNA, 19 nt, Artificial Sequence
  Description of Artificial Sequence: Synthetic oligonucleotide
  Sense strand starting at position 3881 of SEQ ID NO: 2323
cugacuuccugacaacaga

SEQ ID NO: 180261 - RNA, 19 nt, Artificial Sequence
  Description of Artificial Sequence: Synthetic oligonucleotide
  Antisense strand to SEQ ID NO: 180260
ucuguugucaggaagucag

SEQ ID NO: 180262 - RNA, 19 nt, Artificial Sequence
  Description of Artificial Sequence: Synthetic oligonucleotide
  Sense strand starting at position 285 of SEQ ID NO: 2324
aucuaaugaggugguuauu

SEQ ID NO: 180263 - RNA, 19 nt, Artificial Sequence
  Description of Artificial Sequence: Synthetic oligonucleotide
  Antisense strand to SEQ ID NO: 180262
aauaaccaccucauuagau

SEQ ID NO: 180264 - RNA, 19 nt, Artificial Sequence
  Description of Artificial Sequence: Synthetic oligonucleotide
  Sense strand starting at position 288 of SEQ ID NO: 2324
uaaugaggugguuauuguu

SEQ ID NO: 180265 - RNA, 19 nt, Artificial Sequence
  Description of Artificial Sequence: Synthetic oligonucleotide
  Antisense strand to SEQ ID NO: 180264
aacaauaaccaccucauua

SEQ ID NO: 180266 - RNA, 19 nt, Artificial Sequence
  Description of Artificial Sequence: Synthetic oligonucleotide
  Sense strand starting at position 519 of SEQ ID NO: 2324
gaaagugacagagguaagu

SEQ ID NO: 180267 - RNA, 19 nt, Artificial Sequence
  Description of Artificial Sequence: Synthetic oligonucleotide
  Antisense strand to SEQ ID NO: 180266
acuuaccucugucacuuuc

SEQ ID NO: 180268 - RNA, 19 nt, Artificial Sequence
  Description of Artificial Sequence: Synthetic oligonucleotide
  Sense strand starting at position 624 of SEQ ID NO: 2324
caaaccucucagugaguga

SEQ ID NO: 180269 - RNA, 19 nt, Artificial Sequence
  Description of Artificial Sequence: Synthetic oligonucleotide
  Antisense strand to SEQ ID NO: 180268
ucacucacugagagguuug

SEQ ID NO: 180270 - RNA, 19 nt, Artificial Sequence
  Description of Artificial Sequence: Synthetic oligonucleotide
  Sense strand starting at position 638 of SEQ ID NO: 2324
agugacacuuccucaagga

SEQ ID NO: 180271 - RNA, 19 nt, Artificial Sequence
  Description of Artificial Sequence: Synthetic oligonucleotide
  Antisense strand to SEQ ID NO: 180270
uccuugaggaagugucacu

SEQ ID NO: 180272 - RNA, 19 nt, Artificial Sequence
  Description of Artificial Sequence: Synthetic oligonucleotide
  Sense strand starting at position 674 of SEQ ID NO: 2324
aggaaaucagauugugcua

SEQ ID NO: 180273 - RNA, 19 nt, Artificial Sequence
  Description of Artificial Sequence: Synthetic oligonucleotide
  Antisense strand to SEQ ID NO: 180272
uagcacaaucugauuuccu

SEQ ID NO: 180274 - RNA, 19 nt, Artificial Sequence
  Description of Artificial Sequence: Synthetic oligonucleotide
  Sense strand starting at position 1089 of SEQ ID NO: 2324
aucgcagguugaucuuaaa

SEQ ID NO: 180275 - RNA, 19 nt, Artificial Sequence
  Description of Artificial Sequence: Synthetic oligonucleotide
  Antisense strand to SEQ ID NO: 180274
uuuaagaucaaccugcgau

SEQ ID NO: 180276 - RNA, 19 nt, Artificial Sequence
  Description of Artificial Sequence: Synthetic oligonucleotide
  Sense strand starting at position 1121 of SEQ ID NO: 2324
gaugucaacgagcagauaa

SEQ ID NO: 180277 - RNA, 19 nt, Artificial Sequence
  Description of Artificial Sequence: Synthetic oligonucleotide
  Antisense strand to SEQ ID NO: 180276
uuaucugcucguugacauc

SEQ ID NO: 180278 - RNA, 19 nt, Artificial Sequence
  Description of Artificial Sequence: Synthetic oligonucleotide
  Sense strand starting at position 1157 of SEQ ID NO: 2324
uuuccauuccagggaucca

SEQ ID NO: 180279 - RNA, 19 nt, Artificial Sequence
  Description of Artificial Sequence: Synthetic oligonucleotide
  Antisense strand to SEQ ID NO: 180278
uggaucccuggaauggaaa

SEQ ID NO: 180280 - RNA, 19 nt, Artificial Sequence
  Description of Artificial Sequence: Synthetic oligonucleotide
  Sense strand starting at position 1183 of SEQ ID NO: 2324
ggaacuguuguauacgaga

SEQ ID NO: 180281 - RNA, 19 nt, Artificial Sequence
  Description of Artificial Sequence: Synthetic oligonucleotide
  Antisense strand to SEQ ID NO: 180280
ucucguauacaacaguucc

SEQ ID NO: 180282 - RNA, 19 nt, Artificial Sequence
  Description of Artificial Sequence: Synthetic oligonucleotide
  Sense strand starting at position 1188 of SEQ ID NO: 2324
uguuguauacgagacauua

SEQ ID NO: 180283 - RNA, 19 nt, Artificial Sequence
  Description of Artificial Sequence: Synthetic oligonucleotide
  Antisense strand to SEQ ID NO: 180282
uaaugucucguauacaaca

SEQ ID NO: 180284 - RNA, 19 nt, Artificial Sequence
  Description of Artificial Sequence: Synthetic oligonucleotide
  Sense strand starting at position 1224 of SEQ ID NO: 2324
gccugauuuccaggccuaa

SEQ ID NO: 180285 - RNA, 19 nt, Artificial Sequence
  Description of Artificial Sequence: Synthetic oligonucleotide
  Antisense strand to SEQ ID NO: 180284
uuaggccuggaaaucaggc

SEQ ID NO: 180286 - RNA, 19 nt, Artificial Sequence
  Description of Artificial Sequence: Synthetic oligonucleotide
  Sense strand starting at position 2185 of SEQ ID NO: 2324
cgucuuacccuccacagaa

SEQ ID NO: 180287 - RNA, 19 nt, Artificial Sequence
  Description of Artificial Sequence: Synthetic oligonucleotide
  Antisense strand to SEQ ID NO: 180286
uucuguggaggguaagacg

SEQ ID NO: 180288 - RNA, 19 nt, Artificial Sequence
  Description of Artificial Sequence: Synthetic oligonucleotide
  Sense strand starting at position 2395 of SEQ ID NO: 2324
gauaaccaucugugugagu

SEQ ID NO: 180289 - RNA, 19 nt, Artificial Sequence
  Description of Artificial Sequence: Synthetic oligonucleotide
  Antisense strand to SEQ ID NO: 180288
acucacacagaugguuauc

SEQ ID NO: 180290 - RNA, 19 nt, Artificial Sequence
  Description of Artificial Sequence: Synthetic oligonucleotide
  Sense strand starting at position 2396 of SEQ ID NO: 2324
auaaccaucugugugaguu

SEQ ID NO: 180291 - RNA, 19 nt, Artificial Sequence
  Description of Artificial Sequence: Synthetic oligonucleotide
  Antisense strand to SEQ ID NO: 180290
aacucacacagaugguuau

SEQ ID NO: 180292 - RNA, 19 nt, Artificial Sequence
  Description of Artificial Sequence: Synthetic oligonucleotide
  Sense strand starting at position 2406 of SEQ ID NO: 2324
gugugaguugucaggugug

SEQ ID NO: 180293 - RNA, 19 nt, Artificial Sequence
  Description of Artificial Sequence: Synthetic oligonucleotide
  Antisense strand to SEQ ID NO: 180292
cacaccugacaacucacac

SEQ ID NO: 180294 - RNA, 19 nt, Artificial Sequence
  Description of Artificial Sequence: Synthetic oligonucleotide
  Sense strand starting at position 2472 of SEQ ID NO: 2324
ggagcaggguccucugaua

SEQ ID NO: 180295 - RNA, 19 nt, Artificial Sequence
  Description of Artificial Sequence: Synthetic oligonucleotide
  Antisense strand to SEQ ID NO: 180294
uaucagaggacccugcucc

SEQ ID NO: 180296 - RNA, 19 nt, Artificial Sequence
  Description of Artificial Sequence: Synthetic oligonucleotide
  Sense strand starting at position 2485 of SEQ ID NO: 2324
cugauacagucuuuaguuc

SEQ ID NO: 180297 - RNA, 19 nt, Artificial Sequence
  Description of Artificial Sequence: Synthetic oligonucleotide
  Antisense strand to SEQ ID NO: 180296
gaacuaaagacuguaucag

SEQ ID NO: 180298 - RNA, 19 nt, Artificial Sequence
  Description of Artificial Sequence: Synthetic oligonucleotide
  Sense strand starting at position 2524 of SEQ ID NO: 2324
gggaucuuugcaugaauau

SEQ ID NO: 180299 - RNA, 19 nt, Artificial Sequence
  Description of Artificial Sequence: Synthetic oligonucleotide
  Antisense strand to SEQ ID NO: 180298
auauucaugcaaagauccc

SEQ ID NO: 180300 - RNA, 19 nt, Artificial Sequence
  Description of Artificial Sequence: Synthetic oligonucleotide
  Sense strand starting at position 2525 of SEQ ID NO: 2324
ggaucuuugcaugaauauc

SEQ ID NO: 180301 - RNA, 19 nt, Artificial Sequence
  Description of Artificial Sequence: Synthetic oligonucleotide
  Antisense strand to SEQ ID NO: 180300
gauauucaugcaaagaucc

SEQ ID NO: 180302 - RNA, 19 nt, Artificial Sequence
  Description of Artificial Sequence: Synthetic oligonucleotide
  Sense strand starting at position 2533 of SEQ ID NO: 2324
gcaugaauaucuguacuga

SEQ ID NO: 180303 - RNA, 19 nt, Artificial Sequence
  Description of Artificial Sequence: Synthetic oligonucleotide
  Antisense strand to SEQ ID NO: 180302
ucaguacagauauucaugc

SEQ ID NO: 180304 - RNA, 19 nt, Artificial Sequence
  Description of Artificial Sequence: Synthetic oligonucleotide
  Sense strand starting at position 2680 of SEQ ID NO: 2324
gaucaauuagguugacauu

SEQ ID NO: 180305 - RNA, 19 nt, Artificial Sequence
  Description of Artificial Sequence: Synthetic oligonucleotide
  Antisense strand to SEQ ID NO: 180304
aaugucaaccuaauugauc

SEQ ID NO: 180306 - RNA, 19 nt, Artificial Sequence
  Description of Artificial Sequence: Synthetic oligonucleotide
  Sense strand starting at position 2815 of SEQ ID NO: 2324
aucaauugucguuauugga

SEQ ID NO: 180307 - RNA, 19 nt, Artificial Sequence
  Description of Artificial Sequence: Synthetic oligonucleotide
  Antisense strand to SEQ ID NO: 180306
uccaauaacgacaauugau

SEQ ID NO: 180308 - RNA, 19 nt, Artificial Sequence
  Description of Artificial Sequence: Synthetic oligonucleotide
  Sense strand starting at position 2907 of SEQ ID NO: 2324
auuucaagguguucguaga

SEQ ID NO: 180309 - RNA, 19 nt, Artificial Sequence
  Description of Artificial Sequence: Synthetic oligonucleotide
  Antisense strand to SEQ ID NO: 180308
ucuacgaacaccuugaaau

SEQ ID NO: 180310 - RNA, 19 nt, Artificial Sequence
  Description of Artificial Sequence: Synthetic oligonucleotide
  Sense strand starting at position 2920 of SEQ ID NO: 2324
cguagaauaccuugaacuu

SEQ ID NO: 180311 - RNA, 19 nt, Artificial Sequence
  Description of Artificial Sequence: Synthetic oligonucleotide
  Antisense strand to SEQ ID NO: 180310
aaguucaagguauucuacg

SEQ ID NO: 180312 - RNA, 19 nt, Artificial Sequence
  Description of Artificial Sequence: Synthetic oligonucleotide
  Sense strand starting at position 3091 of SEQ ID NO: 2324
ggguauuaauuagcaaaga

SEQ ID NO: 180313 - RNA, 19 nt, Artificial Sequence
  Description of Artificial Sequence: Synthetic oligonucleotide
  Antisense strand to SEQ ID NO: 180312
ucuuugcuaauuaauaccc

SEQ ID NO: 180314 - RNA, 19 nt, Artificial Sequence
  Description of Artificial Sequence: Synthetic oligonucleotide
  Sense strand starting at position 3175 of SEQ ID NO: 2324
aguaaauuauggucuguag

SEQ ID NO: 180315 - RNA, 19 nt, Artificial Sequence
  Description of Artificial Sequence: Synthetic oligonucleotide
  Antisense strand to SEQ ID NO: 180314
cuacagaccauaauuuacu

SEQ ID NO: 180316 - RNA, 19 nt, Artificial Sequence
  Description of Artificial Sequence: Synthetic oligonucleotide
  Sense strand starting at position 3177 of SEQ ID NO: 2324
uaaauuauggucuguagua

SEQ ID NO: 180317 - RNA, 19 nt, Artificial Sequence
  Description of Artificial Sequence: Synthetic oligonucleotide
  Antisense strand to SEQ ID NO: 180316
uacuacagaccauaauuua

SEQ ID NO: 180318 - RNA, 19 nt, Artificial Sequence
  Description of Artificial Sequence: Synthetic oligonucleotide
  Sense strand starting at position 3178 of SEQ ID NO: 2324
aaauuauggucuguaguaa

SEQ ID NO: 180319 - RNA, 19 nt, Artificial Sequence
  Description of Artificial Sequence: Synthetic oligonucleotide
  Antisense strand to SEQ ID NO: 180318
uuacuacagaccauaauuu

SEQ ID NO: 180320 - RNA, 19 nt, Artificial Sequence
  Description of Artificial Sequence: Synthetic oligonucleotide
  Sense strand starting at position 3179 of SEQ ID NO: 2324
aauuauggucuguaguaau

SEQ ID NO: 180321 - RNA, 19 nt, Artificial Sequence
  Description of Artificial Sequence: Synthetic oligonucleotide
  Antisense strand to SEQ ID NO: 180320
auuacuacagaccauaauu

SEQ ID NO: 180322 - RNA, 19 nt, Artificial Sequence
  Description of Artificial Sequence: Synthetic oligonucleotide
  Sense strand starting at position 3209 of SEQ ID NO: 2324
uugacaaacugaguguaua

SEQ ID NO: 180323 - RNA, 19 nt, Artificial Sequence
  Description of Artificial Sequence: Synthetic oligonucleotide
  Antisense strand to SEQ ID NO: 180322
uauacacucaguuugucaa

SEQ ID NO: 180324 - RNA, 19 nt, Artificial Sequence
  Description of Artificial Sequence: Synthetic oligonucleotide
  Sense strand starting at position 3217 of SEQ ID NO: 2324
cugaguguauaccuguaua

SEQ ID NO: 180325 - RNA, 19 nt, Artificial Sequence
  Description of Artificial Sequence: Synthetic oligonucleotide
  Antisense strand to SEQ ID NO: 180324
uauacagguauacacucag

SEQ ID NO: 180326 - RNA, 19 nt, Artificial Sequence
  Description of Artificial Sequence: Synthetic oligonucleotide
  Sense strand starting at position 3220 of SEQ ID NO: 2324
aguguauaccuguauaauc

SEQ ID NO: 180327 - RNA, 19 nt, Artificial Sequence
  Description of Artificial Sequence: Synthetic oligonucleotide
  Antisense strand to SEQ ID NO: 180326
gauuauacagguauacacu

SEQ ID NO: 180328 - RNA, 19 nt, Artificial Sequence
  Description of Artificial Sequence: Synthetic oligonucleotide
  Sense strand starting at position 3318 of SEQ ID NO: 2324
ugucaacccuuguuaaauc

SEQ ID NO: 180329 - RNA, 19 nt, Artificial Sequence
  Description of Artificial Sequence: Synthetic oligonucleotide
  Antisense strand to SEQ ID NO: 180328
gauuuaacaaggguugaca

SEQ ID NO: 180330 - RNA, 19 nt, Artificial Sequence
  Description of Artificial Sequence: Synthetic oligonucleotide
  Sense strand starting at position 3392 of SEQ ID NO: 2324
aaacaaauuugugacgauu

SEQ ID NO: 180331 - RNA, 19 nt, Artificial Sequence
  Description of Artificial Sequence: Synthetic oligonucleotide
  Antisense strand to SEQ ID NO: 180330
aaucgucacaaauuuguuu

SEQ ID NO: 180332 - RNA, 19 nt, Artificial Sequence
  Description of Artificial Sequence: Synthetic oligonucleotide
  Sense strand starting at position 3401 of SEQ ID NO: 2324
ugugacgauuaaccucaua

SEQ ID NO: 180333 - RNA, 19 nt, Artificial Sequence
  Description of Artificial Sequence: Synthetic oligonucleotide
  Antisense strand to SEQ ID NO: 180332
uaugagguuaaucgucaca

SEQ ID NO: 180334 - RNA, 19 nt, Artificial Sequence
  Description of Artificial Sequence: Synthetic oligonucleotide
  Sense strand starting at position 3438 of SEQ ID NO: 2324
uggcaaucuuauuucgguu

SEQ ID NO: 180335 - RNA, 19 nt, Artificial Sequence
  Description of Artificial Sequence: Synthetic oligonucleotide
  Antisense strand to SEQ ID NO: 180334
aaccgaaauaagauugcca

SEQ ID NO: 180336 - RNA, 19 nt, Artificial Sequence
  Description of Artificial Sequence: Synthetic oligonucleotide
  Sense strand starting at position 3775 of SEQ ID NO: 2324
ccagguuugcaacaacaua

SEQ ID NO: 180337 - RNA, 19 nt, Artificial Sequence
  Description of Artificial Sequence: Synthetic oligonucleotide
  Antisense strand to SEQ ID NO: 180336
uauguuguugcaaaccugg

SEQ ID NO: 180338 - RNA, 19 nt, Artificial Sequence
  Description of Artificial Sequence: Synthetic oligonucleotide
  Sense strand starting at position 3812 of SEQ ID NO: 2324
guuauuucuuuacuguacu

SEQ ID NO: 180339 - RNA, 19 nt, Artificial Sequence
  Description of Artificial Sequence: Synthetic oligonucleotide
  Antisense strand to SEQ ID NO: 180338
aguacaguaaagaaauaac

SEQ ID NO: 180340 - RNA, 19 nt, Artificial Sequence
  Description of Artificial Sequence: Synthetic oligonucleotide
  Sense strand starting at position 3840 of SEQ ID NO: 2324
ugccuucugcuggaucauu

SEQ ID NO: 180341 - RNA, 19 nt, Artificial Sequence
  Description of Artificial Sequence: Synthetic oligonucleotide
  Antisense strand to SEQ ID NO: 180340
aaugauccagcagaaggca

SEQ ID NO: 180342 - RNA, 19 nt, Artificial Sequence
  Description of Artificial Sequence: Synthetic oligonucleotide
  Sense strand starting at position 25 of SEQ ID NO: 2325
cguguucccagagagggaa

SEQ ID NO: 180343 - RNA, 19 nt, Artificial Sequence
  Description of Artificial Sequence: Synthetic oligonucleotide
  Antisense strand to SEQ ID NO: 180342
uucccucucugggaacacg

SEQ ID NO: 180344 - RNA, 19 nt, Artificial Sequence
  Description of Artificial Sequence: Synthetic oligonucleotide
  Sense strand starting at position 230 of SEQ ID NO: 2325
uaguguugcagcugagaca

SEQ ID NO: 180345 - RNA, 19 nt, Artificial Sequence
  Description of Artificial Sequence: Synthetic oligonucleotide
  Antisense strand to SEQ ID NO: 180344
ugucucagcugcaacacua

SEQ ID NO: 180346 - RNA, 19 nt, Artificial Sequence
  Description of Artificial Sequence: Synthetic oligonucleotide
  Sense strand starting at position 231 of SEQ ID NO: 2325
aguguugcagcugagacaa

SEQ ID NO: 180347 - RNA, 19 nt, Artificial Sequence
  Description of Artificial Sequence: Synthetic oligonucleotide
  Antisense strand to SEQ ID NO: 180346
uugucucagcugcaacacu

SEQ ID NO: 180348 - RNA, 19 nt, Artificial Sequence
  Description of Artificial Sequence: Synthetic oligonucleotide
  Sense strand starting at position 348 of SEQ ID NO: 2325
gugccuuccacugaaggua

SEQ ID NO: 180349 - RNA, 19 nt, Artificial Sequence
  Description of Artificial Sequence: Synthetic oligonucleotide
  Antisense strand to SEQ ID NO: 180348
uaccuucaguggaaggcac

SEQ ID NO: 180350 - RNA, 19 nt, Artificial Sequence
  Description of Artificial Sequence: Synthetic oligonucleotide
  Sense strand starting at position 401 of SEQ ID NO: 2325
acaagagaccuggguucuu

SEQ ID NO: 180351 - RNA, 19 nt, Artificial Sequence
  Description of Artificial Sequence: Synthetic oligonucleotide
  Antisense strand to SEQ ID NO: 180350
aagaacccaggucucuugu

SEQ ID NO: 180352 - RNA, 19 nt, Artificial Sequence
  Description of Artificial Sequence: Synthetic oligonucleotide
  Sense strand starting at position 416 of SEQ ID NO: 2325
ucuuguugaccucaugcaa

SEQ ID NO: 180353 - RNA, 19 nt, Artificial Sequence
  Description of Artificial Sequence: Synthetic oligonucleotide
  Antisense strand to SEQ ID NO: 180352
uugcaugaggucaacaaga

SEQ ID NO: 180354 - RNA, 19 nt, Artificial Sequence
  Description of Artificial Sequence: Synthetic oligonucleotide
  Sense strand starting at position 427 of SEQ ID NO: 2325
ucaugcaaucaguggucau

SEQ ID NO: 180355 - RNA, 19 nt, Artificial Sequence
  Description of Artificial Sequence: Synthetic oligonucleotide
  Antisense strand to SEQ ID NO: 180354
augaccacugauugcauga

SEQ ID NO: 180356 - RNA, 19 nt, Artificial Sequence
  Description of Artificial Sequence: Synthetic oligonucleotide
  Sense strand starting at position 534 of SEQ ID NO: 2325
cuuucuaggugcuuuacaa

SEQ ID NO: 180357 - RNA, 19 nt, Artificial Sequence
  Description of Artificial Sequence: Synthetic oligonucleotide
  Antisense strand to SEQ ID NO: 180356
uuguaaagcaccuagaaag

SEQ ID NO: 180358 - RNA, 19 nt, Artificial Sequence
  Description of Artificial Sequence: Synthetic oligonucleotide
  Sense strand starting at position 608 of SEQ ID NO: 2325
ugacaaagccuaugacaua

SEQ ID NO: 180359 - RNA, 19 nt, Artificial Sequence
  Description of Artificial Sequence: Synthetic oligonucleotide
  Antisense strand to SEQ ID NO: 180358
uaugucauaggcuuuguca

SEQ ID NO: 180360 - RNA, 19 nt, Artificial Sequence
  Description of Artificial Sequence: Synthetic oligonucleotide
  Sense strand starting at position 768 of SEQ ID NO: 2325
cugcaugcuguccuuaagu

SEQ ID NO: 180361 - RNA, 19 nt, Artificial Sequence
  Description of Artificial Sequence: Synthetic oligonucleotide
  Antisense strand to SEQ ID NO: 180360
acuuaaggacagcaugcag

SEQ ID NO: 180362 - RNA, 19 nt, Artificial Sequence
  Description of Artificial Sequence: Synthetic oligonucleotide
  Sense strand starting at position 770 of SEQ ID NO: 2325
gcaugcuguccuuaaguca

SEQ ID NO: 180363 - RNA, 19 nt, Artificial Sequence
  Description of Artificial Sequence: Synthetic oligonucleotide
  Antisense strand to SEQ ID NO: 180362
ugacuuaaggacagcaugc

SEQ ID NO: 180364 - RNA, 19 nt, Artificial Sequence
  Description of Artificial Sequence: Synthetic oligonucleotide
  Sense strand starting at position 958 of SEQ ID NO: 2325
gugggaaugugcccaaguu

SEQ ID NO: 180365 - RNA, 19 nt, Artificial Sequence
  Description of Artificial Sequence: Synthetic oligonucleotide
  Antisense strand to SEQ ID NO: 180364
aacuugggcacauucccac

SEQ ID NO: 180366 - RNA, 19 nt, Artificial Sequence
  Description of Artificial Sequence: Synthetic oligonucleotide
  Sense strand starting at position 959 of SEQ ID NO: 2325
ugggaaugugcccaaguuu

SEQ ID NO: 180367 - RNA, 19 nt, Artificial Sequence
  Description of Artificial Sequence: Synthetic oligonucleotide
  Antisense strand to SEQ ID NO: 180366
aaacuugggcacauuccca

SEQ ID NO: 180368 - RNA, 19 nt, Artificial Sequence
  Description of Artificial Sequence: Synthetic oligonucleotide
  Sense strand starting at position 1065 of SEQ ID NO: 2325
ggaugaauuguccagguug

SEQ ID NO: 180369 - RNA, 19 nt, Artificial Sequence
  Description of Artificial Sequence: Synthetic oligonucleotide
  Antisense strand to SEQ ID NO: 180368
caaccuggacaauucaucc

SEQ ID NO: 180370 - RNA, 19 nt, Artificial Sequence
  Description of Artificial Sequence: Synthetic oligonucleotide
  Sense strand starting at position 1251 of SEQ ID NO: 2325
ggcaucucugcagacagaa

SEQ ID NO: 180371 - RNA, 19 nt, Artificial Sequence
  Description of Artificial Sequence: Synthetic oligonucleotide
  Antisense strand to SEQ ID NO: 180370
uucugucugcagagaugcc

SEQ ID NO: 180372 - RNA, 19 nt, Artificial Sequence
  Description of Artificial Sequence: Synthetic oligonucleotide
  Sense strand starting at position 1565 of SEQ ID NO: 2325
cguacacgugugccagauu

SEQ ID NO: 180373 - RNA, 19 nt, Artificial Sequence
  Description of Artificial Sequence: Synthetic oligonucleotide
  Antisense strand to SEQ ID NO: 180372
aaucuggcacacguguacg

SEQ ID NO: 180374 - RNA, 19 nt, Artificial Sequence
  Description of Artificial Sequence: Synthetic oligonucleotide
  Sense strand starting at position 1576 of SEQ ID NO: 2325
gccagauuggcccaggcau

SEQ ID NO: 180375 - RNA, 19 nt, Artificial Sequence
  Description of Artificial Sequence: Synthetic oligonucleotide
  Antisense strand to SEQ ID NO: 180374
augccugggccaaucuggc

SEQ ID NO: 180376 - RNA, 19 nt, Artificial Sequence
  Description of Artificial Sequence: Synthetic oligonucleotide
  Sense strand starting at position 1805 of SEQ ID NO: 2325
acugcaucuccaggugaaa

SEQ ID NO: 180377 - RNA, 19 nt, Artificial Sequence
  Description of Artificial Sequence: Synthetic oligonucleotide
  Antisense strand to SEQ ID NO: 180376
uuucaccuggagaugcagu

SEQ ID NO: 180378 - RNA, 19 nt, Artificial Sequence
  Description of Artificial Sequence: Synthetic oligonucleotide
  Sense strand starting at position 1807 of SEQ ID NO: 2325
ugcaucuccaggugaaagu

SEQ ID NO: 180379 - RNA, 19 nt, Artificial Sequence
  Description of Artificial Sequence: Synthetic oligonucleotide
  Antisense strand to SEQ ID NO: 180378
acuuucaccuggagaugca

SEQ ID NO: 180380 - RNA, 19 nt, Artificial Sequence
  Description of Artificial Sequence: Synthetic oligonucleotide
  Sense strand starting at position 2065 of SEQ ID NO: 2325
cgaggagugcccuguaggu

SEQ ID NO: 180381 - RNA, 19 nt, Artificial Sequence
  Description of Artificial Sequence: Synthetic oligonucleotide
  Antisense strand to SEQ ID NO: 180380
accuacagggcacuccucg

SEQ ID NO: 180382 - RNA, 19 nt, Artificial Sequence
  Description of Artificial Sequence: Synthetic oligonucleotide
  Sense strand starting at position 2107 of SEQ ID NO: 2325
gcuucuagacgcugacauu

SEQ ID NO: 180383 - RNA, 19 nt, Artificial Sequence
  Description of Artificial Sequence: Synthetic oligonucleotide
  Antisense strand to SEQ ID NO: 180382
aaugucagcgucuagaagc

SEQ ID NO: 180384 - RNA, 19 nt, Artificial Sequence
  Description of Artificial Sequence: Synthetic oligonucleotide
  Sense strand starting at position 2149 of SEQ ID NO: 2325
acaggcacauugucaaaua

SEQ ID NO: 180385 - RNA, 19 nt, Artificial Sequence
  Description of Artificial Sequence: Synthetic oligonucleotide
  Antisense strand to SEQ ID NO: 180384
uauuugacaaugugccugu

SEQ ID NO: 180386 - RNA, 19 nt, Artificial Sequence
  Description of Artificial Sequence: Synthetic oligonucleotide
  Sense strand starting at position 2358 of SEQ ID NO: 2325
gucugcuugagcugaguca

SEQ ID NO: 180387 - RNA, 19 nt, Artificial Sequence
  Description of Artificial Sequence: Synthetic oligonucleotide
  Antisense strand to SEQ ID NO: 180386
ugacucagcucaagcagac

SEQ ID NO: 180388 - RNA, 19 nt, Artificial Sequence
  Description of Artificial Sequence: Synthetic oligonucleotide
  Sense strand starting at position 2494 of SEQ ID NO: 2325
ggccauuauuuaugaggcu

SEQ ID NO: 180389 - RNA, 19 nt, Artificial Sequence
  Description of Artificial Sequence: Synthetic oligonucleotide
  Antisense strand to SEQ ID NO: 180388
agccucauaaauaauggcc

SEQ ID NO: 180390 - RNA, 19 nt, Artificial Sequence
  Description of Artificial Sequence: Synthetic oligonucleotide
  Sense strand starting at position 2495 of SEQ ID NO: 2325
gccauuauuuaugaggcuu

SEQ ID NO: 180391 - RNA, 19 nt, Artificial Sequence
  Description of Artificial Sequence: Synthetic oligonucleotide
  Antisense strand to SEQ ID NO: 180390
aagccucauaaauaauggc

SEQ ID NO: 180392 - RNA, 19 nt, Artificial Sequence
  Description of Artificial Sequence: Synthetic oligonucleotide
  Sense strand starting at position 2507 of SEQ ID NO: 2325
gaggcuuccuuccugggau

SEQ ID NO: 180393 - RNA, 19 nt, Artificial Sequence
  Description of Artificial Sequence: Synthetic oligonucleotide
  Antisense strand to SEQ ID NO: 180392
aucccaggaaggaagccuc

SEQ ID NO: 180394 - RNA, 19 nt, Artificial Sequence
  Description of Artificial Sequence: Synthetic oligonucleotide
  Sense strand starting at position 2551 of SEQ ID NO: 2325
gugagcuccugugcaaaga

SEQ ID NO: 180395 - RNA, 19 nt, Artificial Sequence
  Description of Artificial Sequence: Synthetic oligonucleotide
  Antisense strand to SEQ ID NO: 180394
ucuuugcacaggagcucac

SEQ ID NO: 180396 - RNA, 19 nt, Artificial Sequence
  Description of Artificial Sequence: Synthetic oligonucleotide
  Sense strand starting at position 2632 of SEQ ID NO: 2325
acacuuuccucaccuguga

SEQ ID NO: 180397 - RNA, 19 nt, Artificial Sequence
  Description of Artificial Sequence: Synthetic oligonucleotide
  Antisense strand to SEQ ID NO: 180396
ucacaggugaggaaagugu

SEQ ID NO: 180398 - RNA, 19 nt, Artificial Sequence
  Description of Artificial Sequence: Synthetic oligonucleotide
  Sense strand starting at position 2641 of SEQ ID NO: 2325
ucaccugugacaugaggau

SEQ ID NO: 180399 - RNA, 19 nt, Artificial Sequence
  Description of Artificial Sequence: Synthetic oligonucleotide
  Antisense strand to SEQ ID NO: 180398
auccucaugucacagguga

SEQ ID NO: 180400 - RNA, 19 nt, Artificial Sequence
  Description of Artificial Sequence: Synthetic oligonucleotide
  Sense strand starting at position 2659 of SEQ ID NO: 2325
ugacaauccuuccgcauuu

SEQ ID NO: 180401 - RNA, 19 nt, Artificial Sequence
  Description of Artificial Sequence: Synthetic oligonucleotide
  Antisense strand to SEQ ID NO: 180400
aaaugcggaaggauuguca

SEQ ID NO: 180402 - RNA, 19 nt, Artificial Sequence
  Description of Artificial Sequence: Synthetic oligonucleotide
  Sense strand starting at position 2668 of SEQ ID NO: 2325
uuccgcauuuaucagguaa

SEQ ID NO: 180403 - RNA, 19 nt, Artificial Sequence
  Description of Artificial Sequence: Synthetic oligonucleotide
  Antisense strand to SEQ ID NO: 180402
uuaccugauaaaugcggaa

SEQ ID NO: 180404 - RNA, 19 nt, Artificial Sequence
  Description of Artificial Sequence: Synthetic oligonucleotide
  Sense strand starting at position 2698 of SEQ ID NO: 2325
ggccacucuggauaaaugu

SEQ ID NO: 180405 - RNA, 19 nt, Artificial Sequence
  Description of Artificial Sequence: Synthetic oligonucleotide
  Antisense strand to SEQ ID NO: 180404
acauuuauccagaguggcc

SEQ ID NO: 180406 - RNA, 19 nt, Artificial Sequence
  Description of Artificial Sequence: Synthetic oligonucleotide
  Sense strand starting at position 2707 of SEQ ID NO: 2325
ggauaaaugucagcuccca

SEQ ID NO: 180407 - RNA, 19 nt, Artificial Sequence
  Description of Artificial Sequence: Synthetic oligonucleotide
  Antisense strand to SEQ ID NO: 180406
ugggagcugacauuuaucc

SEQ ID NO: 180408 - RNA, 19 nt, Artificial Sequence
  Description of Artificial Sequence: Synthetic oligonucleotide
  Sense strand starting at position 3224 of SEQ ID NO: 2325
cuauaaauugcuggugauc

SEQ ID NO: 180409 - RNA, 19 nt, Artificial Sequence
  Description of Artificial Sequence: Synthetic oligonucleotide
  Antisense strand to SEQ ID NO: 180408
gaucaccagcaauuuauag

SEQ ID NO: 180410 - RNA, 19 nt, Artificial Sequence
  Description of Artificial Sequence: Synthetic oligonucleotide
  Sense strand starting at position 3260 of SEQ ID NO: 2325
cucucaccugcuugagagu

SEQ ID NO: 180411 - RNA, 19 nt, Artificial Sequence
  Description of Artificial Sequence: Synthetic oligonucleotide
  Antisense strand to SEQ ID NO: 180410
acucucaagcaggugagag

SEQ ID NO: 180412 - RNA, 19 nt, Artificial Sequence
  Description of Artificial Sequence: Synthetic oligonucleotide
  Sense strand starting at position 3597 of SEQ ID NO: 2325
agaacuccgucucaaagaa

SEQ ID NO: 180413 - RNA, 19 nt, Artificial Sequence
  Description of Artificial Sequence: Synthetic oligonucleotide
  Antisense strand to SEQ ID NO: 180412
uucuuugagacggaguucu

SEQ ID NO: 180414 - RNA, 19 nt, Artificial Sequence
  Description of Artificial Sequence: Synthetic oligonucleotide
  Sense strand starting at position 3686 of SEQ ID NO: 2325
uggcauuaagugcaugaau

SEQ ID NO: 180415 - RNA, 19 nt, Artificial Sequence
  Description of Artificial Sequence: Synthetic oligonucleotide
  Antisense strand to SEQ ID NO: 180414
auucaugcacuuaaugcca

SEQ ID NO: 180416 - RNA, 19 nt, Artificial Sequence
  Description of Artificial Sequence: Synthetic oligonucleotide
  Sense strand starting at position 3727 of SEQ ID NO: 2325
cccugagggcacugcuaua

SEQ ID NO: 180417 - RNA, 19 nt, Artificial Sequence
  Description of Artificial Sequence: Synthetic oligonucleotide
  Antisense strand to SEQ ID NO: 180416
uauagcagugcccucaggg

SEQ ID NO: 180418 - RNA, 19 nt, Artificial Sequence
  Description of Artificial Sequence: Synthetic oligonucleotide
  Sense strand starting at position 3938 of SEQ ID NO: 2325
gcuuaucucccuuagcaug

SEQ ID NO: 180419 - RNA, 19 nt, Artificial Sequence
  Description of Artificial Sequence: Synthetic oligonucleotide
  Antisense strand to SEQ ID NO: 180418
caugcuaagggagauaagc

SEQ ID NO: 180420 - RNA, 19 nt, Artificial Sequence
  Description of Artificial Sequence: Synthetic oligonucleotide
  Sense strand starting at position 3974 of SEQ ID NO: 2325
ugugguagcacguguuaga

SEQ ID NO: 180421 - RNA, 19 nt, Artificial Sequence
  Description of Artificial Sequence: Synthetic oligonucleotide
  Antisense strand to SEQ ID NO: 180420
ucuaacacgugcuaccaca

SEQ ID NO: 180422 - RNA, 19 nt, Artificial Sequence
  Description of Artificial Sequence: Synthetic oligonucleotide
  Sense strand starting at position 3912 of SEQ ID NO: 2326
agauucuuuggcugggcua

SEQ ID NO: 180423 - RNA, 19 nt, Artificial Sequence
  Description of Artificial Sequence: Synthetic oligonucleotide
  Antisense strand to SEQ ID NO: 180422
uagcccagccaaagaaucu

SEQ ID NO: 180424 - RNA, 19 nt, Artificial Sequence
  Description of Artificial Sequence: Synthetic oligonucleotide
  Sense strand starting at position 3869 of SEQ ID NO: 2326
ggugcuguggcagagugaa

SEQ ID NO: 180425 - RNA, 19 nt, Artificial Sequence
  Description of Artificial Sequence: Synthetic oligonucleotide
  Antisense strand to SEQ ID NO: 180424
uucacucugccacagcacc

SEQ ID NO: 180426 - RNA, 19 nt, Artificial Sequence
  Description of Artificial Sequence: Synthetic oligonucleotide
  Sense strand starting at position 3812 of SEQ ID NO: 2326
ccugcagccuuugcuaaau

SEQ ID NO: 180427 - RNA, 19 nt, Artificial Sequence
  Description of Artificial Sequence: Synthetic oligonucleotide
  Antisense strand to SEQ ID NO: 180426
auuuagcaaaggcugcagg

SEQ ID NO: 180428 - RNA, 19 nt, Artificial Sequence
  Description of Artificial Sequence: Synthetic oligonucleotide
  Sense strand starting at position 3759 of SEQ ID NO: 2326
aggccuuugccagaaacaa

SEQ ID NO: 180429 - RNA, 19 nt, Artificial Sequence
  Description of Artificial Sequence: Synthetic oligonucleotide
  Antisense strand to SEQ ID NO: 180428
uuguuucuggcaaaggccu

SEQ ID NO: 180430 - RNA, 19 nt, Artificial Sequence
  Description of Artificial Sequence: Synthetic oligonucleotide
  Sense strand starting at position 3754 of SEQ ID NO: 2326
uaaagaggccuuugccaga

SEQ ID NO: 180431 - RNA, 19 nt, Artificial Sequence
  Description of Artificial Sequence: Synthetic oligonucleotide
  Antisense strand to SEQ ID NO: 180430
ucuggcaaaggccucuuua

SEQ ID NO: 180432 - RNA, 19 nt, Artificial Sequence
  Description of Artificial Sequence: Synthetic oligonucleotide
  Sense strand starting at position 3721 of SEQ ID NO: 2326
guccucauugccuagggaa

SEQ ID NO: 180433 - RNA, 19 nt, Artificial Sequence
  Description of Artificial Sequence: Synthetic oligonucleotide
  Antisense strand to SEQ ID NO: 180432
uucccuaggcaaugaggac

SEQ ID NO: 180434 - RNA, 19 nt, Artificial Sequence
  Description of Artificial Sequence: Synthetic oligonucleotide
  Sense strand starting at position 3634 of SEQ ID NO: 2326
ucugcuuaaugagaggaca

SEQ ID NO: 180435 - RNA, 19 nt, Artificial Sequence
  Description of Artificial Sequence: Synthetic oligonucleotide
  Antisense strand to SEQ ID NO: 180434
uguccucucauuaagcaga

SEQ ID NO: 180436 - RNA, 19 nt, Artificial Sequence
  Description of Artificial Sequence: Synthetic oligonucleotide
  Sense strand starting at position 3628 of SEQ ID NO: 2326
acaguuucugcuuaaugag

SEQ ID NO: 180437 - RNA, 19 nt, Artificial Sequence
  Description of Artificial Sequence: Synthetic oligonucleotide
  Antisense strand to SEQ ID NO: 180436
cucauuaagcagaaacugu

SEQ ID NO: 180438 - RNA, 19 nt, Artificial Sequence
  Description of Artificial Sequence: Synthetic oligonucleotide
  Sense strand starting at position 3610 of SEQ ID NO: 2326
uccacugaucugugaccua

SEQ ID NO: 180439 - RNA, 19 nt, Artificial Sequence
  Description of Artificial Sequence: Synthetic oligonucleotide
  Antisense strand to SEQ ID NO: 180438
uaggucacagaucagugga

SEQ ID NO: 180440 - RNA, 19 nt, Artificial Sequence
  Description of Artificial Sequence: Synthetic oligonucleotide
  Sense strand starting at position 3557 of SEQ ID NO: 2326
ucaggaaaggccuggagau

SEQ ID NO: 180441 - RNA, 19 nt, Artificial Sequence
  Description of Artificial Sequence: Synthetic oligonucleotide
  Antisense strand to SEQ ID NO: 180440
aucuccaggccuuuccuga

SEQ ID NO: 180442 - RNA, 19 nt, Artificial Sequence
  Description of Artificial Sequence: Synthetic oligonucleotide
  Sense strand starting at position 3548 of SEQ ID NO: 2326
gauugauagucaggaaagg

SEQ ID NO: 180443 - RNA, 19 nt, Artificial Sequence
  Description of Artificial Sequence: Synthetic oligonucleotide
  Antisense strand to SEQ ID NO: 180442
ccuuuccugacuaucaauc

SEQ ID NO: 180444 - RNA, 19 nt, Artificial Sequence
  Description of Artificial Sequence: Synthetic oligonucleotide
  Sense strand starting at position 3542 of SEQ ID NO: 2326
gugaaagauugauagucag

SEQ ID NO: 180445 - RNA, 19 nt, Artificial Sequence
  Description of Artificial Sequence: Synthetic oligonucleotide
  Antisense strand to SEQ ID NO: 180444
cugacuaucaaucuuucac

SEQ ID NO: 180446 - RNA, 19 nt, Artificial Sequence
  Description of Artificial Sequence: Synthetic oligonucleotide
  Sense strand starting at position 3343 of SEQ ID NO: 2326
cccggcaugaccugugaua

SEQ ID NO: 180447 - RNA, 19 nt, Artificial Sequence
  Description of Artificial Sequence: Synthetic oligonucleotide
  Antisense strand to SEQ ID NO: 180446
uaucacaggucaugccggg

SEQ ID NO: 180448 - RNA, 19 nt, Artificial Sequence
  Description of Artificial Sequence: Synthetic oligonucleotide
  Sense strand starting at position 3253 of SEQ ID NO: 2326
uuugauauguugcccagga

SEQ ID NO: 180449 - RNA, 19 nt, Artificial Sequence
  Description of Artificial Sequence: Synthetic oligonucleotide
  Antisense strand to SEQ ID NO: 180448
uccugggcaacauaucaaa

SEQ ID NO: 180450 - RNA, 19 nt, Artificial Sequence
  Description of Artificial Sequence: Synthetic oligonucleotide
  Sense strand starting at position 3066 of SEQ ID NO: 2326
ggcugaagugccuagauga

SEQ ID NO: 180451 - RNA, 19 nt, Artificial Sequence
  Description of Artificial Sequence: Synthetic oligonucleotide
  Antisense strand to SEQ ID NO: 180450
ucaucuaggcacuucagcc

SEQ ID NO: 180452 - RNA, 19 nt, Artificial Sequence
  Description of Artificial Sequence: Synthetic oligonucleotide
  Sense strand starting at position 2987 of SEQ ID NO: 2326
uccacuacacugugugauu

SEQ ID NO: 180453 - RNA, 19 nt, Artificial Sequence
  Description of Artificial Sequence: Synthetic oligonucleotide
  Antisense strand to SEQ ID NO: 180452
aaucacacaguguagugga

SEQ ID NO: 180454 - RNA, 19 nt, Artificial Sequence
  Description of Artificial Sequence: Synthetic oligonucleotide
  Sense strand starting at position 2130 of SEQ ID NO: 2326
gugcuaaaccucgguagug

SEQ ID NO: 180455 - RNA, 19 nt, Artificial Sequence
  Description of Artificial Sequence: Synthetic oligonucleotide
  Antisense strand to SEQ ID NO: 180454
cacuaccgagguuuagcac

SEQ ID NO: 180456 - RNA, 19 nt, Artificial Sequence
  Description of Artificial Sequence: Synthetic oligonucleotide
  Sense strand starting at position 2129 of SEQ ID NO: 2326
agugcuaaaccucgguagu

SEQ ID NO: 180457 - RNA, 19 nt, Artificial Sequence
  Description of Artificial Sequence: Synthetic oligonucleotide
  Antisense strand to SEQ ID NO: 180456
acuaccgagguuuagcacu

SEQ ID NO: 180458 - RNA, 19 nt, Artificial Sequence
  Description of Artificial Sequence: Synthetic oligonucleotide
  Sense strand starting at position 2091 of SEQ ID NO: 2326
agggaauuauuugagugac

SEQ ID NO: 180459 - RNA, 19 nt, Artificial Sequence
  Description of Artificial Sequence: Synthetic oligonucleotide
  Antisense strand to SEQ ID NO: 180458
gucacucaaauaauucccu

SEQ ID NO: 180460 - RNA, 19 nt, Artificial Sequence
  Description of Artificial Sequence: Synthetic oligonucleotide
  Sense strand starting at position 2082 of SEQ ID NO: 2326
uccagucguagggaauuau

SEQ ID NO: 180461 - RNA, 19 nt, Artificial Sequence
  Description of Artificial Sequence: Synthetic oligonucleotide
  Antisense strand to SEQ ID NO: 180460
auaauucccuacgacugga

SEQ ID NO: 180462 - RNA, 19 nt, Artificial Sequence
  Description of Artificial Sequence: Synthetic oligonucleotide
  Sense strand starting at position 2080 of SEQ ID NO: 2326
ccuccagucguagggaauu

SEQ ID NO: 180463 - RNA, 19 nt, Artificial Sequence
  Description of Artificial Sequence: Synthetic oligonucleotide
  Antisense strand to SEQ ID NO: 180462
aauucccuacgacuggagg

SEQ ID NO: 180464 - RNA, 19 nt, Artificial Sequence
  Description of Artificial Sequence: Synthetic oligonucleotide
  Sense strand starting at position 2050 of SEQ ID NO: 2326
ccuagagguuacuagacaa

SEQ ID NO: 180465 - RNA, 19 nt, Artificial Sequence
  Description of Artificial Sequence: Synthetic oligonucleotide
  Antisense strand to SEQ ID NO: 180464
uugucuaguaaccucuagg

SEQ ID NO: 180466 - RNA, 19 nt, Artificial Sequence
  Description of Artificial Sequence: Synthetic oligonucleotide
  Sense strand starting at position 1674 of SEQ ID NO: 2326
guauauccuguuuguauuu

SEQ ID NO: 180467 - RNA, 19 nt, Artificial Sequence
  Description of Artificial Sequence: Synthetic oligonucleotide
  Antisense strand to SEQ ID NO: 180466
aaauacaaacaggauauac

SEQ ID NO: 180468 - RNA, 19 nt, Artificial Sequence
  Description of Artificial Sequence: Synthetic oligonucleotide
  Sense strand starting at position 1673 of SEQ ID NO: 2326
uguauauccuguuuguauu

SEQ ID NO: 180469 - RNA, 19 nt, Artificial Sequence
  Description of Artificial Sequence: Synthetic oligonucleotide
  Antisense strand to SEQ ID NO: 180468
aauacaaacaggauauaca

SEQ ID NO: 180470 - RNA, 19 nt, Artificial Sequence
  Description of Artificial Sequence: Synthetic oligonucleotide
  Sense strand starting at position 1661 of SEQ ID NO: 2326
aucucagcagcuuguauau

SEQ ID NO: 180471 - RNA, 19 nt, Artificial Sequence
  Description of Artificial Sequence: Synthetic oligonucleotide
  Antisense strand to SEQ ID NO: 180470
auauacaagcugcugagau

SEQ ID NO: 180472 - RNA, 19 nt, Artificial Sequence
  Description of Artificial Sequence: Synthetic oligonucleotide
  Sense strand starting at position 1273 of SEQ ID NO: 2326
gggccucuccuccauaacu

SEQ ID NO: 180473 - RNA, 19 nt, Artificial Sequence
  Description of Artificial Sequence: Synthetic oligonucleotide
  Antisense strand to SEQ ID NO: 180472
aguuauggaggagaggccc

SEQ ID NO: 180474 - RNA, 19 nt, Artificial Sequence
  Description of Artificial Sequence: Synthetic oligonucleotide
  Sense strand starting at position 912 of SEQ ID NO: 2326
auauguuaccaccauacga

SEQ ID NO: 180475 - RNA, 19 nt, Artificial Sequence
  Description of Artificial Sequence: Synthetic oligonucleotide
  Antisense strand to SEQ ID NO: 180474
ucguauggugguaacauau

SEQ ID NO: 180476 - RNA, 19 nt, Artificial Sequence
  Description of Artificial Sequence: Synthetic oligonucleotide
  Sense strand starting at position 837 of SEQ ID NO: 2326
caauaaugugaguguacuu

SEQ ID NO: 180477 - RNA, 19 nt, Artificial Sequence
  Description of Artificial Sequence: Synthetic oligonucleotide
  Antisense strand to SEQ ID NO: 180476
aaguacacucacauuauug

SEQ ID NO: 180478 - RNA, 19 nt, Artificial Sequence
  Description of Artificial Sequence: Synthetic oligonucleotide
  Sense strand starting at position 836 of SEQ ID NO: 2326
acaauaaugugaguguacu

SEQ ID NO: 180479 - RNA, 19 nt, Artificial Sequence
  Description of Artificial Sequence: Synthetic oligonucleotide
  Antisense strand to SEQ ID NO: 180478
aguacacucacauuauugu

SEQ ID NO: 180480 - RNA, 19 nt, Artificial Sequence
  Description of Artificial Sequence: Synthetic oligonucleotide
  Sense strand starting at position 825 of SEQ ID NO: 2326
guguuaauugcacaauaau

SEQ ID NO: 180481 - RNA, 19 nt, Artificial Sequence
  Description of Artificial Sequence: Synthetic oligonucleotide
  Antisense strand to SEQ ID NO: 180480
auuauugugcaauuaacac

SEQ ID NO: 180482 - RNA, 19 nt, Artificial Sequence
  Description of Artificial Sequence: Synthetic oligonucleotide
  Sense strand starting at position 821 of SEQ ID NO: 2326
agugguguuaauugcacaa

SEQ ID NO: 180483 - RNA, 19 nt, Artificial Sequence
  Description of Artificial Sequence: Synthetic oligonucleotide
  Antisense strand to SEQ ID NO: 180482
uugugcaauuaacaccacu

SEQ ID NO: 180484 - RNA, 19 nt, Artificial Sequence
  Description of Artificial Sequence: Synthetic oligonucleotide
  Sense strand starting at position 728 of SEQ ID NO: 2326
acuacuagauuuggagcaa

SEQ ID NO: 180485 - RNA, 19 nt, Artificial Sequence
  Description of Artificial Sequence: Synthetic oligonucleotide
  Antisense strand to SEQ ID NO: 180484
uugcuccaaaucuaguagu

SEQ ID NO: 180486 - RNA, 19 nt, Artificial Sequence
  Description of Artificial Sequence: Synthetic oligonucleotide
  Sense strand starting at position 698 of SEQ ID NO: 2326
cagagcugaugacuuuauu

SEQ ID NO: 180487 - RNA, 19 nt, Artificial Sequence
  Description of Artificial Sequence: Synthetic oligonucleotide
  Antisense strand to SEQ ID NO: 180486
aauaaagucaucagcucug

SEQ ID NO: 180488 - RNA, 19 nt, Artificial Sequence
  Description of Artificial Sequence: Synthetic oligonucleotide
  Sense strand starting at position 696 of SEQ ID NO: 2326
gucagagcugaugacuuua

SEQ ID NO: 180489 - RNA, 19 nt, Artificial Sequence
  Description of Artificial Sequence: Synthetic oligonucleotide
  Antisense strand to SEQ ID NO: 180488
uaaagucaucagcucugac

SEQ ID NO: 180490 - RNA, 19 nt, Artificial Sequence
  Description of Artificial Sequence: Synthetic oligonucleotide
  Sense strand starting at position 657 of SEQ ID NO: 2326
acuugaugccuaugucuuu

SEQ ID NO: 180491 - RNA, 19 nt, Artificial Sequence
  Description of Artificial Sequence: Synthetic oligonucleotide
  Antisense strand to SEQ ID NO: 180490
aaagacauaggcaucaagu

SEQ ID NO: 180492 - RNA, 19 nt, Artificial Sequence
  Description of Artificial Sequence: Synthetic oligonucleotide
  Sense strand starting at position 636 of SEQ ID NO: 2326
guacuccuguggucccaua

SEQ ID NO: 180493 - RNA, 19 nt, Artificial Sequence
  Description of Artificial Sequence: Synthetic oligonucleotide
  Antisense strand to SEQ ID NO: 180492
uaugggaccacaggaguac

SEQ ID NO: 180494 - RNA, 19 nt, Artificial Sequence
  Description of Artificial Sequence: Synthetic oligonucleotide
  Sense strand starting at position 492 of SEQ ID NO: 2326
ucugaucucucacuuuguu

SEQ ID NO: 180495 - RNA, 19 nt, Artificial Sequence
  Description of Artificial Sequence: Synthetic oligonucleotide
  Antisense strand to SEQ ID NO: 180494
aacaaagugagagaucaga

SEQ ID NO: 180496 - RNA, 19 nt, Artificial Sequence
  Description of Artificial Sequence: Synthetic oligonucleotide
  Sense strand starting at position 482 of SEQ ID NO: 2326
aggauugcucucugaucuc

SEQ ID NO: 180497 - RNA, 19 nt, Artificial Sequence
  Description of Artificial Sequence: Synthetic oligonucleotide
  Antisense strand to SEQ ID NO: 180496
gagaucagagagcaauccu

SEQ ID NO: 180498 - RNA, 19 nt, Artificial Sequence
  Description of Artificial Sequence: Synthetic oligonucleotide
  Sense strand starting at position 405 of SEQ ID NO: 2326
uggcuuccucuagauagca

SEQ ID NO: 180499 - RNA, 19 nt, Artificial Sequence
  Description of Artificial Sequence: Synthetic oligonucleotide
  Antisense strand to SEQ ID NO: 180498
ugcuaucuagaggaagcca

SEQ ID NO: 180500 - RNA, 19 nt, Artificial Sequence
  Description of Artificial Sequence: Synthetic oligonucleotide
  Sense strand starting at position 403 of SEQ ID NO: 2326
cuuggcuuccucuagauag

SEQ ID NO: 180501 - RNA, 19 nt, Artificial Sequence
  Description of Artificial Sequence: Synthetic oligonucleotide
  Antisense strand to SEQ ID NO: 180500
cuaucuagaggaagccaag

SEQ ID NO: 180502 - RNA, 19 nt, Artificial Sequence
  Description of Artificial Sequence: Synthetic oligonucleotide
  Sense strand starting at position 117 of SEQ ID NO: 2327
gaaaucccgucuccaugua

SEQ ID NO: 180503 - RNA, 19 nt, Artificial Sequence
  Description of Artificial Sequence: Synthetic oligonucleotide
  Antisense strand to SEQ ID NO: 180502
uacauggagacgggauuuc

SEQ ID NO: 180504 - RNA, 19 nt, Artificial Sequence
  Description of Artificial Sequence: Synthetic oligonucleotide
  Sense strand starting at position 432 of SEQ ID NO: 2327
gugggaauguuacugagug

SEQ ID NO: 180505 - RNA, 19 nt, Artificial Sequence
  Description of Artificial Sequence: Synthetic oligonucleotide
  Antisense strand to SEQ ID NO: 180504
cacucaguaacauucccac

SEQ ID NO: 180506 - RNA, 19 nt, Artificial Sequence
  Description of Artificial Sequence: Synthetic oligonucleotide
  Sense strand starting at position 434 of SEQ ID NO: 2327
gggaauguuacugagugcu

SEQ ID NO: 180507 - RNA, 19 nt, Artificial Sequence
  Description of Artificial Sequence: Synthetic oligonucleotide
  Antisense strand to SEQ ID NO: 180506
agcacucaguaacauuccc

SEQ ID NO: 180508 - RNA, 19 nt, Artificial Sequence
  Description of Artificial Sequence: Synthetic oligonucleotide
  Sense strand starting at position 436 of SEQ ID NO: 2327
gaauguuacugagugcuca

SEQ ID NO: 180509 - RNA, 19 nt, Artificial Sequence
  Description of Artificial Sequence: Synthetic oligonucleotide
  Antisense strand to SEQ ID NO: 180508
ugagcacucaguaacauuc

SEQ ID NO: 180510 - RNA, 19 nt, Artificial Sequence
  Description of Artificial Sequence: Synthetic oligonucleotide
  Sense strand starting at position 444 of SEQ ID NO: 2327
cugagugcucacugggaaa

SEQ ID NO: 180511 - RNA, 19 nt, Artificial Sequence
  Description of Artificial Sequence: Synthetic oligonucleotide
  Antisense strand to SEQ ID NO: 180510
uuucccagugagcacucag

SEQ ID NO: 180512 - RNA, 19 nt, Artificial Sequence
  Description of Artificial Sequence: Synthetic oligonucleotide
  Sense strand starting at position 446 of SEQ ID NO: 2327
gagugcucacugggaaaug

SEQ ID NO: 180513 - RNA, 19 nt, Artificial Sequence
  Description of Artificial Sequence: Synthetic oligonucleotide
  Antisense strand to SEQ ID NO: 180512
cauuucccagugagcacuc

SEQ ID NO: 180514 - RNA, 19 nt, Artificial Sequence
  Description of Artificial Sequence: Synthetic oligonucleotide
  Sense strand starting at position 524 of SEQ ID NO: 2327
gaaaguuucuuaccagcag

SEQ ID NO: 180515 - RNA, 19 nt, Artificial Sequence
  Description of Artificial Sequence: Synthetic oligonucleotide
  Antisense strand to SEQ ID NO: 180514
cugcugguaagaaacuuuc

SEQ ID NO: 180516 - RNA, 19 nt, Artificial Sequence
  Description of Artificial Sequence: Synthetic oligonucleotide
  Sense strand starting at position 528 of SEQ ID NO: 2327
guuucuuaccagcagcaaa

SEQ ID NO: 180517 - RNA, 19 nt, Artificial Sequence
  Description of Artificial Sequence: Synthetic oligonucleotide
  Antisense strand to SEQ ID NO: 180516
uuugcugcugguaagaaac

SEQ ID NO: 180518 - RNA, 19 nt, Artificial Sequence
  Description of Artificial Sequence: Synthetic oligonucleotide
  Sense strand starting at position 579 of SEQ ID NO: 2327
agaggaacucuguguguuu

SEQ ID NO: 180519 - RNA, 19 nt, Artificial Sequence
  Description of Artificial Sequence: Synthetic oligonucleotide
  Antisense strand to SEQ ID NO: 180518
aaacacacagaguuccucu

SEQ ID NO: 180520 - RNA, 19 nt, Artificial Sequence
  Description of Artificial Sequence: Synthetic oligonucleotide
  Sense strand starting at position 599 of SEQ ID NO: 2327
gugugcguuauguacaugu

SEQ ID NO: 180521 - RNA, 19 nt, Artificial Sequence
  Description of Artificial Sequence: Synthetic oligonucleotide
  Antisense strand to SEQ ID NO: 180520
acauguacauaacgcacac

SEQ ID NO: 180522 - RNA, 19 nt, Artificial Sequence
  Description of Artificial Sequence: Synthetic oligonucleotide
  Sense strand starting at position 632 of SEQ ID NO: 2327
guguuauguacauguugug

SEQ ID NO: 180523 - RNA, 19 nt, Artificial Sequence
  Description of Artificial Sequence: Synthetic oligonucleotide
  Antisense strand to SEQ ID NO: 180522
cacaacauguacauaacac

SEQ ID NO: 180524 - RNA, 19 nt, Artificial Sequence
  Description of Artificial Sequence: Synthetic oligonucleotide
  Sense strand starting at position 639 of SEQ ID NO: 2327
guacauguuguguguugua

SEQ ID NO: 180525 - RNA, 19 nt, Artificial Sequence
  Description of Artificial Sequence: Synthetic oligonucleotide
  Antisense strand to SEQ ID NO: 180524
uacaacacacaacauguac

SEQ ID NO: 180526 - RNA, 19 nt, Artificial Sequence
  Description of Artificial Sequence: Synthetic oligonucleotide
  Sense strand starting at position 651 of SEQ ID NO: 2327
uguuguauguguguuaugu

SEQ ID NO: 180527 - RNA, 19 nt, Artificial Sequence
  Description of Artificial Sequence: Synthetic oligonucleotide
  Antisense strand to SEQ ID NO: 180526
acauaacacacauacaaca

SEQ ID NO: 180528 - RNA, 19 nt, Artificial Sequence
  Description of Artificial Sequence: Synthetic oligonucleotide
  Sense strand starting at position 652 of SEQ ID NO: 2327
guuguauguguguuaugua

SEQ ID NO: 180529 - RNA, 19 nt, Artificial Sequence
  Description of Artificial Sequence: Synthetic oligonucleotide
  Antisense strand to SEQ ID NO: 180528
uacauaacacacauacaac

SEQ ID NO: 180530 - RNA, 19 nt, Artificial Sequence
  Description of Artificial Sequence: Synthetic oligonucleotide
  Sense strand starting at position 661 of SEQ ID NO: 2327
guguuauguacaugugugu

SEQ ID NO: 180531 - RNA, 19 nt, Artificial Sequence
  Description of Artificial Sequence: Synthetic oligonucleotide
  Antisense strand to SEQ ID NO: 180530
acacacauguacauaacac

SEQ ID NO: 180532 - RNA, 19 nt, Artificial Sequence
  Description of Artificial Sequence: Synthetic oligonucleotide
  Sense strand starting at position 696 of SEQ ID NO: 2327
guuguauguguggugugua

SEQ ID NO: 180533 - RNA, 19 nt, Artificial Sequence
  Description of Artificial Sequence: Synthetic oligonucleotide
  Antisense strand to SEQ ID NO: 180532
uacacaccacacauacaac

SEQ ID NO: 180534 - RNA, 19 nt, Artificial Sequence
  Description of Artificial Sequence: Synthetic oligonucleotide
  Sense strand starting at position 739 of SEQ ID NO: 2327
guguguuauguauguguug

SEQ ID NO: 180535 - RNA, 19 nt, Artificial Sequence
  Description of Artificial Sequence: Synthetic oligonucleotide
  Antisense strand to SEQ ID NO: 180534
caacacauacauaacacac

SEQ ID NO: 180536 - RNA, 19 nt, Artificial Sequence
  Description of Artificial Sequence: Synthetic oligonucleotide
  Sense strand starting at position 790 of SEQ ID NO: 2327
ggacgcugacaucaaugau

SEQ ID NO: 180537 - RNA, 19 nt, Artificial Sequence
  Description of Artificial Sequence: Synthetic oligonucleotide
  Antisense strand to SEQ ID NO: 180536
aucauugaugucagcgucc

SEQ ID NO: 180538 - RNA, 19 nt, Artificial Sequence
  Description of Artificial Sequence: Synthetic oligonucleotide
  Sense strand starting at position 885 of SEQ ID NO: 2327
gcaauuacacgagggaagu

SEQ ID NO: 180539 - RNA, 19 nt, Artificial Sequence
  Description of Artificial Sequence: Synthetic oligonucleotide
  Antisense strand to SEQ ID NO: 180538
acuucccucguguaauugc

SEQ ID NO: 180540 - RNA, 19 nt, Artificial Sequence
  Description of Artificial Sequence: Synthetic oligonucleotide
  Sense strand starting at position 929 of SEQ ID NO: 2327
gggcuuugggcuggcaaau

SEQ ID NO: 180541 - RNA, 19 nt, Artificial Sequence
  Description of Artificial Sequence: Synthetic oligonucleotide
  Antisense strand to SEQ ID NO: 180540
auuugccagcccaaagccc

SEQ ID NO: 180542 - RNA, 19 nt, Artificial Sequence
  Description of Artificial Sequence: Synthetic oligonucleotide
  Sense strand starting at position 1025 of SEQ ID NO: 2327
agucaaggauccuacaagu

SEQ ID NO: 180543 - RNA, 19 nt, Artificial Sequence
  Description of Artificial Sequence: Synthetic oligonucleotide
  Antisense strand to SEQ ID NO: 180542
acuuguaggauccuugacu

SEQ ID NO: 180544 - RNA, 19 nt, Artificial Sequence
  Description of Artificial Sequence: Synthetic oligonucleotide
  Sense strand starting at position 1079 of SEQ ID NO: 2327
cuccgucucauggagagaa

SEQ ID NO: 180545 - RNA, 19 nt, Artificial Sequence
  Description of Artificial Sequence: Synthetic oligonucleotide
  Antisense strand to SEQ ID NO: 180544
uucucuccaugagacggag

SEQ ID NO: 180546 - RNA, 19 nt, Artificial Sequence
  Description of Artificial Sequence: Synthetic oligonucleotide
  Sense strand starting at position 1525 of SEQ ID NO: 2327
gggaaucgucaugaccuau

SEQ ID NO: 180547 - RNA, 19 nt, Artificial Sequence
  Description of Artificial Sequence: Synthetic oligonucleotide
  Antisense strand to SEQ ID NO: 180546
auaggucaugacgauuccc

SEQ ID NO: 180548 - RNA, 19 nt, Artificial Sequence
  Description of Artificial Sequence: Synthetic oligonucleotide
  Sense strand starting at position 1587 of SEQ ID NO: 2327
ucgguuuggugagcuauuu

SEQ ID NO: 180549 - RNA, 19 nt, Artificial Sequence
  Description of Artificial Sequence: Synthetic oligonucleotide
  Antisense strand to SEQ ID NO: 180548
aaauagcucaccaaaccga

SEQ ID NO: 180550 - RNA, 19 nt, Artificial Sequence
  Description of Artificial Sequence: Synthetic oligonucleotide
  Sense strand starting at position 1633 of SEQ ID NO: 2327
ggaaaugugagccgcggau

SEQ ID NO: 180551 - RNA, 19 nt, Artificial Sequence
  Description of Artificial Sequence: Synthetic oligonucleotide
  Antisense strand to SEQ ID NO: 180550
auccgcggcucacauuucc

SEQ ID NO: 180552 - RNA, 19 nt, Artificial Sequence
  Description of Artificial Sequence: Synthetic oligonucleotide
  Sense strand starting at position 1635 of SEQ ID NO: 2327
aaaugugagccgcggauuu

SEQ ID NO: 180553 - RNA, 19 nt, Artificial Sequence
  Description of Artificial Sequence: Synthetic oligonucleotide
  Antisense strand to SEQ ID NO: 180552
aaauccgcggcucacauuu

SEQ ID NO: 180554 - RNA, 19 nt, Artificial Sequence
  Description of Artificial Sequence: Synthetic oligonucleotide
  Sense strand starting at position 1775 of SEQ ID NO: 2327
gucgcuaccucgaaggaga

SEQ ID NO: 180555 - RNA, 19 nt, Artificial Sequence
  Description of Artificial Sequence: Synthetic oligonucleotide
  Antisense strand to SEQ ID NO: 180554
ucuccuucgagguagcgac

SEQ ID NO: 180556 - RNA, 19 nt, Artificial Sequence
  Description of Artificial Sequence: Synthetic oligonucleotide
  Sense strand starting at position 2520 of SEQ ID NO: 2327
gcuccugguccuggacaga

SEQ ID NO: 180557 - RNA, 19 nt, Artificial Sequence
  Description of Artificial Sequence: Synthetic oligonucleotide
  Antisense strand to SEQ ID NO: 180556
ucuguccaggaccaggagc

SEQ ID NO: 180558 - RNA, 19 nt, Artificial Sequence
  Description of Artificial Sequence: Synthetic oligonucleotide
  Sense strand starting at position 3054 of SEQ ID NO: 2327
gauugaguuuccuccucug

SEQ ID NO: 180559 - RNA, 19 nt, Artificial Sequence
  Description of Artificial Sequence: Synthetic oligonucleotide
  Antisense strand to SEQ ID NO: 180558
cagaggaggaaacucaauc

SEQ ID NO: 180560 - RNA, 19 nt, Artificial Sequence
  Description of Artificial Sequence: Synthetic oligonucleotide
  Sense strand starting at position 3057 of SEQ ID NO: 2327
ugaguuuccuccucuggga

SEQ ID NO: 180561 - RNA, 19 nt, Artificial Sequence
  Description of Artificial Sequence: Synthetic oligonucleotide
  Antisense strand to SEQ ID NO: 180560
ucccagaggaggaaacuca

SEQ ID NO: 180562 - RNA, 19 nt, Artificial Sequence
  Description of Artificial Sequence: Synthetic oligonucleotide
  Sense strand starting at position 3305 of SEQ ID NO: 2327
ccuggucugcacuauaaug

SEQ ID NO: 180563 - RNA, 19 nt, Artificial Sequence
  Description of Artificial Sequence: Synthetic oligonucleotide
  Antisense strand to SEQ ID NO: 180562
cauuauagugcagaccagg

SEQ ID NO: 180564 - RNA, 19 nt, Artificial Sequence
  Description of Artificial Sequence: Synthetic oligonucleotide
  Sense strand starting at position 3313 of SEQ ID NO: 2327
gcacuauaauggguuauaa

SEQ ID NO: 180565 - RNA, 19 nt, Artificial Sequence
  Description of Artificial Sequence: Synthetic oligonucleotide
  Antisense strand to SEQ ID NO: 180564
uuauaacccauuauagugc

SEQ ID NO: 180566 - RNA, 19 nt, Artificial Sequence
  Description of Artificial Sequence: Synthetic oligonucleotide
  Sense strand starting at position 3349 of SEQ ID NO: 2327
gggugaggauuaaacggau

SEQ ID NO: 180567 - RNA, 19 nt, Artificial Sequence
  Description of Artificial Sequence: Synthetic oligonucleotide
  Antisense strand to SEQ ID NO: 180566
auccguuuaauccucaccc

SEQ ID NO: 180568 - RNA, 19 nt, Artificial Sequence
  Description of Artificial Sequence: Synthetic oligonucleotide
  Sense strand starting at position 3397 of SEQ ID NO: 2327
uggugcaucgugugaguca

SEQ ID NO: 180569 - RNA, 19 nt, Artificial Sequence
  Description of Artificial Sequence: Synthetic oligonucleotide
  Antisense strand to SEQ ID NO: 180568
ugacucacacgaugcacca

SEQ ID NO: 180570 - RNA, 19 nt, Artificial Sequence
  Description of Artificial Sequence: Synthetic oligonucleotide
  Sense strand starting at position 3399 of SEQ ID NO: 2327
gugcaucgugugagucagu

SEQ ID NO: 180571 - RNA, 19 nt, Artificial Sequence
  Description of Artificial Sequence: Synthetic oligonucleotide
  Antisense strand to SEQ ID NO: 180570
acugacucacacgaugcac

SEQ ID NO: 180572 - RNA, 19 nt, Artificial Sequence
  Description of Artificial Sequence: Synthetic oligonucleotide
  Sense strand starting at position 3509 of SEQ ID NO: 2327
gggcuuucugacugguaag

SEQ ID NO: 180573 - RNA, 19 nt, Artificial Sequence
  Description of Artificial Sequence: Synthetic oligonucleotide
  Antisense strand to SEQ ID NO: 180572
cuuaccagucagaaagccc

SEQ ID NO: 180574 - RNA, 19 nt, Artificial Sequence
  Description of Artificial Sequence: Synthetic oligonucleotide
  Sense strand starting at position 3512 of SEQ ID NO: 2327
cuuucugacugguaaggga

SEQ ID NO: 180575 - RNA, 19 nt, Artificial Sequence
  Description of Artificial Sequence: Synthetic oligonucleotide
  Antisense strand to SEQ ID NO: 180574
ucccuuaccagucagaaag

SEQ ID NO: 180576 - RNA, 19 nt, Artificial Sequence
  Description of Artificial Sequence: Synthetic oligonucleotide
  Sense strand starting at position 3906 of SEQ ID NO: 2327
ggugucucgugcccugaga

SEQ ID NO: 180577 - RNA, 19 nt, Artificial Sequence
  Description of Artificial Sequence: Synthetic oligonucleotide
  Antisense strand to SEQ ID NO: 180576
ucucagggcacgagacacc

SEQ ID NO: 180578 - RNA, 19 nt, Artificial Sequence
  Description of Artificial Sequence: Synthetic oligonucleotide
  Sense strand starting at position 3957 of SEQ ID NO: 2327
ucuaguucugguggccaaa

SEQ ID NO: 180579 - RNA, 19 nt, Artificial Sequence
  Description of Artificial Sequence: Synthetic oligonucleotide
  Antisense strand to SEQ ID NO: 180578
uuuggccaccagaacuaga

SEQ ID NO: 180580 - RNA, 19 nt, Artificial Sequence
  Description of Artificial Sequence: Synthetic oligonucleotide
  Sense strand starting at position 3960 of SEQ ID NO: 2327
aguucugguggccaaagua

SEQ ID NO: 180581 - RNA, 19 nt, Artificial Sequence
  Description of Artificial Sequence: Synthetic oligonucleotide
  Antisense strand to SEQ ID NO: 180580
uacuuuggccaccagaacu

SEQ ID NO: 180582 - RNA, 19 nt, Artificial Sequence
  Description of Artificial Sequence: Synthetic oligonucleotide
  Sense strand starting at position 40 of SEQ ID NO: 2331
aauagucucgcacaugauu

SEQ ID NO: 180583 - RNA, 19 nt, Artificial Sequence
  Description of Artificial Sequence: Synthetic oligonucleotide
  Antisense strand to SEQ ID NO: 180582
aaucaugugcgagacuauu

SEQ ID NO: 180584 - RNA, 19 nt, Artificial Sequence
  Description of Artificial Sequence: Synthetic oligonucleotide
  Sense strand starting at position 96 of SEQ ID NO: 2331
gguaaauacugauucuuuc

SEQ ID NO: 180585 - RNA, 19 nt, Artificial Sequence
  Description of Artificial Sequence: Synthetic oligonucleotide
  Antisense strand to SEQ ID NO: 180584
gaaagaaucaguauuuacc

SEQ ID NO: 180586 - RNA, 19 nt, Artificial Sequence
  Description of Artificial Sequence: Synthetic oligonucleotide
  Sense strand starting at position 287 of SEQ ID NO: 2331
cugagacuauagcuacuau

SEQ ID NO: 180587 - RNA, 19 nt, Artificial Sequence
  Description of Artificial Sequence: Synthetic oligonucleotide
  Antisense strand to SEQ ID NO: 180586
auaguagcuauagucucag

SEQ ID NO: 180588 - RNA, 19 nt, Artificial Sequence
  Description of Artificial Sequence: Synthetic oligonucleotide
  Sense strand starting at position 482 of SEQ ID NO: 2331
guuaaacacugauuauuga

SEQ ID NO: 180589 - RNA, 19 nt, Artificial Sequence
  Description of Artificial Sequence: Synthetic oligonucleotide
  Antisense strand to SEQ ID NO: 180588
ucaauaaucaguguuuaac

SEQ ID NO: 180590 - RNA, 19 nt, Artificial Sequence
  Description of Artificial Sequence: Synthetic oligonucleotide
  Sense strand starting at position 507 of SEQ ID NO: 2331
ccaauauugugauauaaug

SEQ ID NO: 180591 - RNA, 19 nt, Artificial Sequence
  Description of Artificial Sequence: Synthetic oligonucleotide
  Antisense strand to SEQ ID NO: 180590
cauuauaucacaauauugg

SEQ ID NO: 180592 - RNA, 19 nt, Artificial Sequence
  Description of Artificial Sequence: Synthetic oligonucleotide
  Sense strand starting at position 515 of SEQ ID NO: 2331
gugauauaaugacgagaaa

SEQ ID NO: 180593 - RNA, 19 nt, Artificial Sequence
  Description of Artificial Sequence: Synthetic oligonucleotide
  Antisense strand to SEQ ID NO: 180592
uuucucgucauuauaucac

SEQ ID NO: 180594 - RNA, 19 nt, Artificial Sequence
  Description of Artificial Sequence: Synthetic oligonucleotide
  Sense strand starting at position 575 of SEQ ID NO: 2331
auucucaucuaucaguaga

SEQ ID NO: 180595 - RNA, 19 nt, Artificial Sequence
  Description of Artificial Sequence: Synthetic oligonucleotide
  Antisense strand to SEQ ID NO: 180594
ucuacugauagaugagaau

SEQ ID NO: 180596 - RNA, 19 nt, Artificial Sequence
  Description of Artificial Sequence: Synthetic oligonucleotide
  Sense strand starting at position 577 of SEQ ID NO: 2331
ucucaucuaucaguagaug

SEQ ID NO: 180597 - RNA, 19 nt, Artificial Sequence
  Description of Artificial Sequence: Synthetic oligonucleotide
  Antisense strand to SEQ ID NO: 180596
caucuacugauagaugaga

SEQ ID NO: 180598 - RNA, 19 nt, Artificial Sequence
  Description of Artificial Sequence: Synthetic oligonucleotide
  Sense strand starting at position 578 of SEQ ID NO: 2331
cucaucuaucaguagaugu

SEQ ID NO: 180599 - RNA, 19 nt, Artificial Sequence
  Description of Artificial Sequence: Synthetic oligonucleotide
  Antisense strand to SEQ ID NO: 180598
acaucuacugauagaugag

SEQ ID NO: 180600 - RNA, 19 nt, Artificial Sequence
  Description of Artificial Sequence: Synthetic oligonucleotide
  Sense strand starting at position 1004 of SEQ ID NO: 2331
ggaguauacgcccauuauu

SEQ ID NO: 180601 - RNA, 19 nt, Artificial Sequence
  Description of Artificial Sequence: Synthetic oligonucleotide
  Antisense strand to SEQ ID NO: 180600
aauaaugggcguauacucc

SEQ ID NO: 180602 - RNA, 19 nt, Artificial Sequence
  Description of Artificial Sequence: Synthetic oligonucleotide
  Sense strand starting at position 1007 of SEQ ID NO: 2331
guauacgcccauuauugau

SEQ ID NO: 180603 - RNA, 19 nt, Artificial Sequence
  Description of Artificial Sequence: Synthetic oligonucleotide
  Antisense strand to SEQ ID NO: 180602
aucaauaaugggcguauac

SEQ ID NO: 180604 - RNA, 19 nt, Artificial Sequence
  Description of Artificial Sequence: Synthetic oligonucleotide
  Sense strand starting at position 1013 of SEQ ID NO: 2331
gcccauuauugauuuguau

SEQ ID NO: 180605 - RNA, 19 nt, Artificial Sequence
  Description of Artificial Sequence: Synthetic oligonucleotide
  Antisense strand to SEQ ID NO: 180604
auacaaaucaauaaugggc

SEQ ID NO: 180606 - RNA, 19 nt, Artificial Sequence
  Description of Artificial Sequence: Synthetic oligonucleotide
  Sense strand starting at position 1037 of SEQ ID NO: 2331
gaaacauggcagugaguac

SEQ ID NO: 180607 - RNA, 19 nt, Artificial Sequence
  Description of Artificial Sequence: Synthetic oligonucleotide
  Antisense strand to SEQ ID NO: 180606
guacucacugccauguuuc

SEQ ID NO: 180608 - RNA, 19 nt, Artificial Sequence
  Description of Artificial Sequence: Synthetic oligonucleotide
  Sense strand starting at position 1044 of SEQ ID NO: 2331
ggcagugaguacucaagga

SEQ ID NO: 180609 - RNA, 19 nt, Artificial Sequence
  Description of Artificial Sequence: Synthetic oligonucleotide
  Antisense strand to SEQ ID NO: 180608
uccuugaguacucacugcc

SEQ ID NO: 180610 - RNA, 19 nt, Artificial Sequence
  Description of Artificial Sequence: Synthetic oligonucleotide
  Sense strand starting at position 1048 of SEQ ID NO: 2331
gugaguacucaaggaaaug

SEQ ID NO: 180611 - RNA, 19 nt, Artificial Sequence
  Description of Artificial Sequence: Synthetic oligonucleotide
  Antisense strand to SEQ ID NO: 180610
cauuuccuugaguacucac

SEQ ID NO: 180612 - RNA, 19 nt, Artificial Sequence
  Description of Artificial Sequence: Synthetic oligonucleotide
  Sense strand starting at position 1152 of SEQ ID NO: 2331
aaaggagucaugugagagc

SEQ ID NO: 180613 - RNA, 19 nt, Artificial Sequence
  Description of Artificial Sequence: Synthetic oligonucleotide
  Antisense strand to SEQ ID NO: 180612
gcucucacaugacuccuuu

SEQ ID NO: 180614 - RNA, 19 nt, Artificial Sequence
  Description of Artificial Sequence: Synthetic oligonucleotide
  Sense strand starting at position 1191 of SEQ ID NO: 2331
guggauucugcgggaacaa

SEQ ID NO: 180615 - RNA, 19 nt, Artificial Sequence
  Description of Artificial Sequence: Synthetic oligonucleotide
  Antisense strand to SEQ ID NO: 180614
uuguucccgcagaauccac

SEQ ID NO: 180616 - RNA, 19 nt, Artificial Sequence
  Description of Artificial Sequence: Synthetic oligonucleotide
  Sense strand starting at position 1374 of SEQ ID NO: 2331
ggguuccucucauacaaga

SEQ ID NO: 180617 - RNA, 19 nt, Artificial Sequence
  Description of Artificial Sequence: Synthetic oligonucleotide
  Antisense strand to SEQ ID NO: 180616
ucuuguaugagaggaaccc

SEQ ID NO: 180618 - RNA, 19 nt, Artificial Sequence
  Description of Artificial Sequence: Synthetic oligonucleotide
  Sense strand starting at position 1998 of SEQ ID NO: 2331
ucuagaaucccugacguug

SEQ ID NO: 180619 - RNA, 19 nt, Artificial Sequence
  Description of Artificial Sequence: Synthetic oligonucleotide
  Antisense strand to SEQ ID NO: 180618
caacgucagggauucuaga

SEQ ID NO: 180620 - RNA, 19 nt, Artificial Sequence
  Description of Artificial Sequence: Synthetic oligonucleotide
  Sense strand starting at position 2087 of SEQ ID NO: 2331
gccaauggcuccuccagaa

SEQ ID NO: 180621 - RNA, 19 nt, Artificial Sequence
  Description of Artificial Sequence: Synthetic oligonucleotide
  Antisense strand to SEQ ID NO: 180620
uucuggaggagccauuggc

SEQ ID NO: 180622 - RNA, 19 nt, Artificial Sequence
  Description of Artificial Sequence: Synthetic oligonucleotide
  Sense strand starting at position 2123 of SEQ ID NO: 2331
guccuuacguuucucuaua

SEQ ID NO: 180623 - RNA, 19 nt, Artificial Sequence
  Description of Artificial Sequence: Synthetic oligonucleotide
  Antisense strand to SEQ ID NO: 180622
uauagagaaacguaaggac

SEQ ID NO: 180624 - RNA, 19 nt, Artificial Sequence
  Description of Artificial Sequence: Synthetic oligonucleotide
  Sense strand starting at position 2151 of SEQ ID NO: 2331
acccucugacgugauauau

SEQ ID NO: 180625 - RNA, 19 nt, Artificial Sequence
  Description of Artificial Sequence: Synthetic oligonucleotide
  Antisense strand to SEQ ID NO: 180624
auauaucacgucagagggu

SEQ ID NO: 180626 - RNA, 19 nt, Artificial Sequence
  Description of Artificial Sequence: Synthetic oligonucleotide
  Sense strand starting at position 2214 of SEQ ID NO: 2331
auaagcuuccaggaagcaa

SEQ ID NO: 180627 - RNA, 19 nt, Artificial Sequence
  Description of Artificial Sequence: Synthetic oligonucleotide
  Antisense strand to SEQ ID NO: 180626
uugcuuccuggaagcuuau

SEQ ID NO: 180628 - RNA, 19 nt, Artificial Sequence
  Description of Artificial Sequence: Synthetic oligonucleotide
  Sense strand starting at position 2292 of SEQ ID NO: 2331
aauaucuguuagguaaaug

SEQ ID NO: 180629 - RNA, 19 nt, Artificial Sequence
  Description of Artificial Sequence: Synthetic oligonucleotide
  Antisense strand to SEQ ID NO: 180628
cauuuaccuaacagauauu

SEQ ID NO: 180630 - RNA, 19 nt, Artificial Sequence
  Description of Artificial Sequence: Synthetic oligonucleotide
  Sense strand starting at position 2297 of SEQ ID NO: 2331
cuguuagguaaaugaauga

SEQ ID NO: 180631 - RNA, 19 nt, Artificial Sequence
  Description of Artificial Sequence: Synthetic oligonucleotide
  Antisense strand to SEQ ID NO: 180630
ucauucauuuaccuaacag

SEQ ID NO: 180632 - RNA, 19 nt, Artificial Sequence
  Description of Artificial Sequence: Synthetic oligonucleotide
  Sense strand starting at position 2387 of SEQ ID NO: 2331
ggucucagcuuucccauau

SEQ ID NO: 180633 - RNA, 19 nt, Artificial Sequence
  Description of Artificial Sequence: Synthetic oligonucleotide
  Antisense strand to SEQ ID NO: 180632
auaugggaaagcugagacc

SEQ ID NO: 180634 - RNA, 19 nt, Artificial Sequence
  Description of Artificial Sequence: Synthetic oligonucleotide
  Sense strand starting at position 2388 of SEQ ID NO: 2331
gucucagcuuucccauaua

SEQ ID NO: 180635 - RNA, 19 nt, Artificial Sequence
  Description of Artificial Sequence: Synthetic oligonucleotide
  Antisense strand to SEQ ID NO: 180634
uauaugggaaagcugagac

SEQ ID NO: 180636 - RNA, 19 nt, Artificial Sequence
  Description of Artificial Sequence: Synthetic oligonucleotide
  Sense strand starting at position 2481 of SEQ ID NO: 2331
gccuccuuugagugaaaga

SEQ ID NO: 180637 - RNA, 19 nt, Artificial Sequence
  Description of Artificial Sequence: Synthetic oligonucleotide
  Antisense strand to SEQ ID NO: 180636
ucuuucacucaaaggaggc

SEQ ID NO: 180638 - RNA, 19 nt, Artificial Sequence
  Description of Artificial Sequence: Synthetic oligonucleotide
  Sense strand starting at position 2492 of SEQ ID NO: 2331
gugaaagaauguuccagaa

SEQ ID NO: 180639 - RNA, 19 nt, Artificial Sequence
  Description of Artificial Sequence: Synthetic oligonucleotide
  Antisense strand to SEQ ID NO: 180638
uucuggaacauucuuucac

SEQ ID NO: 180640 - RNA, 19 nt, Artificial Sequence
  Description of Artificial Sequence: Synthetic oligonucleotide
  Sense strand starting at position 2506 of SEQ ID NO: 2331
cagaaagaggcuugauacu

SEQ ID NO: 180641 - RNA, 19 nt, Artificial Sequence
  Description of Artificial Sequence: Synthetic oligonucleotide
  Antisense strand to SEQ ID NO: 180640
aguaucaagccucuuucug

SEQ ID NO: 180642 - RNA, 19 nt, Artificial Sequence
  Description of Artificial Sequence: Synthetic oligonucleotide
  Sense strand starting at position 2515 of SEQ ID NO: 2331
gcuugauacucucccugaa

SEQ ID NO: 180643 - RNA, 19 nt, Artificial Sequence
  Description of Artificial Sequence: Synthetic oligonucleotide
  Antisense strand to SEQ ID NO: 180642
uucagggagaguaucaagc

SEQ ID NO: 180644 - RNA, 19 nt, Artificial Sequence
  Description of Artificial Sequence: Synthetic oligonucleotide
  Sense strand starting at position 2633 of SEQ ID NO: 2331
ugagaugcaucaguagauc

SEQ ID NO: 180645 - RNA, 19 nt, Artificial Sequence
  Description of Artificial Sequence: Synthetic oligonucleotide
  Antisense strand to SEQ ID NO: 180644
gaucuacugaugcaucuca

SEQ ID NO: 180646 - RNA, 19 nt, Artificial Sequence
  Description of Artificial Sequence: Synthetic oligonucleotide
  Sense strand starting at position 3254 of SEQ ID NO: 2331
uucucucuucucuguuaga

SEQ ID NO: 180647 - RNA, 19 nt, Artificial Sequence
  Description of Artificial Sequence: Synthetic oligonucleotide
  Antisense strand to SEQ ID NO: 180646
ucuaacagagaagagagaa

SEQ ID NO: 180648 - RNA, 19 nt, Artificial Sequence
  Description of Artificial Sequence: Synthetic oligonucleotide
  Sense strand starting at position 3331 of SEQ ID NO: 2331
cuguuagauccugaguaau

SEQ ID NO: 180649 - RNA, 19 nt, Artificial Sequence
  Description of Artificial Sequence: Synthetic oligonucleotide
  Antisense strand to SEQ ID NO: 180648
auuacucaggaucuaacag

SEQ ID NO: 180650 - RNA, 19 nt, Artificial Sequence
  Description of Artificial Sequence: Synthetic oligonucleotide
  Sense strand starting at position 3377 of SEQ ID NO: 2331
aggugugucugaccugcua

SEQ ID NO: 180651 - RNA, 19 nt, Artificial Sequence
  Description of Artificial Sequence: Synthetic oligonucleotide
  Antisense strand to SEQ ID NO: 180650
uagcaggucagacacaccu

SEQ ID NO: 180652 - RNA, 19 nt, Artificial Sequence
  Description of Artificial Sequence: Synthetic oligonucleotide
  Sense strand starting at position 3582 of SEQ ID NO: 2331
uuuagacucucagggaaac

SEQ ID NO: 180653 - RNA, 19 nt, Artificial Sequence
  Description of Artificial Sequence: Synthetic oligonucleotide
  Antisense strand to SEQ ID NO: 180652
guuucccugagagucuaaa

SEQ ID NO: 180654 - RNA, 19 nt, Artificial Sequence
  Description of Artificial Sequence: Synthetic oligonucleotide
  Sense strand starting at position 3715 of SEQ ID NO: 2331
aggauacauugcuccagga

SEQ ID NO: 180655 - RNA, 19 nt, Artificial Sequence
  Description of Artificial Sequence: Synthetic oligonucleotide
  Antisense strand to SEQ ID NO: 180654
uccuggagcaauguauccu

SEQ ID NO: 180656 - RNA, 19 nt, Artificial Sequence
  Description of Artificial Sequence: Synthetic oligonucleotide
  Sense strand starting at position 3719 of SEQ ID NO: 2331
uacauugcuccaggaagga

SEQ ID NO: 180657 - RNA, 19 nt, Artificial Sequence
  Description of Artificial Sequence: Synthetic oligonucleotide
  Antisense strand to SEQ ID NO: 180656
uccuuccuggagcaaugua

SEQ ID NO: 180658 - RNA, 19 nt, Artificial Sequence
  Description of Artificial Sequence: Synthetic oligonucleotide
  Sense strand starting at position 3849 of SEQ ID NO: 2331
aacccaaaguuugugugau

SEQ ID NO: 180659 - RNA, 19 nt, Artificial Sequence
  Description of Artificial Sequence: Synthetic oligonucleotide
  Antisense strand to SEQ ID NO: 180658
aucacacaaacuuuggguu

SEQ ID NO: 180660 - RNA, 19 nt, Artificial Sequence
  Description of Artificial Sequence: Synthetic oligonucleotide
  Sense strand starting at position 3914 of SEQ ID NO: 2331
agaaaugcugucuaacuuu

SEQ ID NO: 180661 - RNA, 19 nt, Artificial Sequence
  Description of Artificial Sequence: Synthetic oligonucleotide
  Antisense strand to SEQ ID NO: 180660
aaaguuagacagcauuucu

SEQ ID NO: 180662 - RNA, 19 nt, Artificial Sequence
  Description of Artificial Sequence: Synthetic oligonucleotide
  Sense strand starting at position 98 of SEQ ID NO: 2332
gucuccuuuccauaaguag

SEQ ID NO: 180663 - RNA, 19 nt, Artificial Sequence
  Description of Artificial Sequence: Synthetic oligonucleotide
  Antisense strand to SEQ ID NO: 180662
cuacuuauggaaaggagac

SEQ ID NO: 180664 - RNA, 19 nt, Artificial Sequence
  Description of Artificial Sequence: Synthetic oligonucleotide
  Sense strand starting at position 106 of SEQ ID NO: 2332
uccauaaguaguggagaaa

SEQ ID NO: 180665 - RNA, 19 nt, Artificial Sequence
  Description of Artificial Sequence: Synthetic oligonucleotide
  Antisense strand to SEQ ID NO: 180664
uuucuccacuacuuaugga

SEQ ID NO: 180666 - RNA, 19 nt, Artificial Sequence
  Description of Artificial Sequence: Synthetic oligonucleotide
  Sense strand starting at position 139 of SEQ ID NO: 2332
gugacagugauccagcauu

SEQ ID NO: 180667 - RNA, 19 nt, Artificial Sequence
  Description of Artificial Sequence: Synthetic oligonucleotide
  Antisense strand to SEQ ID NO: 180666
aaugcuggaucacugucac

SEQ ID NO: 180668 - RNA, 19 nt, Artificial Sequence
  Description of Artificial Sequence: Synthetic oligonucleotide
  Sense strand starting at position 145 of SEQ ID NO: 2332
gugauccagcauugaaauc

SEQ ID NO: 180669 - RNA, 19 nt, Artificial Sequence
  Description of Artificial Sequence: Synthetic oligonucleotide
  Antisense strand to SEQ ID NO: 180668
gauuucaaugcuggaucac

SEQ ID NO: 180670 - RNA, 19 nt, Artificial Sequence
  Description of Artificial Sequence: Synthetic oligonucleotide
  Sense strand starting at position 158 of SEQ ID NO: 2332
gaaaucgucuguccacaaa

SEQ ID NO: 180671 - RNA, 19 nt, Artificial Sequence
  Description of Artificial Sequence: Synthetic oligonucleotide
  Antisense strand to SEQ ID NO: 180670
uuuguggacagacgauuuc

SEQ ID NO: 180672 - RNA, 19 nt, Artificial Sequence
  Description of Artificial Sequence: Synthetic oligonucleotide
  Sense strand starting at position 176 of SEQ ID NO: 2332
aaauccuuucuccguagga

SEQ ID NO: 180673 - RNA, 19 nt, Artificial Sequence
  Description of Artificial Sequence: Synthetic oligonucleotide
  Antisense strand to SEQ ID NO: 180672
uccuacggagaaaggauuu

SEQ ID NO: 180674 - RNA, 19 nt, Artificial Sequence
  Description of Artificial Sequence: Synthetic oligonucleotide
  Sense strand starting at position 178 of SEQ ID NO: 2332
auccuuucuccguaggaca

SEQ ID NO: 180675 - RNA, 19 nt, Artificial Sequence
  Description of Artificial Sequence: Synthetic oligonucleotide
  Antisense strand to SEQ ID NO: 180674
uguccuacggagaaaggau

SEQ ID NO: 180676 - RNA, 19 nt, Artificial Sequence
  Description of Artificial Sequence: Synthetic oligonucleotide
  Sense strand starting at position 198 of SEQ ID NO: 2332
cguggucagcuuuaaauaa

SEQ ID NO: 180677 - RNA, 19 nt, Artificial Sequence
  Description of Artificial Sequence: Synthetic oligonucleotide
  Antisense strand to SEQ ID NO: 180676
uuauuuaaagcugaccacg

SEQ ID NO: 180678 - RNA, 19 nt, Artificial Sequence
  Description of Artificial Sequence: Synthetic oligonucleotide
  Sense strand starting at position 308 of SEQ ID NO: 2332
gggucucagugaucuucca

SEQ ID NO: 180679 - RNA, 19 nt, Artificial Sequence
  Description of Artificial Sequence: Synthetic oligonucleotide
  Antisense strand to SEQ ID NO: 180678
uggaagaucacugagaccc

SEQ ID NO: 180680 - RNA, 19 nt, Artificial Sequence
  Description of Artificial Sequence: Synthetic oligonucleotide
  Sense strand starting at position 359 of SEQ ID NO: 2332
caggguuugaugugagcua

SEQ ID NO: 180681 - RNA, 19 nt, Artificial Sequence
  Description of Artificial Sequence: Synthetic oligonucleotide
  Antisense strand to SEQ ID NO: 180680
uagcucacaucaaacccug

SEQ ID NO: 180682 - RNA, 19 nt, Artificial Sequence
  Description of Artificial Sequence: Synthetic oligonucleotide
  Sense strand starting at position 370 of SEQ ID NO: 2332
gugagcuauccugccugca

SEQ ID NO: 180683 - RNA, 19 nt, Artificial Sequence
  Description of Artificial Sequence: Synthetic oligonucleotide
  Antisense strand to SEQ ID NO: 180682
ugcaggcaggauagcucac

SEQ ID NO: 180684 - RNA, 19 nt, Artificial Sequence
  Description of Artificial Sequence: Synthetic oligonucleotide
  Sense strand starting at position 413 of SEQ ID NO: 2332
ugggcauaacauugccuua

SEQ ID NO: 180685 - RNA, 19 nt, Artificial Sequence
  Description of Artificial Sequence: Synthetic oligonucleotide
  Antisense strand to SEQ ID NO: 180684
uaaggcaauguuaugccca

SEQ ID NO: 180686 - RNA, 19 nt, Artificial Sequence
  Description of Artificial Sequence: Synthetic oligonucleotide
  Sense strand starting at position 515 of SEQ ID NO: 2332
gcaggaccuguauaucuga

SEQ ID NO: 180687 - RNA, 19 nt, Artificial Sequence
  Description of Artificial Sequence: Synthetic oligonucleotide
  Antisense strand to SEQ ID NO: 180686
ucagauauacagguccugc

SEQ ID NO: 180688 - RNA, 19 nt, Artificial Sequence
  Description of Artificial Sequence: Synthetic oligonucleotide
  Sense strand starting at position 518 of SEQ ID NO: 2332
ggaccuguauaucugaagu

SEQ ID NO: 180689 - RNA, 19 nt, Artificial Sequence
  Description of Artificial Sequence: Synthetic oligonucleotide
  Antisense strand to SEQ ID NO: 180688
acuucagauauacaggucc

SEQ ID NO: 180690 - RNA, 19 nt, Artificial Sequence
  Description of Artificial Sequence: Synthetic oligonucleotide
  Sense strand starting at position 575 of SEQ ID NO: 2332
gcacacaagugcucaacaa

SEQ ID NO: 180691 - RNA, 19 nt, Artificial Sequence
  Description of Artificial Sequence: Synthetic oligonucleotide
  Antisense strand to SEQ ID NO: 180690
uuguugagcacuugugugc

SEQ ID NO: 180692 - RNA, 19 nt, Artificial Sequence
  Description of Artificial Sequence: Synthetic oligonucleotide
  Sense strand starting at position 587 of SEQ ID NO: 2332
ucaacaaugugugcugaaa

SEQ ID NO: 180693 - RNA, 19 nt, Artificial Sequence
  Description of Artificial Sequence: Synthetic oligonucleotide
  Antisense strand to SEQ ID NO: 180692
uuucagcacacauuguuga

SEQ ID NO: 180694 - RNA, 19 nt, Artificial Sequence
  Description of Artificial Sequence: Synthetic oligonucleotide
  Sense strand starting at position 821 of SEQ ID NO: 2332
ugguuugugcuuuagaaag

SEQ ID NO: 180695 - RNA, 19 nt, Artificial Sequence
  Description of Artificial Sequence: Synthetic oligonucleotide
  Antisense strand to SEQ ID NO: 180694
cuuucuaaagcacaaacca

SEQ ID NO: 180696 - RNA, 19 nt, Artificial Sequence
  Description of Artificial Sequence: Synthetic oligonucleotide
  Sense strand starting at position 832 of SEQ ID NO: 2332
uuagaaaggauguguggaa

SEQ ID NO: 180697 - RNA, 19 nt, Artificial Sequence
  Description of Artificial Sequence: Synthetic oligonucleotide
  Antisense strand to SEQ ID NO: 180696
uuccacacauccuuucuaa

SEQ ID NO: 180698 - RNA, 19 nt, Artificial Sequence
  Description of Artificial Sequence: Synthetic oligonucleotide
  Sense strand starting at position 888 of SEQ ID NO: 2332
gcaauaguccaaugagaau

SEQ ID NO: 180699 - RNA, 19 nt, Artificial Sequence
  Description of Artificial Sequence: Synthetic oligonucleotide
  Antisense strand to SEQ ID NO: 180698
auucucauuggacuauugc

SEQ ID NO: 180700 - RNA, 19 nt, Artificial Sequence
  Description of Artificial Sequence: Synthetic oligonucleotide
  Sense strand starting at position 1080 of SEQ ID NO: 2332
guuugagguguucauagga

SEQ ID NO: 180701 - RNA, 19 nt, Artificial Sequence
  Description of Artificial Sequence: Synthetic oligonucleotide
  Antisense strand to SEQ ID NO: 180700
uccuaugaacaccucaaac

SEQ ID NO: 180702 - RNA, 19 nt, Artificial Sequence
  Description of Artificial Sequence: Synthetic oligonucleotide
  Sense strand starting at position 1286 of SEQ ID NO: 2332
cuaacuuaucccggaggua

SEQ ID NO: 180703 - RNA, 19 nt, Artificial Sequence
  Description of Artificial Sequence: Synthetic oligonucleotide
  Antisense strand to SEQ ID NO: 180702
uaccuccgggauaaguuag

SEQ ID NO: 180704 - RNA, 19 nt, Artificial Sequence
  Description of Artificial Sequence: Synthetic oligonucleotide
  Sense strand starting at position 1287 of SEQ ID NO: 2332
uaacuuaucccggagguag

SEQ ID NO: 180705 - RNA, 19 nt, Artificial Sequence
  Description of Artificial Sequence: Synthetic oligonucleotide
  Antisense strand to SEQ ID NO: 180704
cuaccuccgggauaaguua

SEQ ID NO: 180706 - RNA, 19 nt, Artificial Sequence
  Description of Artificial Sequence: Synthetic oligonucleotide
  Sense strand starting at position 2406 of SEQ ID NO: 2332
gucaaaugcugggcacaga

SEQ ID NO: 180707 - RNA, 19 nt, Artificial Sequence
  Description of Artificial Sequence: Synthetic oligonucleotide
  Antisense strand to SEQ ID NO: 180706
ucugugcccagcauuugac

SEQ ID NO: 180708 - RNA, 19 nt, Artificial Sequence
  Description of Artificial Sequence: Synthetic oligonucleotide
  Sense strand starting at position 2589 of SEQ ID NO: 2332
ccaucuccaguguaaacuu

SEQ ID NO: 180709 - RNA, 19 nt, Artificial Sequence
  Description of Artificial Sequence: Synthetic oligonucleotide
  Antisense strand to SEQ ID NO: 180708
aaguuuacacuggagaugg

SEQ ID NO: 180710 - RNA, 19 nt, Artificial Sequence
  Description of Artificial Sequence: Synthetic oligonucleotide
  Sense strand starting at position 2597 of SEQ ID NO: 2332
aguguaaacuuucuuugaa

SEQ ID NO: 180711 - RNA, 19 nt, Artificial Sequence
  Description of Artificial Sequence: Synthetic oligonucleotide
  Antisense strand to SEQ ID NO: 180710
uucaaagaaaguuuacacu

SEQ ID NO: 180712 - RNA, 19 nt, Artificial Sequence
  Description of Artificial Sequence: Synthetic oligonucleotide
  Sense strand starting at position 2598 of SEQ ID NO: 2332
guguaaacuuucuuugaag

SEQ ID NO: 180713 - RNA, 19 nt, Artificial Sequence
  Description of Artificial Sequence: Synthetic oligonucleotide
  Antisense strand to SEQ ID NO: 180712
cuucaaagaaaguuuacac

SEQ ID NO: 180714 - RNA, 19 nt, Artificial Sequence
  Description of Artificial Sequence: Synthetic oligonucleotide
  Sense strand starting at position 2798 of SEQ ID NO: 2332
ccagcuccagugugaagaa

SEQ ID NO: 180715 - RNA, 19 nt, Artificial Sequence
  Description of Artificial Sequence: Synthetic oligonucleotide
  Antisense strand to SEQ ID NO: 180714
uucuucacacuggagcugg

SEQ ID NO: 180716 - RNA, 19 nt, Artificial Sequence
  Description of Artificial Sequence: Synthetic oligonucleotide
  Sense strand starting at position 2932 of SEQ ID NO: 2332
uagguacuugugcaauaca

SEQ ID NO: 180717 - RNA, 19 nt, Artificial Sequence
  Description of Artificial Sequence: Synthetic oligonucleotide
  Antisense strand to SEQ ID NO: 180716
uguauugcacaaguaccua

SEQ ID NO: 180718 - RNA, 19 nt, Artificial Sequence
  Description of Artificial Sequence: Synthetic oligonucleotide
  Sense strand starting at position 2935 of SEQ ID NO: 2332
guacuugugcaauacaaau

SEQ ID NO: 180719 - RNA, 19 nt, Artificial Sequence
  Description of Artificial Sequence: Synthetic oligonucleotide
  Antisense strand to SEQ ID NO: 180718
auuuguauugcacaaguac

SEQ ID NO: 180720 - RNA, 19 nt, Artificial Sequence
  Description of Artificial Sequence: Synthetic oligonucleotide
  Sense strand starting at position 3023 of SEQ ID NO: 2332
ggcaguuuacaccaauucu

SEQ ID NO: 180721 - RNA, 19 nt, Artificial Sequence
  Description of Artificial Sequence: Synthetic oligonucleotide
  Antisense strand to SEQ ID NO: 180720
agaauugguguaaacugcc

SEQ ID NO: 180722 - RNA, 19 nt, Artificial Sequence
  Description of Artificial Sequence: Synthetic oligonucleotide
  Sense strand starting at position 3377 of SEQ ID NO: 2332
ugcuuaucugaucacaaag

SEQ ID NO: 180723 - RNA, 19 nt, Artificial Sequence
  Description of Artificial Sequence: Synthetic oligonucleotide
  Antisense strand to SEQ ID NO: 180722
cuuugugaucagauaagca

SEQ ID NO: 180724 - RNA, 19 nt, Artificial Sequence
  Description of Artificial Sequence: Synthetic oligonucleotide
  Sense strand starting at position 3761 of SEQ ID NO: 2332
agauuucucucugaaggua

SEQ ID NO: 180725 - RNA, 19 nt, Artificial Sequence
  Description of Artificial Sequence: Synthetic oligonucleotide
  Antisense strand to SEQ ID NO: 180724
uaccuucagagagaaaucu

SEQ ID NO: 180726 - RNA, 19 nt, Artificial Sequence
  Description of Artificial Sequence: Synthetic oligonucleotide
  Sense strand starting at position 3793 of SEQ ID NO: 2332
augugucuucuacagagcu

SEQ ID NO: 180727 - RNA, 19 nt, Artificial Sequence
  Description of Artificial Sequence: Synthetic oligonucleotide
  Antisense strand to SEQ ID NO: 180726
agcucuguagaagacacau

SEQ ID NO: 180728 - RNA, 19 nt, Artificial Sequence
  Description of Artificial Sequence: Synthetic oligonucleotide
  Sense strand starting at position 3814 of SEQ ID NO: 2332
gcacuauugcuauacauag

SEQ ID NO: 180729 - RNA, 19 nt, Artificial Sequence
  Description of Artificial Sequence: Synthetic oligonucleotide
  Antisense strand to SEQ ID NO: 180728
cuauguauagcaauagugc

SEQ ID NO: 180730 - RNA, 19 nt, Artificial Sequence
  Description of Artificial Sequence: Synthetic oligonucleotide
  Sense strand starting at position 3833 of SEQ ID NO: 2332
uagguacucaauggugagu

SEQ ID NO: 180731 - RNA, 19 nt, Artificial Sequence
  Description of Artificial Sequence: Synthetic oligonucleotide
  Antisense strand to SEQ ID NO: 180730
acucaccauugaguaccua

SEQ ID NO: 180732 - RNA, 19 nt, Artificial Sequence
  Description of Artificial Sequence: Synthetic oligonucleotide
  Sense strand starting at position 3836 of SEQ ID NO: 2332
guacucaauggugaguaaa

SEQ ID NO: 180733 - RNA, 19 nt, Artificial Sequence
  Description of Artificial Sequence: Synthetic oligonucleotide
  Antisense strand to SEQ ID NO: 180732
uuuacucaccauugaguac

SEQ ID NO: 180734 - RNA, 19 nt, Artificial Sequence
  Description of Artificial Sequence: Synthetic oligonucleotide
  Sense strand starting at position 3838 of SEQ ID NO: 2332
acucaauggugaguaaaua

SEQ ID NO: 180735 - RNA, 19 nt, Artificial Sequence
  Description of Artificial Sequence: Synthetic oligonucleotide
  Antisense strand to SEQ ID NO: 180734
uauuuacucaccauugagu

SEQ ID NO: 180736 - RNA, 19 nt, Artificial Sequence
  Description of Artificial Sequence: Synthetic oligonucleotide
  Sense strand starting at position 3861 of SEQ ID NO: 2332
aggagcuaauaccuaucaa

SEQ ID NO: 180737 - RNA, 19 nt, Artificial Sequence
  Description of Artificial Sequence: Synthetic oligonucleotide
  Antisense strand to SEQ ID NO: 180736
uugauagguauuagcuccu

SEQ ID NO: 180738 - RNA, 19 nt, Artificial Sequence
  Description of Artificial Sequence: Synthetic oligonucleotide
  Sense strand starting at position 3954 of SEQ ID NO: 2332
auauuugggucagaaguuu

SEQ ID NO: 180739 - RNA, 19 nt, Artificial Sequence
  Description of Artificial Sequence: Synthetic oligonucleotide
  Antisense strand to SEQ ID NO: 180738
aaacuucugacccaaauau

SEQ ID NO: 180740 - RNA, 19 nt, Artificial Sequence
  Description of Artificial Sequence: Synthetic oligonucleotide
  Sense strand starting at position 3971 of SEQ ID NO: 2332
uuagaaauguuccuaagau

SEQ ID NO: 180741 - RNA, 19 nt, Artificial Sequence
  Description of Artificial Sequence: Synthetic oligonucleotide
  Antisense strand to SEQ ID NO: 180740
aucuuaggaacauuucuaa

SEQ ID NO: 180742 - RNA, 19 nt, Artificial Sequence
  Description of Artificial Sequence: Synthetic oligonucleotide
  Sense strand starting at position 61 of SEQ ID NO: 2328
ggaagagguuuccacaaga

SEQ ID NO: 180743 - RNA, 19 nt, Artificial Sequence
  Description of Artificial Sequence: Synthetic oligonucleotide
  Antisense strand to SEQ ID NO: 180742
ucuuguggaaaccucuucc

SEQ ID NO: 180744 - RNA, 19 nt, Artificial Sequence
  Description of Artificial Sequence: Synthetic oligonucleotide
  Sense strand starting at position 87 of SEQ ID NO: 2328
gggucucuacuaugguuua

SEQ ID NO: 180745 - RNA, 19 nt, Artificial Sequence
  Description of Artificial Sequence: Synthetic oligonucleotide
  Antisense strand to SEQ ID NO: 180744
uaaaccauaguagagaccc

SEQ ID NO: 180746 - RNA, 19 nt, Artificial Sequence
  Description of Artificial Sequence: Synthetic oligonucleotide
  Sense strand starting at position 142 of SEQ ID NO: 2328
guuaauaucugacaaaguu

SEQ ID NO: 180747 - RNA, 19 nt, Artificial Sequence
  Description of Artificial Sequence: Synthetic oligonucleotide
  Antisense strand to SEQ ID NO: 180746
aacuuugucagauauuaac

SEQ ID NO: 180748 - RNA, 19 nt, Artificial Sequence
  Description of Artificial Sequence: Synthetic oligonucleotide
  Sense strand starting at position 163 of SEQ ID NO: 2328
guggcaaggguuugugagu

SEQ ID NO: 180749 - RNA, 19 nt, Artificial Sequence
  Description of Artificial Sequence: Synthetic oligonucleotide
  Antisense strand to SEQ ID NO: 180748
acucacaaacccuugccac

SEQ ID NO: 180750 - RNA, 19 nt, Artificial Sequence
  Description of Artificial Sequence: Synthetic oligonucleotide
  Sense strand starting at position 299 of SEQ ID NO: 2328
ugcugagugucuguugagu

SEQ ID NO: 180751 - RNA, 19 nt, Artificial Sequence
  Description of Artificial Sequence: Synthetic oligonucleotide
  Antisense strand to SEQ ID NO: 180750
acucaacagacacucagca

SEQ ID NO: 180752 - RNA, 19 nt, Artificial Sequence
  Description of Artificial Sequence: Synthetic oligonucleotide
  Sense strand starting at position 305 of SEQ ID NO: 2328
gugucuguugagugagugu

SEQ ID NO: 180753 - RNA, 19 nt, Artificial Sequence
  Description of Artificial Sequence: Synthetic oligonucleotide
  Antisense strand to SEQ ID NO: 180752
acacucacucaacagacac

SEQ ID NO: 180754 - RNA, 19 nt, Artificial Sequence
  Description of Artificial Sequence: Synthetic oligonucleotide
  Sense strand starting at position 312 of SEQ ID NO: 2328
uugagugagugucucugua

SEQ ID NO: 180755 - RNA, 19 nt, Artificial Sequence
  Description of Artificial Sequence: Synthetic oligonucleotide
  Antisense strand to SEQ ID NO: 180754
uacagagacacucacucaa

SEQ ID NO: 180756 - RNA, 19 nt, Artificial Sequence
  Description of Artificial Sequence: Synthetic oligonucleotide
  Sense strand starting at position 314 of SEQ ID NO: 2328
gagugagugucucuguagu

SEQ ID NO: 180757 - RNA, 19 nt, Artificial Sequence
  Description of Artificial Sequence: Synthetic oligonucleotide
  Antisense strand to SEQ ID NO: 180756
acuacagagacacucacuc

SEQ ID NO: 180758 - RNA, 19 nt, Artificial Sequence
  Description of Artificial Sequence: Synthetic oligonucleotide
  Sense strand starting at position 316 of SEQ ID NO: 2328
gugagugucucuguaguga

SEQ ID NO: 180759 - RNA, 19 nt, Artificial Sequence
  Description of Artificial Sequence: Synthetic oligonucleotide
  Antisense strand to SEQ ID NO: 180758
ucacuacagagacacucac

SEQ ID NO: 180760 - RNA, 19 nt, Artificial Sequence
  Description of Artificial Sequence: Synthetic oligonucleotide
  Sense strand starting at position 324 of SEQ ID NO: 2328
cucuguagugaaggugaga

SEQ ID NO: 180761 - RNA, 19 nt, Artificial Sequence
  Description of Artificial Sequence: Synthetic oligonucleotide
  Antisense strand to SEQ ID NO: 180760
ucucaccuucacuacagag

SEQ ID NO: 180762 - RNA, 19 nt, Artificial Sequence
  Description of Artificial Sequence: Synthetic oligonucleotide
  Sense strand starting at position 463 of SEQ ID NO: 2328
uacgguucugcauaaggaa

SEQ ID NO: 180763 - RNA, 19 nt, Artificial Sequence
  Description of Artificial Sequence: Synthetic oligonucleotide
  Antisense strand to SEQ ID NO: 180762
uuccuuaugcagaaccgua

SEQ ID NO: 180764 - RNA, 19 nt, Artificial Sequence
  Description of Artificial Sequence: Synthetic oligonucleotide
  Sense strand starting at position 559 of SEQ ID NO: 2328
gcacuuaggcagggaugua

SEQ ID NO: 180765 - RNA, 19 nt, Artificial Sequence
  Description of Artificial Sequence: Synthetic oligonucleotide
  Antisense strand to SEQ ID NO: 180764
uacaucccugccuaagugc

SEQ ID NO: 180766 - RNA, 19 nt, Artificial Sequence
  Description of Artificial Sequence: Synthetic oligonucleotide
  Sense strand starting at position 619 of SEQ ID NO: 2328
agucuagacuucuuugaua

SEQ ID NO: 180767 - RNA, 19 nt, Artificial Sequence
  Description of Artificial Sequence: Synthetic oligonucleotide
  Antisense strand to SEQ ID NO: 180766
uaucaaagaagucuagacu

SEQ ID NO: 180768 - RNA, 19 nt, Artificial Sequence
  Description of Artificial Sequence: Synthetic oligonucleotide
  Sense strand starting at position 621 of SEQ ID NO: 2328
ucuagacuucuuugauaga

SEQ ID NO: 180769 - RNA, 19 nt, Artificial Sequence
  Description of Artificial Sequence: Synthetic oligonucleotide
  Antisense strand to SEQ ID NO: 180768
ucuaucaaagaagucuaga

SEQ ID NO: 180770 - RNA, 19 nt, Artificial Sequence
  Description of Artificial Sequence: Synthetic oligonucleotide
  Sense strand starting at position 622 of SEQ ID NO: 2328
cuagacuucuuugauagau

SEQ ID NO: 180771 - RNA, 19 nt, Artificial Sequence
  Description of Artificial Sequence: Synthetic oligonucleotide
  Antisense strand to SEQ ID NO: 180770
aucuaucaaagaagucuag

SEQ ID NO: 180772 - RNA, 19 nt, Artificial Sequence
  Description of Artificial Sequence: Synthetic oligonucleotide
  Sense strand starting at position 624 of SEQ ID NO: 2328
agacuucuuugauagauac

SEQ ID NO: 180773 - RNA, 19 nt, Artificial Sequence
  Description of Artificial Sequence: Synthetic oligonucleotide
  Antisense strand to SEQ ID NO: 180772
guaucuaucaaagaagucu

SEQ ID NO: 180774 - RNA, 19 nt, Artificial Sequence
  Description of Artificial Sequence: Synthetic oligonucleotide
  Sense strand starting at position 820 of SEQ ID NO: 2328
gaagucuaggaaggguuaa

SEQ ID NO: 180775 - RNA, 19 nt, Artificial Sequence
  Description of Artificial Sequence: Synthetic oligonucleotide
  Antisense strand to SEQ ID NO: 180774
uuaacccuuccuagacuuc

SEQ ID NO: 180776 - RNA, 19 nt, Artificial Sequence
  Description of Artificial Sequence: Synthetic oligonucleotide
  Sense strand starting at position 832 of SEQ ID NO: 2328
ggguuaaggacuuggccaa

SEQ ID NO: 180777 - RNA, 19 nt, Artificial Sequence
  Description of Artificial Sequence: Synthetic oligonucleotide
  Antisense strand to SEQ ID NO: 180776
uuggccaaguccuuaaccc

SEQ ID NO: 180778 - RNA, 19 nt, Artificial Sequence
  Description of Artificial Sequence: Synthetic oligonucleotide
  Sense strand starting at position 833 of SEQ ID NO: 2328
gguuaaggacuuggccaaa

SEQ ID NO: 180779 - RNA, 19 nt, Artificial Sequence
  Description of Artificial Sequence: Synthetic oligonucleotide
  Antisense strand to SEQ ID NO: 180778
uuuggccaaguccuuaacc

SEQ ID NO: 180780 - RNA, 19 nt, Artificial Sequence
  Description of Artificial Sequence: Synthetic oligonucleotide
  Sense strand starting at position 928 of SEQ ID NO: 2328
gcuuccaagcccugauaga

SEQ ID NO: 180781 - RNA, 19 nt, Artificial Sequence
  Description of Artificial Sequence: Synthetic oligonucleotide
  Antisense strand to SEQ ID NO: 180780
ucuaucagggcuuggaagc

SEQ ID NO: 180782 - RNA, 19 nt, Artificial Sequence
  Description of Artificial Sequence: Synthetic oligonucleotide
  Sense strand starting at position 1042 of SEQ ID NO: 2328
aaauauugucacugguggu

SEQ ID NO: 180783 - RNA, 19 nt, Artificial Sequence
  Description of Artificial Sequence: Synthetic oligonucleotide
  Antisense strand to SEQ ID NO: 180782
accaccagugacaauauuu

SEQ ID NO: 180784 - RNA, 19 nt, Artificial Sequence
  Description of Artificial Sequence: Synthetic oligonucleotide
  Sense strand starting at position 1261 of SEQ ID NO: 2328
ggguuucucagugggaugu

SEQ ID NO: 180785 - RNA, 19 nt, Artificial Sequence
  Description of Artificial Sequence: Synthetic oligonucleotide
  Antisense strand to SEQ ID NO: 180784
acaucccacugagaaaccc

SEQ ID NO: 180786 - RNA, 19 nt, Artificial Sequence
  Description of Artificial Sequence: Synthetic oligonucleotide
  Sense strand starting at position 1488 of SEQ ID NO: 2328
gaugacaagucacuuaagu

SEQ ID NO: 180787 - RNA, 19 nt, Artificial Sequence
  Description of Artificial Sequence: Synthetic oligonucleotide
  Antisense strand to SEQ ID NO: 180786
acuuaagugacuugucauc

SEQ ID NO: 180788 - RNA, 19 nt, Artificial Sequence
  Description of Artificial Sequence: Synthetic oligonucleotide
  Sense strand starting at position 1499 of SEQ ID NO: 2328
acuuaagugcugugucuca

SEQ ID NO: 180789 - RNA, 19 nt, Artificial Sequence
  Description of Artificial Sequence: Synthetic oligonucleotide
  Antisense strand to SEQ ID NO: 180788
ugagacacagcacuuaagu

SEQ ID NO: 180790 - RNA, 19 nt, Artificial Sequence
  Description of Artificial Sequence: Synthetic oligonucleotide
  Sense strand starting at position 1501 of SEQ ID NO: 2328
uuaagugcugugucucagu

SEQ ID NO: 180791 - RNA, 19 nt, Artificial Sequence
  Description of Artificial Sequence: Synthetic oligonucleotide
  Antisense strand to SEQ ID NO: 180790
acugagacacagcacuuaa

SEQ ID NO: 180792 - RNA, 19 nt, Artificial Sequence
  Description of Artificial Sequence: Synthetic oligonucleotide
  Sense strand starting at position 1503 of SEQ ID NO: 2328
aagugcugugucucaguuu

SEQ ID NO: 180793 - RNA, 19 nt, Artificial Sequence
  Description of Artificial Sequence: Synthetic oligonucleotide
  Antisense strand to SEQ ID NO: 180792
aaacugagacacagcacuu

SEQ ID NO: 180794 - RNA, 19 nt, Artificial Sequence
  Description of Artificial Sequence: Synthetic oligonucleotide
  Sense strand starting at position 2239 of SEQ ID NO: 2328
ccuauuuggcgcuagaagu

SEQ ID NO: 180795 - RNA, 19 nt, Artificial Sequence
  Description of Artificial Sequence: Synthetic oligonucleotide
  Antisense strand to SEQ ID NO: 180794
acuucuagcgccaaauagg

SEQ ID NO: 180796 - RNA, 19 nt, Artificial Sequence
  Description of Artificial Sequence: Synthetic oligonucleotide
  Sense strand starting at position 2768 of SEQ ID NO: 2328
cugaucuucuggcacagaa

SEQ ID NO: 180797 - RNA, 19 nt, Artificial Sequence
  Description of Artificial Sequence: Synthetic oligonucleotide
  Antisense strand to SEQ ID NO: 180796
uucugugccagaagaucag

SEQ ID NO: 180798 - RNA, 19 nt, Artificial Sequence
  Description of Artificial Sequence: Synthetic oligonucleotide
  Sense strand starting at position 2830 of SEQ ID NO: 2328
cccagaugcugcucuuaac

SEQ ID NO: 180799 - RNA, 19 nt, Artificial Sequence
  Description of Artificial Sequence: Synthetic oligonucleotide
  Antisense strand to SEQ ID NO: 180798
guuaagagcagcaucuggg

SEQ ID NO: 180800 - RNA, 19 nt, Artificial Sequence
  Description of Artificial Sequence: Synthetic oligonucleotide
  Sense strand starting at position 3129 of SEQ ID NO: 2328
ggcagaugcucacuugcaa

SEQ ID NO: 180801 - RNA, 19 nt, Artificial Sequence
  Description of Artificial Sequence: Synthetic oligonucleotide
  Antisense strand to SEQ ID NO: 180800
uugcaagugagcaucugcc

SEQ ID NO: 180802 - RNA, 19 nt, Artificial Sequence
  Description of Artificial Sequence: Synthetic oligonucleotide
  Sense strand starting at position 3136 of SEQ ID NO: 2328
gcucacuugcaagaaucau

SEQ ID NO: 180803 - RNA, 19 nt, Artificial Sequence
  Description of Artificial Sequence: Synthetic oligonucleotide
  Antisense strand to SEQ ID NO: 180802
augauucuugcaagugagc

SEQ ID NO: 180804 - RNA, 19 nt, Artificial Sequence
  Description of Artificial Sequence: Synthetic oligonucleotide
  Sense strand starting at position 3162 of SEQ ID NO: 2328
cuaggagucucauauacag

SEQ ID NO: 180805 - RNA, 19 nt, Artificial Sequence
  Description of Artificial Sequence: Synthetic oligonucleotide
  Antisense strand to SEQ ID NO: 180804
cuguauaugagacuccuag

SEQ ID NO: 180806 - RNA, 19 nt, Artificial Sequence
  Description of Artificial Sequence: Synthetic oligonucleotide
  Sense strand starting at position 3205 of SEQ ID NO: 2328
agaaguaagcuaugaugac

SEQ ID NO: 180807 - RNA, 19 nt, Artificial Sequence
  Description of Artificial Sequence: Synthetic oligonucleotide
  Antisense strand to SEQ ID NO: 180806
gucaucauagcuuacuucu

SEQ ID NO: 180808 - RNA, 19 nt, Artificial Sequence
  Description of Artificial Sequence: Synthetic oligonucleotide
  Sense strand starting at position 3206 of SEQ ID NO: 2328
gaaguaagcuaugaugaca

SEQ ID NO: 180809 - RNA, 19 nt, Artificial Sequence
  Description of Artificial Sequence: Synthetic oligonucleotide
  Antisense strand to SEQ ID NO: 180808
ugucaucauagcuuacuuc

SEQ ID NO: 180810 - RNA, 19 nt, Artificial Sequence
  Description of Artificial Sequence: Synthetic oligonucleotide
  Sense strand starting at position 3268 of SEQ ID NO: 2328
ggagcuuccuggaagaggu

SEQ ID NO: 180811 - RNA, 19 nt, Artificial Sequence
  Description of Artificial Sequence: Synthetic oligonucleotide
  Antisense strand to SEQ ID NO: 180810
accucuuccaggaagcucc

SEQ ID NO: 180812 - RNA, 19 nt, Artificial Sequence
  Description of Artificial Sequence: Synthetic oligonucleotide
  Sense strand starting at position 3293 of SEQ ID NO: 2328
agaacugagccuugaaguu

SEQ ID NO: 180813 - RNA, 19 nt, Artificial Sequence
  Description of Artificial Sequence: Synthetic oligonucleotide
  Antisense strand to SEQ ID NO: 180812
aacuucaaggcucaguucu

SEQ ID NO: 180814 - RNA, 19 nt, Artificial Sequence
  Description of Artificial Sequence: Synthetic oligonucleotide
  Sense strand starting at position 3525 of SEQ ID NO: 2328
ccucccuugucacuuguua

SEQ ID NO: 180815 - RNA, 19 nt, Artificial Sequence
  Description of Artificial Sequence: Synthetic oligonucleotide
  Antisense strand to SEQ ID NO: 180814
uaacaagugacaagggagg

SEQ ID NO: 180816 - RNA, 19 nt, Artificial Sequence
  Description of Artificial Sequence: Synthetic oligonucleotide
  Sense strand starting at position 3529 of SEQ ID NO: 2328
ccuugucacuuguuaguca

SEQ ID NO: 180817 - RNA, 19 nt, Artificial Sequence
  Description of Artificial Sequence: Synthetic oligonucleotide
  Antisense strand to SEQ ID NO: 180816
ugacuaacaagugacaagg

SEQ ID NO: 180818 - RNA, 19 nt, Artificial Sequence
  Description of Artificial Sequence: Synthetic oligonucleotide
  Sense strand starting at position 3651 of SEQ ID NO: 2328
auccgaaauccagaaugcu

SEQ ID NO: 180819 - RNA, 19 nt, Artificial Sequence
  Description of Artificial Sequence: Synthetic oligonucleotide
  Antisense strand to SEQ ID NO: 180818
agcauucuggauuucggau

SEQ ID NO: 180820 - RNA, 19 nt, Artificial Sequence
  Description of Artificial Sequence: Synthetic oligonucleotide
  Sense strand starting at position 3748 of SEQ ID NO: 2328
gcacaaucucgugaucuug

SEQ ID NO: 180821 - RNA, 19 nt, Artificial Sequence
  Description of Artificial Sequence: Synthetic oligonucleotide
  Antisense strand to SEQ ID NO: 180820
caagaucacgagauugugc

SEQ ID NO: 180822 - RNA, 19 nt, Artificial Sequence
  Description of Artificial Sequence: Synthetic oligonucleotide
  Sense strand starting at position 60 of SEQ ID NO: 2330
ucgugaaacacaugugcaa

SEQ ID NO: 180823 - RNA, 19 nt, Artificial Sequence
  Description of Artificial Sequence: Synthetic oligonucleotide
  Antisense strand to SEQ ID NO: 180822
uugcacauguguuucacga

SEQ ID NO: 180824 - RNA, 19 nt, Artificial Sequence
  Description of Artificial Sequence: Synthetic oligonucleotide
  Sense strand starting at position 121 of SEQ ID NO: 2330
cugggaacacuucgacauc

SEQ ID NO: 180825 - RNA, 19 nt, Artificial Sequence
  Description of Artificial Sequence: Synthetic oligonucleotide
  Antisense strand to SEQ ID NO: 180824
gaugucgaaguguucccag

SEQ ID NO: 180826 - RNA, 19 nt, Artificial Sequence
  Description of Artificial Sequence: Synthetic oligonucleotide
  Sense strand starting at position 167 of SEQ ID NO: 2330
gucuacauagggugguaua

SEQ ID NO: 180827 - RNA, 19 nt, Artificial Sequence
  Description of Artificial Sequence: Synthetic oligonucleotide
  Antisense strand to SEQ ID NO: 180826
uauaccacccuauguagac

SEQ ID NO: 180828 - RNA, 19 nt, Artificial Sequence
  Description of Artificial Sequence: Synthetic oligonucleotide
  Sense strand starting at position 168 of SEQ ID NO: 2330
ucuacauagggugguauau

SEQ ID NO: 180829 - RNA, 19 nt, Artificial Sequence
  Description of Artificial Sequence: Synthetic oligonucleotide
  Antisense strand to SEQ ID NO: 180828
auauaccacccuauguaga

SEQ ID NO: 180830 - RNA, 19 nt, Artificial Sequence
  Description of Artificial Sequence: Synthetic oligonucleotide
  Sense strand starting at position 239 of SEQ ID NO: 2330
accugaaguugagugugaa

SEQ ID NO: 180831 - RNA, 19 nt, Artificial Sequence
  Description of Artificial Sequence: Synthetic oligonucleotide
  Antisense strand to SEQ ID NO: 180830
uucacacucaacuucaggu

SEQ ID NO: 180832 - RNA, 19 nt, Artificial Sequence
  Description of Artificial Sequence: Synthetic oligonucleotide
  Sense strand starting at position 240 of SEQ ID NO: 2330
ccugaaguugagugugaaa

SEQ ID NO: 180833 - RNA, 19 nt, Artificial Sequence
  Description of Artificial Sequence: Synthetic oligonucleotide
  Antisense strand to SEQ ID NO: 180832
uuucacacucaacuucagg

SEQ ID NO: 180834 - RNA, 19 nt, Artificial Sequence
  Description of Artificial Sequence: Synthetic oligonucleotide
  Sense strand starting at position 423 of SEQ ID NO: 2330
ggaagagguuuccacaaga

SEQ ID NO: 180835 - RNA, 19 nt, Artificial Sequence
  Description of Artificial Sequence: Synthetic oligonucleotide
  Antisense strand to SEQ ID NO: 180834
ucuuguggaaaccucuucc

SEQ ID NO: 180836 - RNA, 19 nt, Artificial Sequence
  Description of Artificial Sequence: Synthetic oligonucleotide
  Sense strand starting at position 449 of SEQ ID NO: 2330
gggucucuacuaugguuua

SEQ ID NO: 180837 - RNA, 19 nt, Artificial Sequence
  Description of Artificial Sequence: Synthetic oligonucleotide
  Antisense strand to SEQ ID NO: 180836
uaaaccauaguagagaccc

SEQ ID NO: 180838 - RNA, 19 nt, Artificial Sequence
  Description of Artificial Sequence: Synthetic oligonucleotide
  Sense strand starting at position 525 of SEQ ID NO: 2330
guggcaaggguuugugagu

SEQ ID NO: 180839 - RNA, 19 nt, Artificial Sequence
  Description of Artificial Sequence: Synthetic oligonucleotide
  Antisense strand to SEQ ID NO: 180838
acucacaaacccuugccac

SEQ ID NO: 180840 - RNA, 19 nt, Artificial Sequence
  Description of Artificial Sequence: Synthetic oligonucleotide
  Sense strand starting at position 674 of SEQ ID NO: 2330
uugagugagugucucugua

SEQ ID NO: 180841 - RNA, 19 nt, Artificial Sequence
  Description of Artificial Sequence: Synthetic oligonucleotide
  Antisense strand to SEQ ID NO: 180840
uacagagacacucacucaa

SEQ ID NO: 180842 - RNA, 19 nt, Artificial Sequence
  Description of Artificial Sequence: Synthetic oligonucleotide
  Sense strand starting at position 676 of SEQ ID NO: 2330
gagugagugucucuguagu

SEQ ID NO: 180843 - RNA, 19 nt, Artificial Sequence
  Description of Artificial Sequence: Synthetic oligonucleotide
  Antisense strand to SEQ ID NO: 180842
acuacagagacacucacuc

SEQ ID NO: 180844 - RNA, 19 nt, Artificial Sequence
  Description of Artificial Sequence: Synthetic oligonucleotide
  Sense strand starting at position 678 of SEQ ID NO: 2330
gugagugucucuguaguga

SEQ ID NO: 180845 - RNA, 19 nt, Artificial Sequence
  Description of Artificial Sequence: Synthetic oligonucleotide
  Antisense strand to SEQ ID NO: 180844
ucacuacagagacacucac

SEQ ID NO: 180846 - RNA, 19 nt, Artificial Sequence
  Description of Artificial Sequence: Synthetic oligonucleotide
  Sense strand starting at position 686 of SEQ ID NO: 2330
cucuguagugaaggugaga

SEQ ID NO: 180847 - RNA, 19 nt, Artificial Sequence
  Description of Artificial Sequence: Synthetic oligonucleotide
  Antisense strand to SEQ ID NO: 180846
ucucaccuucacuacagag

SEQ ID NO: 180848 - RNA, 19 nt, Artificial Sequence
  Description of Artificial Sequence: Synthetic oligonucleotide
  Sense strand starting at position 825 of SEQ ID NO: 2330
uacgguucugcauaaggaa

SEQ ID NO: 180849 - RNA, 19 nt, Artificial Sequence
  Description of Artificial Sequence: Synthetic oligonucleotide
  Antisense strand to SEQ ID NO: 180848
uuccuuaugcagaaccgua

SEQ ID NO: 180850 - RNA, 19 nt, Artificial Sequence
  Description of Artificial Sequence: Synthetic oligonucleotide
  Sense strand starting at position 921 of SEQ ID NO: 2330
gcacuuaggcagggaugua

SEQ ID NO: 180851 - RNA, 19 nt, Artificial Sequence
  Description of Artificial Sequence: Synthetic oligonucleotide
  Antisense strand to SEQ ID NO: 180850
uacaucccugccuaagugc

SEQ ID NO: 180852 - RNA, 19 nt, Artificial Sequence
  Description of Artificial Sequence: Synthetic oligonucleotide
  Sense strand starting at position 981 of SEQ ID NO: 2330
agucuagacuucuuugaua

SEQ ID NO: 180853 - RNA, 19 nt, Artificial Sequence
  Description of Artificial Sequence: Synthetic oligonucleotide
  Antisense strand to SEQ ID NO: 180852
uaucaaagaagucuagacu

SEQ ID NO: 180854 - RNA, 19 nt, Artificial Sequence
  Description of Artificial Sequence: Synthetic oligonucleotide
  Sense strand starting at position 983 of SEQ ID NO: 2330
ucuagacuucuuugauaga

SEQ ID NO: 180855 - RNA, 19 nt, Artificial Sequence
  Description of Artificial Sequence: Synthetic oligonucleotide
  Antisense strand to SEQ ID NO: 180854
ucuaucaaagaagucuaga

SEQ ID NO: 180856 - RNA, 19 nt, Artificial Sequence
  Description of Artificial Sequence: Synthetic oligonucleotide
  Sense strand starting at position 984 of SEQ ID NO: 2330
cuagacuucuuugauagau

SEQ ID NO: 180857 - RNA, 19 nt, Artificial Sequence
  Description of Artificial Sequence: Synthetic oligonucleotide
  Antisense strand to SEQ ID NO: 180856
aucuaucaaagaagucuag

SEQ ID NO: 180858 - RNA, 19 nt, Artificial Sequence
  Description of Artificial Sequence: Synthetic oligonucleotide
  Sense strand starting at position 986 of SEQ ID NO: 2330
agacuucuuugauagauac

SEQ ID NO: 180859 - RNA, 19 nt, Artificial Sequence
  Description of Artificial Sequence: Synthetic oligonucleotide
  Antisense strand to SEQ ID NO: 180858
guaucuaucaaagaagucu

SEQ ID NO: 180860 - RNA, 19 nt, Artificial Sequence
  Description of Artificial Sequence: Synthetic oligonucleotide
  Sense strand starting at position 1182 of SEQ ID NO: 2330
gaagucuaggaaggguuaa

SEQ ID NO: 180861 - RNA, 19 nt, Artificial Sequence
  Description of Artificial Sequence: Synthetic oligonucleotide
  Antisense strand to SEQ ID NO: 180860
uuaacccuuccuagacuuc

SEQ ID NO: 180862 - RNA, 19 nt, Artificial Sequence
  Description of Artificial Sequence: Synthetic oligonucleotide
  Sense strand starting at position 1194 of SEQ ID NO: 2330
ggguuaaggacuuggccaa

SEQ ID NO: 180863 - RNA, 19 nt, Artificial Sequence
  Description of Artificial Sequence: Synthetic oligonucleotide
  Antisense strand to SEQ ID NO: 180862
uuggccaaguccuuaaccc

SEQ ID NO: 180864 - RNA, 19 nt, Artificial Sequence
  Description of Artificial Sequence: Synthetic oligonucleotide
  Sense strand starting at position 1195 of SEQ ID NO: 2330
gguuaaggacuuggccaaa

SEQ ID NO: 180865 - RNA, 19 nt, Artificial Sequence
  Description of Artificial Sequence: Synthetic oligonucleotide
  Antisense strand to SEQ ID NO: 180864
uuuggccaaguccuuaacc

SEQ ID NO: 180866 - RNA, 19 nt, Artificial Sequence
  Description of Artificial Sequence: Synthetic oligonucleotide
  Sense strand starting at position 1290 of SEQ ID NO: 2330
gcuuccaagcccugauaga

SEQ ID NO: 180867 - RNA, 19 nt, Artificial Sequence
  Description of Artificial Sequence: Synthetic oligonucleotide
  Antisense strand to SEQ ID NO: 180866
ucuaucagggcuuggaagc

SEQ ID NO: 180868 - RNA, 19 nt, Artificial Sequence
  Description of Artificial Sequence: Synthetic oligonucleotide
  Sense strand starting at position 1404 of SEQ ID NO: 2330
aaauauugucacugguggu

SEQ ID NO: 180869 - RNA, 19 nt, Artificial Sequence
  Description of Artificial Sequence: Synthetic oligonucleotide
  Antisense strand to SEQ ID NO: 180868
accaccagugacaauauuu

SEQ ID NO: 180870 - RNA, 19 nt, Artificial Sequence
  Description of Artificial Sequence: Synthetic oligonucleotide
  Sense strand starting at position 1623 of SEQ ID NO: 2330
ggguuucucagugggaugu

SEQ ID NO: 180871 - RNA, 19 nt, Artificial Sequence
  Description of Artificial Sequence: Synthetic oligonucleotide
  Antisense strand to SEQ ID NO: 180870
acaucccacugagaaaccc

SEQ ID NO: 180872 - RNA, 19 nt, Artificial Sequence
  Description of Artificial Sequence: Synthetic oligonucleotide
  Sense strand starting at position 1850 of SEQ ID NO: 2330
gaugacaagucacuuaagu

SEQ ID NO: 180873 - RNA, 19 nt, Artificial Sequence
  Description of Artificial Sequence: Synthetic oligonucleotide
  Antisense strand to SEQ ID NO: 180872
acuuaagugacuugucauc

SEQ ID NO: 180874 - RNA, 19 nt, Artificial Sequence
  Description of Artificial Sequence: Synthetic oligonucleotide
  Sense strand starting at position 1861 of SEQ ID NO: 2330
acuuaagugcugugucuca

SEQ ID NO: 180875 - RNA, 19 nt, Artificial Sequence
  Description of Artificial Sequence: Synthetic oligonucleotide
  Antisense strand to SEQ ID NO: 180874
ugagacacagcacuuaagu

SEQ ID NO: 180876 - RNA, 19 nt, Artificial Sequence
  Description of Artificial Sequence: Synthetic oligonucleotide
  Sense strand starting at position 1863 of SEQ ID NO: 2330
uuaagugcugugucucagu

SEQ ID NO: 180877 - RNA, 19 nt, Artificial Sequence
  Description of Artificial Sequence: Synthetic oligonucleotide
  Antisense strand to SEQ ID NO: 180876
acugagacacagcacuuaa

SEQ ID NO: 180878 - RNA, 19 nt, Artificial Sequence
  Description of Artificial Sequence: Synthetic oligonucleotide
  Sense strand starting at position 1865 of SEQ ID NO: 2330
aagugcugugucucaguuu

SEQ ID NO: 180879 - RNA, 19 nt, Artificial Sequence
  Description of Artificial Sequence: Synthetic oligonucleotide
  Antisense strand to SEQ ID NO: 180878
aaacugagacacagcacuu

SEQ ID NO: 180880 - RNA, 19 nt, Artificial Sequence
  Description of Artificial Sequence: Synthetic oligonucleotide
  Sense strand starting at position 2601 of SEQ ID NO: 2330
ccuauuuggcgcuagaagu

SEQ ID NO: 180881 - RNA, 19 nt, Artificial Sequence
  Description of Artificial Sequence: Synthetic oligonucleotide
  Antisense strand to SEQ ID NO: 180880
acuucuagcgccaaauagg

SEQ ID NO: 180882 - RNA, 19 nt, Artificial Sequence
  Description of Artificial Sequence: Synthetic oligonucleotide
  Sense strand starting at position 3192 of SEQ ID NO: 2330
cccagaugcugcucuuaac

SEQ ID NO: 180883 - RNA, 19 nt, Artificial Sequence
  Description of Artificial Sequence: Synthetic oligonucleotide
  Antisense strand to SEQ ID NO: 180882
guuaagagcagcaucuggg

SEQ ID NO: 180884 - RNA, 19 nt, Artificial Sequence
  Description of Artificial Sequence: Synthetic oligonucleotide
  Sense strand starting at position 3491 of SEQ ID NO: 2330
ggcagaugcucacuugcaa

SEQ ID NO: 180885 - RNA, 19 nt, Artificial Sequence
  Description of Artificial Sequence: Synthetic oligonucleotide
  Antisense strand to SEQ ID NO: 180884
uugcaagugagcaucugcc

SEQ ID NO: 180886 - RNA, 19 nt, Artificial Sequence
  Description of Artificial Sequence: Synthetic oligonucleotide
  Sense strand starting at position 3498 of SEQ ID NO: 2330
gcucacuugcaagaaucau

SEQ ID NO: 180887 - RNA, 19 nt, Artificial Sequence
  Description of Artificial Sequence: Synthetic oligonucleotide
  Antisense strand to SEQ ID NO: 180886
augauucuugcaagugagc

SEQ ID NO: 180888 - RNA, 19 nt, Artificial Sequence
  Description of Artificial Sequence: Synthetic oligonucleotide
  Sense strand starting at position 3524 of SEQ ID NO: 2330
cuaggagucucauauacag

SEQ ID NO: 180889 - RNA, 19 nt, Artificial Sequence
  Description of Artificial Sequence: Synthetic oligonucleotide
  Antisense strand to SEQ ID NO: 180888
cuguauaugagacuccuag

SEQ ID NO: 180890 - RNA, 19 nt, Artificial Sequence
  Description of Artificial Sequence: Synthetic oligonucleotide
  Sense strand starting at position 3567 of SEQ ID NO: 2330
agaaguaagcuaugaugac

SEQ ID NO: 180891 - RNA, 19 nt, Artificial Sequence
  Description of Artificial Sequence: Synthetic oligonucleotide
  Antisense strand to SEQ ID NO: 180890
gucaucauagcuuacuucu

SEQ ID NO: 180892 - RNA, 19 nt, Artificial Sequence
  Description of Artificial Sequence: Synthetic oligonucleotide
  Sense strand starting at position 3568 of SEQ ID NO: 2330
gaaguaagcuaugaugaca

SEQ ID NO: 180893 - RNA, 19 nt, Artificial Sequence
  Description of Artificial Sequence: Synthetic oligonucleotide
  Antisense strand to SEQ ID NO: 180892
ugucaucauagcuuacuuc

SEQ ID NO: 180894 - RNA, 19 nt, Artificial Sequence
  Description of Artificial Sequence: Synthetic oligonucleotide
  Sense strand starting at position 3630 of SEQ ID NO: 2330
ggagcuuccuggaagaggu

SEQ ID NO: 180895 - RNA, 19 nt, Artificial Sequence
  Description of Artificial Sequence: Synthetic oligonucleotide
  Antisense strand to SEQ ID NO: 180894
accucuuccaggaagcucc

SEQ ID NO: 180896 - RNA, 19 nt, Artificial Sequence
  Description of Artificial Sequence: Synthetic oligonucleotide
  Sense strand starting at position 3655 of SEQ ID NO: 2330
agaacugagccuugaaguu

SEQ ID NO: 180897 - RNA, 19 nt, Artificial Sequence
  Description of Artificial Sequence: Synthetic oligonucleotide
  Antisense strand to SEQ ID NO: 180896
aacuucaaggcucaguucu

SEQ ID NO: 180898 - RNA, 19 nt, Artificial Sequence
  Description of Artificial Sequence: Synthetic oligonucleotide
  Sense strand starting at position 3887 of SEQ ID NO: 2330
ccucccuugucacuuguua

SEQ ID NO: 180899 - RNA, 19 nt, Artificial Sequence
  Description of Artificial Sequence: Synthetic oligonucleotide
  Antisense strand to SEQ ID NO: 180898
uaacaagugacaagggagg

SEQ ID NO: 180900 - RNA, 19 nt, Artificial Sequence
  Description of Artificial Sequence: Synthetic oligonucleotide
  Sense strand starting at position 3891 of SEQ ID NO: 2330
ccuugucacuuguuaguca

SEQ ID NO: 180901 - RNA, 19 nt, Artificial Sequence
  Description of Artificial Sequence: Synthetic oligonucleotide
  Antisense strand to SEQ ID NO: 180900
ugacuaacaagugacaagg

SEQ ID NO: 180902 - RNA, 19 nt, Artificial Sequence
  Description of Artificial Sequence: Synthetic oligonucleotide
  Sense strand starting at position 164 of SEQ ID NO: 2329
ucccaaacaugcugaggua

SEQ ID NO: 180903 - RNA, 19 nt, Artificial Sequence
  Description of Artificial Sequence: Synthetic oligonucleotide
  Antisense strand to SEQ ID NO: 180902
uaccucagcauguuuggga

SEQ ID NO: 180904 - RNA, 19 nt, Artificial Sequence
  Description of Artificial Sequence: Synthetic oligonucleotide
  Sense strand starting at position 447 of SEQ ID NO: 2329
uaguaauaggcaggacaga

SEQ ID NO: 180905 - RNA, 19 nt, Artificial Sequence
  Description of Artificial Sequence: Synthetic oligonucleotide
  Antisense strand to SEQ ID NO: 180904
ucuguccugccuauuacua

SEQ ID NO: 180906 - RNA, 19 nt, Artificial Sequence
  Description of Artificial Sequence: Synthetic oligonucleotide
  Sense strand starting at position 678 of SEQ ID NO: 2329
aggcuugagccagaaacgu

SEQ ID NO: 180907 - RNA, 19 nt, Artificial Sequence
  Description of Artificial Sequence: Synthetic oligonucleotide
  Antisense strand to SEQ ID NO: 180906
acguuucuggcucaagccu

SEQ ID NO: 180908 - RNA, 19 nt, Artificial Sequence
  Description of Artificial Sequence: Synthetic oligonucleotide
  Sense strand starting at position 1053 of SEQ ID NO: 2329
cugccuccuggcuaagaaa

SEQ ID NO: 180909 - RNA, 19 nt, Artificial Sequence
  Description of Artificial Sequence: Synthetic oligonucleotide
  Antisense strand to SEQ ID NO: 180908
uuucuuagccaggaggcag

SEQ ID NO: 180910 - RNA, 19 nt, Artificial Sequence
  Description of Artificial Sequence: Synthetic oligonucleotide
  Sense strand starting at position 1101 of SEQ ID NO: 2329
gggaguccugccuaaagca

SEQ ID NO: 180911 - RNA, 19 nt, Artificial Sequence
  Description of Artificial Sequence: Synthetic oligonucleotide
  Antisense strand to SEQ ID NO: 180910
ugcuuuaggcaggacuccc

SEQ ID NO: 180912 - RNA, 19 nt, Artificial Sequence
  Description of Artificial Sequence: Synthetic oligonucleotide
  Sense strand starting at position 1232 of SEQ ID NO: 2329
ccugaaaucuguucccggu

SEQ ID NO: 180913 - RNA, 19 nt, Artificial Sequence
  Description of Artificial Sequence: Synthetic oligonucleotide
  Antisense strand to SEQ ID NO: 180912
accgggaacagauuucagg

SEQ ID NO: 180914 - RNA, 19 nt, Artificial Sequence
  Description of Artificial Sequence: Synthetic oligonucleotide
  Sense strand starting at position 1627 of SEQ ID NO: 2329
ccaagucccggugacuuua

SEQ ID NO: 180915 - RNA, 19 nt, Artificial Sequence
  Description of Artificial Sequence: Synthetic oligonucleotide
  Antisense strand to SEQ ID NO: 180914
uaaagucaccgggacuugg

SEQ ID NO: 180916 - RNA, 19 nt, Artificial Sequence
  Description of Artificial Sequence: Synthetic oligonucleotide
  Sense strand starting at position 1764 of SEQ ID NO: 2329
gguacacauugucuccuau

SEQ ID NO: 180917 - RNA, 19 nt, Artificial Sequence
  Description of Artificial Sequence: Synthetic oligonucleotide
  Antisense strand to SEQ ID NO: 180916
auaggagacaauguguacc

SEQ ID NO: 180918 - RNA, 19 nt, Artificial Sequence
  Description of Artificial Sequence: Synthetic oligonucleotide
  Sense strand starting at position 1835 of SEQ ID NO: 2329
uaagucagaucaugucagu

SEQ ID NO: 180919 - RNA, 19 nt, Artificial Sequence
  Description of Artificial Sequence: Synthetic oligonucleotide
  Antisense strand to SEQ ID NO: 180918
acugacaugaucugacuua

SEQ ID NO: 180920 - RNA, 19 nt, Artificial Sequence
  Description of Artificial Sequence: Synthetic oligonucleotide
  Sense strand starting at position 1848 of SEQ ID NO: 2329
gucaguuccuucuggaaau

SEQ ID NO: 180921 - RNA, 19 nt, Artificial Sequence
  Description of Artificial Sequence: Synthetic oligonucleotide
  Antisense strand to SEQ ID NO: 180920
auuuccagaaggaacugac

SEQ ID NO: 180922 - RNA, 19 nt, Artificial Sequence
  Description of Artificial Sequence: Synthetic oligonucleotide
  Sense strand starting at position 1849 of SEQ ID NO: 2329
ucaguuccuucuggaaauc

SEQ ID NO: 180923 - RNA, 19 nt, Artificial Sequence
  Description of Artificial Sequence: Synthetic oligonucleotide
  Antisense strand to SEQ ID NO: 180922
gauuuccagaaggaacuga

SEQ ID NO: 180924 - RNA, 19 nt, Artificial Sequence
  Description of Artificial Sequence: Synthetic oligonucleotide
  Sense strand starting at position 1859 of SEQ ID NO: 2329
cuggaaaucugguuauauu

SEQ ID NO: 180925 - RNA, 19 nt, Artificial Sequence
  Description of Artificial Sequence: Synthetic oligonucleotide
  Antisense strand to SEQ ID NO: 180924
aauauaaccagauuuccag

SEQ ID NO: 180926 - RNA, 19 nt, Artificial Sequence
  Description of Artificial Sequence: Synthetic oligonucleotide
  Sense strand starting at position 1867 of SEQ ID NO: 2329
cugguuauauuccaucaca

SEQ ID NO: 180927 - RNA, 19 nt, Artificial Sequence
  Description of Artificial Sequence: Synthetic oligonucleotide
  Antisense strand to SEQ ID NO: 180926
ugugauggaauauaaccag

SEQ ID NO: 180928 - RNA, 19 nt, Artificial Sequence
  Description of Artificial Sequence: Synthetic oligonucleotide
  Sense strand starting at position 1890 of SEQ ID NO: 2329
ggagacaucuccuacaauu

SEQ ID NO: 180929 - RNA, 19 nt, Artificial Sequence
  Description of Artificial Sequence: Synthetic oligonucleotide
  Antisense strand to SEQ ID NO: 180928
aauuguaggagaugucucc

SEQ ID NO: 180930 - RNA, 19 nt, Artificial Sequence
  Description of Artificial Sequence: Synthetic oligonucleotide
  Sense strand starting at position 1950 of SEQ ID NO: 2329
ggcgguucccaggacacau

SEQ ID NO: 180931 - RNA, 19 nt, Artificial Sequence
  Description of Artificial Sequence: Synthetic oligonucleotide
  Antisense strand to SEQ ID NO: 180930
auguguccugggaaccgcc

SEQ ID NO: 180932 - RNA, 19 nt, Artificial Sequence
  Description of Artificial Sequence: Synthetic oligonucleotide
  Sense strand starting at position 2060 of SEQ ID NO: 2329
ucugguguccucugagaca

SEQ ID NO: 180933 - RNA, 19 nt, Artificial Sequence
  Description of Artificial Sequence: Synthetic oligonucleotide
  Antisense strand to SEQ ID NO: 180932
ugucucagaggacaccaga

SEQ ID NO: 180934 - RNA, 19 nt, Artificial Sequence
  Description of Artificial Sequence: Synthetic oligonucleotide
  Sense strand starting at position 2159 of SEQ ID NO: 2329
ggaaccagacaucguguua

SEQ ID NO: 180935 - RNA, 19 nt, Artificial Sequence
  Description of Artificial Sequence: Synthetic oligonucleotide
  Antisense strand to SEQ ID NO: 180934
uaacacgaugucugguucc

SEQ ID NO: 180936 - RNA, 19 nt, Artificial Sequence
  Description of Artificial Sequence: Synthetic oligonucleotide
  Sense strand starting at position 2164 of SEQ ID NO: 2329
cagacaucguguuauauug

SEQ ID NO: 180937 - RNA, 19 nt, Artificial Sequence
  Description of Artificial Sequence: Synthetic oligonucleotide
  Antisense strand to SEQ ID NO: 180936
caauauaacacgaugucug

SEQ ID NO: 180938 - RNA, 19 nt, Artificial Sequence
  Description of Artificial Sequence: Synthetic oligonucleotide
  Sense strand starting at position 2171 of SEQ ID NO: 2329
cguguuauauugcccaucu

SEQ ID NO: 180939 - RNA, 19 nt, Artificial Sequence
  Description of Artificial Sequence: Synthetic oligonucleotide
  Antisense strand to SEQ ID NO: 180938
agaugggcaauauaacacg

SEQ ID NO: 180940 - RNA, 19 nt, Artificial Sequence
  Description of Artificial Sequence: Synthetic oligonucleotide
  Sense strand starting at position 2172 of SEQ ID NO: 2329
guguuauauugcccaucug

SEQ ID NO: 180941 - RNA, 19 nt, Artificial Sequence
  Description of Artificial Sequence: Synthetic oligonucleotide
  Antisense strand to SEQ ID NO: 180940
cagaugggcaauauaacac

SEQ ID NO: 180942 - RNA, 19 nt, Artificial Sequence
  Description of Artificial Sequence: Synthetic oligonucleotide
  Sense strand starting at position 2173 of SEQ ID NO: 2329
uguuauauugcccaucugu

SEQ ID NO: 180943 - RNA, 19 nt, Artificial Sequence
  Description of Artificial Sequence: Synthetic oligonucleotide
  Antisense strand to SEQ ID NO: 180942
acagaugggcaauauaaca

SEQ ID NO: 180944 - RNA, 19 nt, Artificial Sequence
  Description of Artificial Sequence: Synthetic oligonucleotide
  Sense strand starting at position 2237 of SEQ ID NO: 2329
ccugcucaugcuuguauuu

SEQ ID NO: 180945 - RNA, 19 nt, Artificial Sequence
  Description of Artificial Sequence: Synthetic oligonucleotide
  Antisense strand to SEQ ID NO: 180944
aaauacaagcaugagcagg

SEQ ID NO: 180946 - RNA, 19 nt, Artificial Sequence
  Description of Artificial Sequence: Synthetic oligonucleotide
  Sense strand starting at position 2246 of SEQ ID NO: 2329
gcuuguauuuccugccuua

SEQ ID NO: 180947 - RNA, 19 nt, Artificial Sequence
  Description of Artificial Sequence: Synthetic oligonucleotide
  Antisense strand to SEQ ID NO: 180946
uaaggcaggaaauacaagc

SEQ ID NO: 180948 - RNA, 19 nt, Artificial Sequence
  Description of Artificial Sequence: Synthetic oligonucleotide
  Sense strand starting at position 2249 of SEQ ID NO: 2329
uguauuuccugccuuagaa

SEQ ID NO: 180949 - RNA, 19 nt, Artificial Sequence
  Description of Artificial Sequence: Synthetic oligonucleotide
  Antisense strand to SEQ ID NO: 180948
uucuaaggcaggaaauaca

SEQ ID NO: 180950 - RNA, 19 nt, Artificial Sequence
  Description of Artificial Sequence: Synthetic oligonucleotide
  Sense strand starting at position 2420 of SEQ ID NO: 2329
ggcucaucuucugccauuu

SEQ ID NO: 180951 - RNA, 19 nt, Artificial Sequence
  Description of Artificial Sequence: Synthetic oligonucleotide
  Antisense strand to SEQ ID NO: 180950
aaauggcagaagaugagcc

SEQ ID NO: 180952 - RNA, 19 nt, Artificial Sequence
  Description of Artificial Sequence: Synthetic oligonucleotide
  Sense strand starting at position 2517 of SEQ ID NO: 2329
caggcucaucuccaagagu

SEQ ID NO: 180953 - RNA, 19 nt, Artificial Sequence
  Description of Artificial Sequence: Synthetic oligonucleotide
  Antisense strand to SEQ ID NO: 180952
acucuuggagaugagccug

SEQ ID NO: 180954 - RNA, 19 nt, Artificial Sequence
  Description of Artificial Sequence: Synthetic oligonucleotide
  Sense strand starting at position 2596 of SEQ ID NO: 2329
gugacuuagaguuguggac

SEQ ID NO: 180955 - RNA, 19 nt, Artificial Sequence
  Description of Artificial Sequence: Synthetic oligonucleotide
  Antisense strand to SEQ ID NO: 180954
guccacaacucuaagucac

SEQ ID NO: 180956 - RNA, 19 nt, Artificial Sequence
  Description of Artificial Sequence: Synthetic oligonucleotide
  Sense strand starting at position 2618 of SEQ ID NO: 2329
ccagcucuccagggaugua

SEQ ID NO: 180957 - RNA, 19 nt, Artificial Sequence
  Description of Artificial Sequence: Synthetic oligonucleotide
  Antisense strand to SEQ ID NO: 180956
uacaucccuggagagcugg

SEQ ID NO: 180958 - RNA, 19 nt, Artificial Sequence
  Description of Artificial Sequence: Synthetic oligonucleotide
  Sense strand starting at position 2846 of SEQ ID NO: 2329
agaggucucuccucagaag

SEQ ID NO: 180959 - RNA, 19 nt, Artificial Sequence
  Description of Artificial Sequence: Synthetic oligonucleotide
  Antisense strand to SEQ ID NO: 180958
cuucugaggagagaccucu

SEQ ID NO: 180960 - RNA, 19 nt, Artificial Sequence
  Description of Artificial Sequence: Synthetic oligonucleotide
  Sense strand starting at position 3026 of SEQ ID NO: 2329
aggucaggguggugagaaa

SEQ ID NO: 180961 - RNA, 19 nt, Artificial Sequence
  Description of Artificial Sequence: Synthetic oligonucleotide
  Antisense strand to SEQ ID NO: 180960
uuucucaccacccugaccu

SEQ ID NO: 180962 - RNA, 19 nt, Artificial Sequence
  Description of Artificial Sequence: Synthetic oligonucleotide
  Sense strand starting at position 3240 of SEQ ID NO: 2329
cgacaauguuaauuaccca

SEQ ID NO: 180963 - RNA, 19 nt, Artificial Sequence
  Description of Artificial Sequence: Synthetic oligonucleotide
  Antisense strand to SEQ ID NO: 180962
uggguaauuaacauugucg

SEQ ID NO: 180964 - RNA, 19 nt, Artificial Sequence
  Description of Artificial Sequence: Synthetic oligonucleotide
  Sense strand starting at position 3258 of SEQ ID NO: 2329
acaaauggaguuugcuuua

SEQ ID NO: 180965 - RNA, 19 nt, Artificial Sequence
  Description of Artificial Sequence: Synthetic oligonucleotide
  Antisense strand to SEQ ID NO: 180964
uaaagcaaacuccauuugu

SEQ ID NO: 180966 - RNA, 19 nt, Artificial Sequence
  Description of Artificial Sequence: Synthetic oligonucleotide
  Sense strand starting at position 3271 of SEQ ID NO: 2329
gcuuuaggccuuugucauu

SEQ ID NO: 180967 - RNA, 19 nt, Artificial Sequence
  Description of Artificial Sequence: Synthetic oligonucleotide
  Antisense strand to SEQ ID NO: 180966
aaugacaaaggccuaaagc

SEQ ID NO: 180968 - RNA, 19 nt, Artificial Sequence
  Description of Artificial Sequence: Synthetic oligonucleotide
  Sense strand starting at position 3276 of SEQ ID NO: 2329
aggccuuugucauuacauc

SEQ ID NO: 180969 - RNA, 19 nt, Artificial Sequence
  Description of Artificial Sequence: Synthetic oligonucleotide
  Antisense strand to SEQ ID NO: 180968
gauguaaugacaaaggccu

SEQ ID NO: 180970 - RNA, 19 nt, Artificial Sequence
  Description of Artificial Sequence: Synthetic oligonucleotide
  Sense strand starting at position 3277 of SEQ ID NO: 2329
ggccuuugucauuacaucu

SEQ ID NO: 180971 - RNA, 19 nt, Artificial Sequence
  Description of Artificial Sequence: Synthetic oligonucleotide
  Antisense strand to SEQ ID NO: 180970
agauguaaugacaaaggcc

SEQ ID NO: 180972 - RNA, 19 nt, Artificial Sequence
  Description of Artificial Sequence: Synthetic oligonucleotide
  Sense strand starting at position 3284 of SEQ ID NO: 2329
gucauuacaucuguacuaa

SEQ ID NO: 180973 - RNA, 19 nt, Artificial Sequence
  Description of Artificial Sequence: Synthetic oligonucleotide
  Antisense strand to SEQ ID NO: 180972
uuaguacagauguaaugac

SEQ ID NO: 180974 - RNA, 19 nt, Artificial Sequence
  Description of Artificial Sequence: Synthetic oligonucleotide
  Sense strand starting at position 3373 of SEQ ID NO: 2329
gcaagccugugucugcaua

SEQ ID NO: 180975 - RNA, 19 nt, Artificial Sequence
  Description of Artificial Sequence: Synthetic oligonucleotide
  Antisense strand to SEQ ID NO: 180974
uaugcagacacaggcuugc

SEQ ID NO: 180976 - RNA, 19 nt, Artificial Sequence
  Description of Artificial Sequence: Synthetic oligonucleotide
  Sense strand starting at position 3552 of SEQ ID NO: 2329
uggccaaguucuggagauu

SEQ ID NO: 180977 - RNA, 19 nt, Artificial Sequence
  Description of Artificial Sequence: Synthetic oligonucleotide
  Antisense strand to SEQ ID NO: 180976
aaucuccagaacuuggcca

SEQ ID NO: 180978 - RNA, 19 nt, Artificial Sequence
  Description of Artificial Sequence: Synthetic oligonucleotide
  Sense strand starting at position 3553 of SEQ ID NO: 2329
ggccaaguucuggagauua

SEQ ID NO: 180979 - RNA, 19 nt, Artificial Sequence
  Description of Artificial Sequence: Synthetic oligonucleotide
  Antisense strand to SEQ ID NO: 180978
uaaucuccagaacuuggcc

SEQ ID NO: 180980 - RNA, 19 nt, Artificial Sequence
  Description of Artificial Sequence: Synthetic oligonucleotide
  Sense strand starting at position 3819 of SEQ ID NO: 2329
acaggaaggcuucgagagu

SEQ ID NO: 180981 - RNA, 19 nt, Artificial Sequence
  Description of Artificial Sequence: Synthetic oligonucleotide
  Antisense strand to SEQ ID NO: 180980
acucucgaagccuuccugu

SEQ ID NO: 180982 - RNA, 19 nt, Artificial Sequence
  Description of Artificial Sequence: Synthetic oligonucleotide
  Sense strand starting at position 3936 of SEQ ID NO: 2333
auaagaacacugugaggua

SEQ ID NO: 180983 - RNA, 19 nt, Artificial Sequence
  Description of Artificial Sequence: Synthetic oligonucleotide
  Antisense strand to SEQ ID NO: 180982
uaccucacaguguucuuau

SEQ ID NO: 180984 - RNA, 19 nt, Artificial Sequence
  Description of Artificial Sequence: Synthetic oligonucleotide
  Sense strand starting at position 3872 of SEQ ID NO: 2333
uuccuuuacugaguccaga

SEQ ID NO: 180985 - RNA, 19 nt, Artificial Sequence
  Description of Artificial Sequence: Synthetic oligonucleotide
  Antisense strand to SEQ ID NO: 180984
ucuggacucaguaaaggaa

SEQ ID NO: 180986 - RNA, 19 nt, Artificial Sequence
  Description of Artificial Sequence: Synthetic oligonucleotide
  Sense strand starting at position 3709 of SEQ ID NO: 2333
gugccaggacuuuaucuuu

SEQ ID NO: 180987 - RNA, 19 nt, Artificial Sequence
  Description of Artificial Sequence: Synthetic oligonucleotide
  Antisense strand to SEQ ID NO: 180986
aaagauaaaguccuggcac

SEQ ID NO: 180988 - RNA, 19 nt, Artificial Sequence
  Description of Artificial Sequence: Synthetic oligonucleotide
  Sense strand starting at position 3638 of SEQ ID NO: 2333
guagucauucuuugauaug

SEQ ID NO: 180989 - RNA, 19 nt, Artificial Sequence
  Description of Artificial Sequence: Synthetic oligonucleotide
  Antisense strand to SEQ ID NO: 180988
cauaucaaagaaugacuac

SEQ ID NO: 180990 - RNA, 19 nt, Artificial Sequence
  Description of Artificial Sequence: Synthetic oligonucleotide
  Sense strand starting at position 3637 of SEQ ID NO: 2333
gguagucauucuuugauau

SEQ ID NO: 180991 - RNA, 19 nt, Artificial Sequence
  Description of Artificial Sequence: Synthetic oligonucleotide
  Antisense strand to SEQ ID NO: 180990
auaucaaagaaugacuacc

SEQ ID NO: 180992 - RNA, 19 nt, Artificial Sequence
  Description of Artificial Sequence: Synthetic oligonucleotide
  Sense strand starting at position 3550 of SEQ ID NO: 2333
ggagguugguuaagagauu

SEQ ID NO: 180993 - RNA, 19 nt, Artificial Sequence
  Description of Artificial Sequence: Synthetic oligonucleotide
  Antisense strand to SEQ ID NO: 180992
aaucucuuaaccaaccucc

SEQ ID NO: 180994 - RNA, 19 nt, Artificial Sequence
  Description of Artificial Sequence: Synthetic oligonucleotide
  Sense strand starting at position 3500 of SEQ ID NO: 2333
gcacauuugucuuaggaag

SEQ ID NO: 180995 - RNA, 19 nt, Artificial Sequence
  Description of Artificial Sequence: Synthetic oligonucleotide
  Antisense strand to SEQ ID NO: 180994
cuuccuaagacaaaugugc

SEQ ID NO: 180996 - RNA, 19 nt, Artificial Sequence
  Description of Artificial Sequence: Synthetic oligonucleotide
  Sense strand starting at position 3443 of SEQ ID NO: 2333
ugguccugcagaggauaau

SEQ ID NO: 180997 - RNA, 19 nt, Artificial Sequence
  Description of Artificial Sequence: Synthetic oligonucleotide
  Antisense strand to SEQ ID NO: 180996
auuauccucugcaggacca

SEQ ID NO: 180998 - RNA, 19 nt, Artificial Sequence
  Description of Artificial Sequence: Synthetic oligonucleotide
  Sense strand starting at position 3441 of SEQ ID NO: 2333
cuugguccugcagaggaua

SEQ ID NO: 180999 - RNA, 19 nt, Artificial Sequence
  Description of Artificial Sequence: Synthetic oligonucleotide
  Antisense strand to SEQ ID NO: 180998
uauccucugcaggaccaag

SEQ ID NO: 181000 - RNA, 19 nt, Artificial Sequence
  Description of Artificial Sequence: Synthetic oligonucleotide
  Sense strand starting at position 3013 of SEQ ID NO: 2333
gggagcucauauguggaga

SEQ ID NO: 181001 - RNA, 19 nt, Artificial Sequence
  Description of Artificial Sequence: Synthetic oligonucleotide
  Antisense strand to SEQ ID NO: 181000
ucuccacauaugagcuccc

SEQ ID NO: 181002 - RNA, 19 nt, Artificial Sequence
  Description of Artificial Sequence: Synthetic oligonucleotide
  Sense strand starting at position 2970 of SEQ ID NO: 2333
aaggucucugcagauggau

SEQ ID NO: 181003 - RNA, 19 nt, Artificial Sequence
  Description of Artificial Sequence: Synthetic oligonucleotide
  Antisense strand to SEQ ID NO: 181002
auccaucugcagagaccuu

SEQ ID NO: 181004 - RNA, 19 nt, Artificial Sequence
  Description of Artificial Sequence: Synthetic oligonucleotide
  Sense strand starting at position 2966 of SEQ ID NO: 2333
gaggaaggucucugcagau

SEQ ID NO: 181005 - RNA, 19 nt, Artificial Sequence
  Description of Artificial Sequence: Synthetic oligonucleotide
  Antisense strand to SEQ ID NO: 181004
aucugcagagaccuuccuc

SEQ ID NO: 181006 - RNA, 19 nt, Artificial Sequence
  Description of Artificial Sequence: Synthetic oligonucleotide
  Sense strand starting at position 2965 of SEQ ID NO: 2333
ugaggaaggucucugcaga

SEQ ID NO: 181007 - RNA, 19 nt, Artificial Sequence
  Description of Artificial Sequence: Synthetic oligonucleotide
  Antisense strand to SEQ ID NO: 181006
ucugcagagaccuuccuca

SEQ ID NO: 181008 - RNA, 19 nt, Artificial Sequence
  Description of Artificial Sequence: Synthetic oligonucleotide
  Sense strand starting at position 2840 of SEQ ID NO: 2333
uagccuggucuggaaugaa

SEQ ID NO: 181009 - RNA, 19 nt, Artificial Sequence
  Description of Artificial Sequence: Synthetic oligonucleotide
  Antisense strand to SEQ ID NO: 181008
uucauuccagaccaggcua

SEQ ID NO: 181010 - RNA, 19 nt, Artificial Sequence
  Description of Artificial Sequence: Synthetic oligonucleotide
  Sense strand starting at position 2634 of SEQ ID NO: 2333
uggagaguuucgaggaaag

SEQ ID NO: 181011 - RNA, 19 nt, Artificial Sequence
  Description of Artificial Sequence: Synthetic oligonucleotide
  Antisense strand to SEQ ID NO: 181010
cuuuccucgaaacucucca

SEQ ID NO: 181012 - RNA, 19 nt, Artificial Sequence
  Description of Artificial Sequence: Synthetic oligonucleotide
  Sense strand starting at position 2606 of SEQ ID NO: 2333
gcuauuuccucagugguau

SEQ ID NO: 181013 - RNA, 19 nt, Artificial Sequence
  Description of Artificial Sequence: Synthetic oligonucleotide
  Antisense strand to SEQ ID NO: 181012
auaccacugaggaaauagc

SEQ ID NO: 181014 - RNA, 19 nt, Artificial Sequence
  Description of Artificial Sequence: Synthetic oligonucleotide
  Sense strand starting at position 2604 of SEQ ID NO: 2333
uggcuauuuccucaguggu

SEQ ID NO: 181015 - RNA, 19 nt, Artificial Sequence
  Description of Artificial Sequence: Synthetic oligonucleotide
  Antisense strand to SEQ ID NO: 181014
accacugaggaaauagcca

SEQ ID NO: 181016 - RNA, 19 nt, Artificial Sequence
  Description of Artificial Sequence: Synthetic oligonucleotide
  Sense strand starting at position 2441 of SEQ ID NO: 2333
aggcauucccauggaagga

SEQ ID NO: 181017 - RNA, 19 nt, Artificial Sequence
  Description of Artificial Sequence: Synthetic oligonucleotide
  Antisense strand to SEQ ID NO: 181016
uccuuccaugggaaugccu

SEQ ID NO: 181018 - RNA, 19 nt, Artificial Sequence
  Description of Artificial Sequence: Synthetic oligonucleotide
  Sense strand starting at position 2326 of SEQ ID NO: 2333
auaguugagauguaagagu

SEQ ID NO: 181019 - RNA, 19 nt, Artificial Sequence
  Description of Artificial Sequence: Synthetic oligonucleotide
  Antisense strand to SEQ ID NO: 181018
acucuuacaucucaacuau

SEQ ID NO: 181020 - RNA, 19 nt, Artificial Sequence
  Description of Artificial Sequence: Synthetic oligonucleotide
  Sense strand starting at position 1624 of SEQ ID NO: 2333
agguucucagcuuaagaag

SEQ ID NO: 181021 - RNA, 19 nt, Artificial Sequence
  Description of Artificial Sequence: Synthetic oligonucleotide
  Antisense strand to SEQ ID NO: 181020
cuucuuaagcugagaaccu

SEQ ID NO: 181022 - RNA, 19 nt, Artificial Sequence
  Description of Artificial Sequence: Synthetic oligonucleotide
  Sense strand starting at position 1585 of SEQ ID NO: 2333
caguuaagugguggaguca

SEQ ID NO: 181023 - RNA, 19 nt, Artificial Sequence
  Description of Artificial Sequence: Synthetic oligonucleotide
  Antisense strand to SEQ ID NO: 181022
ugacuccaccacuuaacug

SEQ ID NO: 181024 - RNA, 19 nt, Artificial Sequence
  Description of Artificial Sequence: Synthetic oligonucleotide
  Sense strand starting at position 1513 of SEQ ID NO: 2333
gauauaguucgcgcaguuu

SEQ ID NO: 181025 - RNA, 19 nt, Artificial Sequence
  Description of Artificial Sequence: Synthetic oligonucleotide
  Antisense strand to SEQ ID NO: 181024
aaacugcgcgaacuauauc

SEQ ID NO: 181026 - RNA, 19 nt, Artificial Sequence
  Description of Artificial Sequence: Synthetic oligonucleotide
  Sense strand starting at position 1509 of SEQ ID NO: 2333
uggugauauaguucgcgca

SEQ ID NO: 181027 - RNA, 19 nt, Artificial Sequence
  Description of Artificial Sequence: Synthetic oligonucleotide
  Antisense strand to SEQ ID NO: 181026
ugcgcgaacuauaucacca

SEQ ID NO: 181028 - RNA, 19 nt, Artificial Sequence
  Description of Artificial Sequence: Synthetic oligonucleotide
  Sense strand starting at position 1388 of SEQ ID NO: 2333
uguaauggucucuaaugau

SEQ ID NO: 181029 - RNA, 19 nt, Artificial Sequence
  Description of Artificial Sequence: Synthetic oligonucleotide
  Antisense strand to SEQ ID NO: 181028
aucauuagagaccauuaca

SEQ ID NO: 181030 - RNA, 19 nt, Artificial Sequence
  Description of Artificial Sequence: Synthetic oligonucleotide
  Sense strand starting at position 1387 of SEQ ID NO: 2333
guguaauggucucuaauga

SEQ ID NO: 181031 - RNA, 19 nt, Artificial Sequence
  Description of Artificial Sequence: Synthetic oligonucleotide
  Antisense strand to SEQ ID NO: 181030
ucauuagagaccauuacac

SEQ ID NO: 181032 - RNA, 19 nt, Artificial Sequence
  Description of Artificial Sequence: Synthetic oligonucleotide
  Sense strand starting at position 1378 of SEQ ID NO: 2333
gggagugugguguaauggu

SEQ ID NO: 181033 - RNA, 19 nt, Artificial Sequence
  Description of Artificial Sequence: Synthetic oligonucleotide
  Antisense strand to SEQ ID NO: 181032
accauuacaccacacuccc

SEQ ID NO: 181034 - RNA, 19 nt, Artificial Sequence
  Description of Artificial Sequence: Synthetic oligonucleotide
  Sense strand starting at position 861 of SEQ ID NO: 2333
ugucuugauucuuuaagac

SEQ ID NO: 181035 - RNA, 19 nt, Artificial Sequence
  Description of Artificial Sequence: Synthetic oligonucleotide
  Antisense strand to SEQ ID NO: 181034
gucuuaaagaaucaagaca

SEQ ID NO: 181036 - RNA, 19 nt, Artificial Sequence
  Description of Artificial Sequence: Synthetic oligonucleotide
  Sense strand starting at position 860 of SEQ ID NO: 2333
uugucuugauucuuuaaga

SEQ ID NO: 181037 - RNA, 19 nt, Artificial Sequence
  Description of Artificial Sequence: Synthetic oligonucleotide
  Antisense strand to SEQ ID NO: 181036
ucuuaaagaaucaagacaa

SEQ ID NO: 181038 - RNA, 19 nt, Artificial Sequence
  Description of Artificial Sequence: Synthetic oligonucleotide
  Sense strand starting at position 811 of SEQ ID NO: 2333
ccacuacagcuguaguaua

SEQ ID NO: 181039 - RNA, 19 nt, Artificial Sequence
  Description of Artificial Sequence: Synthetic oligonucleotide
  Antisense strand to SEQ ID NO: 181038
uauacuacagcuguagugg

SEQ ID NO: 181040 - RNA, 19 nt, Artificial Sequence
  Description of Artificial Sequence: Synthetic oligonucleotide
  Sense strand starting at position 788 of SEQ ID NO: 2333
uccuuaaaguguuccaaca

SEQ ID NO: 181041 - RNA, 19 nt, Artificial Sequence
  Description of Artificial Sequence: Synthetic oligonucleotide
  Antisense strand to SEQ ID NO: 181040
uguuggaacacuuuaagga

SEQ ID NO: 181042 - RNA, 19 nt, Artificial Sequence
  Description of Artificial Sequence: Synthetic oligonucleotide
  Sense strand starting at position 688 of SEQ ID NO: 2333
uauucuguggagugcaaau

SEQ ID NO: 181043 - RNA, 19 nt, Artificial Sequence
  Description of Artificial Sequence: Synthetic oligonucleotide
  Antisense strand to SEQ ID NO: 181042
auuugcacuccacagaaua

SEQ ID NO: 181044 - RNA, 19 nt, Artificial Sequence
  Description of Artificial Sequence: Synthetic oligonucleotide
  Sense strand starting at position 592 of SEQ ID NO: 2333
auccuagcuguugaagaaa

SEQ ID NO: 181045 - RNA, 19 nt, Artificial Sequence
  Description of Artificial Sequence: Synthetic oligonucleotide
  Antisense strand to SEQ ID NO: 181044
uuucuucaacagcuaggau

SEQ ID NO: 181046 - RNA, 19 nt, Artificial Sequence
  Description of Artificial Sequence: Synthetic oligonucleotide
  Sense strand starting at position 537 of SEQ ID NO: 2333
guagauuacuaagugcuuu

SEQ ID NO: 181047 - RNA, 19 nt, Artificial Sequence
  Description of Artificial Sequence: Synthetic oligonucleotide
  Antisense strand to SEQ ID NO: 181046
aaagcacuuaguaaucuac

SEQ ID NO: 181048 - RNA, 19 nt, Artificial Sequence
  Description of Artificial Sequence: Synthetic oligonucleotide
  Sense strand starting at position 492 of SEQ ID NO: 2333
gacaaagucgcacaaaugu

SEQ ID NO: 181049 - RNA, 19 nt, Artificial Sequence
  Description of Artificial Sequence: Synthetic oligonucleotide
  Antisense strand to SEQ ID NO: 181048
acauuugugcgacuuuguc

SEQ ID NO: 181050 - RNA, 19 nt, Artificial Sequence
  Description of Artificial Sequence: Synthetic oligonucleotide
  Sense strand starting at position 452 of SEQ ID NO: 2333
aaggaaacucgauguuaug

SEQ ID NO: 181051 - RNA, 19 nt, Artificial Sequence
  Description of Artificial Sequence: Synthetic oligonucleotide
  Antisense strand to SEQ ID NO: 181050
cauaacaucgaguuuccuu

SEQ ID NO: 181052 - RNA, 19 nt, Artificial Sequence
  Description of Artificial Sequence: Synthetic oligonucleotide
  Sense strand starting at position 323 of SEQ ID NO: 2333
uggccuguucugcaaagaa

SEQ ID NO: 181053 - RNA, 19 nt, Artificial Sequence
  Description of Artificial Sequence: Synthetic oligonucleotide
  Antisense strand to SEQ ID NO: 181052
uucuuugcagaacaggcca

SEQ ID NO: 181054 - RNA, 19 nt, Artificial Sequence
  Description of Artificial Sequence: Synthetic oligonucleotide
  Sense strand starting at position 117 of SEQ ID NO: 2333
aucauaauggcuuguauca

SEQ ID NO: 181055 - RNA, 19 nt, Artificial Sequence
  Description of Artificial Sequence: Synthetic oligonucleotide
  Antisense strand to SEQ ID NO: 181054
ugauacaagccauuaugau

SEQ ID NO: 181056 - RNA, 19 nt, Artificial Sequence
  Description of Artificial Sequence: Synthetic oligonucleotide
  Sense strand starting at position 115 of SEQ ID NO: 2333
ccaucauaauggcuuguau

SEQ ID NO: 181057 - RNA, 19 nt, Artificial Sequence
  Description of Artificial Sequence: Synthetic oligonucleotide
  Antisense strand to SEQ ID NO: 181056
auacaagccauuaugaugg

SEQ ID NO: 181058 - RNA, 19 nt, Artificial Sequence
  Description of Artificial Sequence: Synthetic oligonucleotide
  Sense strand starting at position 43 of SEQ ID NO: 2333
aguaaacuauccuuagucu

SEQ ID NO: 181059 - RNA, 19 nt, Artificial Sequence
  Description of Artificial Sequence: Synthetic oligonucleotide
  Antisense strand to SEQ ID NO: 181058
agacuaaggauaguuuacu

SEQ ID NO: 181060 - RNA, 19 nt, Artificial Sequence
  Description of Artificial Sequence: Synthetic oligonucleotide
  Sense strand starting at position 41 of SEQ ID NO: 2333
agaguaaacuauccuuagu

SEQ ID NO: 181061 - RNA, 19 nt, Artificial Sequence
  Description of Artificial Sequence: Synthetic oligonucleotide
  Antisense strand to SEQ ID NO: 181060
acuaaggauaguuuacucu

SEQ ID NO: 181062 - RNA, 19 nt, Artificial Sequence
  Description of Artificial Sequence: Synthetic oligonucleotide
  Sense strand starting at position 3794 of SEQ ID NO: 2334
gggcaugguaauuaauuau

SEQ ID NO: 181063 - RNA, 19 nt, Artificial Sequence
  Description of Artificial Sequence: Synthetic oligonucleotide
  Antisense strand to SEQ ID NO: 181062
auaauuaauuaccaugccc

SEQ ID NO: 181064 - RNA, 19 nt, Artificial Sequence
  Description of Artificial Sequence: Synthetic oligonucleotide
  Sense strand starting at position 3758 of SEQ ID NO: 2334
gguaguauaccaugaauac

SEQ ID NO: 181065 - RNA, 19 nt, Artificial Sequence
  Description of Artificial Sequence: Synthetic oligonucleotide
  Antisense strand to SEQ ID NO: 181064
guauucaugguauacuacc

SEQ ID NO: 181066 - RNA, 19 nt, Artificial Sequence
  Description of Artificial Sequence: Synthetic oligonucleotide
  Sense strand starting at position 3748 of SEQ ID NO: 2334
cuguauuggagguaguaua

SEQ ID NO: 181067 - RNA, 19 nt, Artificial Sequence
  Description of Artificial Sequence: Synthetic oligonucleotide
  Antisense strand to SEQ ID NO: 181066
uauacuaccuccaauacag

SEQ ID NO: 181068 - RNA, 19 nt, Artificial Sequence
  Description of Artificial Sequence: Synthetic oligonucleotide
  Sense strand starting at position 3563 of SEQ ID NO: 2334
gcaguaacucucuaggacu

SEQ ID NO: 181069 - RNA, 19 nt, Artificial Sequence
  Description of Artificial Sequence: Synthetic oligonucleotide
  Antisense strand to SEQ ID NO: 181068
aguccuagagaguuacugc

SEQ ID NO: 181070 - RNA, 19 nt, Artificial Sequence
  Description of Artificial Sequence: Synthetic oligonucleotide
  Sense strand starting at position 3499 of SEQ ID NO: 2334
guacauguugaacacuuaa

SEQ ID NO: 181071 - RNA, 19 nt, Artificial Sequence
  Description of Artificial Sequence: Synthetic oligonucleotide
  Antisense strand to SEQ ID NO: 181070
uuaaguguucaacauguac

SEQ ID NO: 181072 - RNA, 19 nt, Artificial Sequence
  Description of Artificial Sequence: Synthetic oligonucleotide
  Sense strand starting at position 3391 of SEQ ID NO: 2334
ggacuaggugcuugagaaa

SEQ ID NO: 181073 - RNA, 19 nt, Artificial Sequence
  Description of Artificial Sequence: Synthetic oligonucleotide
  Antisense strand to SEQ ID NO: 181072
uuucucaagcaccuagucc

SEQ ID NO: 181074 - RNA, 19 nt, Artificial Sequence
  Description of Artificial Sequence: Synthetic oligonucleotide
  Sense strand starting at position 3390 of SEQ ID NO: 2334
uggacuaggugcuugagaa

SEQ ID NO: 181075 - RNA, 19 nt, Artificial Sequence
  Description of Artificial Sequence: Synthetic oligonucleotide
  Antisense strand to SEQ ID NO: 181074
uucucaagcaccuagucca

SEQ ID NO: 181076 - RNA, 19 nt, Artificial Sequence
  Description of Artificial Sequence: Synthetic oligonucleotide
  Sense strand starting at position 3286 of SEQ ID NO: 2334
gugauaaauguacauguua

SEQ ID NO: 181077 - RNA, 19 nt, Artificial Sequence
  Description of Artificial Sequence: Synthetic oligonucleotide
  Antisense strand to SEQ ID NO: 181076
uaacauguacauuuaucac

SEQ ID NO: 181078 - RNA, 19 nt, Artificial Sequence
  Description of Artificial Sequence: Synthetic oligonucleotide
  Sense strand starting at position 3284 of SEQ ID NO: 2334
augugauaaauguacaugu

SEQ ID NO: 181079 - RNA, 19 nt, Artificial Sequence
  Description of Artificial Sequence: Synthetic oligonucleotide
  Antisense strand to SEQ ID NO: 181078
acauguacauuuaucacau

SEQ ID NO: 181080 - RNA, 19 nt, Artificial Sequence
  Description of Artificial Sequence: Synthetic oligonucleotide
  Sense strand starting at position 3271 of SEQ ID NO: 2334
ggaaaucugggcgauguga

SEQ ID NO: 181081 - RNA, 19 nt, Artificial Sequence
  Description of Artificial Sequence: Synthetic oligonucleotide
  Antisense strand to SEQ ID NO: 181080
ucacaucgcccagauuucc

SEQ ID NO: 181082 - RNA, 19 nt, Artificial Sequence
  Description of Artificial Sequence: Synthetic oligonucleotide
  Sense strand starting at position 3268 of SEQ ID NO: 2334
cuaggaaaucugggcgaug

SEQ ID NO: 181083 - RNA, 19 nt, Artificial Sequence
  Description of Artificial Sequence: Synthetic oligonucleotide
  Antisense strand to SEQ ID NO: 181082
caucgcccagauuuccuag

SEQ ID NO: 181084 - RNA, 19 nt, Artificial Sequence
  Description of Artificial Sequence: Synthetic oligonucleotide
  Sense strand starting at position 3259 of SEQ ID NO: 2334
cuguaaugucuaggaaauc

SEQ ID NO: 181085 - RNA, 19 nt, Artificial Sequence
  Description of Artificial Sequence: Synthetic oligonucleotide
  Antisense strand to SEQ ID NO: 181084
gauuuccuagacauuacag

SEQ ID NO: 181086 - RNA, 19 nt, Artificial Sequence
  Description of Artificial Sequence: Synthetic oligonucleotide
  Sense strand starting at position 3180 of SEQ ID NO: 2334
gcagcuauugaggaccaua

SEQ ID NO: 181087 - RNA, 19 nt, Artificial Sequence
  Description of Artificial Sequence: Synthetic oligonucleotide
  Antisense strand to SEQ ID NO: 181086
uaugguccucaauagcugc

SEQ ID NO: 181088 - RNA, 19 nt, Artificial Sequence
  Description of Artificial Sequence: Synthetic oligonucleotide
  Sense strand starting at position 3029 of SEQ ID NO: 2334
aaucgaagacgagguuaaa

SEQ ID NO: 181089 - RNA, 19 nt, Artificial Sequence
  Description of Artificial Sequence: Synthetic oligonucleotide
  Antisense strand to SEQ ID NO: 181088
uuuaaccucgucuucgauu

SEQ ID NO: 181090 - RNA, 19 nt, Artificial Sequence
  Description of Artificial Sequence: Synthetic oligonucleotide
  Sense strand starting at position 2722 of SEQ ID NO: 2334
uggugagauggguagcauu

SEQ ID NO: 181091 - RNA, 19 nt, Artificial Sequence
  Description of Artificial Sequence: Synthetic oligonucleotide
  Antisense strand to SEQ ID NO: 181090
aaugcuacccaucucacca

SEQ ID NO: 181092 - RNA, 19 nt, Artificial Sequence
  Description of Artificial Sequence: Synthetic oligonucleotide
  Sense strand starting at position 2662 of SEQ ID NO: 2334
ugccucgugcuuuagauuu

SEQ ID NO: 181093 - RNA, 19 nt, Artificial Sequence
  Description of Artificial Sequence: Synthetic oligonucleotide
  Antisense strand to SEQ ID NO: 181092
aaaucuaaagcacgaggca

SEQ ID NO: 181094 - RNA, 19 nt, Artificial Sequence
  Description of Artificial Sequence: Synthetic oligonucleotide
  Sense strand starting at position 2661 of SEQ ID NO: 2334
uugccucgugcuuuagauu

SEQ ID NO: 181095 - RNA, 19 nt, Artificial Sequence
  Description of Artificial Sequence: Synthetic oligonucleotide
  Antisense strand to SEQ ID NO: 181094
aaucuaaagcacgaggcaa

SEQ ID NO: 181096 - RNA, 19 nt, Artificial Sequence
  Description of Artificial Sequence: Synthetic oligonucleotide
  Sense strand starting at position 2659 of SEQ ID NO: 2334
guuugccucgugcuuuaga

SEQ ID NO: 181097 - RNA, 19 nt, Artificial Sequence
  Description of Artificial Sequence: Synthetic oligonucleotide
  Antisense strand to SEQ ID NO: 181096
ucuaaagcacgaggcaaac

SEQ ID NO: 181098 - RNA, 19 nt, Artificial Sequence
  Description of Artificial Sequence: Synthetic oligonucleotide
  Sense strand starting at position 2531 of SEQ ID NO: 2334
cgagauuugcagugcagga

SEQ ID NO: 181099 - RNA, 19 nt, Artificial Sequence
  Description of Artificial Sequence: Synthetic oligonucleotide
  Antisense strand to SEQ ID NO: 181098
uccugcacugcaaaucucg

SEQ ID NO: 181100 - RNA, 19 nt, Artificial Sequence
  Description of Artificial Sequence: Synthetic oligonucleotide
  Sense strand starting at position 1863 of SEQ ID NO: 2334
gcagaaagucccugaagag

SEQ ID NO: 181101 - RNA, 19 nt, Artificial Sequence
  Description of Artificial Sequence: Synthetic oligonucleotide
  Antisense strand to SEQ ID NO: 181100
cucuucagggacuuucugc

SEQ ID NO: 181102 - RNA, 19 nt, Artificial Sequence
  Description of Artificial Sequence: Synthetic oligonucleotide
  Sense strand starting at position 1862 of SEQ ID NO: 2334
agcagaaagucccugaaga

SEQ ID NO: 181103 - RNA, 19 nt, Artificial Sequence
  Description of Artificial Sequence: Synthetic oligonucleotide
  Antisense strand to SEQ ID NO: 181102
ucuucagggacuuucugcu

SEQ ID NO: 181104 - RNA, 19 nt, Artificial Sequence
  Description of Artificial Sequence: Synthetic oligonucleotide
  Sense strand starting at position 1570 of SEQ ID NO: 2334
gggucacacagccagaauu

SEQ ID NO: 181105 - RNA, 19 nt, Artificial Sequence
  Description of Artificial Sequence: Synthetic oligonucleotide
  Antisense strand to SEQ ID NO: 181104
aauucuggcugugugaccc

SEQ ID NO: 181106 - RNA, 19 nt, Artificial Sequence
  Description of Artificial Sequence: Synthetic oligonucleotide
  Sense strand starting at position 1238 of SEQ ID NO: 2334
gcgcuaauuucuuugaauu

SEQ ID NO: 181107 - RNA, 19 nt, Artificial Sequence
  Description of Artificial Sequence: Synthetic oligonucleotide
  Antisense strand to SEQ ID NO: 181106
aauucaaagaaauuagcgc

SEQ ID NO: 181108 - RNA, 19 nt, Artificial Sequence
  Description of Artificial Sequence: Synthetic oligonucleotide
  Sense strand starting at position 1237 of SEQ ID NO: 2334
agcgcuaauuucuuugaau

SEQ ID NO: 181109 - RNA, 19 nt, Artificial Sequence
  Description of Artificial Sequence: Synthetic oligonucleotide
  Antisense strand to SEQ ID NO: 181108
auucaaagaaauuagcgcu

SEQ ID NO: 181110 - RNA, 19 nt, Artificial Sequence
  Description of Artificial Sequence: Synthetic oligonucleotide
  Sense strand starting at position 1226 of SEQ ID NO: 2334
uuguuucuuccagcgcuaa

SEQ ID NO: 181111 - RNA, 19 nt, Artificial Sequence
  Description of Artificial Sequence: Synthetic oligonucleotide
  Antisense strand to SEQ ID NO: 181110
uuagcgcuggaagaaacaa

SEQ ID NO: 181112 - RNA, 19 nt, Artificial Sequence
  Description of Artificial Sequence: Synthetic oligonucleotide
  Sense strand starting at position 892 of SEQ ID NO: 2334
uguuuaaugaugugaugau

SEQ ID NO: 181113 - RNA, 19 nt, Artificial Sequence
  Description of Artificial Sequence: Synthetic oligonucleotide
  Antisense strand to SEQ ID NO: 181112
aucaucacaucauuaaaca

SEQ ID NO: 181114 - RNA, 19 nt, Artificial Sequence
  Description of Artificial Sequence: Synthetic oligonucleotide
  Sense strand starting at position 880 of SEQ ID NO: 2334
gagagcaggagauguuuaa

SEQ ID NO: 181115 - RNA, 19 nt, Artificial Sequence
  Description of Artificial Sequence: Synthetic oligonucleotide
  Antisense strand to SEQ ID NO: 181114
uuaaacaucuccugcucuc

SEQ ID NO: 181116 - RNA, 19 nt, Artificial Sequence
  Description of Artificial Sequence: Synthetic oligonucleotide
  Sense strand starting at position 828 of SEQ ID NO: 2334
cuacaucugacacggagaa

SEQ ID NO: 181117 - RNA, 19 nt, Artificial Sequence
  Description of Artificial Sequence: Synthetic oligonucleotide
  Antisense strand to SEQ ID NO: 181116
uucuccgugucagauguag

SEQ ID NO: 181118 - RNA, 19 nt, Artificial Sequence
  Description of Artificial Sequence: Synthetic oligonucleotide
  Sense strand starting at position 819 of SEQ ID NO: 2334
uuauguacucuacaucuga

SEQ ID NO: 181119 - RNA, 19 nt, Artificial Sequence
  Description of Artificial Sequence: Synthetic oligonucleotide
  Antisense strand to SEQ ID NO: 181118
ucagauguagaguacauaa

SEQ ID NO: 181120 - RNA, 19 nt, Artificial Sequence
  Description of Artificial Sequence: Synthetic oligonucleotide
  Sense strand starting at position 727 of SEQ ID NO: 2334
agaggcucaguguaaauca

SEQ ID NO: 181121 - RNA, 19 nt, Artificial Sequence
  Description of Artificial Sequence: Synthetic oligonucleotide
  Antisense strand to SEQ ID NO: 181120
ugauuuacacugagccucu

SEQ ID NO: 181122 - RNA, 19 nt, Artificial Sequence
  Description of Artificial Sequence: Synthetic oligonucleotide
  Sense strand starting at position 722 of SEQ ID NO: 2334
aucugagaggcucagugua

SEQ ID NO: 181123 - RNA, 19 nt, Artificial Sequence
  Description of Artificial Sequence: Synthetic oligonucleotide
  Antisense strand to SEQ ID NO: 181122
uacacugagccucucagau

SEQ ID NO: 181124 - RNA, 19 nt, Artificial Sequence
  Description of Artificial Sequence: Synthetic oligonucleotide
  Sense strand starting at position 702 of SEQ ID NO: 2334
aaacuugaccuggguacua

SEQ ID NO: 181125 - RNA, 19 nt, Artificial Sequence
  Description of Artificial Sequence: Synthetic oligonucleotide
  Antisense strand to SEQ ID NO: 181124
uaguacccaggucaaguuu

SEQ ID NO: 181126 - RNA, 19 nt, Artificial Sequence
  Description of Artificial Sequence: Synthetic oligonucleotide
  Sense strand starting at position 663 of SEQ ID NO: 2334
guugaauuccugcaaaggu

SEQ ID NO: 181127 - RNA, 19 nt, Artificial Sequence
  Description of Artificial Sequence: Synthetic oligonucleotide
  Antisense strand to SEQ ID NO: 181126
accuuugcaggaauucaac

SEQ ID NO: 181128 - RNA, 19 nt, Artificial Sequence
  Description of Artificial Sequence: Synthetic oligonucleotide
  Sense strand starting at position 584 of SEQ ID NO: 2334
agcaaagcauuuguguaga

SEQ ID NO: 181129 - RNA, 19 nt, Artificial Sequence
  Description of Artificial Sequence: Synthetic oligonucleotide
  Antisense strand to SEQ ID NO: 181128
ucuacacaaaugcuuugcu

SEQ ID NO: 181130 - RNA, 19 nt, Artificial Sequence
  Description of Artificial Sequence: Synthetic oligonucleotide
  Sense strand starting at position 503 of SEQ ID NO: 2334
guauauugguuaucagaua

SEQ ID NO: 181131 - RNA, 19 nt, Artificial Sequence
  Description of Artificial Sequence: Synthetic oligonucleotide
  Antisense strand to SEQ ID NO: 181130
uaucugauaaccaauauac

SEQ ID NO: 181132 - RNA, 19 nt, Artificial Sequence
  Description of Artificial Sequence: Synthetic oligonucleotide
  Sense strand starting at position 501 of SEQ ID NO: 2334
cuguauauugguuaucaga

SEQ ID NO: 181133 - RNA, 19 nt, Artificial Sequence
  Description of Artificial Sequence: Synthetic oligonucleotide
  Antisense strand to SEQ ID NO: 181132
ucugauaaccaauauacag

SEQ ID NO: 181134 - RNA, 19 nt, Artificial Sequence
  Description of Artificial Sequence: Synthetic oligonucleotide
  Sense strand starting at position 445 of SEQ ID NO: 2334
acagguuugagugaagguu

SEQ ID NO: 181135 - RNA, 19 nt, Artificial Sequence
  Description of Artificial Sequence: Synthetic oligonucleotide
  Antisense strand to SEQ ID NO: 181134
aaccuucacucaaaccugu

SEQ ID NO: 181136 - RNA, 19 nt, Artificial Sequence
  Description of Artificial Sequence: Synthetic oligonucleotide
  Sense strand starting at position 440 of SEQ ID NO: 2334
aguaaacagguuugaguga

SEQ ID NO: 181137 - RNA, 19 nt, Artificial Sequence
  Description of Artificial Sequence: Synthetic oligonucleotide
  Antisense strand to SEQ ID NO: 181136
ucacucaaaccuguuuacu

SEQ ID NO: 181138 - RNA, 19 nt, Artificial Sequence
  Description of Artificial Sequence: Synthetic oligonucleotide
  Sense strand starting at position 154 of SEQ ID NO: 2334
cuguuucuugaugacucaa

SEQ ID NO: 181139 - RNA, 19 nt, Artificial Sequence
  Description of Artificial Sequence: Synthetic oligonucleotide
  Antisense strand to SEQ ID NO: 181138
uugagucaucaagaaacag

SEQ ID NO: 181140 - RNA, 19 nt, Artificial Sequence
  Description of Artificial Sequence: Synthetic oligonucleotide
  Sense strand starting at position 103 of SEQ ID NO: 2334
ggaagaagucccuagcuuu

SEQ ID NO: 181141 - RNA, 19 nt, Artificial Sequence
  Description of Artificial Sequence: Synthetic oligonucleotide
  Antisense strand to SEQ ID NO: 181140
aaagcuagggacuucuucc

SEQ ID NO: 181142 - RNA, 19 nt, Artificial Sequence
  Description of Artificial Sequence: Synthetic oligonucleotide
  Sense strand starting at position 3839 of SEQ ID NO: 2336
ggcguaagcgucuguuguu

SEQ ID NO: 181143 - RNA, 19 nt, Artificial Sequence
  Description of Artificial Sequence: Synthetic oligonucleotide
  Antisense strand to SEQ ID NO: 181142
aacaacagacgcuuacgcc

SEQ ID NO: 181144 - RNA, 19 nt, Artificial Sequence
  Description of Artificial Sequence: Synthetic oligonucleotide
  Sense strand starting at position 3583 of SEQ ID NO: 2336
caggaucucuagugacauc

SEQ ID NO: 181145 - RNA, 19 nt, Artificial Sequence
  Description of Artificial Sequence: Synthetic oligonucleotide
  Antisense strand to SEQ ID NO: 181144
gaugucacuagagauccug

SEQ ID NO: 181146 - RNA, 19 nt, Artificial Sequence
  Description of Artificial Sequence: Synthetic oligonucleotide
  Sense strand starting at position 3579 of SEQ ID NO: 2336
acgucaggaucucuaguga

SEQ ID NO: 181147 - RNA, 19 nt, Artificial Sequence
  Description of Artificial Sequence: Synthetic oligonucleotide
  Antisense strand to SEQ ID NO: 181146
ucacuagagauccugacgu

SEQ ID NO: 181148 - RNA, 19 nt, Artificial Sequence
  Description of Artificial Sequence: Synthetic oligonucleotide
  Sense strand starting at position 3541 of SEQ ID NO: 2336
ugaccuuauuuagaagaag

SEQ ID NO: 181149 - RNA, 19 nt, Artificial Sequence
  Description of Artificial Sequence: Synthetic oligonucleotide
  Antisense strand to SEQ ID NO: 181148
cuucuucuaaauaagguca

SEQ ID NO: 181150 - RNA, 19 nt, Artificial Sequence
  Description of Artificial Sequence: Synthetic oligonucleotide
  Sense strand starting at position 3532 of SEQ ID NO: 2336
ccucgaaugugaccuuauu

SEQ ID NO: 181151 - RNA, 19 nt, Artificial Sequence
  Description of Artificial Sequence: Synthetic oligonucleotide
  Antisense strand to SEQ ID NO: 181150
aauaaggucacauucgagg

SEQ ID NO: 181152 - RNA, 19 nt, Artificial Sequence
  Description of Artificial Sequence: Synthetic oligonucleotide
  Sense strand starting at position 3524 of SEQ ID NO: 2336
cccugaaaccucgaaugug

SEQ ID NO: 181153 - RNA, 19 nt, Artificial Sequence
  Description of Artificial Sequence: Synthetic oligonucleotide
  Antisense strand to SEQ ID NO: 181152
cacauucgagguuucaggg

SEQ ID NO: 181154 - RNA, 19 nt, Artificial Sequence
  Description of Artificial Sequence: Synthetic oligonucleotide
  Sense strand starting at position 3435 of SEQ ID NO: 2336
cagagcuuugcguggguca

SEQ ID NO: 181155 - RNA, 19 nt, Artificial Sequence
  Description of Artificial Sequence: Synthetic oligonucleotide
  Antisense strand to SEQ ID NO: 181154
ugacccacgcaaagcucug

SEQ ID NO: 181156 - RNA, 19 nt, Artificial Sequence
  Description of Artificial Sequence: Synthetic oligonucleotide
  Sense strand starting at position 3294 of SEQ ID NO: 2336
gcccucgccuucucuuuaa

SEQ ID NO: 181157 - RNA, 19 nt, Artificial Sequence
  Description of Artificial Sequence: Synthetic oligonucleotide
  Antisense strand to SEQ ID NO: 181156
uuaaagagaaggcgagggc

SEQ ID NO: 181158 - RNA, 19 nt, Artificial Sequence
  Description of Artificial Sequence: Synthetic oligonucleotide
  Sense strand starting at position 2856 of SEQ ID NO: 2336
cugugugucuuuguuuaac

SEQ ID NO: 181159 - RNA, 19 nt, Artificial Sequence
  Description of Artificial Sequence: Synthetic oligonucleotide
  Antisense strand to SEQ ID NO: 181158
guuaaacaaagacacacag

SEQ ID NO: 181160 - RNA, 19 nt, Artificial Sequence
  Description of Artificial Sequence: Synthetic oligonucleotide
  Sense strand starting at position 2854 of SEQ ID NO: 2336
cucugugugucuuuguuua

SEQ ID NO: 181161 - RNA, 19 nt, Artificial Sequence
  Description of Artificial Sequence: Synthetic oligonucleotide
  Antisense strand to SEQ ID NO: 181160
uaaacaaagacacacagag

SEQ ID NO: 181162 - RNA, 19 nt, Artificial Sequence
  Description of Artificial Sequence: Synthetic oligonucleotide
  Sense strand starting at position 2665 of SEQ ID NO: 2336
uuaccuucugcgggaacaa

SEQ ID NO: 181163 - RNA, 19 nt, Artificial Sequence
  Description of Artificial Sequence: Synthetic oligonucleotide
  Antisense strand to SEQ ID NO: 181162
uuguucccgcagaagguaa

SEQ ID NO: 181164 - RNA, 19 nt, Artificial Sequence
  Description of Artificial Sequence: Synthetic oligonucleotide
  Sense strand starting at position 2662 of SEQ ID NO: 2336
cgauuaccuucugcgggaa

SEQ ID NO: 181165 - RNA, 19 nt, Artificial Sequence
  Description of Artificial Sequence: Synthetic oligonucleotide
  Antisense strand to SEQ ID NO: 181164
uucccgcagaagguaaucg

SEQ ID NO: 181166 - RNA, 19 nt, Artificial Sequence
  Description of Artificial Sequence: Synthetic oligonucleotide
  Sense strand starting at position 2661 of SEQ ID NO: 2336
acgauuaccuucugcggga

SEQ ID NO: 181167 - RNA, 19 nt, Artificial Sequence
  Description of Artificial Sequence: Synthetic oligonucleotide
  Antisense strand to SEQ ID NO: 181166
ucccgcagaagguaaucgu

SEQ ID NO: 181168 - RNA, 19 nt, Artificial Sequence
  Description of Artificial Sequence: Synthetic oligonucleotide
  Sense strand starting at position 2586 of SEQ ID NO: 2336
ggguuugggccgugaggaa

SEQ ID NO: 181169 - RNA, 19 nt, Artificial Sequence
  Description of Artificial Sequence: Synthetic oligonucleotide
  Antisense strand to SEQ ID NO: 181168
uuccucacggcccaaaccc

SEQ ID NO: 181170 - RNA, 19 nt, Artificial Sequence
  Description of Artificial Sequence: Synthetic oligonucleotide
  Sense strand starting at position 2504 of SEQ ID NO: 2336
ucacaucuaucgguccaaa

SEQ ID NO: 181171 - RNA, 19 nt, Artificial Sequence
  Description of Artificial Sequence: Synthetic oligonucleotide
  Antisense strand to SEQ ID NO: 181170
uuuggaccgauagauguga

SEQ ID NO: 181172 - RNA, 19 nt, Artificial Sequence
  Description of Artificial Sequence: Synthetic oligonucleotide
  Sense strand starting at position 2375 of SEQ ID NO: 2336
cugagcauucucugugcuu

SEQ ID NO: 181173 - RNA, 19 nt, Artificial Sequence
  Description of Artificial Sequence: Synthetic oligonucleotide
  Antisense strand to SEQ ID NO: 181172
aagcacagagaaugcucag

SEQ ID NO: 181174 - RNA, 19 nt, Artificial Sequence
  Description of Artificial Sequence: Synthetic oligonucleotide
  Sense strand starting at position 2342 of SEQ ID NO: 2336
ggugauguuggcuggauac

SEQ ID NO: 181175 - RNA, 19 nt, Artificial Sequence
  Description of Artificial Sequence: Synthetic oligonucleotide
  Antisense strand to SEQ ID NO: 181174
guauccagccaacaucacc

SEQ ID NO: 181176 - RNA, 19 nt, Artificial Sequence
  Description of Artificial Sequence: Synthetic oligonucleotide
  Sense strand starting at position 2341 of SEQ ID NO: 2336
uggugauguuggcuggaua

SEQ ID NO: 181177 - RNA, 19 nt, Artificial Sequence
  Description of Artificial Sequence: Synthetic oligonucleotide
  Antisense strand to SEQ ID NO: 181176
uauccagccaacaucacca

SEQ ID NO: 181178 - RNA, 19 nt, Artificial Sequence
  Description of Artificial Sequence: Synthetic oligonucleotide
  Sense strand starting at position 1612 of SEQ ID NO: 2336
gccggaggccgcugucaaa

SEQ ID NO: 181179 - RNA, 19 nt, Artificial Sequence
  Description of Artificial Sequence: Synthetic oligonucleotide
  Antisense strand to SEQ ID NO: 181178
uuugacagcggccuccggc

SEQ ID NO: 181180 - RNA, 19 nt, Artificial Sequence
  Description of Artificial Sequence: Synthetic oligonucleotide
  Sense strand starting at position 1579 of SEQ ID NO: 2336
uacugacauuguucgaaga

SEQ ID NO: 181181 - RNA, 19 nt, Artificial Sequence
  Description of Artificial Sequence: Synthetic oligonucleotide
  Antisense strand to SEQ ID NO: 181180
ucuucgaacaaugucagua

SEQ ID NO: 181182 - RNA, 19 nt, Artificial Sequence
  Description of Artificial Sequence: Synthetic oligonucleotide
  Sense strand starting at position 1570 of SEQ ID NO: 2336
cuaggaagguacugacauu

SEQ ID NO: 181183 - RNA, 19 nt, Artificial Sequence
  Description of Artificial Sequence: Synthetic oligonucleotide
  Antisense strand to SEQ ID NO: 181182
aaugucaguaccuuccuag

SEQ ID NO: 181184 - RNA, 19 nt, Artificial Sequence
  Description of Artificial Sequence: Synthetic oligonucleotide
  Sense strand starting at position 1413 of SEQ ID NO: 2336
uuuaccuggugagaugaaa

SEQ ID NO: 181185 - RNA, 19 nt, Artificial Sequence
  Description of Artificial Sequence: Synthetic oligonucleotide
  Antisense strand to SEQ ID NO: 181184
uuucaucucaccagguaaa

SEQ ID NO: 181186 - RNA, 19 nt, Artificial Sequence
  Description of Artificial Sequence: Synthetic oligonucleotide
  Sense strand starting at position 1377 of SEQ ID NO: 2336
ggugcacgaccuuacaaua

SEQ ID NO: 181187 - RNA, 19 nt, Artificial Sequence
  Description of Artificial Sequence: Synthetic oligonucleotide
  Antisense strand to SEQ ID NO: 181186
uauuguaaggucgugcacc

SEQ ID NO: 181188 - RNA, 19 nt, Artificial Sequence
  Description of Artificial Sequence: Synthetic oligonucleotide
  Sense strand starting at position 1276 of SEQ ID NO: 2336
ccuuuauagcggugggacu

SEQ ID NO: 181189 - RNA, 19 nt, Artificial Sequence
  Description of Artificial Sequence: Synthetic oligonucleotide
  Antisense strand to SEQ ID NO: 181188
agucccaccgcuauaaagg

SEQ ID NO: 181190 - RNA, 19 nt, Artificial Sequence
  Description of Artificial Sequence: Synthetic oligonucleotide
  Sense strand starting at position 1274 of SEQ ID NO: 2336
guccuuuauagcgguggga

SEQ ID NO: 181191 - RNA, 19 nt, Artificial Sequence
  Description of Artificial Sequence: Synthetic oligonucleotide
  Antisense strand to SEQ ID NO: 181190
ucccaccgcuauaaaggac

SEQ ID NO: 181192 - RNA, 19 nt, Artificial Sequence
  Description of Artificial Sequence: Synthetic oligonucleotide
  Sense strand starting at position 1266 of SEQ ID NO: 2336
acugacguguccuuuauag

SEQ ID NO: 181193 - RNA, 19 nt, Artificial Sequence
  Description of Artificial Sequence: Synthetic oligonucleotide
  Antisense strand to SEQ ID NO: 181192
cuauaaaggacacgucagu

SEQ ID NO: 181194 - RNA, 19 nt, Artificial Sequence
  Description of Artificial Sequence: Synthetic oligonucleotide
  Sense strand starting at position 1193 of SEQ ID NO: 2336
gcaaaugugcuuuggaguc

SEQ ID NO: 181195 - RNA, 19 nt, Artificial Sequence
  Description of Artificial Sequence: Synthetic oligonucleotide
  Antisense strand to SEQ ID NO: 181194
gacuccaaagcacauuugc

SEQ ID NO: 181196 - RNA, 19 nt, Artificial Sequence
  Description of Artificial Sequence: Synthetic oligonucleotide
  Sense strand starting at position 1075 of SEQ ID NO: 2336
aucaaagguuucuuaagca

SEQ ID NO: 181197 - RNA, 19 nt, Artificial Sequence
  Description of Artificial Sequence: Synthetic oligonucleotide
  Antisense strand to SEQ ID NO: 181196
ugcuuaagaaaccuuugau

SEQ ID NO: 181198 - RNA, 19 nt, Artificial Sequence
  Description of Artificial Sequence: Synthetic oligonucleotide
  Sense strand starting at position 744 of SEQ ID NO: 2336
guuauuucuugucauugaa

SEQ ID NO: 181199 - RNA, 19 nt, Artificial Sequence
  Description of Artificial Sequence: Synthetic oligonucleotide
  Antisense strand to SEQ ID NO: 181198
uucaaugacaagaaauaac

SEQ ID NO: 181200 - RNA, 19 nt, Artificial Sequence
  Description of Artificial Sequence: Synthetic oligonucleotide
  Sense strand starting at position 743 of SEQ ID NO: 2336
uguuauuucuugucauuga

SEQ ID NO: 181201 - RNA, 19 nt, Artificial Sequence
  Description of Artificial Sequence: Synthetic oligonucleotide
  Antisense strand to SEQ ID NO: 181200
ucaaugacaagaaauaaca

SEQ ID NO: 181202 - RNA, 19 nt, Artificial Sequence
  Description of Artificial Sequence: Synthetic oligonucleotide
  Sense strand starting at position 741 of SEQ ID NO: 2336
gcuguuauuucuugucauu

SEQ ID NO: 181203 - RNA, 19 nt, Artificial Sequence
  Description of Artificial Sequence: Synthetic oligonucleotide
  Antisense strand to SEQ ID NO: 181202
aaugacaagaaauaacagc

SEQ ID NO: 181204 - RNA, 19 nt, Artificial Sequence
  Description of Artificial Sequence: Synthetic oligonucleotide
  Sense strand starting at position 696 of SEQ ID NO: 2336
acuuuauguccuuaugaug

SEQ ID NO: 181205 - RNA, 19 nt, Artificial Sequence
  Description of Artificial Sequence: Synthetic oligonucleotide
  Antisense strand to SEQ ID NO: 181204
caucauaaggacauaaagu

SEQ ID NO: 181206 - RNA, 19 nt, Artificial Sequence
  Description of Artificial Sequence: Synthetic oligonucleotide
  Sense strand starting at position 605 of SEQ ID NO: 2336
cgucucuucugcugcagaa

SEQ ID NO: 181207 - RNA, 19 nt, Artificial Sequence
  Description of Artificial Sequence: Synthetic oligonucleotide
  Antisense strand to SEQ ID NO: 181206
uucugcagcagaagagacg

SEQ ID NO: 181208 - RNA, 19 nt, Artificial Sequence
  Description of Artificial Sequence: Synthetic oligonucleotide
  Sense strand starting at position 429 of SEQ ID NO: 2336
ucauucgugccgggaugau

SEQ ID NO: 181209 - RNA, 19 nt, Artificial Sequence
  Description of Artificial Sequence: Synthetic oligonucleotide
  Antisense strand to SEQ ID NO: 181208
aucaucccggcacgaauga

SEQ ID NO: 181210 - RNA, 19 nt, Artificial Sequence
  Description of Artificial Sequence: Synthetic oligonucleotide
  Sense strand starting at position 428 of SEQ ID NO: 2336
aucauucgugccgggauga

SEQ ID NO: 181211 - RNA, 19 nt, Artificial Sequence
  Description of Artificial Sequence: Synthetic oligonucleotide
  Antisense strand to SEQ ID NO: 181210
ucaucccggcacgaaugau

SEQ ID NO: 181212 - RNA, 19 nt, Artificial Sequence
  Description of Artificial Sequence: Synthetic oligonucleotide
  Sense strand starting at position 364 of SEQ ID NO: 2336
aucgccaacucugaggaaa

SEQ ID NO: 181213 - RNA, 19 nt, Artificial Sequence
  Description of Artificial Sequence: Synthetic oligonucleotide
  Antisense strand to SEQ ID NO: 181212
uuuccucagaguuggcgau

SEQ ID NO: 181214 - RNA, 19 nt, Artificial Sequence
  Description of Artificial Sequence: Synthetic oligonucleotide
  Sense strand starting at position 222 of SEQ ID NO: 2336
auguaaugucaggacagca

SEQ ID NO: 181215 - RNA, 19 nt, Artificial Sequence
  Description of Artificial Sequence: Synthetic oligonucleotide
  Antisense strand to SEQ ID NO: 181214
ugcuguccugacauuacau

SEQ ID NO: 181216 - RNA, 19 nt, Artificial Sequence
  Description of Artificial Sequence: Synthetic oligonucleotide
  Sense strand starting at position 211 of SEQ ID NO: 2336
ggaguuuccacauguaaug

SEQ ID NO: 181217 - RNA, 19 nt, Artificial Sequence
  Description of Artificial Sequence: Synthetic oligonucleotide
  Antisense strand to SEQ ID NO: 181216
cauuacauguggaaacucc

SEQ ID NO: 181218 - RNA, 19 nt, Artificial Sequence
  Description of Artificial Sequence: Synthetic oligonucleotide
  Sense strand starting at position 3910 of SEQ ID NO: 2335
gugcaagacucugcauuaa

SEQ ID NO: 181219 - RNA, 19 nt, Artificial Sequence
  Description of Artificial Sequence: Synthetic oligonucleotide
  Antisense strand to SEQ ID NO: 181218
uuaaugcagagucuugcac

SEQ ID NO: 181220 - RNA, 19 nt, Artificial Sequence
  Description of Artificial Sequence: Synthetic oligonucleotide
  Sense strand starting at position 3909 of SEQ ID NO: 2335
cgugcaagacucugcauua

SEQ ID NO: 181221 - RNA, 19 nt, Artificial Sequence
  Description of Artificial Sequence: Synthetic oligonucleotide
  Antisense strand to SEQ ID NO: 181220
uaaugcagagucuugcacg

SEQ ID NO: 181222 - RNA, 19 nt, Artificial Sequence
  Description of Artificial Sequence: Synthetic oligonucleotide
  Sense strand starting at position 3908 of SEQ ID NO: 2335
gcgugcaagacucugcauu

SEQ ID NO: 181223 - RNA, 19 nt, Artificial Sequence
  Description of Artificial Sequence: Synthetic oligonucleotide
  Antisense strand to SEQ ID NO: 181222
aaugcagagucuugcacgc

SEQ ID NO: 181224 - RNA, 19 nt, Artificial Sequence
  Description of Artificial Sequence: Synthetic oligonucleotide
  Sense strand starting at position 3901 of SEQ ID NO: 2335
ggugugugcgugcaagacu

SEQ ID NO: 181225 - RNA, 19 nt, Artificial Sequence
  Description of Artificial Sequence: Synthetic oligonucleotide
  Antisense strand to SEQ ID NO: 181224
agucuugcacgcacacacc

SEQ ID NO: 181226 - RNA, 19 nt, Artificial Sequence
  Description of Artificial Sequence: Synthetic oligonucleotide
  Sense strand starting at position 3577 of SEQ ID NO: 2335
gcaggaagccuuugugucu

SEQ ID NO: 181227 - RNA, 19 nt, Artificial Sequence
  Description of Artificial Sequence: Synthetic oligonucleotide
  Antisense strand to SEQ ID NO: 181226
agacacaaaggcuuccugc

SEQ ID NO: 181228 - RNA, 19 nt, Artificial Sequence
  Description of Artificial Sequence: Synthetic oligonucleotide
  Sense strand starting at position 3551 of SEQ ID NO: 2335
cacagagcucggcaccaau

SEQ ID NO: 181229 - RNA, 19 nt, Artificial Sequence
  Description of Artificial Sequence: Synthetic oligonucleotide
  Antisense strand to SEQ ID NO: 181228
auuggugccgagcucugug

SEQ ID NO: 181230 - RNA, 19 nt, Artificial Sequence
  Description of Artificial Sequence: Synthetic oligonucleotide
  Sense strand starting at position 3046 of SEQ ID NO: 2335
ccaguuccucgacagaucu

SEQ ID NO: 181231 - RNA, 19 nt, Artificial Sequence
  Description of Artificial Sequence: Synthetic oligonucleotide
  Antisense strand to SEQ ID NO: 181230
agaucugucgaggaacugg

SEQ ID NO: 181232 - RNA, 19 nt, Artificial Sequence
  Description of Artificial Sequence: Synthetic oligonucleotide
  Sense strand starting at position 3043 of SEQ ID NO: 2335
cagccaguuccucgacaga

SEQ ID NO: 181233 - RNA, 19 nt, Artificial Sequence
  Description of Artificial Sequence: Synthetic oligonucleotide
  Antisense strand to SEQ ID NO: 181232
ucugucgaggaacuggcug

SEQ ID NO: 181234 - RNA, 19 nt, Artificial Sequence
  Description of Artificial Sequence: Synthetic oligonucleotide
  Sense strand starting at position 3023 of SEQ ID NO: 2335
uguugcaacuuaggaauuu

SEQ ID NO: 181235 - RNA, 19 nt, Artificial Sequence
  Description of Artificial Sequence: Synthetic oligonucleotide
  Antisense strand to SEQ ID NO: 181234
aaauuccuaaguugcaaca

SEQ ID NO: 181236 - RNA, 19 nt, Artificial Sequence
  Description of Artificial Sequence: Synthetic oligonucleotide
  Sense strand starting at position 2827 of SEQ ID NO: 2335
gggcgccugccugaagaau

SEQ ID NO: 181237 - RNA, 19 nt, Artificial Sequence
  Description of Artificial Sequence: Synthetic oligonucleotide
  Antisense strand to SEQ ID NO: 181236
auucuucaggcaggcgccc

SEQ ID NO: 181238 - RNA, 19 nt, Artificial Sequence
  Description of Artificial Sequence: Synthetic oligonucleotide
  Sense strand starting at position 2278 of SEQ ID NO: 2335
gacugacuuccuuggguau

SEQ ID NO: 181239 - RNA, 19 nt, Artificial Sequence
  Description of Artificial Sequence: Synthetic oligonucleotide
  Antisense strand to SEQ ID NO: 181238
auacccaaggaagucaguc

SEQ ID NO: 181240 - RNA, 19 nt, Artificial Sequence
  Description of Artificial Sequence: Synthetic oligonucleotide
  Sense strand starting at position 2071 of SEQ ID NO: 2335
ugaugucaugggugaccca

SEQ ID NO: 181241 - RNA, 19 nt, Artificial Sequence
  Description of Artificial Sequence: Synthetic oligonucleotide
  Antisense strand to SEQ ID NO: 181240
ugggucacccaugacauca

SEQ ID NO: 181242 - RNA, 19 nt, Artificial Sequence
  Description of Artificial Sequence: Synthetic oligonucleotide
  Sense strand starting at position 2065 of SEQ ID NO: 2335
ccaugaugaugucaugggu

SEQ ID NO: 181243 - RNA, 19 nt, Artificial Sequence
  Description of Artificial Sequence: Synthetic oligonucleotide
  Antisense strand to SEQ ID NO: 181242
acccaugacaucaucaugg

SEQ ID NO: 181244 - RNA, 19 nt, Artificial Sequence
  Description of Artificial Sequence: Synthetic oligonucleotide
  Sense strand starting at position 2056 of SEQ ID NO: 2335
ucacaauguccaugaugau

SEQ ID NO: 181245 - RNA, 19 nt, Artificial Sequence
  Description of Artificial Sequence: Synthetic oligonucleotide
  Antisense strand to SEQ ID NO: 181244
aucaucauggacauuguga

SEQ ID NO: 181246 - RNA, 19 nt, Artificial Sequence
  Description of Artificial Sequence: Synthetic oligonucleotide
  Sense strand starting at position 2053 of SEQ ID NO: 2335
gggucacaauguccaugau

SEQ ID NO: 181247 - RNA, 19 nt, Artificial Sequence
  Description of Artificial Sequence: Synthetic oligonucleotide
  Antisense strand to SEQ ID NO: 181246
aucauggacauugugaccc

SEQ ID NO: 181248 - RNA, 19 nt, Artificial Sequence
  Description of Artificial Sequence: Synthetic oligonucleotide
  Sense strand starting at position 410 of SEQ ID NO: 2335
gauggauuggauggauguu

SEQ ID NO: 181249 - RNA, 19 nt, Artificial Sequence
  Description of Artificial Sequence: Synthetic oligonucleotide
  Antisense strand to SEQ ID NO: 181248
aacauccauccaauccauc

SEQ ID NO: 181250 - RNA, 19 nt, Artificial Sequence
  Description of Artificial Sequence: Synthetic oligonucleotide
  Sense strand starting at position 398 of SEQ ID NO: 2335
ugugggauuguggauggau

SEQ ID NO: 181251 - RNA, 19 nt, Artificial Sequence
  Description of Artificial Sequence: Synthetic oligonucleotide
  Antisense strand to SEQ ID NO: 181250
auccauccacaaucccaca

SEQ ID NO: 181252 - RNA, 19 nt, Artificial Sequence
  Description of Artificial Sequence: Synthetic oligonucleotide
  Sense strand starting at position 262 of SEQ ID NO: 2335
agggauagguggguccaua

SEQ ID NO: 181253 - RNA, 19 nt, Artificial Sequence
  Description of Artificial Sequence: Synthetic oligonucleotide
  Antisense strand to SEQ ID NO: 181252
uauggacccaccuaucccu

SEQ ID NO: 181254 - RNA, 19 nt, Artificial Sequence
  Description of Artificial Sequence: Synthetic oligonucleotide
  Sense strand starting at position 261 of SEQ ID NO: 2335
gagggauagguggguccau

SEQ ID NO: 181255 - RNA, 19 nt, Artificial Sequence
  Description of Artificial Sequence: Synthetic oligonucleotide
  Antisense strand to SEQ ID NO: 181254
auggacccaccuaucccuc

SEQ ID NO: 181256 - RNA, 19 nt, Artificial Sequence
  Description of Artificial Sequence: Synthetic oligonucleotide
  Sense strand starting at position 152 of SEQ ID NO: 2335
guguaaagcuggugucaca

SEQ ID NO: 181257 - RNA, 19 nt, Artificial Sequence
  Description of Artificial Sequence: Synthetic oligonucleotide
  Antisense strand to SEQ ID NO: 181256
ugugacaccagcuuuacac

SEQ ID NO: 181258 - RNA, 19 nt, Artificial Sequence
  Description of Artificial Sequence: Synthetic oligonucleotide
  Sense strand starting at position 150 of SEQ ID NO: 2335
ugguguaaagcugguguca

SEQ ID NO: 181259 - RNA, 19 nt, Artificial Sequence
  Description of Artificial Sequence: Synthetic oligonucleotide
  Antisense strand to SEQ ID NO: 181258
ugacaccagcuuuacacca

SEQ ID NO: 181260 - RNA, 19 nt, Artificial Sequence
  Description of Artificial Sequence: Synthetic oligonucleotide
  Sense strand starting at position 60 of SEQ ID NO: 2335
gugaguugugguggaagga

SEQ ID NO: 181261 - RNA, 19 nt, Artificial Sequence
  Description of Artificial Sequence: Synthetic oligonucleotide
  Antisense strand to SEQ ID NO: 181260
uccuuccaccacaacucac

SEQ ID NO: 181262 - RNA, 19 nt, Artificial Sequence
  Description of Artificial Sequence: Synthetic oligonucleotide
  Sense strand starting at position 56 of SEQ ID NO: 2335
gacugugaguuguggugga

SEQ ID NO: 181263 - RNA, 19 nt, Artificial Sequence
  Description of Artificial Sequence: Synthetic oligonucleotide
  Antisense strand to SEQ ID NO: 181262
uccaccacaacucacaguc

SEQ ID NO: 181264 - RNA, 19 nt, Artificial Sequence
  Description of Artificial Sequence: Synthetic oligonucleotide
  Sense strand starting at position 56 of SEQ ID NO: 2337
cuaagaugacucuguuccu

SEQ ID NO: 181265 - RNA, 19 nt, Artificial Sequence
  Description of Artificial Sequence: Synthetic oligonucleotide
  Antisense strand to SEQ ID NO: 181264
aggaacagagucaucuuag

SEQ ID NO: 181266 - RNA, 19 nt, Artificial Sequence
  Description of Artificial Sequence: Synthetic oligonucleotide
  Sense strand starting at position 80 of SEQ ID NO: 2337
ccaucaauacuaugugagu

SEQ ID NO: 181267 - RNA, 19 nt, Artificial Sequence
  Description of Artificial Sequence: Synthetic oligonucleotide
  Antisense strand to SEQ ID NO: 181266
acucacauaguauugaugg

SEQ ID NO: 181268 - RNA, 19 nt, Artificial Sequence
  Description of Artificial Sequence: Synthetic oligonucleotide
  Sense strand starting at position 156 of SEQ ID NO: 2337
agaugcauuucuuaagaaa

SEQ ID NO: 181269 - RNA, 19 nt, Artificial Sequence
  Description of Artificial Sequence: Synthetic oligonucleotide
  Antisense strand to SEQ ID NO: 181268
uuucuuaagaaaugcaucu

SEQ ID NO: 181270 - RNA, 19 nt, Artificial Sequence
  Description of Artificial Sequence: Synthetic oligonucleotide
  Sense strand starting at position 268 of SEQ ID NO: 2337
aggucaauauaauuguuga

SEQ ID NO: 181271 - RNA, 19 nt, Artificial Sequence
  Description of Artificial Sequence: Synthetic oligonucleotide
  Antisense strand to SEQ ID NO: 181270
ucaacaauuauauugaccu

SEQ ID NO: 181272 - RNA, 19 nt, Artificial Sequence
  Description of Artificial Sequence: Synthetic oligonucleotide
  Sense strand starting at position 285 of SEQ ID NO: 2337
gacucuuaacggcagggua

SEQ ID NO: 181273 - RNA, 19 nt, Artificial Sequence
  Description of Artificial Sequence: Synthetic oligonucleotide
  Antisense strand to SEQ ID NO: 181272
uacccugccguuaagaguc

SEQ ID NO: 181274 - RNA, 19 nt, Artificial Sequence
  Description of Artificial Sequence: Synthetic oligonucleotide
  Sense strand starting at position 406 of SEQ ID NO: 2337
cuuacugaguggucuugaa

SEQ ID NO: 181275 - RNA, 19 nt, Artificial Sequence
  Description of Artificial Sequence: Synthetic oligonucleotide
  Antisense strand to SEQ ID NO: 181274
uucaagaccacucaguaag

SEQ ID NO: 181276 - RNA, 19 nt, Artificial Sequence
  Description of Artificial Sequence: Synthetic oligonucleotide
  Sense strand starting at position 410 of SEQ ID NO: 2337
cugaguggucuugaaccuu

SEQ ID NO: 181277 - RNA, 19 nt, Artificial Sequence
  Description of Artificial Sequence: Synthetic oligonucleotide
  Antisense strand to SEQ ID NO: 181276
aagguucaagaccacucag

SEQ ID NO: 181278 - RNA, 19 nt, Artificial Sequence
  Description of Artificial Sequence: Synthetic oligonucleotide
  Sense strand starting at position 459 of SEQ ID NO: 2337
ggaguuaucaccuguuaug

SEQ ID NO: 181279 - RNA, 19 nt, Artificial Sequence
  Description of Artificial Sequence: Synthetic oligonucleotide
  Antisense strand to SEQ ID NO: 181278
cauaacaggugauaacucc

SEQ ID NO: 181280 - RNA, 19 nt, Artificial Sequence
  Description of Artificial Sequence: Synthetic oligonucleotide
  Sense strand starting at position 595 of SEQ ID NO: 2337
guaaaugucucccuaacau

SEQ ID NO: 181281 - RNA, 19 nt, Artificial Sequence
  Description of Artificial Sequence: Synthetic oligonucleotide
  Antisense strand to SEQ ID NO: 181280
auguuagggagacauuuac

SEQ ID NO: 181282 - RNA, 19 nt, Artificial Sequence
  Description of Artificial Sequence: Synthetic oligonucleotide
  Sense strand starting at position 658 of SEQ ID NO: 2337
cgacuucuccaacacuuga

SEQ ID NO: 181283 - RNA, 19 nt, Artificial Sequence
  Description of Artificial Sequence: Synthetic oligonucleotide
  Antisense strand to SEQ ID NO: 181282
ucaaguguuggagaagucg

SEQ ID NO: 181284 - RNA, 19 nt, Artificial Sequence
  Description of Artificial Sequence: Synthetic oligonucleotide
  Sense strand starting at position 765 of SEQ ID NO: 2337
gccauaagcuuucuaagaa

SEQ ID NO: 181285 - RNA, 19 nt, Artificial Sequence
  Description of Artificial Sequence: Synthetic oligonucleotide
  Antisense strand to SEQ ID NO: 181284
uucuuagaaagcuuauggc

SEQ ID NO: 181286 - RNA, 19 nt, Artificial Sequence
  Description of Artificial Sequence: Synthetic oligonucleotide
  Sense strand starting at position 835 of SEQ ID NO: 2337
gcaauaauuccuuaugcag

SEQ ID NO: 181287 - RNA, 19 nt, Artificial Sequence
  Description of Artificial Sequence: Synthetic oligonucleotide
  Antisense strand to SEQ ID NO: 181286
cugcauaaggaauuauugc

SEQ ID NO: 181288 - RNA, 19 nt, Artificial Sequence
  Description of Artificial Sequence: Synthetic oligonucleotide
  Sense strand starting at position 841 of SEQ ID NO: 2337
auuccuuaugcagaaaguu

SEQ ID NO: 181289 - RNA, 19 nt, Artificial Sequence
  Description of Artificial Sequence: Synthetic oligonucleotide
  Antisense strand to SEQ ID NO: 181288
aacuuucugcauaaggaau

SEQ ID NO: 181290 - RNA, 19 nt, Artificial Sequence
  Description of Artificial Sequence: Synthetic oligonucleotide
  Sense strand starting at position 880 of SEQ ID NO: 2337
guuugagauuacuccucaa

SEQ ID NO: 181291 - RNA, 19 nt, Artificial Sequence
  Description of Artificial Sequence: Synthetic oligonucleotide
  Antisense strand to SEQ ID NO: 181290
uugaggaguaaucucaaac

SEQ ID NO: 181292 - RNA, 19 nt, Artificial Sequence
  Description of Artificial Sequence: Synthetic oligonucleotide
  Sense strand starting at position 1024 of SEQ ID NO: 2337
ugaccuugagaauguaauu

SEQ ID NO: 181293 - RNA, 19 nt, Artificial Sequence
  Description of Artificial Sequence: Synthetic oligonucleotide
  Antisense strand to SEQ ID NO: 181292
aauuacauucucaagguca

SEQ ID NO: 181294 - RNA, 19 nt, Artificial Sequence
  Description of Artificial Sequence: Synthetic oligonucleotide
  Sense strand starting at position 1112 of SEQ ID NO: 2337
aaaguaagugccuaggcua

SEQ ID NO: 181295 - RNA, 19 nt, Artificial Sequence
  Description of Artificial Sequence: Synthetic oligonucleotide
  Antisense strand to SEQ ID NO: 181294
uagccuaggcacuuacuuu

SEQ ID NO: 181296 - RNA, 19 nt, Artificial Sequence
  Description of Artificial Sequence: Synthetic oligonucleotide
  Sense strand starting at position 1123 of SEQ ID NO: 2337
cuaggcuaugaagguauua

SEQ ID NO: 181297 - RNA, 19 nt, Artificial Sequence
  Description of Artificial Sequence: Synthetic oligonucleotide
  Antisense strand to SEQ ID NO: 181296
uaauaccuucauagccuag

SEQ ID NO: 181298 - RNA, 19 nt, Artificial Sequence
  Description of Artificial Sequence: Synthetic oligonucleotide
  Sense strand starting at position 1125 of SEQ ID NO: 2337
aggcuaugaagguauuauu

SEQ ID NO: 181299 - RNA, 19 nt, Artificial Sequence
  Description of Artificial Sequence: Synthetic oligonucleotide
  Antisense strand to SEQ ID NO: 181298
aauaauaccuucauagccu

SEQ ID NO: 181300 - RNA, 19 nt, Artificial Sequence
  Description of Artificial Sequence: Synthetic oligonucleotide
  Sense strand starting at position 1166 of SEQ ID NO: 2337
cuuucuaugccaggaucaa

SEQ ID NO: 181301 - RNA, 19 nt, Artificial Sequence
  Description of Artificial Sequence: Synthetic oligonucleotide
  Antisense strand to SEQ ID NO: 181300
uugauccuggcauagaaag

SEQ ID NO: 181302 - RNA, 19 nt, Artificial Sequence
  Description of Artificial Sequence: Synthetic oligonucleotide
  Sense strand starting at position 1167 of SEQ ID NO: 2337
uuucuaugccaggaucaau

SEQ ID NO: 181303 - RNA, 19 nt, Artificial Sequence
  Description of Artificial Sequence: Synthetic oligonucleotide
  Antisense strand to SEQ ID NO: 181302
auugauccuggcauagaaa

SEQ ID NO: 181304 - RNA, 19 nt, Artificial Sequence
  Description of Artificial Sequence: Synthetic oligonucleotide
  Sense strand starting at position 1253 of SEQ ID NO: 2337
augugauauaaguggauga

SEQ ID NO: 181305 - RNA, 19 nt, Artificial Sequence
  Description of Artificial Sequence: Synthetic oligonucleotide
  Antisense strand to SEQ ID NO: 181304
ucauccacuuauaucacau

SEQ ID NO: 181306 - RNA, 19 nt, Artificial Sequence
  Description of Artificial Sequence: Synthetic oligonucleotide
  Sense strand starting at position 1254 of SEQ ID NO: 2337
ugugauauaaguggaugau

SEQ ID NO: 181307 - RNA, 19 nt, Artificial Sequence
  Description of Artificial Sequence: Synthetic oligonucleotide
  Antisense strand to SEQ ID NO: 181306
aucauccacuuauaucaca

SEQ ID NO: 181308 - RNA, 19 nt, Artificial Sequence
  Description of Artificial Sequence: Synthetic oligonucleotide
  Sense strand starting at position 1274 of SEQ ID NO: 2337
gcaugagucaggcauccaa

SEQ ID NO: 181309 - RNA, 19 nt, Artificial Sequence
  Description of Artificial Sequence: Synthetic oligonucleotide
  Antisense strand to SEQ ID NO: 181308
uuggaugccugacucaugc

SEQ ID NO: 181310 - RNA, 19 nt, Artificial Sequence
  Description of Artificial Sequence: Synthetic oligonucleotide
  Sense strand starting at position 1595 of SEQ ID NO: 2337
acgaauggugcugaaucau

SEQ ID NO: 181311 - RNA, 19 nt, Artificial Sequence
  Description of Artificial Sequence: Synthetic oligonucleotide
  Antisense strand to SEQ ID NO: 181310
augauucagcaccauucgu

SEQ ID NO: 181312 - RNA, 19 nt, Artificial Sequence
  Description of Artificial Sequence: Synthetic oligonucleotide
  Sense strand starting at position 1603 of SEQ ID NO: 2337
ugcugaaucauuugcacga

SEQ ID NO: 181313 - RNA, 19 nt, Artificial Sequence
  Description of Artificial Sequence: Synthetic oligonucleotide
  Antisense strand to SEQ ID NO: 181312
ucgugcaaaugauucagca

SEQ ID NO: 181314 - RNA, 19 nt, Artificial Sequence
  Description of Artificial Sequence: Synthetic oligonucleotide
  Sense strand starting at position 1604 of SEQ ID NO: 2337
gcugaaucauuugcacgaa

SEQ ID NO: 181315 - RNA, 19 nt, Artificial Sequence
  Description of Artificial Sequence: Synthetic oligonucleotide
  Antisense strand to SEQ ID NO: 181314
uucgugcaaaugauucagc

SEQ ID NO: 181316 - RNA, 19 nt, Artificial Sequence
  Description of Artificial Sequence: Synthetic oligonucleotide
  Sense strand starting at position 2484 of SEQ ID NO: 2337
aucuaagcaucuuugugaa

SEQ ID NO: 181317 - RNA, 19 nt, Artificial Sequence
  Description of Artificial Sequence: Synthetic oligonucleotide
  Antisense strand to SEQ ID NO: 181316
uucacaaagaugcuuagau

SEQ ID NO: 181318 - RNA, 19 nt, Artificial Sequence
  Description of Artificial Sequence: Synthetic oligonucleotide
  Sense strand starting at position 2581 of SEQ ID NO: 2337
gagggacagcucugaccua

SEQ ID NO: 181319 - RNA, 19 nt, Artificial Sequence
  Description of Artificial Sequence: Synthetic oligonucleotide
  Antisense strand to SEQ ID NO: 181318
uaggucagagcugucccuc

SEQ ID NO: 181320 - RNA, 19 nt, Artificial Sequence
  Description of Artificial Sequence: Synthetic oligonucleotide
  Sense strand starting at position 2679 of SEQ ID NO: 2337
uacagaagauuguugcaga

SEQ ID NO: 181321 - RNA, 19 nt, Artificial Sequence
  Description of Artificial Sequence: Synthetic oligonucleotide
  Antisense strand to SEQ ID NO: 181320
ucugcaacaaucuucugua

SEQ ID NO: 181322 - RNA, 19 nt, Artificial Sequence
  Description of Artificial Sequence: Synthetic oligonucleotide
  Sense strand starting at position 3044 of SEQ ID NO: 2337
uccuucguugaguaaauca

SEQ ID NO: 181323 - RNA, 19 nt, Artificial Sequence
  Description of Artificial Sequence: Synthetic oligonucleotide
  Antisense strand to SEQ ID NO: 181322
ugauuuacucaacgaagga

SEQ ID NO: 181324 - RNA, 19 nt, Artificial Sequence
  Description of Artificial Sequence: Synthetic oligonucleotide
  Sense strand starting at position 3086 of SEQ ID NO: 2337
gaccacugugcugagaaua

SEQ ID NO: 181325 - RNA, 19 nt, Artificial Sequence
  Description of Artificial Sequence: Synthetic oligonucleotide
  Antisense strand to SEQ ID NO: 181324
uauucucagcacagugguc

SEQ ID NO: 181326 - RNA, 19 nt, Artificial Sequence
  Description of Artificial Sequence: Synthetic oligonucleotide
  Sense strand starting at position 3147 of SEQ ID NO: 2337
ugagauugguaaccugcaa

SEQ ID NO: 181327 - RNA, 19 nt, Artificial Sequence
  Description of Artificial Sequence: Synthetic oligonucleotide
  Antisense strand to SEQ ID NO: 181326
uugcagguuaccaaucuca

SEQ ID NO: 181328 - RNA, 19 nt, Artificial Sequence
  Description of Artificial Sequence: Synthetic oligonucleotide
  Sense strand starting at position 3151 of SEQ ID NO: 2337
auugguaaccugcaauaga

SEQ ID NO: 181329 - RNA, 19 nt, Artificial Sequence
  Description of Artificial Sequence: Synthetic oligonucleotide
  Antisense strand to SEQ ID NO: 181328
ucuauugcagguuaccaau

SEQ ID NO: 181330 - RNA, 19 nt, Artificial Sequence
  Description of Artificial Sequence: Synthetic oligonucleotide
  Sense strand starting at position 3341 of SEQ ID NO: 2337
cuagaaugccucugagaac

SEQ ID NO: 181331 - RNA, 19 nt, Artificial Sequence
  Description of Artificial Sequence: Synthetic oligonucleotide
  Antisense strand to SEQ ID NO: 181330
guucucagaggcauucuag

SEQ ID NO: 181332 - RNA, 19 nt, Artificial Sequence
  Description of Artificial Sequence: Synthetic oligonucleotide
  Sense strand starting at position 3347 of SEQ ID NO: 2337
ugccucugagaacgauaua

SEQ ID NO: 181333 - RNA, 19 nt, Artificial Sequence
  Description of Artificial Sequence: Synthetic oligonucleotide
  Antisense strand to SEQ ID NO: 181332
uauaucguucucagaggca

SEQ ID NO: 181334 - RNA, 19 nt, Artificial Sequence
  Description of Artificial Sequence: Synthetic oligonucleotide
  Sense strand starting at position 3456 of SEQ ID NO: 2337
caguuagguguccagggua

SEQ ID NO: 181335 - RNA, 19 nt, Artificial Sequence
  Description of Artificial Sequence: Synthetic oligonucleotide
  Antisense strand to SEQ ID NO: 181334
uacccuggacaccuaacug

SEQ ID NO: 181336 - RNA, 19 nt, Artificial Sequence
  Description of Artificial Sequence: Synthetic oligonucleotide
  Sense strand starting at position 3728 of SEQ ID NO: 2337
cuauuaucauggguccuca

SEQ ID NO: 181337 - RNA, 19 nt, Artificial Sequence
  Description of Artificial Sequence: Synthetic oligonucleotide
  Antisense strand to SEQ ID NO: 181336
ugaggacccaugauaauag

SEQ ID NO: 181338 - RNA, 19 nt, Artificial Sequence
  Description of Artificial Sequence: Synthetic oligonucleotide
  Sense strand starting at position 3766 of SEQ ID NO: 2337
uguuaaguaacagagguau

SEQ ID NO: 181339 - RNA, 19 nt, Artificial Sequence
  Description of Artificial Sequence: Synthetic oligonucleotide
  Antisense strand to SEQ ID NO: 181338
auaccucuguuacuuaaca

SEQ ID NO: 181340 - RNA, 19 nt, Artificial Sequence
  Description of Artificial Sequence: Synthetic oligonucleotide
  Sense strand starting at position 3779 of SEQ ID NO: 2337
agguauuagcaacacuuaa

SEQ ID NO: 181341 - RNA, 19 nt, Artificial Sequence
  Description of Artificial Sequence: Synthetic oligonucleotide
  Antisense strand to SEQ ID NO: 181340
uuaaguguugcuaauaccu

SEQ ID NO: 181342 - RNA, 19 nt, Artificial Sequence
  Description of Artificial Sequence: Synthetic oligonucleotide
  Sense strand starting at position 3979 of SEQ ID NO: 2337
uggccucaggcucagaaau

SEQ ID NO: 181343 - RNA, 19 nt, Artificial Sequence
  Description of Artificial Sequence: Synthetic oligonucleotide
  Antisense strand to SEQ ID NO: 181342
auuucugagccugaggcca

SEQ ID NO: 181344 - RNA, 19 nt, Artificial Sequence
  Description of Artificial Sequence: Synthetic oligonucleotide
  Sense strand starting at position 3528 of SEQ ID NO: 2338
gcuccuaagcuguacaguu

SEQ ID NO: 181345 - RNA, 19 nt, Artificial Sequence
  Description of Artificial Sequence: Synthetic oligonucleotide
  Antisense strand to SEQ ID NO: 181344
aacuguacagcuuaggagc

SEQ ID NO: 181346 - RNA, 19 nt, Artificial Sequence
  Description of Artificial Sequence: Synthetic oligonucleotide
  Sense strand starting at position 3397 of SEQ ID NO: 2338
uuguucuucccagaagguu

SEQ ID NO: 181347 - RNA, 19 nt, Artificial Sequence
  Description of Artificial Sequence: Synthetic oligonucleotide
  Antisense strand to SEQ ID NO: 181346
aaccuucugggaagaacaa

SEQ ID NO: 181348 - RNA, 19 nt, Artificial Sequence
  Description of Artificial Sequence: Synthetic oligonucleotide
  Sense strand starting at position 3392 of SEQ ID NO: 2338
uguccuuguucuucccaga

SEQ ID NO: 181349 - RNA, 19 nt, Artificial Sequence
  Description of Artificial Sequence: Synthetic oligonucleotide
  Antisense strand to SEQ ID NO: 181348
ucugggaagaacaaggaca

SEQ ID NO: 181350 - RNA, 19 nt, Artificial Sequence
  Description of Artificial Sequence: Synthetic oligonucleotide
  Sense strand starting at position 3004 of SEQ ID NO: 2338
ggguuaucacuaugaccca

SEQ ID NO: 181351 - RNA, 19 nt, Artificial Sequence
  Description of Artificial Sequence: Synthetic oligonucleotide
  Antisense strand to SEQ ID NO: 181350
ugggucauagugauaaccc

SEQ ID NO: 181352 - RNA, 19 nt, Artificial Sequence
  Description of Artificial Sequence: Synthetic oligonucleotide
  Sense strand starting at position 2956 of SEQ ID NO: 2338
gucaguuaggaaugaauga

SEQ ID NO: 181353 - RNA, 19 nt, Artificial Sequence
  Description of Artificial Sequence: Synthetic oligonucleotide
  Antisense strand to SEQ ID NO: 181352
ucauucauuccuaacugac

SEQ ID NO: 181354 - RNA, 19 nt, Artificial Sequence
  Description of Artificial Sequence: Synthetic oligonucleotide
  Sense strand starting at position 2948 of SEQ ID NO: 2338
gguccuaugucaguuagga

SEQ ID NO: 181355 - RNA, 19 nt, Artificial Sequence
  Description of Artificial Sequence: Synthetic oligonucleotide
  Antisense strand to SEQ ID NO: 181354
uccuaacugacauaggacc

SEQ ID NO: 181356 - RNA, 19 nt, Artificial Sequence
  Description of Artificial Sequence: Synthetic oligonucleotide
  Sense strand starting at position 2915 of SEQ ID NO: 2338
gcagaaaugucccuaccuc

SEQ ID NO: 181357 - RNA, 19 nt, Artificial Sequence
  Description of Artificial Sequence: Synthetic oligonucleotide
  Antisense strand to SEQ ID NO: 181356
gagguagggacauuucugc

SEQ ID NO: 181358 - RNA, 19 nt, Artificial Sequence
  Description of Artificial Sequence: Synthetic oligonucleotide
  Sense strand starting at position 2856 of SEQ ID NO: 2338
ggcaauaggcucuagugaa

SEQ ID NO: 181359 - RNA, 19 nt, Artificial Sequence
  Description of Artificial Sequence: Synthetic oligonucleotide
  Antisense strand to SEQ ID NO: 181358
uucacuagagccuauugcc

SEQ ID NO: 181360 - RNA, 19 nt, Artificial Sequence
  Description of Artificial Sequence: Synthetic oligonucleotide
  Sense strand starting at position 2834 of SEQ ID NO: 2338
aagggauaguacuccuaua

SEQ ID NO: 181361 - RNA, 19 nt, Artificial Sequence
  Description of Artificial Sequence: Synthetic oligonucleotide
  Antisense strand to SEQ ID NO: 181360
uauaggaguacuaucccuu

SEQ ID NO: 181362 - RNA, 19 nt, Artificial Sequence
  Description of Artificial Sequence: Synthetic oligonucleotide
  Sense strand starting at position 2631 of SEQ ID NO: 2338
aaggaugagccuugacuuu

SEQ ID NO: 181363 - RNA, 19 nt, Artificial Sequence
  Description of Artificial Sequence: Synthetic oligonucleotide
  Antisense strand to SEQ ID NO: 181362
aaagucaaggcucauccuu

SEQ ID NO: 181364 - RNA, 19 nt, Artificial Sequence
  Description of Artificial Sequence: Synthetic oligonucleotide
  Sense strand starting at position 2613 of SEQ ID NO: 2338
gaauuuguguucgugagaa

SEQ ID NO: 181365 - RNA, 19 nt, Artificial Sequence
  Description of Artificial Sequence: Synthetic oligonucleotide
  Antisense strand to SEQ ID NO: 181364
uucucacgaacacaaauuc

SEQ ID NO: 181366 - RNA, 19 nt, Artificial Sequence
  Description of Artificial Sequence: Synthetic oligonucleotide
  Sense strand starting at position 2612 of SEQ ID NO: 2338
ggaauuuguguucgugaga

SEQ ID NO: 181367 - RNA, 19 nt, Artificial Sequence
  Description of Artificial Sequence: Synthetic oligonucleotide
  Antisense strand to SEQ ID NO: 181366
ucucacgaacacaaauucc

SEQ ID NO: 181368 - RNA, 19 nt, Artificial Sequence
  Description of Artificial Sequence: Synthetic oligonucleotide
  Sense strand starting at position 2611 of SEQ ID NO: 2338
aggaauuuguguucgugag

SEQ ID NO: 181369 - RNA, 19 nt, Artificial Sequence
  Description of Artificial Sequence: Synthetic oligonucleotide
  Antisense strand to SEQ ID NO: 181368
cucacgaacacaaauuccu

SEQ ID NO: 181370 - RNA, 19 nt, Artificial Sequence
  Description of Artificial Sequence: Synthetic oligonucleotide
  Sense strand starting at position 2609 of SEQ ID NO: 2338
aaaggaauuuguguucgug

SEQ ID NO: 181371 - RNA, 19 nt, Artificial Sequence
  Description of Artificial Sequence: Synthetic oligonucleotide
  Antisense strand to SEQ ID NO: 181370
cacgaacacaaauuccuuu

SEQ ID NO: 181372 - RNA, 19 nt, Artificial Sequence
  Description of Artificial Sequence: Synthetic oligonucleotide
  Sense strand starting at position 2592 of SEQ ID NO: 2338
cgggacacauugccuuaaa

SEQ ID NO: 181373 - RNA, 19 nt, Artificial Sequence
  Description of Artificial Sequence: Synthetic oligonucleotide
  Antisense strand to SEQ ID NO: 181372
uuuaaggcaaugugucccg

SEQ ID NO: 181374 - RNA, 19 nt, Artificial Sequence
  Description of Artificial Sequence: Synthetic oligonucleotide
  Sense strand starting at position 2571 of SEQ ID NO: 2338
cccuuauauaguugggaga

SEQ ID NO: 181375 - RNA, 19 nt, Artificial Sequence
  Description of Artificial Sequence: Synthetic oligonucleotide
  Antisense strand to SEQ ID NO: 181374
ucucccaacuauauaaggg

SEQ ID NO: 181376 - RNA, 19 nt, Artificial Sequence
  Description of Artificial Sequence: Synthetic oligonucleotide
  Sense strand starting at position 2482 of SEQ ID NO: 2338
gugcacuuccuuggcaaga

SEQ ID NO: 181377 - RNA, 19 nt, Artificial Sequence
  Description of Artificial Sequence: Synthetic oligonucleotide
  Antisense strand to SEQ ID NO: 181376
ucuugccaaggaagugcac

SEQ ID NO: 181378 - RNA, 19 nt, Artificial Sequence
  Description of Artificial Sequence: Synthetic oligonucleotide
  Sense strand starting at position 2392 of SEQ ID NO: 2338
cuuuguggagcugaguaaa

SEQ ID NO: 181379 - RNA, 19 nt, Artificial Sequence
  Description of Artificial Sequence: Synthetic oligonucleotide
  Antisense strand to SEQ ID NO: 181378
uuuacucagcuccacaaag

SEQ ID NO: 181380 - RNA, 19 nt, Artificial Sequence
  Description of Artificial Sequence: Synthetic oligonucleotide
  Sense strand starting at position 2276 of SEQ ID NO: 2338
agaucaguguuggucagag

SEQ ID NO: 181381 - RNA, 19 nt, Artificial Sequence
  Description of Artificial Sequence: Synthetic oligonucleotide
  Antisense strand to SEQ ID NO: 181380
cucugaccaacacugaucu

SEQ ID NO: 181382 - RNA, 19 nt, Artificial Sequence
  Description of Artificial Sequence: Synthetic oligonucleotide
  Sense strand starting at position 2275 of SEQ ID NO: 2338
aagaucaguguuggucaga

SEQ ID NO: 181383 - RNA, 19 nt, Artificial Sequence
  Description of Artificial Sequence: Synthetic oligonucleotide
  Antisense strand to SEQ ID NO: 181382
ucugaccaacacugaucuu

SEQ ID NO: 181384 - RNA, 19 nt, Artificial Sequence
  Description of Artificial Sequence: Synthetic oligonucleotide
  Sense strand starting at position 2271 of SEQ ID NO: 2338
uuccaagaucaguguuggu

SEQ ID NO: 181385 - RNA, 19 nt, Artificial Sequence
  Description of Artificial Sequence: Synthetic oligonucleotide
  Antisense strand to SEQ ID NO: 181384
accaacacugaucuuggaa

SEQ ID NO: 181386 - RNA, 19 nt, Artificial Sequence
  Description of Artificial Sequence: Synthetic oligonucleotide
  Sense strand starting at position 2224 of SEQ ID NO: 2338
ggaguaugugguugcacau

SEQ ID NO: 181387 - RNA, 19 nt, Artificial Sequence
  Description of Artificial Sequence: Synthetic oligonucleotide
  Antisense strand to SEQ ID NO: 181386
augugcaaccacauacucc

SEQ ID NO: 181388 - RNA, 19 nt, Artificial Sequence
  Description of Artificial Sequence: Synthetic oligonucleotide
  Sense strand starting at position 2223 of SEQ ID NO: 2338
uggaguaugugguugcaca

SEQ ID NO: 181389 - RNA, 19 nt, Artificial Sequence
  Description of Artificial Sequence: Synthetic oligonucleotide
  Antisense strand to SEQ ID NO: 181388
ugugcaaccacauacucca

SEQ ID NO: 181390 - RNA, 19 nt, Artificial Sequence
  Description of Artificial Sequence: Synthetic oligonucleotide
  Sense strand starting at position 2213 of SEQ ID NO: 2338
cagcuuuaucuggaguaug

SEQ ID NO: 181391 - RNA, 19 nt, Artificial Sequence
  Description of Artificial Sequence: Synthetic oligonucleotide
  Antisense strand to SEQ ID NO: 181390
cauacuccagauaaagcug

SEQ ID NO: 181392 - RNA, 19 nt, Artificial Sequence
  Description of Artificial Sequence: Synthetic oligonucleotide
  Sense strand starting at position 2076 of SEQ ID NO: 2338
cgguuucgcagagaacuaa

SEQ ID NO: 181393 - RNA, 19 nt, Artificial Sequence
  Description of Artificial Sequence: Synthetic oligonucleotide
  Antisense strand to SEQ ID NO: 181392
uuaguucucugcgaaaccg

SEQ ID NO: 181394 - RNA, 19 nt, Artificial Sequence
  Description of Artificial Sequence: Synthetic oligonucleotide
  Sense strand starting at position 2075 of SEQ ID NO: 2338
gcgguuucgcagagaacua

SEQ ID NO: 181395 - RNA, 19 nt, Artificial Sequence
  Description of Artificial Sequence: Synthetic oligonucleotide
  Antisense strand to SEQ ID NO: 181394
uaguucucugcgaaaccgc

SEQ ID NO: 181396 - RNA, 19 nt, Artificial Sequence
  Description of Artificial Sequence: Synthetic oligonucleotide
  Sense strand starting at position 1542 of SEQ ID NO: 2338
ugagcucauucucuuauga

SEQ ID NO: 181397 - RNA, 19 nt, Artificial Sequence
  Description of Artificial Sequence: Synthetic oligonucleotide
  Antisense strand to SEQ ID NO: 181396
ucauaagagaaugagcuca

SEQ ID NO: 181398 - RNA, 19 nt, Artificial Sequence
  Description of Artificial Sequence: Synthetic oligonucleotide
  Sense strand starting at position 1403 of SEQ ID NO: 2338
ucuuguuacugaucaucca

SEQ ID NO: 181399 - RNA, 19 nt, Artificial Sequence
  Description of Artificial Sequence: Synthetic oligonucleotide
  Antisense strand to SEQ ID NO: 181398
uggaugaucaguaacaaga

SEQ ID NO: 181400 - RNA, 19 nt, Artificial Sequence
  Description of Artificial Sequence: Synthetic oligonucleotide
  Sense strand starting at position 1326 of SEQ ID NO: 2338
ggaauaguuugaguccuac

SEQ ID NO: 181401 - RNA, 19 nt, Artificial Sequence
  Description of Artificial Sequence: Synthetic oligonucleotide
  Antisense strand to SEQ ID NO: 181400
guaggacucaaacuauucc

SEQ ID NO: 181402 - RNA, 19 nt, Artificial Sequence
  Description of Artificial Sequence: Synthetic oligonucleotide
  Sense strand starting at position 1284 of SEQ ID NO: 2338
agcccuaucccuuagcgaa

SEQ ID NO: 181403 - RNA, 19 nt, Artificial Sequence
  Description of Artificial Sequence: Synthetic oligonucleotide
  Antisense strand to SEQ ID NO: 181402
uucgcuaagggauagggcu

SEQ ID NO: 181404 - RNA, 19 nt, Artificial Sequence
  Description of Artificial Sequence: Synthetic oligonucleotide
  Sense strand starting at position 873 of SEQ ID NO: 2338
caccuaaucuggguuaagu

SEQ ID NO: 181405 - RNA, 19 nt, Artificial Sequence
  Description of Artificial Sequence: Synthetic oligonucleotide
  Antisense strand to SEQ ID NO: 181404
acuuaacccagauuaggug

SEQ ID NO: 181406 - RNA, 19 nt, Artificial Sequence
  Description of Artificial Sequence: Synthetic oligonucleotide
  Sense strand starting at position 840 of SEQ ID NO: 2338
ccacaauagcuuggaaauu

SEQ ID NO: 181407 - RNA, 19 nt, Artificial Sequence
  Description of Artificial Sequence: Synthetic oligonucleotide
  Antisense strand to SEQ ID NO: 181406
aauuuccaagcuauugugg

SEQ ID NO: 181408 - RNA, 19 nt, Artificial Sequence
  Description of Artificial Sequence: Synthetic oligonucleotide
  Sense strand starting at position 839 of SEQ ID NO: 2338
cccacaauagcuuggaaau

SEQ ID NO: 181409 - RNA, 19 nt, Artificial Sequence
  Description of Artificial Sequence: Synthetic oligonucleotide
  Antisense strand to SEQ ID NO: 181408
auuuccaagcuauuguggg

SEQ ID NO: 181410 - RNA, 19 nt, Artificial Sequence
  Description of Artificial Sequence: Synthetic oligonucleotide
  Sense strand starting at position 724 of SEQ ID NO: 2338
uuggguuagcucuaccuca

SEQ ID NO: 181411 - RNA, 19 nt, Artificial Sequence
  Description of Artificial Sequence: Synthetic oligonucleotide
  Antisense strand to SEQ ID NO: 181410
ugagguagagcuaacccaa

SEQ ID NO: 181412 - RNA, 19 nt, Artificial Sequence
  Description of Artificial Sequence: Synthetic oligonucleotide
  Sense strand starting at position 686 of SEQ ID NO: 2338
ugaaaugaguuugaagaag

SEQ ID NO: 181413 - RNA, 19 nt, Artificial Sequence
  Description of Artificial Sequence: Synthetic oligonucleotide
  Antisense strand to SEQ ID NO: 181412
cuucuucaaacucauuuca

SEQ ID NO: 181414 - RNA, 19 nt, Artificial Sequence
  Description of Artificial Sequence: Synthetic oligonucleotide
  Sense strand starting at position 473 of SEQ ID NO: 2338
ggacuuguggcugacacau

SEQ ID NO: 181415 - RNA, 19 nt, Artificial Sequence
  Description of Artificial Sequence: Synthetic oligonucleotide
  Antisense strand to SEQ ID NO: 181414
augugucagccacaagucc

SEQ ID NO: 181416 - RNA, 19 nt, Artificial Sequence
  Description of Artificial Sequence: Synthetic oligonucleotide
  Sense strand starting at position 472 of SEQ ID NO: 2338
aggacuuguggcugacaca

SEQ ID NO: 181417 - RNA, 19 nt, Artificial Sequence
  Description of Artificial Sequence: Synthetic oligonucleotide
  Antisense strand to SEQ ID NO: 181416
ugugucagccacaaguccu

SEQ ID NO: 181418 - RNA, 19 nt, Artificial Sequence
  Description of Artificial Sequence: Synthetic oligonucleotide
  Sense strand starting at position 466 of SEQ ID NO: 2338
gggaguaggacuuguggcu

SEQ ID NO: 181419 - RNA, 19 nt, Artificial Sequence
  Description of Artificial Sequence: Synthetic oligonucleotide
  Antisense strand to SEQ ID NO: 181418
agccacaaguccuacuccc

SEQ ID NO: 181420 - RNA, 19 nt, Artificial Sequence
  Description of Artificial Sequence: Synthetic oligonucleotide
  Sense strand starting at position 169 of SEQ ID NO: 2338
gacuucuuuccggaucucu

SEQ ID NO: 181421 - RNA, 19 nt, Artificial Sequence
  Description of Artificial Sequence: Synthetic oligonucleotide
  Antisense strand to SEQ ID NO: 181420
agagauccggaaagaaguc

SEQ ID NO: 181422 - RNA, 19 nt, Artificial Sequence
  Description of Artificial Sequence: Synthetic oligonucleotide
  Sense strand starting at position 152 of SEQ ID NO: 2338
gugccaacuuggucuuaga

SEQ ID NO: 181423 - RNA, 19 nt, Artificial Sequence
  Description of Artificial Sequence: Synthetic oligonucleotide
  Antisense strand to SEQ ID NO: 181422
ucuaagaccaaguuggcac

SEQ ID NO: 181424 - RNA, 19 nt, Artificial Sequence
  Description of Artificial Sequence: Synthetic oligonucleotide
  Sense strand starting at position 3532 of SEQ ID NO: 2339
gcuccuaagcuguacaguu

SEQ ID NO: 181425 - RNA, 19 nt, Artificial Sequence
  Description of Artificial Sequence: Synthetic oligonucleotide
  Antisense strand to SEQ ID NO: 181424
aacuguacagcuuaggagc

SEQ ID NO: 181426 - RNA, 19 nt, Artificial Sequence
  Description of Artificial Sequence: Synthetic oligonucleotide
  Sense strand starting at position 3401 of SEQ ID NO: 2339
uuguucuucccagaagguu

SEQ ID NO: 181427 - RNA, 19 nt, Artificial Sequence
  Description of Artificial Sequence: Synthetic oligonucleotide
  Antisense strand to SEQ ID NO: 181426
aaccuucugggaagaacaa

SEQ ID NO: 181428 - RNA, 19 nt, Artificial Sequence
  Description of Artificial Sequence: Synthetic oligonucleotide
  Sense strand starting at position 3396 of SEQ ID NO: 2339
uguccuuguucuucccaga

SEQ ID NO: 181429 - RNA, 19 nt, Artificial Sequence
  Description of Artificial Sequence: Synthetic oligonucleotide
  Antisense strand to SEQ ID NO: 181428
ucugggaagaacaaggaca

SEQ ID NO: 181430 - RNA, 19 nt, Artificial Sequence
  Description of Artificial Sequence: Synthetic oligonucleotide
  Sense strand starting at position 3008 of SEQ ID NO: 2339
ggguuaucacuaugaccca

SEQ ID NO: 181431 - RNA, 19 nt, Artificial Sequence
  Description of Artificial Sequence: Synthetic oligonucleotide
  Antisense strand to SEQ ID NO: 181430
ugggucauagugauaaccc

SEQ ID NO: 181432 - RNA, 19 nt, Artificial Sequence
  Description of Artificial Sequence: Synthetic oligonucleotide
  Sense strand starting at position 2960 of SEQ ID NO: 2339
gucaguuaggaaugaauga

SEQ ID NO: 181433 - RNA, 19 nt, Artificial Sequence
  Description of Artificial Sequence: Synthetic oligonucleotide
  Antisense strand to SEQ ID NO: 181432
ucauucauuccuaacugac

SEQ ID NO: 181434 - RNA, 19 nt, Artificial Sequence
  Description of Artificial Sequence: Synthetic oligonucleotide
  Sense strand starting at position 2952 of SEQ ID NO: 2339
gguccuaugucaguuagga

SEQ ID NO: 181435 - RNA, 19 nt, Artificial Sequence
  Description of Artificial Sequence: Synthetic oligonucleotide
  Antisense strand to SEQ ID NO: 181434
uccuaacugacauaggacc

SEQ ID NO: 181436 - RNA, 19 nt, Artificial Sequence
  Description of Artificial Sequence: Synthetic oligonucleotide
  Sense strand starting at position 2919 of SEQ ID NO: 2339
gcagaaaugucccuaccuc

SEQ ID NO: 181437 - RNA, 19 nt, Artificial Sequence
  Description of Artificial Sequence: Synthetic oligonucleotide
  Antisense strand to SEQ ID NO: 181436
gagguagggacauuucugc

SEQ ID NO: 181438 - RNA, 19 nt, Artificial Sequence
  Description of Artificial Sequence: Synthetic oligonucleotide
  Sense strand starting at position 2860 of SEQ ID NO: 2339
ggcaauaggcucuagugaa

SEQ ID NO: 181439 - RNA, 19 nt, Artificial Sequence
  Description of Artificial Sequence: Synthetic oligonucleotide
  Antisense strand to SEQ ID NO: 181438
uucacuagagccuauugcc

SEQ ID NO: 181440 - RNA, 19 nt, Artificial Sequence
  Description of Artificial Sequence: Synthetic oligonucleotide
  Sense strand starting at position 2838 of SEQ ID NO: 2339
aagggauaguacuccuaua

SEQ ID NO: 181441 - RNA, 19 nt, Artificial Sequence
  Description of Artificial Sequence: Synthetic oligonucleotide
  Antisense strand to SEQ ID NO: 181440
uauaggaguacuaucccuu

SEQ ID NO: 181442 - RNA, 19 nt, Artificial Sequence
  Description of Artificial Sequence: Synthetic oligonucleotide
  Sense strand starting at position 2635 of SEQ ID NO: 2339
aaggaugagccuugacuuu

SEQ ID NO: 181443 - RNA, 19 nt, Artificial Sequence
  Description of Artificial Sequence: Synthetic oligonucleotide
  Antisense strand to SEQ ID NO: 181442
aaagucaaggcucauccuu

SEQ ID NO: 181444 - RNA, 19 nt, Artificial Sequence
  Description of Artificial Sequence: Synthetic oligonucleotide
  Sense strand starting at position 2617 of SEQ ID NO: 2339
gaauuuguguucgugagaa

SEQ ID NO: 181445 - RNA, 19 nt, Artificial Sequence
  Description of Artificial Sequence: Synthetic oligonucleotide
  Antisense strand to SEQ ID NO: 181444
uucucacgaacacaaauuc

SEQ ID NO: 181446 - RNA, 19 nt, Artificial Sequence
  Description of Artificial Sequence: Synthetic oligonucleotide
  Sense strand starting at position 2616 of SEQ ID NO: 2339
ggaauuuguguucgugaga

SEQ ID NO: 181447 - RNA, 19 nt, Artificial Sequence
  Description of Artificial Sequence: Synthetic oligonucleotide
  Antisense strand to SEQ ID NO: 181446
ucucacgaacacaaauucc

SEQ ID NO: 181448 - RNA, 19 nt, Artificial Sequence
  Description of Artificial Sequence: Synthetic oligonucleotide
  Sense strand starting at position 2615 of SEQ ID NO: 2339
aggaauuuguguucgugag

SEQ ID NO: 181449 - RNA, 19 nt, Artificial Sequence
  Description of Artificial Sequence: Synthetic oligonucleotide
  Antisense strand to SEQ ID NO: 181448
cucacgaacacaaauuccu

SEQ ID NO: 181450 - RNA, 19 nt, Artificial Sequence
  Description of Artificial Sequence: Synthetic oligonucleotide
  Sense strand starting at position 2613 of SEQ ID NO: 2339
aaaggaauuuguguucgug

SEQ ID NO: 181451 - RNA, 19 nt, Artificial Sequence
  Description of Artificial Sequence: Synthetic oligonucleotide
  Antisense strand to SEQ ID NO: 181450
cacgaacacaaauuccuuu

SEQ ID NO: 181452 - RNA, 19 nt, Artificial Sequence
  Description of Artificial Sequence: Synthetic oligonucleotide
  Sense strand starting at position 2596 of SEQ ID NO: 2339
cgggacacauugccuuaaa

SEQ ID NO: 181453 - RNA, 19 nt, Artificial Sequence
  Description of Artificial Sequence: Synthetic oligonucleotide
  Antisense strand to SEQ ID NO: 181452
uuuaaggcaaugugucccg

SEQ ID NO: 181454 - RNA, 19 nt, Artificial Sequence
  Description of Artificial Sequence: Synthetic oligonucleotide
  Sense strand starting at position 2575 of SEQ ID NO: 2339
cccuuauauaguugggaga

SEQ ID NO: 181455 - RNA, 19 nt, Artificial Sequence
  Description of Artificial Sequence: Synthetic oligonucleotide
  Antisense strand to SEQ ID NO: 181454
ucucccaacuauauaaggg

SEQ ID NO: 181456 - RNA, 19 nt, Artificial Sequence
  Description of Artificial Sequence: Synthetic oligonucleotide
  Sense strand starting at position 2486 of SEQ ID NO: 2339
gugcacuuccuuggcaaga

SEQ ID NO: 181457 - RNA, 19 nt, Artificial Sequence
  Description of Artificial Sequence: Synthetic oligonucleotide
  Antisense strand to SEQ ID NO: 181456
ucuugccaaggaagugcac

SEQ ID NO: 181458 - RNA, 19 nt, Artificial Sequence
  Description of Artificial Sequence: Synthetic oligonucleotide
  Sense strand starting at position 2396 of SEQ ID NO: 2339
cuuuguggagcugaguaaa

SEQ ID NO: 181459 - RNA, 19 nt, Artificial Sequence
  Description of Artificial Sequence: Synthetic oligonucleotide
  Antisense strand to SEQ ID NO: 181458
uuuacucagcuccacaaag

SEQ ID NO: 181460 - RNA, 19 nt, Artificial Sequence
  Description of Artificial Sequence: Synthetic oligonucleotide
  Sense strand starting at position 2280 of SEQ ID NO: 2339
agaucaguguuggucagag

SEQ ID NO: 181461 - RNA, 19 nt, Artificial Sequence
  Description of Artificial Sequence: Synthetic oligonucleotide
  Antisense strand to SEQ ID NO: 181460
cucugaccaacacugaucu

SEQ ID NO: 181462 - RNA, 19 nt, Artificial Sequence
  Description of Artificial Sequence: Synthetic oligonucleotide
  Sense strand starting at position 2279 of SEQ ID NO: 2339
aagaucaguguuggucaga

SEQ ID NO: 181463 - RNA, 19 nt, Artificial Sequence
  Description of Artificial Sequence: Synthetic oligonucleotide
  Antisense strand to SEQ ID NO: 181462
ucugaccaacacugaucuu

SEQ ID NO: 181464 - RNA, 19 nt, Artificial Sequence
  Description of Artificial Sequence: Synthetic oligonucleotide
  Sense strand starting at position 2275 of SEQ ID NO: 2339
uuccaagaucaguguuggu

SEQ ID NO: 181465 - RNA, 19 nt, Artificial Sequence
  Description of Artificial Sequence: Synthetic oligonucleotide
  Antisense strand to SEQ ID NO: 181464
accaacacugaucuuggaa

SEQ ID NO: 181466 - RNA, 19 nt, Artificial Sequence
  Description of Artificial Sequence: Synthetic oligonucleotide
  Sense strand starting at position 2228 of SEQ ID NO: 2339
ggaguaugugguugcacau

SEQ ID NO: 181467 - RNA, 19 nt, Artificial Sequence
  Description of Artificial Sequence: Synthetic oligonucleotide
  Antisense strand to SEQ ID NO: 181466
augugcaaccacauacucc

SEQ ID NO: 181468 - RNA, 19 nt, Artificial Sequence
  Description of Artificial Sequence: Synthetic oligonucleotide
  Sense strand starting at position 2227 of SEQ ID NO: 2339
uggaguaugugguugcaca

SEQ ID NO: 181469 - RNA, 19 nt, Artificial Sequence
  Description of Artificial Sequence: Synthetic oligonucleotide
  Antisense strand to SEQ ID NO: 181468
ugugcaaccacauacucca

SEQ ID NO: 181470 - RNA, 19 nt, Artificial Sequence
  Description of Artificial Sequence: Synthetic oligonucleotide
  Sense strand starting at position 2217 of SEQ ID NO: 2339
cagcuuuaucuggaguaug

SEQ ID NO: 181471 - RNA, 19 nt, Artificial Sequence
  Description of Artificial Sequence: Synthetic oligonucleotide
  Antisense strand to SEQ ID NO: 181470
cauacuccagauaaagcug

SEQ ID NO: 181472 - RNA, 19 nt, Artificial Sequence
  Description of Artificial Sequence: Synthetic oligonucleotide
  Sense strand starting at position 2080 of SEQ ID NO: 2339
cgguuucgcagagaacuaa

SEQ ID NO: 181473 - RNA, 19 nt, Artificial Sequence
  Description of Artificial Sequence: Synthetic oligonucleotide
  Antisense strand to SEQ ID NO: 181472
uuaguucucugcgaaaccg

SEQ ID NO: 181474 - RNA, 19 nt, Artificial Sequence
  Description of Artificial Sequence: Synthetic oligonucleotide
  Sense strand starting at position 2079 of SEQ ID NO: 2339
gcgguuucgcagagaacua

SEQ ID NO: 181475 - RNA, 19 nt, Artificial Sequence
  Description of Artificial Sequence: Synthetic oligonucleotide
  Antisense strand to SEQ ID NO: 181474
uaguucucugcgaaaccgc

SEQ ID NO: 181476 - RNA, 19 nt, Artificial Sequence
  Description of Artificial Sequence: Synthetic oligonucleotide
  Sense strand starting at position 1546 of SEQ ID NO: 2339
ugagcucauucucuuauga

SEQ ID NO: 181477 - RNA, 19 nt, Artificial Sequence
  Description of Artificial Sequence: Synthetic oligonucleotide
  Antisense strand to SEQ ID NO: 181476
ucauaagagaaugagcuca

SEQ ID NO: 181478 - RNA, 19 nt, Artificial Sequence
  Description of Artificial Sequence: Synthetic oligonucleotide
  Sense strand starting at position 1407 of SEQ ID NO: 2339
ucuuguuacugaucaucca

SEQ ID NO: 181479 - RNA, 19 nt, Artificial Sequence
  Description of Artificial Sequence: Synthetic oligonucleotide
  Antisense strand to SEQ ID NO: 181478
uggaugaucaguaacaaga

SEQ ID NO: 181480 - RNA, 19 nt, Artificial Sequence
  Description of Artificial Sequence: Synthetic oligonucleotide
  Sense strand starting at position 1330 of SEQ ID NO: 2339
ggaauaguuugaguccuac

SEQ ID NO: 181481 - RNA, 19 nt, Artificial Sequence
  Description of Artificial Sequence: Synthetic oligonucleotide
  Antisense strand to SEQ ID NO: 181480
guaggacucaaacuauucc

SEQ ID NO: 181482 - RNA, 19 nt, Artificial Sequence
  Description of Artificial Sequence: Synthetic oligonucleotide
  Sense strand starting at position 1288 of SEQ ID NO: 2339
agcccuaucccuuagcgaa

SEQ ID NO: 181483 - RNA, 19 nt, Artificial Sequence
  Description of Artificial Sequence: Synthetic oligonucleotide
  Antisense strand to SEQ ID NO: 181482
uucgcuaagggauagggcu

SEQ ID NO: 181484 - RNA, 19 nt, Artificial Sequence
  Description of Artificial Sequence: Synthetic oligonucleotide
  Sense strand starting at position 877 of SEQ ID NO: 2339
caccuaaucuggguuaagu

SEQ ID NO: 181485 - RNA, 19 nt, Artificial Sequence
  Description of Artificial Sequence: Synthetic oligonucleotide
  Antisense strand to SEQ ID NO: 181484
acuuaacccagauuaggug

SEQ ID NO: 181486 - RNA, 19 nt, Artificial Sequence
  Description of Artificial Sequence: Synthetic oligonucleotide
  Sense strand starting at position 844 of SEQ ID NO: 2339
ccacaauagcuuggaaauu

SEQ ID NO: 181487 - RNA, 19 nt, Artificial Sequence
  Description of Artificial Sequence: Synthetic oligonucleotide
  Antisense strand to SEQ ID NO: 181486
aauuuccaagcuauugugg

SEQ ID NO: 181488 - RNA, 19 nt, Artificial Sequence
  Description of Artificial Sequence: Synthetic oligonucleotide
  Sense strand starting at position 843 of SEQ ID NO: 2339
cccacaauagcuuggaaau

SEQ ID NO: 181489 - RNA, 19 nt, Artificial Sequence
  Description of Artificial Sequence: Synthetic oligonucleotide
  Antisense strand to SEQ ID NO: 181488
auuuccaagcuauuguggg

SEQ ID NO: 181490 - RNA, 19 nt, Artificial Sequence
  Description of Artificial Sequence: Synthetic oligonucleotide
  Sense strand starting at position 728 of SEQ ID NO: 2339
uuggguuagcucuaccuca

SEQ ID NO: 181491 - RNA, 19 nt, Artificial Sequence
  Description of Artificial Sequence: Synthetic oligonucleotide
  Antisense strand to SEQ ID NO: 181490
ugagguagagcuaacccaa

SEQ ID NO: 181492 - RNA, 19 nt, Artificial Sequence
  Description of Artificial Sequence: Synthetic oligonucleotide
  Sense strand starting at position 690 of SEQ ID NO: 2339
ugaaaugaguuugaagaag

SEQ ID NO: 181493 - RNA, 19 nt, Artificial Sequence
  Description of Artificial Sequence: Synthetic oligonucleotide
  Antisense strand to SEQ ID NO: 181492
cuucuucaaacucauuuca

SEQ ID NO: 181494 - RNA, 19 nt, Artificial Sequence
  Description of Artificial Sequence: Synthetic oligonucleotide
  Sense strand starting at position 477 of SEQ ID NO: 2339
ggacuuguggcugacacau

SEQ ID NO: 181495 - RNA, 19 nt, Artificial Sequence
  Description of Artificial Sequence: Synthetic oligonucleotide
  Antisense strand to SEQ ID NO: 181494
augugucagccacaagucc

SEQ ID NO: 181496 - RNA, 19 nt, Artificial Sequence
  Description of Artificial Sequence: Synthetic oligonucleotide
  Sense strand starting at position 476 of SEQ ID NO: 2339
aggacuuguggcugacaca

SEQ ID NO: 181497 - RNA, 19 nt, Artificial Sequence
  Description of Artificial Sequence: Synthetic oligonucleotide
  Antisense strand to SEQ ID NO: 181496
ugugucagccacaaguccu

SEQ ID NO: 181498 - RNA, 19 nt, Artificial Sequence
  Description of Artificial Sequence: Synthetic oligonucleotide
  Sense strand starting at position 470 of SEQ ID NO: 2339
gggaguaggacuuguggcu

SEQ ID NO: 181499 - RNA, 19 nt, Artificial Sequence
  Description of Artificial Sequence: Synthetic oligonucleotide
  Antisense strand to SEQ ID NO: 181498
agccacaaguccuacuccc

SEQ ID NO: 181500 - RNA, 19 nt, Artificial Sequence
  Description of Artificial Sequence: Synthetic oligonucleotide
  Sense strand starting at position 173 of SEQ ID NO: 2339
gacuucuuuccggaucucu

SEQ ID NO: 181501 - RNA, 19 nt, Artificial Sequence
  Description of Artificial Sequence: Synthetic oligonucleotide
  Antisense strand to SEQ ID NO: 181500
agagauccggaaagaaguc

SEQ ID NO: 181502 - RNA, 19 nt, Artificial Sequence
  Description of Artificial Sequence: Synthetic oligonucleotide
  Sense strand starting at position 156 of SEQ ID NO: 2339
gugccaacuuggucuuaga

SEQ ID NO: 181503 - RNA, 19 nt, Artificial Sequence
  Description of Artificial Sequence: Synthetic oligonucleotide
  Antisense strand to SEQ ID NO: 181502
ucuaagaccaaguuggcac

SEQ ID NO: 181504 - RNA, 19 nt, Artificial Sequence
  Description of Artificial Sequence: Synthetic oligonucleotide
  Sense strand starting at position 3937 of SEQ ID NO: 2340
cggguagggccagauugua

SEQ ID NO: 181505 - RNA, 19 nt, Artificial Sequence
  Description of Artificial Sequence: Synthetic oligonucleotide
  Antisense strand to SEQ ID NO: 181504
uacaaucuggcccuacccg

SEQ ID NO: 181506 - RNA, 19 nt, Artificial Sequence
  Description of Artificial Sequence: Synthetic oligonucleotide
  Sense strand starting at position 3873 of SEQ ID NO: 2340
agagguggugauugcagua

SEQ ID NO: 181507 - RNA, 19 nt, Artificial Sequence
  Description of Artificial Sequence: Synthetic oligonucleotide
  Antisense strand to SEQ ID NO: 181506
uacugcaaucaccaccucu

SEQ ID NO: 181508 - RNA, 19 nt, Artificial Sequence
  Description of Artificial Sequence: Synthetic oligonucleotide
  Sense strand starting at position 3665 of SEQ ID NO: 2340
gguguucuaggugagauaa

SEQ ID NO: 181509 - RNA, 19 nt, Artificial Sequence
  Description of Artificial Sequence: Synthetic oligonucleotide
  Antisense strand to SEQ ID NO: 181508
uuaucucaccuagaacacc

SEQ ID NO: 181510 - RNA, 19 nt, Artificial Sequence
  Description of Artificial Sequence: Synthetic oligonucleotide
  Sense strand starting at position 3664 of SEQ ID NO: 2340
ggguguucuaggugagaua

SEQ ID NO: 181511 - RNA, 19 nt, Artificial Sequence
  Description of Artificial Sequence: Synthetic oligonucleotide
  Antisense strand to SEQ ID NO: 181510
uaucucaccuagaacaccc

SEQ ID NO: 181512 - RNA, 19 nt, Artificial Sequence
  Description of Artificial Sequence: Synthetic oligonucleotide
  Sense strand starting at position 3662 of SEQ ID NO: 2340
aaggguguucuaggugaga

SEQ ID NO: 181513 - RNA, 19 nt, Artificial Sequence
  Description of Artificial Sequence: Synthetic oligonucleotide
  Antisense strand to SEQ ID NO: 181512
ucucaccuagaacacccuu

SEQ ID NO: 181514 - RNA, 19 nt, Artificial Sequence
  Description of Artificial Sequence: Synthetic oligonucleotide
  Sense strand starting at position 3655 of SEQ ID NO: 2340
auauaacaaggguguucua

SEQ ID NO: 181515 - RNA, 19 nt, Artificial Sequence
  Description of Artificial Sequence: Synthetic oligonucleotide
  Antisense strand to SEQ ID NO: 181514
uagaacacccuuguuauau

SEQ ID NO: 181516 - RNA, 19 nt, Artificial Sequence
  Description of Artificial Sequence: Synthetic oligonucleotide
  Sense strand starting at position 3554 of SEQ ID NO: 2340
gaaucuagauguccugaaa

SEQ ID NO: 181517 - RNA, 19 nt, Artificial Sequence
  Description of Artificial Sequence: Synthetic oligonucleotide
  Antisense strand to SEQ ID NO: 181516
uuucaggacaucuagauuc

SEQ ID NO: 181518 - RNA, 19 nt, Artificial Sequence
  Description of Artificial Sequence: Synthetic oligonucleotide
  Sense strand starting at position 3541 of SEQ ID NO: 2340
cucagaaagguuggaaucu

SEQ ID NO: 181519 - RNA, 19 nt, Artificial Sequence
  Description of Artificial Sequence: Synthetic oligonucleotide
  Antisense strand to SEQ ID NO: 181518
agauuccaaccuuucugag

SEQ ID NO: 181520 - RNA, 19 nt, Artificial Sequence
  Description of Artificial Sequence: Synthetic oligonucleotide
  Sense strand starting at position 3326 of SEQ ID NO: 2340
gcuaauugagcguugguuu

SEQ ID NO: 181521 - RNA, 19 nt, Artificial Sequence
  Description of Artificial Sequence: Synthetic oligonucleotide
  Antisense strand to SEQ ID NO: 181520
aaaccaacgcucaauuagc

SEQ ID NO: 181522 - RNA, 19 nt, Artificial Sequence
  Description of Artificial Sequence: Synthetic oligonucleotide
  Sense strand starting at position 3325 of SEQ ID NO: 2340
ugcuaauugagcguugguu

SEQ ID NO: 181523 - RNA, 19 nt, Artificial Sequence
  Description of Artificial Sequence: Synthetic oligonucleotide
  Antisense strand to SEQ ID NO: 181522
aaccaacgcucaauuagca

SEQ ID NO: 181524 - RNA, 19 nt, Artificial Sequence
  Description of Artificial Sequence: Synthetic oligonucleotide
  Sense strand starting at position 3249 of SEQ ID NO: 2340
gcaagaacuguuggcuaaa

SEQ ID NO: 181525 - RNA, 19 nt, Artificial Sequence
  Description of Artificial Sequence: Synthetic oligonucleotide
  Antisense strand to SEQ ID NO: 181524
uuuagccaacaguucuugc

SEQ ID NO: 181526 - RNA, 19 nt, Artificial Sequence
  Description of Artificial Sequence: Synthetic oligonucleotide
  Sense strand starting at position 3203 of SEQ ID NO: 2340
cagugagguguugaaauua

SEQ ID NO: 181527 - RNA, 19 nt, Artificial Sequence
  Description of Artificial Sequence: Synthetic oligonucleotide
  Antisense strand to SEQ ID NO: 181526
uaauuucaacaccucacug

SEQ ID NO: 181528 - RNA, 19 nt, Artificial Sequence
  Description of Artificial Sequence: Synthetic oligonucleotide
  Sense strand starting at position 3171 of SEQ ID NO: 2340
ucccuaggucugcagaguu

SEQ ID NO: 181529 - RNA, 19 nt, Artificial Sequence
  Description of Artificial Sequence: Synthetic oligonucleotide
  Antisense strand to SEQ ID NO: 181528
aacucugcagaccuaggga

SEQ ID NO: 181530 - RNA, 19 nt, Artificial Sequence
  Description of Artificial Sequence: Synthetic oligonucleotide
  Sense strand starting at position 3068 of SEQ ID NO: 2340
uuugaagccuaagagauuu

SEQ ID NO: 181531 - RNA, 19 nt, Artificial Sequence
  Description of Artificial Sequence: Synthetic oligonucleotide
  Antisense strand to SEQ ID NO: 181530
aaaucucuuaggcuucaaa

SEQ ID NO: 181532 - RNA, 19 nt, Artificial Sequence
  Description of Artificial Sequence: Synthetic oligonucleotide
  Sense strand starting at position 3052 of SEQ ID NO: 2340
auccuugugccuggaauuu

SEQ ID NO: 181533 - RNA, 19 nt, Artificial Sequence
  Description of Artificial Sequence: Synthetic oligonucleotide
  Antisense strand to SEQ ID NO: 181532
aaauuccaggcacaaggau

SEQ ID NO: 181534 - RNA, 19 nt, Artificial Sequence
  Description of Artificial Sequence: Synthetic oligonucleotide
  Sense strand starting at position 3051 of SEQ ID NO: 2340
aauccuugugccuggaauu

SEQ ID NO: 181535 - RNA, 19 nt, Artificial Sequence
  Description of Artificial Sequence: Synthetic oligonucleotide
  Antisense strand to SEQ ID NO: 181534
aauuccaggcacaaggauu

SEQ ID NO: 181536 - RNA, 19 nt, Artificial Sequence
  Description of Artificial Sequence: Synthetic oligonucleotide
  Sense strand starting at position 3050 of SEQ ID NO: 2340
caauccuugugccuggaau

SEQ ID NO: 181537 - RNA, 19 nt, Artificial Sequence
  Description of Artificial Sequence: Synthetic oligonucleotide
  Antisense strand to SEQ ID NO: 181536
auuccaggcacaaggauug

SEQ ID NO: 181538 - RNA, 19 nt, Artificial Sequence
  Description of Artificial Sequence: Synthetic oligonucleotide
  Sense strand starting at position 2895 of SEQ ID NO: 2340
ugaguuaggcuucaggcau

SEQ ID NO: 181539 - RNA, 19 nt, Artificial Sequence
  Description of Artificial Sequence: Synthetic oligonucleotide
  Antisense strand to SEQ ID NO: 181538
augccugaagccuaacuca

SEQ ID NO: 181540 - RNA, 19 nt, Artificial Sequence
  Description of Artificial Sequence: Synthetic oligonucleotide
  Sense strand starting at position 2872 of SEQ ID NO: 2340
cagucaguuccucagaaag

SEQ ID NO: 181541 - RNA, 19 nt, Artificial Sequence
  Description of Artificial Sequence: Synthetic oligonucleotide
  Antisense strand to SEQ ID NO: 181540
cuuucugaggaacugacug

SEQ ID NO: 181542 - RNA, 19 nt, Artificial Sequence
  Description of Artificial Sequence: Synthetic oligonucleotide
  Sense strand starting at position 2871 of SEQ ID NO: 2340
gcagucaguuccucagaaa

SEQ ID NO: 181543 - RNA, 19 nt, Artificial Sequence
  Description of Artificial Sequence: Synthetic oligonucleotide
  Antisense strand to SEQ ID NO: 181542
uuucugaggaacugacugc

SEQ ID NO: 181544 - RNA, 19 nt, Artificial Sequence
  Description of Artificial Sequence: Synthetic oligonucleotide
  Sense strand starting at position 2870 of SEQ ID NO: 2340
ggcagucaguuccucagaa

SEQ ID NO: 181545 - RNA, 19 nt, Artificial Sequence
  Description of Artificial Sequence: Synthetic oligonucleotide
  Antisense strand to SEQ ID NO: 181544
uucugaggaacugacugcc

SEQ ID NO: 181546 - RNA, 19 nt, Artificial Sequence
  Description of Artificial Sequence: Synthetic oligonucleotide
  Sense strand starting at position 2828 of SEQ ID NO: 2340
uugugaaaguaggucauau

SEQ ID NO: 181547 - RNA, 19 nt, Artificial Sequence
  Description of Artificial Sequence: Synthetic oligonucleotide
  Antisense strand to SEQ ID NO: 181546
auaugaccuacuuucacaa

SEQ ID NO: 181548 - RNA, 19 nt, Artificial Sequence
  Description of Artificial Sequence: Synthetic oligonucleotide
  Sense strand starting at position 2757 of SEQ ID NO: 2340
agguaauuaccuggucuuu

SEQ ID NO: 181549 - RNA, 19 nt, Artificial Sequence
  Description of Artificial Sequence: Synthetic oligonucleotide
  Antisense strand to SEQ ID NO: 181548
aaagaccagguaauuaccu

SEQ ID NO: 181550 - RNA, 19 nt, Artificial Sequence
  Description of Artificial Sequence: Synthetic oligonucleotide
  Sense strand starting at position 2700 of SEQ ID NO: 2340
ucgauagugagugguuaaa

SEQ ID NO: 181551 - RNA, 19 nt, Artificial Sequence
  Description of Artificial Sequence: Synthetic oligonucleotide
  Antisense strand to SEQ ID NO: 181550
uuuaaccacucacuaucga

SEQ ID NO: 181552 - RNA, 19 nt, Artificial Sequence
  Description of Artificial Sequence: Synthetic oligonucleotide
  Sense strand starting at position 2699 of SEQ ID NO: 2340
aucgauagugagugguuaa

SEQ ID NO: 181553 - RNA, 19 nt, Artificial Sequence
  Description of Artificial Sequence: Synthetic oligonucleotide
  Antisense strand to SEQ ID NO: 181552
uuaaccacucacuaucgau

SEQ ID NO: 181554 - RNA, 19 nt, Artificial Sequence
  Description of Artificial Sequence: Synthetic oligonucleotide
  Sense strand starting at position 2692 of SEQ ID NO: 2340
aggucauaucgauagugag

SEQ ID NO: 181555 - RNA, 19 nt, Artificial Sequence
  Description of Artificial Sequence: Synthetic oligonucleotide
  Antisense strand to SEQ ID NO: 181554
cucacuaucgauaugaccu

SEQ ID NO: 181556 - RNA, 19 nt, Artificial Sequence
  Description of Artificial Sequence: Synthetic oligonucleotide
  Sense strand starting at position 2594 of SEQ ID NO: 2340
auagcuugguucucauaac

SEQ ID NO: 181557 - RNA, 19 nt, Artificial Sequence
  Description of Artificial Sequence: Synthetic oligonucleotide
  Antisense strand to SEQ ID NO: 181556
guuaugagaaccaagcuau

SEQ ID NO: 181558 - RNA, 19 nt, Artificial Sequence
  Description of Artificial Sequence: Synthetic oligonucleotide
  Sense strand starting at position 2591 of SEQ ID NO: 2340
cuaauagcuugguucucau

SEQ ID NO: 181559 - RNA, 19 nt, Artificial Sequence
  Description of Artificial Sequence: Synthetic oligonucleotide
  Antisense strand to SEQ ID NO: 181558
augagaaccaagcuauuag

SEQ ID NO: 181560 - RNA, 19 nt, Artificial Sequence
  Description of Artificial Sequence: Synthetic oligonucleotide
  Sense strand starting at position 2590 of SEQ ID NO: 2340
ucuaauagcuugguucuca

SEQ ID NO: 181561 - RNA, 19 nt, Artificial Sequence
  Description of Artificial Sequence: Synthetic oligonucleotide
  Antisense strand to SEQ ID NO: 181560
ugagaaccaagcuauuaga

SEQ ID NO: 181562 - RNA, 19 nt, Artificial Sequence
  Description of Artificial Sequence: Synthetic oligonucleotide
  Sense strand starting at position 2575 of SEQ ID NO: 2340
ugugcuuucccgcuaucua

SEQ ID NO: 181563 - RNA, 19 nt, Artificial Sequence
  Description of Artificial Sequence: Synthetic oligonucleotide
  Antisense strand to SEQ ID NO: 181562
uagauagcgggaaagcaca

SEQ ID NO: 181564 - RNA, 19 nt, Artificial Sequence
  Description of Artificial Sequence: Synthetic oligonucleotide
  Sense strand starting at position 2574 of SEQ ID NO: 2340
gugugcuuucccgcuaucu

SEQ ID NO: 181565 - RNA, 19 nt, Artificial Sequence
  Description of Artificial Sequence: Synthetic oligonucleotide
  Antisense strand to SEQ ID NO: 181564
agauagcgggaaagcacac

SEQ ID NO: 181566 - RNA, 19 nt, Artificial Sequence
  Description of Artificial Sequence: Synthetic oligonucleotide
  Sense strand starting at position 2277 of SEQ ID NO: 2340
uucuaucucgcagaagcua

SEQ ID NO: 181567 - RNA, 19 nt, Artificial Sequence
  Description of Artificial Sequence: Synthetic oligonucleotide
  Antisense strand to SEQ ID NO: 181566
uagcuucugcgagauagaa

SEQ ID NO: 181568 - RNA, 19 nt, Artificial Sequence
  Description of Artificial Sequence: Synthetic oligonucleotide
  Sense strand starting at position 2264 of SEQ ID NO: 2340
augucaaccuuguuucuau

SEQ ID NO: 181569 - RNA, 19 nt, Artificial Sequence
  Description of Artificial Sequence: Synthetic oligonucleotide
  Antisense strand to SEQ ID NO: 181568
auagaaacaagguugacau

SEQ ID NO: 181570 - RNA, 19 nt, Artificial Sequence
  Description of Artificial Sequence: Synthetic oligonucleotide
  Sense strand starting at position 1478 of SEQ ID NO: 2340
cgcagccuggaucagaaau

SEQ ID NO: 181571 - RNA, 19 nt, Artificial Sequence
  Description of Artificial Sequence: Synthetic oligonucleotide
  Antisense strand to SEQ ID NO: 181570
auuucugauccaggcugcg

SEQ ID NO: 181572 - RNA, 19 nt, Artificial Sequence
  Description of Artificial Sequence: Synthetic oligonucleotide
  Sense strand starting at position 1021 of SEQ ID NO: 2340
ggagcuucucuccagaacu

SEQ ID NO: 181573 - RNA, 19 nt, Artificial Sequence
  Description of Artificial Sequence: Synthetic oligonucleotide
  Antisense strand to SEQ ID NO: 181572
aguucuggagagaagcucc

SEQ ID NO: 181574 - RNA, 19 nt, Artificial Sequence
  Description of Artificial Sequence: Synthetic oligonucleotide
  Sense strand starting at position 948 of SEQ ID NO: 2340
ugagguguuucuaacggga

SEQ ID NO: 181575 - RNA, 19 nt, Artificial Sequence
  Description of Artificial Sequence: Synthetic oligonucleotide
  Antisense strand to SEQ ID NO: 181574
ucccguuagaaacaccuca

SEQ ID NO: 181576 - RNA, 19 nt, Artificial Sequence
  Description of Artificial Sequence: Synthetic oligonucleotide
  Sense strand starting at position 596 of SEQ ID NO: 2340
aguuaaauguugccuaacu

SEQ ID NO: 181577 - RNA, 19 nt, Artificial Sequence
  Description of Artificial Sequence: Synthetic oligonucleotide
  Antisense strand to SEQ ID NO: 181576
aguuaggcaacauuuaacu

SEQ ID NO: 181578 - RNA, 19 nt, Artificial Sequence
  Description of Artificial Sequence: Synthetic oligonucleotide
  Sense strand starting at position 587 of SEQ ID NO: 2340
aucaguuugaguuaaaugu

SEQ ID NO: 181579 - RNA, 19 nt, Artificial Sequence
  Description of Artificial Sequence: Synthetic oligonucleotide
  Antisense strand to SEQ ID NO: 181578
acauuuaacucaaacugau

SEQ ID NO: 181580 - RNA, 19 nt, Artificial Sequence
  Description of Artificial Sequence: Synthetic oligonucleotide
  Sense strand starting at position 585 of SEQ ID NO: 2340
ucaucaguuugaguuaaau

SEQ ID NO: 181581 - RNA, 19 nt, Artificial Sequence
  Description of Artificial Sequence: Synthetic oligonucleotide
  Antisense strand to SEQ ID NO: 181580
auuuaacucaaacugauga

SEQ ID NO: 181582 - RNA, 19 nt, Artificial Sequence
  Description of Artificial Sequence: Synthetic oligonucleotide
  Sense strand starting at position 24 of SEQ ID NO: 2340
ccuggcuuugauuagacua

SEQ ID NO: 181583 - RNA, 19 nt, Artificial Sequence
  Description of Artificial Sequence: Synthetic oligonucleotide
  Antisense strand to SEQ ID NO: 181582
uagucuaaucaaagccagg

SEQ ID NO: 181584 - RNA, 19 nt, Artificial Sequence
  Description of Artificial Sequence: Synthetic oligonucleotide
  Sense strand starting at position 7 of SEQ ID NO: 2341
aggauugcagcagaaucau

SEQ ID NO: 181585 - RNA, 19 nt, Artificial Sequence
  Description of Artificial Sequence: Synthetic oligonucleotide
  Antisense strand to SEQ ID NO: 181584
augauucugcugcaauccu

SEQ ID NO: 181586 - RNA, 19 nt, Artificial Sequence
  Description of Artificial Sequence: Synthetic oligonucleotide
  Sense strand starting at position 13 of SEQ ID NO: 2341
gcagcagaaucauuccaua

SEQ ID NO: 181587 - RNA, 19 nt, Artificial Sequence
  Description of Artificial Sequence: Synthetic oligonucleotide
  Antisense strand to SEQ ID NO: 181586
uauggaaugauucugcugc

SEQ ID NO: 181588 - RNA, 19 nt, Artificial Sequence
  Description of Artificial Sequence: Synthetic oligonucleotide
  Sense strand starting at position 180 of SEQ ID NO: 2341
uuagaauggagauguaggu

SEQ ID NO: 181589 - RNA, 19 nt, Artificial Sequence
  Description of Artificial Sequence: Synthetic oligonucleotide
  Antisense strand to SEQ ID NO: 181588
accuacaucuccauucuaa

SEQ ID NO: 181590 - RNA, 19 nt, Artificial Sequence
  Description of Artificial Sequence: Synthetic oligonucleotide
  Sense strand starting at position 193 of SEQ ID NO: 2341
guagguaauggauggagua

SEQ ID NO: 181591 - RNA, 19 nt, Artificial Sequence
  Description of Artificial Sequence: Synthetic oligonucleotide
  Antisense strand to SEQ ID NO: 181590
uacuccauccauuaccuac

SEQ ID NO: 181592 - RNA, 19 nt, Artificial Sequence
  Description of Artificial Sequence: Synthetic oligonucleotide
  Sense strand starting at position 245 of SEQ ID NO: 2341
acugaucgcucacuuacaa

SEQ ID NO: 181593 - RNA, 19 nt, Artificial Sequence
  Description of Artificial Sequence: Synthetic oligonucleotide
  Antisense strand to SEQ ID NO: 181592
uuguaagugagcgaucagu

SEQ ID NO: 181594 - RNA, 19 nt, Artificial Sequence
  Description of Artificial Sequence: Synthetic oligonucleotide
  Sense strand starting at position 710 of SEQ ID NO: 2341
agaaaucuggaguggccua

SEQ ID NO: 181595 - RNA, 19 nt, Artificial Sequence
  Description of Artificial Sequence: Synthetic oligonucleotide
  Antisense strand to SEQ ID NO: 181594
uaggccacuccagauuucu

SEQ ID NO: 181596 - RNA, 19 nt, Artificial Sequence
  Description of Artificial Sequence: Synthetic oligonucleotide
  Sense strand starting at position 715 of SEQ ID NO: 2341
ucuggaguggccuaagagu

SEQ ID NO: 181597 - RNA, 19 nt, Artificial Sequence
  Description of Artificial Sequence: Synthetic oligonucleotide
  Antisense strand to SEQ ID NO: 181596
acucuuaggccacuccaga

SEQ ID NO: 181598 - RNA, 19 nt, Artificial Sequence
  Description of Artificial Sequence: Synthetic oligonucleotide
  Sense strand starting at position 838 of SEQ ID NO: 2341
gcccauuauguccaucaga

SEQ ID NO: 181599 - RNA, 19 nt, Artificial Sequence
  Description of Artificial Sequence: Synthetic oligonucleotide
  Antisense strand to SEQ ID NO: 181598
ucugauggacauaaugggc

SEQ ID NO: 181600 - RNA, 19 nt, Artificial Sequence
  Description of Artificial Sequence: Synthetic oligonucleotide
  Sense strand starting at position 1219 of SEQ ID NO: 2341
aauguaggccaagauagua

SEQ ID NO: 181601 - RNA, 19 nt, Artificial Sequence
  Description of Artificial Sequence: Synthetic oligonucleotide
  Antisense strand to SEQ ID NO: 181600
uacuaucuuggccuacauu

SEQ ID NO: 181602 - RNA, 19 nt, Artificial Sequence
  Description of Artificial Sequence: Synthetic oligonucleotide
  Sense strand starting at position 1533 of SEQ ID NO: 2341
uggagaagcucuguaccuu

SEQ ID NO: 181603 - RNA, 19 nt, Artificial Sequence
  Description of Artificial Sequence: Synthetic oligonucleotide
  Antisense strand to SEQ ID NO: 181602
aagguacagagcuucucca

SEQ ID NO: 181604 - RNA, 19 nt, Artificial Sequence
  Description of Artificial Sequence: Synthetic oligonucleotide
  Sense strand starting at position 1534 of SEQ ID NO: 2341
ggagaagcucuguaccuua

SEQ ID NO: 181605 - RNA, 19 nt, Artificial Sequence
  Description of Artificial Sequence: Synthetic oligonucleotide
  Antisense strand to SEQ ID NO: 181604
uaagguacagagcuucucc

SEQ ID NO: 181606 - RNA, 19 nt, Artificial Sequence
  Description of Artificial Sequence: Synthetic oligonucleotide
  Sense strand starting at position 1573 of SEQ ID NO: 2341
ucuucuacucagggaugau

SEQ ID NO: 181607 - RNA, 19 nt, Artificial Sequence
  Description of Artificial Sequence: Synthetic oligonucleotide
  Antisense strand to SEQ ID NO: 181606
aucaucccugaguagaaga

SEQ ID NO: 181608 - RNA, 19 nt, Artificial Sequence
  Description of Artificial Sequence: Synthetic oligonucleotide
  Sense strand starting at position 1601 of SEQ ID NO: 2341
ugaugcaagcuccaagaaa

SEQ ID NO: 181609 - RNA, 19 nt, Artificial Sequence
  Description of Artificial Sequence: Synthetic oligonucleotide
  Antisense strand to SEQ ID NO: 181608
uuucuuggagcuugcauca

SEQ ID NO: 181610 - RNA, 19 nt, Artificial Sequence
  Description of Artificial Sequence: Synthetic oligonucleotide
  Sense strand starting at position 1628 of SEQ ID NO: 2341
ugggaccucuuauugcaaa

SEQ ID NO: 181611 - RNA, 19 nt, Artificial Sequence
  Description of Artificial Sequence: Synthetic oligonucleotide
  Antisense strand to SEQ ID NO: 181610
uuugcaauaagagguccca

SEQ ID NO: 181612 - RNA, 19 nt, Artificial Sequence
  Description of Artificial Sequence: Synthetic oligonucleotide
  Sense strand starting at position 1802 of SEQ ID NO: 2341
gguacuaguugaguccuaa

SEQ ID NO: 181613 - RNA, 19 nt, Artificial Sequence
  Description of Artificial Sequence: Synthetic oligonucleotide
  Antisense strand to SEQ ID NO: 181612
uuaggacucaacuaguacc

SEQ ID NO: 181614 - RNA, 19 nt, Artificial Sequence
  Description of Artificial Sequence: Synthetic oligonucleotide
  Sense strand starting at position 1815 of SEQ ID NO: 2341
uccuaaaguccguacuuaa

SEQ ID NO: 181615 - RNA, 19 nt, Artificial Sequence
  Description of Artificial Sequence: Synthetic oligonucleotide
  Antisense strand to SEQ ID NO: 181614
uuaaguacggacuuuagga

SEQ ID NO: 181616 - RNA, 19 nt, Artificial Sequence
  Description of Artificial Sequence: Synthetic oligonucleotide
  Sense strand starting at position 1826 of SEQ ID NO: 2341
guacuuaaugcauagcgaa

SEQ ID NO: 181617 - RNA, 19 nt, Artificial Sequence
  Description of Artificial Sequence: Synthetic oligonucleotide
  Antisense strand to SEQ ID NO: 181616
uucgcuaugcauuaaguac

SEQ ID NO: 181618 - RNA, 19 nt, Artificial Sequence
  Description of Artificial Sequence: Synthetic oligonucleotide
  Sense strand starting at position 2531 of SEQ ID NO: 2341
ugcuuugagcuuuauacag

SEQ ID NO: 181619 - RNA, 19 nt, Artificial Sequence
  Description of Artificial Sequence: Synthetic oligonucleotide
  Antisense strand to SEQ ID NO: 181618
cuguauaaagcucaaagca

SEQ ID NO: 181620 - RNA, 19 nt, Artificial Sequence
  Description of Artificial Sequence: Synthetic oligonucleotide
  Sense strand starting at position 2792 of SEQ ID NO: 2341
auucuugcaguuuaccaua

SEQ ID NO: 181621 - RNA, 19 nt, Artificial Sequence
  Description of Artificial Sequence: Synthetic oligonucleotide
  Antisense strand to SEQ ID NO: 181620
uaugguaaacugcaagaau

SEQ ID NO: 181622 - RNA, 19 nt, Artificial Sequence
  Description of Artificial Sequence: Synthetic oligonucleotide
  Sense strand starting at position 2868 of SEQ ID NO: 2341
cauucccugugguugauaa

SEQ ID NO: 181623 - RNA, 19 nt, Artificial Sequence
  Description of Artificial Sequence: Synthetic oligonucleotide
  Antisense strand to SEQ ID NO: 181622
uuaucaaccacagggaaug

SEQ ID NO: 181624 - RNA, 19 nt, Artificial Sequence
  Description of Artificial Sequence: Synthetic oligonucleotide
  Sense strand starting at position 2991 of SEQ ID NO: 2341
gaaccuuggucuuucugau

SEQ ID NO: 181625 - RNA, 19 nt, Artificial Sequence
  Description of Artificial Sequence: Synthetic oligonucleotide
  Antisense strand to SEQ ID NO: 181624
aucagaaagaccaagguuc

SEQ ID NO: 181626 - RNA, 19 nt, Artificial Sequence
  Description of Artificial Sequence: Synthetic oligonucleotide
  Sense strand starting at position 3079 of SEQ ID NO: 2341
uuuaucucuguguaaacau

SEQ ID NO: 181627 - RNA, 19 nt, Artificial Sequence
  Description of Artificial Sequence: Synthetic oligonucleotide
  Antisense strand to SEQ ID NO: 181626
auguuuacacagagauaaa

SEQ ID NO: 181628 - RNA, 19 nt, Artificial Sequence
  Description of Artificial Sequence: Synthetic oligonucleotide
  Sense strand starting at position 3086 of SEQ ID NO: 2341
cuguguaaacaugauguau

SEQ ID NO: 181629 - RNA, 19 nt, Artificial Sequence
  Description of Artificial Sequence: Synthetic oligonucleotide
  Antisense strand to SEQ ID NO: 181628
auacaucauguuuacacag

SEQ ID NO: 181630 - RNA, 19 nt, Artificial Sequence
  Description of Artificial Sequence: Synthetic oligonucleotide
  Sense strand starting at position 3090 of SEQ ID NO: 2341
guaaacaugauguauguga

SEQ ID NO: 181631 - RNA, 19 nt, Artificial Sequence
  Description of Artificial Sequence: Synthetic oligonucleotide
  Antisense strand to SEQ ID NO: 181630
ucacauacaucauguuuac

SEQ ID NO: 181632 - RNA, 19 nt, Artificial Sequence
  Description of Artificial Sequence: Synthetic oligonucleotide
  Sense strand starting at position 3094 of SEQ ID NO: 2341
acaugauguaugugaaagu

SEQ ID NO: 181633 - RNA, 19 nt, Artificial Sequence
  Description of Artificial Sequence: Synthetic oligonucleotide
  Antisense strand to SEQ ID NO: 181632
acuuucacauacaucaugu

SEQ ID NO: 181634 - RNA, 19 nt, Artificial Sequence
  Description of Artificial Sequence: Synthetic oligonucleotide
  Sense strand starting at position 3179 of SEQ ID NO: 2341
ccuugagaacagugcuaaa

SEQ ID NO: 181635 - RNA, 19 nt, Artificial Sequence
  Description of Artificial Sequence: Synthetic oligonucleotide
  Antisense strand to SEQ ID NO: 181634
uuuagcacuguucucaagg

SEQ ID NO: 181636 - RNA, 19 nt, Artificial Sequence
  Description of Artificial Sequence: Synthetic oligonucleotide
  Sense strand starting at position 3244 of SEQ ID NO: 2341
ggaaguuacuucucccuuu

SEQ ID NO: 181637 - RNA, 19 nt, Artificial Sequence
  Description of Artificial Sequence: Synthetic oligonucleotide
  Antisense strand to SEQ ID NO: 181636
aaagggagaaguaacuucc

SEQ ID NO: 181638 - RNA, 19 nt, Artificial Sequence
  Description of Artificial Sequence: Synthetic oligonucleotide
  Sense strand starting at position 3331 of SEQ ID NO: 2341
acuguuucguuuguaauuu

SEQ ID NO: 181639 - RNA, 19 nt, Artificial Sequence
  Description of Artificial Sequence: Synthetic oligonucleotide
  Antisense strand to SEQ ID NO: 181638
aaauuacaaacgaaacagu

SEQ ID NO: 181640 - RNA, 19 nt, Artificial Sequence
  Description of Artificial Sequence: Synthetic oligonucleotide
  Sense strand starting at position 3391 of SEQ ID NO: 2341
auaggaaugaugggugcaa

SEQ ID NO: 181641 - RNA, 19 nt, Artificial Sequence
  Description of Artificial Sequence: Synthetic oligonucleotide
  Antisense strand to SEQ ID NO: 181640
uugcacccaucauuccuau

SEQ ID NO: 181642 - RNA, 19 nt, Artificial Sequence
  Description of Artificial Sequence: Synthetic oligonucleotide
  Sense strand starting at position 3392 of SEQ ID NO: 2341
uaggaaugaugggugcaau

SEQ ID NO: 181643 - RNA, 19 nt, Artificial Sequence
  Description of Artificial Sequence: Synthetic oligonucleotide
  Antisense strand to SEQ ID NO: 181642
auugcacccaucauuccua

SEQ ID NO: 181644 - RNA, 19 nt, Artificial Sequence
  Description of Artificial Sequence: Synthetic oligonucleotide
  Sense strand starting at position 3393 of SEQ ID NO: 2341
aggaaugaugggugcaaua

SEQ ID NO: 181645 - RNA, 19 nt, Artificial Sequence
  Description of Artificial Sequence: Synthetic oligonucleotide
  Antisense strand to SEQ ID NO: 181644
uauugcacccaucauuccu

SEQ ID NO: 181646 - RNA, 19 nt, Artificial Sequence
  Description of Artificial Sequence: Synthetic oligonucleotide
  Sense strand starting at position 3410 of SEQ ID NO: 2341
uaaaguagagguugauuga

SEQ ID NO: 181647 - RNA, 19 nt, Artificial Sequence
  Description of Artificial Sequence: Synthetic oligonucleotide
  Antisense strand to SEQ ID NO: 181646
ucaaucaaccucuacuuua

SEQ ID NO: 181648 - RNA, 19 nt, Artificial Sequence
  Description of Artificial Sequence: Synthetic oligonucleotide
  Sense strand starting at position 3469 of SEQ ID NO: 2341
agauucugagcuugacauc

SEQ ID NO: 181649 - RNA, 19 nt, Artificial Sequence
  Description of Artificial Sequence: Synthetic oligonucleotide
  Antisense strand to SEQ ID NO: 181648
gaugucaagcucagaaucu

SEQ ID NO: 181650 - RNA, 19 nt, Artificial Sequence
  Description of Artificial Sequence: Synthetic oligonucleotide
  Sense strand starting at position 3691 of SEQ ID NO: 2341
auaccuugauuugaagagu

SEQ ID NO: 181651 - RNA, 19 nt, Artificial Sequence
  Description of Artificial Sequence: Synthetic oligonucleotide
  Antisense strand to SEQ ID NO: 181650
acucuucaaaucaagguau

SEQ ID NO: 181652 - RNA, 19 nt, Artificial Sequence
  Description of Artificial Sequence: Synthetic oligonucleotide
  Sense strand starting at position 3819 of SEQ ID NO: 2341
ggguuuaccaaguaucuag

SEQ ID NO: 181653 - RNA, 19 nt, Artificial Sequence
  Description of Artificial Sequence: Synthetic oligonucleotide
  Antisense strand to SEQ ID NO: 181652
cuagauacuugguaaaccc

SEQ ID NO: 181654 - RNA, 19 nt, Artificial Sequence
  Description of Artificial Sequence: Synthetic oligonucleotide
  Sense strand starting at position 3826 of SEQ ID NO: 2341
ccaaguaucuaggucuaau

SEQ ID NO: 181655 - RNA, 19 nt, Artificial Sequence
  Description of Artificial Sequence: Synthetic oligonucleotide
  Antisense strand to SEQ ID NO: 181654
auuagaccuagauacuugg

SEQ ID NO: 181656 - RNA, 19 nt, Artificial Sequence
  Description of Artificial Sequence: Synthetic oligonucleotide
  Sense strand starting at position 3829 of SEQ ID NO: 2341
aguaucuaggucuaauguu

SEQ ID NO: 181657 - RNA, 19 nt, Artificial Sequence
  Description of Artificial Sequence: Synthetic oligonucleotide
  Antisense strand to SEQ ID NO: 181656
aacauuagaccuagauacu

SEQ ID NO: 181658 - RNA, 19 nt, Artificial Sequence
  Description of Artificial Sequence: Synthetic oligonucleotide
  Sense strand starting at position 3913 of SEQ ID NO: 2341
uggccacauuccuuugaga

SEQ ID NO: 181659 - RNA, 19 nt, Artificial Sequence
  Description of Artificial Sequence: Synthetic oligonucleotide
  Antisense strand to SEQ ID NO: 181658
ucucaaaggaauguggcca

SEQ ID NO: 181660 - RNA, 19 nt, Artificial Sequence
  Description of Artificial Sequence: Synthetic oligonucleotide
  Sense strand starting at position 3915 of SEQ ID NO: 2341
gccacauuccuuugagaaa

SEQ ID NO: 181661 - RNA, 19 nt, Artificial Sequence
  Description of Artificial Sequence: Synthetic oligonucleotide
  Antisense strand to SEQ ID NO: 181660
uuucucaaaggaauguggc

SEQ ID NO: 181662 - RNA, 19 nt, Artificial Sequence
  Description of Artificial Sequence: Synthetic oligonucleotide
  Sense strand starting at position 3965 of SEQ ID NO: 2341
gagcauaggaauugggauu

SEQ ID NO: 181663 - RNA, 19 nt, Artificial Sequence
  Description of Artificial Sequence: Synthetic oligonucleotide
  Antisense strand to SEQ ID NO: 181662
aaucccaauuccuaugcuc

SEQ ID NO: 181664 - RNA, 19 nt, Artificial Sequence
  Description of Artificial Sequence: Synthetic oligonucleotide
  Sense strand starting at position 14 of SEQ ID NO: 2342
agauaauaugauugccucu

SEQ ID NO: 181665 - RNA, 19 nt, Artificial Sequence
  Description of Artificial Sequence: Synthetic oligonucleotide
  Antisense strand to SEQ ID NO: 181664
agaggcaaucauauuaucu

SEQ ID NO: 181666 - RNA, 19 nt, Artificial Sequence
  Description of Artificial Sequence: Synthetic oligonucleotide
  Sense strand starting at position 16 of SEQ ID NO: 2342
auaauaugauugccucuga

SEQ ID NO: 181667 - RNA, 19 nt, Artificial Sequence
  Description of Artificial Sequence: Synthetic oligonucleotide
  Antisense strand to SEQ ID NO: 181666
ucagaggcaaucauauuau

SEQ ID NO: 181668 - RNA, 19 nt, Artificial Sequence
  Description of Artificial Sequence: Synthetic oligonucleotide
  Sense strand starting at position 20 of SEQ ID NO: 2342
uaugauugccucugacuga

SEQ ID NO: 181669 - RNA, 19 nt, Artificial Sequence
  Description of Artificial Sequence: Synthetic oligonucleotide
  Antisense strand to SEQ ID NO: 181668
ucagucagaggcaaucaua

SEQ ID NO: 181670 - RNA, 19 nt, Artificial Sequence
  Description of Artificial Sequence: Synthetic oligonucleotide
  Sense strand starting at position 23 of SEQ ID NO: 2342
gauugccucugacugauga

SEQ ID NO: 181671 - RNA, 19 nt, Artificial Sequence
  Description of Artificial Sequence: Synthetic oligonucleotide
  Antisense strand to SEQ ID NO: 181670
ucaucagucagaggcaauc

SEQ ID NO: 181672 - RNA, 19 nt, Artificial Sequence
  Description of Artificial Sequence: Synthetic oligonucleotide
  Sense strand starting at position 125 of SEQ ID NO: 2342
gggaacauguauucucaaa

SEQ ID NO: 181673 - RNA, 19 nt, Artificial Sequence
  Description of Artificial Sequence: Synthetic oligonucleotide
  Antisense strand to SEQ ID NO: 181672
uuugagaauacauguuccc

SEQ ID NO: 181674 - RNA, 19 nt, Artificial Sequence
  Description of Artificial Sequence: Synthetic oligonucleotide
  Sense strand starting at position 137 of SEQ ID NO: 2342
ucucaaagucagcauggau

SEQ ID NO: 181675 - RNA, 19 nt, Artificial Sequence
  Description of Artificial Sequence: Synthetic oligonucleotide
  Antisense strand to SEQ ID NO: 181674
auccaugcugacuuugaga

SEQ ID NO: 181676 - RNA, 19 nt, Artificial Sequence
  Description of Artificial Sequence: Synthetic oligonucleotide
  Sense strand starting at position 191 of SEQ ID NO: 2342
acuuacugauacucaguau

SEQ ID NO: 181677 - RNA, 19 nt, Artificial Sequence
  Description of Artificial Sequence: Synthetic oligonucleotide
  Antisense strand to SEQ ID NO: 181676
auacugaguaucaguaagu

SEQ ID NO: 181678 - RNA, 19 nt, Artificial Sequence
  Description of Artificial Sequence: Synthetic oligonucleotide
  Sense strand starting at position 195 of SEQ ID NO: 2342
acugauacucaguauaguu

SEQ ID NO: 181679 - RNA, 19 nt, Artificial Sequence
  Description of Artificial Sequence: Synthetic oligonucleotide
  Antisense strand to SEQ ID NO: 181678
aacuauacugaguaucagu

SEQ ID NO: 181680 - RNA, 19 nt, Artificial Sequence
  Description of Artificial Sequence: Synthetic oligonucleotide
  Sense strand starting at position 197 of SEQ ID NO: 2342
ugauacucaguauaguuaa

SEQ ID NO: 181681 - RNA, 19 nt, Artificial Sequence
  Description of Artificial Sequence: Synthetic oligonucleotide
  Antisense strand to SEQ ID NO: 181680
uuaacuauacugaguauca

SEQ ID NO: 181682 - RNA, 19 nt, Artificial Sequence
  Description of Artificial Sequence: Synthetic oligonucleotide
  Sense strand starting at position 275 of SEQ ID NO: 2342
ugccauaagcacuaggauu

SEQ ID NO: 181683 - RNA, 19 nt, Artificial Sequence
  Description of Artificial Sequence: Synthetic oligonucleotide
  Antisense strand to SEQ ID NO: 181682
aauccuagugcuuauggca

SEQ ID NO: 181684 - RNA, 19 nt, Artificial Sequence
  Description of Artificial Sequence: Synthetic oligonucleotide
  Sense strand starting at position 316 of SEQ ID NO: 2342
ugucaauucgagcagagac

SEQ ID NO: 181685 - RNA, 19 nt, Artificial Sequence
  Description of Artificial Sequence: Synthetic oligonucleotide
  Antisense strand to SEQ ID NO: 181684
gucucugcucgaauugaca

SEQ ID NO: 181686 - RNA, 19 nt, Artificial Sequence
  Description of Artificial Sequence: Synthetic oligonucleotide
  Sense strand starting at position 343 of SEQ ID NO: 2342
gcccaucaggaaugaacau

SEQ ID NO: 181687 - RNA, 19 nt, Artificial Sequence
  Description of Artificial Sequence: Synthetic oligonucleotide
  Antisense strand to SEQ ID NO: 181686
auguucauuccugaugggc

SEQ ID NO: 181688 - RNA, 19 nt, Artificial Sequence
  Description of Artificial Sequence: Synthetic oligonucleotide
  Sense strand starting at position 389 of SEQ ID NO: 2342
agacacaggugccuauaua

SEQ ID NO: 181689 - RNA, 19 nt, Artificial Sequence
  Description of Artificial Sequence: Synthetic oligonucleotide
  Antisense strand to SEQ ID NO: 181688
uauauaggcaccugugucu

SEQ ID NO: 181690 - RNA, 19 nt, Artificial Sequence
  Description of Artificial Sequence: Synthetic oligonucleotide
  Sense strand starting at position 448 of SEQ ID NO: 2342
gcccaagacgucugauuua

SEQ ID NO: 181691 - RNA, 19 nt, Artificial Sequence
  Description of Artificial Sequence: Synthetic oligonucleotide
  Antisense strand to SEQ ID NO: 181690
uaaaucagacgucuugggc

SEQ ID NO: 181692 - RNA, 19 nt, Artificial Sequence
  Description of Artificial Sequence: Synthetic oligonucleotide
  Sense strand starting at position 754 of SEQ ID NO: 2342
gcauuuagcugauauuuac

SEQ ID NO: 181693 - RNA, 19 nt, Artificial Sequence
  Description of Artificial Sequence: Synthetic oligonucleotide
  Antisense strand to SEQ ID NO: 181692
guaaauaucagcuaaaugc

SEQ ID NO: 181694 - RNA, 19 nt, Artificial Sequence
  Description of Artificial Sequence: Synthetic oligonucleotide
  Sense strand starting at position 869 of SEQ ID NO: 2342
gccauuaggcuugcuguua

SEQ ID NO: 181695 - RNA, 19 nt, Artificial Sequence
  Description of Artificial Sequence: Synthetic oligonucleotide
  Antisense strand to SEQ ID NO: 181694
uaacagcaagccuaauggc

SEQ ID NO: 181696 - RNA, 19 nt, Artificial Sequence
  Description of Artificial Sequence: Synthetic oligonucleotide
  Sense strand starting at position 894 of SEQ ID NO: 2342
aaaugcaucugugugauaa

SEQ ID NO: 181697 - RNA, 19 nt, Artificial Sequence
  Description of Artificial Sequence: Synthetic oligonucleotide
  Antisense strand to SEQ ID NO: 181696
uuaucacacagaugcauuu

SEQ ID NO: 181698 - RNA, 19 nt, Artificial Sequence
  Description of Artificial Sequence: Synthetic oligonucleotide
  Sense strand starting at position 1066 of SEQ ID NO: 2342
ccaggacaguucucuacua

SEQ ID NO: 181699 - RNA, 19 nt, Artificial Sequence
  Description of Artificial Sequence: Synthetic oligonucleotide
  Antisense strand to SEQ ID NO: 181698
uaguagagaacuguccugg

SEQ ID NO: 181700 - RNA, 19 nt, Artificial Sequence
  Description of Artificial Sequence: Synthetic oligonucleotide
  Sense strand starting at position 1226 of SEQ ID NO: 2342
ggaggagaaugucugcaaa

SEQ ID NO: 181701 - RNA, 19 nt, Artificial Sequence
  Description of Artificial Sequence: Synthetic oligonucleotide
  Antisense strand to SEQ ID NO: 181700
uuugcagacauucuccucc

SEQ ID NO: 181702 - RNA, 19 nt, Artificial Sequence
  Description of Artificial Sequence: Synthetic oligonucleotide
  Sense strand starting at position 1228 of SEQ ID NO: 2342
aggagaaugucugcaaauu

SEQ ID NO: 181703 - RNA, 19 nt, Artificial Sequence
  Description of Artificial Sequence: Synthetic oligonucleotide
  Antisense strand to SEQ ID NO: 181702
aauuugcagacauucuccu

SEQ ID NO: 181704 - RNA, 19 nt, Artificial Sequence
  Description of Artificial Sequence: Synthetic oligonucleotide
  Sense strand starting at position 1453 of SEQ ID NO: 2342
cugggaucccugcauccaa

SEQ ID NO: 181705 - RNA, 19 nt, Artificial Sequence
  Description of Artificial Sequence: Synthetic oligonucleotide
  Antisense strand to SEQ ID NO: 181704
uuggaugcagggaucccag

SEQ ID NO: 181706 - RNA, 19 nt, Artificial Sequence
  Description of Artificial Sequence: Synthetic oligonucleotide
  Sense strand starting at position 1660 of SEQ ID NO: 2342
guuagaaaugacgguggaa

SEQ ID NO: 181707 - RNA, 19 nt, Artificial Sequence
  Description of Artificial Sequence: Synthetic oligonucleotide
  Antisense strand to SEQ ID NO: 181706
uuccaccgucauuucuaac

SEQ ID NO: 181708 - RNA, 19 nt, Artificial Sequence
  Description of Artificial Sequence: Synthetic oligonucleotide
  Sense strand starting at position 1843 of SEQ ID NO: 2342
ugguuacacuaagcuaauu

SEQ ID NO: 181709 - RNA, 19 nt, Artificial Sequence
  Description of Artificial Sequence: Synthetic oligonucleotide
  Antisense strand to SEQ ID NO: 181708
aauuagcuuaguguaacca

SEQ ID NO: 181710 - RNA, 19 nt, Artificial Sequence
  Description of Artificial Sequence: Synthetic oligonucleotide
  Sense strand starting at position 1960 of SEQ ID NO: 2342
cggaaacgucucuauauag

SEQ ID NO: 181711 - RNA, 19 nt, Artificial Sequence
  Description of Artificial Sequence: Synthetic oligonucleotide
  Antisense strand to SEQ ID NO: 181710
cuauauagagacguuuccg

SEQ ID NO: 181712 - RNA, 19 nt, Artificial Sequence
  Description of Artificial Sequence: Synthetic oligonucleotide
  Sense strand starting at position 2372 of SEQ ID NO: 2342
uagucuuagccagugcagu

SEQ ID NO: 181713 - RNA, 19 nt, Artificial Sequence
  Description of Artificial Sequence: Synthetic oligonucleotide
  Antisense strand to SEQ ID NO: 181712
acugcacuggcuaagacua

SEQ ID NO: 181714 - RNA, 19 nt, Artificial Sequence
  Description of Artificial Sequence: Synthetic oligonucleotide
  Sense strand starting at position 2374 of SEQ ID NO: 2342
gucuuagccagugcaguua

SEQ ID NO: 181715 - RNA, 19 nt, Artificial Sequence
  Description of Artificial Sequence: Synthetic oligonucleotide
  Antisense strand to SEQ ID NO: 181714
uaacugcacuggcuaagac

SEQ ID NO: 181716 - RNA, 19 nt, Artificial Sequence
  Description of Artificial Sequence: Synthetic oligonucleotide
  Sense strand starting at position 2497 of SEQ ID NO: 2342
gguguuacuguucaggaac

SEQ ID NO: 181717 - RNA, 19 nt, Artificial Sequence
  Description of Artificial Sequence: Synthetic oligonucleotide
  Antisense strand to SEQ ID NO: 181716
guuccugaacaguaacacc

SEQ ID NO: 181718 - RNA, 19 nt, Artificial Sequence
  Description of Artificial Sequence: Synthetic oligonucleotide
  Sense strand starting at position 2722 of SEQ ID NO: 2342
cucuguucuguggaacgga

SEQ ID NO: 181719 - RNA, 19 nt, Artificial Sequence
  Description of Artificial Sequence: Synthetic oligonucleotide
  Antisense strand to SEQ ID NO: 181718
uccguuccacagaacagag

SEQ ID NO: 181720 - RNA, 19 nt, Artificial Sequence
  Description of Artificial Sequence: Synthetic oligonucleotide
  Sense strand starting at position 2839 of SEQ ID NO: 2342
cucauuaccucuuuaguga

SEQ ID NO: 181721 - RNA, 19 nt, Artificial Sequence
  Description of Artificial Sequence: Synthetic oligonucleotide
  Antisense strand to SEQ ID NO: 181720
ucacuaaagagguaaugag

SEQ ID NO: 181722 - RNA, 19 nt, Artificial Sequence
  Description of Artificial Sequence: Synthetic oligonucleotide
  Sense strand starting at position 2840 of SEQ ID NO: 2342
ucauuaccucuuuagugag

SEQ ID NO: 181723 - RNA, 19 nt, Artificial Sequence
  Description of Artificial Sequence: Synthetic oligonucleotide
  Antisense strand to SEQ ID NO: 181722
cucacuaaagagguaauga

SEQ ID NO: 181724 - RNA, 19 nt, Artificial Sequence
  Description of Artificial Sequence: Synthetic oligonucleotide
  Sense strand starting at position 2861 of SEQ ID NO: 2342
guguccaggcgcucauuau

SEQ ID NO: 181725 - RNA, 19 nt, Artificial Sequence
  Description of Artificial Sequence: Synthetic oligonucleotide
  Antisense strand to SEQ ID NO: 181724
auaaugagcgccuggacac

SEQ ID NO: 181726 - RNA, 19 nt, Artificial Sequence
  Description of Artificial Sequence: Synthetic oligonucleotide
  Sense strand starting at position 3611 of SEQ ID NO: 2342
gcuaacgagaguuacaacu

SEQ ID NO: 181727 - RNA, 19 nt, Artificial Sequence
  Description of Artificial Sequence: Synthetic oligonucleotide
  Antisense strand to SEQ ID NO: 181726
aguuguaacucucguuagc

SEQ ID NO: 181728 - RNA, 19 nt, Artificial Sequence
  Description of Artificial Sequence: Synthetic oligonucleotide
  Sense strand starting at position 3649 of SEQ ID NO: 2342
gcucaagaauaggcaucau

SEQ ID NO: 181729 - RNA, 19 nt, Artificial Sequence
  Description of Artificial Sequence: Synthetic oligonucleotide
  Antisense strand to SEQ ID NO: 181728
augaugccuauucuugagc

SEQ ID NO: 181730 - RNA, 19 nt, Artificial Sequence
  Description of Artificial Sequence: Synthetic oligonucleotide
  Sense strand starting at position 3662 of SEQ ID NO: 2342
caucaugagucucuucgaa

SEQ ID NO: 181731 - RNA, 19 nt, Artificial Sequence
  Description of Artificial Sequence: Synthetic oligonucleotide
  Antisense strand to SEQ ID NO: 181730
uucgaagagacucaugaug

SEQ ID NO: 181732 - RNA, 19 nt, Artificial Sequence
  Description of Artificial Sequence: Synthetic oligonucleotide
  Sense strand starting at position 3705 of SEQ ID NO: 2342
ggaacauguugauccuuag

SEQ ID NO: 181733 - RNA, 19 nt, Artificial Sequence
  Description of Artificial Sequence: Synthetic oligonucleotide
  Antisense strand to SEQ ID NO: 181732
cuaaggaucaacauguucc

SEQ ID NO: 181734 - RNA, 19 nt, Artificial Sequence
  Description of Artificial Sequence: Synthetic oligonucleotide
  Sense strand starting at position 3708 of SEQ ID NO: 2342
acauguugauccuuagggu

SEQ ID NO: 181735 - RNA, 19 nt, Artificial Sequence
  Description of Artificial Sequence: Synthetic oligonucleotide
  Antisense strand to SEQ ID NO: 181734
acccuaaggaucaacaugu

SEQ ID NO: 181736 - RNA, 19 nt, Artificial Sequence
  Description of Artificial Sequence: Synthetic oligonucleotide
  Sense strand starting at position 3785 of SEQ ID NO: 2342
guugguuaacaauauugau

SEQ ID NO: 181737 - RNA, 19 nt, Artificial Sequence
  Description of Artificial Sequence: Synthetic oligonucleotide
  Antisense strand to SEQ ID NO: 181736
aucaauauuguuaaccaac

SEQ ID NO: 181738 - RNA, 19 nt, Artificial Sequence
  Description of Artificial Sequence: Synthetic oligonucleotide
  Sense strand starting at position 3801 of SEQ ID NO: 2342
gauugaguuacugggagca

SEQ ID NO: 181739 - RNA, 19 nt, Artificial Sequence
  Description of Artificial Sequence: Synthetic oligonucleotide
  Antisense strand to SEQ ID NO: 181738
ugcucccaguaacucaauc

SEQ ID NO: 181740 - RNA, 19 nt, Artificial Sequence
  Description of Artificial Sequence: Synthetic oligonucleotide
  Sense strand starting at position 3826 of SEQ ID NO: 2342
guggaacucugacugaagu

SEQ ID NO: 181741 - RNA, 19 nt, Artificial Sequence
  Description of Artificial Sequence: Synthetic oligonucleotide
  Antisense strand to SEQ ID NO: 181740
acuucagucagaguuccac

SEQ ID NO: 181742 - RNA, 19 nt, Artificial Sequence
  Description of Artificial Sequence: Synthetic oligonucleotide
  Sense strand starting at position 3827 of SEQ ID NO: 2342
uggaacucugacugaagua

SEQ ID NO: 181743 - RNA, 19 nt, Artificial Sequence
  Description of Artificial Sequence: Synthetic oligonucleotide
  Antisense strand to SEQ ID NO: 181742
uacuucagucagaguucca

SEQ ID NO: 181744 - RNA, 19 nt, Artificial Sequence
  Description of Artificial Sequence: Synthetic oligonucleotide
  Sense strand starting at position 3705 of SEQ ID NO: 2343
guauuagcagcagaacaau

SEQ ID NO: 181745 - RNA, 19 nt, Artificial Sequence
  Description of Artificial Sequence: Synthetic oligonucleotide
  Antisense strand to SEQ ID NO: 181744
auuguucugcugcuaauac

SEQ ID NO: 181746 - RNA, 19 nt, Artificial Sequence
  Description of Artificial Sequence: Synthetic oligonucleotide
  Sense strand starting at position 3703 of SEQ ID NO: 2343
guguauuagcagcagaaca

SEQ ID NO: 181747 - RNA, 19 nt, Artificial Sequence
  Description of Artificial Sequence: Synthetic oligonucleotide
  Antisense strand to SEQ ID NO: 181746
uguucugcugcuaauacac

SEQ ID NO: 181748 - RNA, 19 nt, Artificial Sequence
  Description of Artificial Sequence: Synthetic oligonucleotide
  Sense strand starting at position 3693 of SEQ ID NO: 2343
augagucauuguguauuag

SEQ ID NO: 181749 - RNA, 19 nt, Artificial Sequence
  Description of Artificial Sequence: Synthetic oligonucleotide
  Antisense strand to SEQ ID NO: 181748
cuaauacacaaugacucau

SEQ ID NO: 181750 - RNA, 19 nt, Artificial Sequence
  Description of Artificial Sequence: Synthetic oligonucleotide
  Sense strand starting at position 3683 of SEQ ID NO: 2343
auaugcuuacaugagucau

SEQ ID NO: 181751 - RNA, 19 nt, Artificial Sequence
  Description of Artificial Sequence: Synthetic oligonucleotide
  Antisense strand to SEQ ID NO: 181750
augacucauguaagcauau

SEQ ID NO: 181752 - RNA, 19 nt, Artificial Sequence
  Description of Artificial Sequence: Synthetic oligonucleotide
  Sense strand starting at position 3524 of SEQ ID NO: 2343
ccuggaggaguccgaaauu

SEQ ID NO: 181753 - RNA, 19 nt, Artificial Sequence
  Description of Artificial Sequence: Synthetic oligonucleotide
  Antisense strand to SEQ ID NO: 181752
aauuucggacuccuccagg

SEQ ID NO: 181754 - RNA, 19 nt, Artificial Sequence
  Description of Artificial Sequence: Synthetic oligonucleotide
  Sense strand starting at position 3505 of SEQ ID NO: 2343
guuccauacgaucauggaa

SEQ ID NO: 181755 - RNA, 19 nt, Artificial Sequence
  Description of Artificial Sequence: Synthetic oligonucleotide
  Antisense strand to SEQ ID NO: 181754
uuccaugaucguauggaac

SEQ ID NO: 181756 - RNA, 19 nt, Artificial Sequence
  Description of Artificial Sequence: Synthetic oligonucleotide
  Sense strand starting at position 3418 of SEQ ID NO: 2343
ugugauuacgugucugguu

SEQ ID NO: 181757 - RNA, 19 nt, Artificial Sequence
  Description of Artificial Sequence: Synthetic oligonucleotide
  Antisense strand to SEQ ID NO: 181756
aaccagacacguaaucaca

SEQ ID NO: 181758 - RNA, 19 nt, Artificial Sequence
  Description of Artificial Sequence: Synthetic oligonucleotide
  Sense strand starting at position 3417 of SEQ ID NO: 2343
cugugauuacgugucuggu

SEQ ID NO: 181759 - RNA, 19 nt, Artificial Sequence
  Description of Artificial Sequence: Synthetic oligonucleotide
  Antisense strand to SEQ ID NO: 181758
accagacacguaaucacag

SEQ ID NO: 181760 - RNA, 19 nt, Artificial Sequence
  Description of Artificial Sequence: Synthetic oligonucleotide
  Sense strand starting at position 3328 of SEQ ID NO: 2343
aggugugucaaugauuaaa

SEQ ID NO: 181761 - RNA, 19 nt, Artificial Sequence
  Description of Artificial Sequence: Synthetic oligonucleotide
  Antisense strand to SEQ ID NO: 181760
uuuaaucauugacacaccu

SEQ ID NO: 181762 - RNA, 19 nt, Artificial Sequence
  Description of Artificial Sequence: Synthetic oligonucleotide
  Sense strand starting at position 3178 of SEQ ID NO: 2343
gauugcagucuuugagaga

SEQ ID NO: 181763 - RNA, 19 nt, Artificial Sequence
  Description of Artificial Sequence: Synthetic oligonucleotide
  Antisense strand to SEQ ID NO: 181762
ucucucaaagacugcaauc

SEQ ID NO: 181764 - RNA, 19 nt, Artificial Sequence
  Description of Artificial Sequence: Synthetic oligonucleotide
  Sense strand starting at position 3163 of SEQ ID NO: 2343
cagcuuugccaucaggauu

SEQ ID NO: 181765 - RNA, 19 nt, Artificial Sequence
  Description of Artificial Sequence: Synthetic oligonucleotide
  Antisense strand to SEQ ID NO: 181764
aauccugauggcaaagcug

SEQ ID NO: 181766 - RNA, 19 nt, Artificial Sequence
  Description of Artificial Sequence: Synthetic oligonucleotide
  Sense strand starting at position 3121 of SEQ ID NO: 2343
ugucuuggauucccacaau

SEQ ID NO: 181767 - RNA, 19 nt, Artificial Sequence
  Description of Artificial Sequence: Synthetic oligonucleotide
  Antisense strand to SEQ ID NO: 181766
auugugggaauccaagaca

SEQ ID NO: 181768 - RNA, 19 nt, Artificial Sequence
  Description of Artificial Sequence: Synthetic oligonucleotide
  Sense strand starting at position 2669 of SEQ ID NO: 2343
gaggauuuguccuagguag

SEQ ID NO: 181769 - RNA, 19 nt, Artificial Sequence
  Description of Artificial Sequence: Synthetic oligonucleotide
  Antisense strand to SEQ ID NO: 181768
cuaccuaggacaaauccuc

SEQ ID NO: 181770 - RNA, 19 nt, Artificial Sequence
  Description of Artificial Sequence: Synthetic oligonucleotide
  Sense strand starting at position 2657 of SEQ ID NO: 2343
cucucagcuguagaggauu

SEQ ID NO: 181771 - RNA, 19 nt, Artificial Sequence
  Description of Artificial Sequence: Synthetic oligonucleotide
  Antisense strand to SEQ ID NO: 181770
aauccucuacagcugagag

SEQ ID NO: 181772 - RNA, 19 nt, Artificial Sequence
  Description of Artificial Sequence: Synthetic oligonucleotide
  Sense strand starting at position 2556 of SEQ ID NO: 2343
gccagucacccgcuugauu

SEQ ID NO: 181773 - RNA, 19 nt, Artificial Sequence
  Description of Artificial Sequence: Synthetic oligonucleotide
  Antisense strand to SEQ ID NO: 181772
aaucaagcgggugacuggc

SEQ ID NO: 181774 - RNA, 19 nt, Artificial Sequence
  Description of Artificial Sequence: Synthetic oligonucleotide
  Sense strand starting at position 2443 of SEQ ID NO: 2343
cugaguuuaggcuaccaca

SEQ ID NO: 181775 - RNA, 19 nt, Artificial Sequence
  Description of Artificial Sequence: Synthetic oligonucleotide
  Antisense strand to SEQ ID NO: 181774
ugugguagccuaaacucag

SEQ ID NO: 181776 - RNA, 19 nt, Artificial Sequence
  Description of Artificial Sequence: Synthetic oligonucleotide
  Sense strand starting at position 2431 of SEQ ID NO: 2343
ugcguuuaggcucugaguu

SEQ ID NO: 181777 - RNA, 19 nt, Artificial Sequence
  Description of Artificial Sequence: Synthetic oligonucleotide
  Antisense strand to SEQ ID NO: 181776
aacucagagccuaaacgca

SEQ ID NO: 181778 - RNA, 19 nt, Artificial Sequence
  Description of Artificial Sequence: Synthetic oligonucleotide
  Sense strand starting at position 2430 of SEQ ID NO: 2343
cugcguuuaggcucugagu

SEQ ID NO: 181779 - RNA, 19 nt, Artificial Sequence
  Description of Artificial Sequence: Synthetic oligonucleotide
  Antisense strand to SEQ ID NO: 181778
acucagagccuaaacgcag

SEQ ID NO: 181780 - RNA, 19 nt, Artificial Sequence
  Description of Artificial Sequence: Synthetic oligonucleotide
  Sense strand starting at position 2144 of SEQ ID NO: 2343
uucuguggaaucugaagaa

SEQ ID NO: 181781 - RNA, 19 nt, Artificial Sequence
  Description of Artificial Sequence: Synthetic oligonucleotide
  Antisense strand to SEQ ID NO: 181780
uucuucagauuccacagaa

SEQ ID NO: 181782 - RNA, 19 nt, Artificial Sequence
  Description of Artificial Sequence: Synthetic oligonucleotide
  Sense strand starting at position 2020 of SEQ ID NO: 2343
uucuuaauuugggaaauuc

SEQ ID NO: 181783 - RNA, 19 nt, Artificial Sequence
  Description of Artificial Sequence: Synthetic oligonucleotide
  Antisense strand to SEQ ID NO: 181782
gaauuucccaaauuaagaa

SEQ ID NO: 181784 - RNA, 19 nt, Artificial Sequence
  Description of Artificial Sequence: Synthetic oligonucleotide
  Sense strand starting at position 1546 of SEQ ID NO: 2343
gauuaauagccacguuaaa

SEQ ID NO: 181785 - RNA, 19 nt, Artificial Sequence
  Description of Artificial Sequence: Synthetic oligonucleotide
  Antisense strand to SEQ ID NO: 181784
uuuaacguggcuauuaauc

SEQ ID NO: 181786 - RNA, 19 nt, Artificial Sequence
  Description of Artificial Sequence: Synthetic oligonucleotide
  Sense strand starting at position 1534 of SEQ ID NO: 2343
agaugcucagcugauuaau

SEQ ID NO: 181787 - RNA, 19 nt, Artificial Sequence
  Description of Artificial Sequence: Synthetic oligonucleotide
  Antisense strand to SEQ ID NO: 181786
auuaaucagcugagcaucu

SEQ ID NO: 181788 - RNA, 19 nt, Artificial Sequence
  Description of Artificial Sequence: Synthetic oligonucleotide
  Sense strand starting at position 1372 of SEQ ID NO: 2343
uuuagauucccuuaguauu

SEQ ID NO: 181789 - RNA, 19 nt, Artificial Sequence
  Description of Artificial Sequence: Synthetic oligonucleotide
  Antisense strand to SEQ ID NO: 181788
aauacuaagggaaucuaaa

SEQ ID NO: 181790 - RNA, 19 nt, Artificial Sequence
  Description of Artificial Sequence: Synthetic oligonucleotide
  Sense strand starting at position 1370 of SEQ ID NO: 2343
ucuuuagauucccuuagua

SEQ ID NO: 181791 - RNA, 19 nt, Artificial Sequence
  Description of Artificial Sequence: Synthetic oligonucleotide
  Antisense strand to SEQ ID NO: 181790
uacuaagggaaucuaaaga

SEQ ID NO: 181792 - RNA, 19 nt, Artificial Sequence
  Description of Artificial Sequence: Synthetic oligonucleotide
  Sense strand starting at position 1361 of SEQ ID NO: 2343
gcuacaaagucuuuagauu

SEQ ID NO: 181793 - RNA, 19 nt, Artificial Sequence
  Description of Artificial Sequence: Synthetic oligonucleotide
  Antisense strand to SEQ ID NO: 181792
aaucuaaagacuuuguagc

SEQ ID NO: 181794 - RNA, 19 nt, Artificial Sequence
  Description of Artificial Sequence: Synthetic oligonucleotide
  Sense strand starting at position 1291 of SEQ ID NO: 2343
ucaagcaugcaguaacaau

SEQ ID NO: 181795 - RNA, 19 nt, Artificial Sequence
  Description of Artificial Sequence: Synthetic oligonucleotide
  Antisense strand to SEQ ID NO: 181794
auuguuacugcaugcuuga

SEQ ID NO: 181796 - RNA, 19 nt, Artificial Sequence
  Description of Artificial Sequence: Synthetic oligonucleotide
  Sense strand starting at position 1270 of SEQ ID NO: 2343
acuccuuaacacuggugau

SEQ ID NO: 181797 - RNA, 19 nt, Artificial Sequence
  Description of Artificial Sequence: Synthetic oligonucleotide
  Antisense strand to SEQ ID NO: 181796
aucaccaguguuaaggagu

SEQ ID NO: 181798 - RNA, 19 nt, Artificial Sequence
  Description of Artificial Sequence: Synthetic oligonucleotide
  Sense strand starting at position 1046 of SEQ ID NO: 2343
ggagguauggcuuguacag

SEQ ID NO: 181799 - RNA, 19 nt, Artificial Sequence
  Description of Artificial Sequence: Synthetic oligonucleotide
  Antisense strand to SEQ ID NO: 181798
cuguacaagccauaccucc

SEQ ID NO: 181800 - RNA, 19 nt, Artificial Sequence
  Description of Artificial Sequence: Synthetic oligonucleotide
  Sense strand starting at position 718 of SEQ ID NO: 2343
ccaaaucgccagcaucauu

SEQ ID NO: 181801 - RNA, 19 nt, Artificial Sequence
  Description of Artificial Sequence: Synthetic oligonucleotide
  Antisense strand to SEQ ID NO: 181800
aaugaugcuggcgauuugg

SEQ ID NO: 181802 - RNA, 19 nt, Artificial Sequence
  Description of Artificial Sequence: Synthetic oligonucleotide
  Sense strand starting at position 699 of SEQ ID NO: 2343
aaacuuacuguuggcagau

SEQ ID NO: 181803 - RNA, 19 nt, Artificial Sequence
  Description of Artificial Sequence: Synthetic oligonucleotide
  Antisense strand to SEQ ID NO: 181802
aucugccaacaguaaguuu

SEQ ID NO: 181804 - RNA, 19 nt, Artificial Sequence
  Description of Artificial Sequence: Synthetic oligonucleotide
  Sense strand starting at position 598 of SEQ ID NO: 2343
auucuuuccguagaucuua

SEQ ID NO: 181805 - RNA, 19 nt, Artificial Sequence
  Description of Artificial Sequence: Synthetic oligonucleotide
  Antisense strand to SEQ ID NO: 181804
uaagaucuacggaaagaau

SEQ ID NO: 181806 - RNA, 19 nt, Artificial Sequence
  Description of Artificial Sequence: Synthetic oligonucleotide
  Sense strand starting at position 596 of SEQ ID NO: 2343
ucauucuuuccguagaucu

SEQ ID NO: 181807 - RNA, 19 nt, Artificial Sequence
  Description of Artificial Sequence: Synthetic oligonucleotide
  Antisense strand to SEQ ID NO: 181806
agaucuacggaaagaauga

SEQ ID NO: 181808 - RNA, 19 nt, Artificial Sequence
  Description of Artificial Sequence: Synthetic oligonucleotide
  Sense strand starting at position 447 of SEQ ID NO: 2343
gucacauagcccgugguuu

SEQ ID NO: 181809 - RNA, 19 nt, Artificial Sequence
  Description of Artificial Sequence: Synthetic oligonucleotide
  Antisense strand to SEQ ID NO: 181808
aaaccacgggcuaugugac

SEQ ID NO: 181810 - RNA, 19 nt, Artificial Sequence
  Description of Artificial Sequence: Synthetic oligonucleotide
  Sense strand starting at position 429 of SEQ ID NO: 2343
ugagauagcuuuccuaagg

SEQ ID NO: 181811 - RNA, 19 nt, Artificial Sequence
  Description of Artificial Sequence: Synthetic oligonucleotide
  Antisense strand to SEQ ID NO: 181810
ccuuaggaaagcuaucuca

SEQ ID NO: 181812 - RNA, 19 nt, Artificial Sequence
  Description of Artificial Sequence: Synthetic oligonucleotide
  Sense strand starting at position 193 of SEQ ID NO: 2343
gcaaauaaaugaucaguca

SEQ ID NO: 181813 - RNA, 19 nt, Artificial Sequence
  Description of Artificial Sequence: Synthetic oligonucleotide
  Antisense strand to SEQ ID NO: 181812
ugacugaucauuuauuugc

SEQ ID NO: 181814 - RNA, 19 nt, Artificial Sequence
  Description of Artificial Sequence: Synthetic oligonucleotide
  Sense strand starting at position 172 of SEQ ID NO: 2343
cccugcuaacuugagagau

SEQ ID NO: 181815 - RNA, 19 nt, Artificial Sequence
  Description of Artificial Sequence: Synthetic oligonucleotide
  Antisense strand to SEQ ID NO: 181814
aucucucaaguuagcaggg

SEQ ID NO: 181816 - RNA, 19 nt, Artificial Sequence
  Description of Artificial Sequence: Synthetic oligonucleotide
  Sense strand starting at position 108 of SEQ ID NO: 2343
gagaguuugugggcaagaa

SEQ ID NO: 181817 - RNA, 19 nt, Artificial Sequence
  Description of Artificial Sequence: Synthetic oligonucleotide
  Antisense strand to SEQ ID NO: 181816
uucuugcccacaaacucuc

SEQ ID NO: 181818 - RNA, 19 nt, Artificial Sequence
  Description of Artificial Sequence: Synthetic oligonucleotide
  Sense strand starting at position 78 of SEQ ID NO: 2343
gcgagacagaguuauggaa

SEQ ID NO: 181819 - RNA, 19 nt, Artificial Sequence
  Description of Artificial Sequence: Synthetic oligonucleotide
  Antisense strand to SEQ ID NO: 181818
uuccauaacucugucucgc

SEQ ID NO: 181820 - RNA, 19 nt, Artificial Sequence
  Description of Artificial Sequence: Synthetic oligonucleotide
  Sense strand starting at position 46 of SEQ ID NO: 2343
uggcuuguuagagaaccau

SEQ ID NO: 181821 - RNA, 19 nt, Artificial Sequence
  Description of Artificial Sequence: Synthetic oligonucleotide
  Antisense strand to SEQ ID NO: 181820
augguucucuaacaagcca

SEQ ID NO: 181822 - RNA, 19 nt, Artificial Sequence
  Description of Artificial Sequence: Synthetic oligonucleotide
  Sense strand starting at position 41 of SEQ ID NO: 2343
uuaaguggcuuguuagaga

SEQ ID NO: 181823 - RNA, 19 nt, Artificial Sequence
  Description of Artificial Sequence: Synthetic oligonucleotide
  Antisense strand to SEQ ID NO: 181822
ucucuaacaagccacuuaa

SEQ ID NO: 181824 - RNA, 19 nt, Artificial Sequence
  Description of Artificial Sequence: Synthetic oligonucleotide
  Sense strand starting at position 3709 of SEQ ID NO: 2344
guauuagcagcagaacaau

SEQ ID NO: 181825 - RNA, 19 nt, Artificial Sequence
  Description of Artificial Sequence: Synthetic oligonucleotide
  Antisense strand to SEQ ID NO: 181824
auuguucugcugcuaauac

SEQ ID NO: 181826 - RNA, 19 nt, Artificial Sequence
  Description of Artificial Sequence: Synthetic oligonucleotide
  Sense strand starting at position 3707 of SEQ ID NO: 2344
guguauuagcagcagaaca

SEQ ID NO: 181827 - RNA, 19 nt, Artificial Sequence
  Description of Artificial Sequence: Synthetic oligonucleotide
  Antisense strand to SEQ ID NO: 181826
uguucugcugcuaauacac

SEQ ID NO: 181828 - RNA, 19 nt, Artificial Sequence
  Description of Artificial Sequence: Synthetic oligonucleotide
  Sense strand starting at position 3697 of SEQ ID NO: 2344
augagucauuguguauuag

SEQ ID NO: 181829 - RNA, 19 nt, Artificial Sequence
  Description of Artificial Sequence: Synthetic oligonucleotide
  Antisense strand to SEQ ID NO: 181828
cuaauacacaaugacucau

SEQ ID NO: 181830 - RNA, 19 nt, Artificial Sequence
  Description of Artificial Sequence: Synthetic oligonucleotide
  Sense strand starting at position 3687 of SEQ ID NO: 2344
auaugcuuacaugagucau

SEQ ID NO: 181831 - RNA, 19 nt, Artificial Sequence
  Description of Artificial Sequence: Synthetic oligonucleotide
  Antisense strand to SEQ ID NO: 181830
augacucauguaagcauau

SEQ ID NO: 181832 - RNA, 19 nt, Artificial Sequence
  Description of Artificial Sequence: Synthetic oligonucleotide
  Sense strand starting at position 3528 of SEQ ID NO: 2344
ccuggaggaguccgaaauu

SEQ ID NO: 181833 - RNA, 19 nt, Artificial Sequence
  Description of Artificial Sequence: Synthetic oligonucleotide
  Antisense strand to SEQ ID NO: 181832
aauuucggacuccuccagg

SEQ ID NO: 181834 - RNA, 19 nt, Artificial Sequence
  Description of Artificial Sequence: Synthetic oligonucleotide
  Sense strand starting at position 3509 of SEQ ID NO: 2344
guuccauacgaucauggaa

SEQ ID NO: 181835 - RNA, 19 nt, Artificial Sequence
  Description of Artificial Sequence: Synthetic oligonucleotide
  Antisense strand to SEQ ID NO: 181834
uuccaugaucguauggaac

SEQ ID NO: 181836 - RNA, 19 nt, Artificial Sequence
  Description of Artificial Sequence: Synthetic oligonucleotide
  Sense strand starting at position 3422 of SEQ ID NO: 2344
ugugauuacgugucugguu

SEQ ID NO: 181837 - RNA, 19 nt, Artificial Sequence
  Description of Artificial Sequence: Synthetic oligonucleotide
  Antisense strand to SEQ ID NO: 181836
aaccagacacguaaucaca

SEQ ID NO: 181838 - RNA, 19 nt, Artificial Sequence
  Description of Artificial Sequence: Synthetic oligonucleotide
  Sense strand starting at position 3421 of SEQ ID NO: 2344
cugugauuacgugucuggu

SEQ ID NO: 181839 - RNA, 19 nt, Artificial Sequence
  Description of Artificial Sequence: Synthetic oligonucleotide
  Antisense strand to SEQ ID NO: 181838
accagacacguaaucacag

SEQ ID NO: 181840 - RNA, 19 nt, Artificial Sequence
  Description of Artificial Sequence: Synthetic oligonucleotide
  Sense strand starting at position 3332 of SEQ ID NO: 2344
aggugugucaaugauuaaa

SEQ ID NO: 181841 - RNA, 19 nt, Artificial Sequence
  Description of Artificial Sequence: Synthetic oligonucleotide
  Antisense strand to SEQ ID NO: 181840
uuuaaucauugacacaccu

SEQ ID NO: 181842 - RNA, 19 nt, Artificial Sequence
  Description of Artificial Sequence: Synthetic oligonucleotide
  Sense strand starting at position 3182 of SEQ ID NO: 2344
gauugcagucuuugagaga

SEQ ID NO: 181843 - RNA, 19 nt, Artificial Sequence
  Description of Artificial Sequence: Synthetic oligonucleotide
  Antisense strand to SEQ ID NO: 181842
ucucucaaagacugcaauc

SEQ ID NO: 181844 - RNA, 19 nt, Artificial Sequence
  Description of Artificial Sequence: Synthetic oligonucleotide
  Sense strand starting at position 3167 of SEQ ID NO: 2344
cagcuuugccaucaggauu

SEQ ID NO: 181845 - RNA, 19 nt, Artificial Sequence
  Description of Artificial Sequence: Synthetic oligonucleotide
  Antisense strand to SEQ ID NO: 181844
aauccugauggcaaagcug

SEQ ID NO: 181846 - RNA, 19 nt, Artificial Sequence
  Description of Artificial Sequence: Synthetic oligonucleotide
  Sense strand starting at position 3125 of SEQ ID NO: 2344
ugucuuggauucccacaau

SEQ ID NO: 181847 - RNA, 19 nt, Artificial Sequence
  Description of Artificial Sequence: Synthetic oligonucleotide
  Antisense strand to SEQ ID NO: 181846
auugugggaauccaagaca

SEQ ID NO: 181848 - RNA, 19 nt, Artificial Sequence
  Description of Artificial Sequence: Synthetic oligonucleotide
  Sense strand starting at position 2673 of SEQ ID NO: 2344
gaggauuuguccuagguag

SEQ ID NO: 181849 - RNA, 19 nt, Artificial Sequence
  Description of Artificial Sequence: Synthetic oligonucleotide
  Antisense strand to SEQ ID NO: 181848
cuaccuaggacaaauccuc

SEQ ID NO: 181850 - RNA, 19 nt, Artificial Sequence
  Description of Artificial Sequence: Synthetic oligonucleotide
  Sense strand starting at position 2661 of SEQ ID NO: 2344
cucucagcuguagaggauu

SEQ ID NO: 181851 - RNA, 19 nt, Artificial Sequence
  Description of Artificial Sequence: Synthetic oligonucleotide
  Antisense strand to SEQ ID NO: 181850
aauccucuacagcugagag

SEQ ID NO: 181852 - RNA, 19 nt, Artificial Sequence
  Description of Artificial Sequence: Synthetic oligonucleotide
  Sense strand starting at position 2560 of SEQ ID NO: 2344
gccagucacccgcuugauu

SEQ ID NO: 181853 - RNA, 19 nt, Artificial Sequence
  Description of Artificial Sequence: Synthetic oligonucleotide
  Antisense strand to SEQ ID NO: 181852
aaucaagcgggugacuggc

SEQ ID NO: 181854 - RNA, 19 nt, Artificial Sequence
  Description of Artificial Sequence: Synthetic oligonucleotide
  Sense strand starting at position 2447 of SEQ ID NO: 2344
cugaguuuaggcuaccaca

SEQ ID NO: 181855 - RNA, 19 nt, Artificial Sequence
  Description of Artificial Sequence: Synthetic oligonucleotide
  Antisense strand to SEQ ID NO: 181854
ugugguagccuaaacucag

SEQ ID NO: 181856 - RNA, 19 nt, Artificial Sequence
  Description of Artificial Sequence: Synthetic oligonucleotide
  Sense strand starting at position 2435 of SEQ ID NO: 2344
ugcguuuaggcucugaguu

SEQ ID NO: 181857 - RNA, 19 nt, Artificial Sequence
  Description of Artificial Sequence: Synthetic oligonucleotide
  Antisense strand to SEQ ID NO: 181856
aacucagagccuaaacgca

SEQ ID NO: 181858 - RNA, 19 nt, Artificial Sequence
  Description of Artificial Sequence: Synthetic oligonucleotide
  Sense strand starting at position 2434 of SEQ ID NO: 2344
cugcguuuaggcucugagu

SEQ ID NO: 181859 - RNA, 19 nt, Artificial Sequence
  Description of Artificial Sequence: Synthetic oligonucleotide
  Antisense strand to SEQ ID NO: 181858
acucagagccuaaacgcag

SEQ ID NO: 181860 - RNA, 19 nt, Artificial Sequence
  Description of Artificial Sequence: Synthetic oligonucleotide
  Sense strand starting at position 2148 of SEQ ID NO: 2344
uucuguggaaucugaagaa

SEQ ID NO: 181861 - RNA, 19 nt, Artificial Sequence
  Description of Artificial Sequence: Synthetic oligonucleotide
  Antisense strand to SEQ ID NO: 181860
uucuucagauuccacagaa

SEQ ID NO: 181862 - RNA, 19 nt, Artificial Sequence
  Description of Artificial Sequence: Synthetic oligonucleotide
  Sense strand starting at position 2024 of SEQ ID NO: 2344
uucuuaauuugggaaauuc

SEQ ID NO: 181863 - RNA, 19 nt, Artificial Sequence
  Description of Artificial Sequence: Synthetic oligonucleotide
  Antisense strand to SEQ ID NO: 181862
gaauuucccaaauuaagaa

SEQ ID NO: 181864 - RNA, 19 nt, Artificial Sequence
  Description of Artificial Sequence: Synthetic oligonucleotide
  Sense strand starting at position 1550 of SEQ ID NO: 2344
gauuaauagccacguuaaa

SEQ ID NO: 181865 - RNA, 19 nt, Artificial Sequence
  Description of Artificial Sequence: Synthetic oligonucleotide
  Antisense strand to SEQ ID NO: 181864
uuuaacguggcuauuaauc

SEQ ID NO: 181866 - RNA, 19 nt, Artificial Sequence
  Description of Artificial Sequence: Synthetic oligonucleotide
  Sense strand starting at position 1538 of SEQ ID NO: 2344
agaugcucagcugauuaau

SEQ ID NO: 181867 - RNA, 19 nt, Artificial Sequence
  Description of Artificial Sequence: Synthetic oligonucleotide
  Antisense strand to SEQ ID NO: 181866
auuaaucagcugagcaucu

SEQ ID NO: 181868 - RNA, 19 nt, Artificial Sequence
  Description of Artificial Sequence: Synthetic oligonucleotide
  Sense strand starting at position 1376 of SEQ ID NO: 2344
uuuagauucccuuaguauu

SEQ ID NO: 181869 - RNA, 19 nt, Artificial Sequence
  Description of Artificial Sequence: Synthetic oligonucleotide
  Antisense strand to SEQ ID NO: 181868
aauacuaagggaaucuaaa

SEQ ID NO: 181870 - RNA, 19 nt, Artificial Sequence
  Description of Artificial Sequence: Synthetic oligonucleotide
  Sense strand starting at position 1374 of SEQ ID NO: 2344
ucuuuagauucccuuagua

SEQ ID NO: 181871 - RNA, 19 nt, Artificial Sequence
  Description of Artificial Sequence: Synthetic oligonucleotide
  Antisense strand to SEQ ID NO: 181870
uacuaagggaaucuaaaga

SEQ ID NO: 181872 - RNA, 19 nt, Artificial Sequence
  Description of Artificial Sequence: Synthetic oligonucleotide
  Sense strand starting at position 1365 of SEQ ID NO: 2344
gcuacaaagucuuuagauu

SEQ ID NO: 181873 - RNA, 19 nt, Artificial Sequence
  Description of Artificial Sequence: Synthetic oligonucleotide
  Antisense strand to SEQ ID NO: 181872
aaucuaaagacuuuguagc

SEQ ID NO: 181874 - RNA, 19 nt, Artificial Sequence
  Description of Artificial Sequence: Synthetic oligonucleotide
  Sense strand starting at position 1295 of SEQ ID NO: 2344
ucaagcaugcaguaacaau

SEQ ID NO: 181875 - RNA, 19 nt, Artificial Sequence
  Description of Artificial Sequence: Synthetic oligonucleotide
  Antisense strand to SEQ ID NO: 181874
auuguuacugcaugcuuga

SEQ ID NO: 181876 - RNA, 19 nt, Artificial Sequence
  Description of Artificial Sequence: Synthetic oligonucleotide
  Sense strand starting at position 1274 of SEQ ID NO: 2344
acuccuuaacacuggugau

SEQ ID NO: 181877 - RNA, 19 nt, Artificial Sequence
  Description of Artificial Sequence: Synthetic oligonucleotide
  Antisense strand to SEQ ID NO: 181876
aucaccaguguuaaggagu

SEQ ID NO: 181878 - RNA, 19 nt, Artificial Sequence
  Description of Artificial Sequence: Synthetic oligonucleotide
  Sense strand starting at position 1050 of SEQ ID NO: 2344
ggagguauggcuuguacag

SEQ ID NO: 181879 - RNA, 19 nt, Artificial Sequence
  Description of Artificial Sequence: Synthetic oligonucleotide
  Antisense strand to SEQ ID NO: 181878
cuguacaagccauaccucc

SEQ ID NO: 181880 - RNA, 19 nt, Artificial Sequence
  Description of Artificial Sequence: Synthetic oligonucleotide
  Sense strand starting at position 722 of SEQ ID NO: 2344
ccaaaucgccagcaucauu

SEQ ID NO: 181881 - RNA, 19 nt, Artificial Sequence
  Description of Artificial Sequence: Synthetic oligonucleotide
  Antisense strand to SEQ ID NO: 181880
aaugaugcuggcgauuugg

SEQ ID NO: 181882 - RNA, 19 nt, Artificial Sequence
  Description of Artificial Sequence: Synthetic oligonucleotide
  Sense strand starting at position 703 of SEQ ID NO: 2344
aaacuuacuguuggcagau

SEQ ID NO: 181883 - RNA, 19 nt, Artificial Sequence
  Description of Artificial Sequence: Synthetic oligonucleotide
  Antisense strand to SEQ ID NO: 181882
aucugccaacaguaaguuu

SEQ ID NO: 181884 - RNA, 19 nt, Artificial Sequence
  Description of Artificial Sequence: Synthetic oligonucleotide
  Sense strand starting at position 602 of SEQ ID NO: 2344
auucuuuccguagaucuua

SEQ ID NO: 181885 - RNA, 19 nt, Artificial Sequence
  Description of Artificial Sequence: Synthetic oligonucleotide
  Antisense strand to SEQ ID NO: 181884
uaagaucuacggaaagaau

SEQ ID NO: 181886 - RNA, 19 nt, Artificial Sequence
  Description of Artificial Sequence: Synthetic oligonucleotide
  Sense strand starting at position 600 of SEQ ID NO: 2344
ucauucuuuccguagaucu

SEQ ID NO: 181887 - RNA, 19 nt, Artificial Sequence
  Description of Artificial Sequence: Synthetic oligonucleotide
  Antisense strand to SEQ ID NO: 181886
agaucuacggaaagaauga

SEQ ID NO: 181888 - RNA, 19 nt, Artificial Sequence
  Description of Artificial Sequence: Synthetic oligonucleotide
  Sense strand starting at position 451 of SEQ ID NO: 2344
gucacauagcccgugguuu

SEQ ID NO: 181889 - RNA, 19 nt, Artificial Sequence
  Description of Artificial Sequence: Synthetic oligonucleotide
  Antisense strand to SEQ ID NO: 181888
aaaccacgggcuaugugac

SEQ ID NO: 181890 - RNA, 19 nt, Artificial Sequence
  Description of Artificial Sequence: Synthetic oligonucleotide
  Sense strand starting at position 433 of SEQ ID NO: 2344
ugagauagcuuuccuaagg

SEQ ID NO: 181891 - RNA, 19 nt, Artificial Sequence
  Description of Artificial Sequence: Synthetic oligonucleotide
  Antisense strand to SEQ ID NO: 181890
ccuuaggaaagcuaucuca

SEQ ID NO: 181892 - RNA, 19 nt, Artificial Sequence
  Description of Artificial Sequence: Synthetic oligonucleotide
  Sense strand starting at position 197 of SEQ ID NO: 2344
gcaaauaaaugaucaguca

SEQ ID NO: 181893 - RNA, 19 nt, Artificial Sequence
  Description of Artificial Sequence: Synthetic oligonucleotide
  Antisense strand to SEQ ID NO: 181892
ugacugaucauuuauuugc

SEQ ID NO: 181894 - RNA, 19 nt, Artificial Sequence
  Description of Artificial Sequence: Synthetic oligonucleotide
  Sense strand starting at position 176 of SEQ ID NO: 2344
cccugcuaacuugagagau

SEQ ID NO: 181895 - RNA, 19 nt, Artificial Sequence
  Description of Artificial Sequence: Synthetic oligonucleotide
  Antisense strand to SEQ ID NO: 181894
aucucucaaguuagcaggg

SEQ ID NO: 181896 - RNA, 19 nt, Artificial Sequence
  Description of Artificial Sequence: Synthetic oligonucleotide
  Sense strand starting at position 112 of SEQ ID NO: 2344
gagaguuugugggcaagaa

SEQ ID NO: 181897 - RNA, 19 nt, Artificial Sequence
  Description of Artificial Sequence: Synthetic oligonucleotide
  Antisense strand to SEQ ID NO: 181896
uucuugcccacaaacucuc

SEQ ID NO: 181898 - RNA, 19 nt, Artificial Sequence
  Description of Artificial Sequence: Synthetic oligonucleotide
  Sense strand starting at position 82 of SEQ ID NO: 2344
gcgagacagaguuauggaa

SEQ ID NO: 181899 - RNA, 19 nt, Artificial Sequence
  Description of Artificial Sequence: Synthetic oligonucleotide
  Antisense strand to SEQ ID NO: 181898
uuccauaacucugucucgc

SEQ ID NO: 181900 - RNA, 19 nt, Artificial Sequence
  Description of Artificial Sequence: Synthetic oligonucleotide
  Sense strand starting at position 50 of SEQ ID NO: 2344
uggcuuguuagagaaccau

SEQ ID NO: 181901 - RNA, 19 nt, Artificial Sequence
  Description of Artificial Sequence: Synthetic oligonucleotide
  Antisense strand to SEQ ID NO: 181900
augguucucuaacaagcca

SEQ ID NO: 181902 - RNA, 19 nt, Artificial Sequence
  Description of Artificial Sequence: Synthetic oligonucleotide
  Sense strand starting at position 45 of SEQ ID NO: 2344
uuaaguggcuuguuagaga

SEQ ID NO: 181903 - RNA, 19 nt, Artificial Sequence
  Description of Artificial Sequence: Synthetic oligonucleotide
  Antisense strand to SEQ ID NO: 181902
ucucuaacaagccacuuaa

SEQ ID NO: 181904 - RNA, 19 nt, Artificial Sequence
  Description of Artificial Sequence: Synthetic oligonucleotide
  Sense strand starting at position 3794 of SEQ ID NO: 2345
aguuauuucuguccuucga

SEQ ID NO: 181905 - RNA, 19 nt, Artificial Sequence
  Description of Artificial Sequence: Synthetic oligonucleotide
  Antisense strand to SEQ ID NO: 181904
ucgaaggacagaaauaacu

SEQ ID NO: 181906 - RNA, 19 nt, Artificial Sequence
  Description of Artificial Sequence: Synthetic oligonucleotide
  Sense strand starting at position 3792 of SEQ ID NO: 2345
agaguuauuucuguccuuc

SEQ ID NO: 181907 - RNA, 19 nt, Artificial Sequence
  Description of Artificial Sequence: Synthetic oligonucleotide
  Antisense strand to SEQ ID NO: 181906
gaaggacagaaauaacucu

SEQ ID NO: 181908 - RNA, 19 nt, Artificial Sequence
  Description of Artificial Sequence: Synthetic oligonucleotide
  Sense strand starting at position 3781 of SEQ ID NO: 2345
ugucuaacacuagaguuau

SEQ ID NO: 181909 - RNA, 19 nt, Artificial Sequence
  Description of Artificial Sequence: Synthetic oligonucleotide
  Antisense strand to SEQ ID NO: 181908
auaacucuaguguuagaca

SEQ ID NO: 181910 - RNA, 19 nt, Artificial Sequence
  Description of Artificial Sequence: Synthetic oligonucleotide
  Sense strand starting at position 3765 of SEQ ID NO: 2345
gcuaaauguccagaaaugu

SEQ ID NO: 181911 - RNA, 19 nt, Artificial Sequence
  Description of Artificial Sequence: Synthetic oligonucleotide
  Antisense strand to SEQ ID NO: 181910
acauuucuggacauuuagc

SEQ ID NO: 181912 - RNA, 19 nt, Artificial Sequence
  Description of Artificial Sequence: Synthetic oligonucleotide
  Sense strand starting at position 3762 of SEQ ID NO: 2345
ccagcuaaauguccagaaa

SEQ ID NO: 181913 - RNA, 19 nt, Artificial Sequence
  Description of Artificial Sequence: Synthetic oligonucleotide
  Antisense strand to SEQ ID NO: 181912
uuucuggacauuuagcugg

SEQ ID NO: 181914 - RNA, 19 nt, Artificial Sequence
  Description of Artificial Sequence: Synthetic oligonucleotide
  Sense strand starting at position 3723 of SEQ ID NO: 2345
cugguuacuaggcauaaga

SEQ ID NO: 181915 - RNA, 19 nt, Artificial Sequence
  Description of Artificial Sequence: Synthetic oligonucleotide
  Antisense strand to SEQ ID NO: 181914
ucuuaugccuaguaaccag

SEQ ID NO: 181916 - RNA, 19 nt, Artificial Sequence
  Description of Artificial Sequence: Synthetic oligonucleotide
  Sense strand starting at position 3715 of SEQ ID NO: 2345
uuguuauucugguuacuag

SEQ ID NO: 181917 - RNA, 19 nt, Artificial Sequence
  Description of Artificial Sequence: Synthetic oligonucleotide
  Antisense strand to SEQ ID NO: 181916
cuaguaaccagaauaacaa

SEQ ID NO: 181918 - RNA, 19 nt, Artificial Sequence
  Description of Artificial Sequence: Synthetic oligonucleotide
  Sense strand starting at position 3548 of SEQ ID NO: 2345
auaggcauucuauaaguca

SEQ ID NO: 181919 - RNA, 19 nt, Artificial Sequence
  Description of Artificial Sequence: Synthetic oligonucleotide
  Antisense strand to SEQ ID NO: 181918
ugacuuauagaaugccuau

SEQ ID NO: 181920 - RNA, 19 nt, Artificial Sequence
  Description of Artificial Sequence: Synthetic oligonucleotide
  Sense strand starting at position 3540 of SEQ ID NO: 2345
ggaauauuauaggcauucu

SEQ ID NO: 181921 - RNA, 19 nt, Artificial Sequence
  Description of Artificial Sequence: Synthetic oligonucleotide
  Antisense strand to SEQ ID NO: 181920
agaaugccuauaauauucc

SEQ ID NO: 181922 - RNA, 19 nt, Artificial Sequence
  Description of Artificial Sequence: Synthetic oligonucleotide
  Sense strand starting at position 3526 of SEQ ID NO: 2345
cuaagauaaugucuggaau

SEQ ID NO: 181923 - RNA, 19 nt, Artificial Sequence
  Description of Artificial Sequence: Synthetic oligonucleotide
  Antisense strand to SEQ ID NO: 181922
auuccagacauuaucuuag

SEQ ID NO: 181924 - RNA, 19 nt, Artificial Sequence
  Description of Artificial Sequence: Synthetic oligonucleotide
  Sense strand starting at position 3273 of SEQ ID NO: 2345
ccauuuggugguuguauua

SEQ ID NO: 181925 - RNA, 19 nt, Artificial Sequence
  Description of Artificial Sequence: Synthetic oligonucleotide
  Antisense strand to SEQ ID NO: 181924
uaauacaaccaccaaaugg

SEQ ID NO: 181926 - RNA, 19 nt, Artificial Sequence
  Description of Artificial Sequence: Synthetic oligonucleotide
  Sense strand starting at position 3158 of SEQ ID NO: 2345
uuucuuaaucaugggaucu

SEQ ID NO: 181927 - RNA, 19 nt, Artificial Sequence
  Description of Artificial Sequence: Synthetic oligonucleotide
  Antisense strand to SEQ ID NO: 181926
agaucccaugauuaagaaa

SEQ ID NO: 181928 - RNA, 19 nt, Artificial Sequence
  Description of Artificial Sequence: Synthetic oligonucleotide
  Sense strand starting at position 3150 of SEQ ID NO: 2345
gugauugguuucuuaauca

SEQ ID NO: 181929 - RNA, 19 nt, Artificial Sequence
  Description of Artificial Sequence: Synthetic oligonucleotide
  Antisense strand to SEQ ID NO: 181928
ugauuaagaaaccaaucac

SEQ ID NO: 181930 - RNA, 19 nt, Artificial Sequence
  Description of Artificial Sequence: Synthetic oligonucleotide
  Sense strand starting at position 3149 of SEQ ID NO: 2345
agugauugguuucuuaauc

SEQ ID NO: 181931 - RNA, 19 nt, Artificial Sequence
  Description of Artificial Sequence: Synthetic oligonucleotide
  Antisense strand to SEQ ID NO: 181930
gauuaagaaaccaaucacu

SEQ ID NO: 181932 - RNA, 19 nt, Artificial Sequence
  Description of Artificial Sequence: Synthetic oligonucleotide
  Sense strand starting at position 3136 of SEQ ID NO: 2345
ugguuuauaguguagugau

SEQ ID NO: 181933 - RNA, 19 nt, Artificial Sequence
  Description of Artificial Sequence: Synthetic oligonucleotide
  Antisense strand to SEQ ID NO: 181932
aucacuacacuauaaacca

SEQ ID NO: 181934 - RNA, 19 nt, Artificial Sequence
  Description of Artificial Sequence: Synthetic oligonucleotide
  Sense strand starting at position 3129 of SEQ ID NO: 2345
uagugauugguuuauagug

SEQ ID NO: 181935 - RNA, 19 nt, Artificial Sequence
  Description of Artificial Sequence: Synthetic oligonucleotide
  Antisense strand to SEQ ID NO: 181934
cacuauaaaccaaucacua

SEQ ID NO: 181936 - RNA, 19 nt, Artificial Sequence
  Description of Artificial Sequence: Synthetic oligonucleotide
  Sense strand starting at position 3127 of SEQ ID NO: 2345
uguagugauugguuuauag

SEQ ID NO: 181937 - RNA, 19 nt, Artificial Sequence
  Description of Artificial Sequence: Synthetic oligonucleotide
  Antisense strand to SEQ ID NO: 181936
cuauaaaccaaucacuaca

SEQ ID NO: 181938 - RNA, 19 nt, Artificial Sequence
  Description of Artificial Sequence: Synthetic oligonucleotide
  Sense strand starting at position 2942 of SEQ ID NO: 2345
cuacuuucuugggugcaaa

SEQ ID NO: 181939 - RNA, 19 nt, Artificial Sequence
  Description of Artificial Sequence: Synthetic oligonucleotide
  Antisense strand to SEQ ID NO: 181938
uuugcacccaagaaaguag

SEQ ID NO: 181940 - RNA, 19 nt, Artificial Sequence
  Description of Artificial Sequence: Synthetic oligonucleotide
  Sense strand starting at position 2857 of SEQ ID NO: 2345
uuugcaagaaguggaauau

SEQ ID NO: 181941 - RNA, 19 nt, Artificial Sequence
  Description of Artificial Sequence: Synthetic oligonucleotide
  Antisense strand to SEQ ID NO: 181940
auauuccacuucuugcaaa

SEQ ID NO: 181942 - RNA, 19 nt, Artificial Sequence
  Description of Artificial Sequence: Synthetic oligonucleotide
  Sense strand starting at position 2829 of SEQ ID NO: 2345
auuuaaaguuguguugcau

SEQ ID NO: 181943 - RNA, 19 nt, Artificial Sequence
  Description of Artificial Sequence: Synthetic oligonucleotide
  Antisense strand to SEQ ID NO: 181942
augcaacacaacuuuaaau

SEQ ID NO: 181944 - RNA, 19 nt, Artificial Sequence
  Description of Artificial Sequence: Synthetic oligonucleotide
  Sense strand starting at position 2811 of SEQ ID NO: 2345
cuuggaagcuauguuuaca

SEQ ID NO: 181945 - RNA, 19 nt, Artificial Sequence
  Description of Artificial Sequence: Synthetic oligonucleotide
  Antisense strand to SEQ ID NO: 181944
uguaaacauagcuuccaag

SEQ ID NO: 181946 - RNA, 19 nt, Artificial Sequence
  Description of Artificial Sequence: Synthetic oligonucleotide
  Sense strand starting at position 2808 of SEQ ID NO: 2345
gcccuuggaagcuauguuu

SEQ ID NO: 181947 - RNA, 19 nt, Artificial Sequence
  Description of Artificial Sequence: Synthetic oligonucleotide
  Antisense strand to SEQ ID NO: 181946
aaacauagcuuccaagggc

SEQ ID NO: 181948 - RNA, 19 nt, Artificial Sequence
  Description of Artificial Sequence: Synthetic oligonucleotide
  Sense strand starting at position 2679 of SEQ ID NO: 2345
caguacucugcagaaagau

SEQ ID NO: 181949 - RNA, 19 nt, Artificial Sequence
  Description of Artificial Sequence: Synthetic oligonucleotide
  Antisense strand to SEQ ID NO: 181948
aucuuucugcagaguacug

SEQ ID NO: 181950 - RNA, 19 nt, Artificial Sequence
  Description of Artificial Sequence: Synthetic oligonucleotide
  Sense strand starting at position 2677 of SEQ ID NO: 2345
cucaguacucugcagaaag

SEQ ID NO: 181951 - RNA, 19 nt, Artificial Sequence
  Description of Artificial Sequence: Synthetic oligonucleotide
  Antisense strand to SEQ ID NO: 181950
cuuucugcagaguacugag

SEQ ID NO: 181952 - RNA, 19 nt, Artificial Sequence
  Description of Artificial Sequence: Synthetic oligonucleotide
  Sense strand starting at position 2612 of SEQ ID NO: 2345
gguaaccuaagguaguaua

SEQ ID NO: 181953 - RNA, 19 nt, Artificial Sequence
  Description of Artificial Sequence: Synthetic oligonucleotide
  Antisense strand to SEQ ID NO: 181952
uauacuaccuuagguuacc

SEQ ID NO: 181954 - RNA, 19 nt, Artificial Sequence
  Description of Artificial Sequence: Synthetic oligonucleotide
  Sense strand starting at position 2108 of SEQ ID NO: 2345
ggaauaguucuggagcgca

SEQ ID NO: 181955 - RNA, 19 nt, Artificial Sequence
  Description of Artificial Sequence: Synthetic oligonucleotide
  Antisense strand to SEQ ID NO: 181954
ugcgcuccagaacuauucc

SEQ ID NO: 181956 - RNA, 19 nt, Artificial Sequence
  Description of Artificial Sequence: Synthetic oligonucleotide
  Sense strand starting at position 2074 of SEQ ID NO: 2345
gggccuagugcgucacuca

SEQ ID NO: 181957 - RNA, 19 nt, Artificial Sequence
  Description of Artificial Sequence: Synthetic oligonucleotide
  Antisense strand to SEQ ID NO: 181956
ugagugacgcacuaggccc

SEQ ID NO: 181958 - RNA, 19 nt, Artificial Sequence
  Description of Artificial Sequence: Synthetic oligonucleotide
  Sense strand starting at position 1287 of SEQ ID NO: 2345
ugguauaacuguccacaag

SEQ ID NO: 181959 - RNA, 19 nt, Artificial Sequence
  Description of Artificial Sequence: Synthetic oligonucleotide
  Antisense strand to SEQ ID NO: 181958
cuuguggacaguuauacca

SEQ ID NO: 181960 - RNA, 19 nt, Artificial Sequence
  Description of Artificial Sequence: Synthetic oligonucleotide
  Sense strand starting at position 1154 of SEQ ID NO: 2345
uguccuguccuccaaaugu

SEQ ID NO: 181961 - RNA, 19 nt, Artificial Sequence
  Description of Artificial Sequence: Synthetic oligonucleotide
  Antisense strand to SEQ ID NO: 181960
acauuuggaggacaggaca

SEQ ID NO: 181962 - RNA, 19 nt, Artificial Sequence
  Description of Artificial Sequence: Synthetic oligonucleotide
  Sense strand starting at position 1152 of SEQ ID NO: 2345
acuguccuguccuccaaau

SEQ ID NO: 181963 - RNA, 19 nt, Artificial Sequence
  Description of Artificial Sequence: Synthetic oligonucleotide
  Antisense strand to SEQ ID NO: 181962
auuuggaggacaggacagu

SEQ ID NO: 181964 - RNA, 19 nt, Artificial Sequence
  Description of Artificial Sequence: Synthetic oligonucleotide
  Sense strand starting at position 1007 of SEQ ID NO: 2345
gugugcucagcccuccaau

SEQ ID NO: 181965 - RNA, 19 nt, Artificial Sequence
  Description of Artificial Sequence: Synthetic oligonucleotide
  Antisense strand to SEQ ID NO: 181964
auuggagggcugagcacac

SEQ ID NO: 181966 - RNA, 19 nt, Artificial Sequence
  Description of Artificial Sequence: Synthetic oligonucleotide
  Sense strand starting at position 805 of SEQ ID NO: 2345
agacaacugccuugaguuu

SEQ ID NO: 181967 - RNA, 19 nt, Artificial Sequence
  Description of Artificial Sequence: Synthetic oligonucleotide
  Antisense strand to SEQ ID NO: 181966
aaacucaaggcaguugucu

SEQ ID NO: 181968 - RNA, 19 nt, Artificial Sequence
  Description of Artificial Sequence: Synthetic oligonucleotide
  Sense strand starting at position 784 of SEQ ID NO: 2345
acugacuaaccgugaagga

SEQ ID NO: 181969 - RNA, 19 nt, Artificial Sequence
  Description of Artificial Sequence: Synthetic oligonucleotide
  Antisense strand to SEQ ID NO: 181968
uccuucacgguuagucagu

SEQ ID NO: 181970 - RNA, 19 nt, Artificial Sequence
  Description of Artificial Sequence: Synthetic oligonucleotide
  Sense strand starting at position 640 of SEQ ID NO: 2345
acguaugcccucgaaauga

SEQ ID NO: 181971 - RNA, 19 nt, Artificial Sequence
  Description of Artificial Sequence: Synthetic oligonucleotide
  Antisense strand to SEQ ID NO: 181970
ucauuucgagggcauacgu

SEQ ID NO: 181972 - RNA, 19 nt, Artificial Sequence
  Description of Artificial Sequence: Synthetic oligonucleotide
  Sense strand starting at position 279 of SEQ ID NO: 2345
auauuuauuugaggcagau

SEQ ID NO: 181973 - RNA, 19 nt, Artificial Sequence
  Description of Artificial Sequence: Synthetic oligonucleotide
  Antisense strand to SEQ ID NO: 181972
aucugccucaaauaaauau

SEQ ID NO: 181974 - RNA, 19 nt, Artificial Sequence
  Description of Artificial Sequence: Synthetic oligonucleotide
  Sense strand starting at position 210 of SEQ ID NO: 2345
cuacauguuguauaauguu

SEQ ID NO: 181975 - RNA, 19 nt, Artificial Sequence
  Description of Artificial Sequence: Synthetic oligonucleotide
  Antisense strand to SEQ ID NO: 181974
aacauuauacaacauguag

SEQ ID NO: 181976 - RNA, 19 nt, Artificial Sequence
  Description of Artificial Sequence: Synthetic oligonucleotide
  Sense strand starting at position 173 of SEQ ID NO: 2345
gauaucugggcguaaacca

SEQ ID NO: 181977 - RNA, 19 nt, Artificial Sequence
  Description of Artificial Sequence: Synthetic oligonucleotide
  Antisense strand to SEQ ID NO: 181976
ugguuuacgcccagauauc

SEQ ID NO: 181978 - RNA, 19 nt, Artificial Sequence
  Description of Artificial Sequence: Synthetic oligonucleotide
  Sense strand starting at position 171 of SEQ ID NO: 2345
uugauaucugggcguaaac

SEQ ID NO: 181979 - RNA, 19 nt, Artificial Sequence
  Description of Artificial Sequence: Synthetic oligonucleotide
  Antisense strand to SEQ ID NO: 181978
guuuacgcccagauaucaa

SEQ ID NO: 181980 - RNA, 19 nt, Artificial Sequence
  Description of Artificial Sequence: Synthetic oligonucleotide
  Sense strand starting at position 170 of SEQ ID NO: 2345
uuugauaucugggcguaaa

SEQ ID NO: 181981 - RNA, 19 nt, Artificial Sequence
  Description of Artificial Sequence: Synthetic oligonucleotide
  Antisense strand to SEQ ID NO: 181980
uuuacgcccagauaucaaa

SEQ ID NO: 181982 - RNA, 19 nt, Artificial Sequence
  Description of Artificial Sequence: Synthetic oligonucleotide
  Sense strand starting at position 150 of SEQ ID NO: 2345
ggguaccucauagguuaaa

SEQ ID NO: 181983 - RNA, 19 nt, Artificial Sequence
  Description of Artificial Sequence: Synthetic oligonucleotide
  Antisense strand to SEQ ID NO: 181982
uuuaaccuaugagguaccc

SEQ ID NO: 181984 - RNA, 19 nt, Artificial Sequence
  Description of Artificial Sequence: Synthetic oligonucleotide
  Sense strand starting at position 3920 of SEQ ID NO: 2347
guaccuaauccauggucca

SEQ ID NO: 181985 - RNA, 19 nt, Artificial Sequence
  Description of Artificial Sequence: Synthetic oligonucleotide
  Antisense strand to SEQ ID NO: 181984
uggaccauggauuagguac

SEQ ID NO: 181986 - RNA, 19 nt, Artificial Sequence
  Description of Artificial Sequence: Synthetic oligonucleotide
  Sense strand starting at position 3891 of SEQ ID NO: 2347
acuggucauugucugguaa

SEQ ID NO: 181987 - RNA, 19 nt, Artificial Sequence
  Description of Artificial Sequence: Synthetic oligonucleotide
  Antisense strand to SEQ ID NO: 181986
uuaccagacaaugaccagu

SEQ ID NO: 181988 - RNA, 19 nt, Artificial Sequence
  Description of Artificial Sequence: Synthetic oligonucleotide
  Sense strand starting at position 3727 of SEQ ID NO: 2347
gacauaggguuaguuucua

SEQ ID NO: 181989 - RNA, 19 nt, Artificial Sequence
  Description of Artificial Sequence: Synthetic oligonucleotide
  Antisense strand to SEQ ID NO: 181988
uagaaacuaacccuauguc

SEQ ID NO: 181990 - RNA, 19 nt, Artificial Sequence
  Description of Artificial Sequence: Synthetic oligonucleotide
  Sense strand starting at position 3676 of SEQ ID NO: 2347
ggaggauguccuggcuuga

SEQ ID NO: 181991 - RNA, 19 nt, Artificial Sequence
  Description of Artificial Sequence: Synthetic oligonucleotide
  Antisense strand to SEQ ID NO: 181990
ucaagccaggacauccucc

SEQ ID NO: 181992 - RNA, 19 nt, Artificial Sequence
  Description of Artificial Sequence: Synthetic oligonucleotide
  Sense strand starting at position 3564 of SEQ ID NO: 2347
agagcuagagcucaugacu

SEQ ID NO: 181993 - RNA, 19 nt, Artificial Sequence
  Description of Artificial Sequence: Synthetic oligonucleotide
  Antisense strand to SEQ ID NO: 181992
agucaugagcucuagcucu

SEQ ID NO: 181994 - RNA, 19 nt, Artificial Sequence
  Description of Artificial Sequence: Synthetic oligonucleotide
  Sense strand starting at position 3528 of SEQ ID NO: 2347
uguaauuuguugcugaaug

SEQ ID NO: 181995 - RNA, 19 nt, Artificial Sequence
  Description of Artificial Sequence: Synthetic oligonucleotide
  Antisense strand to SEQ ID NO: 181994
cauucagcaacaaauuaca

SEQ ID NO: 181996 - RNA, 19 nt, Artificial Sequence
  Description of Artificial Sequence: Synthetic oligonucleotide
  Sense strand starting at position 3525 of SEQ ID NO: 2347
cucuguaauuuguugcuga

SEQ ID NO: 181997 - RNA, 19 nt, Artificial Sequence
  Description of Artificial Sequence: Synthetic oligonucleotide
  Antisense strand to SEQ ID NO: 181996
ucagcaacaaauuacagag

SEQ ID NO: 181998 - RNA, 19 nt, Artificial Sequence
  Description of Artificial Sequence: Synthetic oligonucleotide
  Sense strand starting at position 3347 of SEQ ID NO: 2347
guuuguccauuuguuuaaa

SEQ ID NO: 181999 - RNA, 19 nt, Artificial Sequence
  Description of Artificial Sequence: Synthetic oligonucleotide
  Antisense strand to SEQ ID NO: 181998
uuuaaacaaauggacaaac

SEQ ID NO: 182000 - RNA, 19 nt, Artificial Sequence
  Description of Artificial Sequence: Synthetic oligonucleotide
  Sense strand starting at position 3219 of SEQ ID NO: 2347
uugaucuuagcuuaaaugu

SEQ ID NO: 182001 - RNA, 19 nt, Artificial Sequence
  Description of Artificial Sequence: Synthetic oligonucleotide
  Antisense strand to SEQ ID NO: 182000
acauuuaagcuaagaucaa

SEQ ID NO: 182002 - RNA, 19 nt, Artificial Sequence
  Description of Artificial Sequence: Synthetic oligonucleotide
  Sense strand starting at position 3176 of SEQ ID NO: 2347
ugugaucuggaauggucuu

SEQ ID NO: 182003 - RNA, 19 nt, Artificial Sequence
  Description of Artificial Sequence: Synthetic oligonucleotide
  Antisense strand to SEQ ID NO: 182002
aagaccauuccagaucaca

SEQ ID NO: 182004 - RNA, 19 nt, Artificial Sequence
  Description of Artificial Sequence: Synthetic oligonucleotide
  Sense strand starting at position 3173 of SEQ ID NO: 2347
uccugugaucuggaauggu

SEQ ID NO: 182005 - RNA, 19 nt, Artificial Sequence
  Description of Artificial Sequence: Synthetic oligonucleotide
  Antisense strand to SEQ ID NO: 182004
accauuccagaucacagga

SEQ ID NO: 182006 - RNA, 19 nt, Artificial Sequence
  Description of Artificial Sequence: Synthetic oligonucleotide
  Sense strand starting at position 3171 of SEQ ID NO: 2347
gcuccugugaucuggaaug

SEQ ID NO: 182007 - RNA, 19 nt, Artificial Sequence
  Description of Artificial Sequence: Synthetic oligonucleotide
  Antisense strand to SEQ ID NO: 182006
cauuccagaucacaggagc

SEQ ID NO: 182008 - RNA, 19 nt, Artificial Sequence
  Description of Artificial Sequence: Synthetic oligonucleotide
  Sense strand starting at position 3169 of SEQ ID NO: 2347
uugcuccugugaucuggaa

SEQ ID NO: 182009 - RNA, 19 nt, Artificial Sequence
  Description of Artificial Sequence: Synthetic oligonucleotide
  Antisense strand to SEQ ID NO: 182008
uuccagaucacaggagcaa

SEQ ID NO: 182010 - RNA, 19 nt, Artificial Sequence
  Description of Artificial Sequence: Synthetic oligonucleotide
  Sense strand starting at position 2975 of SEQ ID NO: 2347
uuagauuuguaguagacau

SEQ ID NO: 182011 - RNA, 19 nt, Artificial Sequence
  Description of Artificial Sequence: Synthetic oligonucleotide
  Antisense strand to SEQ ID NO: 182010
augucuacuacaaaucuaa

SEQ ID NO: 182012 - RNA, 19 nt, Artificial Sequence
  Description of Artificial Sequence: Synthetic oligonucleotide
  Sense strand starting at position 2972 of SEQ ID NO: 2347
cacuuagauuuguaguaga

SEQ ID NO: 182013 - RNA, 19 nt, Artificial Sequence
  Description of Artificial Sequence: Synthetic oligonucleotide
  Antisense strand to SEQ ID NO: 182012
ucuacuacaaaucuaagug

SEQ ID NO: 182014 - RNA, 19 nt, Artificial Sequence
  Description of Artificial Sequence: Synthetic oligonucleotide
  Sense strand starting at position 2927 of SEQ ID NO: 2347
uccugaguuccuuacauau

SEQ ID NO: 182015 - RNA, 19 nt, Artificial Sequence
  Description of Artificial Sequence: Synthetic oligonucleotide
  Antisense strand to SEQ ID NO: 182014
auauguaaggaacucagga

SEQ ID NO: 182016 - RNA, 19 nt, Artificial Sequence
  Description of Artificial Sequence: Synthetic oligonucleotide
  Sense strand starting at position 2925 of SEQ ID NO: 2347
uuuccugaguuccuuacau

SEQ ID NO: 182017 - RNA, 19 nt, Artificial Sequence
  Description of Artificial Sequence: Synthetic oligonucleotide
  Antisense strand to SEQ ID NO: 182016
auguaaggaacucaggaaa

SEQ ID NO: 182018 - RNA, 19 nt, Artificial Sequence
  Description of Artificial Sequence: Synthetic oligonucleotide
  Sense strand starting at position 2921 of SEQ ID NO: 2347
acucuuuccugaguuccuu

SEQ ID NO: 182019 - RNA, 19 nt, Artificial Sequence
  Description of Artificial Sequence: Synthetic oligonucleotide
  Antisense strand to SEQ ID NO: 182018
aaggaacucaggaaagagu

SEQ ID NO: 182020 - RNA, 19 nt, Artificial Sequence
  Description of Artificial Sequence: Synthetic oligonucleotide
  Sense strand starting at position 2916 of SEQ ID NO: 2347
cuagaacucuuuccugagu

SEQ ID NO: 182021 - RNA, 19 nt, Artificial Sequence
  Description of Artificial Sequence: Synthetic oligonucleotide
  Antisense strand to SEQ ID NO: 182020
acucaggaaagaguucuag

SEQ ID NO: 182022 - RNA, 19 nt, Artificial Sequence
  Description of Artificial Sequence: Synthetic oligonucleotide
  Sense strand starting at position 2882 of SEQ ID NO: 2347
uggcuuuagcuacagauga

SEQ ID NO: 182023 - RNA, 19 nt, Artificial Sequence
  Description of Artificial Sequence: Synthetic oligonucleotide
  Antisense strand to SEQ ID NO: 182022
ucaucuguagcuaaagcca

SEQ ID NO: 182024 - RNA, 19 nt, Artificial Sequence
  Description of Artificial Sequence: Synthetic oligonucleotide
  Sense strand starting at position 2848 of SEQ ID NO: 2347
guacuuucuccuuagguga

SEQ ID NO: 182025 - RNA, 19 nt, Artificial Sequence
  Description of Artificial Sequence: Synthetic oligonucleotide
  Antisense strand to SEQ ID NO: 182024
ucaccuaaggagaaaguac

SEQ ID NO: 182026 - RNA, 19 nt, Artificial Sequence
  Description of Artificial Sequence: Synthetic oligonucleotide
  Sense strand starting at position 2817 of SEQ ID NO: 2347
ugaauaacccaguggucuu

SEQ ID NO: 182027 - RNA, 19 nt, Artificial Sequence
  Description of Artificial Sequence: Synthetic oligonucleotide
  Antisense strand to SEQ ID NO: 182026
aagaccacuggguuauuca

SEQ ID NO: 182028 - RNA, 19 nt, Artificial Sequence
  Description of Artificial Sequence: Synthetic oligonucleotide
  Sense strand starting at position 2805 of SEQ ID NO: 2347
acguauaggaagugaauaa

SEQ ID NO: 182029 - RNA, 19 nt, Artificial Sequence
  Description of Artificial Sequence: Synthetic oligonucleotide
  Antisense strand to SEQ ID NO: 182028
uuauucacuuccuauacgu

SEQ ID NO: 182030 - RNA, 19 nt, Artificial Sequence
  Description of Artificial Sequence: Synthetic oligonucleotide
  Sense strand starting at position 2661 of SEQ ID NO: 2347
gguugagaucauuaagguu

SEQ ID NO: 182031 - RNA, 19 nt, Artificial Sequence
  Description of Artificial Sequence: Synthetic oligonucleotide
  Antisense strand to SEQ ID NO: 182030
aaccuuaaugaucucaacc

SEQ ID NO: 182032 - RNA, 19 nt, Artificial Sequence
  Description of Artificial Sequence: Synthetic oligonucleotide
  Sense strand starting at position 2529 of SEQ ID NO: 2347
guggcucauccuggaacuu

SEQ ID NO: 182033 - RNA, 19 nt, Artificial Sequence
  Description of Artificial Sequence: Synthetic oligonucleotide
  Antisense strand to SEQ ID NO: 182032
aaguuccaggaugagccac

SEQ ID NO: 182034 - RNA, 19 nt, Artificial Sequence
  Description of Artificial Sequence: Synthetic oligonucleotide
  Sense strand starting at position 2477 of SEQ ID NO: 2347
ggcacugugcgcuuuggaa

SEQ ID NO: 182035 - RNA, 19 nt, Artificial Sequence
  Description of Artificial Sequence: Synthetic oligonucleotide
  Antisense strand to SEQ ID NO: 182034
uuccaaagcgcacagugcc

SEQ ID NO: 182036 - RNA, 19 nt, Artificial Sequence
  Description of Artificial Sequence: Synthetic oligonucleotide
  Sense strand starting at position 2450 of SEQ ID NO: 2347
uuguccuuguacuuacuaa

SEQ ID NO: 182037 - RNA, 19 nt, Artificial Sequence
  Description of Artificial Sequence: Synthetic oligonucleotide
  Antisense strand to SEQ ID NO: 182036
uuaguaaguacaaggacaa

SEQ ID NO: 182038 - RNA, 19 nt, Artificial Sequence
  Description of Artificial Sequence: Synthetic oligonucleotide
  Sense strand starting at position 2407 of SEQ ID NO: 2347
gccuuuagugaugacuuua

SEQ ID NO: 182039 - RNA, 19 nt, Artificial Sequence
  Description of Artificial Sequence: Synthetic oligonucleotide
  Antisense strand to SEQ ID NO: 182038
uaaagucaucacuaaaggc

SEQ ID NO: 182040 - RNA, 19 nt, Artificial Sequence
  Description of Artificial Sequence: Synthetic oligonucleotide
  Sense strand starting at position 2394 of SEQ ID NO: 2347
ugagauuuccucugccuuu

SEQ ID NO: 182041 - RNA, 19 nt, Artificial Sequence
  Description of Artificial Sequence: Synthetic oligonucleotide
  Antisense strand to SEQ ID NO: 182040
aaaggcagaggaaaucuca

SEQ ID NO: 182042 - RNA, 19 nt, Artificial Sequence
  Description of Artificial Sequence: Synthetic oligonucleotide
  Sense strand starting at position 2342 of SEQ ID NO: 2347
guccuuagggcacaaguua

SEQ ID NO: 182043 - RNA, 19 nt, Artificial Sequence
  Description of Artificial Sequence: Synthetic oligonucleotide
  Antisense strand to SEQ ID NO: 182042
uaacuugugcccuaaggac

SEQ ID NO: 182044 - RNA, 19 nt, Artificial Sequence
  Description of Artificial Sequence: Synthetic oligonucleotide
  Sense strand starting at position 2304 of SEQ ID NO: 2347
accucaugucccuguggga

SEQ ID NO: 182045 - RNA, 19 nt, Artificial Sequence
  Description of Artificial Sequence: Synthetic oligonucleotide
  Antisense strand to SEQ ID NO: 182044
ucccacagggacaugaggu

SEQ ID NO: 182046 - RNA, 19 nt, Artificial Sequence
  Description of Artificial Sequence: Synthetic oligonucleotide
  Sense strand starting at position 2268 of SEQ ID NO: 2347
gcaaaucaugcgcuuugca

SEQ ID NO: 182047 - RNA, 19 nt, Artificial Sequence
  Description of Artificial Sequence: Synthetic oligonucleotide
  Antisense strand to SEQ ID NO: 182046
ugcaaagcgcaugauuugc

SEQ ID NO: 182048 - RNA, 19 nt, Artificial Sequence
  Description of Artificial Sequence: Synthetic oligonucleotide
  Sense strand starting at position 2023 of SEQ ID NO: 2347
ucccuuuaacgcuagagca

SEQ ID NO: 182049 - RNA, 19 nt, Artificial Sequence
  Description of Artificial Sequence: Synthetic oligonucleotide
  Antisense strand to SEQ ID NO: 182048
ugcucuagcguuaaaggga

SEQ ID NO: 182050 - RNA, 19 nt, Artificial Sequence
  Description of Artificial Sequence: Synthetic oligonucleotide
  Sense strand starting at position 1796 of SEQ ID NO: 2347
gugaaugucgugcugguga

SEQ ID NO: 182051 - RNA, 19 nt, Artificial Sequence
  Description of Artificial Sequence: Synthetic oligonucleotide
  Antisense strand to SEQ ID NO: 182050
ucaccagcacgacauucac

SEQ ID NO: 182052 - RNA, 19 nt, Artificial Sequence
  Description of Artificial Sequence: Synthetic oligonucleotide
  Sense strand starting at position 420 of SEQ ID NO: 2347
agaacuggguuggugagaa

SEQ ID NO: 182053 - RNA, 19 nt, Artificial Sequence
  Description of Artificial Sequence: Synthetic oligonucleotide
  Antisense strand to SEQ ID NO: 182052
uucucaccaacccaguucu

SEQ ID NO: 182054 - RNA, 19 nt, Artificial Sequence
  Description of Artificial Sequence: Synthetic oligonucleotide
  Sense strand starting at position 294 of SEQ ID NO: 2347
gucccuuaagcguaaauac

SEQ ID NO: 182055 - RNA, 19 nt, Artificial Sequence
  Description of Artificial Sequence: Synthetic oligonucleotide
  Antisense strand to SEQ ID NO: 182054
guauuuacgcuuaagggac

SEQ ID NO: 182056 - RNA, 19 nt, Artificial Sequence
  Description of Artificial Sequence: Synthetic oligonucleotide
  Sense strand starting at position 237 of SEQ ID NO: 2347
ugggcauuccuguaccauu

SEQ ID NO: 182057 - RNA, 19 nt, Artificial Sequence
  Description of Artificial Sequence: Synthetic oligonucleotide
  Antisense strand to SEQ ID NO: 182056
aaugguacaggaaugccca

SEQ ID NO: 182058 - RNA, 19 nt, Artificial Sequence
  Description of Artificial Sequence: Synthetic oligonucleotide
  Sense strand starting at position 216 of SEQ ID NO: 2347
agguuaaggguuugaagaa

SEQ ID NO: 182059 - RNA, 19 nt, Artificial Sequence
  Description of Artificial Sequence: Synthetic oligonucleotide
  Antisense strand to SEQ ID NO: 182058
uucuucaaacccuuaaccu

SEQ ID NO: 182060 - RNA, 19 nt, Artificial Sequence
  Description of Artificial Sequence: Synthetic oligonucleotide
  Sense strand starting at position 177 of SEQ ID NO: 2347
gugacaucaguuugcaaag

SEQ ID NO: 182061 - RNA, 19 nt, Artificial Sequence
  Description of Artificial Sequence: Synthetic oligonucleotide
  Antisense strand to SEQ ID NO: 182060
cuuugcaaacugaugucac

SEQ ID NO: 182062 - RNA, 19 nt, Artificial Sequence
  Description of Artificial Sequence: Synthetic oligonucleotide
  Sense strand starting at position 32 of SEQ ID NO: 2347
auuuaauaaucagggagag

SEQ ID NO: 182063 - RNA, 19 nt, Artificial Sequence
  Description of Artificial Sequence: Synthetic oligonucleotide
  Antisense strand to SEQ ID NO: 182062
cucucccugauuauuaaau

SEQ ID NO: 182064 - RNA, 19 nt, Artificial Sequence
  Description of Artificial Sequence: Synthetic oligonucleotide
  Sense strand starting at position 3896 of SEQ ID NO: 2346
uugaucuuagcuuaaaugu

SEQ ID NO: 182065 - RNA, 19 nt, Artificial Sequence
  Description of Artificial Sequence: Synthetic oligonucleotide
  Antisense strand to SEQ ID NO: 182064
acauuuaagcuaagaucaa

SEQ ID NO: 182066 - RNA, 19 nt, Artificial Sequence
  Description of Artificial Sequence: Synthetic oligonucleotide
  Sense strand starting at position 3853 of SEQ ID NO: 2346
ugugaucuggaauggucuu

SEQ ID NO: 182067 - RNA, 19 nt, Artificial Sequence
  Description of Artificial Sequence: Synthetic oligonucleotide
  Antisense strand to SEQ ID NO: 182066
aagaccauuccagaucaca

SEQ ID NO: 182068 - RNA, 19 nt, Artificial Sequence
  Description of Artificial Sequence: Synthetic oligonucleotide
  Sense strand starting at position 3850 of SEQ ID NO: 2346
uccugugaucuggaauggu

SEQ ID NO: 182069 - RNA, 19 nt, Artificial Sequence
  Description of Artificial Sequence: Synthetic oligonucleotide
  Antisense strand to SEQ ID NO: 182068
accauuccagaucacagga

SEQ ID NO: 182070 - RNA, 19 nt, Artificial Sequence
  Description of Artificial Sequence: Synthetic oligonucleotide
  Sense strand starting at position 3848 of SEQ ID NO: 2346
gcuccugugaucuggaaug

SEQ ID NO: 182071 - RNA, 19 nt, Artificial Sequence
  Description of Artificial Sequence: Synthetic oligonucleotide
  Antisense strand to SEQ ID NO: 182070
cauuccagaucacaggagc

SEQ ID NO: 182072 - RNA, 19 nt, Artificial Sequence
  Description of Artificial Sequence: Synthetic oligonucleotide
  Sense strand starting at position 3652 of SEQ ID NO: 2346
uuagauuuguaguagacau

SEQ ID NO: 182073 - RNA, 19 nt, Artificial Sequence
  Description of Artificial Sequence: Synthetic oligonucleotide
  Antisense strand to SEQ ID NO: 182072
augucuacuacaaaucuaa

SEQ ID NO: 182074 - RNA, 19 nt, Artificial Sequence
  Description of Artificial Sequence: Synthetic oligonucleotide
  Sense strand starting at position 3649 of SEQ ID NO: 2346
cacuuagauuuguaguaga

SEQ ID NO: 182075 - RNA, 19 nt, Artificial Sequence
  Description of Artificial Sequence: Synthetic oligonucleotide
  Antisense strand to SEQ ID NO: 182074
ucuacuacaaaucuaagug

SEQ ID NO: 182076 - RNA, 19 nt, Artificial Sequence
  Description of Artificial Sequence: Synthetic oligonucleotide
  Sense strand starting at position 3604 of SEQ ID NO: 2346
uccugaguuccuuacauau

SEQ ID NO: 182077 - RNA, 19 nt, Artificial Sequence
  Description of Artificial Sequence: Synthetic oligonucleotide
  Antisense strand to SEQ ID NO: 182076
auauguaaggaacucagga

SEQ ID NO: 182078 - RNA, 19 nt, Artificial Sequence
  Description of Artificial Sequence: Synthetic oligonucleotide
  Sense strand starting at position 3602 of SEQ ID NO: 2346
uuuccugaguuccuuacau

SEQ ID NO: 182079 - RNA, 19 nt, Artificial Sequence
  Description of Artificial Sequence: Synthetic oligonucleotide
  Antisense strand to SEQ ID NO: 182078
auguaaggaacucaggaaa

SEQ ID NO: 182080 - RNA, 19 nt, Artificial Sequence
  Description of Artificial Sequence: Synthetic oligonucleotide
  Sense strand starting at position 3593 of SEQ ID NO: 2346
cuagaacucuuuccugagu

SEQ ID NO: 182081 - RNA, 19 nt, Artificial Sequence
  Description of Artificial Sequence: Synthetic oligonucleotide
  Antisense strand to SEQ ID NO: 182080
acucaggaaagaguucuag

SEQ ID NO: 182082 - RNA, 19 nt, Artificial Sequence
  Description of Artificial Sequence: Synthetic oligonucleotide
  Sense strand starting at position 3559 of SEQ ID NO: 2346
uggcuuuagcuacagauga

SEQ ID NO: 182083 - RNA, 19 nt, Artificial Sequence
  Description of Artificial Sequence: Synthetic oligonucleotide
  Antisense strand to SEQ ID NO: 182082
ucaucuguagcuaaagcca

SEQ ID NO: 182084 - RNA, 19 nt, Artificial Sequence
  Description of Artificial Sequence: Synthetic oligonucleotide
  Sense strand starting at position 3525 of SEQ ID NO: 2346
guacuuucuccuuagguga

SEQ ID NO: 182085 - RNA, 19 nt, Artificial Sequence
  Description of Artificial Sequence: Synthetic oligonucleotide
  Antisense strand to SEQ ID NO: 182084
ucaccuaaggagaaaguac

SEQ ID NO: 182086 - RNA, 19 nt, Artificial Sequence
  Description of Artificial Sequence: Synthetic oligonucleotide
  Sense strand starting at position 3494 of SEQ ID NO: 2346
ugaauaacccaguggucuu

SEQ ID NO: 182087 - RNA, 19 nt, Artificial Sequence
  Description of Artificial Sequence: Synthetic oligonucleotide
  Antisense strand to SEQ ID NO: 182086
aagaccacuggguuauuca

SEQ ID NO: 182088 - RNA, 19 nt, Artificial Sequence
  Description of Artificial Sequence: Synthetic oligonucleotide
  Sense strand starting at position 3482 of SEQ ID NO: 2346
acguauaggaagugaauaa

SEQ ID NO: 182089 - RNA, 19 nt, Artificial Sequence
  Description of Artificial Sequence: Synthetic oligonucleotide
  Antisense strand to SEQ ID NO: 182088
uuauucacuuccuauacgu

SEQ ID NO: 182090 - RNA, 19 nt, Artificial Sequence
  Description of Artificial Sequence: Synthetic oligonucleotide
  Sense strand starting at position 3338 of SEQ ID NO: 2346
gguugagaucauuaagguu

SEQ ID NO: 182091 - RNA, 19 nt, Artificial Sequence
  Description of Artificial Sequence: Synthetic oligonucleotide
  Antisense strand to SEQ ID NO: 182090
aaccuuaaugaucucaacc

SEQ ID NO: 182092 - RNA, 19 nt, Artificial Sequence
  Description of Artificial Sequence: Synthetic oligonucleotide
  Sense strand starting at position 3154 of SEQ ID NO: 2346
ggcacugugcgcuuuggaa

SEQ ID NO: 182093 - RNA, 19 nt, Artificial Sequence
  Description of Artificial Sequence: Synthetic oligonucleotide
  Antisense strand to SEQ ID NO: 182092
uuccaaagcgcacagugcc

SEQ ID NO: 182094 - RNA, 19 nt, Artificial Sequence
  Description of Artificial Sequence: Synthetic oligonucleotide
  Sense strand starting at position 3084 of SEQ ID NO: 2346
gccuuuagugaugacuuua

SEQ ID NO: 182095 - RNA, 19 nt, Artificial Sequence
  Description of Artificial Sequence: Synthetic oligonucleotide
  Antisense strand to SEQ ID NO: 182094
uaaagucaucacuaaaggc

SEQ ID NO: 182096 - RNA, 19 nt, Artificial Sequence
  Description of Artificial Sequence: Synthetic oligonucleotide
  Sense strand starting at position 3071 of SEQ ID NO: 2346
ugagauuuccucugccuuu

SEQ ID NO: 182097 - RNA, 19 nt, Artificial Sequence
  Description of Artificial Sequence: Synthetic oligonucleotide
  Antisense strand to SEQ ID NO: 182096
aaaggcagaggaaaucuca

SEQ ID NO: 182098 - RNA, 19 nt, Artificial Sequence
  Description of Artificial Sequence: Synthetic oligonucleotide
  Sense strand starting at position 3019 of SEQ ID NO: 2346
guccuuagggcacaaguua

SEQ ID NO: 182099 - RNA, 19 nt, Artificial Sequence
  Description of Artificial Sequence: Synthetic oligonucleotide
  Antisense strand to SEQ ID NO: 182098
uaacuugugcccuaaggac

SEQ ID NO: 182100 - RNA, 19 nt, Artificial Sequence
  Description of Artificial Sequence: Synthetic oligonucleotide
  Sense strand starting at position 2981 of SEQ ID NO: 2346
accucaugucccuguggga

SEQ ID NO: 182101 - RNA, 19 nt, Artificial Sequence
  Description of Artificial Sequence: Synthetic oligonucleotide
  Antisense strand to SEQ ID NO: 182100
ucccacagggacaugaggu

SEQ ID NO: 182102 - RNA, 19 nt, Artificial Sequence
  Description of Artificial Sequence: Synthetic oligonucleotide
  Sense strand starting at position 2945 of SEQ ID NO: 2346
gcaaaucaugcgcuuugca

SEQ ID NO: 182103 - RNA, 19 nt, Artificial Sequence
  Description of Artificial Sequence: Synthetic oligonucleotide
  Antisense strand to SEQ ID NO: 182102
ugcaaagcgcaugauuugc

SEQ ID NO: 182104 - RNA, 19 nt, Artificial Sequence
  Description of Artificial Sequence: Synthetic oligonucleotide
  Sense strand starting at position 2700 of SEQ ID NO: 2346
ucccuuuaacgcuagagca

SEQ ID NO: 182105 - RNA, 19 nt, Artificial Sequence
  Description of Artificial Sequence: Synthetic oligonucleotide
  Antisense strand to SEQ ID NO: 182104
ugcucuagcguuaaaggga

SEQ ID NO: 182106 - RNA, 19 nt, Artificial Sequence
  Description of Artificial Sequence: Synthetic oligonucleotide
  Sense strand starting at position 2473 of SEQ ID NO: 2346
gugaaugucgugcugguga

SEQ ID NO: 182107 - RNA, 19 nt, Artificial Sequence
  Description of Artificial Sequence: Synthetic oligonucleotide
  Antisense strand to SEQ ID NO: 182106
ucaccagcacgacauucac

SEQ ID NO: 182108 - RNA, 19 nt, Artificial Sequence
  Description of Artificial Sequence: Synthetic oligonucleotide
  Sense strand starting at position 1097 of SEQ ID NO: 2346
agaacuggguuggugagaa

SEQ ID NO: 182109 - RNA, 19 nt, Artificial Sequence
  Description of Artificial Sequence: Synthetic oligonucleotide
  Antisense strand to SEQ ID NO: 182108
uucucaccaacccaguucu

SEQ ID NO: 182110 - RNA, 19 nt, Artificial Sequence
  Description of Artificial Sequence: Synthetic oligonucleotide
  Sense strand starting at position 971 of SEQ ID NO: 2346
gucccuuaagcguaaauac

SEQ ID NO: 182111 - RNA, 19 nt, Artificial Sequence
  Description of Artificial Sequence: Synthetic oligonucleotide
  Antisense strand to SEQ ID NO: 182110
guauuuacgcuuaagggac

SEQ ID NO: 182112 - RNA, 19 nt, Artificial Sequence
  Description of Artificial Sequence: Synthetic oligonucleotide
  Sense strand starting at position 914 of SEQ ID NO: 2346
ugggcauuccuguaccauu

SEQ ID NO: 182113 - RNA, 19 nt, Artificial Sequence
  Description of Artificial Sequence: Synthetic oligonucleotide
  Antisense strand to SEQ ID NO: 182112
aaugguacaggaaugccca

SEQ ID NO: 182114 - RNA, 19 nt, Artificial Sequence
  Description of Artificial Sequence: Synthetic oligonucleotide
  Sense strand starting at position 893 of SEQ ID NO: 2346
agguuaaggguuugaagaa

SEQ ID NO: 182115 - RNA, 19 nt, Artificial Sequence
  Description of Artificial Sequence: Synthetic oligonucleotide
  Antisense strand to SEQ ID NO: 182114
uucuucaaacccuuaaccu

SEQ ID NO: 182116 - RNA, 19 nt, Artificial Sequence
  Description of Artificial Sequence: Synthetic oligonucleotide
  Sense strand starting at position 854 of SEQ ID NO: 2346
gugacaucaguuugcaaag

SEQ ID NO: 182117 - RNA, 19 nt, Artificial Sequence
  Description of Artificial Sequence: Synthetic oligonucleotide
  Antisense strand to SEQ ID NO: 182116
cuuugcaaacugaugucac

SEQ ID NO: 182118 - RNA, 19 nt, Artificial Sequence
  Description of Artificial Sequence: Synthetic oligonucleotide
  Sense strand starting at position 709 of SEQ ID NO: 2346
auuuaauaaucagggagag

SEQ ID NO: 182119 - RNA, 19 nt, Artificial Sequence
  Description of Artificial Sequence: Synthetic oligonucleotide
  Antisense strand to SEQ ID NO: 182118
cucucccugauuauuaaau

SEQ ID NO: 182120 - RNA, 19 nt, Artificial Sequence
  Description of Artificial Sequence: Synthetic oligonucleotide
  Sense strand starting at position 501 of SEQ ID NO: 2346
gggauagucuaaucuuuaa

SEQ ID NO: 182121 - RNA, 19 nt, Artificial Sequence
  Description of Artificial Sequence: Synthetic oligonucleotide
  Antisense strand to SEQ ID NO: 182120
uuaaagauuagacuauccc

SEQ ID NO: 182122 - RNA, 19 nt, Artificial Sequence
  Description of Artificial Sequence: Synthetic oligonucleotide
  Sense strand starting at position 489 of SEQ ID NO: 2346
ucuguaaucauugggauag

SEQ ID NO: 182123 - RNA, 19 nt, Artificial Sequence
  Description of Artificial Sequence: Synthetic oligonucleotide
  Antisense strand to SEQ ID NO: 182122
cuaucccaaugauuacaga

SEQ ID NO: 182124 - RNA, 19 nt, Artificial Sequence
  Description of Artificial Sequence: Synthetic oligonucleotide
  Sense strand starting at position 488 of SEQ ID NO: 2346
cucuguaaucauugggaua

SEQ ID NO: 182125 - RNA, 19 nt, Artificial Sequence
  Description of Artificial Sequence: Synthetic oligonucleotide
  Antisense strand to SEQ ID NO: 182124
uaucccaaugauuacagag

SEQ ID NO: 182126 - RNA, 19 nt, Artificial Sequence
  Description of Artificial Sequence: Synthetic oligonucleotide
  Sense strand starting at position 409 of SEQ ID NO: 2346
auagucuaaucuuuaagga

SEQ ID NO: 182127 - RNA, 19 nt, Artificial Sequence
  Description of Artificial Sequence: Synthetic oligonucleotide
  Antisense strand to SEQ ID NO: 182126
uccuuaaagauuagacuau

SEQ ID NO: 182128 - RNA, 19 nt, Artificial Sequence
  Description of Artificial Sequence: Synthetic oligonucleotide
  Sense strand starting at position 261 of SEQ ID NO: 2346
gauaucuaguuaguaagag

SEQ ID NO: 182129 - RNA, 19 nt, Artificial Sequence
  Description of Artificial Sequence: Synthetic oligonucleotide
  Antisense strand to SEQ ID NO: 182128
cucuuacuaacuagauauc

SEQ ID NO: 182130 - RNA, 19 nt, Artificial Sequence
  Description of Artificial Sequence: Synthetic oligonucleotide
  Sense strand starting at position 258 of SEQ ID NO: 2346
cuugauaucuaguuaguaa

SEQ ID NO: 182131 - RNA, 19 nt, Artificial Sequence
  Description of Artificial Sequence: Synthetic oligonucleotide
  Antisense strand to SEQ ID NO: 182130
uuacuaacuagauaucaag

SEQ ID NO: 182132 - RNA, 19 nt, Artificial Sequence
  Description of Artificial Sequence: Synthetic oligonucleotide
  Sense strand starting at position 254 of SEQ ID NO: 2346
ccaccuugauaucuaguua

SEQ ID NO: 182133 - RNA, 19 nt, Artificial Sequence
  Description of Artificial Sequence: Synthetic oligonucleotide
  Antisense strand to SEQ ID NO: 182132
uaacuagauaucaaggugg

SEQ ID NO: 182134 - RNA, 19 nt, Artificial Sequence
  Description of Artificial Sequence: Synthetic oligonucleotide
  Sense strand starting at position 162 of SEQ ID NO: 2346
cuagacugaguuggguaaa

SEQ ID NO: 182135 - RNA, 19 nt, Artificial Sequence
  Description of Artificial Sequence: Synthetic oligonucleotide
  Antisense strand to SEQ ID NO: 182134
uuuacccaacucagucuag

SEQ ID NO: 182136 - RNA, 19 nt, Artificial Sequence
  Description of Artificial Sequence: Synthetic oligonucleotide
  Sense strand starting at position 161 of SEQ ID NO: 2346
gcuagacugaguuggguaa

SEQ ID NO: 182137 - RNA, 19 nt, Artificial Sequence
  Description of Artificial Sequence: Synthetic oligonucleotide
  Antisense strand to SEQ ID NO: 182136
uuacccaacucagucuagc

SEQ ID NO: 182138 - RNA, 19 nt, Artificial Sequence
  Description of Artificial Sequence: Synthetic oligonucleotide
  Sense strand starting at position 90 of SEQ ID NO: 2346
aaagcaguaugacuuagua

SEQ ID NO: 182139 - RNA, 19 nt, Artificial Sequence
  Description of Artificial Sequence: Synthetic oligonucleotide
  Antisense strand to SEQ ID NO: 182138
uacuaagucauacugcuuu

SEQ ID NO: 182140 - RNA, 19 nt, Artificial Sequence
  Description of Artificial Sequence: Synthetic oligonucleotide
  Sense strand starting at position 58 of SEQ ID NO: 2346
cuacuauguguccaauacu

SEQ ID NO: 182141 - RNA, 19 nt, Artificial Sequence
  Description of Artificial Sequence: Synthetic oligonucleotide
  Antisense strand to SEQ ID NO: 182140
aguauuggacacauaguag

SEQ ID NO: 182142 - RNA, 19 nt, Artificial Sequence
  Description of Artificial Sequence: Synthetic oligonucleotide
  Sense strand starting at position 57 of SEQ ID NO: 2346
ucuacuauguguccaauac

SEQ ID NO: 182143 - RNA, 19 nt, Artificial Sequence
  Description of Artificial Sequence: Synthetic oligonucleotide
  Antisense strand to SEQ ID NO: 182142
guauuggacacauaguaga

SEQ ID NO: 182144 - RNA, 19 nt, Artificial Sequence
  Description of Artificial Sequence: Synthetic oligonucleotide
  Sense strand starting at position 318 of SEQ ID NO: 2348
gaagcaaacugugagaaca

SEQ ID NO: 182145 - RNA, 19 nt, Artificial Sequence
  Description of Artificial Sequence: Synthetic oligonucleotide
  Antisense strand to SEQ ID NO: 182144
uguucucacaguuugcuuc

SEQ ID NO: 182146 - RNA, 19 nt, Artificial Sequence
  Description of Artificial Sequence: Synthetic oligonucleotide
  Sense strand starting at position 331 of SEQ ID NO: 2348
agaacagaguuugaagcau

SEQ ID NO: 182147 - RNA, 19 nt, Artificial Sequence
  Description of Artificial Sequence: Synthetic oligonucleotide
  Antisense strand to SEQ ID NO: 182146
augcuucaaacucuguucu

SEQ ID NO: 182148 - RNA, 19 nt, Artificial Sequence
  Description of Artificial Sequence: Synthetic oligonucleotide
  Sense strand starting at position 400 of SEQ ID NO: 2348
auaucauccugcugagaga

SEQ ID NO: 182149 - RNA, 19 nt, Artificial Sequence
  Description of Artificial Sequence: Synthetic oligonucleotide
  Antisense strand to SEQ ID NO: 182148
ucucucagcaggaugauau

SEQ ID NO: 182150 - RNA, 19 nt, Artificial Sequence
  Description of Artificial Sequence: Synthetic oligonucleotide
  Sense strand starting at position 413 of SEQ ID NO: 2348
gagagaaagaguuggcgau

SEQ ID NO: 182151 - RNA, 19 nt, Artificial Sequence
  Description of Artificial Sequence: Synthetic oligonucleotide
  Antisense strand to SEQ ID NO: 182150
aucgccaacucuuucucuc

SEQ ID NO: 182152 - RNA, 19 nt, Artificial Sequence
  Description of Artificial Sequence: Synthetic oligonucleotide
  Sense strand starting at position 414 of SEQ ID NO: 2348
agagaaagaguuggcgauu

SEQ ID NO: 182153 - RNA, 19 nt, Artificial Sequence
  Description of Artificial Sequence: Synthetic oligonucleotide
  Antisense strand to SEQ ID NO: 182152
aaucgccaacucuuucucu

SEQ ID NO: 182154 - RNA, 19 nt, Artificial Sequence
  Description of Artificial Sequence: Synthetic oligonucleotide
  Sense strand starting at position 480 of SEQ ID NO: 2348
gcauuaaagcagcgugaau

SEQ ID NO: 182155 - RNA, 19 nt, Artificial Sequence
  Description of Artificial Sequence: Synthetic oligonucleotide
  Antisense strand to SEQ ID NO: 182154
auucacgcugcuuuaaugc

SEQ ID NO: 182156 - RNA, 19 nt, Artificial Sequence
  Description of Artificial Sequence: Synthetic oligonucleotide
  Sense strand starting at position 491 of SEQ ID NO: 2348
gcgugaaucaccgagggca

SEQ ID NO: 182157 - RNA, 19 nt, Artificial Sequence
  Description of Artificial Sequence: Synthetic oligonucleotide
  Antisense strand to SEQ ID NO: 182156
ugcccucggugauucacgc

SEQ ID NO: 182158 - RNA, 19 nt, Artificial Sequence
  Description of Artificial Sequence: Synthetic oligonucleotide
  Sense strand starting at position 974 of SEQ ID NO: 2348
gugcuagacuaagcgagau

SEQ ID NO: 182159 - RNA, 19 nt, Artificial Sequence
  Description of Artificial Sequence: Synthetic oligonucleotide
  Antisense strand to SEQ ID NO: 182158
aucucgcuuagucuagcac

SEQ ID NO: 182160 - RNA, 19 nt, Artificial Sequence
  Description of Artificial Sequence: Synthetic oligonucleotide
  Sense strand starting at position 986 of SEQ ID NO: 2348
gcgagauacucacgauccu

SEQ ID NO: 182161 - RNA, 19 nt, Artificial Sequence
  Description of Artificial Sequence: Synthetic oligonucleotide
  Antisense strand to SEQ ID NO: 182160
aggaucgugaguaucucgc

SEQ ID NO: 182162 - RNA, 19 nt, Artificial Sequence
  Description of Artificial Sequence: Synthetic oligonucleotide
  Sense strand starting at position 987 of SEQ ID NO: 2348
cgagauacucacgauccuu

SEQ ID NO: 182163 - RNA, 19 nt, Artificial Sequence
  Description of Artificial Sequence: Synthetic oligonucleotide
  Antisense strand to SEQ ID NO: 182162
aaggaucgugaguaucucg

SEQ ID NO: 182164 - RNA, 19 nt, Artificial Sequence
  Description of Artificial Sequence: Synthetic oligonucleotide
  Sense strand starting at position 1432 of SEQ ID NO: 2348
cagucuggagucuaacagu

SEQ ID NO: 182165 - RNA, 19 nt, Artificial Sequence
  Description of Artificial Sequence: Synthetic oligonucleotide
  Antisense strand to SEQ ID NO: 182164
acuguuagacuccagacug

SEQ ID NO: 182166 - RNA, 19 nt, Artificial Sequence
  Description of Artificial Sequence: Synthetic oligonucleotide
  Sense strand starting at position 1504 of SEQ ID NO: 2348
ccgugauccacugacgaac

SEQ ID NO: 182167 - RNA, 19 nt, Artificial Sequence
  Description of Artificial Sequence: Synthetic oligonucleotide
  Antisense strand to SEQ ID NO: 182166
guucgucaguggaucacgg

SEQ ID NO: 182168 - RNA, 19 nt, Artificial Sequence
  Description of Artificial Sequence: Synthetic oligonucleotide
  Sense strand starting at position 2424 of SEQ ID NO: 2348
agcucagagcucucucguu

SEQ ID NO: 182169 - RNA, 19 nt, Artificial Sequence
  Description of Artificial Sequence: Synthetic oligonucleotide
  Antisense strand to SEQ ID NO: 182168
aacgagagagcucugagcu

SEQ ID NO: 182170 - RNA, 19 nt, Artificial Sequence
  Description of Artificial Sequence: Synthetic oligonucleotide
  Sense strand starting at position 2823 of SEQ ID NO: 2348
cagcaagguggcugaauau

SEQ ID NO: 182171 - RNA, 19 nt, Artificial Sequence
  Description of Artificial Sequence: Synthetic oligonucleotide
  Antisense strand to SEQ ID NO: 182170
auauucagccaccuugcug

SEQ ID NO: 182172 - RNA, 19 nt, Artificial Sequence
  Description of Artificial Sequence: Synthetic oligonucleotide
  Sense strand starting at position 2834 of SEQ ID NO: 2348
cugaauauugagggucagu

SEQ ID NO: 182173 - RNA, 19 nt, Artificial Sequence
  Description of Artificial Sequence: Synthetic oligonucleotide
  Antisense strand to SEQ ID NO: 182172
acugacccucaauauucag

SEQ ID NO: 182174 - RNA, 19 nt, Artificial Sequence
  Description of Artificial Sequence: Synthetic oligonucleotide
  Sense strand starting at position 3133 of SEQ ID NO: 2348
uggaaaguuaugugaggga

SEQ ID NO: 182175 - RNA, 19 nt, Artificial Sequence
  Description of Artificial Sequence: Synthetic oligonucleotide
  Antisense strand to SEQ ID NO: 182174
ucccucacauaacuuucca

SEQ ID NO: 182176 - RNA, 19 nt, Artificial Sequence
  Description of Artificial Sequence: Synthetic oligonucleotide
  Sense strand starting at position 3241 of SEQ ID NO: 2348
ccuugucugucccucagua

SEQ ID NO: 182177 - RNA, 19 nt, Artificial Sequence
  Description of Artificial Sequence: Synthetic oligonucleotide
  Antisense strand to SEQ ID NO: 182176
uacugagggacagacaagg

SEQ ID NO: 182178 - RNA, 19 nt, Artificial Sequence
  Description of Artificial Sequence: Synthetic oligonucleotide
  Sense strand starting at position 3243 of SEQ ID NO: 2348
uugucugucccucaguagu

SEQ ID NO: 182179 - RNA, 19 nt, Artificial Sequence
  Description of Artificial Sequence: Synthetic oligonucleotide
  Antisense strand to SEQ ID NO: 182178
acuacugagggacagacaa

SEQ ID NO: 182180 - RNA, 19 nt, Artificial Sequence
  Description of Artificial Sequence: Synthetic oligonucleotide
  Sense strand starting at position 3254 of SEQ ID NO: 2348
ucaguagugugcgaugaca

SEQ ID NO: 182181 - RNA, 19 nt, Artificial Sequence
  Description of Artificial Sequence: Synthetic oligonucleotide
  Antisense strand to SEQ ID NO: 182180
ugucaucgcacacuacuga

SEQ ID NO: 182182 - RNA, 19 nt, Artificial Sequence
  Description of Artificial Sequence: Synthetic oligonucleotide
  Sense strand starting at position 3558 of SEQ ID NO: 2348
cccugagauugcccucuga

SEQ ID NO: 182183 - RNA, 19 nt, Artificial Sequence
  Description of Artificial Sequence: Synthetic oligonucleotide
  Antisense strand to SEQ ID NO: 182182
ucagagggcaaucucaggg

SEQ ID NO: 182184 - RNA, 19 nt, Artificial Sequence
  Description of Artificial Sequence: Synthetic oligonucleotide
  Sense strand starting at position 3866 of SEQ ID NO: 2348
aggucucagucccuuuaga

SEQ ID NO: 182185 - RNA, 19 nt, Artificial Sequence
  Description of Artificial Sequence: Synthetic oligonucleotide
  Antisense strand to SEQ ID NO: 182184
ucuaaagggacugagaccu

SEQ ID NO: 182186 - RNA, 19 nt, Artificial Sequence
  Description of Artificial Sequence: Synthetic oligonucleotide
  Sense strand starting at position 69 of SEQ ID NO: 2349
ggccaagucuccuuuauag

SEQ ID NO: 182187 - RNA, 19 nt, Artificial Sequence
  Description of Artificial Sequence: Synthetic oligonucleotide
  Antisense strand to SEQ ID NO: 182186
cuauaaaggagacuuggcc

SEQ ID NO: 182188 - RNA, 19 nt, Artificial Sequence
  Description of Artificial Sequence: Synthetic oligonucleotide
  Sense strand starting at position 271 of SEQ ID NO: 2349
accucuacuggguaucuua

SEQ ID NO: 182189 - RNA, 19 nt, Artificial Sequence
  Description of Artificial Sequence: Synthetic oligonucleotide
  Antisense strand to SEQ ID NO: 182188
uaagauacccaguagaggu

SEQ ID NO: 182190 - RNA, 19 nt, Artificial Sequence
  Description of Artificial Sequence: Synthetic oligonucleotide
  Sense strand starting at position 287 of SEQ ID NO: 2349
uuagcauugccaugacucu

SEQ ID NO: 182191 - RNA, 19 nt, Artificial Sequence
  Description of Artificial Sequence: Synthetic oligonucleotide
  Antisense strand to SEQ ID NO: 182190
agagucauggcaaugcuaa

SEQ ID NO: 182192 - RNA, 19 nt, Artificial Sequence
  Description of Artificial Sequence: Synthetic oligonucleotide
  Sense strand starting at position 307 of SEQ ID NO: 2349
auccucaaugcuggaggaa

SEQ ID NO: 182193 - RNA, 19 nt, Artificial Sequence
  Description of Artificial Sequence: Synthetic oligonucleotide
  Antisense strand to SEQ ID NO: 182192
uuccuccagcauugaggau

SEQ ID NO: 182194 - RNA, 19 nt, Artificial Sequence
  Description of Artificial Sequence: Synthetic oligonucleotide
  Sense strand starting at position 489 of SEQ ID NO: 2349
aucuuaacuugguuugauu

SEQ ID NO: 182195 - RNA, 19 nt, Artificial Sequence
  Description of Artificial Sequence: Synthetic oligonucleotide
  Antisense strand to SEQ ID NO: 182194
aaucaaaccaaguuaagau

SEQ ID NO: 182196 - RNA, 19 nt, Artificial Sequence
  Description of Artificial Sequence: Synthetic oligonucleotide
  Sense strand starting at position 491 of SEQ ID NO: 2349
cuuaacuugguuugauuga

SEQ ID NO: 182197 - RNA, 19 nt, Artificial Sequence
  Description of Artificial Sequence: Synthetic oligonucleotide
  Antisense strand to SEQ ID NO: 182196
ucaaucaaaccaaguuaag

SEQ ID NO: 182198 - RNA, 19 nt, Artificial Sequence
  Description of Artificial Sequence: Synthetic oligonucleotide
  Sense strand starting at position 602 of SEQ ID NO: 2349
gucugccugccuggauaaa

SEQ ID NO: 182199 - RNA, 19 nt, Artificial Sequence
  Description of Artificial Sequence: Synthetic oligonucleotide
  Antisense strand to SEQ ID NO: 182198
uuuauccaggcaggcagac

SEQ ID NO: 182200 - RNA, 19 nt, Artificial Sequence
  Description of Artificial Sequence: Synthetic oligonucleotide
  Sense strand starting at position 691 of SEQ ID NO: 2349
auauaagugcuauagcaug

SEQ ID NO: 182201 - RNA, 19 nt, Artificial Sequence
  Description of Artificial Sequence: Synthetic oligonucleotide
  Antisense strand to SEQ ID NO: 182200
caugcuauagcacuuauau

SEQ ID NO: 182202 - RNA, 19 nt, Artificial Sequence
  Description of Artificial Sequence: Synthetic oligonucleotide
  Sense strand starting at position 748 of SEQ ID NO: 2349
cuguucaagggaugucuga

SEQ ID NO: 182203 - RNA, 19 nt, Artificial Sequence
  Description of Artificial Sequence: Synthetic oligonucleotide
  Antisense strand to SEQ ID NO: 182202
ucagacaucccuugaacag

SEQ ID NO: 182204 - RNA, 19 nt, Artificial Sequence
  Description of Artificial Sequence: Synthetic oligonucleotide
  Sense strand starting at position 790 of SEQ ID NO: 2349
uaagguguaugccuaggau

SEQ ID NO: 182205 - RNA, 19 nt, Artificial Sequence
  Description of Artificial Sequence: Synthetic oligonucleotide
  Antisense strand to SEQ ID NO: 182204
auccuaggcauacaccuua

SEQ ID NO: 182206 - RNA, 19 nt, Artificial Sequence
  Description of Artificial Sequence: Synthetic oligonucleotide
  Sense strand starting at position 793 of SEQ ID NO: 2349
gguguaugccuaggaugga

SEQ ID NO: 182207 - RNA, 19 nt, Artificial Sequence
  Description of Artificial Sequence: Synthetic oligonucleotide
  Antisense strand to SEQ ID NO: 182206
uccauccuaggcauacacc

SEQ ID NO: 182208 - RNA, 19 nt, Artificial Sequence
  Description of Artificial Sequence: Synthetic oligonucleotide
  Sense strand starting at position 837 of SEQ ID NO: 2349
acuguuacugcuuagaaua

SEQ ID NO: 182209 - RNA, 19 nt, Artificial Sequence
  Description of Artificial Sequence: Synthetic oligonucleotide
  Antisense strand to SEQ ID NO: 182208
uauucuaagcaguaacagu

SEQ ID NO: 182210 - RNA, 19 nt, Artificial Sequence
  Description of Artificial Sequence: Synthetic oligonucleotide
  Sense strand starting at position 981 of SEQ ID NO: 2349
agaggagaguuagagguua

SEQ ID NO: 182211 - RNA, 19 nt, Artificial Sequence
  Description of Artificial Sequence: Synthetic oligonucleotide
  Antisense strand to SEQ ID NO: 182210
uaaccucuaacucuccucu

SEQ ID NO: 182212 - RNA, 19 nt, Artificial Sequence
  Description of Artificial Sequence: Synthetic oligonucleotide
  Sense strand starting at position 983 of SEQ ID NO: 2349
aggagaguuagagguuaca

SEQ ID NO: 182213 - RNA, 19 nt, Artificial Sequence
  Description of Artificial Sequence: Synthetic oligonucleotide
  Antisense strand to SEQ ID NO: 182212
uguaaccucuaacucuccu

SEQ ID NO: 182214 - RNA, 19 nt, Artificial Sequence
  Description of Artificial Sequence: Synthetic oligonucleotide
  Sense strand starting at position 1050 of SEQ ID NO: 2349
aaacuaucacuuggugaag

SEQ ID NO: 182215 - RNA, 19 nt, Artificial Sequence
  Description of Artificial Sequence: Synthetic oligonucleotide
  Antisense strand to SEQ ID NO: 182214
cuucaccaagugauaguuu

SEQ ID NO: 182216 - RNA, 19 nt, Artificial Sequence
  Description of Artificial Sequence: Synthetic oligonucleotide
  Sense strand starting at position 1051 of SEQ ID NO: 2349
aacuaucacuuggugaagu

SEQ ID NO: 182217 - RNA, 19 nt, Artificial Sequence
  Description of Artificial Sequence: Synthetic oligonucleotide
  Antisense strand to SEQ ID NO: 182216
acuucaccaagugauaguu

SEQ ID NO: 182218 - RNA, 19 nt, Artificial Sequence
  Description of Artificial Sequence: Synthetic oligonucleotide
  Sense strand starting at position 1167 of SEQ ID NO: 2349
ugaaaugugcagugaguuu

SEQ ID NO: 182219 - RNA, 19 nt, Artificial Sequence
  Description of Artificial Sequence: Synthetic oligonucleotide
  Antisense strand to SEQ ID NO: 182218
aaacucacugcacauuuca

SEQ ID NO: 182220 - RNA, 19 nt, Artificial Sequence
  Description of Artificial Sequence: Synthetic oligonucleotide
  Sense strand starting at position 1276 of SEQ ID NO: 2349
gguaaaguuguggaggagu

SEQ ID NO: 182221 - RNA, 19 nt, Artificial Sequence
  Description of Artificial Sequence: Synthetic oligonucleotide
  Antisense strand to SEQ ID NO: 182220
acuccuccacaacuuuacc

SEQ ID NO: 182222 - RNA, 19 nt, Artificial Sequence
  Description of Artificial Sequence: Synthetic oligonucleotide
  Sense strand starting at position 1329 of SEQ ID NO: 2349
guggguggguucguggaaa

SEQ ID NO: 182223 - RNA, 19 nt, Artificial Sequence
  Description of Artificial Sequence: Synthetic oligonucleotide
  Antisense strand to SEQ ID NO: 182222
uuuccacgaacccacccac

SEQ ID NO: 182224 - RNA, 19 nt, Artificial Sequence
  Description of Artificial Sequence: Synthetic oligonucleotide
  Sense strand starting at position 1340 of SEQ ID NO: 2349
cguggaaacggguagucua

SEQ ID NO: 182225 - RNA, 19 nt, Artificial Sequence
  Description of Artificial Sequence: Synthetic oligonucleotide
  Antisense strand to SEQ ID NO: 182224
uagacuacccguuuccacg

SEQ ID NO: 182226 - RNA, 19 nt, Artificial Sequence
  Description of Artificial Sequence: Synthetic oligonucleotide
  Sense strand starting at position 1401 of SEQ ID NO: 2349
uagagauucugggugcacu

SEQ ID NO: 182227 - RNA, 19 nt, Artificial Sequence
  Description of Artificial Sequence: Synthetic oligonucleotide
  Antisense strand to SEQ ID NO: 182226
agugcacccagaaucucua

SEQ ID NO: 182228 - RNA, 19 nt, Artificial Sequence
  Description of Artificial Sequence: Synthetic oligonucleotide
  Sense strand starting at position 1494 of SEQ ID NO: 2349
cagguccuucgagagcaaa

SEQ ID NO: 182229 - RNA, 19 nt, Artificial Sequence
  Description of Artificial Sequence: Synthetic oligonucleotide
  Antisense strand to SEQ ID NO: 182228
uuugcucucgaaggaccug

SEQ ID NO: 182230 - RNA, 19 nt, Artificial Sequence
  Description of Artificial Sequence: Synthetic oligonucleotide
  Sense strand starting at position 1527 of SEQ ID NO: 2349
gauccugggucccugacaa

SEQ ID NO: 182231 - RNA, 19 nt, Artificial Sequence
  Description of Artificial Sequence: Synthetic oligonucleotide
  Antisense strand to SEQ ID NO: 182230
uugucagggacccaggauc

SEQ ID NO: 182232 - RNA, 19 nt, Artificial Sequence
  Description of Artificial Sequence: Synthetic oligonucleotide
  Sense strand starting at position 2282 of SEQ ID NO: 2349
gcgaguuugcguaugucgu

SEQ ID NO: 182233 - RNA, 19 nt, Artificial Sequence
  Description of Artificial Sequence: Synthetic oligonucleotide
  Antisense strand to SEQ ID NO: 182232
acgacauacgcaaacucgc

SEQ ID NO: 182234 - RNA, 19 nt, Artificial Sequence
  Description of Artificial Sequence: Synthetic oligonucleotide
  Sense strand starting at position 2790 of SEQ ID NO: 2349
gaggaaugauaauagauca

SEQ ID NO: 182235 - RNA, 19 nt, Artificial Sequence
  Description of Artificial Sequence: Synthetic oligonucleotide
  Antisense strand to SEQ ID NO: 182234
ugaucuauuaucauuccuc

SEQ ID NO: 182236 - RNA, 19 nt, Artificial Sequence
  Description of Artificial Sequence: Synthetic oligonucleotide
  Sense strand starting at position 2803 of SEQ ID NO: 2349
agaucacugcuguguuaug

SEQ ID NO: 182237 - RNA, 19 nt, Artificial Sequence
  Description of Artificial Sequence: Synthetic oligonucleotide
  Antisense strand to SEQ ID NO: 182236
cauaacacagcagugaucu

SEQ ID NO: 182238 - RNA, 19 nt, Artificial Sequence
  Description of Artificial Sequence: Synthetic oligonucleotide
  Sense strand starting at position 2812 of SEQ ID NO: 2349
cuguguuauguacaagugu

SEQ ID NO: 182239 - RNA, 19 nt, Artificial Sequence
  Description of Artificial Sequence: Synthetic oligonucleotide
  Antisense strand to SEQ ID NO: 182238
acacuuguacauaacacag

SEQ ID NO: 182240 - RNA, 19 nt, Artificial Sequence
  Description of Artificial Sequence: Synthetic oligonucleotide
  Sense strand starting at position 2821 of SEQ ID NO: 2349
guacaaguguuaguuaaua

SEQ ID NO: 182241 - RNA, 19 nt, Artificial Sequence
  Description of Artificial Sequence: Synthetic oligonucleotide
  Antisense strand to SEQ ID NO: 182240
uauuaacuaacacuuguac

SEQ ID NO: 182242 - RNA, 19 nt, Artificial Sequence
  Description of Artificial Sequence: Synthetic oligonucleotide
  Sense strand starting at position 3063 of SEQ ID NO: 2349
gcugguugaagcuacagaa

SEQ ID NO: 182243 - RNA, 19 nt, Artificial Sequence
  Description of Artificial Sequence: Synthetic oligonucleotide
  Antisense strand to SEQ ID NO: 182242
uucuguagcuucaaccagc

SEQ ID NO: 182244 - RNA, 19 nt, Artificial Sequence
  Description of Artificial Sequence: Synthetic oligonucleotide
  Sense strand starting at position 3127 of SEQ ID NO: 2349
ugugguaaggccuagucaa

SEQ ID NO: 182245 - RNA, 19 nt, Artificial Sequence
  Description of Artificial Sequence: Synthetic oligonucleotide
  Antisense strand to SEQ ID NO: 182244
uugacuaggccuuaccaca

SEQ ID NO: 182246 - RNA, 19 nt, Artificial Sequence
  Description of Artificial Sequence: Synthetic oligonucleotide
  Sense strand starting at position 3141 of SEQ ID NO: 2349
gucaauucugcugggccaa

SEQ ID NO: 182247 - RNA, 19 nt, Artificial Sequence
  Description of Artificial Sequence: Synthetic oligonucleotide
  Antisense strand to SEQ ID NO: 182246
uuggcccagcagaauugac

SEQ ID NO: 182248 - RNA, 19 nt, Artificial Sequence
  Description of Artificial Sequence: Synthetic oligonucleotide
  Sense strand starting at position 3168 of SEQ ID NO: 2349
uuaaaccacuggucagauu

SEQ ID NO: 182249 - RNA, 19 nt, Artificial Sequence
  Description of Artificial Sequence: Synthetic oligonucleotide
  Antisense strand to SEQ ID NO: 182248
aaucugaccagugguuuaa

SEQ ID NO: 182250 - RNA, 19 nt, Artificial Sequence
  Description of Artificial Sequence: Synthetic oligonucleotide
  Sense strand starting at position 3217 of SEQ ID NO: 2349
gagcuagccuuugcuggaa

SEQ ID NO: 182251 - RNA, 19 nt, Artificial Sequence
  Description of Artificial Sequence: Synthetic oligonucleotide
  Antisense strand to SEQ ID NO: 182250
uuccagcaaaggcuagcuc

SEQ ID NO: 182252 - RNA, 19 nt, Artificial Sequence
  Description of Artificial Sequence: Synthetic oligonucleotide
  Sense strand starting at position 3221 of SEQ ID NO: 2349
uagccuuugcuggaagacu

SEQ ID NO: 182253 - RNA, 19 nt, Artificial Sequence
  Description of Artificial Sequence: Synthetic oligonucleotide
  Antisense strand to SEQ ID NO: 182252
agucuuccagcaaaggcua

SEQ ID NO: 182254 - RNA, 19 nt, Artificial Sequence
  Description of Artificial Sequence: Synthetic oligonucleotide
  Sense strand starting at position 3256 of SEQ ID NO: 2349
agaggccuccuuuggucaa

SEQ ID NO: 182255 - RNA, 19 nt, Artificial Sequence
  Description of Artificial Sequence: Synthetic oligonucleotide
  Antisense strand to SEQ ID NO: 182254
uugaccaaaggaggccucu

SEQ ID NO: 182256 - RNA, 19 nt, Artificial Sequence
  Description of Artificial Sequence: Synthetic oligonucleotide
  Sense strand starting at position 3349 of SEQ ID NO: 2349
gccugaacaguuugcuaca

SEQ ID NO: 182257 - RNA, 19 nt, Artificial Sequence
  Description of Artificial Sequence: Synthetic oligonucleotide
  Antisense strand to SEQ ID NO: 182256
uguagcaaacuguucaggc

SEQ ID NO: 182258 - RNA, 19 nt, Artificial Sequence
  Description of Artificial Sequence: Synthetic oligonucleotide
  Sense strand starting at position 3433 of SEQ ID NO: 2349
uuauuuccugagcgaaggu

SEQ ID NO: 182259 - RNA, 19 nt, Artificial Sequence
  Description of Artificial Sequence: Synthetic oligonucleotide
  Antisense strand to SEQ ID NO: 182258
accuucgcucaggaaauaa

SEQ ID NO: 182260 - RNA, 19 nt, Artificial Sequence
  Description of Artificial Sequence: Synthetic oligonucleotide
  Sense strand starting at position 3819 of SEQ ID NO: 2349
acaacauugcaagguaagu

SEQ ID NO: 182261 - RNA, 19 nt, Artificial Sequence
  Description of Artificial Sequence: Synthetic oligonucleotide
  Antisense strand to SEQ ID NO: 182260
acuuaccuugcaauguugu

SEQ ID NO: 182262 - RNA, 19 nt, Artificial Sequence
  Description of Artificial Sequence: Synthetic oligonucleotide
  Sense strand starting at position 3867 of SEQ ID NO: 2349
aggagugacucuguaagga

SEQ ID NO: 182263 - RNA, 19 nt, Artificial Sequence
  Description of Artificial Sequence: Synthetic oligonucleotide
  Antisense strand to SEQ ID NO: 182262
uccuuacagagucacuccu

SEQ ID NO: 182264 - RNA, 19 nt, Artificial Sequence
  Description of Artificial Sequence: Synthetic oligonucleotide
  Sense strand starting at position 3883 of SEQ ID NO: 2349
ggauauacagucuguaaac

SEQ ID NO: 182265 - RNA, 19 nt, Artificial Sequence
  Description of Artificial Sequence: Synthetic oligonucleotide
  Antisense strand to SEQ ID NO: 182264
guuuacagacuguauaucc

SEQ ID NO: 182266 - RNA, 19 nt, Artificial Sequence
  Description of Artificial Sequence: Synthetic oligonucleotide
  Sense strand starting at position 625 of SEQ ID NO: 2350
aggacaugcauagguuaua

SEQ ID NO: 182267 - RNA, 19 nt, Artificial Sequence
  Description of Artificial Sequence: Synthetic oligonucleotide
  Antisense strand to SEQ ID NO: 182266
uauaaccuaugcauguccu

SEQ ID NO: 182268 - RNA, 19 nt, Artificial Sequence
  Description of Artificial Sequence: Synthetic oligonucleotide
  Sense strand starting at position 626 of SEQ ID NO: 2350
ggacaugcauagguuauau

SEQ ID NO: 182269 - RNA, 19 nt, Artificial Sequence
  Description of Artificial Sequence: Synthetic oligonucleotide
  Antisense strand to SEQ ID NO: 182268
auauaaccuaugcaugucc

SEQ ID NO: 182270 - RNA, 19 nt, Artificial Sequence
  Description of Artificial Sequence: Synthetic oligonucleotide
  Sense strand starting at position 671 of SEQ ID NO: 2350
ggacuugaccuuuggugga

SEQ ID NO: 182271 - RNA, 19 nt, Artificial Sequence
  Description of Artificial Sequence: Synthetic oligonucleotide
  Antisense strand to SEQ ID NO: 182270
uccaccaaaggucaagucc

SEQ ID NO: 182272 - RNA, 19 nt, Artificial Sequence
  Description of Artificial Sequence: Synthetic oligonucleotide
  Sense strand starting at position 673 of SEQ ID NO: 2350
acuugaccuuugguggauu

SEQ ID NO: 182273 - RNA, 19 nt, Artificial Sequence
  Description of Artificial Sequence: Synthetic oligonucleotide
  Antisense strand to SEQ ID NO: 182272
aauccaccaaaggucaagu

SEQ ID NO: 182274 - RNA, 19 nt, Artificial Sequence
  Description of Artificial Sequence: Synthetic oligonucleotide
  Sense strand starting at position 734 of SEQ ID NO: 2350
gaggguugacuguacagua

SEQ ID NO: 182275 - RNA, 19 nt, Artificial Sequence
  Description of Artificial Sequence: Synthetic oligonucleotide
  Antisense strand to SEQ ID NO: 182274
uacuguacagucaacccuc

SEQ ID NO: 182276 - RNA, 19 nt, Artificial Sequence
  Description of Artificial Sequence: Synthetic oligonucleotide
  Sense strand starting at position 756 of SEQ ID NO: 2350
guaucacaaguauaaagua

SEQ ID NO: 182277 - RNA, 19 nt, Artificial Sequence
  Description of Artificial Sequence: Synthetic oligonucleotide
  Antisense strand to SEQ ID NO: 182276
uacuuuauacuugugauac

SEQ ID NO: 182278 - RNA, 19 nt, Artificial Sequence
  Description of Artificial Sequence: Synthetic oligonucleotide
  Sense strand starting at position 797 of SEQ ID NO: 2350
aguggaaagccaugguaaa

SEQ ID NO: 182279 - RNA, 19 nt, Artificial Sequence
  Description of Artificial Sequence: Synthetic oligonucleotide
  Antisense strand to SEQ ID NO: 182278
uuuaccauggcuuuccacu

SEQ ID NO: 182280 - RNA, 19 nt, Artificial Sequence
  Description of Artificial Sequence: Synthetic oligonucleotide
  Sense strand starting at position 907 of SEQ ID NO: 2350
gcucaaaugccaugaauaa

SEQ ID NO: 182281 - RNA, 19 nt, Artificial Sequence
  Description of Artificial Sequence: Synthetic oligonucleotide
  Antisense strand to SEQ ID NO: 182280
uuauucauggcauuugagc

SEQ ID NO: 182282 - RNA, 19 nt, Artificial Sequence
  Description of Artificial Sequence: Synthetic oligonucleotide
  Sense strand starting at position 942 of SEQ ID NO: 2350
guauaaagguucuuuacaa

SEQ ID NO: 182283 - RNA, 19 nt, Artificial Sequence
  Description of Artificial Sequence: Synthetic oligonucleotide
  Antisense strand to SEQ ID NO: 182282
uuguaaagaaccuuuauac

SEQ ID NO: 182284 - RNA, 19 nt, Artificial Sequence
  Description of Artificial Sequence: Synthetic oligonucleotide
  Sense strand starting at position 1213 of SEQ ID NO: 2350
ggaggaauuccuugacagc

SEQ ID NO: 182285 - RNA, 19 nt, Artificial Sequence
  Description of Artificial Sequence: Synthetic oligonucleotide
  Antisense strand to SEQ ID NO: 182284
gcugucaaggaauuccucc

SEQ ID NO: 182286 - RNA, 19 nt, Artificial Sequence
  Description of Artificial Sequence: Synthetic oligonucleotide
  Sense strand starting at position 1293 of SEQ ID NO: 2350
guggguuuggaccagaugu

SEQ ID NO: 182287 - RNA, 19 nt, Artificial Sequence
  Description of Artificial Sequence: Synthetic oligonucleotide
  Antisense strand to SEQ ID NO: 182286
acaucugguccaaacccac

SEQ ID NO: 182288 - RNA, 19 nt, Artificial Sequence
  Description of Artificial Sequence: Synthetic oligonucleotide
  Sense strand starting at position 1696 of SEQ ID NO: 2350
gcaaauuucucccugcugu

SEQ ID NO: 182289 - RNA, 19 nt, Artificial Sequence
  Description of Artificial Sequence: Synthetic oligonucleotide
  Antisense strand to SEQ ID NO: 182288
acagcagggagaaauuugc

SEQ ID NO: 182290 - RNA, 19 nt, Artificial Sequence
  Description of Artificial Sequence: Synthetic oligonucleotide
  Sense strand starting at position 1733 of SEQ ID NO: 2350
gggagcucugaccacgauu

SEQ ID NO: 182291 - RNA, 19 nt, Artificial Sequence
  Description of Artificial Sequence: Synthetic oligonucleotide
  Antisense strand to SEQ ID NO: 182290
aaucguggucagagcuccc

SEQ ID NO: 182292 - RNA, 19 nt, Artificial Sequence
  Description of Artificial Sequence: Synthetic oligonucleotide
  Sense strand starting at position 1826 of SEQ ID NO: 2350
cucccauauuaggcggaaa

SEQ ID NO: 182293 - RNA, 19 nt, Artificial Sequence
  Description of Artificial Sequence: Synthetic oligonucleotide
  Antisense strand to SEQ ID NO: 182292
uuuccgccuaauaugggag

SEQ ID NO: 182294 - RNA, 19 nt, Artificial Sequence
  Description of Artificial Sequence: Synthetic oligonucleotide
  Sense strand starting at position 1828 of SEQ ID NO: 2350
cccauauuaggcggaaaca

SEQ ID NO: 182295 - RNA, 19 nt, Artificial Sequence
  Description of Artificial Sequence: Synthetic oligonucleotide
  Antisense strand to SEQ ID NO: 182294
uguuuccgccuaauauggg

SEQ ID NO: 182296 - RNA, 19 nt, Artificial Sequence
  Description of Artificial Sequence: Synthetic oligonucleotide
  Sense strand starting at position 1909 of SEQ ID NO: 2350
ggaauacucuccuugcuua

SEQ ID NO: 182297 - RNA, 19 nt, Artificial Sequence
  Description of Artificial Sequence: Synthetic oligonucleotide
  Antisense strand to SEQ ID NO: 182296
uaagcaaggagaguauucc

SEQ ID NO: 182298 - RNA, 19 nt, Artificial Sequence
  Description of Artificial Sequence: Synthetic oligonucleotide
  Sense strand starting at position 2029 of SEQ ID NO: 2350
gaagauugugauuggccca

SEQ ID NO: 182299 - RNA, 19 nt, Artificial Sequence
  Description of Artificial Sequence: Synthetic oligonucleotide
  Antisense strand to SEQ ID NO: 182298
ugggccaaucacaaucuuc

SEQ ID NO: 182300 - RNA, 19 nt, Artificial Sequence
  Description of Artificial Sequence: Synthetic oligonucleotide
  Sense strand starting at position 2034 of SEQ ID NO: 2350
uugugauuggcccacagua

SEQ ID NO: 182301 - RNA, 19 nt, Artificial Sequence
  Description of Artificial Sequence: Synthetic oligonucleotide
  Antisense strand to SEQ ID NO: 182300
uacugugggccaaucacaa

SEQ ID NO: 182302 - RNA, 19 nt, Artificial Sequence
  Description of Artificial Sequence: Synthetic oligonucleotide
  Sense strand starting at position 2036 of SEQ ID NO: 2350
gugauuggcccacaguaau

SEQ ID NO: 182303 - RNA, 19 nt, Artificial Sequence
  Description of Artificial Sequence: Synthetic oligonucleotide
  Antisense strand to SEQ ID NO: 182302
auuacugugggccaaucac

SEQ ID NO: 182304 - RNA, 19 nt, Artificial Sequence
  Description of Artificial Sequence: Synthetic oligonucleotide
  Sense strand starting at position 2047 of SEQ ID NO: 2350
acaguaauccaccgggaaa

SEQ ID NO: 182305 - RNA, 19 nt, Artificial Sequence
  Description of Artificial Sequence: Synthetic oligonucleotide
  Antisense strand to SEQ ID NO: 182304
uuucccgguggauuacugu

SEQ ID NO: 182306 - RNA, 19 nt, Artificial Sequence
  Description of Artificial Sequence: Synthetic oligonucleotide
  Sense strand starting at position 2049 of SEQ ID NO: 2350
aguaauccaccgggaaaga

SEQ ID NO: 182307 - RNA, 19 nt, Artificial Sequence
  Description of Artificial Sequence: Synthetic oligonucleotide
  Antisense strand to SEQ ID NO: 182306
ucuuucccgguggauuacu

SEQ ID NO: 182308 - RNA, 19 nt, Artificial Sequence
  Description of Artificial Sequence: Synthetic oligonucleotide
  Sense strand starting at position 2195 of SEQ ID NO: 2350
aguccaaauucgguuacaa

SEQ ID NO: 182309 - RNA, 19 nt, Artificial Sequence
  Description of Artificial Sequence: Synthetic oligonucleotide
  Antisense strand to SEQ ID NO: 182308
uuguaaccgaauuuggacu

SEQ ID NO: 182310 - RNA, 19 nt, Artificial Sequence
  Description of Artificial Sequence: Synthetic oligonucleotide
  Sense strand starting at position 2197 of SEQ ID NO: 2350
uccaaauucgguuacaaag

SEQ ID NO: 182311 - RNA, 19 nt, Artificial Sequence
  Description of Artificial Sequence: Synthetic oligonucleotide
  Antisense strand to SEQ ID NO: 182310
cuuuguaaccgaauuugga

SEQ ID NO: 182312 - RNA, 19 nt, Artificial Sequence
  Description of Artificial Sequence: Synthetic oligonucleotide
  Sense strand starting at position 2299 of SEQ ID NO: 2350
aagagaauacgugauagcu

SEQ ID NO: 182313 - RNA, 19 nt, Artificial Sequence
  Description of Artificial Sequence: Synthetic oligonucleotide
  Antisense strand to SEQ ID NO: 182312
agcuaucacguauucucuu

SEQ ID NO: 182314 - RNA, 19 nt, Artificial Sequence
  Description of Artificial Sequence: Synthetic oligonucleotide
  Sense strand starting at position 2515 of SEQ ID NO: 2350
gaaguuaggucaucacuug

SEQ ID NO: 182315 - RNA, 19 nt, Artificial Sequence
  Description of Artificial Sequence: Synthetic oligonucleotide
  Antisense strand to SEQ ID NO: 182314
caagugaugaccuaacuuc

SEQ ID NO: 182316 - RNA, 19 nt, Artificial Sequence
  Description of Artificial Sequence: Synthetic oligonucleotide
  Sense strand starting at position 2522 of SEQ ID NO: 2350
ggucaucacuuguuaggga

SEQ ID NO: 182317 - RNA, 19 nt, Artificial Sequence
  Description of Artificial Sequence: Synthetic oligonucleotide
  Antisense strand to SEQ ID NO: 182316
ucccuaacaagugaugacc

SEQ ID NO: 182318 - RNA, 19 nt, Artificial Sequence
  Description of Artificial Sequence: Synthetic oligonucleotide
  Sense strand starting at position 2527 of SEQ ID NO: 2350
ucacuuguuagggauagug

SEQ ID NO: 182319 - RNA, 19 nt, Artificial Sequence
  Description of Artificial Sequence: Synthetic oligonucleotide
  Antisense strand to SEQ ID NO: 182318
cacuaucccuaacaaguga

SEQ ID NO: 182320 - RNA, 19 nt, Artificial Sequence
  Description of Artificial Sequence: Synthetic oligonucleotide
  Sense strand starting at position 2529 of SEQ ID NO: 2350
acuuguuagggauagugca

SEQ ID NO: 182321 - RNA, 19 nt, Artificial Sequence
  Description of Artificial Sequence: Synthetic oligonucleotide
  Antisense strand to SEQ ID NO: 182320
ugcacuaucccuaacaagu

SEQ ID NO: 182322 - RNA, 19 nt, Artificial Sequence
  Description of Artificial Sequence: Synthetic oligonucleotide
  Sense strand starting at position 2952 of SEQ ID NO: 2350
ggaagaaccuguuuauagu

SEQ ID NO: 182323 - RNA, 19 nt, Artificial Sequence
  Description of Artificial Sequence: Synthetic oligonucleotide
  Antisense strand to SEQ ID NO: 182322
acuauaaacagguucuucc

SEQ ID NO: 182324 - RNA, 19 nt, Artificial Sequence
  Description of Artificial Sequence: Synthetic oligonucleotide
  Sense strand starting at position 2953 of SEQ ID NO: 2350
gaagaaccuguuuauaguu

SEQ ID NO: 182325 - RNA, 19 nt, Artificial Sequence
  Description of Artificial Sequence: Synthetic oligonucleotide
  Antisense strand to SEQ ID NO: 182324
aacuauaaacagguucuuc

SEQ ID NO: 182326 - RNA, 19 nt, Artificial Sequence
  Description of Artificial Sequence: Synthetic oligonucleotide
  Sense strand starting at position 3076 of SEQ ID NO: 2350
uugacuagccuuuggaaau

SEQ ID NO: 182327 - RNA, 19 nt, Artificial Sequence
  Description of Artificial Sequence: Synthetic oligonucleotide
  Antisense strand to SEQ ID NO: 182326
auuuccaaaggcuagucaa

SEQ ID NO: 182328 - RNA, 19 nt, Artificial Sequence
  Description of Artificial Sequence: Synthetic oligonucleotide
  Sense strand starting at position 3089 of SEQ ID NO: 2350
ggaaaugcuguggguggaa

SEQ ID NO: 182329 - RNA, 19 nt, Artificial Sequence
  Description of Artificial Sequence: Synthetic oligonucleotide
  Antisense strand to SEQ ID NO: 182328
uuccacccacagcauuucc

SEQ ID NO: 182330 - RNA, 19 nt, Artificial Sequence
  Description of Artificial Sequence: Synthetic oligonucleotide
  Sense strand starting at position 3160 of SEQ ID NO: 2350
guagcuuuggaacaacgau

SEQ ID NO: 182331 - RNA, 19 nt, Artificial Sequence
  Description of Artificial Sequence: Synthetic oligonucleotide
  Antisense strand to SEQ ID NO: 182330
aucguuguuccaaagcuac

SEQ ID NO: 182332 - RNA, 19 nt, Artificial Sequence
  Description of Artificial Sequence: Synthetic oligonucleotide
  Sense strand starting at position 3166 of SEQ ID NO: 2350
uuggaacaacgaugguaau

SEQ ID NO: 182333 - RNA, 19 nt, Artificial Sequence
  Description of Artificial Sequence: Synthetic oligonucleotide
  Antisense strand to SEQ ID NO: 182332
auuaccaucguuguuccaa

SEQ ID NO: 182334 - RNA, 19 nt, Artificial Sequence
  Description of Artificial Sequence: Synthetic oligonucleotide
  Sense strand starting at position 3167 of SEQ ID NO: 2350
uggaacaacgaugguaaua

SEQ ID NO: 182335 - RNA, 19 nt, Artificial Sequence
  Description of Artificial Sequence: Synthetic oligonucleotide
  Antisense strand to SEQ ID NO: 182334
uauuaccaucguuguucca

SEQ ID NO: 182336 - RNA, 19 nt, Artificial Sequence
  Description of Artificial Sequence: Synthetic oligonucleotide
  Sense strand starting at position 3404 of SEQ ID NO: 2350
ucacuaggacucugugaug

SEQ ID NO: 182337 - RNA, 19 nt, Artificial Sequence
  Description of Artificial Sequence: Synthetic oligonucleotide
  Antisense strand to SEQ ID NO: 182336
caucacagaguccuaguga

SEQ ID NO: 182338 - RNA, 19 nt, Artificial Sequence
  Description of Artificial Sequence: Synthetic oligonucleotide
  Sense strand starting at position 3440 of SEQ ID NO: 2350
accuuaguuguaggaauaa

SEQ ID NO: 182339 - RNA, 19 nt, Artificial Sequence
  Description of Artificial Sequence: Synthetic oligonucleotide
  Antisense strand to SEQ ID NO: 182338
uuauuccuacaacuaaggu

SEQ ID NO: 182340 - RNA, 19 nt, Artificial Sequence
  Description of Artificial Sequence: Synthetic oligonucleotide
  Sense strand starting at position 3555 of SEQ ID NO: 2350
uugcauuuauuguuagcau

SEQ ID NO: 182341 - RNA, 19 nt, Artificial Sequence
  Description of Artificial Sequence: Synthetic oligonucleotide
  Antisense strand to SEQ ID NO: 182340
augcuaacaauaaaugcaa

SEQ ID NO: 182342 - RNA, 19 nt, Artificial Sequence
  Description of Artificial Sequence: Synthetic oligonucleotide
  Sense strand starting at position 3566 of SEQ ID NO: 2350
guuagcauuuacucagcau

SEQ ID NO: 182343 - RNA, 19 nt, Artificial Sequence
  Description of Artificial Sequence: Synthetic oligonucleotide
  Antisense strand to SEQ ID NO: 182342
augcugaguaaaugcuaac

SEQ ID NO: 182344 - RNA, 19 nt, Artificial Sequence
  Description of Artificial Sequence: Synthetic oligonucleotide
  Sense strand starting at position 3742 of SEQ ID NO: 2350
uugggugguucucugagaa

SEQ ID NO: 182345 - RNA, 19 nt, Artificial Sequence
  Description of Artificial Sequence: Synthetic oligonucleotide
  Antisense strand to SEQ ID NO: 182344
uucucagagaaccacccaa

SEQ ID NO: 182346 - RNA, 19 nt, Artificial Sequence
  Description of Artificial Sequence: Synthetic oligonucleotide
  Sense strand starting at position 3474 of SEQ ID NO: 2351
uggguuuaaacaggagagu

SEQ ID NO: 182347 - RNA, 19 nt, Artificial Sequence
  Description of Artificial Sequence: Synthetic oligonucleotide
  Antisense strand to SEQ ID NO: 182346
acucuccuguuuaaaccca

SEQ ID NO: 182348 - RNA, 19 nt, Artificial Sequence
  Description of Artificial Sequence: Synthetic oligonucleotide
  Sense strand starting at position 3447 of SEQ ID NO: 2351
uuugaauagcuaugggaau

SEQ ID NO: 182349 - RNA, 19 nt, Artificial Sequence
  Description of Artificial Sequence: Synthetic oligonucleotide
  Antisense strand to SEQ ID NO: 182348
auucccauagcuauucaaa

SEQ ID NO: 182350 - RNA, 19 nt, Artificial Sequence
  Description of Artificial Sequence: Synthetic oligonucleotide
  Sense strand starting at position 3429 of SEQ ID NO: 2351
uaggaaguuugggcuuuau

SEQ ID NO: 182351 - RNA, 19 nt, Artificial Sequence
  Description of Artificial Sequence: Synthetic oligonucleotide
  Antisense strand to SEQ ID NO: 182350
auaaagcccaaacuuccua

SEQ ID NO: 182352 - RNA, 19 nt, Artificial Sequence
  Description of Artificial Sequence: Synthetic oligonucleotide
  Sense strand starting at position 3405 of SEQ ID NO: 2351
gugauaaagaugggcacua

SEQ ID NO: 182353 - RNA, 19 nt, Artificial Sequence
  Description of Artificial Sequence: Synthetic oligonucleotide
  Antisense strand to SEQ ID NO: 182352
uagugcccaucuuuaucac

SEQ ID NO: 182354 - RNA, 19 nt, Artificial Sequence
  Description of Artificial Sequence: Synthetic oligonucleotide
  Sense strand starting at position 3215 of SEQ ID NO: 2351
ggaaaugccucuguaagga

SEQ ID NO: 182355 - RNA, 19 nt, Artificial Sequence
  Description of Artificial Sequence: Synthetic oligonucleotide
  Antisense strand to SEQ ID NO: 182354
uccuuacagaggcauuucc

SEQ ID NO: 182356 - RNA, 19 nt, Artificial Sequence
  Description of Artificial Sequence: Synthetic oligonucleotide
  Sense strand starting at position 3214 of SEQ ID NO: 2351
aggaaaugccucuguaagg

SEQ ID NO: 182357 - RNA, 19 nt, Artificial Sequence
  Description of Artificial Sequence: Synthetic oligonucleotide
  Antisense strand to SEQ ID NO: 182356
ccuuacagaggcauuuccu

SEQ ID NO: 182358 - RNA, 19 nt, Artificial Sequence
  Description of Artificial Sequence: Synthetic oligonucleotide
  Sense strand starting at position 3139 of SEQ ID NO: 2351
acguuauguggacaauaau

SEQ ID NO: 182359 - RNA, 19 nt, Artificial Sequence
  Description of Artificial Sequence: Synthetic oligonucleotide
  Antisense strand to SEQ ID NO: 182358
auuauuguccacauaacgu

SEQ ID NO: 182360 - RNA, 19 nt, Artificial Sequence
  Description of Artificial Sequence: Synthetic oligonucleotide
  Sense strand starting at position 3137 of SEQ ID NO: 2351
aaacguuauguggacaaua

SEQ ID NO: 182361 - RNA, 19 nt, Artificial Sequence
  Description of Artificial Sequence: Synthetic oligonucleotide
  Antisense strand to SEQ ID NO: 182360
uauuguccacauaacguuu

SEQ ID NO: 182362 - RNA, 19 nt, Artificial Sequence
  Description of Artificial Sequence: Synthetic oligonucleotide
  Sense strand starting at position 3135 of SEQ ID NO: 2351
auaaacguuauguggacaa

SEQ ID NO: 182363 - RNA, 19 nt, Artificial Sequence
  Description of Artificial Sequence: Synthetic oligonucleotide
  Antisense strand to SEQ ID NO: 182362
uuguccacauaacguuuau

SEQ ID NO: 182364 - RNA, 19 nt, Artificial Sequence
  Description of Artificial Sequence: Synthetic oligonucleotide
  Sense strand starting at position 3069 of SEQ ID NO: 2351
augucuuuauggcuccaau

SEQ ID NO: 182365 - RNA, 19 nt, Artificial Sequence
  Description of Artificial Sequence: Synthetic oligonucleotide
  Antisense strand to SEQ ID NO: 182364
auuggagccauaaagacau

SEQ ID NO: 182366 - RNA, 19 nt, Artificial Sequence
  Description of Artificial Sequence: Synthetic oligonucleotide
  Sense strand starting at position 3064 of SEQ ID NO: 2351
aguaaaugucuuuauggcu

SEQ ID NO: 182367 - RNA, 19 nt, Artificial Sequence
  Description of Artificial Sequence: Synthetic oligonucleotide
  Antisense strand to SEQ ID NO: 182366
agccauaaagacauuuacu

SEQ ID NO: 182368 - RNA, 19 nt, Artificial Sequence
  Description of Artificial Sequence: Synthetic oligonucleotide
  Sense strand starting at position 3061 of SEQ ID NO: 2351
ugaaguaaaugucuuuaug

SEQ ID NO: 182369 - RNA, 19 nt, Artificial Sequence
  Description of Artificial Sequence: Synthetic oligonucleotide
  Antisense strand to SEQ ID NO: 182368
cauaaagacauuuacuuca

SEQ ID NO: 182370 - RNA, 19 nt, Artificial Sequence
  Description of Artificial Sequence: Synthetic oligonucleotide
  Sense strand starting at position 2841 of SEQ ID NO: 2351
gccauacggcaucacaauu

SEQ ID NO: 182371 - RNA, 19 nt, Artificial Sequence
  Description of Artificial Sequence: Synthetic oligonucleotide
  Antisense strand to SEQ ID NO: 182370
aauugugaugccguauggc

SEQ ID NO: 182372 - RNA, 19 nt, Artificial Sequence
  Description of Artificial Sequence: Synthetic oligonucleotide
  Sense strand starting at position 2701 of SEQ ID NO: 2351
aggaguuuaccacauuccu

SEQ ID NO: 182373 - RNA, 19 nt, Artificial Sequence
  Description of Artificial Sequence: Synthetic oligonucleotide
  Antisense strand to SEQ ID NO: 182372
aggaaugugguaaacuccu

SEQ ID NO: 182374 - RNA, 19 nt, Artificial Sequence
  Description of Artificial Sequence: Synthetic oligonucleotide
  Sense strand starting at position 2690 of SEQ ID NO: 2351
uccuucuaccuaggaguuu

SEQ ID NO: 182375 - RNA, 19 nt, Artificial Sequence
  Description of Artificial Sequence: Synthetic oligonucleotide
  Antisense strand to SEQ ID NO: 182374
aaacuccuagguagaagga

SEQ ID NO: 182376 - RNA, 19 nt, Artificial Sequence
  Description of Artificial Sequence: Synthetic oligonucleotide
  Sense strand starting at position 2599 of SEQ ID NO: 2351
acaaucacccugggaaagu

SEQ ID NO: 182377 - RNA, 19 nt, Artificial Sequence
  Description of Artificial Sequence: Synthetic oligonucleotide
  Antisense strand to SEQ ID NO: 182376
acuuucccagggugauugu

SEQ ID NO: 182378 - RNA, 19 nt, Artificial Sequence
  Description of Artificial Sequence: Synthetic oligonucleotide
  Sense strand starting at position 2514 of SEQ ID NO: 2351
gguacaggucugcauaaca

SEQ ID NO: 182379 - RNA, 19 nt, Artificial Sequence
  Description of Artificial Sequence: Synthetic oligonucleotide
  Antisense strand to SEQ ID NO: 182378
uguuaugcagaccuguacc

SEQ ID NO: 182380 - RNA, 19 nt, Artificial Sequence
  Description of Artificial Sequence: Synthetic oligonucleotide
  Sense strand starting at position 2512 of SEQ ID NO: 2351
uagguacaggucugcauaa

SEQ ID NO: 182381 - RNA, 19 nt, Artificial Sequence
  Description of Artificial Sequence: Synthetic oligonucleotide
  Antisense strand to SEQ ID NO: 182380
uuaugcagaccuguaccua

SEQ ID NO: 182382 - RNA, 19 nt, Artificial Sequence
  Description of Artificial Sequence: Synthetic oligonucleotide
  Sense strand starting at position 2446 of SEQ ID NO: 2351
cgaagucuuucuucgaaau

SEQ ID NO: 182383 - RNA, 19 nt, Artificial Sequence
  Description of Artificial Sequence: Synthetic oligonucleotide
  Antisense strand to SEQ ID NO: 182382
auuucgaagaaagacuucg

SEQ ID NO: 182384 - RNA, 19 nt, Artificial Sequence
  Description of Artificial Sequence: Synthetic oligonucleotide
  Sense strand starting at position 2444 of SEQ ID NO: 2351
cacgaagucuuucuucgaa

SEQ ID NO: 182385 - RNA, 19 nt, Artificial Sequence
  Description of Artificial Sequence: Synthetic oligonucleotide
  Antisense strand to SEQ ID NO: 182384
uucgaagaaagacuucgug

SEQ ID NO: 182386 - RNA, 19 nt, Artificial Sequence
  Description of Artificial Sequence: Synthetic oligonucleotide
  Sense strand starting at position 2325 of SEQ ID NO: 2351
gagauucguggucaaggca

SEQ ID NO: 182387 - RNA, 19 nt, Artificial Sequence
  Description of Artificial Sequence: Synthetic oligonucleotide
  Antisense strand to SEQ ID NO: 182386
ugccuugaccacgaaucuc

SEQ ID NO: 182388 - RNA, 19 nt, Artificial Sequence
  Description of Artificial Sequence: Synthetic oligonucleotide
  Sense strand starting at position 2037 of SEQ ID NO: 2351
aagacaaacuuggaugagu

SEQ ID NO: 182389 - RNA, 19 nt, Artificial Sequence
  Description of Artificial Sequence: Synthetic oligonucleotide
  Antisense strand to SEQ ID NO: 182388
acucauccaaguuugucuu

SEQ ID NO: 182390 - RNA, 19 nt, Artificial Sequence
  Description of Artificial Sequence: Synthetic oligonucleotide
  Sense strand starting at position 1626 of SEQ ID NO: 2351
ggguuaaacugccucuuaa

SEQ ID NO: 182391 - RNA, 19 nt, Artificial Sequence
  Description of Artificial Sequence: Synthetic oligonucleotide
  Antisense strand to SEQ ID NO: 182390
uuaagaggcaguuuaaccc

SEQ ID NO: 182392 - RNA, 19 nt, Artificial Sequence
  Description of Artificial Sequence: Synthetic oligonucleotide
  Sense strand starting at position 1585 of SEQ ID NO: 2351
gcaaaucagguuuaacuaa

SEQ ID NO: 182393 - RNA, 19 nt, Artificial Sequence
  Description of Artificial Sequence: Synthetic oligonucleotide
  Antisense strand to SEQ ID NO: 182392
uuaguuaaaccugauuugc

SEQ ID NO: 182394 - RNA, 19 nt, Artificial Sequence
  Description of Artificial Sequence: Synthetic oligonucleotide
  Sense strand starting at position 1317 of SEQ ID NO: 2351
acagaauauuucugaggcu

SEQ ID NO: 182395 - RNA, 19 nt, Artificial Sequence
  Description of Artificial Sequence: Synthetic oligonucleotide
  Antisense strand to SEQ ID NO: 182394
agccucagaaauauucugu

SEQ ID NO: 182396 - RNA, 19 nt, Artificial Sequence
  Description of Artificial Sequence: Synthetic oligonucleotide
  Sense strand starting at position 1232 of SEQ ID NO: 2351
gacaguaagcaguggaaca

SEQ ID NO: 182397 - RNA, 19 nt, Artificial Sequence
  Description of Artificial Sequence: Synthetic oligonucleotide
  Antisense strand to SEQ ID NO: 182396
uguuccacugcuuacuguc

SEQ ID NO: 182398 - RNA, 19 nt, Artificial Sequence
  Description of Artificial Sequence: Synthetic oligonucleotide
  Sense strand starting at position 1149 of SEQ ID NO: 2351
guuuaagcccaaggacauu

SEQ ID NO: 182399 - RNA, 19 nt, Artificial Sequence
  Description of Artificial Sequence: Synthetic oligonucleotide
  Antisense strand to SEQ ID NO: 182398
aauguccuugggcuuaaac

SEQ ID NO: 182400 - RNA, 19 nt, Artificial Sequence
  Description of Artificial Sequence: Synthetic oligonucleotide
  Sense strand starting at position 1010 of SEQ ID NO: 2351
ggaagcacucuauaccuuu

SEQ ID NO: 182401 - RNA, 19 nt, Artificial Sequence
  Description of Artificial Sequence: Synthetic oligonucleotide
  Antisense strand to SEQ ID NO: 182400
aaagguauagagugcuucc

SEQ ID NO: 182402 - RNA, 19 nt, Artificial Sequence
  Description of Artificial Sequence: Synthetic oligonucleotide
  Sense strand starting at position 904 of SEQ ID NO: 2351
gcuguuggacuccauaauu

SEQ ID NO: 182403 - RNA, 19 nt, Artificial Sequence
  Description of Artificial Sequence: Synthetic oligonucleotide
  Antisense strand to SEQ ID NO: 182402
aauuauggaguccaacagc

SEQ ID NO: 182404 - RNA, 19 nt, Artificial Sequence
  Description of Artificial Sequence: Synthetic oligonucleotide
  Sense strand starting at position 740 of SEQ ID NO: 2351
uccacauaguuauuaagua

SEQ ID NO: 182405 - RNA, 19 nt, Artificial Sequence
  Description of Artificial Sequence: Synthetic oligonucleotide
  Antisense strand to SEQ ID NO: 182404
uacuuaauaacuaugugga

SEQ ID NO: 182406 - RNA, 19 nt, Artificial Sequence
  Description of Artificial Sequence: Synthetic oligonucleotide
  Sense strand starting at position 627 of SEQ ID NO: 2351
uuuccuauacuugaggagu

SEQ ID NO: 182407 - RNA, 19 nt, Artificial Sequence
  Description of Artificial Sequence: Synthetic oligonucleotide
  Antisense strand to SEQ ID NO: 182406
acuccucaaguauaggaaa

SEQ ID NO: 182408 - RNA, 19 nt, Artificial Sequence
  Description of Artificial Sequence: Synthetic oligonucleotide
  Sense strand starting at position 431 of SEQ ID NO: 2351
gaauguguggcuuauauac

SEQ ID NO: 182409 - RNA, 19 nt, Artificial Sequence
  Description of Artificial Sequence: Synthetic oligonucleotide
  Antisense strand to SEQ ID NO: 182408
guauauaagccacacauuc

SEQ ID NO: 182410 - RNA, 19 nt, Artificial Sequence
  Description of Artificial Sequence: Synthetic oligonucleotide
  Sense strand starting at position 429 of SEQ ID NO: 2351
uagaauguguggcuuauau

SEQ ID NO: 182411 - RNA, 19 nt, Artificial Sequence
  Description of Artificial Sequence: Synthetic oligonucleotide
  Antisense strand to SEQ ID NO: 182410
auauaagccacacauucua

SEQ ID NO: 182412 - RNA, 19 nt, Artificial Sequence
  Description of Artificial Sequence: Synthetic oligonucleotide
  Sense strand starting at position 425 of SEQ ID NO: 2351
agauuagaauguguggcuu

SEQ ID NO: 182413 - RNA, 19 nt, Artificial Sequence
  Description of Artificial Sequence: Synthetic oligonucleotide
  Antisense strand to SEQ ID NO: 182412
aagccacacauucuaaucu

SEQ ID NO: 182414 - RNA, 19 nt, Artificial Sequence
  Description of Artificial Sequence: Synthetic oligonucleotide
  Sense strand starting at position 384 of SEQ ID NO: 2351
aaaucauaaguguggaaau

SEQ ID NO: 182415 - RNA, 19 nt, Artificial Sequence
  Description of Artificial Sequence: Synthetic oligonucleotide
  Antisense strand to SEQ ID NO: 182414
auuuccacacuuaugauuu

SEQ ID NO: 182416 - RNA, 19 nt, Artificial Sequence
  Description of Artificial Sequence: Synthetic oligonucleotide
  Sense strand starting at position 314 of SEQ ID NO: 2351
aguguuacaugucuuauuu

SEQ ID NO: 182417 - RNA, 19 nt, Artificial Sequence
  Description of Artificial Sequence: Synthetic oligonucleotide
  Antisense strand to SEQ ID NO: 182416
aaauaagacauguaacacu

SEQ ID NO: 182418 - RNA, 19 nt, Artificial Sequence
  Description of Artificial Sequence: Synthetic oligonucleotide
  Sense strand starting at position 311 of SEQ ID NO: 2351
ggaaguguuacaugucuua

SEQ ID NO: 182419 - RNA, 19 nt, Artificial Sequence
  Description of Artificial Sequence: Synthetic oligonucleotide
  Antisense strand to SEQ ID NO: 182418
uaagacauguaacacuucc

SEQ ID NO: 182420 - RNA, 19 nt, Artificial Sequence
  Description of Artificial Sequence: Synthetic oligonucleotide
  Sense strand starting at position 161 of SEQ ID NO: 2351
agugauacccuugaaguua

SEQ ID NO: 182421 - RNA, 19 nt, Artificial Sequence
  Description of Artificial Sequence: Synthetic oligonucleotide
  Antisense strand to SEQ ID NO: 182420
uaacuucaaggguaucacu

SEQ ID NO: 182422 - RNA, 19 nt, Artificial Sequence
  Description of Artificial Sequence: Synthetic oligonucleotide
  Sense strand starting at position 160 of SEQ ID NO: 2351
cagugauacccuugaaguu

SEQ ID NO: 182423 - RNA, 19 nt, Artificial Sequence
  Description of Artificial Sequence: Synthetic oligonucleotide
  Antisense strand to SEQ ID NO: 182422
aacuucaaggguaucacug

SEQ ID NO: 182424 - RNA, 19 nt, Artificial Sequence
  Description of Artificial Sequence: Synthetic oligonucleotide
  Sense strand starting at position 29 of SEQ ID NO: 2351
ugggcuaauaaugguauaa

SEQ ID NO: 182425 - RNA, 19 nt, Artificial Sequence
  Description of Artificial Sequence: Synthetic oligonucleotide
  Antisense strand to SEQ ID NO: 182424
uuauaccauuauuagccca

SEQ ID NO: 182426 - RNA, 19 nt, Artificial Sequence
  Description of Artificial Sequence: Synthetic oligonucleotide
  Sense strand starting at position 3913 of SEQ ID NO: 2352
cuuggugaauuugccuauu

SEQ ID NO: 182427 - RNA, 19 nt, Artificial Sequence
  Description of Artificial Sequence: Synthetic oligonucleotide
  Antisense strand to SEQ ID NO: 182426
aauaggcaaauucaccaag

SEQ ID NO: 182428 - RNA, 19 nt, Artificial Sequence
  Description of Artificial Sequence: Synthetic oligonucleotide
  Sense strand starting at position 3905 of SEQ ID NO: 2352
ccuucugucuuggugaauu

SEQ ID NO: 182429 - RNA, 19 nt, Artificial Sequence
  Description of Artificial Sequence: Synthetic oligonucleotide
  Antisense strand to SEQ ID NO: 182428
aauucaccaagacagaagg

SEQ ID NO: 182430 - RNA, 19 nt, Artificial Sequence
  Description of Artificial Sequence: Synthetic oligonucleotide
  Sense strand starting at position 3904 of SEQ ID NO: 2352
accuucugucuuggugaau

SEQ ID NO: 182431 - RNA, 19 nt, Artificial Sequence
  Description of Artificial Sequence: Synthetic oligonucleotide
  Antisense strand to SEQ ID NO: 182430
auucaccaagacagaaggu

SEQ ID NO: 182432 - RNA, 19 nt, Artificial Sequence
  Description of Artificial Sequence: Synthetic oligonucleotide
  Sense strand starting at position 3668 of SEQ ID NO: 2352
ucaagagguccggaguuua

SEQ ID NO: 182433 - RNA, 19 nt, Artificial Sequence
  Description of Artificial Sequence: Synthetic oligonucleotide
  Antisense strand to SEQ ID NO: 182432
uaaacuccggaccucuuga

SEQ ID NO: 182434 - RNA, 19 nt, Artificial Sequence
  Description of Artificial Sequence: Synthetic oligonucleotide
  Sense strand starting at position 3529 of SEQ ID NO: 2352
agucauccucacuguccaa

SEQ ID NO: 182435 - RNA, 19 nt, Artificial Sequence
  Description of Artificial Sequence: Synthetic oligonucleotide
  Antisense strand to SEQ ID NO: 182434
uuggacagugaggaugacu

SEQ ID NO: 182436 - RNA, 19 nt, Artificial Sequence
  Description of Artificial Sequence: Synthetic oligonucleotide
  Sense strand starting at position 3412 of SEQ ID NO: 2352
ccuggugacauugauguua

SEQ ID NO: 182437 - RNA, 19 nt, Artificial Sequence
  Description of Artificial Sequence: Synthetic oligonucleotide
  Antisense strand to SEQ ID NO: 182436
uaacaucaaugucaccagg

SEQ ID NO: 182438 - RNA, 19 nt, Artificial Sequence
  Description of Artificial Sequence: Synthetic oligonucleotide
  Sense strand starting at position 3385 of SEQ ID NO: 2352
aauucuguguaagccagaa

SEQ ID NO: 182439 - RNA, 19 nt, Artificial Sequence
  Description of Artificial Sequence: Synthetic oligonucleotide
  Antisense strand to SEQ ID NO: 182438
uucuggcuuacacagaauu

SEQ ID NO: 182440 - RNA, 19 nt, Artificial Sequence
  Description of Artificial Sequence: Synthetic oligonucleotide
  Sense strand starting at position 3382 of SEQ ID NO: 2352
aggaauucuguguaagcca

SEQ ID NO: 182441 - RNA, 19 nt, Artificial Sequence
  Description of Artificial Sequence: Synthetic oligonucleotide
  Antisense strand to SEQ ID NO: 182440
uggcuuacacagaauuccu

SEQ ID NO: 182442 - RNA, 19 nt, Artificial Sequence
  Description of Artificial Sequence: Synthetic oligonucleotide
  Sense strand starting at position 3380 of SEQ ID NO: 2352
aaaggaauucuguguaagc

SEQ ID NO: 182443 - RNA, 19 nt, Artificial Sequence
  Description of Artificial Sequence: Synthetic oligonucleotide
  Antisense strand to SEQ ID NO: 182442
gcuuacacagaauuccuuu

SEQ ID NO: 182444 - RNA, 19 nt, Artificial Sequence
  Description of Artificial Sequence: Synthetic oligonucleotide
  Sense strand starting at position 3364 of SEQ ID NO: 2352
uuaucugcucuccaggaaa

SEQ ID NO: 182445 - RNA, 19 nt, Artificial Sequence
  Description of Artificial Sequence: Synthetic oligonucleotide
  Antisense strand to SEQ ID NO: 182444
uuuccuggagagcagauaa

SEQ ID NO: 182446 - RNA, 19 nt, Artificial Sequence
  Description of Artificial Sequence: Synthetic oligonucleotide
  Sense strand starting at position 3363 of SEQ ID NO: 2352
auuaucugcucuccaggaa

SEQ ID NO: 182447 - RNA, 19 nt, Artificial Sequence
  Description of Artificial Sequence: Synthetic oligonucleotide
  Antisense strand to SEQ ID NO: 182446
uuccuggagagcagauaau

SEQ ID NO: 182448 - RNA, 19 nt, Artificial Sequence
  Description of Artificial Sequence: Synthetic oligonucleotide
  Sense strand starting at position 3295 of SEQ ID NO: 2352
uaaggaauuugugaguaaa

SEQ ID NO: 182449 - RNA, 19 nt, Artificial Sequence
  Description of Artificial Sequence: Synthetic oligonucleotide
  Antisense strand to SEQ ID NO: 182448
uuuacucacaaauuccuua

SEQ ID NO: 182450 - RNA, 19 nt, Artificial Sequence
  Description of Artificial Sequence: Synthetic oligonucleotide
  Sense strand starting at position 3286 of SEQ ID NO: 2352
cuagauauguaaggaauuu

SEQ ID NO: 182451 - RNA, 19 nt, Artificial Sequence
  Description of Artificial Sequence: Synthetic oligonucleotide
  Antisense strand to SEQ ID NO: 182450
aaauuccuuacauaucuag

SEQ ID NO: 182452 - RNA, 19 nt, Artificial Sequence
  Description of Artificial Sequence: Synthetic oligonucleotide
  Sense strand starting at position 3181 of SEQ ID NO: 2352
cgaagacuauaaguggauu

SEQ ID NO: 182453 - RNA, 19 nt, Artificial Sequence
  Description of Artificial Sequence: Synthetic oligonucleotide
  Antisense strand to SEQ ID NO: 182452
aauccacuuauagucuucg

SEQ ID NO: 182454 - RNA, 19 nt, Artificial Sequence
  Description of Artificial Sequence: Synthetic oligonucleotide
  Sense strand starting at position 3145 of SEQ ID NO: 2352
guaacaguaccaugaaauu

SEQ ID NO: 182455 - RNA, 19 nt, Artificial Sequence
  Description of Artificial Sequence: Synthetic oligonucleotide
  Antisense strand to SEQ ID NO: 182454
aauuucaugguacuguuac

SEQ ID NO: 182456 - RNA, 19 nt, Artificial Sequence
  Description of Artificial Sequence: Synthetic oligonucleotide
  Sense strand starting at position 3125 of SEQ ID NO: 2352
aucuaaguugagcgaucaa

SEQ ID NO: 182457 - RNA, 19 nt, Artificial Sequence
  Description of Artificial Sequence: Synthetic oligonucleotide
  Antisense strand to SEQ ID NO: 182456
uugaucgcucaacuuagau

SEQ ID NO: 182458 - RNA, 19 nt, Artificial Sequence
  Description of Artificial Sequence: Synthetic oligonucleotide
  Sense strand starting at position 3124 of SEQ ID NO: 2352
aaucuaaguugagcgauca

SEQ ID NO: 182459 - RNA, 19 nt, Artificial Sequence
  Description of Artificial Sequence: Synthetic oligonucleotide
  Antisense strand to SEQ ID NO: 182458
ugaucgcucaacuuagauu

SEQ ID NO: 182460 - RNA, 19 nt, Artificial Sequence
  Description of Artificial Sequence: Synthetic oligonucleotide
  Sense strand starting at position 2621 of SEQ ID NO: 2352
uagagauacuuccuggguu

SEQ ID NO: 182461 - RNA, 19 nt, Artificial Sequence
  Description of Artificial Sequence: Synthetic oligonucleotide
  Antisense strand to SEQ ID NO: 182460
aacccaggaaguaucucua

SEQ ID NO: 182462 - RNA, 19 nt, Artificial Sequence
  Description of Artificial Sequence: Synthetic oligonucleotide
  Sense strand starting at position 2497 of SEQ ID NO: 2352
accguauugagcgcucauu

SEQ ID NO: 182463 - RNA, 19 nt, Artificial Sequence
  Description of Artificial Sequence: Synthetic oligonucleotide
  Antisense strand to SEQ ID NO: 182462
aaugagcgcucaauacggu

SEQ ID NO: 182464 - RNA, 19 nt, Artificial Sequence
  Description of Artificial Sequence: Synthetic oligonucleotide
  Sense strand starting at position 2489 of SEQ ID NO: 2352
cgugaucuaccguauugag

SEQ ID NO: 182465 - RNA, 19 nt, Artificial Sequence
  Description of Artificial Sequence: Synthetic oligonucleotide
  Antisense strand to SEQ ID NO: 182464
cucaauacgguagaucacg

SEQ ID NO: 182466 - RNA, 19 nt, Artificial Sequence
  Description of Artificial Sequence: Synthetic oligonucleotide
  Sense strand starting at position 1149 of SEQ ID NO: 2352
gagucacguuauucuugga

SEQ ID NO: 182467 - RNA, 19 nt, Artificial Sequence
  Description of Artificial Sequence: Synthetic oligonucleotide
  Antisense strand to SEQ ID NO: 182466
uccaagaauaacgugacuc

SEQ ID NO: 182468 - RNA, 19 nt, Artificial Sequence
  Description of Artificial Sequence: Synthetic oligonucleotide
  Sense strand starting at position 1060 of SEQ ID NO: 2352
aaagaacacucggaaagaa

SEQ ID NO: 182469 - RNA, 19 nt, Artificial Sequence
  Description of Artificial Sequence: Synthetic oligonucleotide
  Antisense strand to SEQ ID NO: 182468
uucuuuccgaguguucuuu

SEQ ID NO: 182470 - RNA, 19 nt, Artificial Sequence
  Description of Artificial Sequence: Synthetic oligonucleotide
  Sense strand starting at position 997 of SEQ ID NO: 2352
uucgcauacccugaagaaa

SEQ ID NO: 182471 - RNA, 19 nt, Artificial Sequence
  Description of Artificial Sequence: Synthetic oligonucleotide
  Antisense strand to SEQ ID NO: 182470
uuucuucaggguaugcgaa

SEQ ID NO: 182472 - RNA, 19 nt, Artificial Sequence
  Description of Artificial Sequence: Synthetic oligonucleotide
  Sense strand starting at position 996 of SEQ ID NO: 2352
guucgcauacccugaagaa

SEQ ID NO: 182473 - RNA, 19 nt, Artificial Sequence
  Description of Artificial Sequence: Synthetic oligonucleotide
  Antisense strand to SEQ ID NO: 182472
uucuucaggguaugcgaac

SEQ ID NO: 182474 - RNA, 19 nt, Artificial Sequence
  Description of Artificial Sequence: Synthetic oligonucleotide
  Sense strand starting at position 788 of SEQ ID NO: 2352
agaaucugucuguaaacca

SEQ ID NO: 182475 - RNA, 19 nt, Artificial Sequence
  Description of Artificial Sequence: Synthetic oligonucleotide
  Antisense strand to SEQ ID NO: 182474
ugguuuacagacagauucu

SEQ ID NO: 182476 - RNA, 19 nt, Artificial Sequence
  Description of Artificial Sequence: Synthetic oligonucleotide
  Sense strand starting at position 783 of SEQ ID NO: 2352
aucaaagaaucugucugua

SEQ ID NO: 182477 - RNA, 19 nt, Artificial Sequence
  Description of Artificial Sequence: Synthetic oligonucleotide
  Antisense strand to SEQ ID NO: 182476
uacagacagauucuuugau

SEQ ID NO: 182478 - RNA, 19 nt, Artificial Sequence
  Description of Artificial Sequence: Synthetic oligonucleotide
  Sense strand starting at position 745 of SEQ ID NO: 2352
uucucuaaacuguggagaa

SEQ ID NO: 182479 - RNA, 19 nt, Artificial Sequence
  Description of Artificial Sequence: Synthetic oligonucleotide
  Antisense strand to SEQ ID NO: 182478
uucuccacaguuuagagaa

SEQ ID NO: 182480 - RNA, 19 nt, Artificial Sequence
  Description of Artificial Sequence: Synthetic oligonucleotide
  Sense strand starting at position 707 of SEQ ID NO: 2352
ucauuaguggucuauuaag

SEQ ID NO: 182481 - RNA, 19 nt, Artificial Sequence
  Description of Artificial Sequence: Synthetic oligonucleotide
  Antisense strand to SEQ ID NO: 182480
cuuaauagaccacuaauga

SEQ ID NO: 182482 - RNA, 19 nt, Artificial Sequence
  Description of Artificial Sequence: Synthetic oligonucleotide
  Sense strand starting at position 705 of SEQ ID NO: 2352
agucauuaguggucuauua

SEQ ID NO: 182483 - RNA, 19 nt, Artificial Sequence
  Description of Artificial Sequence: Synthetic oligonucleotide
  Antisense strand to SEQ ID NO: 182482
uaauagaccacuaaugacu

SEQ ID NO: 182484 - RNA, 19 nt, Artificial Sequence
  Description of Artificial Sequence: Synthetic oligonucleotide
  Sense strand starting at position 699 of SEQ ID NO: 2352
gccagaagucauuaguggu

SEQ ID NO: 182485 - RNA, 19 nt, Artificial Sequence
  Description of Artificial Sequence: Synthetic oligonucleotide
  Antisense strand to SEQ ID NO: 182484
accacuaaugacuucuggc

SEQ ID NO: 182486 - RNA, 19 nt, Artificial Sequence
  Description of Artificial Sequence: Synthetic oligonucleotide
  Sense strand starting at position 678 of SEQ ID NO: 2352
gauagaauguaacagaaga

SEQ ID NO: 182487 - RNA, 19 nt, Artificial Sequence
  Description of Artificial Sequence: Synthetic oligonucleotide
  Antisense strand to SEQ ID NO: 182486
ucuucuguuacauucuauc

SEQ ID NO: 182488 - RNA, 19 nt, Artificial Sequence
  Description of Artificial Sequence: Synthetic oligonucleotide
  Sense strand starting at position 544 of SEQ ID NO: 2352
agaaguagaucuguauaac

SEQ ID NO: 182489 - RNA, 19 nt, Artificial Sequence
  Description of Artificial Sequence: Synthetic oligonucleotide
  Antisense strand to SEQ ID NO: 182488
guuauacagaucuacuucu

SEQ ID NO: 182490 - RNA, 19 nt, Artificial Sequence
  Description of Artificial Sequence: Synthetic oligonucleotide
  Sense strand starting at position 404 of SEQ ID NO: 2352
aagggaagcuccuaauuug

SEQ ID NO: 182491 - RNA, 19 nt, Artificial Sequence
  Description of Artificial Sequence: Synthetic oligonucleotide
  Antisense strand to SEQ ID NO: 182490
caaauuaggagcuucccuu

SEQ ID NO: 182492 - RNA, 19 nt, Artificial Sequence
  Description of Artificial Sequence: Synthetic oligonucleotide
  Sense strand starting at position 318 of SEQ ID NO: 2352
ccuaauacuguagggaagu

SEQ ID NO: 182493 - RNA, 19 nt, Artificial Sequence
  Description of Artificial Sequence: Synthetic oligonucleotide
  Antisense strand to SEQ ID NO: 182492
acuucccuacaguauuagg

SEQ ID NO: 182494 - RNA, 19 nt, Artificial Sequence
  Description of Artificial Sequence: Synthetic oligonucleotide
  Sense strand starting at position 303 of SEQ ID NO: 2352
auggaugacugcuuuccua

SEQ ID NO: 182495 - RNA, 19 nt, Artificial Sequence
  Description of Artificial Sequence: Synthetic oligonucleotide
  Antisense strand to SEQ ID NO: 182494
uaggaaagcagucauccau

SEQ ID NO: 182496 - RNA, 19 nt, Artificial Sequence
  Description of Artificial Sequence: Synthetic oligonucleotide
  Sense strand starting at position 280 of SEQ ID NO: 2352
agucuuguaguacaaucaa

SEQ ID NO: 182497 - RNA, 19 nt, Artificial Sequence
  Description of Artificial Sequence: Synthetic oligonucleotide
  Antisense strand to SEQ ID NO: 182496
uugauuguacuacaagacu

SEQ ID NO: 182498 - RNA, 19 nt, Artificial Sequence
  Description of Artificial Sequence: Synthetic oligonucleotide
  Sense strand starting at position 247 of SEQ ID NO: 2352
cuaaguacucuguagcuaa

SEQ ID NO: 182499 - RNA, 19 nt, Artificial Sequence
  Description of Artificial Sequence: Synthetic oligonucleotide
  Antisense strand to SEQ ID NO: 182498
uuagcuacagaguacuuag

SEQ ID NO: 182500 - RNA, 19 nt, Artificial Sequence
  Description of Artificial Sequence: Synthetic oligonucleotide
  Sense strand starting at position 207 of SEQ ID NO: 2352
uguccuaucccaggagaau

SEQ ID NO: 182501 - RNA, 19 nt, Artificial Sequence
  Description of Artificial Sequence: Synthetic oligonucleotide
  Antisense strand to SEQ ID NO: 182500
auucuccugggauaggaca

SEQ ID NO: 182502 - RNA, 19 nt, Artificial Sequence
  Description of Artificial Sequence: Synthetic oligonucleotide
  Sense strand starting at position 23 of SEQ ID NO: 2352
uuuccuaccgaaugaaaga

SEQ ID NO: 182503 - RNA, 19 nt, Artificial Sequence
  Description of Artificial Sequence: Synthetic oligonucleotide
  Antisense strand to SEQ ID NO: 182502
ucuuucauucgguaggaaa

SEQ ID NO: 182504 - RNA, 19 nt, Artificial Sequence
  Description of Artificial Sequence: Synthetic oligonucleotide
  Sense strand starting at position 19 of SEQ ID NO: 2352
gagauuuccuaccgaauga

SEQ ID NO: 182505 - RNA, 19 nt, Artificial Sequence
  Description of Artificial Sequence: Synthetic oligonucleotide
  Antisense strand to SEQ ID NO: 182504
ucauucgguaggaaaucuc

SEQ ID NO: 182506 - RNA, 19 nt, Artificial Sequence
  Description of Artificial Sequence: Synthetic oligonucleotide
  Sense strand starting at position 3951 of SEQ ID NO: 2353
aucucuugagcucagguua

SEQ ID NO: 182507 - RNA, 19 nt, Artificial Sequence
  Description of Artificial Sequence: Synthetic oligonucleotide
  Antisense strand to SEQ ID NO: 182506
uaaccugagcucaagagau

SEQ ID NO: 182508 - RNA, 19 nt, Artificial Sequence
  Description of Artificial Sequence: Synthetic oligonucleotide
  Sense strand starting at position 3619 of SEQ ID NO: 2353
gugauaaugugugccugua

SEQ ID NO: 182509 - RNA, 19 nt, Artificial Sequence
  Description of Artificial Sequence: Synthetic oligonucleotide
  Antisense strand to SEQ ID NO: 182508
uacaggcacacauuaucac

SEQ ID NO: 182510 - RNA, 19 nt, Artificial Sequence
  Description of Artificial Sequence: Synthetic oligonucleotide
  Sense strand starting at position 3618 of SEQ ID NO: 2353
ggugauaaugugugccugu

SEQ ID NO: 182511 - RNA, 19 nt, Artificial Sequence
  Description of Artificial Sequence: Synthetic oligonucleotide
  Antisense strand to SEQ ID NO: 182510
acaggcacacauuaucacc

SEQ ID NO: 182512 - RNA, 19 nt, Artificial Sequence
  Description of Artificial Sequence: Synthetic oligonucleotide
  Sense strand starting at position 3494 of SEQ ID NO: 2353
uuguaaacuguaugcuaca

SEQ ID NO: 182513 - RNA, 19 nt, Artificial Sequence
  Description of Artificial Sequence: Synthetic oligonucleotide
  Antisense strand to SEQ ID NO: 182512
uguagcauacaguuuacaa

SEQ ID NO: 182514 - RNA, 19 nt, Artificial Sequence
  Description of Artificial Sequence: Synthetic oligonucleotide
  Sense strand starting at position 3467 of SEQ ID NO: 2353
agaguccuguacuguauau

SEQ ID NO: 182515 - RNA, 19 nt, Artificial Sequence
  Description of Artificial Sequence: Synthetic oligonucleotide
  Antisense strand to SEQ ID NO: 182514
auauacaguacaggacucu

SEQ ID NO: 182516 - RNA, 19 nt, Artificial Sequence
  Description of Artificial Sequence: Synthetic oligonucleotide
  Sense strand starting at position 3464 of SEQ ID NO: 2353
aauagaguccuguacugua

SEQ ID NO: 182517 - RNA, 19 nt, Artificial Sequence
  Description of Artificial Sequence: Synthetic oligonucleotide
  Antisense strand to SEQ ID NO: 182516
uacaguacaggacucuauu

SEQ ID NO: 182518 - RNA, 19 nt, Artificial Sequence
  Description of Artificial Sequence: Synthetic oligonucleotide
  Sense strand starting at position 3462 of SEQ ID NO: 2353
acaauagaguccuguacug

SEQ ID NO: 182519 - RNA, 19 nt, Artificial Sequence
  Description of Artificial Sequence: Synthetic oligonucleotide
  Antisense strand to SEQ ID NO: 182518
caguacaggacucuauugu

SEQ ID NO: 182520 - RNA, 19 nt, Artificial Sequence
  Description of Artificial Sequence: Synthetic oligonucleotide
  Sense strand starting at position 3428 of SEQ ID NO: 2353
aaagcauacugugagaacu

SEQ ID NO: 182521 - RNA, 19 nt, Artificial Sequence
  Description of Artificial Sequence: Synthetic oligonucleotide
  Antisense strand to SEQ ID NO: 182520
aguucucacaguaugcuuu

SEQ ID NO: 182522 - RNA, 19 nt, Artificial Sequence
  Description of Artificial Sequence: Synthetic oligonucleotide
  Sense strand starting at position 3425 of SEQ ID NO: 2353
aagaaagcauacugugaga

SEQ ID NO: 182523 - RNA, 19 nt, Artificial Sequence
  Description of Artificial Sequence: Synthetic oligonucleotide
  Antisense strand to SEQ ID NO: 182522
ucucacaguaugcuuucuu

SEQ ID NO: 182524 - RNA, 19 nt, Artificial Sequence
  Description of Artificial Sequence: Synthetic oligonucleotide
  Sense strand starting at position 3387 of SEQ ID NO: 2353
uugaucaauugggaccaua

SEQ ID NO: 182525 - RNA, 19 nt, Artificial Sequence
  Description of Artificial Sequence: Synthetic oligonucleotide
  Antisense strand to SEQ ID NO: 182524
uauggucccaauugaucaa

SEQ ID NO: 182526 - RNA, 19 nt, Artificial Sequence
  Description of Artificial Sequence: Synthetic oligonucleotide
  Sense strand starting at position 3373 of SEQ ID NO: 2353
cugaacuaugcucauugau

SEQ ID NO: 182527 - RNA, 19 nt, Artificial Sequence
  Description of Artificial Sequence: Synthetic oligonucleotide
  Antisense strand to SEQ ID NO: 182526
aucaaugagcauaguucag

SEQ ID NO: 182528 - RNA, 19 nt, Artificial Sequence
  Description of Artificial Sequence: Synthetic oligonucleotide
  Sense strand starting at position 3372 of SEQ ID NO: 2353
ucugaacuaugcucauuga

SEQ ID NO: 182529 - RNA, 19 nt, Artificial Sequence
  Description of Artificial Sequence: Synthetic oligonucleotide
  Antisense strand to SEQ ID NO: 182528
ucaaugagcauaguucaga

SEQ ID NO: 182530 - RNA, 19 nt, Artificial Sequence
  Description of Artificial Sequence: Synthetic oligonucleotide
  Sense strand starting at position 3369 of SEQ ID NO: 2353
augucugaacuaugcucau

SEQ ID NO: 182531 - RNA, 19 nt, Artificial Sequence
  Description of Artificial Sequence: Synthetic oligonucleotide
  Antisense strand to SEQ ID NO: 182530
augagcauaguucagacau

SEQ ID NO: 182532 - RNA, 19 nt, Artificial Sequence
  Description of Artificial Sequence: Synthetic oligonucleotide
  Sense strand starting at position 3293 of SEQ ID NO: 2353
uagugaaguucugacauau

SEQ ID NO: 182533 - RNA, 19 nt, Artificial Sequence
  Description of Artificial Sequence: Synthetic oligonucleotide
  Antisense strand to SEQ ID NO: 182532
auaugucagaacuucacua

SEQ ID NO: 182534 - RNA, 19 nt, Artificial Sequence
  Description of Artificial Sequence: Synthetic oligonucleotide
  Sense strand starting at position 3284 of SEQ ID NO: 2353
uugacaaacuagugaaguu

SEQ ID NO: 182535 - RNA, 19 nt, Artificial Sequence
  Description of Artificial Sequence: Synthetic oligonucleotide
  Antisense strand to SEQ ID NO: 182534
aacuucacuaguuugucaa

SEQ ID NO: 182536 - RNA, 19 nt, Artificial Sequence
  Description of Artificial Sequence: Synthetic oligonucleotide
  Sense strand starting at position 3274 of SEQ ID NO: 2353
gcuuguagccuugacaaac

SEQ ID NO: 182537 - RNA, 19 nt, Artificial Sequence
  Description of Artificial Sequence: Synthetic oligonucleotide
  Antisense strand to SEQ ID NO: 182536
guuugucaaggcuacaagc

SEQ ID NO: 182538 - RNA, 19 nt, Artificial Sequence
  Description of Artificial Sequence: Synthetic oligonucleotide
  Sense strand starting at position 3271 of SEQ ID NO: 2353
gucgcuuguagccuugaca

SEQ ID NO: 182539 - RNA, 19 nt, Artificial Sequence
  Description of Artificial Sequence: Synthetic oligonucleotide
  Antisense strand to SEQ ID NO: 182538
ugucaaggcuacaagcgac

SEQ ID NO: 182540 - RNA, 19 nt, Artificial Sequence
  Description of Artificial Sequence: Synthetic oligonucleotide
  Sense strand starting at position 3243 of SEQ ID NO: 2353
gcaaauuauuauccaguug

SEQ ID NO: 182541 - RNA, 19 nt, Artificial Sequence
  Description of Artificial Sequence: Synthetic oligonucleotide
  Antisense strand to SEQ ID NO: 182540
caacuggauaauaauuugc

SEQ ID NO: 182542 - RNA, 19 nt, Artificial Sequence
  Description of Artificial Sequence: Synthetic oligonucleotide
  Sense strand starting at position 3242 of SEQ ID NO: 2353
ggcaaauuauuauccaguu

SEQ ID NO: 182543 - RNA, 19 nt, Artificial Sequence
  Description of Artificial Sequence: Synthetic oligonucleotide
  Antisense strand to SEQ ID NO: 182542
aacuggauaauaauuugcc

SEQ ID NO: 182544 - RNA, 19 nt, Artificial Sequence
  Description of Artificial Sequence: Synthetic oligonucleotide
  Sense strand starting at position 2656 of SEQ ID NO: 2353
gucgucuagacuuaagaaa

SEQ ID NO: 182545 - RNA, 19 nt, Artificial Sequence
  Description of Artificial Sequence: Synthetic oligonucleotide
  Antisense strand to SEQ ID NO: 182544
uuucuuaagucuagacgac

SEQ ID NO: 182546 - RNA, 19 nt, Artificial Sequence
  Description of Artificial Sequence: Synthetic oligonucleotide
  Sense strand starting at position 2652 of SEQ ID NO: 2353
cuaagucgucuagacuuaa

SEQ ID NO: 182547 - RNA, 19 nt, Artificial Sequence
  Description of Artificial Sequence: Synthetic oligonucleotide
  Antisense strand to SEQ ID NO: 182546
uuaagucuagacgacuuag

SEQ ID NO: 182548 - RNA, 19 nt, Artificial Sequence
  Description of Artificial Sequence: Synthetic oligonucleotide
  Sense strand starting at position 2650 of SEQ ID NO: 2353
ugcuaagucgucuagacuu

SEQ ID NO: 182549 - RNA, 19 nt, Artificial Sequence
  Description of Artificial Sequence: Synthetic oligonucleotide
  Antisense strand to SEQ ID NO: 182548
aagucuagacgacuuagca

SEQ ID NO: 182550 - RNA, 19 nt, Artificial Sequence
  Description of Artificial Sequence: Synthetic oligonucleotide
  Sense strand starting at position 2648 of SEQ ID NO: 2353
acugcuaagucgucuagac

SEQ ID NO: 182551 - RNA, 19 nt, Artificial Sequence
  Description of Artificial Sequence: Synthetic oligonucleotide
  Antisense strand to SEQ ID NO: 182550
gucuagacgacuuagcagu

SEQ ID NO: 182552 - RNA, 19 nt, Artificial Sequence
  Description of Artificial Sequence: Synthetic oligonucleotide
  Sense strand starting at position 2599 of SEQ ID NO: 2353
ugcccauggugggagaauu

SEQ ID NO: 182553 - RNA, 19 nt, Artificial Sequence
  Description of Artificial Sequence: Synthetic oligonucleotide
  Antisense strand to SEQ ID NO: 182552
aauucucccaccaugggca

SEQ ID NO: 182554 - RNA, 19 nt, Artificial Sequence
  Description of Artificial Sequence: Synthetic oligonucleotide
  Sense strand starting at position 2590 of SEQ ID NO: 2353
cuugaaaucugcccauggu

SEQ ID NO: 182555 - RNA, 19 nt, Artificial Sequence
  Description of Artificial Sequence: Synthetic oligonucleotide
  Antisense strand to SEQ ID NO: 182554
accaugggcagauuucaag

SEQ ID NO: 182556 - RNA, 19 nt, Artificial Sequence
  Description of Artificial Sequence: Synthetic oligonucleotide
  Sense strand starting at position 2522 of SEQ ID NO: 2353
ggaaauacucuaugaugug

SEQ ID NO: 182557 - RNA, 19 nt, Artificial Sequence
  Description of Artificial Sequence: Synthetic oligonucleotide
  Antisense strand to SEQ ID NO: 182556
cacaucauagaguauuucc

SEQ ID NO: 182558 - RNA, 19 nt, Artificial Sequence
  Description of Artificial Sequence: Synthetic oligonucleotide
  Sense strand starting at position 2509 of SEQ ID NO: 2353
auaucugcaccguggaaau

SEQ ID NO: 182559 - RNA, 19 nt, Artificial Sequence
  Description of Artificial Sequence: Synthetic oligonucleotide
  Antisense strand to SEQ ID NO: 182558
auuuccacggugcagauau

SEQ ID NO: 182560 - RNA, 19 nt, Artificial Sequence
  Description of Artificial Sequence: Synthetic oligonucleotide
  Sense strand starting at position 2507 of SEQ ID NO: 2353
ucauaucugcaccguggaa

SEQ ID NO: 182561 - RNA, 19 nt, Artificial Sequence
  Description of Artificial Sequence: Synthetic oligonucleotide
  Antisense strand to SEQ ID NO: 182560
uuccacggugcagauauga

SEQ ID NO: 182562 - RNA, 19 nt, Artificial Sequence
  Description of Artificial Sequence: Synthetic oligonucleotide
  Sense strand starting at position 2477 of SEQ ID NO: 2353
gccugcugugugcauacau

SEQ ID NO: 182563 - RNA, 19 nt, Artificial Sequence
  Description of Artificial Sequence: Synthetic oligonucleotide
  Antisense strand to SEQ ID NO: 182562
auguaugcacacagcaggc

SEQ ID NO: 182564 - RNA, 19 nt, Artificial Sequence
  Description of Artificial Sequence: Synthetic oligonucleotide
  Sense strand starting at position 2392 of SEQ ID NO: 2353
cguguugcuuuaggacuua

SEQ ID NO: 182565 - RNA, 19 nt, Artificial Sequence
  Description of Artificial Sequence: Synthetic oligonucleotide
  Antisense strand to SEQ ID NO: 182564
uaaguccuaaagcaacacg

SEQ ID NO: 182566 - RNA, 19 nt, Artificial Sequence
  Description of Artificial Sequence: Synthetic oligonucleotide
  Sense strand starting at position 1135 of SEQ ID NO: 2353
uuaccuccuguguagagaa

SEQ ID NO: 182567 - RNA, 19 nt, Artificial Sequence
  Description of Artificial Sequence: Synthetic oligonucleotide
  Antisense strand to SEQ ID NO: 182566
uucucuacacaggagguaa

SEQ ID NO: 182568 - RNA, 19 nt, Artificial Sequence
  Description of Artificial Sequence: Synthetic oligonucleotide
  Sense strand starting at position 1134 of SEQ ID NO: 2353
cuuaccuccuguguagaga

SEQ ID NO: 182569 - RNA, 19 nt, Artificial Sequence
  Description of Artificial Sequence: Synthetic oligonucleotide
  Antisense strand to SEQ ID NO: 182568
ucucuacacaggagguaag

SEQ ID NO: 182570 - RNA, 19 nt, Artificial Sequence
  Description of Artificial Sequence: Synthetic oligonucleotide
  Sense strand starting at position 1022 of SEQ ID NO: 2353
auuaaagcggcuuaaauua

SEQ ID NO: 182571 - RNA, 19 nt, Artificial Sequence
  Description of Artificial Sequence: Synthetic oligonucleotide
  Antisense strand to SEQ ID NO: 182570
uaauuuaagccgcuuuaau

SEQ ID NO: 182572 - RNA, 19 nt, Artificial Sequence
  Description of Artificial Sequence: Synthetic oligonucleotide
  Sense strand starting at position 236 of SEQ ID NO: 2353
cauuauaaaguaugaguga

SEQ ID NO: 182573 - RNA, 19 nt, Artificial Sequence
  Description of Artificial Sequence: Synthetic oligonucleotide
  Antisense strand to SEQ ID NO: 182572
ucacucauacuuuauaaug

SEQ ID NO: 182574 - RNA, 19 nt, Artificial Sequence
  Description of Artificial Sequence: Synthetic oligonucleotide
  Sense strand starting at position 234 of SEQ ID NO: 2353
ggcauuauaaaguaugagu

SEQ ID NO: 182575 - RNA, 19 nt, Artificial Sequence
  Description of Artificial Sequence: Synthetic oligonucleotide
  Antisense strand to SEQ ID NO: 182574
acucauacuuuauaaugcc

SEQ ID NO: 182576 - RNA, 19 nt, Artificial Sequence
  Description of Artificial Sequence: Synthetic oligonucleotide
  Sense strand starting at position 224 of SEQ ID NO: 2353
uugaaacuguggcauuaua

SEQ ID NO: 182577 - RNA, 19 nt, Artificial Sequence
  Description of Artificial Sequence: Synthetic oligonucleotide
  Antisense strand to SEQ ID NO: 182576
uauaaugccacaguuucaa

SEQ ID NO: 182578 - RNA, 19 nt, Artificial Sequence
  Description of Artificial Sequence: Synthetic oligonucleotide
  Sense strand starting at position 222 of SEQ ID NO: 2353
auuugaaacuguggcauua

SEQ ID NO: 182579 - RNA, 19 nt, Artificial Sequence
  Description of Artificial Sequence: Synthetic oligonucleotide
  Antisense strand to SEQ ID NO: 182578
uaaugccacaguuucaaau

SEQ ID NO: 182580 - RNA, 19 nt, Artificial Sequence
  Description of Artificial Sequence: Synthetic oligonucleotide
  Sense strand starting at position 163 of SEQ ID NO: 2353
gcaaacuagcuagaaguaa

SEQ ID NO: 182581 - RNA, 19 nt, Artificial Sequence
  Description of Artificial Sequence: Synthetic oligonucleotide
  Antisense strand to SEQ ID NO: 182580
uuacuucuagcuaguuugc

SEQ ID NO: 182582 - RNA, 19 nt, Artificial Sequence
  Description of Artificial Sequence: Synthetic oligonucleotide
  Sense strand starting at position 140 of SEQ ID NO: 2353
agccucuugcaagaaguca

SEQ ID NO: 182583 - RNA, 19 nt, Artificial Sequence
  Description of Artificial Sequence: Synthetic oligonucleotide
  Antisense strand to SEQ ID NO: 182582
ugacuucuugcaagaggcu

SEQ ID NO: 182584 - RNA, 19 nt, Artificial Sequence
  Description of Artificial Sequence: Synthetic oligonucleotide
  Sense strand starting at position 13 of SEQ ID NO: 2353
ucaugauaauacguaaguu

SEQ ID NO: 182585 - RNA, 19 nt, Artificial Sequence
  Description of Artificial Sequence: Synthetic oligonucleotide
  Antisense strand to SEQ ID NO: 182584
aacuuacguauuaucauga

SEQ ID NO: 182586 - RNA, 19 nt, Artificial Sequence
  Description of Artificial Sequence: Synthetic oligonucleotide
  Sense strand starting at position 3729 of SEQ ID NO: 2354
cuuggacuuuccugaacug

SEQ ID NO: 182587 - RNA, 19 nt, Artificial Sequence
  Description of Artificial Sequence: Synthetic oligonucleotide
  Antisense strand to SEQ ID NO: 182586
caguucaggaaaguccaag

SEQ ID NO: 182588 - RNA, 19 nt, Artificial Sequence
  Description of Artificial Sequence: Synthetic oligonucleotide
  Sense strand starting at position 3720 of SEQ ID NO: 2354
gucaacauccuuggacuuu

SEQ ID NO: 182589 - RNA, 19 nt, Artificial Sequence
  Description of Artificial Sequence: Synthetic oligonucleotide
  Antisense strand to SEQ ID NO: 182588
aaaguccaaggauguugac

SEQ ID NO: 182590 - RNA, 19 nt, Artificial Sequence
  Description of Artificial Sequence: Synthetic oligonucleotide
  Sense strand starting at position 3719 of SEQ ID NO: 2354
ugucaacauccuuggacuu

SEQ ID NO: 182591 - RNA, 19 nt, Artificial Sequence
  Description of Artificial Sequence: Synthetic oligonucleotide
  Antisense strand to SEQ ID NO: 182590
aaguccaaggauguugaca

SEQ ID NO: 182592 - RNA, 19 nt, Artificial Sequence
  Description of Artificial Sequence: Synthetic oligonucleotide
  Sense strand starting at position 3707 of SEQ ID NO: 2354
gcaugaugcuguugucaac

SEQ ID NO: 182593 - RNA, 19 nt, Artificial Sequence
  Description of Artificial Sequence: Synthetic oligonucleotide
  Antisense strand to SEQ ID NO: 182592
guugacaacagcaucaugc

SEQ ID NO: 182594 - RNA, 19 nt, Artificial Sequence
  Description of Artificial Sequence: Synthetic oligonucleotide
  Sense strand starting at position 3533 of SEQ ID NO: 2354
ugagcaacuuuggagaaga

SEQ ID NO: 182595 - RNA, 19 nt, Artificial Sequence
  Description of Artificial Sequence: Synthetic oligonucleotide
  Antisense strand to SEQ ID NO: 182594
ucuucuccaaaguugcuca

SEQ ID NO: 182596 - RNA, 19 nt, Artificial Sequence
  Description of Artificial Sequence: Synthetic oligonucleotide
  Sense strand starting at position 3525 of SEQ ID NO: 2354
uuuagaacugagcaacuuu

SEQ ID NO: 182597 - RNA, 19 nt, Artificial Sequence
  Description of Artificial Sequence: Synthetic oligonucleotide
  Antisense strand to SEQ ID NO: 182596
aaaguugcucaguucuaaa

SEQ ID NO: 182598 - RNA, 19 nt, Artificial Sequence
  Description of Artificial Sequence: Synthetic oligonucleotide
  Sense strand starting at position 3507 of SEQ ID NO: 2354
aggaaaguauugucucauu

SEQ ID NO: 182599 - RNA, 19 nt, Artificial Sequence
  Description of Artificial Sequence: Synthetic oligonucleotide
  Antisense strand to SEQ ID NO: 182598
aaugagacaauacuuuccu

SEQ ID NO: 182600 - RNA, 19 nt, Artificial Sequence
  Description of Artificial Sequence: Synthetic oligonucleotide
  Sense strand starting at position 3505 of SEQ ID NO: 2354
ggaggaaaguauugucuca

SEQ ID NO: 182601 - RNA, 19 nt, Artificial Sequence
  Description of Artificial Sequence: Synthetic oligonucleotide
  Antisense strand to SEQ ID NO: 182600
ugagacaauacuuuccucc

SEQ ID NO: 182602 - RNA, 19 nt, Artificial Sequence
  Description of Artificial Sequence: Synthetic oligonucleotide
  Sense strand starting at position 3494 of SEQ ID NO: 2354
aauuuagccugggaggaaa

SEQ ID NO: 182603 - RNA, 19 nt, Artificial Sequence
  Description of Artificial Sequence: Synthetic oligonucleotide
  Antisense strand to SEQ ID NO: 182602
uuuccucccaggcuaaauu

SEQ ID NO: 182604 - RNA, 19 nt, Artificial Sequence
  Description of Artificial Sequence: Synthetic oligonucleotide
  Sense strand starting at position 3476 of SEQ ID NO: 2354
cuuuauauauguugucaca

SEQ ID NO: 182605 - RNA, 19 nt, Artificial Sequence
  Description of Artificial Sequence: Synthetic oligonucleotide
  Antisense strand to SEQ ID NO: 182604
ugugacaacauauauaaag

SEQ ID NO: 182606 - RNA, 19 nt, Artificial Sequence
  Description of Artificial Sequence: Synthetic oligonucleotide
  Sense strand starting at position 3467 of SEQ ID NO: 2354
ggucaagcccuuuauauau

SEQ ID NO: 182607 - RNA, 19 nt, Artificial Sequence
  Description of Artificial Sequence: Synthetic oligonucleotide
  Antisense strand to SEQ ID NO: 182606
auauauaaagggcuugacc

SEQ ID NO: 182608 - RNA, 19 nt, Artificial Sequence
  Description of Artificial Sequence: Synthetic oligonucleotide
  Sense strand starting at position 3409 of SEQ ID NO: 2354
cugcaacuucugcagcauu

SEQ ID NO: 182609 - RNA, 19 nt, Artificial Sequence
  Description of Artificial Sequence: Synthetic oligonucleotide
  Antisense strand to SEQ ID NO: 182608
aaugcugcagaaguugcag

SEQ ID NO: 182610 - RNA, 19 nt, Artificial Sequence
  Description of Artificial Sequence: Synthetic oligonucleotide
  Sense strand starting at position 3358 of SEQ ID NO: 2354
ccggcucaaaggugaauau

SEQ ID NO: 182611 - RNA, 19 nt, Artificial Sequence
  Description of Artificial Sequence: Synthetic oligonucleotide
  Antisense strand to SEQ ID NO: 182610
auauucaccuuugagccgg

SEQ ID NO: 182612 - RNA, 19 nt, Artificial Sequence
  Description of Artificial Sequence: Synthetic oligonucleotide
  Sense strand starting at position 3234 of SEQ ID NO: 2354
ggaggcuuggcugauccua

SEQ ID NO: 182613 - RNA, 19 nt, Artificial Sequence
  Description of Artificial Sequence: Synthetic oligonucleotide
  Antisense strand to SEQ ID NO: 182612
uaggaucagccaagccucc

SEQ ID NO: 182614 - RNA, 19 nt, Artificial Sequence
  Description of Artificial Sequence: Synthetic oligonucleotide
  Sense strand starting at position 3104 of SEQ ID NO: 2354
ucaggaaugugagugcuga

SEQ ID NO: 182615 - RNA, 19 nt, Artificial Sequence
  Description of Artificial Sequence: Synthetic oligonucleotide
  Antisense strand to SEQ ID NO: 182614
ucagcacucacauuccuga

SEQ ID NO: 182616 - RNA, 19 nt, Artificial Sequence
  Description of Artificial Sequence: Synthetic oligonucleotide
  Sense strand starting at position 3003 of SEQ ID NO: 2354
gucuuuggcuaauagaagu

SEQ ID NO: 182617 - RNA, 19 nt, Artificial Sequence
  Description of Artificial Sequence: Synthetic oligonucleotide
  Antisense strand to SEQ ID NO: 182616
acuucuauuagccaaagac

SEQ ID NO: 182618 - RNA, 19 nt, Artificial Sequence
  Description of Artificial Sequence: Synthetic oligonucleotide
  Sense strand starting at position 3000 of SEQ ID NO: 2354
ccugucuuuggcuaauaga

SEQ ID NO: 182619 - RNA, 19 nt, Artificial Sequence
  Description of Artificial Sequence: Synthetic oligonucleotide
  Antisense strand to SEQ ID NO: 182618
ucuauuagccaaagacagg

SEQ ID NO: 182620 - RNA, 19 nt, Artificial Sequence
  Description of Artificial Sequence: Synthetic oligonucleotide
  Sense strand starting at position 2997 of SEQ ID NO: 2354
acuccugucuuuggcuaau

SEQ ID NO: 182621 - RNA, 19 nt, Artificial Sequence
  Description of Artificial Sequence: Synthetic oligonucleotide
  Antisense strand to SEQ ID NO: 182620
auuagccaaagacaggagu

SEQ ID NO: 182622 - RNA, 19 nt, Artificial Sequence
  Description of Artificial Sequence: Synthetic oligonucleotide
  Sense strand starting at position 2996 of SEQ ID NO: 2354
gacuccugucuuuggcuaa

SEQ ID NO: 182623 - RNA, 19 nt, Artificial Sequence
  Description of Artificial Sequence: Synthetic oligonucleotide
  Antisense strand to SEQ ID NO: 182622
uuagccaaagacaggaguc

SEQ ID NO: 182624 - RNA, 19 nt, Artificial Sequence
  Description of Artificial Sequence: Synthetic oligonucleotide
  Sense strand starting at position 2981 of SEQ ID NO: 2354
gcaucuuuaugcucugacu

SEQ ID NO: 182625 - RNA, 19 nt, Artificial Sequence
  Description of Artificial Sequence: Synthetic oligonucleotide
  Antisense strand to SEQ ID NO: 182624
agucagagcauaaagaugc

SEQ ID NO: 182626 - RNA, 19 nt, Artificial Sequence
  Description of Artificial Sequence: Synthetic oligonucleotide
  Sense strand starting at position 2593 of SEQ ID NO: 2354
gggcaacuaguauguuauc

SEQ ID NO: 182627 - RNA, 19 nt, Artificial Sequence
  Description of Artificial Sequence: Synthetic oligonucleotide
  Antisense strand to SEQ ID NO: 182626
gauaacauacuaguugccc

SEQ ID NO: 182628 - RNA, 19 nt, Artificial Sequence
  Description of Artificial Sequence: Synthetic oligonucleotide
  Sense strand starting at position 2591 of SEQ ID NO: 2354
gugggcaacuaguauguua

SEQ ID NO: 182629 - RNA, 19 nt, Artificial Sequence
  Description of Artificial Sequence: Synthetic oligonucleotide
  Antisense strand to SEQ ID NO: 182628
uaacauacuaguugcccac

SEQ ID NO: 182630 - RNA, 19 nt, Artificial Sequence
  Description of Artificial Sequence: Synthetic oligonucleotide
  Sense strand starting at position 2566 of SEQ ID NO: 2354
gugcauucaugagcagguu

SEQ ID NO: 182631 - RNA, 19 nt, Artificial Sequence
  Description of Artificial Sequence: Synthetic oligonucleotide
  Antisense strand to SEQ ID NO: 182630
aaccugcucaugaaugcac

SEQ ID NO: 182632 - RNA, 19 nt, Artificial Sequence
  Description of Artificial Sequence: Synthetic oligonucleotide
  Sense strand starting at position 2488 of SEQ ID NO: 2354
acucaauuaggaggugauc

SEQ ID NO: 182633 - RNA, 19 nt, Artificial Sequence
  Description of Artificial Sequence: Synthetic oligonucleotide
  Antisense strand to SEQ ID NO: 182632
gaucaccuccuaauugagu

SEQ ID NO: 182634 - RNA, 19 nt, Artificial Sequence
  Description of Artificial Sequence: Synthetic oligonucleotide
  Sense strand starting at position 2442 of SEQ ID NO: 2354
ugggcuuuccagcagcaga

SEQ ID NO: 182635 - RNA, 19 nt, Artificial Sequence
  Description of Artificial Sequence: Synthetic oligonucleotide
  Antisense strand to SEQ ID NO: 182634
ucugcugcuggaaagccca

SEQ ID NO: 182636 - RNA, 19 nt, Artificial Sequence
  Description of Artificial Sequence: Synthetic oligonucleotide
  Sense strand starting at position 2379 of SEQ ID NO: 2354
ugagcuggcuagcauuuau

SEQ ID NO: 182637 - RNA, 19 nt, Artificial Sequence
  Description of Artificial Sequence: Synthetic oligonucleotide
  Antisense strand to SEQ ID NO: 182636
auaaaugcuagccagcuca

SEQ ID NO: 182638 - RNA, 19 nt, Artificial Sequence
  Description of Artificial Sequence: Synthetic oligonucleotide
  Sense strand starting at position 2376 of SEQ ID NO: 2354
uagugagcuggcuagcauu

SEQ ID NO: 182639 - RNA, 19 nt, Artificial Sequence
  Description of Artificial Sequence: Synthetic oligonucleotide
  Antisense strand to SEQ ID NO: 182638
aaugcuagccagcucacua

SEQ ID NO: 182640 - RNA, 19 nt, Artificial Sequence
  Description of Artificial Sequence: Synthetic oligonucleotide
  Sense strand starting at position 2323 of SEQ ID NO: 2354
gggagacagucauauucag

SEQ ID NO: 182641 - RNA, 19 nt, Artificial Sequence
  Description of Artificial Sequence: Synthetic oligonucleotide
  Antisense strand to SEQ ID NO: 182640
cugaauaugacugucuccc

SEQ ID NO: 182642 - RNA, 19 nt, Artificial Sequence
  Description of Artificial Sequence: Synthetic oligonucleotide
  Sense strand starting at position 2255 of SEQ ID NO: 2354
gagcaugucuauugauuuc

SEQ ID NO: 182643 - RNA, 19 nt, Artificial Sequence
  Description of Artificial Sequence: Synthetic oligonucleotide
  Antisense strand to SEQ ID NO: 182642
gaaaucaauagacaugcuc

SEQ ID NO: 182644 - RNA, 19 nt, Artificial Sequence
  Description of Artificial Sequence: Synthetic oligonucleotide
  Sense strand starting at position 2251 of SEQ ID NO: 2354
ggaggagcaugucuauuga

SEQ ID NO: 182645 - RNA, 19 nt, Artificial Sequence
  Description of Artificial Sequence: Synthetic oligonucleotide
  Antisense strand to SEQ ID NO: 182644
ucaauagacaugcuccucc

SEQ ID NO: 182646 - RNA, 19 nt, Artificial Sequence
  Description of Artificial Sequence: Synthetic oligonucleotide
  Sense strand starting at position 2248 of SEQ ID NO: 2354
gugggaggagcaugucuau

SEQ ID NO: 182647 - RNA, 19 nt, Artificial Sequence
  Description of Artificial Sequence: Synthetic oligonucleotide
  Antisense strand to SEQ ID NO: 182646
auagacaugcuccucccac

SEQ ID NO: 182648 - RNA, 19 nt, Artificial Sequence
  Description of Artificial Sequence: Synthetic oligonucleotide
  Sense strand starting at position 2141 of SEQ ID NO: 2354
gcauccuuccuccacgaga

SEQ ID NO: 182649 - RNA, 19 nt, Artificial Sequence
  Description of Artificial Sequence: Synthetic oligonucleotide
  Antisense strand to SEQ ID NO: 182648
ucucguggaggaaggaugc

SEQ ID NO: 182650 - RNA, 19 nt, Artificial Sequence
  Description of Artificial Sequence: Synthetic oligonucleotide
  Sense strand starting at position 391 of SEQ ID NO: 2354
gaguaaagggccuggcuuu

SEQ ID NO: 182651 - RNA, 19 nt, Artificial Sequence
  Description of Artificial Sequence: Synthetic oligonucleotide
  Antisense strand to SEQ ID NO: 182650
aaagccaggcccuuuacuc

SEQ ID NO: 182652 - RNA, 19 nt, Artificial Sequence
  Description of Artificial Sequence: Synthetic oligonucleotide
  Sense strand starting at position 193 of SEQ ID NO: 2354
gggcccugcuuguucaaga

SEQ ID NO: 182653 - RNA, 19 nt, Artificial Sequence
  Description of Artificial Sequence: Synthetic oligonucleotide
  Antisense strand to SEQ ID NO: 182652
ucuugaacaagcagggccc

SEQ ID NO: 182654 - RNA, 19 nt, Artificial Sequence
  Description of Artificial Sequence: Synthetic oligonucleotide
  Sense strand starting at position 172 of SEQ ID NO: 2354
caggaugcuuccuagggaa

SEQ ID NO: 182655 - RNA, 19 nt, Artificial Sequence
  Description of Artificial Sequence: Synthetic oligonucleotide
  Antisense strand to SEQ ID NO: 182654
uucccuaggaagcauccug

SEQ ID NO: 182656 - RNA, 19 nt, Artificial Sequence
  Description of Artificial Sequence: Synthetic oligonucleotide
  Sense strand starting at position 171 of SEQ ID NO: 2354
acaggaugcuuccuaggga

SEQ ID NO: 182657 - RNA, 19 nt, Artificial Sequence
  Description of Artificial Sequence: Synthetic oligonucleotide
  Antisense strand to SEQ ID NO: 182656
ucccuaggaagcauccugu

SEQ ID NO: 182658 - RNA, 19 nt, Artificial Sequence
  Description of Artificial Sequence: Synthetic oligonucleotide
  Sense strand starting at position 47 of SEQ ID NO: 2354
cuguuauaaggaugcccau

SEQ ID NO: 182659 - RNA, 19 nt, Artificial Sequence
  Description of Artificial Sequence: Synthetic oligonucleotide
  Antisense strand to SEQ ID NO: 182658
augggcauccuuauaacag

SEQ ID NO: 182660 - RNA, 19 nt, Artificial Sequence
  Description of Artificial Sequence: Synthetic oligonucleotide
  Sense strand starting at position 36 of SEQ ID NO: 2354
guaaguagaugcuguuaua

SEQ ID NO: 182661 - RNA, 19 nt, Artificial Sequence
  Description of Artificial Sequence: Synthetic oligonucleotide
  Antisense strand to SEQ ID NO: 182660
uauaacagcaucuacuuac

SEQ ID NO: 182662 - RNA, 19 nt, Artificial Sequence
  Description of Artificial Sequence: Synthetic oligonucleotide
  Sense strand starting at position 57 of SEQ ID NO: 2355
ugaggaucuugccugcgaa

SEQ ID NO: 182663 - RNA, 19 nt, Artificial Sequence
  Description of Artificial Sequence: Synthetic oligonucleotide
  Antisense strand to SEQ ID NO: 182662
uucgcaggcaagauccuca

SEQ ID NO: 182664 - RNA, 19 nt, Artificial Sequence
  Description of Artificial Sequence: Synthetic oligonucleotide
  Sense strand starting at position 58 of SEQ ID NO: 2355
gaggaucuugccugcgaag

SEQ ID NO: 182665 - RNA, 19 nt, Artificial Sequence
  Description of Artificial Sequence: Synthetic oligonucleotide
  Antisense strand to SEQ ID NO: 182664
cuucgcaggcaagauccuc

SEQ ID NO: 182666 - RNA, 19 nt, Artificial Sequence
  Description of Artificial Sequence: Synthetic oligonucleotide
  Sense strand starting at position 60 of SEQ ID NO: 2355
ggaucuugccugcgaagau

SEQ ID NO: 182667 - RNA, 19 nt, Artificial Sequence
  Description of Artificial Sequence: Synthetic oligonucleotide
  Antisense strand to SEQ ID NO: 182666
aucuucgcaggcaagaucc

SEQ ID NO: 182668 - RNA, 19 nt, Artificial Sequence
  Description of Artificial Sequence: Synthetic oligonucleotide
  Sense strand starting at position 124 of SEQ ID NO: 2355
cucuuugaacugugaucaa

SEQ ID NO: 182669 - RNA, 19 nt, Artificial Sequence
  Description of Artificial Sequence: Synthetic oligonucleotide
  Antisense strand to SEQ ID NO: 182668
uugaucacaguucaaagag

SEQ ID NO: 182670 - RNA, 19 nt, Artificial Sequence
  Description of Artificial Sequence: Synthetic oligonucleotide
  Sense strand starting at position 127 of SEQ ID NO: 2355
uuugaacugugaucaagag

SEQ ID NO: 182671 - RNA, 19 nt, Artificial Sequence
  Description of Artificial Sequence: Synthetic oligonucleotide
  Antisense strand to SEQ ID NO: 182670
cucuugaucacaguucaaa

SEQ ID NO: 182672 - RNA, 19 nt, Artificial Sequence
  Description of Artificial Sequence: Synthetic oligonucleotide
  Sense strand starting at position 224 of SEQ ID NO: 2355
ugcucucaucucuagucau

SEQ ID NO: 182673 - RNA, 19 nt, Artificial Sequence
  Description of Artificial Sequence: Synthetic oligonucleotide
  Antisense strand to SEQ ID NO: 182672
augacuagagaugagagca

SEQ ID NO: 182674 - RNA, 19 nt, Artificial Sequence
  Description of Artificial Sequence: Synthetic oligonucleotide
  Sense strand starting at position 231 of SEQ ID NO: 2355
aucucuagucaugggaagu

SEQ ID NO: 182675 - RNA, 19 nt, Artificial Sequence
  Description of Artificial Sequence: Synthetic oligonucleotide
  Antisense strand to SEQ ID NO: 182674
acuucccaugacuagagau

SEQ ID NO: 182676 - RNA, 19 nt, Artificial Sequence
  Description of Artificial Sequence: Synthetic oligonucleotide
  Sense strand starting at position 232 of SEQ ID NO: 2355
ucucuagucaugggaaguc

SEQ ID NO: 182677 - RNA, 19 nt, Artificial Sequence
  Description of Artificial Sequence: Synthetic oligonucleotide
  Antisense strand to SEQ ID NO: 182676
gacuucccaugacuagaga

SEQ ID NO: 182678 - RNA, 19 nt, Artificial Sequence
  Description of Artificial Sequence: Synthetic oligonucleotide
  Sense strand starting at position 322 of SEQ ID NO: 2355
gugagaggcucuucucuca

SEQ ID NO: 182679 - RNA, 19 nt, Artificial Sequence
  Description of Artificial Sequence: Synthetic oligonucleotide
  Antisense strand to SEQ ID NO: 182678
ugagagaagagccucucac

SEQ ID NO: 182680 - RNA, 19 nt, Artificial Sequence
  Description of Artificial Sequence: Synthetic oligonucleotide
  Sense strand starting at position 406 of SEQ ID NO: 2355
uccaccuaguucucuguaa

SEQ ID NO: 182681 - RNA, 19 nt, Artificial Sequence
  Description of Artificial Sequence: Synthetic oligonucleotide
  Antisense strand to SEQ ID NO: 182680
uuacagagaacuaggugga

SEQ ID NO: 182682 - RNA, 19 nt, Artificial Sequence
  Description of Artificial Sequence: Synthetic oligonucleotide
  Sense strand starting at position 407 of SEQ ID NO: 2355
ccaccuaguucucuguaag

SEQ ID NO: 182683 - RNA, 19 nt, Artificial Sequence
  Description of Artificial Sequence: Synthetic oligonucleotide
  Antisense strand to SEQ ID NO: 182682
cuuacagagaacuaggugg

SEQ ID NO: 182684 - RNA, 19 nt, Artificial Sequence
  Description of Artificial Sequence: Synthetic oligonucleotide
  Sense strand starting at position 410 of SEQ ID NO: 2355
ccuaguucucuguaaggca

SEQ ID NO: 182685 - RNA, 19 nt, Artificial Sequence
  Description of Artificial Sequence: Synthetic oligonucleotide
  Antisense strand to SEQ ID NO: 182684
ugccuuacagagaacuagg

SEQ ID NO: 182686 - RNA, 19 nt, Artificial Sequence
  Description of Artificial Sequence: Synthetic oligonucleotide
  Sense strand starting at position 535 of SEQ ID NO: 2355
auagaugccaguuauugag

SEQ ID NO: 182687 - RNA, 19 nt, Artificial Sequence
  Description of Artificial Sequence: Synthetic oligonucleotide
  Antisense strand to SEQ ID NO: 182686
cucaauaacuggcaucuau

SEQ ID NO: 182688 - RNA, 19 nt, Artificial Sequence
  Description of Artificial Sequence: Synthetic oligonucleotide
  Sense strand starting at position 545 of SEQ ID NO: 2355
guuauugagcacuaccuau

SEQ ID NO: 182689 - RNA, 19 nt, Artificial Sequence
  Description of Artificial Sequence: Synthetic oligonucleotide
  Antisense strand to SEQ ID NO: 182688
auagguagugcucaauaac

SEQ ID NO: 182690 - RNA, 19 nt, Artificial Sequence
  Description of Artificial Sequence: Synthetic oligonucleotide
  Sense strand starting at position 929 of SEQ ID NO: 2355
ggaucagcgagguaaggua

SEQ ID NO: 182691 - RNA, 19 nt, Artificial Sequence
  Description of Artificial Sequence: Synthetic oligonucleotide
  Antisense strand to SEQ ID NO: 182690
uaccuuaccucgcugaucc

SEQ ID NO: 182692 - RNA, 19 nt, Artificial Sequence
  Description of Artificial Sequence: Synthetic oligonucleotide
  Sense strand starting at position 1081 of SEQ ID NO: 2355
uuaguaauucuaugugguu

SEQ ID NO: 182693 - RNA, 19 nt, Artificial Sequence
  Description of Artificial Sequence: Synthetic oligonucleotide
  Antisense strand to SEQ ID NO: 182692
aaccacauagaauuacuaa

SEQ ID NO: 182694 - RNA, 19 nt, Artificial Sequence
  Description of Artificial Sequence: Synthetic oligonucleotide
  Sense strand starting at position 1082 of SEQ ID NO: 2355
uaguaauucuaugugguua

SEQ ID NO: 182695 - RNA, 19 nt, Artificial Sequence
  Description of Artificial Sequence: Synthetic oligonucleotide
  Antisense strand to SEQ ID NO: 182694
uaaccacauagaauuacua

SEQ ID NO: 182696 - RNA, 19 nt, Artificial Sequence
  Description of Artificial Sequence: Synthetic oligonucleotide
  Sense strand starting at position 1083 of SEQ ID NO: 2355
aguaauucuaugugguuag

SEQ ID NO: 182697 - RNA, 19 nt, Artificial Sequence
  Description of Artificial Sequence: Synthetic oligonucleotide
  Antisense strand to SEQ ID NO: 182696
cuaaccacauagaauuacu

SEQ ID NO: 182698 - RNA, 19 nt, Artificial Sequence
  Description of Artificial Sequence: Synthetic oligonucleotide
  Sense strand starting at position 1086 of SEQ ID NO: 2355
aauucuaugugguuaggga

SEQ ID NO: 182699 - RNA, 19 nt, Artificial Sequence
  Description of Artificial Sequence: Synthetic oligonucleotide
  Antisense strand to SEQ ID NO: 182698
ucccuaaccacauagaauu

SEQ ID NO: 182700 - RNA, 19 nt, Artificial Sequence
  Description of Artificial Sequence: Synthetic oligonucleotide
  Sense strand starting at position 1349 of SEQ ID NO: 2355
uacugcacaccguguaaau

SEQ ID NO: 182701 - RNA, 19 nt, Artificial Sequence
  Description of Artificial Sequence: Synthetic oligonucleotide
  Antisense strand to SEQ ID NO: 182700
auuuacacggugugcagua

SEQ ID NO: 182702 - RNA, 19 nt, Artificial Sequence
  Description of Artificial Sequence: Synthetic oligonucleotide
  Sense strand starting at position 1474 of SEQ ID NO: 2355
gggcguucucugaggcaca

SEQ ID NO: 182703 - RNA, 19 nt, Artificial Sequence
  Description of Artificial Sequence: Synthetic oligonucleotide
  Antisense strand to SEQ ID NO: 182702
ugugccucagagaacgccc

SEQ ID NO: 182704 - RNA, 19 nt, Artificial Sequence
  Description of Artificial Sequence: Synthetic oligonucleotide
  Sense strand starting at position 1523 of SEQ ID NO: 2355
cggcccguucucucaguua

SEQ ID NO: 182705 - RNA, 19 nt, Artificial Sequence
  Description of Artificial Sequence: Synthetic oligonucleotide
  Antisense strand to SEQ ID NO: 182704
uaacugagagaacgggccg

SEQ ID NO: 182706 - RNA, 19 nt, Artificial Sequence
  Description of Artificial Sequence: Synthetic oligonucleotide
  Sense strand starting at position 2440 of SEQ ID NO: 2355
uucugugucgccgcuuuau

SEQ ID NO: 182707 - RNA, 19 nt, Artificial Sequence
  Description of Artificial Sequence: Synthetic oligonucleotide
  Antisense strand to SEQ ID NO: 182706
auaaagcggcgacacagaa

SEQ ID NO: 182708 - RNA, 19 nt, Artificial Sequence
  Description of Artificial Sequence: Synthetic oligonucleotide
  Sense strand starting at position 2457 of SEQ ID NO: 2355
aucuccguucccugugaua

SEQ ID NO: 182709 - RNA, 19 nt, Artificial Sequence
  Description of Artificial Sequence: Synthetic oligonucleotide
  Antisense strand to SEQ ID NO: 182708
uaucacagggaacggagau

SEQ ID NO: 182710 - RNA, 19 nt, Artificial Sequence
  Description of Artificial Sequence: Synthetic oligonucleotide
  Sense strand starting at position 2459 of SEQ ID NO: 2355
cuccguucccugugauaac

SEQ ID NO: 182711 - RNA, 19 nt, Artificial Sequence
  Description of Artificial Sequence: Synthetic oligonucleotide
  Antisense strand to SEQ ID NO: 182710
guuaucacagggaacggag

SEQ ID NO: 182712 - RNA, 19 nt, Artificial Sequence
  Description of Artificial Sequence: Synthetic oligonucleotide
  Sense strand starting at position 2468 of SEQ ID NO: 2355
cugugauaacuuggucuuu

SEQ ID NO: 182713 - RNA, 19 nt, Artificial Sequence
  Description of Artificial Sequence: Synthetic oligonucleotide
  Antisense strand to SEQ ID NO: 182712
aaagaccaaguuaucacag

SEQ ID NO: 182714 - RNA, 19 nt, Artificial Sequence
  Description of Artificial Sequence: Synthetic oligonucleotide
  Sense strand starting at position 2470 of SEQ ID NO: 2355
gugauaacuuggucuuucu

SEQ ID NO: 182715 - RNA, 19 nt, Artificial Sequence
  Description of Artificial Sequence: Synthetic oligonucleotide
  Antisense strand to SEQ ID NO: 182714
agaaagaccaaguuaucac

SEQ ID NO: 182716 - RNA, 19 nt, Artificial Sequence
  Description of Artificial Sequence: Synthetic oligonucleotide
  Sense strand starting at position 2608 of SEQ ID NO: 2355
cggccugaauggucuauua

SEQ ID NO: 182717 - RNA, 19 nt, Artificial Sequence
  Description of Artificial Sequence: Synthetic oligonucleotide
  Antisense strand to SEQ ID NO: 182716
uaauagaccauucaggccg

SEQ ID NO: 182718 - RNA, 19 nt, Artificial Sequence
  Description of Artificial Sequence: Synthetic oligonucleotide
  Sense strand starting at position 2610 of SEQ ID NO: 2355
gccugaauggucuauuaag

SEQ ID NO: 182719 - RNA, 19 nt, Artificial Sequence
  Description of Artificial Sequence: Synthetic oligonucleotide
  Antisense strand to SEQ ID NO: 182718
cuuaauagaccauucaggc

SEQ ID NO: 182720 - RNA, 19 nt, Artificial Sequence
  Description of Artificial Sequence: Synthetic oligonucleotide
  Sense strand starting at position 2653 of SEQ ID NO: 2355
ggcugcguggccuuucaga

SEQ ID NO: 182721 - RNA, 19 nt, Artificial Sequence
  Description of Artificial Sequence: Synthetic oligonucleotide
  Antisense strand to SEQ ID NO: 182720
ucugaaaggccacgcagcc

SEQ ID NO: 182722 - RNA, 19 nt, Artificial Sequence
  Description of Artificial Sequence: Synthetic oligonucleotide
  Sense strand starting at position 2671 of SEQ ID NO: 2355
agccuugguuuccucaaga

SEQ ID NO: 182723 - RNA, 19 nt, Artificial Sequence
  Description of Artificial Sequence: Synthetic oligonucleotide
  Antisense strand to SEQ ID NO: 182722
ucuugaggaaaccaaggcu

SEQ ID NO: 182724 - RNA, 19 nt, Artificial Sequence
  Description of Artificial Sequence: Synthetic oligonucleotide
  Sense strand starting at position 2709 of SEQ ID NO: 2355
cgccucaucgcacagaauu

SEQ ID NO: 182725 - RNA, 19 nt, Artificial Sequence
  Description of Artificial Sequence: Synthetic oligonucleotide
  Antisense strand to SEQ ID NO: 182724
aauucugugcgaugaggcg

SEQ ID NO: 182726 - RNA, 19 nt, Artificial Sequence
  Description of Artificial Sequence: Synthetic oligonucleotide
  Sense strand starting at position 2721 of SEQ ID NO: 2355
cagaauugugcauaacgga

SEQ ID NO: 182727 - RNA, 19 nt, Artificial Sequence
  Description of Artificial Sequence: Synthetic oligonucleotide
  Antisense strand to SEQ ID NO: 182726
uccguuaugcacaauucug

SEQ ID NO: 182728 - RNA, 19 nt, Artificial Sequence
  Description of Artificial Sequence: Synthetic oligonucleotide
  Sense strand starting at position 2762 of SEQ ID NO: 2355
aaaggcgugccugacaaau

SEQ ID NO: 182729 - RNA, 19 nt, Artificial Sequence
  Description of Artificial Sequence: Synthetic oligonucleotide
  Antisense strand to SEQ ID NO: 182728
auuugucaggcacgccuuu

SEQ ID NO: 182730 - RNA, 19 nt, Artificial Sequence
  Description of Artificial Sequence: Synthetic oligonucleotide
  Sense strand starting at position 2770 of SEQ ID NO: 2355
gccugacaaauaugaggau

SEQ ID NO: 182731 - RNA, 19 nt, Artificial Sequence
  Description of Artificial Sequence: Synthetic oligonucleotide
  Antisense strand to SEQ ID NO: 182730
auccucauauuugucaggc

SEQ ID NO: 182732 - RNA, 19 nt, Artificial Sequence
  Description of Artificial Sequence: Synthetic oligonucleotide
  Sense strand starting at position 2776 of SEQ ID NO: 2355
caaauaugaggauguagua

SEQ ID NO: 182733 - RNA, 19 nt, Artificial Sequence
  Description of Artificial Sequence: Synthetic oligonucleotide
  Antisense strand to SEQ ID NO: 182732
uacuacauccucauauuug

SEQ ID NO: 182734 - RNA, 19 nt, Artificial Sequence
  Description of Artificial Sequence: Synthetic oligonucleotide
  Sense strand starting at position 2851 of SEQ ID NO: 2355
gguuaaauguccuuccagc

SEQ ID NO: 182735 - RNA, 19 nt, Artificial Sequence
  Description of Artificial Sequence: Synthetic oligonucleotide
  Antisense strand to SEQ ID NO: 182734
gcuggaaggacauuuaacc

SEQ ID NO: 182736 - RNA, 19 nt, Artificial Sequence
  Description of Artificial Sequence: Synthetic oligonucleotide
  Sense strand starting at position 2916 of SEQ ID NO: 2355
cgcguggucggcuuggaaa

SEQ ID NO: 182737 - RNA, 19 nt, Artificial Sequence
  Description of Artificial Sequence: Synthetic oligonucleotide
  Antisense strand to SEQ ID NO: 182736
uuuccaagccgaccacgcg

SEQ ID NO: 182738 - RNA, 19 nt, Artificial Sequence
  Description of Artificial Sequence: Synthetic oligonucleotide
  Sense strand starting at position 3949 of SEQ ID NO: 2355
ggguaagucgcuuaaccuc

SEQ ID NO: 182739 - RNA, 19 nt, Artificial Sequence
  Description of Artificial Sequence: Synthetic oligonucleotide
  Antisense strand to SEQ ID NO: 182738
gagguuaagcgacuuaccc

SEQ ID NO: 182740 - RNA, 19 nt, Artificial Sequence
  Description of Artificial Sequence: Synthetic oligonucleotide
  Sense strand starting at position 3978 of SEQ ID NO: 2355
cuuaccucauguuuaagga

SEQ ID NO: 182741 - RNA, 19 nt, Artificial Sequence
  Description of Artificial Sequence: Synthetic oligonucleotide
  Antisense strand to SEQ ID NO: 182740
uccuuaaacaugagguaag

SEQ ID NO: 182742 - RNA, 19 nt, Artificial Sequence
  Description of Artificial Sequence: Synthetic oligonucleotide
  Sense strand starting at position 254 of SEQ ID NO: 2356
auaaaugcguuaccaaaga

SEQ ID NO: 182743 - RNA, 19 nt, Artificial Sequence
  Description of Artificial Sequence: Synthetic oligonucleotide
  Antisense strand to SEQ ID NO: 182742
ucuuugguaacgcauuuau

SEQ ID NO: 182744 - RNA, 19 nt, Artificial Sequence
  Description of Artificial Sequence: Synthetic oligonucleotide
  Sense strand starting at position 271 of SEQ ID NO: 2356
gacccaucaguuuggacuu

SEQ ID NO: 182745 - RNA, 19 nt, Artificial Sequence
  Description of Artificial Sequence: Synthetic oligonucleotide
  Antisense strand to SEQ ID NO: 182744
aaguccaaacugauggguc

SEQ ID NO: 182746 - RNA, 19 nt, Artificial Sequence
  Description of Artificial Sequence: Synthetic oligonucleotide
  Sense strand starting at position 424 of SEQ ID NO: 2356
gaggguguuccuuaaguau

SEQ ID NO: 182747 - RNA, 19 nt, Artificial Sequence
  Description of Artificial Sequence: Synthetic oligonucleotide
  Antisense strand to SEQ ID NO: 182746
auacuuaaggaacacccuc

SEQ ID NO: 182748 - RNA, 19 nt, Artificial Sequence
  Description of Artificial Sequence: Synthetic oligonucleotide
  Sense strand starting at position 439 of SEQ ID NO: 2356
guauuacagcuuuaaaggu

SEQ ID NO: 182749 - RNA, 19 nt, Artificial Sequence
  Description of Artificial Sequence: Synthetic oligonucleotide
  Antisense strand to SEQ ID NO: 182748
accuuuaaagcuguaauac

SEQ ID NO: 182750 - RNA, 19 nt, Artificial Sequence
  Description of Artificial Sequence: Synthetic oligonucleotide
  Sense strand starting at position 518 of SEQ ID NO: 2356
uccagcucauguccagaaa

SEQ ID NO: 182751 - RNA, 19 nt, Artificial Sequence
  Description of Artificial Sequence: Synthetic oligonucleotide
  Antisense strand to SEQ ID NO: 182750
uuucuggacaugagcugga

SEQ ID NO: 182752 - RNA, 19 nt, Artificial Sequence
  Description of Artificial Sequence: Synthetic oligonucleotide
  Sense strand starting at position 565 of SEQ ID NO: 2356
uggaacguuacugauucua

SEQ ID NO: 182753 - RNA, 19 nt, Artificial Sequence
  Description of Artificial Sequence: Synthetic oligonucleotide
  Antisense strand to SEQ ID NO: 182752
uagaaucaguaacguucca

SEQ ID NO: 182754 - RNA, 19 nt, Artificial Sequence
  Description of Artificial Sequence: Synthetic oligonucleotide
  Sense strand starting at position 583 of SEQ ID NO: 2356
acguaacaugaguaugagu

SEQ ID NO: 182755 - RNA, 19 nt, Artificial Sequence
  Description of Artificial Sequence: Synthetic oligonucleotide
  Antisense strand to SEQ ID NO: 182754
acucauacucauguuacgu

SEQ ID NO: 182756 - RNA, 19 nt, Artificial Sequence
  Description of Artificial Sequence: Synthetic oligonucleotide
  Sense strand starting at position 585 of SEQ ID NO: 2356
guaacaugaguaugaguca

SEQ ID NO: 182757 - RNA, 19 nt, Artificial Sequence
  Description of Artificial Sequence: Synthetic oligonucleotide
  Antisense strand to SEQ ID NO: 182756
ugacucauacucauguuac

SEQ ID NO: 182758 - RNA, 19 nt, Artificial Sequence
  Description of Artificial Sequence: Synthetic oligonucleotide
  Sense strand starting at position 641 of SEQ ID NO: 2356
gcagccacguaauuugaaa

SEQ ID NO: 182759 - RNA, 19 nt, Artificial Sequence
  Description of Artificial Sequence: Synthetic oligonucleotide
  Antisense strand to SEQ ID NO: 182758
uuucaaauuacguggcugc

SEQ ID NO: 182760 - RNA, 19 nt, Artificial Sequence
  Description of Artificial Sequence: Synthetic oligonucleotide
  Sense strand starting at position 643 of SEQ ID NO: 2356
agccacguaauuugaaagu

SEQ ID NO: 182761 - RNA, 19 nt, Artificial Sequence
  Description of Artificial Sequence: Synthetic oligonucleotide
  Antisense strand to SEQ ID NO: 182760
acuuucaaauuacguggcu

SEQ ID NO: 182762 - RNA, 19 nt, Artificial Sequence
  Description of Artificial Sequence: Synthetic oligonucleotide
  Sense strand starting at position 691 of SEQ ID NO: 2356
gaacauuccuggccugaug

SEQ ID NO: 182763 - RNA, 19 nt, Artificial Sequence
  Description of Artificial Sequence: Synthetic oligonucleotide
  Antisense strand to SEQ ID NO: 182762
caucaggccaggaauguuc

SEQ ID NO: 182764 - RNA, 19 nt, Artificial Sequence
  Description of Artificial Sequence: Synthetic oligonucleotide
  Sense strand starting at position 693 of SEQ ID NO: 2356
acauuccuggccugaugau

SEQ ID NO: 182765 - RNA, 19 nt, Artificial Sequence
  Description of Artificial Sequence: Synthetic oligonucleotide
  Antisense strand to SEQ ID NO: 182764
aucaucaggccaggaaugu

SEQ ID NO: 182766 - RNA, 19 nt, Artificial Sequence
  Description of Artificial Sequence: Synthetic oligonucleotide
  Sense strand starting at position 694 of SEQ ID NO: 2356
cauuccuggccugaugauu

SEQ ID NO: 182767 - RNA, 19 nt, Artificial Sequence
  Description of Artificial Sequence: Synthetic oligonucleotide
  Antisense strand to SEQ ID NO: 182766
aaucaucaggccaggaaug

SEQ ID NO: 182768 - RNA, 19 nt, Artificial Sequence
  Description of Artificial Sequence: Synthetic oligonucleotide
  Sense strand starting at position 699 of SEQ ID NO: 2356
cuggccugaugauuagaua

SEQ ID NO: 182769 - RNA, 19 nt, Artificial Sequence
  Description of Artificial Sequence: Synthetic oligonucleotide
  Antisense strand to SEQ ID NO: 182768
uaucuaaucaucaggccag

SEQ ID NO: 182770 - RNA, 19 nt, Artificial Sequence
  Description of Artificial Sequence: Synthetic oligonucleotide
  Sense strand starting at position 856 of SEQ ID NO: 2356
gccuccuuugaguaacaaa

SEQ ID NO: 182771 - RNA, 19 nt, Artificial Sequence
  Description of Artificial Sequence: Synthetic oligonucleotide
  Antisense strand to SEQ ID NO: 182770
uuuguuacucaaaggaggc

SEQ ID NO: 182772 - RNA, 19 nt, Artificial Sequence
  Description of Artificial Sequence: Synthetic oligonucleotide
  Sense strand starting at position 891 of SEQ ID NO: 2356
cuggauagcagcuagauau

SEQ ID NO: 182773 - RNA, 19 nt, Artificial Sequence
  Description of Artificial Sequence: Synthetic oligonucleotide
  Antisense strand to SEQ ID NO: 182772
auaucuagcugcuauccag

SEQ ID NO: 182774 - RNA, 19 nt, Artificial Sequence
  Description of Artificial Sequence: Synthetic oligonucleotide
  Sense strand starting at position 942 of SEQ ID NO: 2356
uuaacaauugcagggaguu

SEQ ID NO: 182775 - RNA, 19 nt, Artificial Sequence
  Description of Artificial Sequence: Synthetic oligonucleotide
  Antisense strand to SEQ ID NO: 182774
aacucccugcaauuguuaa

SEQ ID NO: 182776 - RNA, 19 nt, Artificial Sequence
  Description of Artificial Sequence: Synthetic oligonucleotide
  Sense strand starting at position 961 of SEQ ID NO: 2356
gcugaaaugagguauggcu

SEQ ID NO: 182777 - RNA, 19 nt, Artificial Sequence
  Description of Artificial Sequence: Synthetic oligonucleotide
  Antisense strand to SEQ ID NO: 182776
agccauaccucauuucagc

SEQ ID NO: 182778 - RNA, 19 nt, Artificial Sequence
  Description of Artificial Sequence: Synthetic oligonucleotide
  Sense strand starting at position 1034 of SEQ ID NO: 2356
gaaagacugcucugagcac

SEQ ID NO: 182779 - RNA, 19 nt, Artificial Sequence
  Description of Artificial Sequence: Synthetic oligonucleotide
  Antisense strand to SEQ ID NO: 182778
gugcucagagcagucuuuc

SEQ ID NO: 182780 - RNA, 19 nt, Artificial Sequence
  Description of Artificial Sequence: Synthetic oligonucleotide
  Sense strand starting at position 1038 of SEQ ID NO: 2356
gacugcucugagcacagua

SEQ ID NO: 182781 - RNA, 19 nt, Artificial Sequence
  Description of Artificial Sequence: Synthetic oligonucleotide
  Antisense strand to SEQ ID NO: 182780
uacugugcucagagcaguc

SEQ ID NO: 182782 - RNA, 19 nt, Artificial Sequence
  Description of Artificial Sequence: Synthetic oligonucleotide
  Sense strand starting at position 1241 of SEQ ID NO: 2356
ccacacauccucugggaaa

SEQ ID NO: 182783 - RNA, 19 nt, Artificial Sequence
  Description of Artificial Sequence: Synthetic oligonucleotide
  Antisense strand to SEQ ID NO: 182782
uuucccagaggaugugugg

SEQ ID NO: 182784 - RNA, 19 nt, Artificial Sequence
  Description of Artificial Sequence: Synthetic oligonucleotide
  Sense strand starting at position 1410 of SEQ ID NO: 2356
gggagaccguuauuaaauu

SEQ ID NO: 182785 - RNA, 19 nt, Artificial Sequence
  Description of Artificial Sequence: Synthetic oligonucleotide
  Antisense strand to SEQ ID NO: 182784
aauuuaauaacggucuccc

SEQ ID NO: 182786 - RNA, 19 nt, Artificial Sequence
  Description of Artificial Sequence: Synthetic oligonucleotide
  Sense strand starting at position 1520 of SEQ ID NO: 2356
cgugaacauucccuuaaga

SEQ ID NO: 182787 - RNA, 19 nt, Artificial Sequence
  Description of Artificial Sequence: Synthetic oligonucleotide
  Antisense strand to SEQ ID NO: 182786
ucuuaagggaauguucacg

SEQ ID NO: 182788 - RNA, 19 nt, Artificial Sequence
  Description of Artificial Sequence: Synthetic oligonucleotide
  Sense strand starting at position 1619 of SEQ ID NO: 2356
aacugagguagaggugauu

SEQ ID NO: 182789 - RNA, 19 nt, Artificial Sequence
  Description of Artificial Sequence: Synthetic oligonucleotide
  Antisense strand to SEQ ID NO: 182788
aaucaccucuaccucaguu

SEQ ID NO: 182790 - RNA, 19 nt, Artificial Sequence
  Description of Artificial Sequence: Synthetic oligonucleotide
  Sense strand starting at position 1630 of SEQ ID NO: 2356
aggugauuuacaugcguug

SEQ ID NO: 182791 - RNA, 19 nt, Artificial Sequence
  Description of Artificial Sequence: Synthetic oligonucleotide
  Antisense strand to SEQ ID NO: 182790
caacgcauguaaaucaccu

SEQ ID NO: 182792 - RNA, 19 nt, Artificial Sequence
  Description of Artificial Sequence: Synthetic oligonucleotide
  Sense strand starting at position 1641 of SEQ ID NO: 2356
augcguuggcggagggaaa

SEQ ID NO: 182793 - RNA, 19 nt, Artificial Sequence
  Description of Artificial Sequence: Synthetic oligonucleotide
  Antisense strand to SEQ ID NO: 182792
uuucccuccgccaacgcau

SEQ ID NO: 182794 - RNA, 19 nt, Artificial Sequence
  Description of Artificial Sequence: Synthetic oligonucleotide
  Sense strand starting at position 2077 of SEQ ID NO: 2356
caaucugucgcgucagacu

SEQ ID NO: 182795 - RNA, 19 nt, Artificial Sequence
  Description of Artificial Sequence: Synthetic oligonucleotide
  Antisense strand to SEQ ID NO: 182794
agucugacgcgacagauug

SEQ ID NO: 182796 - RNA, 19 nt, Artificial Sequence
  Description of Artificial Sequence: Synthetic oligonucleotide
  Sense strand starting at position 2569 of SEQ ID NO: 2356
uuggauugcccucauuaac

SEQ ID NO: 182797 - RNA, 19 nt, Artificial Sequence
  Description of Artificial Sequence: Synthetic oligonucleotide
  Antisense strand to SEQ ID NO: 182796
guuaaugagggcaauccaa

SEQ ID NO: 182798 - RNA, 19 nt, Artificial Sequence
  Description of Artificial Sequence: Synthetic oligonucleotide
  Sense strand starting at position 2769 of SEQ ID NO: 2356
aagguauucgugcauuaag

SEQ ID NO: 182799 - RNA, 19 nt, Artificial Sequence
  Description of Artificial Sequence: Synthetic oligonucleotide
  Antisense strand to SEQ ID NO: 182798
cuuaaugcacgaauaccuu

SEQ ID NO: 182800 - RNA, 19 nt, Artificial Sequence
  Description of Artificial Sequence: Synthetic oligonucleotide
  Sense strand starting at position 2786 of SEQ ID NO: 2356
aggacaguccugugaguga

SEQ ID NO: 182801 - RNA, 19 nt, Artificial Sequence
  Description of Artificial Sequence: Synthetic oligonucleotide
  Antisense strand to SEQ ID NO: 182800
ucacucacaggacuguccu

SEQ ID NO: 182802 - RNA, 19 nt, Artificial Sequence
  Description of Artificial Sequence: Synthetic oligonucleotide
  Sense strand starting at position 2789 of SEQ ID NO: 2356
acaguccugugagugagau

SEQ ID NO: 182803 - RNA, 19 nt, Artificial Sequence
  Description of Artificial Sequence: Synthetic oligonucleotide
  Antisense strand to SEQ ID NO: 182802
aucucacucacaggacugu

SEQ ID NO: 182804 - RNA, 19 nt, Artificial Sequence
  Description of Artificial Sequence: Synthetic oligonucleotide
  Sense strand starting at position 2791 of SEQ ID NO: 2356
aguccugugagugagauau

SEQ ID NO: 182805 - RNA, 19 nt, Artificial Sequence
  Description of Artificial Sequence: Synthetic oligonucleotide
  Antisense strand to SEQ ID NO: 182804
auaucucacucacaggacu

SEQ ID NO: 182806 - RNA, 19 nt, Artificial Sequence
  Description of Artificial Sequence: Synthetic oligonucleotide
  Sense strand starting at position 2795 of SEQ ID NO: 2356
cugugagugagauauuggu

SEQ ID NO: 182807 - RNA, 19 nt, Artificial Sequence
  Description of Artificial Sequence: Synthetic oligonucleotide
  Antisense strand to SEQ ID NO: 182806
accaauaucucacucacag

SEQ ID NO: 182808 - RNA, 19 nt, Artificial Sequence
  Description of Artificial Sequence: Synthetic oligonucleotide
  Sense strand starting at position 2962 of SEQ ID NO: 2356
augaauugguaccuaguga

SEQ ID NO: 182809 - RNA, 19 nt, Artificial Sequence
  Description of Artificial Sequence: Synthetic oligonucleotide
  Antisense strand to SEQ ID NO: 182808
ucacuagguaccaauucau

SEQ ID NO: 182810 - RNA, 19 nt, Artificial Sequence
  Description of Artificial Sequence: Synthetic oligonucleotide
  Sense strand starting at position 2963 of SEQ ID NO: 2356
ugaauugguaccuagugau

SEQ ID NO: 182811 - RNA, 19 nt, Artificial Sequence
  Description of Artificial Sequence: Synthetic oligonucleotide
  Antisense strand to SEQ ID NO: 182810
aucacuagguaccaauuca

SEQ ID NO: 182812 - RNA, 19 nt, Artificial Sequence
  Description of Artificial Sequence: Synthetic oligonucleotide
  Sense strand starting at position 2969 of SEQ ID NO: 2356
gguaccuagugauuaaucu

SEQ ID NO: 182813 - RNA, 19 nt, Artificial Sequence
  Description of Artificial Sequence: Synthetic oligonucleotide
  Antisense strand to SEQ ID NO: 182812
agauuaaucacuagguacc

SEQ ID NO: 182814 - RNA, 19 nt, Artificial Sequence
  Description of Artificial Sequence: Synthetic oligonucleotide
  Sense strand starting at position 3550 of SEQ ID NO: 2356
uuauaauggcuuugggaca

SEQ ID NO: 182815 - RNA, 19 nt, Artificial Sequence
  Description of Artificial Sequence: Synthetic oligonucleotide
  Antisense strand to SEQ ID NO: 182814
ugucccaaagccauuauaa

SEQ ID NO: 182816 - RNA, 19 nt, Artificial Sequence
  Description of Artificial Sequence: Synthetic oligonucleotide
  Sense strand starting at position 3664 of SEQ ID NO: 2356
cuucccucuccaggagaau

SEQ ID NO: 182817 - RNA, 19 nt, Artificial Sequence
  Description of Artificial Sequence: Synthetic oligonucleotide
  Antisense strand to SEQ ID NO: 182816
auucuccuggagagggaag

SEQ ID NO: 182818 - RNA, 19 nt, Artificial Sequence
  Description of Artificial Sequence: Synthetic oligonucleotide
  Sense strand starting at position 3859 of SEQ ID NO: 2356
uggaauggcaucuauguua

SEQ ID NO: 182819 - RNA, 19 nt, Artificial Sequence
  Description of Artificial Sequence: Synthetic oligonucleotide
  Antisense strand to SEQ ID NO: 182818
uaacauagaugccauucca

SEQ ID NO: 182820 - RNA, 19 nt, Artificial Sequence
  Description of Artificial Sequence: Synthetic oligonucleotide
  Sense strand starting at position 3933 of SEQ ID NO: 2356
cuaauauucugguccagga

SEQ ID NO: 182821 - RNA, 19 nt, Artificial Sequence
  Description of Artificial Sequence: Synthetic oligonucleotide
  Antisense strand to SEQ ID NO: 182820
uccuggaccagaauauuag

SEQ ID NO: 182822 - RNA, 19 nt, Artificial Sequence
  Description of Artificial Sequence: Synthetic oligonucleotide
  Sense strand starting at position 3940 of SEQ ID NO: 2357
guuuaaugucagcaguaca

SEQ ID NO: 182823 - RNA, 19 nt, Artificial Sequence
  Description of Artificial Sequence: Synthetic oligonucleotide
  Antisense strand to SEQ ID NO: 182822
uguacugcugacauuaaac

SEQ ID NO: 182824 - RNA, 19 nt, Artificial Sequence
  Description of Artificial Sequence: Synthetic oligonucleotide
  Sense strand starting at position 3700 of SEQ ID NO: 2357
gcuuauuucuuguuaauga

SEQ ID NO: 182825 - RNA, 19 nt, Artificial Sequence
  Description of Artificial Sequence: Synthetic oligonucleotide
  Antisense strand to SEQ ID NO: 182824
ucauuaacaagaaauaagc

SEQ ID NO: 182826 - RNA, 19 nt, Artificial Sequence
  Description of Artificial Sequence: Synthetic oligonucleotide
  Sense strand starting at position 3697 of SEQ ID NO: 2357
acggcuuauuucuuguuaa

SEQ ID NO: 182827 - RNA, 19 nt, Artificial Sequence
  Description of Artificial Sequence: Synthetic oligonucleotide
  Antisense strand to SEQ ID NO: 182826
uuaacaagaaauaagccgu

SEQ ID NO: 182828 - RNA, 19 nt, Artificial Sequence
  Description of Artificial Sequence: Synthetic oligonucleotide
  Sense strand starting at position 3696 of SEQ ID NO: 2357
gacggcuuauuucuuguua

SEQ ID NO: 182829 - RNA, 19 nt, Artificial Sequence
  Description of Artificial Sequence: Synthetic oligonucleotide
  Antisense strand to SEQ ID NO: 182828
uaacaagaaauaagccguc

SEQ ID NO: 182830 - RNA, 19 nt, Artificial Sequence
  Description of Artificial Sequence: Synthetic oligonucleotide
  Sense strand starting at position 3492 of SEQ ID NO: 2357
agaucaugucagugguggu

SEQ ID NO: 182831 - RNA, 19 nt, Artificial Sequence
  Description of Artificial Sequence: Synthetic oligonucleotide
  Antisense strand to SEQ ID NO: 182830
accaccacugacaugaucu

SEQ ID NO: 182832 - RNA, 19 nt, Artificial Sequence
  Description of Artificial Sequence: Synthetic oligonucleotide
  Sense strand starting at position 3471 of SEQ ID NO: 2357
uccuccaugggucgugaaa

SEQ ID NO: 182833 - RNA, 19 nt, Artificial Sequence
  Description of Artificial Sequence: Synthetic oligonucleotide
  Antisense strand to SEQ ID NO: 182832
uuucacgacccauggagga

SEQ ID NO: 182834 - RNA, 19 nt, Artificial Sequence
  Description of Artificial Sequence: Synthetic oligonucleotide
  Sense strand starting at position 3449 of SEQ ID NO: 2357
gauucucuccaaggugaau

SEQ ID NO: 182835 - RNA, 19 nt, Artificial Sequence
  Description of Artificial Sequence: Synthetic oligonucleotide
  Antisense strand to SEQ ID NO: 182834
auucaccuuggagagaauc

SEQ ID NO: 182836 - RNA, 19 nt, Artificial Sequence
  Description of Artificial Sequence: Synthetic oligonucleotide
  Sense strand starting at position 3445 of SEQ ID NO: 2357
uucugauucucuccaaggu

SEQ ID NO: 182837 - RNA, 19 nt, Artificial Sequence
  Description of Artificial Sequence: Synthetic oligonucleotide
  Antisense strand to SEQ ID NO: 182836
accuuggagagaaucagaa

SEQ ID NO: 182838 - RNA, 19 nt, Artificial Sequence
  Description of Artificial Sequence: Synthetic oligonucleotide
  Sense strand starting at position 3434 of SEQ ID NO: 2357
guucuaaugucuucugauu

SEQ ID NO: 182839 - RNA, 19 nt, Artificial Sequence
  Description of Artificial Sequence: Synthetic oligonucleotide
  Antisense strand to SEQ ID NO: 182838
aaucagaagacauuagaac

SEQ ID NO: 182840 - RNA, 19 nt, Artificial Sequence
  Description of Artificial Sequence: Synthetic oligonucleotide
  Sense strand starting at position 3356 of SEQ ID NO: 2357
uggaaacuuccucagccuu

SEQ ID NO: 182841 - RNA, 19 nt, Artificial Sequence
  Description of Artificial Sequence: Synthetic oligonucleotide
  Antisense strand to SEQ ID NO: 182840
aaggcugaggaaguuucca

SEQ ID NO: 182842 - RNA, 19 nt, Artificial Sequence
  Description of Artificial Sequence: Synthetic oligonucleotide
  Sense strand starting at position 2824 of SEQ ID NO: 2357
cacaccuugguguaacaga

SEQ ID NO: 182843 - RNA, 19 nt, Artificial Sequence
  Description of Artificial Sequence: Synthetic oligonucleotide
  Antisense strand to SEQ ID NO: 182842
ucuguuacaccaaggugug

SEQ ID NO: 182844 - RNA, 19 nt, Artificial Sequence
  Description of Artificial Sequence: Synthetic oligonucleotide
  Sense strand starting at position 2820 of SEQ ID NO: 2357
gccacacaccuugguguaa

SEQ ID NO: 182845 - RNA, 19 nt, Artificial Sequence
  Description of Artificial Sequence: Synthetic oligonucleotide
  Antisense strand to SEQ ID NO: 182844
uuacaccaagguguguggc

SEQ ID NO: 182846 - RNA, 19 nt, Artificial Sequence
  Description of Artificial Sequence: Synthetic oligonucleotide
  Sense strand starting at position 2670 of SEQ ID NO: 2357
cgauaucaaucugcuucuu

SEQ ID NO: 182847 - RNA, 19 nt, Artificial Sequence
  Description of Artificial Sequence: Synthetic oligonucleotide
  Antisense strand to SEQ ID NO: 182846
aagaagcagauugauaucg

SEQ ID NO: 182848 - RNA, 19 nt, Artificial Sequence
  Description of Artificial Sequence: Synthetic oligonucleotide
  Sense strand starting at position 2396 of SEQ ID NO: 2357
ccuaaacucugaguggaug

SEQ ID NO: 182849 - RNA, 19 nt, Artificial Sequence
  Description of Artificial Sequence: Synthetic oligonucleotide
  Antisense strand to SEQ ID NO: 182848
cauccacucagaguuuagg

SEQ ID NO: 182850 - RNA, 19 nt, Artificial Sequence
  Description of Artificial Sequence: Synthetic oligonucleotide
  Sense strand starting at position 1512 of SEQ ID NO: 2357
cguuuagaaagcgagaauu

SEQ ID NO: 182851 - RNA, 19 nt, Artificial Sequence
  Description of Artificial Sequence: Synthetic oligonucleotide
  Antisense strand to SEQ ID NO: 182850
aauucucgcuuucuaaacg

SEQ ID NO: 182852 - RNA, 19 nt, Artificial Sequence
  Description of Artificial Sequence: Synthetic oligonucleotide
  Sense strand starting at position 1385 of SEQ ID NO: 2357
ggaugauuccagcgucaga

SEQ ID NO: 182853 - RNA, 19 nt, Artificial Sequence
  Description of Artificial Sequence: Synthetic oligonucleotide
  Antisense strand to SEQ ID NO: 182852
ucugacgcuggaaucaucc

SEQ ID NO: 182854 - RNA, 19 nt, Artificial Sequence
  Description of Artificial Sequence: Synthetic oligonucleotide
  Sense strand starting at position 1358 of SEQ ID NO: 2357
ugaucaaauguuuggauag

SEQ ID NO: 182855 - RNA, 19 nt, Artificial Sequence
  Description of Artificial Sequence: Synthetic oligonucleotide
  Antisense strand to SEQ ID NO: 182854
cuauccaaacauuugauca

SEQ ID NO: 182856 - RNA, 19 nt, Artificial Sequence
  Description of Artificial Sequence: Synthetic oligonucleotide
  Sense strand starting at position 1357 of SEQ ID NO: 2357
gugaucaaauguuuggaua

SEQ ID NO: 182857 - RNA, 19 nt, Artificial Sequence
  Description of Artificial Sequence: Synthetic oligonucleotide
  Antisense strand to SEQ ID NO: 182856
uauccaaacauuugaucac

SEQ ID NO: 182858 - RNA, 19 nt, Artificial Sequence
  Description of Artificial Sequence: Synthetic oligonucleotide
  Sense strand starting at position 1350 of SEQ ID NO: 2357
ccaccaagugaucaaaugu

SEQ ID NO: 182859 - RNA, 19 nt, Artificial Sequence
  Description of Artificial Sequence: Synthetic oligonucleotide
  Antisense strand to SEQ ID NO: 182858
acauuugaucacuuggugg

SEQ ID NO: 182860 - RNA, 19 nt, Artificial Sequence
  Description of Artificial Sequence: Synthetic oligonucleotide
  Sense strand starting at position 1244 of SEQ ID NO: 2357
ggugguuggccugagaaug

SEQ ID NO: 182861 - RNA, 19 nt, Artificial Sequence
  Description of Artificial Sequence: Synthetic oligonucleotide
  Antisense strand to SEQ ID NO: 182860
cauucucaggccaaccacc

SEQ ID NO: 182862 - RNA, 19 nt, Artificial Sequence
  Description of Artificial Sequence: Synthetic oligonucleotide
  Sense strand starting at position 1091 of SEQ ID NO: 2357
auaccaucugcugguauau

SEQ ID NO: 182863 - RNA, 19 nt, Artificial Sequence
  Description of Artificial Sequence: Synthetic oligonucleotide
  Antisense strand to SEQ ID NO: 182862
auauaccagcagaugguau

SEQ ID NO: 182864 - RNA, 19 nt, Artificial Sequence
  Description of Artificial Sequence: Synthetic oligonucleotide
  Sense strand starting at position 908 of SEQ ID NO: 2357
gugcccauuccuuaagauu

SEQ ID NO: 182865 - RNA, 19 nt, Artificial Sequence
  Description of Artificial Sequence: Synthetic oligonucleotide
  Antisense strand to SEQ ID NO: 182864
aaucuuaaggaaugggcac

SEQ ID NO: 182866 - RNA, 19 nt, Artificial Sequence
  Description of Artificial Sequence: Synthetic oligonucleotide
  Sense strand starting at position 907 of SEQ ID NO: 2357
ggugcccauuccuuaagau

SEQ ID NO: 182867 - RNA, 19 nt, Artificial Sequence
  Description of Artificial Sequence: Synthetic oligonucleotide
  Antisense strand to SEQ ID NO: 182866
aucuuaaggaaugggcacc

SEQ ID NO: 182868 - RNA, 19 nt, Artificial Sequence
  Description of Artificial Sequence: Synthetic oligonucleotide
  Sense strand starting at position 877 of SEQ ID NO: 2357
aacuguuuccaagaaguug

SEQ ID NO: 182869 - RNA, 19 nt, Artificial Sequence
  Description of Artificial Sequence: Synthetic oligonucleotide
  Antisense strand to SEQ ID NO: 182868
caacuucuuggaaacaguu

SEQ ID NO: 182870 - RNA, 19 nt, Artificial Sequence
  Description of Artificial Sequence: Synthetic oligonucleotide
  Sense strand starting at position 873 of SEQ ID NO: 2357
ugccaacuguuuccaagaa

SEQ ID NO: 182871 - RNA, 19 nt, Artificial Sequence
  Description of Artificial Sequence: Synthetic oligonucleotide
  Antisense strand to SEQ ID NO: 182870
uucuuggaaacaguuggca

SEQ ID NO: 182872 - RNA, 19 nt, Artificial Sequence
  Description of Artificial Sequence: Synthetic oligonucleotide
  Sense strand starting at position 808 of SEQ ID NO: 2357
uggccuguuuacuuaaaca

SEQ ID NO: 182873 - RNA, 19 nt, Artificial Sequence
  Description of Artificial Sequence: Synthetic oligonucleotide
  Antisense strand to SEQ ID NO: 182872
uguuuaaguaaacaggcca

SEQ ID NO: 182874 - RNA, 19 nt, Artificial Sequence
  Description of Artificial Sequence: Synthetic oligonucleotide
  Sense strand starting at position 803 of SEQ ID NO: 2357
gcgaguggccuguuuacuu

SEQ ID NO: 182875 - RNA, 19 nt, Artificial Sequence
  Description of Artificial Sequence: Synthetic oligonucleotide
  Antisense strand to SEQ ID NO: 182874
aaguaaacaggccacucgc

SEQ ID NO: 182876 - RNA, 19 nt, Artificial Sequence
  Description of Artificial Sequence: Synthetic oligonucleotide
  Sense strand starting at position 768 of SEQ ID NO: 2357
ggcguaggcaucuaucaag

SEQ ID NO: 182877 - RNA, 19 nt, Artificial Sequence
  Description of Artificial Sequence: Synthetic oligonucleotide
  Antisense strand to SEQ ID NO: 182876
cuugauagaugccuacgcc

SEQ ID NO: 182878 - RNA, 19 nt, Artificial Sequence
  Description of Artificial Sequence: Synthetic oligonucleotide
  Sense strand starting at position 431 of SEQ ID NO: 2357
caugguuauuuagagacua

SEQ ID NO: 182879 - RNA, 19 nt, Artificial Sequence
  Description of Artificial Sequence: Synthetic oligonucleotide
  Antisense strand to SEQ ID NO: 182878
uagucucuaaauaaccaug

SEQ ID NO: 182880 - RNA, 19 nt, Artificial Sequence
  Description of Artificial Sequence: Synthetic oligonucleotide
  Sense strand starting at position 424 of SEQ ID NO: 2357
gcccacucaugguuauuua

SEQ ID NO: 182881 - RNA, 19 nt, Artificial Sequence
  Description of Artificial Sequence: Synthetic oligonucleotide
  Antisense strand to SEQ ID NO: 182880
uaaauaaccaugagugggc

SEQ ID NO: 182882 - RNA, 19 nt, Artificial Sequence
  Description of Artificial Sequence: Synthetic oligonucleotide
  Sense strand starting at position 422 of SEQ ID NO: 2357
gagcccacucaugguuauu

SEQ ID NO: 182883 - RNA, 19 nt, Artificial Sequence
  Description of Artificial Sequence: Synthetic oligonucleotide
  Antisense strand to SEQ ID NO: 182882
aauaaccaugagugggcuc

SEQ ID NO: 182884 - RNA, 19 nt, Artificial Sequence
  Description of Artificial Sequence: Synthetic oligonucleotide
  Sense strand starting at position 367 of SEQ ID NO: 2357
auaacaugacugugagcua

SEQ ID NO: 182885 - RNA, 19 nt, Artificial Sequence
  Description of Artificial Sequence: Synthetic oligonucleotide
  Antisense strand to SEQ ID NO: 182884
uagcucacagucauguuau

SEQ ID NO: 182886 - RNA, 19 nt, Artificial Sequence
  Description of Artificial Sequence: Synthetic oligonucleotide
  Sense strand starting at position 346 of SEQ ID NO: 2357
ucaagacacccuggucaua

SEQ ID NO: 182887 - RNA, 19 nt, Artificial Sequence
  Description of Artificial Sequence: Synthetic oligonucleotide
  Antisense strand to SEQ ID NO: 182886
uaugaccagggugucuuga

SEQ ID NO: 182888 - RNA, 19 nt, Artificial Sequence
  Description of Artificial Sequence: Synthetic oligonucleotide
  Sense strand starting at position 242 of SEQ ID NO: 2357
aggcucucugugggauuau

SEQ ID NO: 182889 - RNA, 19 nt, Artificial Sequence
  Description of Artificial Sequence: Synthetic oligonucleotide
  Antisense strand to SEQ ID NO: 182888
auaaucccacagagagccu

SEQ ID NO: 182890 - RNA, 19 nt, Artificial Sequence
  Description of Artificial Sequence: Synthetic oligonucleotide
  Sense strand starting at position 240 of SEQ ID NO: 2357
acaggcucucugugggauu

SEQ ID NO: 182891 - RNA, 19 nt, Artificial Sequence
  Description of Artificial Sequence: Synthetic oligonucleotide
  Antisense strand to SEQ ID NO: 182890
aaucccacagagagccugu

SEQ ID NO: 182892 - RNA, 19 nt, Artificial Sequence
  Description of Artificial Sequence: Synthetic oligonucleotide
  Sense strand starting at position 224 of SEQ ID NO: 2357
agagucauguguucucaca

SEQ ID NO: 182893 - RNA, 19 nt, Artificial Sequence
  Description of Artificial Sequence: Synthetic oligonucleotide
  Antisense strand to SEQ ID NO: 182892
ugugagaacacaugacucu

SEQ ID NO: 182894 - RNA, 19 nt, Artificial Sequence
  Description of Artificial Sequence: Synthetic oligonucleotide
  Sense strand starting at position 221 of SEQ ID NO: 2357
aggagagucauguguucuc

SEQ ID NO: 182895 - RNA, 19 nt, Artificial Sequence
  Description of Artificial Sequence: Synthetic oligonucleotide
  Antisense strand to SEQ ID NO: 182894
gagaacacaugacucuccu

SEQ ID NO: 182896 - RNA, 19 nt, Artificial Sequence
  Description of Artificial Sequence: Synthetic oligonucleotide
  Sense strand starting at position 178 of SEQ ID NO: 2357
ugaguuugguaacuuagaa

SEQ ID NO: 182897 - RNA, 19 nt, Artificial Sequence
  Description of Artificial Sequence: Synthetic oligonucleotide
  Antisense strand to SEQ ID NO: 182896
uucuaaguuaccaaacuca

SEQ ID NO: 182898 - RNA, 19 nt, Artificial Sequence
  Description of Artificial Sequence: Synthetic oligonucleotide
  Sense strand starting at position 166 of SEQ ID NO: 2357
uuuaacugucagugaguuu

SEQ ID NO: 182899 - RNA, 19 nt, Artificial Sequence
  Description of Artificial Sequence: Synthetic oligonucleotide
  Antisense strand to SEQ ID NO: 182898
aaacucacugacaguuaaa

SEQ ID NO: 182900 - RNA, 19 nt, Artificial Sequence
  Description of Artificial Sequence: Synthetic oligonucleotide
  Sense strand starting at position 5 of SEQ ID NO: 2357
gucauaacuguccaacugu

SEQ ID NO: 182901 - RNA, 19 nt, Artificial Sequence
  Description of Artificial Sequence: Synthetic oligonucleotide
  Antisense strand to SEQ ID NO: 182900
acaguuggacaguuaugac

SEQ ID NO: 182902 - RNA, 19 nt, Artificial Sequence
  Description of Artificial Sequence: Synthetic oligonucleotide
  Sense strand starting at position 353 of SEQ ID NO: 2358
acagaaagauccuuuguau

SEQ ID NO: 182903 - RNA, 19 nt, Artificial Sequence
  Description of Artificial Sequence: Synthetic oligonucleotide
  Antisense strand to SEQ ID NO: 182902
auacaaaggaucuuucugu

SEQ ID NO: 182904 - RNA, 19 nt, Artificial Sequence
  Description of Artificial Sequence: Synthetic oligonucleotide
  Sense strand starting at position 663 of SEQ ID NO: 2358
accuucuuacaguguaauu

SEQ ID NO: 182905 - RNA, 19 nt, Artificial Sequence
  Description of Artificial Sequence: Synthetic oligonucleotide
  Antisense strand to SEQ ID NO: 182904
aauuacacuguaagaaggu

SEQ ID NO: 182906 - RNA, 19 nt, Artificial Sequence
  Description of Artificial Sequence: Synthetic oligonucleotide
  Sense strand starting at position 836 of SEQ ID NO: 2358
cuuucuguucuauagacuu

SEQ ID NO: 182907 - RNA, 19 nt, Artificial Sequence
  Description of Artificial Sequence: Synthetic oligonucleotide
  Antisense strand to SEQ ID NO: 182906
aagucuauagaacagaaag

SEQ ID NO: 182908 - RNA, 19 nt, Artificial Sequence
  Description of Artificial Sequence: Synthetic oligonucleotide
  Sense strand starting at position 919 of SEQ ID NO: 2358
acuuuaaaggagugaagua

SEQ ID NO: 182909 - RNA, 19 nt, Artificial Sequence
  Description of Artificial Sequence: Synthetic oligonucleotide
  Antisense strand to SEQ ID NO: 182908
uacuucacuccuuuaaagu

SEQ ID NO: 182910 - RNA, 19 nt, Artificial Sequence
  Description of Artificial Sequence: Synthetic oligonucleotide
  Sense strand starting at position 926 of SEQ ID NO: 2358
aggagugaaguauguaaua

SEQ ID NO: 182911 - RNA, 19 nt, Artificial Sequence
  Description of Artificial Sequence: Synthetic oligonucleotide
  Antisense strand to SEQ ID NO: 182910
uauuacauacuucacuccu

SEQ ID NO: 182912 - RNA, 19 nt, Artificial Sequence
  Description of Artificial Sequence: Synthetic oligonucleotide
  Sense strand starting at position 935 of SEQ ID NO: 2358
guauguaauacgugaauua

SEQ ID NO: 182913 - RNA, 19 nt, Artificial Sequence
  Description of Artificial Sequence: Synthetic oligonucleotide
  Antisense strand to SEQ ID NO: 182912
uaauucacguauuacauac

SEQ ID NO: 182914 - RNA, 19 nt, Artificial Sequence
  Description of Artificial Sequence: Synthetic oligonucleotide
  Sense strand starting at position 1271 of SEQ ID NO: 2358
gacacauugucuccagguu

SEQ ID NO: 182915 - RNA, 19 nt, Artificial Sequence
  Description of Artificial Sequence: Synthetic oligonucleotide
  Antisense strand to SEQ ID NO: 182914
aaccuggagacaauguguc

SEQ ID NO: 182916 - RNA, 19 nt, Artificial Sequence
  Description of Artificial Sequence: Synthetic oligonucleotide
  Sense strand starting at position 1272 of SEQ ID NO: 2358
acacauugucuccagguua

SEQ ID NO: 182917 - RNA, 19 nt, Artificial Sequence
  Description of Artificial Sequence: Synthetic oligonucleotide
  Antisense strand to SEQ ID NO: 182916
uaaccuggagacaaugugu

SEQ ID NO: 182918 - RNA, 19 nt, Artificial Sequence
  Description of Artificial Sequence: Synthetic oligonucleotide
  Sense strand starting at position 1285 of SEQ ID NO: 2358
agguuaaucuucucccaga

SEQ ID NO: 182919 - RNA, 19 nt, Artificial Sequence
  Description of Artificial Sequence: Synthetic oligonucleotide
  Antisense strand to SEQ ID NO: 182918
ucugggagaagauuaaccu

SEQ ID NO: 182920 - RNA, 19 nt, Artificial Sequence
  Description of Artificial Sequence: Synthetic oligonucleotide
  Sense strand starting at position 1286 of SEQ ID NO: 2358
gguuaaucuucucccagau

SEQ ID NO: 182921 - RNA, 19 nt, Artificial Sequence
  Description of Artificial Sequence: Synthetic oligonucleotide
  Antisense strand to SEQ ID NO: 182920
aucugggagaagauuaacc

SEQ ID NO: 182922 - RNA, 19 nt, Artificial Sequence
  Description of Artificial Sequence: Synthetic oligonucleotide
  Sense strand starting at position 1704 of SEQ ID NO: 2358
gacgucuaucacgaucuaa

SEQ ID NO: 182923 - RNA, 19 nt, Artificial Sequence
  Description of Artificial Sequence: Synthetic oligonucleotide
  Antisense strand to SEQ ID NO: 182922
uuagaucgugauagacguc

SEQ ID NO: 182924 - RNA, 19 nt, Artificial Sequence
  Description of Artificial Sequence: Synthetic oligonucleotide
  Sense strand starting at position 1761 of SEQ ID NO: 2358
cgcguagucaugguaagca

SEQ ID NO: 182925 - RNA, 19 nt, Artificial Sequence
  Description of Artificial Sequence: Synthetic oligonucleotide
  Antisense strand to SEQ ID NO: 182924
ugcuuaccaugacuacgcg

SEQ ID NO: 182926 - RNA, 19 nt, Artificial Sequence
  Description of Artificial Sequence: Synthetic oligonucleotide
  Sense strand starting at position 2073 of SEQ ID NO: 2358
gggcgaaucccagaaugca

SEQ ID NO: 182927 - RNA, 19 nt, Artificial Sequence
  Description of Artificial Sequence: Synthetic oligonucleotide
  Antisense strand to SEQ ID NO: 182926
ugcauucugggauucgccc

SEQ ID NO: 182928 - RNA, 19 nt, Artificial Sequence
  Description of Artificial Sequence: Synthetic oligonucleotide
  Sense strand starting at position 2224 of SEQ ID NO: 2358
augugugaucccgacagug

SEQ ID NO: 182929 - RNA, 19 nt, Artificial Sequence
  Description of Artificial Sequence: Synthetic oligonucleotide
  Antisense strand to SEQ ID NO: 182928
cacugucgggaucacacau

SEQ ID NO: 182930 - RNA, 19 nt, Artificial Sequence
  Description of Artificial Sequence: Synthetic oligonucleotide
  Sense strand starting at position 2296 of SEQ ID NO: 2358
cccauaugaucaguauugu

SEQ ID NO: 182931 - RNA, 19 nt, Artificial Sequence
  Description of Artificial Sequence: Synthetic oligonucleotide
  Antisense strand to SEQ ID NO: 182930
acaauacugaucauauggg

SEQ ID NO: 182932 - RNA, 19 nt, Artificial Sequence
  Description of Artificial Sequence: Synthetic oligonucleotide
  Sense strand starting at position 2297 of SEQ ID NO: 2358
ccauaugaucaguauugua

SEQ ID NO: 182933 - RNA, 19 nt, Artificial Sequence
  Description of Artificial Sequence: Synthetic oligonucleotide
  Antisense strand to SEQ ID NO: 182932
uacaauacugaucauaugg

SEQ ID NO: 182934 - RNA, 19 nt, Artificial Sequence
  Description of Artificial Sequence: Synthetic oligonucleotide
  Sense strand starting at position 2307 of SEQ ID NO: 2358
aguauuguaacacgaagua

SEQ ID NO: 182935 - RNA, 19 nt, Artificial Sequence
  Description of Artificial Sequence: Synthetic oligonucleotide
  Antisense strand to SEQ ID NO: 182934
uacuucguguuacaauacu

SEQ ID NO: 182936 - RNA, 19 nt, Artificial Sequence
  Description of Artificial Sequence: Synthetic oligonucleotide
  Sense strand starting at position 2317 of SEQ ID NO: 2358
cacgaaguacuguaauacu

SEQ ID NO: 182937 - RNA, 19 nt, Artificial Sequence
  Description of Artificial Sequence: Synthetic oligonucleotide
  Antisense strand to SEQ ID NO: 182936
aguauuacaguacuucgug

SEQ ID NO: 182938 - RNA, 19 nt, Artificial Sequence
  Description of Artificial Sequence: Synthetic oligonucleotide
  Sense strand starting at position 2343 of SEQ ID NO: 2358
ggcugcuuugaggauggau

SEQ ID NO: 182939 - RNA, 19 nt, Artificial Sequence
  Description of Artificial Sequence: Synthetic oligonucleotide
  Antisense strand to SEQ ID NO: 182938
auccauccucaaagcagcc

SEQ ID NO: 182940 - RNA, 19 nt, Artificial Sequence
  Description of Artificial Sequence: Synthetic oligonucleotide
  Sense strand starting at position 2355 of SEQ ID NO: 2358
gauggauugcaaugaugca

SEQ ID NO: 182941 - RNA, 19 nt, Artificial Sequence
  Description of Artificial Sequence: Synthetic oligonucleotide
  Antisense strand to SEQ ID NO: 182940
ugcaucauugcaauccauc

SEQ ID NO: 182942 - RNA, 19 nt, Artificial Sequence
  Description of Artificial Sequence: Synthetic oligonucleotide
  Sense strand starting at position 2367 of SEQ ID NO: 2358
ugaugcaaguacuuaauaa

SEQ ID NO: 182943 - RNA, 19 nt, Artificial Sequence
  Description of Artificial Sequence: Synthetic oligonucleotide
  Antisense strand to SEQ ID NO: 182942
uuauuaaguacuugcauca

SEQ ID NO: 182944 - RNA, 19 nt, Artificial Sequence
  Description of Artificial Sequence: Synthetic oligonucleotide
  Sense strand starting at position 2391 of SEQ ID NO: 2358
uccuaaaucugaguuucug

SEQ ID NO: 182945 - RNA, 19 nt, Artificial Sequence
  Description of Artificial Sequence: Synthetic oligonucleotide
  Antisense strand to SEQ ID NO: 182944
cagaaacucagauuuagga

SEQ ID NO: 182946 - RNA, 19 nt, Artificial Sequence
  Description of Artificial Sequence: Synthetic oligonucleotide
  Sense strand starting at position 2397 of SEQ ID NO: 2358
aucugaguuucugugacaa

SEQ ID NO: 182947 - RNA, 19 nt, Artificial Sequence
  Description of Artificial Sequence: Synthetic oligonucleotide
  Antisense strand to SEQ ID NO: 182946
uugucacagaaacucagau

SEQ ID NO: 182948 - RNA, 19 nt, Artificial Sequence
  Description of Artificial Sequence: Synthetic oligonucleotide
  Sense strand starting at position 2408 of SEQ ID NO: 2358
ugugacaaauccuugacca

SEQ ID NO: 182949 - RNA, 19 nt, Artificial Sequence
  Description of Artificial Sequence: Synthetic oligonucleotide
  Antisense strand to SEQ ID NO: 182948
uggucaaggauuugucaca

SEQ ID NO: 182950 - RNA, 19 nt, Artificial Sequence
  Description of Artificial Sequence: Synthetic oligonucleotide
  Sense strand starting at position 2409 of SEQ ID NO: 2358
gugacaaauccuugaccag

SEQ ID NO: 182951 - RNA, 19 nt, Artificial Sequence
  Description of Artificial Sequence: Synthetic oligonucleotide
  Antisense strand to SEQ ID NO: 182950
cuggucaaggauuugucac

SEQ ID NO: 182952 - RNA, 19 nt, Artificial Sequence
  Description of Artificial Sequence: Synthetic oligonucleotide
  Sense strand starting at position 2466 of SEQ ID NO: 2358
uguguuaagaguuggguaa

SEQ ID NO: 182953 - RNA, 19 nt, Artificial Sequence
  Description of Artificial Sequence: Synthetic oligonucleotide
  Antisense strand to SEQ ID NO: 182952
uuacccaacucuuaacaca

SEQ ID NO: 182954 - RNA, 19 nt, Artificial Sequence
  Description of Artificial Sequence: Synthetic oligonucleotide
  Sense strand starting at position 2467 of SEQ ID NO: 2358
guguuaagaguuggguaag

SEQ ID NO: 182955 - RNA, 19 nt, Artificial Sequence
  Description of Artificial Sequence: Synthetic oligonucleotide
  Antisense strand to SEQ ID NO: 182954
cuuacccaacucuuaacac

SEQ ID NO: 182956 - RNA, 19 nt, Artificial Sequence
  Description of Artificial Sequence: Synthetic oligonucleotide
  Sense strand starting at position 2498 of SEQ ID NO: 2358
cccagagccucaucuguaa

SEQ ID NO: 182957 - RNA, 19 nt, Artificial Sequence
  Description of Artificial Sequence: Synthetic oligonucleotide
  Antisense strand to SEQ ID NO: 182956
uuacagaugaggcucuggg

SEQ ID NO: 182958 - RNA, 19 nt, Artificial Sequence
  Description of Artificial Sequence: Synthetic oligonucleotide
  Sense strand starting at position 2526 of SEQ ID NO: 2358
ggauuagacucagucacca

SEQ ID NO: 182959 - RNA, 19 nt, Artificial Sequence
  Description of Artificial Sequence: Synthetic oligonucleotide
  Antisense strand to SEQ ID NO: 182958
uggugacugagucuaaucc

SEQ ID NO: 182960 - RNA, 19 nt, Artificial Sequence
  Description of Artificial Sequence: Synthetic oligonucleotide
  Sense strand starting at position 2558 of SEQ ID NO: 2358
caguuaagaccacgaacuu

SEQ ID NO: 182961 - RNA, 19 nt, Artificial Sequence
  Description of Artificial Sequence: Synthetic oligonucleotide
  Antisense strand to SEQ ID NO: 182960
aaguucguggucuuaacug

SEQ ID NO: 182962 - RNA, 19 nt, Artificial Sequence
  Description of Artificial Sequence: Synthetic oligonucleotide
  Sense strand starting at position 2559 of SEQ ID NO: 2358
aguuaagaccacgaacuuu

SEQ ID NO: 182963 - RNA, 19 nt, Artificial Sequence
  Description of Artificial Sequence: Synthetic oligonucleotide
  Antisense strand to SEQ ID NO: 182962
aaaguucguggucuuaacu

SEQ ID NO: 182964 - RNA, 19 nt, Artificial Sequence
  Description of Artificial Sequence: Synthetic oligonucleotide
  Sense strand starting at position 2565 of SEQ ID NO: 2358
gaccacgaacuuuggaauu

SEQ ID NO: 182965 - RNA, 19 nt, Artificial Sequence
  Description of Artificial Sequence: Synthetic oligonucleotide
  Antisense strand to SEQ ID NO: 182964
aauuccaaaguucgugguc

SEQ ID NO: 182966 - RNA, 19 nt, Artificial Sequence
  Description of Artificial Sequence: Synthetic oligonucleotide
  Sense strand starting at position 2673 of SEQ ID NO: 2358
uggguugccgugaggauua

SEQ ID NO: 182967 - RNA, 19 nt, Artificial Sequence
  Description of Artificial Sequence: Synthetic oligonucleotide
  Antisense strand to SEQ ID NO: 182966
uaauccucacggcaaccca

SEQ ID NO: 182968 - RNA, 19 nt, Artificial Sequence
  Description of Artificial Sequence: Synthetic oligonucleotide
  Sense strand starting at position 2678 of SEQ ID NO: 2358
ugccgugaggauuaaauaa

SEQ ID NO: 182969 - RNA, 19 nt, Artificial Sequence
  Description of Artificial Sequence: Synthetic oligonucleotide
  Antisense strand to SEQ ID NO: 182968
uuauuuaauccucacggca

SEQ ID NO: 182970 - RNA, 19 nt, Artificial Sequence
  Description of Artificial Sequence: Synthetic oligonucleotide
  Sense strand starting at position 3187 of SEQ ID NO: 2358
uggacagcauucuuuauau

SEQ ID NO: 182971 - RNA, 19 nt, Artificial Sequence
  Description of Artificial Sequence: Synthetic oligonucleotide
  Antisense strand to SEQ ID NO: 182970
auauaaagaaugcugucca

SEQ ID NO: 182972 - RNA, 19 nt, Artificial Sequence
  Description of Artificial Sequence: Synthetic oligonucleotide
  Sense strand starting at position 3704 of SEQ ID NO: 2358
acgcucuuccuagaaacuu

SEQ ID NO: 182973 - RNA, 19 nt, Artificial Sequence
  Description of Artificial Sequence: Synthetic oligonucleotide
  Antisense strand to SEQ ID NO: 182972
aaguuucuaggaagagcgu

SEQ ID NO: 182974 - RNA, 19 nt, Artificial Sequence
  Description of Artificial Sequence: Synthetic oligonucleotide
  Sense strand starting at position 3789 of SEQ ID NO: 2358
ggaggagucugggcggaaa

SEQ ID NO: 182975 - RNA, 19 nt, Artificial Sequence
  Description of Artificial Sequence: Synthetic oligonucleotide
  Antisense strand to SEQ ID NO: 182974
uuuccgcccagacuccucc

SEQ ID NO: 182976 - RNA, 19 nt, Artificial Sequence
  Description of Artificial Sequence: Synthetic oligonucleotide
  Sense strand starting at position 3804 of SEQ ID NO: 2358
gaaagugugacuggagagu

SEQ ID NO: 182977 - RNA, 19 nt, Artificial Sequence
  Description of Artificial Sequence: Synthetic oligonucleotide
  Antisense strand to SEQ ID NO: 182976
acucuccagucacacuuuc

SEQ ID NO: 182978 - RNA, 19 nt, Artificial Sequence
  Description of Artificial Sequence: Synthetic oligonucleotide
  Sense strand starting at position 3895 of SEQ ID NO: 2358
gagaaagacugagaucaug

SEQ ID NO: 182979 - RNA, 19 nt, Artificial Sequence
  Description of Artificial Sequence: Synthetic oligonucleotide
  Antisense strand to SEQ ID NO: 182978
caugaucucagucuuucuc

SEQ ID NO: 182980 - RNA, 19 nt, Artificial Sequence
  Description of Artificial Sequence: Synthetic oligonucleotide
  Sense strand starting at position 3976 of SEQ ID NO: 2358
caccuugcucauggagaua

SEQ ID NO: 182981 - RNA, 19 nt, Artificial Sequence
  Description of Artificial Sequence: Synthetic oligonucleotide
  Antisense strand to SEQ ID NO: 182980
uaucuccaugagcaaggug

SEQ ID NO: 182982 - RNA, 19 nt, Artificial Sequence
  Description of Artificial Sequence: Synthetic oligonucleotide
  Sense strand starting at position 110 of SEQ ID NO: 2359
gcauguaaaugaggccuaa

SEQ ID NO: 182983 - RNA, 19 nt, Artificial Sequence
  Description of Artificial Sequence: Synthetic oligonucleotide
  Antisense strand to SEQ ID NO: 182982
uuaggccucauuuacaugc

SEQ ID NO: 182984 - RNA, 19 nt, Artificial Sequence
  Description of Artificial Sequence: Synthetic oligonucleotide
  Sense strand starting at position 114 of SEQ ID NO: 2359
guaaaugaggccuaaagua

SEQ ID NO: 182985 - RNA, 19 nt, Artificial Sequence
  Description of Artificial Sequence: Synthetic oligonucleotide
  Antisense strand to SEQ ID NO: 182984
uacuuuaggccucauuuac

SEQ ID NO: 182986 - RNA, 19 nt, Artificial Sequence
  Description of Artificial Sequence: Synthetic oligonucleotide
  Sense strand starting at position 1040 of SEQ ID NO: 2359
uucccaguuccuugaaaug

SEQ ID NO: 182987 - RNA, 19 nt, Artificial Sequence
  Description of Artificial Sequence: Synthetic oligonucleotide
  Antisense strand to SEQ ID NO: 182986
cauuucaaggaacugggaa

SEQ ID NO: 182988 - RNA, 19 nt, Artificial Sequence
  Description of Artificial Sequence: Synthetic oligonucleotide
  Sense strand starting at position 1290 of SEQ ID NO: 2359
uacggaauaucugcuaugu

SEQ ID NO: 182989 - RNA, 19 nt, Artificial Sequence
  Description of Artificial Sequence: Synthetic oligonucleotide
  Antisense strand to SEQ ID NO: 182988
acauagcagauauuccgua

SEQ ID NO: 182990 - RNA, 19 nt, Artificial Sequence
  Description of Artificial Sequence: Synthetic oligonucleotide
  Sense strand starting at position 1292 of SEQ ID NO: 2359
cggaauaucugcuauguuc

SEQ ID NO: 182991 - RNA, 19 nt, Artificial Sequence
  Description of Artificial Sequence: Synthetic oligonucleotide
  Antisense strand to SEQ ID NO: 182990
gaacauagcagauauuccg

SEQ ID NO: 182992 - RNA, 19 nt, Artificial Sequence
  Description of Artificial Sequence: Synthetic oligonucleotide
  Sense strand starting at position 1338 of SEQ ID NO: 2359
cauguaauccggcaguucu

SEQ ID NO: 182993 - RNA, 19 nt, Artificial Sequence
  Description of Artificial Sequence: Synthetic oligonucleotide
  Antisense strand to SEQ ID NO: 182992
agaacugccggauuacaug

SEQ ID NO: 182994 - RNA, 19 nt, Artificial Sequence
  Description of Artificial Sequence: Synthetic oligonucleotide
  Sense strand starting at position 1366 of SEQ ID NO: 2359
gggucagagagguagaguu

SEQ ID NO: 182995 - RNA, 19 nt, Artificial Sequence
  Description of Artificial Sequence: Synthetic oligonucleotide
  Antisense strand to SEQ ID NO: 182994
aacucuaccucucugaccc

SEQ ID NO: 182996 - RNA, 19 nt, Artificial Sequence
  Description of Artificial Sequence: Synthetic oligonucleotide
  Sense strand starting at position 1398 of SEQ ID NO: 2359
cucagagcuggucagugau

SEQ ID NO: 182997 - RNA, 19 nt, Artificial Sequence
  Description of Artificial Sequence: Synthetic oligonucleotide
  Antisense strand to SEQ ID NO: 182996
aucacugaccagcucugag

SEQ ID NO: 182998 - RNA, 19 nt, Artificial Sequence
  Description of Artificial Sequence: Synthetic oligonucleotide
  Sense strand starting at position 1400 of SEQ ID NO: 2359
cagagcuggucagugauua

SEQ ID NO: 182999 - RNA, 19 nt, Artificial Sequence
  Description of Artificial Sequence: Synthetic oligonucleotide
  Antisense strand to SEQ ID NO: 182998
uaaucacugaccagcucug

SEQ ID NO: 183000 - RNA, 19 nt, Artificial Sequence
  Description of Artificial Sequence: Synthetic oligonucleotide
  Sense strand starting at position 1401 of SEQ ID NO: 2359
agagcuggucagugauuaa

SEQ ID NO: 183001 - RNA, 19 nt, Artificial Sequence
  Description of Artificial Sequence: Synthetic oligonucleotide
  Antisense strand to SEQ ID NO: 183000
uuaaucacugaccagcucu

SEQ ID NO: 183002 - RNA, 19 nt, Artificial Sequence
  Description of Artificial Sequence: Synthetic oligonucleotide
  Sense strand starting at position 1405 of SEQ ID NO: 2359
cuggucagugauuaaacca

SEQ ID NO: 183003 - RNA, 19 nt, Artificial Sequence
  Description of Artificial Sequence: Synthetic oligonucleotide
  Antisense strand to SEQ ID NO: 183002
ugguuuaaucacugaccag

SEQ ID NO: 183004 - RNA, 19 nt, Artificial Sequence
  Description of Artificial Sequence: Synthetic oligonucleotide
  Sense strand starting at position 1501 of SEQ ID NO: 2359
uccuaucuuguacgaucua

SEQ ID NO: 183005 - RNA, 19 nt, Artificial Sequence
  Description of Artificial Sequence: Synthetic oligonucleotide
  Antisense strand to SEQ ID NO: 183004
uagaucguacaagauagga

SEQ ID NO: 183006 - RNA, 19 nt, Artificial Sequence
  Description of Artificial Sequence: Synthetic oligonucleotide
  Sense strand starting at position 1545 of SEQ ID NO: 2359
gaaccuagagccugguauu

SEQ ID NO: 183007 - RNA, 19 nt, Artificial Sequence
  Description of Artificial Sequence: Synthetic oligonucleotide
  Antisense strand to SEQ ID NO: 183006
aauaccaggcucuagguuc

SEQ ID NO: 183008 - RNA, 19 nt, Artificial Sequence
  Description of Artificial Sequence: Synthetic oligonucleotide
  Sense strand starting at position 1546 of SEQ ID NO: 2359
aaccuagagccugguauua

SEQ ID NO: 183009 - RNA, 19 nt, Artificial Sequence
  Description of Artificial Sequence: Synthetic oligonucleotide
  Antisense strand to SEQ ID NO: 183008
uaauaccaggcucuagguu

SEQ ID NO: 183010 - RNA, 19 nt, Artificial Sequence
  Description of Artificial Sequence: Synthetic oligonucleotide
  Sense strand starting at position 1548 of SEQ ID NO: 2359
ccuagagccugguauuauc

SEQ ID NO: 183011 - RNA, 19 nt, Artificial Sequence
  Description of Artificial Sequence: Synthetic oligonucleotide
  Antisense strand to SEQ ID NO: 183010
gauaauaccaggcucuagg

SEQ ID NO: 183012 - RNA, 19 nt, Artificial Sequence
  Description of Artificial Sequence: Synthetic oligonucleotide
  Sense strand starting at position 1792 of SEQ ID NO: 2359
cugguuaugguacagguaa

SEQ ID NO: 183013 - RNA, 19 nt, Artificial Sequence
  Description of Artificial Sequence: Synthetic oligonucleotide
  Antisense strand to SEQ ID NO: 183012
uuaccuguaccauaaccag

SEQ ID NO: 183014 - RNA, 19 nt, Artificial Sequence
  Description of Artificial Sequence: Synthetic oligonucleotide
  Sense strand starting at position 1794 of SEQ ID NO: 2359
gguuaugguacagguaaga

SEQ ID NO: 183015 - RNA, 19 nt, Artificial Sequence
  Description of Artificial Sequence: Synthetic oligonucleotide
  Antisense strand to SEQ ID NO: 183014
ucuuaccuguaccauaacc

SEQ ID NO: 183016 - RNA, 19 nt, Artificial Sequence
  Description of Artificial Sequence: Synthetic oligonucleotide
  Sense strand starting at position 1895 of SEQ ID NO: 2359
ccagccuucucuccugaga

SEQ ID NO: 183017 - RNA, 19 nt, Artificial Sequence
  Description of Artificial Sequence: Synthetic oligonucleotide
  Antisense strand to SEQ ID NO: 183016
ucucaggagagaaggcugg

SEQ ID NO: 183018 - RNA, 19 nt, Artificial Sequence
  Description of Artificial Sequence: Synthetic oligonucleotide
  Sense strand starting at position 1898 of SEQ ID NO: 2359
gccuucucuccugagagca

SEQ ID NO: 183019 - RNA, 19 nt, Artificial Sequence
  Description of Artificial Sequence: Synthetic oligonucleotide
  Antisense strand to SEQ ID NO: 183018
ugcucucaggagagaaggc

SEQ ID NO: 183020 - RNA, 19 nt, Artificial Sequence
  Description of Artificial Sequence: Synthetic oligonucleotide
  Sense strand starting at position 2005 of SEQ ID NO: 2359
gcgggcugcccugagagaa

SEQ ID NO: 183021 - RNA, 19 nt, Artificial Sequence
  Description of Artificial Sequence: Synthetic oligonucleotide
  Antisense strand to SEQ ID NO: 183020
uucucucagggcagcccgc

SEQ ID NO: 183022 - RNA, 19 nt, Artificial Sequence
  Description of Artificial Sequence: Synthetic oligonucleotide
  Sense strand starting at position 2083 of SEQ ID NO: 2359
gguguuguggaauaauaga

SEQ ID NO: 183023 - RNA, 19 nt, Artificial Sequence
  Description of Artificial Sequence: Synthetic oligonucleotide
  Antisense strand to SEQ ID NO: 183022
ucuauuauuccacaacacc

SEQ ID NO: 183024 - RNA, 19 nt, Artificial Sequence
  Description of Artificial Sequence: Synthetic oligonucleotide
  Sense strand starting at position 2262 of SEQ ID NO: 2359
gagagaagccuggauguuc

SEQ ID NO: 183025 - RNA, 19 nt, Artificial Sequence
  Description of Artificial Sequence: Synthetic oligonucleotide
  Antisense strand to SEQ ID NO: 183024
gaacauccaggcuucucuc

SEQ ID NO: 183026 - RNA, 19 nt, Artificial Sequence
  Description of Artificial Sequence: Synthetic oligonucleotide
  Sense strand starting at position 2271 of SEQ ID NO: 2359
cuggauguucaggaaugca

SEQ ID NO: 183027 - RNA, 19 nt, Artificial Sequence
  Description of Artificial Sequence: Synthetic oligonucleotide
  Antisense strand to SEQ ID NO: 183026
ugcauuccugaacauccag

SEQ ID NO: 183028 - RNA, 19 nt, Artificial Sequence
  Description of Artificial Sequence: Synthetic oligonucleotide
  Sense strand starting at position 2339 of SEQ ID NO: 2359
acugcuauuccaggaggca

SEQ ID NO: 183029 - RNA, 19 nt, Artificial Sequence
  Description of Artificial Sequence: Synthetic oligonucleotide
  Antisense strand to SEQ ID NO: 183028
ugccuccuggaauagcagu

SEQ ID NO: 183030 - RNA, 19 nt, Artificial Sequence
  Description of Artificial Sequence: Synthetic oligonucleotide
  Sense strand starting at position 2409 of SEQ ID NO: 2359
gccaucaaguucuugauca

SEQ ID NO: 183031 - RNA, 19 nt, Artificial Sequence
  Description of Artificial Sequence: Synthetic oligonucleotide
  Antisense strand to SEQ ID NO: 183030
ugaucaagaacuugauggc

SEQ ID NO: 183032 - RNA, 19 nt, Artificial Sequence
  Description of Artificial Sequence: Synthetic oligonucleotide
  Sense strand starting at position 2413 of SEQ ID NO: 2359
ucaaguucuugaucaagaa

SEQ ID NO: 183033 - RNA, 19 nt, Artificial Sequence
  Description of Artificial Sequence: Synthetic oligonucleotide
  Antisense strand to SEQ ID NO: 183032
uucuugaucaagaacuuga

SEQ ID NO: 183034 - RNA, 19 nt, Artificial Sequence
  Description of Artificial Sequence: Synthetic oligonucleotide
  Sense strand starting at position 2602 of SEQ ID NO: 2359
ucacaacugugaugaacuu

SEQ ID NO: 183035 - RNA, 19 nt, Artificial Sequence
  Description of Artificial Sequence: Synthetic oligonucleotide
  Antisense strand to SEQ ID NO: 183034
aaguucaucacaguuguga

SEQ ID NO: 183036 - RNA, 19 nt, Artificial Sequence
  Description of Artificial Sequence: Synthetic oligonucleotide
  Sense strand starting at position 2916 of SEQ ID NO: 2359
gcuggcucgcgucuguaau

SEQ ID NO: 183037 - RNA, 19 nt, Artificial Sequence
  Description of Artificial Sequence: Synthetic oligonucleotide
  Antisense strand to SEQ ID NO: 183036
auuacagacgcgagccagc

SEQ ID NO: 183038 - RNA, 19 nt, Artificial Sequence
  Description of Artificial Sequence: Synthetic oligonucleotide
  Sense strand starting at position 3222 of SEQ ID NO: 2359
gcgugauagcggcugccua

SEQ ID NO: 183039 - RNA, 19 nt, Artificial Sequence
  Description of Artificial Sequence: Synthetic oligonucleotide
  Antisense strand to SEQ ID NO: 183038
uaggcagccgcuaucacgc

SEQ ID NO: 183040 - RNA, 19 nt, Artificial Sequence
  Description of Artificial Sequence: Synthetic oligonucleotide
  Sense strand starting at position 3224 of SEQ ID NO: 2359
gugauagcggcugccuaua

SEQ ID NO: 183041 - RNA, 19 nt, Artificial Sequence
  Description of Artificial Sequence: Synthetic oligonucleotide
  Antisense strand to SEQ ID NO: 183040
uauaggcagccgcuaucac

SEQ ID NO: 183042 - RNA, 19 nt, Artificial Sequence
  Description of Artificial Sequence: Synthetic oligonucleotide
  Sense strand starting at position 3226 of SEQ ID NO: 2359
gauagcggcugccuauaau

SEQ ID NO: 183043 - RNA, 19 nt, Artificial Sequence
  Description of Artificial Sequence: Synthetic oligonucleotide
  Antisense strand to SEQ ID NO: 183042
auuauaggcagccgcuauc

SEQ ID NO: 183044 - RNA, 19 nt, Artificial Sequence
  Description of Artificial Sequence: Synthetic oligonucleotide
  Sense strand starting at position 3345 of SEQ ID NO: 2359
acagaaaguuucugugaaa

SEQ ID NO: 183045 - RNA, 19 nt, Artificial Sequence
  Description of Artificial Sequence: Synthetic oligonucleotide
  Antisense strand to SEQ ID NO: 183044
uuucacagaaacuuucugu

SEQ ID NO: 183046 - RNA, 19 nt, Artificial Sequence
  Description of Artificial Sequence: Synthetic oligonucleotide
  Sense strand starting at position 3348 of SEQ ID NO: 2359
gaaaguuucugugaaaggg

SEQ ID NO: 183047 - RNA, 19 nt, Artificial Sequence
  Description of Artificial Sequence: Synthetic oligonucleotide
  Antisense strand to SEQ ID NO: 183046
cccuuucacagaaacuuuc

SEQ ID NO: 183048 - RNA, 19 nt, Artificial Sequence
  Description of Artificial Sequence: Synthetic oligonucleotide
  Sense strand starting at position 3392 of SEQ ID NO: 2359
ugucccugccugugucaaa

SEQ ID NO: 183049 - RNA, 19 nt, Artificial Sequence
  Description of Artificial Sequence: Synthetic oligonucleotide
  Antisense strand to SEQ ID NO: 183048
uuugacacaggcagggaca

SEQ ID NO: 183050 - RNA, 19 nt, Artificial Sequence
  Description of Artificial Sequence: Synthetic oligonucleotide
  Sense strand starting at position 3431 of SEQ ID NO: 2359
cugacaggaccuuguggaa

SEQ ID NO: 183051 - RNA, 19 nt, Artificial Sequence
  Description of Artificial Sequence: Synthetic oligonucleotide
  Antisense strand to SEQ ID NO: 183050
uuccacaagguccugucag

SEQ ID NO: 183052 - RNA, 19 nt, Artificial Sequence
  Description of Artificial Sequence: Synthetic oligonucleotide
  Sense strand starting at position 3446 of SEQ ID NO: 2359
ggaagaaguaguggucaca

SEQ ID NO: 183053 - RNA, 19 nt, Artificial Sequence
  Description of Artificial Sequence: Synthetic oligonucleotide
  Antisense strand to SEQ ID NO: 183052
ugugaccacuacuucuucc

SEQ ID NO: 183054 - RNA, 19 nt, Artificial Sequence
  Description of Artificial Sequence: Synthetic oligonucleotide
  Sense strand starting at position 3527 of SEQ ID NO: 2359
gggacugcaucuuuaaaua

SEQ ID NO: 183055 - RNA, 19 nt, Artificial Sequence
  Description of Artificial Sequence: Synthetic oligonucleotide
  Antisense strand to SEQ ID NO: 183054
uauuuaaagaugcaguccc

SEQ ID NO: 183056 - RNA, 19 nt, Artificial Sequence
  Description of Artificial Sequence: Synthetic oligonucleotide
  Sense strand starting at position 111 of SEQ ID NO: 2360
uuaagagaugucuagcuuc

SEQ ID NO: 183057 - RNA, 19 nt, Artificial Sequence
  Description of Artificial Sequence: Synthetic oligonucleotide
  Antisense strand to SEQ ID NO: 183056
gaagcuagacaucucuuaa

SEQ ID NO: 183058 - RNA, 19 nt, Artificial Sequence
  Description of Artificial Sequence: Synthetic oligonucleotide
  Sense strand starting at position 273 of SEQ ID NO: 2360
acaaucuguccucaguuua

SEQ ID NO: 183059 - RNA, 19 nt, Artificial Sequence
  Description of Artificial Sequence: Synthetic oligonucleotide
  Antisense strand to SEQ ID NO: 183058
uaaacugaggacagauugu

SEQ ID NO: 183060 - RNA, 19 nt, Artificial Sequence
  Description of Artificial Sequence: Synthetic oligonucleotide
  Sense strand starting at position 324 of SEQ ID NO: 2360
uccagucugcuauauuaug

SEQ ID NO: 183061 - RNA, 19 nt, Artificial Sequence
  Description of Artificial Sequence: Synthetic oligonucleotide
  Antisense strand to SEQ ID NO: 183060
cauaauauagcagacugga

SEQ ID NO: 183062 - RNA, 19 nt, Artificial Sequence
  Description of Artificial Sequence: Synthetic oligonucleotide
  Sense strand starting at position 481 of SEQ ID NO: 2360
accauauuauaguuugacu

SEQ ID NO: 183063 - RNA, 19 nt, Artificial Sequence
  Description of Artificial Sequence: Synthetic oligonucleotide
  Antisense strand to SEQ ID NO: 183062
agucaaacuauaauauggu

SEQ ID NO: 183064 - RNA, 19 nt, Artificial Sequence
  Description of Artificial Sequence: Synthetic oligonucleotide
  Sense strand starting at position 486 of SEQ ID NO: 2360
auuauaguuugacugucaa

SEQ ID NO: 183065 - RNA, 19 nt, Artificial Sequence
  Description of Artificial Sequence: Synthetic oligonucleotide
  Antisense strand to SEQ ID NO: 183064
uugacagucaaacuauaau

SEQ ID NO: 183066 - RNA, 19 nt, Artificial Sequence
  Description of Artificial Sequence: Synthetic oligonucleotide
  Sense strand starting at position 496 of SEQ ID NO: 2360
gacugucaauuauucgaaa

SEQ ID NO: 183067 - RNA, 19 nt, Artificial Sequence
  Description of Artificial Sequence: Synthetic oligonucleotide
  Antisense strand to SEQ ID NO: 183066
uuucgaauaauugacaguc

SEQ ID NO: 183068 - RNA, 19 nt, Artificial Sequence
  Description of Artificial Sequence: Synthetic oligonucleotide
  Sense strand starting at position 864 of SEQ ID NO: 2360
accacugugccugagauau

SEQ ID NO: 183069 - RNA, 19 nt, Artificial Sequence
  Description of Artificial Sequence: Synthetic oligonucleotide
  Antisense strand to SEQ ID NO: 183068
auaucucaggcacaguggu

SEQ ID NO: 183070 - RNA, 19 nt, Artificial Sequence
  Description of Artificial Sequence: Synthetic oligonucleotide
  Sense strand starting at position 868 of SEQ ID NO: 2360
cugugccugagauauagaa

SEQ ID NO: 183071 - RNA, 19 nt, Artificial Sequence
  Description of Artificial Sequence: Synthetic oligonucleotide
  Antisense strand to SEQ ID NO: 183070
uucuauaucucaggcacag

SEQ ID NO: 183072 - RNA, 19 nt, Artificial Sequence
  Description of Artificial Sequence: Synthetic oligonucleotide
  Sense strand starting at position 987 of SEQ ID NO: 2360
uuuaacaucguagagucaa

SEQ ID NO: 183073 - RNA, 19 nt, Artificial Sequence
  Description of Artificial Sequence: Synthetic oligonucleotide
  Antisense strand to SEQ ID NO: 183072
uugacucuacgauguuaaa

SEQ ID NO: 183074 - RNA, 19 nt, Artificial Sequence
  Description of Artificial Sequence: Synthetic oligonucleotide
  Sense strand starting at position 1027 of SEQ ID NO: 2360
aaacguacuguccaaagaa

SEQ ID NO: 183075 - RNA, 19 nt, Artificial Sequence
  Description of Artificial Sequence: Synthetic oligonucleotide
  Antisense strand to SEQ ID NO: 183074
uucuuuggacaguacguuu

SEQ ID NO: 183076 - RNA, 19 nt, Artificial Sequence
  Description of Artificial Sequence: Synthetic oligonucleotide
  Sense strand starting at position 1092 of SEQ ID NO: 2360
uugauuauuuaggacgaaa

SEQ ID NO: 183077 - RNA, 19 nt, Artificial Sequence
  Description of Artificial Sequence: Synthetic oligonucleotide
  Antisense strand to SEQ ID NO: 183076
uuucguccuaaauaaucaa

SEQ ID NO: 183078 - RNA, 19 nt, Artificial Sequence
  Description of Artificial Sequence: Synthetic oligonucleotide
  Sense strand starting at position 1152 of SEQ ID NO: 2360
uggccucuagucuagaaca

SEQ ID NO: 183079 - RNA, 19 nt, Artificial Sequence
  Description of Artificial Sequence: Synthetic oligonucleotide
  Antisense strand to SEQ ID NO: 183078
uguucuagacuagaggcca

SEQ ID NO: 183080 - RNA, 19 nt, Artificial Sequence
  Description of Artificial Sequence: Synthetic oligonucleotide
  Sense strand starting at position 1154 of SEQ ID NO: 2360
gccucuagucuagaacacu

SEQ ID NO: 183081 - RNA, 19 nt, Artificial Sequence
  Description of Artificial Sequence: Synthetic oligonucleotide
  Antisense strand to SEQ ID NO: 183080
aguguucuagacuagaggc

SEQ ID NO: 183082 - RNA, 19 nt, Artificial Sequence
  Description of Artificial Sequence: Synthetic oligonucleotide
  Sense strand starting at position 1303 of SEQ ID NO: 2360
ugcuuugaauaaccagaau

SEQ ID NO: 183083 - RNA, 19 nt, Artificial Sequence
  Description of Artificial Sequence: Synthetic oligonucleotide
  Antisense strand to SEQ ID NO: 183082
auucugguuauucaaagca

SEQ ID NO: 183084 - RNA, 19 nt, Artificial Sequence
  Description of Artificial Sequence: Synthetic oligonucleotide
  Sense strand starting at position 1383 of SEQ ID NO: 2360
uggcuucugcaggacuaau

SEQ ID NO: 183085 - RNA, 19 nt, Artificial Sequence
  Description of Artificial Sequence: Synthetic oligonucleotide
  Antisense strand to SEQ ID NO: 183084
auuaguccugcagaagcca

SEQ ID NO: 183086 - RNA, 19 nt, Artificial Sequence
  Description of Artificial Sequence: Synthetic oligonucleotide
  Sense strand starting at position 1394 of SEQ ID NO: 2360
ggacuaauggccugagcaa

SEQ ID NO: 183087 - RNA, 19 nt, Artificial Sequence
  Description of Artificial Sequence: Synthetic oligonucleotide
  Antisense strand to SEQ ID NO: 183086
uugcucaggccauuagucc

SEQ ID NO: 183088 - RNA, 19 nt, Artificial Sequence
  Description of Artificial Sequence: Synthetic oligonucleotide
  Sense strand starting at position 1395 of SEQ ID NO: 2360
gacuaauggccugagcaau

SEQ ID NO: 183089 - RNA, 19 nt, Artificial Sequence
  Description of Artificial Sequence: Synthetic oligonucleotide
  Antisense strand to SEQ ID NO: 183088
auugcucaggccauuaguc

SEQ ID NO: 183090 - RNA, 19 nt, Artificial Sequence
  Description of Artificial Sequence: Synthetic oligonucleotide
  Sense strand starting at position 2821 of SEQ ID NO: 2360
aggagaaagguuuguccau

SEQ ID NO: 183091 - RNA, 19 nt, Artificial Sequence
  Description of Artificial Sequence: Synthetic oligonucleotide
  Antisense strand to SEQ ID NO: 183090
auggacaaaccuuucuccu

SEQ ID NO: 183092 - RNA, 19 nt, Artificial Sequence
  Description of Artificial Sequence: Synthetic oligonucleotide
  Sense strand starting at position 2822 of SEQ ID NO: 2360
ggagaaagguuuguccaug

SEQ ID NO: 183093 - RNA, 19 nt, Artificial Sequence
  Description of Artificial Sequence: Synthetic oligonucleotide
  Antisense strand to SEQ ID NO: 183092
cauggacaaaccuuucucc

SEQ ID NO: 183094 - RNA, 19 nt, Artificial Sequence
  Description of Artificial Sequence: Synthetic oligonucleotide
  Sense strand starting at position 2897 of SEQ ID NO: 2360
acaaaugucguguauuaau

SEQ ID NO: 183095 - RNA, 19 nt, Artificial Sequence
  Description of Artificial Sequence: Synthetic oligonucleotide
  Antisense strand to SEQ ID NO: 183094
auuaauacacgacauuugu

SEQ ID NO: 183096 - RNA, 19 nt, Artificial Sequence
  Description of Artificial Sequence: Synthetic oligonucleotide
  Sense strand starting at position 3056 of SEQ ID NO: 2360
agucguuaaguguauauuu

SEQ ID NO: 183097 - RNA, 19 nt, Artificial Sequence
  Description of Artificial Sequence: Synthetic oligonucleotide
  Antisense strand to SEQ ID NO: 183096
aaauauacacuuaacgacu

SEQ ID NO: 183098 - RNA, 19 nt, Artificial Sequence
  Description of Artificial Sequence: Synthetic oligonucleotide
  Sense strand starting at position 3201 of SEQ ID NO: 2360
ugugcuacagauuauguga

SEQ ID NO: 183099 - RNA, 19 nt, Artificial Sequence
  Description of Artificial Sequence: Synthetic oligonucleotide
  Antisense strand to SEQ ID NO: 183098
ucacauaaucuguagcaca

SEQ ID NO: 183100 - RNA, 19 nt, Artificial Sequence
  Description of Artificial Sequence: Synthetic oligonucleotide
  Sense strand starting at position 3222 of SEQ ID NO: 2360
ccaugaaauaaacguggua

SEQ ID NO: 183101 - RNA, 19 nt, Artificial Sequence
  Description of Artificial Sequence: Synthetic oligonucleotide
  Antisense strand to SEQ ID NO: 183100
uaccacguuuauuucaugg

SEQ ID NO: 183102 - RNA, 19 nt, Artificial Sequence
  Description of Artificial Sequence: Synthetic oligonucleotide
  Sense strand starting at position 3224 of SEQ ID NO: 2360
augaaauaaacgugguaaa

SEQ ID NO: 183103 - RNA, 19 nt, Artificial Sequence
  Description of Artificial Sequence: Synthetic oligonucleotide
  Antisense strand to SEQ ID NO: 183102
uuuaccacguuuauuucau

SEQ ID NO: 183104 - RNA, 19 nt, Artificial Sequence
  Description of Artificial Sequence: Synthetic oligonucleotide
  Sense strand starting at position 3225 of SEQ ID NO: 2360
ugaaauaaacgugguaaau

SEQ ID NO: 183105 - RNA, 19 nt, Artificial Sequence
  Description of Artificial Sequence: Synthetic oligonucleotide
  Antisense strand to SEQ ID NO: 183104
auuuaccacguuuauuuca

SEQ ID NO: 183106 - RNA, 19 nt, Artificial Sequence
  Description of Artificial Sequence: Synthetic oligonucleotide
  Sense strand starting at position 3321 of SEQ ID NO: 2360
uaugaaguguugguuuaaa

SEQ ID NO: 183107 - RNA, 19 nt, Artificial Sequence
  Description of Artificial Sequence: Synthetic oligonucleotide
  Antisense strand to SEQ ID NO: 183106
uuuaaaccaacacuucaua

SEQ ID NO: 183108 - RNA, 19 nt, Artificial Sequence
  Description of Artificial Sequence: Synthetic oligonucleotide
  Sense strand starting at position 3352 of SEQ ID NO: 2360
uguaacuuucuugaaguuu

SEQ ID NO: 183109 - RNA, 19 nt, Artificial Sequence
  Description of Artificial Sequence: Synthetic oligonucleotide
  Antisense strand to SEQ ID NO: 183108
aaacuucaagaaaguuaca

SEQ ID NO: 183110 - RNA, 19 nt, Artificial Sequence
  Description of Artificial Sequence: Synthetic oligonucleotide
  Sense strand starting at position 3363 of SEQ ID NO: 2360
ugaaguuuaucuccggaaa

SEQ ID NO: 183111 - RNA, 19 nt, Artificial Sequence
  Description of Artificial Sequence: Synthetic oligonucleotide
  Antisense strand to SEQ ID NO: 183110
uuuccggagauaaacuuca

SEQ ID NO: 183112 - RNA, 19 nt, Artificial Sequence
  Description of Artificial Sequence: Synthetic oligonucleotide
  Sense strand starting at position 3364 of SEQ ID NO: 2360
gaaguuuaucuccggaaac

SEQ ID NO: 183113 - RNA, 19 nt, Artificial Sequence
  Description of Artificial Sequence: Synthetic oligonucleotide
  Antisense strand to SEQ ID NO: 183112
guuuccggagauaaacuuc

SEQ ID NO: 183114 - RNA, 19 nt, Artificial Sequence
  Description of Artificial Sequence: Synthetic oligonucleotide
  Sense strand starting at position 3366 of SEQ ID NO: 2360
aguuuaucuccggaaacuc

SEQ ID NO: 183115 - RNA, 19 nt, Artificial Sequence
  Description of Artificial Sequence: Synthetic oligonucleotide
  Antisense strand to SEQ ID NO: 183114
gaguuuccggagauaaacu

SEQ ID NO: 183116 - RNA, 19 nt, Artificial Sequence
  Description of Artificial Sequence: Synthetic oligonucleotide
  Sense strand starting at position 3466 of SEQ ID NO: 2360
aguccagaaugauuggcau

SEQ ID NO: 183117 - RNA, 19 nt, Artificial Sequence
  Description of Artificial Sequence: Synthetic oligonucleotide
  Antisense strand to SEQ ID NO: 183116
augccaaucauucuggacu

SEQ ID NO: 183118 - RNA, 19 nt, Artificial Sequence
  Description of Artificial Sequence: Synthetic oligonucleotide
  Sense strand starting at position 3519 of SEQ ID NO: 2360
ucuguaauauugcuaugaa

SEQ ID NO: 183119 - RNA, 19 nt, Artificial Sequence
  Description of Artificial Sequence: Synthetic oligonucleotide
  Antisense strand to SEQ ID NO: 183118
uucauagcaauauuacaga

SEQ ID NO: 183120 - RNA, 19 nt, Artificial Sequence
  Description of Artificial Sequence: Synthetic oligonucleotide
  Sense strand starting at position 3701 of SEQ ID NO: 2360
acguuuaauccugagaguu

SEQ ID NO: 183121 - RNA, 19 nt, Artificial Sequence
  Description of Artificial Sequence: Synthetic oligonucleotide
  Antisense strand to SEQ ID NO: 183120
aacucucaggauuaaacgu

SEQ ID NO: 183122 - RNA, 19 nt, Artificial Sequence
  Description of Artificial Sequence: Synthetic oligonucleotide
  Sense strand starting at position 3730 of SEQ ID NO: 2360
gccagauuucugggucuuu

SEQ ID NO: 183123 - RNA, 19 nt, Artificial Sequence
  Description of Artificial Sequence: Synthetic oligonucleotide
  Antisense strand to SEQ ID NO: 183122
aaagacccagaaaucuggc

SEQ ID NO: 183124 - RNA, 19 nt, Artificial Sequence
  Description of Artificial Sequence: Synthetic oligonucleotide
  Sense strand starting at position 3765 of SEQ ID NO: 2360
ggcaacuacuaguuccaua

SEQ ID NO: 183125 - RNA, 19 nt, Artificial Sequence
  Description of Artificial Sequence: Synthetic oligonucleotide
  Antisense strand to SEQ ID NO: 183124
uauggaacuaguaguugcc

SEQ ID NO: 183126 - RNA, 19 nt, Artificial Sequence
  Description of Artificial Sequence: Synthetic oligonucleotide
  Sense strand starting at position 3869 of SEQ ID NO: 2360
ucacauugaucaguggauu

SEQ ID NO: 183127 - RNA, 19 nt, Artificial Sequence
  Description of Artificial Sequence: Synthetic oligonucleotide
  Antisense strand to SEQ ID NO: 183126
aauccacugaucaauguga

SEQ ID NO: 183128 - RNA, 19 nt, Artificial Sequence
  Description of Artificial Sequence: Synthetic oligonucleotide
  Sense strand starting at position 3870 of SEQ ID NO: 2360
cacauugaucaguggauuc

SEQ ID NO: 183129 - RNA, 19 nt, Artificial Sequence
  Description of Artificial Sequence: Synthetic oligonucleotide
  Antisense strand to SEQ ID NO: 183128
gaauccacugaucaaugug

SEQ ID NO: 183130 - RNA, 19 nt, Artificial Sequence
  Description of Artificial Sequence: Synthetic oligonucleotide
  Sense strand starting at position 3894 of SEQ ID NO: 2360
ccuguaucauggguaaaca

SEQ ID NO: 183131 - RNA, 19 nt, Artificial Sequence
  Description of Artificial Sequence: Synthetic oligonucleotide
  Antisense strand to SEQ ID NO: 183130
uguuuacccaugauacagg

SEQ ID NO: 183132 - RNA, 19 nt, Artificial Sequence
  Description of Artificial Sequence: Synthetic oligonucleotide
  Sense strand starting at position 3948 of SEQ ID NO: 2360
ucuuuacauuugucaugca

SEQ ID NO: 183133 - RNA, 19 nt, Artificial Sequence
  Description of Artificial Sequence: Synthetic oligonucleotide
  Antisense strand to SEQ ID NO: 183132
ugcaugacaaauguaaaga

SEQ ID NO: 183134 - RNA, 19 nt, Artificial Sequence
  Description of Artificial Sequence: Synthetic oligonucleotide
  Sense strand starting at position 3972 of SEQ ID NO: 2360
auagauaugucagcuuuga

SEQ ID NO: 183135 - RNA, 19 nt, Artificial Sequence
  Description of Artificial Sequence: Synthetic oligonucleotide
  Antisense strand to SEQ ID NO: 183134
ucaaagcugacauaucuau

SEQ ID NO: 183136 - RNA, 19 nt, Artificial Sequence
  Description of Artificial Sequence: Synthetic oligonucleotide
  Sense strand starting at position 3735 of SEQ ID NO: 2361
gauauuagguaguuaagga

SEQ ID NO: 183137 - RNA, 19 nt, Artificial Sequence
  Description of Artificial Sequence: Synthetic oligonucleotide
  Antisense strand to SEQ ID NO: 183136
uccuuaacuaccuaauauc

SEQ ID NO: 183138 - RNA, 19 nt, Artificial Sequence
  Description of Artificial Sequence: Synthetic oligonucleotide
  Sense strand starting at position 3681 of SEQ ID NO: 2361
uuuauagcccauuggaauu

SEQ ID NO: 183139 - RNA, 19 nt, Artificial Sequence
  Description of Artificial Sequence: Synthetic oligonucleotide
  Antisense strand to SEQ ID NO: 183138
aauuccaaugggcuauaaa

SEQ ID NO: 183140 - RNA, 19 nt, Artificial Sequence
  Description of Artificial Sequence: Synthetic oligonucleotide
  Sense strand starting at position 3652 of SEQ ID NO: 2361
auuagucaucauggacuuu

SEQ ID NO: 183141 - RNA, 19 nt, Artificial Sequence
  Description of Artificial Sequence: Synthetic oligonucleotide
  Antisense strand to SEQ ID NO: 183140
aaaguccaugaugacuaau

SEQ ID NO: 183142 - RNA, 19 nt, Artificial Sequence
  Description of Artificial Sequence: Synthetic oligonucleotide
  Sense strand starting at position 3539 of SEQ ID NO: 2361
gggugaaguuuccuaaagg

SEQ ID NO: 183143 - RNA, 19 nt, Artificial Sequence
  Description of Artificial Sequence: Synthetic oligonucleotide
  Antisense strand to SEQ ID NO: 183142
ccuuuaggaaacuucaccc

SEQ ID NO: 183144 - RNA, 19 nt, Artificial Sequence
  Description of Artificial Sequence: Synthetic oligonucleotide
  Sense strand starting at position 3529 of SEQ ID NO: 2361
gcaggcauuugggugaagu

SEQ ID NO: 183145 - RNA, 19 nt, Artificial Sequence
  Description of Artificial Sequence: Synthetic oligonucleotide
  Antisense strand to SEQ ID NO: 183144
acuucacccaaaugccugc

SEQ ID NO: 183146 - RNA, 19 nt, Artificial Sequence
  Description of Artificial Sequence: Synthetic oligonucleotide
  Sense strand starting at position 3419 of SEQ ID NO: 2361
gcauauaucuaggaauuac

SEQ ID NO: 183147 - RNA, 19 nt, Artificial Sequence
  Description of Artificial Sequence: Synthetic oligonucleotide
  Antisense strand to SEQ ID NO: 183146
guaauuccuagauauaugc

SEQ ID NO: 183148 - RNA, 19 nt, Artificial Sequence
  Description of Artificial Sequence: Synthetic oligonucleotide
  Sense strand starting at position 3418 of SEQ ID NO: 2361
cgcauauaucuaggaauua

SEQ ID NO: 183149 - RNA, 19 nt, Artificial Sequence
  Description of Artificial Sequence: Synthetic oligonucleotide
  Antisense strand to SEQ ID NO: 183148
uaauuccuagauauaugcg

SEQ ID NO: 183150 - RNA, 19 nt, Artificial Sequence
  Description of Artificial Sequence: Synthetic oligonucleotide
  Sense strand starting at position 3408 of SEQ ID NO: 2361
ccagucccuccgcauauau

SEQ ID NO: 183151 - RNA, 19 nt, Artificial Sequence
  Description of Artificial Sequence: Synthetic oligonucleotide
  Antisense strand to SEQ ID NO: 183150
auauaugcggagggacugg

SEQ ID NO: 183152 - RNA, 19 nt, Artificial Sequence
  Description of Artificial Sequence: Synthetic oligonucleotide
  Sense strand starting at position 3364 of SEQ ID NO: 2361
gggacuucauguguggauu

SEQ ID NO: 183153 - RNA, 19 nt, Artificial Sequence
  Description of Artificial Sequence: Synthetic oligonucleotide
  Antisense strand to SEQ ID NO: 183152
aauccacacaugaaguccc

SEQ ID NO: 183154 - RNA, 19 nt, Artificial Sequence
  Description of Artificial Sequence: Synthetic oligonucleotide
  Sense strand starting at position 3082 of SEQ ID NO: 2361
ucucucaagccagggaaau

SEQ ID NO: 183155 - RNA, 19 nt, Artificial Sequence
  Description of Artificial Sequence: Synthetic oligonucleotide
  Antisense strand to SEQ ID NO: 183154
auuucccuggcuugagaga

SEQ ID NO: 183156 - RNA, 19 nt, Artificial Sequence
  Description of Artificial Sequence: Synthetic oligonucleotide
  Sense strand starting at position 3011 of SEQ ID NO: 2361
cgucaauagcauuaucuuu

SEQ ID NO: 183157 - RNA, 19 nt, Artificial Sequence
  Description of Artificial Sequence: Synthetic oligonucleotide
  Antisense strand to SEQ ID NO: 183156
aaagauaaugcuauugacg

SEQ ID NO: 183158 - RNA, 19 nt, Artificial Sequence
  Description of Artificial Sequence: Synthetic oligonucleotide
  Sense strand starting at position 2949 of SEQ ID NO: 2361
uccugugaacuugggacua

SEQ ID NO: 183159 - RNA, 19 nt, Artificial Sequence
  Description of Artificial Sequence: Synthetic oligonucleotide
  Antisense strand to SEQ ID NO: 183158
uagucccaaguucacagga

SEQ ID NO: 183160 - RNA, 19 nt, Artificial Sequence
  Description of Artificial Sequence: Synthetic oligonucleotide
  Sense strand starting at position 2862 of SEQ ID NO: 2361
uuucuaaagcgcugaaacu

SEQ ID NO: 183161 - RNA, 19 nt, Artificial Sequence
  Description of Artificial Sequence: Synthetic oligonucleotide
  Antisense strand to SEQ ID NO: 183160
aguuucagcgcuuuagaaa

SEQ ID NO: 183162 - RNA, 19 nt, Artificial Sequence
  Description of Artificial Sequence: Synthetic oligonucleotide
  Sense strand starting at position 2837 of SEQ ID NO: 2361
uguauuaguguuugaagag

SEQ ID NO: 183163 - RNA, 19 nt, Artificial Sequence
  Description of Artificial Sequence: Synthetic oligonucleotide
  Antisense strand to SEQ ID NO: 183162
cucuucaaacacuaauaca

SEQ ID NO: 183164 - RNA, 19 nt, Artificial Sequence
  Description of Artificial Sequence: Synthetic oligonucleotide
  Sense strand starting at position 2836 of SEQ ID NO: 2361
cuguauuaguguuugaaga

SEQ ID NO: 183165 - RNA, 19 nt, Artificial Sequence
  Description of Artificial Sequence: Synthetic oligonucleotide
  Antisense strand to SEQ ID NO: 183164
ucuucaaacacuaauacag

SEQ ID NO: 183166 - RNA, 19 nt, Artificial Sequence
  Description of Artificial Sequence: Synthetic oligonucleotide
  Sense strand starting at position 2825 of SEQ ID NO: 2361
cagucuaggcccuguauua

SEQ ID NO: 183167 - RNA, 19 nt, Artificial Sequence
  Description of Artificial Sequence: Synthetic oligonucleotide
  Antisense strand to SEQ ID NO: 183166
uaauacagggccuagacug

SEQ ID NO: 183168 - RNA, 19 nt, Artificial Sequence
  Description of Artificial Sequence: Synthetic oligonucleotide
  Sense strand starting at position 2787 of SEQ ID NO: 2361
gaauuaguguauguaaagu

SEQ ID NO: 183169 - RNA, 19 nt, Artificial Sequence
  Description of Artificial Sequence: Synthetic oligonucleotide
  Antisense strand to SEQ ID NO: 183168
acuuuacauacacuaauuc

SEQ ID NO: 183170 - RNA, 19 nt, Artificial Sequence
  Description of Artificial Sequence: Synthetic oligonucleotide
  Sense strand starting at position 2614 of SEQ ID NO: 2361
ggcaaucagucacuuagaa

SEQ ID NO: 183171 - RNA, 19 nt, Artificial Sequence
  Description of Artificial Sequence: Synthetic oligonucleotide
  Antisense strand to SEQ ID NO: 183170
uucuaagugacugauugcc

SEQ ID NO: 183172 - RNA, 19 nt, Artificial Sequence
  Description of Artificial Sequence: Synthetic oligonucleotide
  Sense strand starting at position 2533 of SEQ ID NO: 2361
uuccuauggaguuagggua

SEQ ID NO: 183173 - RNA, 19 nt, Artificial Sequence
  Description of Artificial Sequence: Synthetic oligonucleotide
  Antisense strand to SEQ ID NO: 183172
uacccuaacuccauaggaa

SEQ ID NO: 183174 - RNA, 19 nt, Artificial Sequence
  Description of Artificial Sequence: Synthetic oligonucleotide
  Sense strand starting at position 2527 of SEQ ID NO: 2361
cugagcuuccuauggaguu

SEQ ID NO: 183175 - RNA, 19 nt, Artificial Sequence
  Description of Artificial Sequence: Synthetic oligonucleotide
  Antisense strand to SEQ ID NO: 183174
aacuccauaggaagcucag

SEQ ID NO: 183176 - RNA, 19 nt, Artificial Sequence
  Description of Artificial Sequence: Synthetic oligonucleotide
  Sense strand starting at position 2433 of SEQ ID NO: 2361
ucucuagugaagggcaauu

SEQ ID NO: 183177 - RNA, 19 nt, Artificial Sequence
  Description of Artificial Sequence: Synthetic oligonucleotide
  Antisense strand to SEQ ID NO: 183176
aauugcccuucacuagaga

SEQ ID NO: 183178 - RNA, 19 nt, Artificial Sequence
  Description of Artificial Sequence: Synthetic oligonucleotide
  Sense strand starting at position 2367 of SEQ ID NO: 2361
uuagauauuuccugucuug

SEQ ID NO: 183179 - RNA, 19 nt, Artificial Sequence
  Description of Artificial Sequence: Synthetic oligonucleotide
  Antisense strand to SEQ ID NO: 183178
caagacaggaaauaucuaa

SEQ ID NO: 183180 - RNA, 19 nt, Artificial Sequence
  Description of Artificial Sequence: Synthetic oligonucleotide
  Sense strand starting at position 2363 of SEQ ID NO: 2361
ggcuuuagauauuuccugu

SEQ ID NO: 183181 - RNA, 19 nt, Artificial Sequence
  Description of Artificial Sequence: Synthetic oligonucleotide
  Antisense strand to SEQ ID NO: 183180
acaggaaauaucuaaagcc

SEQ ID NO: 183182 - RNA, 19 nt, Artificial Sequence
  Description of Artificial Sequence: Synthetic oligonucleotide
  Sense strand starting at position 2356 of SEQ ID NO: 2361
agccgcuggcuuuagauau

SEQ ID NO: 183183 - RNA, 19 nt, Artificial Sequence
  Description of Artificial Sequence: Synthetic oligonucleotide
  Antisense strand to SEQ ID NO: 183182
auaucuaaagccagcggcu

SEQ ID NO: 183184 - RNA, 19 nt, Artificial Sequence
  Description of Artificial Sequence: Synthetic oligonucleotide
  Sense strand starting at position 2333 of SEQ ID NO: 2361
cccguucgccaagauaaua

SEQ ID NO: 183185 - RNA, 19 nt, Artificial Sequence
  Description of Artificial Sequence: Synthetic oligonucleotide
  Antisense strand to SEQ ID NO: 183184
uauuaucuuggcgaacggg

SEQ ID NO: 183186 - RNA, 19 nt, Artificial Sequence
  Description of Artificial Sequence: Synthetic oligonucleotide
  Sense strand starting at position 2330 of SEQ ID NO: 2361
ucucccguucgccaagaua

SEQ ID NO: 183187 - RNA, 19 nt, Artificial Sequence
  Description of Artificial Sequence: Synthetic oligonucleotide
  Antisense strand to SEQ ID NO: 183186
uaucuuggcgaacgggaga

SEQ ID NO: 183188 - RNA, 19 nt, Artificial Sequence
  Description of Artificial Sequence: Synthetic oligonucleotide
  Sense strand starting at position 2241 of SEQ ID NO: 2361
agauuaguguggaacgaag

SEQ ID NO: 183189 - RNA, 19 nt, Artificial Sequence
  Description of Artificial Sequence: Synthetic oligonucleotide
  Antisense strand to SEQ ID NO: 183188
cuucguuccacacuaaucu

SEQ ID NO: 183190 - RNA, 19 nt, Artificial Sequence
  Description of Artificial Sequence: Synthetic oligonucleotide
  Sense strand starting at position 2225 of SEQ ID NO: 2361
uuugaacaagcuugaaaga

SEQ ID NO: 183191 - RNA, 19 nt, Artificial Sequence
  Description of Artificial Sequence: Synthetic oligonucleotide
  Antisense strand to SEQ ID NO: 183190
ucuuucaagcuuguucaaa

SEQ ID NO: 183192 - RNA, 19 nt, Artificial Sequence
  Description of Artificial Sequence: Synthetic oligonucleotide
  Sense strand starting at position 2195 of SEQ ID NO: 2361
gaaggaauggcccagguuu

SEQ ID NO: 183193 - RNA, 19 nt, Artificial Sequence
  Description of Artificial Sequence: Synthetic oligonucleotide
  Antisense strand to SEQ ID NO: 183192
aaaccugggccauuccuuc

SEQ ID NO: 183194 - RNA, 19 nt, Artificial Sequence
  Description of Artificial Sequence: Synthetic oligonucleotide
  Sense strand starting at position 2183 of SEQ ID NO: 2361
cagauuagauaagaaggaa

SEQ ID NO: 183195 - RNA, 19 nt, Artificial Sequence
  Description of Artificial Sequence: Synthetic oligonucleotide
  Antisense strand to SEQ ID NO: 183194
uuccuucuuaucuaaucug

SEQ ID NO: 183196 - RNA, 19 nt, Artificial Sequence
  Description of Artificial Sequence: Synthetic oligonucleotide
  Sense strand starting at position 2102 of SEQ ID NO: 2361
gaaacaggcuguucuguau

SEQ ID NO: 183197 - RNA, 19 nt, Artificial Sequence
  Description of Artificial Sequence: Synthetic oligonucleotide
  Antisense strand to SEQ ID NO: 183196
auacagaacagccuguuuc

SEQ ID NO: 183198 - RNA, 19 nt, Artificial Sequence
  Description of Artificial Sequence: Synthetic oligonucleotide
  Sense strand starting at position 968 of SEQ ID NO: 2361
cuauuuggcucucagacuu

SEQ ID NO: 183199 - RNA, 19 nt, Artificial Sequence
  Description of Artificial Sequence: Synthetic oligonucleotide
  Antisense strand to SEQ ID NO: 183198
aagucugagagccaaauag

SEQ ID NO: 183200 - RNA, 19 nt, Artificial Sequence
  Description of Artificial Sequence: Synthetic oligonucleotide
  Sense strand starting at position 737 of SEQ ID NO: 2361
agucauuucccuugucucu

SEQ ID NO: 183201 - RNA, 19 nt, Artificial Sequence
  Description of Artificial Sequence: Synthetic oligonucleotide
  Antisense strand to SEQ ID NO: 183200
agagacaagggaaaugacu

SEQ ID NO: 183202 - RNA, 19 nt, Artificial Sequence
  Description of Artificial Sequence: Synthetic oligonucleotide
  Sense strand starting at position 613 of SEQ ID NO: 2361
gguguuaaacggugggaaa

SEQ ID NO: 183203 - RNA, 19 nt, Artificial Sequence
  Description of Artificial Sequence: Synthetic oligonucleotide
  Antisense strand to SEQ ID NO: 183202
uuucccaccguuuaacacc

SEQ ID NO: 183204 - RNA, 19 nt, Artificial Sequence
  Description of Artificial Sequence: Synthetic oligonucleotide
  Sense strand starting at position 603 of SEQ ID NO: 2361
gaaguuggaggguguuaaa

SEQ ID NO: 183205 - RNA, 19 nt, Artificial Sequence
  Description of Artificial Sequence: Synthetic oligonucleotide
  Antisense strand to SEQ ID NO: 183204
uuuaacacccuccaacuuc

SEQ ID NO: 183206 - RNA, 19 nt, Artificial Sequence
  Description of Artificial Sequence: Synthetic oligonucleotide
  Sense strand starting at position 590 of SEQ ID NO: 2361
ccgugcuccaaaugaaguu

SEQ ID NO: 183207 - RNA, 19 nt, Artificial Sequence
  Description of Artificial Sequence: Synthetic oligonucleotide
  Antisense strand to SEQ ID NO: 183206
aacuucauuuggagcacgg

SEQ ID NO: 183208 - RNA, 19 nt, Artificial Sequence
  Description of Artificial Sequence: Synthetic oligonucleotide
  Sense strand starting at position 372 of SEQ ID NO: 2361
ggcuccuugcgcuaaagua

SEQ ID NO: 183209 - RNA, 19 nt, Artificial Sequence
  Description of Artificial Sequence: Synthetic oligonucleotide
  Antisense strand to SEQ ID NO: 183208
uacuuuagcgcaaggagcc

SEQ ID NO: 183210 - RNA, 19 nt, Artificial Sequence
  Description of Artificial Sequence: Synthetic oligonucleotide
  Sense strand starting at position 371 of SEQ ID NO: 2361
gggcuccuugcgcuaaagu

SEQ ID NO: 183211 - RNA, 19 nt, Artificial Sequence
  Description of Artificial Sequence: Synthetic oligonucleotide
  Antisense strand to SEQ ID NO: 183210
acuuuagcgcaaggagccc

SEQ ID NO: 183212 - RNA, 19 nt, Artificial Sequence
  Description of Artificial Sequence: Synthetic oligonucleotide
  Sense strand starting at position 174 of SEQ ID NO: 2361
ugcuuugaauuacuaguau

SEQ ID NO: 183213 - RNA, 19 nt, Artificial Sequence
  Description of Artificial Sequence: Synthetic oligonucleotide
  Antisense strand to SEQ ID NO: 183212
auacuaguaauucaaagca

SEQ ID NO: 183214 - RNA, 19 nt, Artificial Sequence
  Description of Artificial Sequence: Synthetic oligonucleotide
  Sense strand starting at position 98 of SEQ ID NO: 2361
acaggaauaugccagaaga

SEQ ID NO: 183215 - RNA, 19 nt, Artificial Sequence
  Description of Artificial Sequence: Synthetic oligonucleotide
  Antisense strand to SEQ ID NO: 183214
ucuucuggcauauuccugu

SEQ ID NO: 183216 - RNA, 19 nt, Artificial Sequence
  Description of Artificial Sequence: Synthetic oligonucleotide
  Sense strand starting at position 3541 of SEQ ID NO: 2362
ggucgagauugcaaaugag

SEQ ID NO: 183217 - RNA, 19 nt, Artificial Sequence
  Description of Artificial Sequence: Synthetic oligonucleotide
  Antisense strand to SEQ ID NO: 183216
cucauuugcaaucucgacc

SEQ ID NO: 183218 - RNA, 19 nt, Artificial Sequence
  Description of Artificial Sequence: Synthetic oligonucleotide
  Sense strand starting at position 3538 of SEQ ID NO: 2362
ggaggucgagauugcaaau

SEQ ID NO: 183219 - RNA, 19 nt, Artificial Sequence
  Description of Artificial Sequence: Synthetic oligonucleotide
  Antisense strand to SEQ ID NO: 183218
auuugcaaucucgaccucc

SEQ ID NO: 183220 - RNA, 19 nt, Artificial Sequence
  Description of Artificial Sequence: Synthetic oligonucleotide
  Sense strand starting at position 2433 of SEQ ID NO: 2362
ccugcaagauuucugccuu

SEQ ID NO: 183221 - RNA, 19 nt, Artificial Sequence
  Description of Artificial Sequence: Synthetic oligonucleotide
  Antisense strand to SEQ ID NO: 183220
aaggcagaaaucuugcagg

SEQ ID NO: 183222 - RNA, 19 nt, Artificial Sequence
  Description of Artificial Sequence: Synthetic oligonucleotide
  Sense strand starting at position 2373 of SEQ ID NO: 2362
guagaaggauguuuaacuc

SEQ ID NO: 183223 - RNA, 19 nt, Artificial Sequence
  Description of Artificial Sequence: Synthetic oligonucleotide
  Antisense strand to SEQ ID NO: 183222
gaguuaaacauccuucuac

SEQ ID NO: 183224 - RNA, 19 nt, Artificial Sequence
  Description of Artificial Sequence: Synthetic oligonucleotide
  Sense strand starting at position 2370 of SEQ ID NO: 2362
ccuguagaaggauguuuaa

SEQ ID NO: 183225 - RNA, 19 nt, Artificial Sequence
  Description of Artificial Sequence: Synthetic oligonucleotide
  Antisense strand to SEQ ID NO: 183224
uuaaacauccuucuacagg

SEQ ID NO: 183226 - RNA, 19 nt, Artificial Sequence
  Description of Artificial Sequence: Synthetic oligonucleotide
  Sense strand starting at position 2362 of SEQ ID NO: 2362
gcaguuauccuguagaagg

SEQ ID NO: 183227 - RNA, 19 nt, Artificial Sequence
  Description of Artificial Sequence: Synthetic oligonucleotide
  Antisense strand to SEQ ID NO: 183226
ccuucuacaggauaacugc

SEQ ID NO: 183228 - RNA, 19 nt, Artificial Sequence
  Description of Artificial Sequence: Synthetic oligonucleotide
  Sense strand starting at position 2311 of SEQ ID NO: 2362
uuccucuucgaagaacuuu

SEQ ID NO: 183229 - RNA, 19 nt, Artificial Sequence
  Description of Artificial Sequence: Synthetic oligonucleotide
  Antisense strand to SEQ ID NO: 183228
aaaguucuucgaagaggaa

SEQ ID NO: 183230 - RNA, 19 nt, Artificial Sequence
  Description of Artificial Sequence: Synthetic oligonucleotide
  Sense strand starting at position 2307 of SEQ ID NO: 2362
guguuuccucuucgaagaa

SEQ ID NO: 183231 - RNA, 19 nt, Artificial Sequence
  Description of Artificial Sequence: Synthetic oligonucleotide
  Antisense strand to SEQ ID NO: 183230
uucuucgaagaggaaacac

SEQ ID NO: 183232 - RNA, 19 nt, Artificial Sequence
  Description of Artificial Sequence: Synthetic oligonucleotide
  Sense strand starting at position 2298 of SEQ ID NO: 2362
gagcgauucguguuuccuc

SEQ ID NO: 183233 - RNA, 19 nt, Artificial Sequence
  Description of Artificial Sequence: Synthetic oligonucleotide
  Antisense strand to SEQ ID NO: 183232
gaggaaacacgaaucgcuc

SEQ ID NO: 183234 - RNA, 19 nt, Artificial Sequence
  Description of Artificial Sequence: Synthetic oligonucleotide
  Sense strand starting at position 1597 of SEQ ID NO: 2362
cgcguuagacuguagaaac

SEQ ID NO: 183235 - RNA, 19 nt, Artificial Sequence
  Description of Artificial Sequence: Synthetic oligonucleotide
  Antisense strand to SEQ ID NO: 183234
guuucuacagucuaacgcg

SEQ ID NO: 183236 - RNA, 19 nt, Artificial Sequence
  Description of Artificial Sequence: Synthetic oligonucleotide
  Sense strand starting at position 1589 of SEQ ID NO: 2362
uuaugcuacgcguuagacu

SEQ ID NO: 183237 - RNA, 19 nt, Artificial Sequence
  Description of Artificial Sequence: Synthetic oligonucleotide
  Antisense strand to SEQ ID NO: 183236
agucuaacgcguagcauaa

SEQ ID NO: 183238 - RNA, 19 nt, Artificial Sequence
  Description of Artificial Sequence: Synthetic oligonucleotide
  Sense strand starting at position 927 of SEQ ID NO: 2362
ccuaauguggcuugaaaga

SEQ ID NO: 183239 - RNA, 19 nt, Artificial Sequence
  Description of Artificial Sequence: Synthetic oligonucleotide
  Antisense strand to SEQ ID NO: 183238
ucuuucaagccacauuagg

SEQ ID NO: 183240 - RNA, 19 nt, Artificial Sequence
  Description of Artificial Sequence: Synthetic oligonucleotide
  Sense strand starting at position 925 of SEQ ID NO: 2362
gcccuaauguggcuugaaa

SEQ ID NO: 183241 - RNA, 19 nt, Artificial Sequence
  Description of Artificial Sequence: Synthetic oligonucleotide
  Antisense strand to SEQ ID NO: 183240
uuucaagccacauuagggc

SEQ ID NO: 183242 - RNA, 19 nt, Artificial Sequence
  Description of Artificial Sequence: Synthetic oligonucleotide
  Sense strand starting at position 888 of SEQ ID NO: 2362
cccaacucucuguaguuaa

SEQ ID NO: 183243 - RNA, 19 nt, Artificial Sequence
  Description of Artificial Sequence: Synthetic oligonucleotide
  Antisense strand to SEQ ID NO: 183242
uuaacuacagagaguuggg

SEQ ID NO: 183244 - RNA, 19 nt, Artificial Sequence
  Description of Artificial Sequence: Synthetic oligonucleotide
  Sense strand starting at position 864 of SEQ ID NO: 2362
cguuucuaacuaugagcua

SEQ ID NO: 183245 - RNA, 19 nt, Artificial Sequence
  Description of Artificial Sequence: Synthetic oligonucleotide
  Antisense strand to SEQ ID NO: 183244
uagcucauaguuagaaacg

SEQ ID NO: 183246 - RNA, 19 nt, Artificial Sequence
  Description of Artificial Sequence: Synthetic oligonucleotide
  Sense strand starting at position 861 of SEQ ID NO: 2362
gcccguuucuaacuaugag

SEQ ID NO: 183247 - RNA, 19 nt, Artificial Sequence
  Description of Artificial Sequence: Synthetic oligonucleotide
  Antisense strand to SEQ ID NO: 183246
cucauaguuagaaacgggc

SEQ ID NO: 183248 - RNA, 19 nt, Artificial Sequence
  Description of Artificial Sequence: Synthetic oligonucleotide
  Sense strand starting at position 842 of SEQ ID NO: 2362
agagauaacugagaagaca

SEQ ID NO: 183249 - RNA, 19 nt, Artificial Sequence
  Description of Artificial Sequence: Synthetic oligonucleotide
  Antisense strand to SEQ ID NO: 183248
ugucuucucaguuaucucu

SEQ ID NO: 183250 - RNA, 19 nt, Artificial Sequence
  Description of Artificial Sequence: Synthetic oligonucleotide
  Sense strand starting at position 775 of SEQ ID NO: 2362
uagaacugcuggucuuuga

SEQ ID NO: 183251 - RNA, 19 nt, Artificial Sequence
  Description of Artificial Sequence: Synthetic oligonucleotide
  Antisense strand to SEQ ID NO: 183250
ucaaagaccagcaguucua

SEQ ID NO: 183252 - RNA, 19 nt, Artificial Sequence
  Description of Artificial Sequence: Synthetic oligonucleotide
  Sense strand starting at position 773 of SEQ ID NO: 2362
acuagaacugcuggucuuu

SEQ ID NO: 183253 - RNA, 19 nt, Artificial Sequence
  Description of Artificial Sequence: Synthetic oligonucleotide
  Antisense strand to SEQ ID NO: 183252
aaagaccagcaguucuagu

SEQ ID NO: 183254 - RNA, 19 nt, Artificial Sequence
  Description of Artificial Sequence: Synthetic oligonucleotide
  Sense strand starting at position 717 of SEQ ID NO: 2362
guucuauaugcacaguaau

SEQ ID NO: 183255 - RNA, 19 nt, Artificial Sequence
  Description of Artificial Sequence: Synthetic oligonucleotide
  Antisense strand to SEQ ID NO: 183254
auuacugugcauauagaac

SEQ ID NO: 183256 - RNA, 19 nt, Artificial Sequence
  Description of Artificial Sequence: Synthetic oligonucleotide
  Sense strand starting at position 675 of SEQ ID NO: 2362
ucaguaaguuccuccuuau

SEQ ID NO: 183257 - RNA, 19 nt, Artificial Sequence
  Description of Artificial Sequence: Synthetic oligonucleotide
  Antisense strand to SEQ ID NO: 183256
auaaggaggaacuuacuga

SEQ ID NO: 183258 - RNA, 19 nt, Artificial Sequence
  Description of Artificial Sequence: Synthetic oligonucleotide
  Sense strand starting at position 674 of SEQ ID NO: 2362
cucaguaaguuccuccuua

SEQ ID NO: 183259 - RNA, 19 nt, Artificial Sequence
  Description of Artificial Sequence: Synthetic oligonucleotide
  Antisense strand to SEQ ID NO: 183258
uaaggaggaacuuacugag

SEQ ID NO: 183260 - RNA, 19 nt, Artificial Sequence
  Description of Artificial Sequence: Synthetic oligonucleotide
  Sense strand starting at position 666 of SEQ ID NO: 2362
uugucuaccucaguaaguu

SEQ ID NO: 183261 - RNA, 19 nt, Artificial Sequence
  Description of Artificial Sequence: Synthetic oligonucleotide
  Antisense strand to SEQ ID NO: 183260
aacuuacugagguagacaa

SEQ ID NO: 183262 - RNA, 19 nt, Artificial Sequence
  Description of Artificial Sequence: Synthetic oligonucleotide
  Sense strand starting at position 647 of SEQ ID NO: 2362
guauuauaaugaucugguu

SEQ ID NO: 183263 - RNA, 19 nt, Artificial Sequence
  Description of Artificial Sequence: Synthetic oligonucleotide
  Antisense strand to SEQ ID NO: 183262
aaccagaucauuauaauac

SEQ ID NO: 183264 - RNA, 19 nt, Artificial Sequence
  Description of Artificial Sequence: Synthetic oligonucleotide
  Sense strand starting at position 588 of SEQ ID NO: 2362
agccauuucucgcuuuaua

SEQ ID NO: 183265 - RNA, 19 nt, Artificial Sequence
  Description of Artificial Sequence: Synthetic oligonucleotide
  Antisense strand to SEQ ID NO: 183264
uauaaagcgagaaauggcu

SEQ ID NO: 183266 - RNA, 19 nt, Artificial Sequence
  Description of Artificial Sequence: Synthetic oligonucleotide
  Sense strand starting at position 554 of SEQ ID NO: 2362
cuggaugucuccucuuaug

SEQ ID NO: 183267 - RNA, 19 nt, Artificial Sequence
  Description of Artificial Sequence: Synthetic oligonucleotide
  Antisense strand to SEQ ID NO: 183266
cauaagaggagacauccag

SEQ ID NO: 183268 - RNA, 19 nt, Artificial Sequence
  Description of Artificial Sequence: Synthetic oligonucleotide
  Sense strand starting at position 529 of SEQ ID NO: 2362
gaaaccuuccgugaccgaa

SEQ ID NO: 183269 - RNA, 19 nt, Artificial Sequence
  Description of Artificial Sequence: Synthetic oligonucleotide
  Antisense strand to SEQ ID NO: 183268
uucggucacggaagguuuc

SEQ ID NO: 183270 - RNA, 19 nt, Artificial Sequence
  Description of Artificial Sequence: Synthetic oligonucleotide
  Sense strand starting at position 528 of SEQ ID NO: 2362
ggaaaccuuccgugaccga

SEQ ID NO: 183271 - RNA, 19 nt, Artificial Sequence
  Description of Artificial Sequence: Synthetic oligonucleotide
  Antisense strand to SEQ ID NO: 183270
ucggucacggaagguuucc

SEQ ID NO: 183272 - RNA, 19 nt, Artificial Sequence
  Description of Artificial Sequence: Synthetic oligonucleotide
  Sense strand starting at position 512 of SEQ ID NO: 2362
agcauuaccucuuccagga

SEQ ID NO: 183273 - RNA, 19 nt, Artificial Sequence
  Description of Artificial Sequence: Synthetic oligonucleotide
  Antisense strand to SEQ ID NO: 183272
uccuggaagagguaaugcu

SEQ ID NO: 183274 - RNA, 19 nt, Artificial Sequence
  Description of Artificial Sequence: Synthetic oligonucleotide
  Sense strand starting at position 481 of SEQ ID NO: 2362
agcuuauguuuacucuuua

SEQ ID NO: 183275 - RNA, 19 nt, Artificial Sequence
  Description of Artificial Sequence: Synthetic oligonucleotide
  Antisense strand to SEQ ID NO: 183274
uaaagaguaaacauaagcu

SEQ ID NO: 183276 - RNA, 19 nt, Artificial Sequence
  Description of Artificial Sequence: Synthetic oligonucleotide
  Sense strand starting at position 444 of SEQ ID NO: 2362
gcuugaauguccuucuacu

SEQ ID NO: 183277 - RNA, 19 nt, Artificial Sequence
  Description of Artificial Sequence: Synthetic oligonucleotide
  Antisense strand to SEQ ID NO: 183276
aguagaaggacauucaagc

SEQ ID NO: 183278 - RNA, 19 nt, Artificial Sequence
  Description of Artificial Sequence: Synthetic oligonucleotide
  Sense strand starting at position 442 of SEQ ID NO: 2362
uggcuugaauguccuucua

SEQ ID NO: 183279 - RNA, 19 nt, Artificial Sequence
  Description of Artificial Sequence: Synthetic oligonucleotide
  Antisense strand to SEQ ID NO: 183278
uagaaggacauucaagcca

SEQ ID NO: 183280 - RNA, 19 nt, Artificial Sequence
  Description of Artificial Sequence: Synthetic oligonucleotide
  Sense strand starting at position 395 of SEQ ID NO: 2362
gccugugccguuucuagau

SEQ ID NO: 183281 - RNA, 19 nt, Artificial Sequence
  Description of Artificial Sequence: Synthetic oligonucleotide
  Antisense strand to SEQ ID NO: 183280
aucuagaaacggcacaggc

SEQ ID NO: 183282 - RNA, 19 nt, Artificial Sequence
  Description of Artificial Sequence: Synthetic oligonucleotide
  Sense strand starting at position 309 of SEQ ID NO: 2362
ccuagcuuugucuaccauu

SEQ ID NO: 183283 - RNA, 19 nt, Artificial Sequence
  Description of Artificial Sequence: Synthetic oligonucleotide
  Antisense strand to SEQ ID NO: 183282
aaugguagacaaagcuagg

SEQ ID NO: 183284 - RNA, 19 nt, Artificial Sequence
  Description of Artificial Sequence: Synthetic oligonucleotide
  Sense strand starting at position 221 of SEQ ID NO: 2362
ccaaaucggccauguaauu

SEQ ID NO: 183285 - RNA, 19 nt, Artificial Sequence
  Description of Artificial Sequence: Synthetic oligonucleotide
  Antisense strand to SEQ ID NO: 183284
aauuacauggccgauuugg

SEQ ID NO: 183286 - RNA, 19 nt, Artificial Sequence
  Description of Artificial Sequence: Synthetic oligonucleotide
  Sense strand starting at position 219 of SEQ ID NO: 2362
acccaaaucggccauguaa

SEQ ID NO: 183287 - RNA, 19 nt, Artificial Sequence
  Description of Artificial Sequence: Synthetic oligonucleotide
  Antisense strand to SEQ ID NO: 183286
uuacauggccgauuugggu

SEQ ID NO: 183288 - RNA, 19 nt, Artificial Sequence
  Description of Artificial Sequence: Synthetic oligonucleotide
  Sense strand starting at position 199 of SEQ ID NO: 2362
ugccaaugugacugaucua

SEQ ID NO: 183289 - RNA, 19 nt, Artificial Sequence
  Description of Artificial Sequence: Synthetic oligonucleotide
  Antisense strand to SEQ ID NO: 183288
uagaucagucacauuggca

SEQ ID NO: 183290 - RNA, 19 nt, Artificial Sequence
  Description of Artificial Sequence: Synthetic oligonucleotide
  Sense strand starting at position 193 of SEQ ID NO: 2362
ccuuauugccaaugugacu

SEQ ID NO: 183291 - RNA, 19 nt, Artificial Sequence
  Description of Artificial Sequence: Synthetic oligonucleotide
  Antisense strand to SEQ ID NO: 183290
agucacauuggcaauaagg

SEQ ID NO: 183292 - RNA, 19 nt, Artificial Sequence
  Description of Artificial Sequence: Synthetic oligonucleotide
  Sense strand starting at position 163 of SEQ ID NO: 2362
ucagucuugucccugucaa

SEQ ID NO: 183293 - RNA, 19 nt, Artificial Sequence
  Description of Artificial Sequence: Synthetic oligonucleotide
  Antisense strand to SEQ ID NO: 183292
uugacagggacaagacuga

SEQ ID NO: 183294 - RNA, 19 nt, Artificial Sequence
  Description of Artificial Sequence: Synthetic oligonucleotide
  Sense strand starting at position 95 of SEQ ID NO: 2362
acaacugccuaguuuagau

SEQ ID NO: 183295 - RNA, 19 nt, Artificial Sequence
  Description of Artificial Sequence: Synthetic oligonucleotide
  Antisense strand to SEQ ID NO: 183294
aucuaaacuaggcaguugu

SEQ ID NO: 183296 - RNA, 19 nt, Artificial Sequence
  Description of Artificial Sequence: Synthetic oligonucleotide
  Sense strand starting at position 3436 of SEQ ID NO: 2363
ggcaacguccuggaaguua

SEQ ID NO: 183297 - RNA, 19 nt, Artificial Sequence
  Description of Artificial Sequence: Synthetic oligonucleotide
  Antisense strand to SEQ ID NO: 183296
uaacuuccaggacguugcc

SEQ ID NO: 183298 - RNA, 19 nt, Artificial Sequence
  Description of Artificial Sequence: Synthetic oligonucleotide
  Sense strand starting at position 3202 of SEQ ID NO: 2363
gaaguuagguauucuaagu

SEQ ID NO: 183299 - RNA, 19 nt, Artificial Sequence
  Description of Artificial Sequence: Synthetic oligonucleotide
  Antisense strand to SEQ ID NO: 183298
acuuagaauaccuaacuuc

SEQ ID NO: 183300 - RNA, 19 nt, Artificial Sequence
  Description of Artificial Sequence: Synthetic oligonucleotide
  Sense strand starting at position 3198 of SEQ ID NO: 2363
ccaggaaguuagguauucu

SEQ ID NO: 183301 - RNA, 19 nt, Artificial Sequence
  Description of Artificial Sequence: Synthetic oligonucleotide
  Antisense strand to SEQ ID NO: 183300
agaauaccuaacuuccugg

SEQ ID NO: 183302 - RNA, 19 nt, Artificial Sequence
  Description of Artificial Sequence: Synthetic oligonucleotide
  Sense strand starting at position 3111 of SEQ ID NO: 2363
cagauugucagagguguuc

SEQ ID NO: 183303 - RNA, 19 nt, Artificial Sequence
  Description of Artificial Sequence: Synthetic oligonucleotide
  Antisense strand to SEQ ID NO: 183302
gaacaccucugacaaucug

SEQ ID NO: 183304 - RNA, 19 nt, Artificial Sequence
  Description of Artificial Sequence: Synthetic oligonucleotide
  Sense strand starting at position 3104 of SEQ ID NO: 2363
aucucaucagauugucaga

SEQ ID NO: 183305 - RNA, 19 nt, Artificial Sequence
  Description of Artificial Sequence: Synthetic oligonucleotide
  Antisense strand to SEQ ID NO: 183304
ucugacaaucugaugagau

SEQ ID NO: 183306 - RNA, 19 nt, Artificial Sequence
  Description of Artificial Sequence: Synthetic oligonucleotide
  Sense strand starting at position 2650 of SEQ ID NO: 2363
gccagaugagaugguucau

SEQ ID NO: 183307 - RNA, 19 nt, Artificial Sequence
  Description of Artificial Sequence: Synthetic oligonucleotide
  Antisense strand to SEQ ID NO: 183306
augaaccaucucaucuggc

SEQ ID NO: 183308 - RNA, 19 nt, Artificial Sequence
  Description of Artificial Sequence: Synthetic oligonucleotide
  Sense strand starting at position 2571 of SEQ ID NO: 2363
uauucugauuguguggcaa

SEQ ID NO: 183309 - RNA, 19 nt, Artificial Sequence
  Description of Artificial Sequence: Synthetic oligonucleotide
  Antisense strand to SEQ ID NO: 183308
uugccacacaaucagaaua

SEQ ID NO: 183310 - RNA, 19 nt, Artificial Sequence
  Description of Artificial Sequence: Synthetic oligonucleotide
  Sense strand starting at position 2567 of SEQ ID NO: 2363
gaucuauucugauugugug

SEQ ID NO: 183311 - RNA, 19 nt, Artificial Sequence
  Description of Artificial Sequence: Synthetic oligonucleotide
  Antisense strand to SEQ ID NO: 183310
cacacaaucagaauagauc

SEQ ID NO: 183312 - RNA, 19 nt, Artificial Sequence
  Description of Artificial Sequence: Synthetic oligonucleotide
  Sense strand starting at position 2512 of SEQ ID NO: 2363
guguaagaaauguagccuu

SEQ ID NO: 183313 - RNA, 19 nt, Artificial Sequence
  Description of Artificial Sequence: Synthetic oligonucleotide
  Antisense strand to SEQ ID NO: 183312
aaggcuacauuucuuacac

SEQ ID NO: 183314 - RNA, 19 nt, Artificial Sequence
  Description of Artificial Sequence: Synthetic oligonucleotide
  Sense strand starting at position 2502 of SEQ ID NO: 2363
aaacucgaguguguaagaa

SEQ ID NO: 183315 - RNA, 19 nt, Artificial Sequence
  Description of Artificial Sequence: Synthetic oligonucleotide
  Antisense strand to SEQ ID NO: 183314
uucuuacacacucgaguuu

SEQ ID NO: 183316 - RNA, 19 nt, Artificial Sequence
  Description of Artificial Sequence: Synthetic oligonucleotide
  Sense strand starting at position 2501 of SEQ ID NO: 2363
caaacucgaguguguaaga

SEQ ID NO: 183317 - RNA, 19 nt, Artificial Sequence
  Description of Artificial Sequence: Synthetic oligonucleotide
  Antisense strand to SEQ ID NO: 183316
ucuuacacacucgaguuug

SEQ ID NO: 183318 - RNA, 19 nt, Artificial Sequence
  Description of Artificial Sequence: Synthetic oligonucleotide
  Sense strand starting at position 2499 of SEQ ID NO: 2363
cacaaacucgaguguguaa

SEQ ID NO: 183319 - RNA, 19 nt, Artificial Sequence
  Description of Artificial Sequence: Synthetic oligonucleotide
  Antisense strand to SEQ ID NO: 183318
uuacacacucgaguuugug

SEQ ID NO: 183320 - RNA, 19 nt, Artificial Sequence
  Description of Artificial Sequence: Synthetic oligonucleotide
  Sense strand starting at position 2457 of SEQ ID NO: 2363
acguuuauugaguaacaaa

SEQ ID NO: 183321 - RNA, 19 nt, Artificial Sequence
  Description of Artificial Sequence: Synthetic oligonucleotide
  Antisense strand to SEQ ID NO: 183320
uuuguuacucaauaaacgu

SEQ ID NO: 183322 - RNA, 19 nt, Artificial Sequence
  Description of Artificial Sequence: Synthetic oligonucleotide
  Sense strand starting at position 2456 of SEQ ID NO: 2363
aacguuuauugaguaacaa

SEQ ID NO: 183323 - RNA, 19 nt, Artificial Sequence
  Description of Artificial Sequence: Synthetic oligonucleotide
  Antisense strand to SEQ ID NO: 183322
uuguuacucaauaaacguu

SEQ ID NO: 183324 - RNA, 19 nt, Artificial Sequence
  Description of Artificial Sequence: Synthetic oligonucleotide
  Sense strand starting at position 2452 of SEQ ID NO: 2363
agcaaacguuuauugagua

SEQ ID NO: 183325 - RNA, 19 nt, Artificial Sequence
  Description of Artificial Sequence: Synthetic oligonucleotide
  Antisense strand to SEQ ID NO: 183324
uacucaauaaacguuugcu

SEQ ID NO: 183326 - RNA, 19 nt, Artificial Sequence
  Description of Artificial Sequence: Synthetic oligonucleotide
  Sense strand starting at position 1872 of SEQ ID NO: 2363
cucauaccucuccgguuaa

SEQ ID NO: 183327 - RNA, 19 nt, Artificial Sequence
  Description of Artificial Sequence: Synthetic oligonucleotide
  Antisense strand to SEQ ID NO: 183326
uuaaccggagagguaugag

SEQ ID NO: 183328 - RNA, 19 nt, Artificial Sequence
  Description of Artificial Sequence: Synthetic oligonucleotide
  Sense strand starting at position 1631 of SEQ ID NO: 2363
uagaaaggaucccaaggaa

SEQ ID NO: 183329 - RNA, 19 nt, Artificial Sequence
  Description of Artificial Sequence: Synthetic oligonucleotide
  Antisense strand to SEQ ID NO: 183328
uuccuugggauccuuucua

SEQ ID NO: 183330 - RNA, 19 nt, Artificial Sequence
  Description of Artificial Sequence: Synthetic oligonucleotide
  Sense strand starting at position 1486 of SEQ ID NO: 2363
auuauugaguaucuaccau

SEQ ID NO: 183331 - RNA, 19 nt, Artificial Sequence
  Description of Artificial Sequence: Synthetic oligonucleotide
  Antisense strand to SEQ ID NO: 183330
augguagauacucaauaau

SEQ ID NO: 183332 - RNA, 19 nt, Artificial Sequence
  Description of Artificial Sequence: Synthetic oligonucleotide
  Sense strand starting at position 863 of SEQ ID NO: 2363
gacugugaccugggcaaga

SEQ ID NO: 183333 - RNA, 19 nt, Artificial Sequence
  Description of Artificial Sequence: Synthetic oligonucleotide
  Antisense strand to SEQ ID NO: 183332
ucuugcccaggucacaguc

SEQ ID NO: 183334 - RNA, 19 nt, Artificial Sequence
  Description of Artificial Sequence: Synthetic oligonucleotide
  Sense strand starting at position 848 of SEQ ID NO: 2363
ggaagagugugcucggacu

SEQ ID NO: 183335 - RNA, 19 nt, Artificial Sequence
  Description of Artificial Sequence: Synthetic oligonucleotide
  Antisense strand to SEQ ID NO: 183334
aguccgagcacacucuucc

SEQ ID NO: 183336 - RNA, 19 nt, Artificial Sequence
  Description of Artificial Sequence: Synthetic oligonucleotide
  Sense strand starting at position 779 of SEQ ID NO: 2363
gggugauaaagagggcuaa

SEQ ID NO: 183337 - RNA, 19 nt, Artificial Sequence
  Description of Artificial Sequence: Synthetic oligonucleotide
  Antisense strand to SEQ ID NO: 183336
uuagcccucuuuaucaccc

SEQ ID NO: 183338 - RNA, 19 nt, Artificial Sequence
  Description of Artificial Sequence: Synthetic oligonucleotide
  Sense strand starting at position 735 of SEQ ID NO: 2363
uaccgcagacaguaauaaa

SEQ ID NO: 183339 - RNA, 19 nt, Artificial Sequence
  Description of Artificial Sequence: Synthetic oligonucleotide
  Antisense strand to SEQ ID NO: 183338
uuuauuacugucugcggua

SEQ ID NO: 183340 - RNA, 19 nt, Artificial Sequence
  Description of Artificial Sequence: Synthetic oligonucleotide
  Sense strand starting at position 652 of SEQ ID NO: 2363
ggcauucuccgaugagacu

SEQ ID NO: 183341 - RNA, 19 nt, Artificial Sequence
  Description of Artificial Sequence: Synthetic oligonucleotide
  Antisense strand to SEQ ID NO: 183340
agucucaucggagaaugcc

SEQ ID NO: 183342 - RNA, 19 nt, Artificial Sequence
  Description of Artificial Sequence: Synthetic oligonucleotide
  Sense strand starting at position 630 of SEQ ID NO: 2363
auuucuguaugcuaaugaa

SEQ ID NO: 183343 - RNA, 19 nt, Artificial Sequence
  Description of Artificial Sequence: Synthetic oligonucleotide
  Antisense strand to SEQ ID NO: 183342
uucauuagcauacagaaau

SEQ ID NO: 183344 - RNA, 19 nt, Artificial Sequence
  Description of Artificial Sequence: Synthetic oligonucleotide
  Sense strand starting at position 488 of SEQ ID NO: 2363
aggugagcuauacgaguua

SEQ ID NO: 183345 - RNA, 19 nt, Artificial Sequence
  Description of Artificial Sequence: Synthetic oligonucleotide
  Antisense strand to SEQ ID NO: 183344
uaacucguauagcucaccu

SEQ ID NO: 183346 - RNA, 19 nt, Artificial Sequence
  Description of Artificial Sequence: Synthetic oligonucleotide
  Sense strand starting at position 486 of SEQ ID NO: 2363
auaggugagcuauacgagu

SEQ ID NO: 183347 - RNA, 19 nt, Artificial Sequence
  Description of Artificial Sequence: Synthetic oligonucleotide
  Antisense strand to SEQ ID NO: 183346
acucguauagcucaccuau

SEQ ID NO: 183348 - RNA, 19 nt, Artificial Sequence
  Description of Artificial Sequence: Synthetic oligonucleotide
  Sense strand starting at position 479 of SEQ ID NO: 2363
agauauaauaggugagcua

SEQ ID NO: 183349 - RNA, 19 nt, Artificial Sequence
  Description of Artificial Sequence: Synthetic oligonucleotide
  Antisense strand to SEQ ID NO: 183348
uagcucaccuauuauaucu

SEQ ID NO: 183350 - RNA, 19 nt, Artificial Sequence
  Description of Artificial Sequence: Synthetic oligonucleotide
  Sense strand starting at position 441 of SEQ ID NO: 2363
cauggaauagugcaucauu

SEQ ID NO: 183351 - RNA, 19 nt, Artificial Sequence
  Description of Artificial Sequence: Synthetic oligonucleotide
  Antisense strand to SEQ ID NO: 183350
aaugaugcacuauuccaug

SEQ ID NO: 183352 - RNA, 19 nt, Artificial Sequence
  Description of Artificial Sequence: Synthetic oligonucleotide
  Sense strand starting at position 401 of SEQ ID NO: 2363
gguauaguguuccuaaauu

SEQ ID NO: 183353 - RNA, 19 nt, Artificial Sequence
  Description of Artificial Sequence: Synthetic oligonucleotide
  Antisense strand to SEQ ID NO: 183352
aauuuaggaacacuauacc

SEQ ID NO: 183354 - RNA, 19 nt, Artificial Sequence
  Description of Artificial Sequence: Synthetic oligonucleotide
  Sense strand starting at position 399 of SEQ ID NO: 2363
aagguauaguguuccuaaa

SEQ ID NO: 183355 - RNA, 19 nt, Artificial Sequence
  Description of Artificial Sequence: Synthetic oligonucleotide
  Antisense strand to SEQ ID NO: 183354
uuuaggaacacuauaccuu

SEQ ID NO: 183356 - RNA, 19 nt, Artificial Sequence
  Description of Artificial Sequence: Synthetic oligonucleotide
  Sense strand starting at position 365 of SEQ ID NO: 2363
aguaucugauucuugaaac

SEQ ID NO: 183357 - RNA, 19 nt, Artificial Sequence
  Description of Artificial Sequence: Synthetic oligonucleotide
  Antisense strand to SEQ ID NO: 183356
guuucaagaaucagauacu

SEQ ID NO: 183358 - RNA, 19 nt, Artificial Sequence
  Description of Artificial Sequence: Synthetic oligonucleotide
  Sense strand starting at position 355 of SEQ ID NO: 2363
uuacauucugaguaucuga

SEQ ID NO: 183359 - RNA, 19 nt, Artificial Sequence
  Description of Artificial Sequence: Synthetic oligonucleotide
  Antisense strand to SEQ ID NO: 183358
ucagauacucagaauguaa

SEQ ID NO: 183360 - RNA, 19 nt, Artificial Sequence
  Description of Artificial Sequence: Synthetic oligonucleotide
  Sense strand starting at position 291 of SEQ ID NO: 2363
cuuucugucguguaaugaa

SEQ ID NO: 183361 - RNA, 19 nt, Artificial Sequence
  Description of Artificial Sequence: Synthetic oligonucleotide
  Antisense strand to SEQ ID NO: 183360
uucauuacacgacagaaag

SEQ ID NO: 183362 - RNA, 19 nt, Artificial Sequence
  Description of Artificial Sequence: Synthetic oligonucleotide
  Sense strand starting at position 290 of SEQ ID NO: 2363
gcuuucugucguguaauga

SEQ ID NO: 183363 - RNA, 19 nt, Artificial Sequence
  Description of Artificial Sequence: Synthetic oligonucleotide
  Antisense strand to SEQ ID NO: 183362
ucauuacacgacagaaagc

SEQ ID NO: 183364 - RNA, 19 nt, Artificial Sequence
  Description of Artificial Sequence: Synthetic oligonucleotide
  Sense strand starting at position 288 of SEQ ID NO: 2363
aagcuuucugucguguaau

SEQ ID NO: 183365 - RNA, 19 nt, Artificial Sequence
  Description of Artificial Sequence: Synthetic oligonucleotide
  Antisense strand to SEQ ID NO: 183364
auuacacgacagaaagcuu

SEQ ID NO: 183366 - RNA, 19 nt, Artificial Sequence
  Description of Artificial Sequence: Synthetic oligonucleotide
  Sense strand starting at position 286 of SEQ ID NO: 2363
auaagcuuucugucgugua

SEQ ID NO: 183367 - RNA, 19 nt, Artificial Sequence
  Description of Artificial Sequence: Synthetic oligonucleotide
  Antisense strand to SEQ ID NO: 183366
uacacgacagaaagcuuau

SEQ ID NO: 183368 - RNA, 19 nt, Artificial Sequence
  Description of Artificial Sequence: Synthetic oligonucleotide
  Sense strand starting at position 232 of SEQ ID NO: 2363
ucauacuugcuaggaaaua

SEQ ID NO: 183369 - RNA, 19 nt, Artificial Sequence
  Description of Artificial Sequence: Synthetic oligonucleotide
  Antisense strand to SEQ ID NO: 183368
uauuuccuagcaaguauga

SEQ ID NO: 183370 - RNA, 19 nt, Artificial Sequence
  Description of Artificial Sequence: Synthetic oligonucleotide
  Sense strand starting at position 229 of SEQ ID NO: 2363
gcaucauacuugcuaggaa

SEQ ID NO: 183371 - RNA, 19 nt, Artificial Sequence
  Description of Artificial Sequence: Synthetic oligonucleotide
  Antisense strand to SEQ ID NO: 183370
uuccuagcaaguaugaugc

SEQ ID NO: 183372 - RNA, 19 nt, Artificial Sequence
  Description of Artificial Sequence: Synthetic oligonucleotide
  Sense strand starting at position 171 of SEQ ID NO: 2363
aguguuaauucuucuccaa

SEQ ID NO: 183373 - RNA, 19 nt, Artificial Sequence
  Description of Artificial Sequence: Synthetic oligonucleotide
  Antisense strand to SEQ ID NO: 183372
uuggagaagaauuaacacu

SEQ ID NO: 183374 - RNA, 19 nt, Artificial Sequence
  Description of Artificial Sequence: Synthetic oligonucleotide
  Sense strand starting at position 63 of SEQ ID NO: 2363
uuuaaucuugcagagauca

SEQ ID NO: 183375 - RNA, 19 nt, Artificial Sequence
  Description of Artificial Sequence: Synthetic oligonucleotide
  Antisense strand to SEQ ID NO: 183374
ugaucucugcaagauuaaa

SEQ ID NO: 183376 - RNA, 19 nt, Artificial Sequence
  Description of Artificial Sequence: Synthetic oligonucleotide
  Sense strand starting at position 3833 of SEQ ID NO: 2364
gaaguuagguauucuaagu

SEQ ID NO: 183377 - RNA, 19 nt, Artificial Sequence
  Description of Artificial Sequence: Synthetic oligonucleotide
  Antisense strand to SEQ ID NO: 183376
acuuagaauaccuaacuuc

SEQ ID NO: 183378 - RNA, 19 nt, Artificial Sequence
  Description of Artificial Sequence: Synthetic oligonucleotide
  Sense strand starting at position 3829 of SEQ ID NO: 2364
ccaggaaguuagguauucu

SEQ ID NO: 183379 - RNA, 19 nt, Artificial Sequence
  Description of Artificial Sequence: Synthetic oligonucleotide
  Antisense strand to SEQ ID NO: 183378
agaauaccuaacuuccugg

SEQ ID NO: 183380 - RNA, 19 nt, Artificial Sequence
  Description of Artificial Sequence: Synthetic oligonucleotide
  Sense strand starting at position 3742 of SEQ ID NO: 2364
cagauugucagagguguuc

SEQ ID NO: 183381 - RNA, 19 nt, Artificial Sequence
  Description of Artificial Sequence: Synthetic oligonucleotide
  Antisense strand to SEQ ID NO: 183380
gaacaccucugacaaucug

SEQ ID NO: 183382 - RNA, 19 nt, Artificial Sequence
  Description of Artificial Sequence: Synthetic oligonucleotide
  Sense strand starting at position 3735 of SEQ ID NO: 2364
aucucaucagauugucaga

SEQ ID NO: 183383 - RNA, 19 nt, Artificial Sequence
  Description of Artificial Sequence: Synthetic oligonucleotide
  Antisense strand to SEQ ID NO: 183382
ucugacaaucugaugagau

SEQ ID NO: 183384 - RNA, 19 nt, Artificial Sequence
  Description of Artificial Sequence: Synthetic oligonucleotide
  Sense strand starting at position 3281 of SEQ ID NO: 2364
gccagaugagaugguucau

SEQ ID NO: 183385 - RNA, 19 nt, Artificial Sequence
  Description of Artificial Sequence: Synthetic oligonucleotide
  Antisense strand to SEQ ID NO: 183384
augaaccaucucaucuggc

SEQ ID NO: 183386 - RNA, 19 nt, Artificial Sequence
  Description of Artificial Sequence: Synthetic oligonucleotide
  Sense strand starting at position 3198 of SEQ ID NO: 2364
gaucuauucugauugugug

SEQ ID NO: 183387 - RNA, 19 nt, Artificial Sequence
  Description of Artificial Sequence: Synthetic oligonucleotide
  Antisense strand to SEQ ID NO: 183386
cacacaaucagaauagauc

SEQ ID NO: 183388 - RNA, 19 nt, Artificial Sequence
  Description of Artificial Sequence: Synthetic oligonucleotide
  Sense strand starting at position 3143 of SEQ ID NO: 2364
guguaagaaauguagccuu

SEQ ID NO: 183389 - RNA, 19 nt, Artificial Sequence
  Description of Artificial Sequence: Synthetic oligonucleotide
  Antisense strand to SEQ ID NO: 183388
aaggcuacauuucuuacac

SEQ ID NO: 183390 - RNA, 19 nt, Artificial Sequence
  Description of Artificial Sequence: Synthetic oligonucleotide
  Sense strand starting at position 3133 of SEQ ID NO: 2364
aaacucgaguguguaagaa

SEQ ID NO: 183391 - RNA, 19 nt, Artificial Sequence
  Description of Artificial Sequence: Synthetic oligonucleotide
  Antisense strand to SEQ ID NO: 183390
uucuuacacacucgaguuu

SEQ ID NO: 183392 - RNA, 19 nt, Artificial Sequence
  Description of Artificial Sequence: Synthetic oligonucleotide
  Sense strand starting at position 3132 of SEQ ID NO: 2364
caaacucgaguguguaaga

SEQ ID NO: 183393 - RNA, 19 nt, Artificial Sequence
  Description of Artificial Sequence: Synthetic oligonucleotide
  Antisense strand to SEQ ID NO: 183392
ucuuacacacucgaguuug

SEQ ID NO: 183394 - RNA, 19 nt, Artificial Sequence
  Description of Artificial Sequence: Synthetic oligonucleotide
  Sense strand starting at position 3130 of SEQ ID NO: 2364
cacaaacucgaguguguaa

SEQ ID NO: 183395 - RNA, 19 nt, Artificial Sequence
  Description of Artificial Sequence: Synthetic oligonucleotide
  Antisense strand to SEQ ID NO: 183394
uuacacacucgaguuugug

SEQ ID NO: 183396 - RNA, 19 nt, Artificial Sequence
  Description of Artificial Sequence: Synthetic oligonucleotide
  Sense strand starting at position 3088 of SEQ ID NO: 2364
acguuuauugaguaacaaa

SEQ ID NO: 183397 - RNA, 19 nt, Artificial Sequence
  Description of Artificial Sequence: Synthetic oligonucleotide
  Antisense strand to SEQ ID NO: 183396
uuuguuacucaauaaacgu

SEQ ID NO: 183398 - RNA, 19 nt, Artificial Sequence
  Description of Artificial Sequence: Synthetic oligonucleotide
  Sense strand starting at position 3087 of SEQ ID NO: 2364
aacguuuauugaguaacaa

SEQ ID NO: 183399 - RNA, 19 nt, Artificial Sequence
  Description of Artificial Sequence: Synthetic oligonucleotide
  Antisense strand to SEQ ID NO: 183398
uuguuacucaauaaacguu

SEQ ID NO: 183400 - RNA, 19 nt, Artificial Sequence
  Description of Artificial Sequence: Synthetic oligonucleotide
  Sense strand starting at position 3083 of SEQ ID NO: 2364
agcaaacguuuauugagua

SEQ ID NO: 183401 - RNA, 19 nt, Artificial Sequence
  Description of Artificial Sequence: Synthetic oligonucleotide
  Antisense strand to SEQ ID NO: 183400
uacucaauaaacguuugcu

SEQ ID NO: 183402 - RNA, 19 nt, Artificial Sequence
  Description of Artificial Sequence: Synthetic oligonucleotide
  Sense strand starting at position 2503 of SEQ ID NO: 2364
cucauaccucuccgguuaa

SEQ ID NO: 183403 - RNA, 19 nt, Artificial Sequence
  Description of Artificial Sequence: Synthetic oligonucleotide
  Antisense strand to SEQ ID NO: 183402
uuaaccggagagguaugag

SEQ ID NO: 183404 - RNA, 19 nt, Artificial Sequence
  Description of Artificial Sequence: Synthetic oligonucleotide
  Sense strand starting at position 2262 of SEQ ID NO: 2364
uagaaaggaucccaaggaa

SEQ ID NO: 183405 - RNA, 19 nt, Artificial Sequence
  Description of Artificial Sequence: Synthetic oligonucleotide
  Antisense strand to SEQ ID NO: 183404
uuccuugggauccuuucua

SEQ ID NO: 183406 - RNA, 19 nt, Artificial Sequence
  Description of Artificial Sequence: Synthetic oligonucleotide
  Sense strand starting at position 2117 of SEQ ID NO: 2364
auuauugaguaucuaccau

SEQ ID NO: 183407 - RNA, 19 nt, Artificial Sequence
  Description of Artificial Sequence: Synthetic oligonucleotide
  Antisense strand to SEQ ID NO: 183406
augguagauacucaauaau

SEQ ID NO: 183408 - RNA, 19 nt, Artificial Sequence
  Description of Artificial Sequence: Synthetic oligonucleotide
  Sense strand starting at position 1494 of SEQ ID NO: 2364
gacugugaccugggcaaga

SEQ ID NO: 183409 - RNA, 19 nt, Artificial Sequence
  Description of Artificial Sequence: Synthetic oligonucleotide
  Antisense strand to SEQ ID NO: 183408
ucuugcccaggucacaguc

SEQ ID NO: 183410 - RNA, 19 nt, Artificial Sequence
  Description of Artificial Sequence: Synthetic oligonucleotide
  Sense strand starting at position 1479 of SEQ ID NO: 2364
ggaagagugugcucggacu

SEQ ID NO: 183411 - RNA, 19 nt, Artificial Sequence
  Description of Artificial Sequence: Synthetic oligonucleotide
  Antisense strand to SEQ ID NO: 183410
aguccgagcacacucuucc

SEQ ID NO: 183412 - RNA, 19 nt, Artificial Sequence
  Description of Artificial Sequence: Synthetic oligonucleotide
  Sense strand starting at position 1410 of SEQ ID NO: 2364
gggugauaaagagggcuaa

SEQ ID NO: 183413 - RNA, 19 nt, Artificial Sequence
  Description of Artificial Sequence: Synthetic oligonucleotide
  Antisense strand to SEQ ID NO: 183412
uuagcccucuuuaucaccc

SEQ ID NO: 183414 - RNA, 19 nt, Artificial Sequence
  Description of Artificial Sequence: Synthetic oligonucleotide
  Sense strand starting at position 1366 of SEQ ID NO: 2364
uaccgcagacaguaauaaa

SEQ ID NO: 183415 - RNA, 19 nt, Artificial Sequence
  Description of Artificial Sequence: Synthetic oligonucleotide
  Antisense strand to SEQ ID NO: 183414
uuuauuacugucugcggua

SEQ ID NO: 183416 - RNA, 19 nt, Artificial Sequence
  Description of Artificial Sequence: Synthetic oligonucleotide
  Sense strand starting at position 1283 of SEQ ID NO: 2364
ggcauucuccgaugagacu

SEQ ID NO: 183417 - RNA, 19 nt, Artificial Sequence
  Description of Artificial Sequence: Synthetic oligonucleotide
  Antisense strand to SEQ ID NO: 183416
agucucaucggagaaugcc

SEQ ID NO: 183418 - RNA, 19 nt, Artificial Sequence
  Description of Artificial Sequence: Synthetic oligonucleotide
  Sense strand starting at position 1119 of SEQ ID NO: 2364
aggugagcuauacgaguua

SEQ ID NO: 183419 - RNA, 19 nt, Artificial Sequence
  Description of Artificial Sequence: Synthetic oligonucleotide
  Antisense strand to SEQ ID NO: 183418
uaacucguauagcucaccu

SEQ ID NO: 183420 - RNA, 19 nt, Artificial Sequence
  Description of Artificial Sequence: Synthetic oligonucleotide
  Sense strand starting at position 1117 of SEQ ID NO: 2364
auaggugagcuauacgagu

SEQ ID NO: 183421 - RNA, 19 nt, Artificial Sequence
  Description of Artificial Sequence: Synthetic oligonucleotide
  Antisense strand to SEQ ID NO: 183420
acucguauagcucaccuau

SEQ ID NO: 183422 - RNA, 19 nt, Artificial Sequence
  Description of Artificial Sequence: Synthetic oligonucleotide
  Sense strand starting at position 1110 of SEQ ID NO: 2364
agauauaauaggugagcua

SEQ ID NO: 183423 - RNA, 19 nt, Artificial Sequence
  Description of Artificial Sequence: Synthetic oligonucleotide
  Antisense strand to SEQ ID NO: 183422
uagcucaccuauuauaucu

SEQ ID NO: 183424 - RNA, 19 nt, Artificial Sequence
  Description of Artificial Sequence: Synthetic oligonucleotide
  Sense strand starting at position 1072 of SEQ ID NO: 2364
cauggaauagugcaucauu

SEQ ID NO: 183425 - RNA, 19 nt, Artificial Sequence
  Description of Artificial Sequence: Synthetic oligonucleotide
  Antisense strand to SEQ ID NO: 183424
aaugaugcacuauuccaug

SEQ ID NO: 183426 - RNA, 19 nt, Artificial Sequence
  Description of Artificial Sequence: Synthetic oligonucleotide
  Sense strand starting at position 1032 of SEQ ID NO: 2364
gguauaguguuccuaaauu

SEQ ID NO: 183427 - RNA, 19 nt, Artificial Sequence
  Description of Artificial Sequence: Synthetic oligonucleotide
  Antisense strand to SEQ ID NO: 183426
aauuuaggaacacuauacc

SEQ ID NO: 183428 - RNA, 19 nt, Artificial Sequence
  Description of Artificial Sequence: Synthetic oligonucleotide
  Sense strand starting at position 1030 of SEQ ID NO: 2364
aagguauaguguuccuaaa

SEQ ID NO: 183429 - RNA, 19 nt, Artificial Sequence
  Description of Artificial Sequence: Synthetic oligonucleotide
  Antisense strand to SEQ ID NO: 183428
uuuaggaacacuauaccuu

SEQ ID NO: 183430 - RNA, 19 nt, Artificial Sequence
  Description of Artificial Sequence: Synthetic oligonucleotide
  Sense strand starting at position 996 of SEQ ID NO: 2364
aguaucugauucuugaaac

SEQ ID NO: 183431 - RNA, 19 nt, Artificial Sequence
  Description of Artificial Sequence: Synthetic oligonucleotide
  Antisense strand to SEQ ID NO: 183430
guuucaagaaucagauacu

SEQ ID NO: 183432 - RNA, 19 nt, Artificial Sequence
  Description of Artificial Sequence: Synthetic oligonucleotide
  Sense strand starting at position 986 of SEQ ID NO: 2364
uuacauucugaguaucuga

SEQ ID NO: 183433 - RNA, 19 nt, Artificial Sequence
  Description of Artificial Sequence: Synthetic oligonucleotide
  Antisense strand to SEQ ID NO: 183432
ucagauacucagaauguaa

SEQ ID NO: 183434 - RNA, 19 nt, Artificial Sequence
  Description of Artificial Sequence: Synthetic oligonucleotide
  Sense strand starting at position 922 of SEQ ID NO: 2364
cuuucugucguguaaugaa

SEQ ID NO: 183435 - RNA, 19 nt, Artificial Sequence
  Description of Artificial Sequence: Synthetic oligonucleotide
  Antisense strand to SEQ ID NO: 183434
uucauuacacgacagaaag

SEQ ID NO: 183436 - RNA, 19 nt, Artificial Sequence
  Description of Artificial Sequence: Synthetic oligonucleotide
  Sense strand starting at position 921 of SEQ ID NO: 2364
gcuuucugucguguaauga

SEQ ID NO: 183437 - RNA, 19 nt, Artificial Sequence
  Description of Artificial Sequence: Synthetic oligonucleotide
  Antisense strand to SEQ ID NO: 183436
ucauuacacgacagaaagc

SEQ ID NO: 183438 - RNA, 19 nt, Artificial Sequence
  Description of Artificial Sequence: Synthetic oligonucleotide
  Sense strand starting at position 919 of SEQ ID NO: 2364
aagcuuucugucguguaau

SEQ ID NO: 183439 - RNA, 19 nt, Artificial Sequence
  Description of Artificial Sequence: Synthetic oligonucleotide
  Antisense strand to SEQ ID NO: 183438
auuacacgacagaaagcuu

SEQ ID NO: 183440 - RNA, 19 nt, Artificial Sequence
  Description of Artificial Sequence: Synthetic oligonucleotide
  Sense strand starting at position 917 of SEQ ID NO: 2364
auaagcuuucugucgugua

SEQ ID NO: 183441 - RNA, 19 nt, Artificial Sequence
  Description of Artificial Sequence: Synthetic oligonucleotide
  Antisense strand to SEQ ID NO: 183440
uacacgacagaaagcuuau

SEQ ID NO: 183442 - RNA, 19 nt, Artificial Sequence
  Description of Artificial Sequence: Synthetic oligonucleotide
  Sense strand starting at position 863 of SEQ ID NO: 2364
ucauacuugcuaggaaaua

SEQ ID NO: 183443 - RNA, 19 nt, Artificial Sequence
  Description of Artificial Sequence: Synthetic oligonucleotide
  Antisense strand to SEQ ID NO: 183442
uauuuccuagcaaguauga

SEQ ID NO: 183444 - RNA, 19 nt, Artificial Sequence
  Description of Artificial Sequence: Synthetic oligonucleotide
  Sense strand starting at position 860 of SEQ ID NO: 2364
gcaucauacuugcuaggaa

SEQ ID NO: 183445 - RNA, 19 nt, Artificial Sequence
  Description of Artificial Sequence: Synthetic oligonucleotide
  Antisense strand to SEQ ID NO: 183444
uuccuagcaaguaugaugc

SEQ ID NO: 183446 - RNA, 19 nt, Artificial Sequence
  Description of Artificial Sequence: Synthetic oligonucleotide
  Sense strand starting at position 802 of SEQ ID NO: 2364
aguguuaauucuucuccaa

SEQ ID NO: 183447 - RNA, 19 nt, Artificial Sequence
  Description of Artificial Sequence: Synthetic oligonucleotide
  Antisense strand to SEQ ID NO: 183446
uuggagaagaauuaacacu

SEQ ID NO: 183448 - RNA, 19 nt, Artificial Sequence
  Description of Artificial Sequence: Synthetic oligonucleotide
  Sense strand starting at position 694 of SEQ ID NO: 2364
uuuaaucuugcagagauca

SEQ ID NO: 183449 - RNA, 19 nt, Artificial Sequence
  Description of Artificial Sequence: Synthetic oligonucleotide
  Antisense strand to SEQ ID NO: 183448
ugaucucugcaagauuaaa

SEQ ID NO: 183450 - RNA, 19 nt, Artificial Sequence
  Description of Artificial Sequence: Synthetic oligonucleotide
  Sense strand starting at position 122 of SEQ ID NO: 2364
uggugaugaacacgaacuu

SEQ ID NO: 183451 - RNA, 19 nt, Artificial Sequence
  Description of Artificial Sequence: Synthetic oligonucleotide
  Antisense strand to SEQ ID NO: 183450
aaguucguguucaucacca

SEQ ID NO: 183452 - RNA, 19 nt, Artificial Sequence
  Description of Artificial Sequence: Synthetic oligonucleotide
  Sense strand starting at position 114 of SEQ ID NO: 2364
guacucauuggugaugaac

SEQ ID NO: 183453 - RNA, 19 nt, Artificial Sequence
  Description of Artificial Sequence: Synthetic oligonucleotide
  Antisense strand to SEQ ID NO: 183452
guucaucaccaaugaguac

SEQ ID NO: 183454 - RNA, 19 nt, Artificial Sequence
  Description of Artificial Sequence: Synthetic oligonucleotide
  Sense strand starting at position 110 of SEQ ID NO: 2364
ccaaguacucauuggugau

SEQ ID NO: 183455 - RNA, 19 nt, Artificial Sequence
  Description of Artificial Sequence: Synthetic oligonucleotide
  Antisense strand to SEQ ID NO: 183454
aucaccaaugaguacuugg

SEQ ID NO: 183456 - RNA, 19 nt, Artificial Sequence
  Description of Artificial Sequence: Synthetic oligonucleotide
  Sense strand starting at position 3935 of SEQ ID NO: 2365
ugaguuaugccaugaggag

SEQ ID NO: 183457 - RNA, 19 nt, Artificial Sequence
  Description of Artificial Sequence: Synthetic oligonucleotide
  Antisense strand to SEQ ID NO: 183456
cuccucauggcauaacuca

SEQ ID NO: 183458 - RNA, 19 nt, Artificial Sequence
  Description of Artificial Sequence: Synthetic oligonucleotide
  Sense strand starting at position 3930 of SEQ ID NO: 2365
gaguuugaguuaugccaug

SEQ ID NO: 183459 - RNA, 19 nt, Artificial Sequence
  Description of Artificial Sequence: Synthetic oligonucleotide
  Antisense strand to SEQ ID NO: 183458
cauggcauaacucaaacuc

SEQ ID NO: 183460 - RNA, 19 nt, Artificial Sequence
  Description of Artificial Sequence: Synthetic oligonucleotide
  Sense strand starting at position 3928 of SEQ ID NO: 2365
cggaguuugaguuaugcca

SEQ ID NO: 183461 - RNA, 19 nt, Artificial Sequence
  Description of Artificial Sequence: Synthetic oligonucleotide
  Antisense strand to SEQ ID NO: 183460
uggcauaacucaaacuccg

SEQ ID NO: 183462 - RNA, 19 nt, Artificial Sequence
  Description of Artificial Sequence: Synthetic oligonucleotide
  Sense strand starting at position 3857 of SEQ ID NO: 2365
ggcgucuuugcaggaggaa

SEQ ID NO: 183463 - RNA, 19 nt, Artificial Sequence
  Description of Artificial Sequence: Synthetic oligonucleotide
  Antisense strand to SEQ ID NO: 183462
uuccuccugcaaagacgcc

SEQ ID NO: 183464 - RNA, 19 nt, Artificial Sequence
  Description of Artificial Sequence: Synthetic oligonucleotide
  Sense strand starting at position 2830 of SEQ ID NO: 2365
gagagucucggaugucgaa

SEQ ID NO: 183465 - RNA, 19 nt, Artificial Sequence
  Description of Artificial Sequence: Synthetic oligonucleotide
  Antisense strand to SEQ ID NO: 183464
uucgacauccgagacucuc

SEQ ID NO: 183466 - RNA, 19 nt, Artificial Sequence
  Description of Artificial Sequence: Synthetic oligonucleotide
  Sense strand starting at position 2612 of SEQ ID NO: 2365
gcucguaggaucggagaau

SEQ ID NO: 183467 - RNA, 19 nt, Artificial Sequence
  Description of Artificial Sequence: Synthetic oligonucleotide
  Antisense strand to SEQ ID NO: 183466
auucuccgauccuacgagc

SEQ ID NO: 183468 - RNA, 19 nt, Artificial Sequence
  Description of Artificial Sequence: Synthetic oligonucleotide
  Sense strand starting at position 2160 of SEQ ID NO: 2365
gcuaauuucuucgaaauuu

SEQ ID NO: 183469 - RNA, 19 nt, Artificial Sequence
  Description of Artificial Sequence: Synthetic oligonucleotide
  Antisense strand to SEQ ID NO: 183468
aaauuucgaagaaauuagc

SEQ ID NO: 183470 - RNA, 19 nt, Artificial Sequence
  Description of Artificial Sequence: Synthetic oligonucleotide
  Sense strand starting at position 2158 of SEQ ID NO: 2365
gugcuaauuucuucgaaau

SEQ ID NO: 183471 - RNA, 19 nt, Artificial Sequence
  Description of Artificial Sequence: Synthetic oligonucleotide
  Antisense strand to SEQ ID NO: 183470
auuucgaagaaauuagcac

SEQ ID NO: 183472 - RNA, 19 nt, Artificial Sequence
  Description of Artificial Sequence: Synthetic oligonucleotide
  Sense strand starting at position 2157 of SEQ ID NO: 2365
ugugcuaauuucuucgaaa

SEQ ID NO: 183473 - RNA, 19 nt, Artificial Sequence
  Description of Artificial Sequence: Synthetic oligonucleotide
  Antisense strand to SEQ ID NO: 183472
uuucgaagaaauuagcaca

SEQ ID NO: 183474 - RNA, 19 nt, Artificial Sequence
  Description of Artificial Sequence: Synthetic oligonucleotide
  Sense strand starting at position 2156 of SEQ ID NO: 2365
gugugcuaauuucuucgaa

SEQ ID NO: 183475 - RNA, 19 nt, Artificial Sequence
  Description of Artificial Sequence: Synthetic oligonucleotide
  Antisense strand to SEQ ID NO: 183474
uucgaagaaauuagcacac

SEQ ID NO: 183476 - RNA, 19 nt, Artificial Sequence
  Description of Artificial Sequence: Synthetic oligonucleotide
  Sense strand starting at position 2150 of SEQ ID NO: 2365
uggaaagugugcuaauuuc

SEQ ID NO: 183477 - RNA, 19 nt, Artificial Sequence
  Description of Artificial Sequence: Synthetic oligonucleotide
  Antisense strand to SEQ ID NO: 183476
gaaauuagcacacuuucca

SEQ ID NO: 183478 - RNA, 19 nt, Artificial Sequence
  Description of Artificial Sequence: Synthetic oligonucleotide
  Sense strand starting at position 2148 of SEQ ID NO: 2365
cuuggaaagugugcuaauu

SEQ ID NO: 183479 - RNA, 19 nt, Artificial Sequence
  Description of Artificial Sequence: Synthetic oligonucleotide
  Antisense strand to SEQ ID NO: 183478
aauuagcacacuuuccaag

SEQ ID NO: 183480 - RNA, 19 nt, Artificial Sequence
  Description of Artificial Sequence: Synthetic oligonucleotide
  Sense strand starting at position 2145 of SEQ ID NO: 2365
agacuuggaaagugugcua

SEQ ID NO: 183481 - RNA, 19 nt, Artificial Sequence
  Description of Artificial Sequence: Synthetic oligonucleotide
  Antisense strand to SEQ ID NO: 183480
uagcacacuuuccaagucu

SEQ ID NO: 183482 - RNA, 19 nt, Artificial Sequence
  Description of Artificial Sequence: Synthetic oligonucleotide
  Sense strand starting at position 2129 of SEQ ID NO: 2365
aauaguagcuccuaagaga

SEQ ID NO: 183483 - RNA, 19 nt, Artificial Sequence
  Description of Artificial Sequence: Synthetic oligonucleotide
  Antisense strand to SEQ ID NO: 183482
ucucuuaggagcuacuauu

SEQ ID NO: 183484 - RNA, 19 nt, Artificial Sequence
  Description of Artificial Sequence: Synthetic oligonucleotide
  Sense strand starting at position 2104 of SEQ ID NO: 2365
auaauugaucuaggaguuu

SEQ ID NO: 183485 - RNA, 19 nt, Artificial Sequence
  Description of Artificial Sequence: Synthetic oligonucleotide
  Antisense strand to SEQ ID NO: 183484
aaacuccuagaucaauuau

SEQ ID NO: 183486 - RNA, 19 nt, Artificial Sequence
  Description of Artificial Sequence: Synthetic oligonucleotide
  Sense strand starting at position 2060 of SEQ ID NO: 2365
aggcuuugcuaagaaacau

SEQ ID NO: 183487 - RNA, 19 nt, Artificial Sequence
  Description of Artificial Sequence: Synthetic oligonucleotide
  Antisense strand to SEQ ID NO: 183486
auguuucuuagcaaagccu

SEQ ID NO: 183488 - RNA, 19 nt, Artificial Sequence
  Description of Artificial Sequence: Synthetic oligonucleotide
  Sense strand starting at position 2055 of SEQ ID NO: 2365
cgaggaggcuuugcuaaga

SEQ ID NO: 183489 - RNA, 19 nt, Artificial Sequence
  Description of Artificial Sequence: Synthetic oligonucleotide
  Antisense strand to SEQ ID NO: 183488
ucuuagcaaagccuccucg

SEQ ID NO: 183490 - RNA, 19 nt, Artificial Sequence
  Description of Artificial Sequence: Synthetic oligonucleotide
  Sense strand starting at position 1995 of SEQ ID NO: 2365
cucagauuggcauguacua

SEQ ID NO: 183491 - RNA, 19 nt, Artificial Sequence
  Description of Artificial Sequence: Synthetic oligonucleotide
  Antisense strand to SEQ ID NO: 183490
uaguacaugccaaucugag

SEQ ID NO: 183492 - RNA, 19 nt, Artificial Sequence
  Description of Artificial Sequence: Synthetic oligonucleotide
  Sense strand starting at position 1984 of SEQ ID NO: 2365
gcgaacacaugcucagauu

SEQ ID NO: 183493 - RNA, 19 nt, Artificial Sequence
  Description of Artificial Sequence: Synthetic oligonucleotide
  Antisense strand to SEQ ID NO: 183492
aaucugagcauguguucgc

SEQ ID NO: 183494 - RNA, 19 nt, Artificial Sequence
  Description of Artificial Sequence: Synthetic oligonucleotide
  Sense strand starting at position 1786 of SEQ ID NO: 2365
ugccuuaccuccucaggau

SEQ ID NO: 183495 - RNA, 19 nt, Artificial Sequence
  Description of Artificial Sequence: Synthetic oligonucleotide
  Antisense strand to SEQ ID NO: 183494
auccugaggagguaaggca

SEQ ID NO: 183496 - RNA, 19 nt, Artificial Sequence
  Description of Artificial Sequence: Synthetic oligonucleotide
  Sense strand starting at position 1774 of SEQ ID NO: 2365
aguggaucgccuugccuua

SEQ ID NO: 183497 - RNA, 19 nt, Artificial Sequence
  Description of Artificial Sequence: Synthetic oligonucleotide
  Antisense strand to SEQ ID NO: 183496
uaaggcaaggcgauccacu

SEQ ID NO: 183498 - RNA, 19 nt, Artificial Sequence
  Description of Artificial Sequence: Synthetic oligonucleotide
  Sense strand starting at position 1614 of SEQ ID NO: 2365
ucaucuaucuguccaaagu

SEQ ID NO: 183499 - RNA, 19 nt, Artificial Sequence
  Description of Artificial Sequence: Synthetic oligonucleotide
  Antisense strand to SEQ ID NO: 183498
acuuuggacagauagauga

SEQ ID NO: 183500 - RNA, 19 nt, Artificial Sequence
  Description of Artificial Sequence: Synthetic oligonucleotide
  Sense strand starting at position 1612 of SEQ ID NO: 2365
agucaucuaucuguccaaa

SEQ ID NO: 183501 - RNA, 19 nt, Artificial Sequence
  Description of Artificial Sequence: Synthetic oligonucleotide
  Antisense strand to SEQ ID NO: 183500
uuuggacagauagaugacu

SEQ ID NO: 183502 - RNA, 19 nt, Artificial Sequence
  Description of Artificial Sequence: Synthetic oligonucleotide
  Sense strand starting at position 1504 of SEQ ID NO: 2365
cugcaaacauaggucauau

SEQ ID NO: 183503 - RNA, 19 nt, Artificial Sequence
  Description of Artificial Sequence: Synthetic oligonucleotide
  Antisense strand to SEQ ID NO: 183502
auaugaccuauguuugcag

SEQ ID NO: 183504 - RNA, 19 nt, Artificial Sequence
  Description of Artificial Sequence: Synthetic oligonucleotide
  Sense strand starting at position 1492 of SEQ ID NO: 2365
acaucugacugacugcaaa

SEQ ID NO: 183505 - RNA, 19 nt, Artificial Sequence
  Description of Artificial Sequence: Synthetic oligonucleotide
  Antisense strand to SEQ ID NO: 183504
uuugcagucagucagaugu

SEQ ID NO: 183506 - RNA, 19 nt, Artificial Sequence
  Description of Artificial Sequence: Synthetic oligonucleotide
  Sense strand starting at position 1403 of SEQ ID NO: 2365
cuccauagaagauguggua

SEQ ID NO: 183507 - RNA, 19 nt, Artificial Sequence
  Description of Artificial Sequence: Synthetic oligonucleotide
  Antisense strand to SEQ ID NO: 183506
uaccacaucuucuauggag

SEQ ID NO: 183508 - RNA, 19 nt, Artificial Sequence
  Description of Artificial Sequence: Synthetic oligonucleotide
  Sense strand starting at position 1316 of SEQ ID NO: 2365
acagaaucacaucguacau

SEQ ID NO: 183509 - RNA, 19 nt, Artificial Sequence
  Description of Artificial Sequence: Synthetic oligonucleotide
  Antisense strand to SEQ ID NO: 183508
auguacgaugugauucugu

SEQ ID NO: 183510 - RNA, 19 nt, Artificial Sequence
  Description of Artificial Sequence: Synthetic oligonucleotide
  Sense strand starting at position 1283 of SEQ ID NO: 2365
cucuuucucugggaaagag

SEQ ID NO: 183511 - RNA, 19 nt, Artificial Sequence
  Description of Artificial Sequence: Synthetic oligonucleotide
  Antisense strand to SEQ ID NO: 183510
cucuuucccagagaaagag

SEQ ID NO: 183512 - RNA, 19 nt, Artificial Sequence
  Description of Artificial Sequence: Synthetic oligonucleotide
  Sense strand starting at position 1282 of SEQ ID NO: 2365
acucuuucucugggaaaga

SEQ ID NO: 183513 - RNA, 19 nt, Artificial Sequence
  Description of Artificial Sequence: Synthetic oligonucleotide
  Antisense strand to SEQ ID NO: 183512
ucuuucccagagaaagagu

SEQ ID NO: 183514 - RNA, 19 nt, Artificial Sequence
  Description of Artificial Sequence: Synthetic oligonucleotide
  Sense strand starting at position 1280 of SEQ ID NO: 2365
gcacucuuucucugggaaa

SEQ ID NO: 183515 - RNA, 19 nt, Artificial Sequence
  Description of Artificial Sequence: Synthetic oligonucleotide
  Antisense strand to SEQ ID NO: 183514
uuucccagagaaagagugc

SEQ ID NO: 183516 - RNA, 19 nt, Artificial Sequence
  Description of Artificial Sequence: Synthetic oligonucleotide
  Sense strand starting at position 1279 of SEQ ID NO: 2365
agcacucuuucucugggaa

SEQ ID NO: 183517 - RNA, 19 nt, Artificial Sequence
  Description of Artificial Sequence: Synthetic oligonucleotide
  Antisense strand to SEQ ID NO: 183516
uucccagagaaagagugcu

SEQ ID NO: 183518 - RNA, 19 nt, Artificial Sequence
  Description of Artificial Sequence: Synthetic oligonucleotide
  Sense strand starting at position 1257 of SEQ ID NO: 2365
gcaagcagucaauaauuau

SEQ ID NO: 183519 - RNA, 19 nt, Artificial Sequence
  Description of Artificial Sequence: Synthetic oligonucleotide
  Antisense strand to SEQ ID NO: 183518
auaauuauugacugcuugc

SEQ ID NO: 183520 - RNA, 19 nt, Artificial Sequence
  Description of Artificial Sequence: Synthetic oligonucleotide
  Sense strand starting at position 906 of SEQ ID NO: 2365
uaguguguagaugaaauga

SEQ ID NO: 183521 - RNA, 19 nt, Artificial Sequence
  Description of Artificial Sequence: Synthetic oligonucleotide
  Antisense strand to SEQ ID NO: 183520
ucauuucaucuacacacua

SEQ ID NO: 183522 - RNA, 19 nt, Artificial Sequence
  Description of Artificial Sequence: Synthetic oligonucleotide
  Sense strand starting at position 900 of SEQ ID NO: 2365
uaggaauaguguguagaug

SEQ ID NO: 183523 - RNA, 19 nt, Artificial Sequence
  Description of Artificial Sequence: Synthetic oligonucleotide
  Antisense strand to SEQ ID NO: 183522
caucuacacacuauuccua

SEQ ID NO: 183524 - RNA, 19 nt, Artificial Sequence
  Description of Artificial Sequence: Synthetic oligonucleotide
  Sense strand starting at position 899 of SEQ ID NO: 2365
auaggaauaguguguagau

SEQ ID NO: 183525 - RNA, 19 nt, Artificial Sequence
  Description of Artificial Sequence: Synthetic oligonucleotide
  Antisense strand to SEQ ID NO: 183524
aucuacacacuauuccuau

SEQ ID NO: 183526 - RNA, 19 nt, Artificial Sequence
  Description of Artificial Sequence: Synthetic oligonucleotide
  Sense strand starting at position 747 of SEQ ID NO: 2365
ugauaagaguccugguucu

SEQ ID NO: 183527 - RNA, 19 nt, Artificial Sequence
  Description of Artificial Sequence: Synthetic oligonucleotide
  Antisense strand to SEQ ID NO: 183526
agaaccaggacucuuauca

SEQ ID NO: 183528 - RNA, 19 nt, Artificial Sequence
  Description of Artificial Sequence: Synthetic oligonucleotide
  Sense strand starting at position 726 of SEQ ID NO: 2365
cuaguagcugugucgcaaa

SEQ ID NO: 183529 - RNA, 19 nt, Artificial Sequence
  Description of Artificial Sequence: Synthetic oligonucleotide
  Antisense strand to SEQ ID NO: 183528
uuugcgacacagcuacuag

SEQ ID NO: 183530 - RNA, 19 nt, Artificial Sequence
  Description of Artificial Sequence: Synthetic oligonucleotide
  Sense strand starting at position 725 of SEQ ID NO: 2365
acuaguagcugugucgcaa

SEQ ID NO: 183531 - RNA, 19 nt, Artificial Sequence
  Description of Artificial Sequence: Synthetic oligonucleotide
  Antisense strand to SEQ ID NO: 183530
uugcgacacagcuacuagu

SEQ ID NO: 183532 - RNA, 19 nt, Artificial Sequence
  Description of Artificial Sequence: Synthetic oligonucleotide
  Sense strand starting at position 496 of SEQ ID NO: 2365
guccaacuccuggacucau

SEQ ID NO: 183533 - RNA, 19 nt, Artificial Sequence
  Description of Artificial Sequence: Synthetic oligonucleotide
  Antisense strand to SEQ ID NO: 183532
augaguccaggaguuggac

SEQ ID NO: 183534 - RNA, 19 nt, Artificial Sequence
  Description of Artificial Sequence: Synthetic oligonucleotide
  Sense strand starting at position 183 of SEQ ID NO: 2365
gccagaauacccuaguuua

SEQ ID NO: 183535 - RNA, 19 nt, Artificial Sequence
  Description of Artificial Sequence: Synthetic oligonucleotide
  Antisense strand to SEQ ID NO: 183534
uaaacuaggguauucuggc

SEQ ID NO: 183536 - RNA, 19 nt, Artificial Sequence
  Description of Artificial Sequence: Synthetic oligonucleotide
  Sense strand starting at position 544 of SEQ ID NO: 2366
uuuccuuuauggucuuuau

SEQ ID NO: 183537 - RNA, 19 nt, Artificial Sequence
  Description of Artificial Sequence: Synthetic oligonucleotide
  Antisense strand to SEQ ID NO: 183536
auaaagaccauaaaggaaa

SEQ ID NO: 183538 - RNA, 19 nt, Artificial Sequence
  Description of Artificial Sequence: Synthetic oligonucleotide
  Sense strand starting at position 622 of SEQ ID NO: 2366
cgagauuucugcucaaucg

SEQ ID NO: 183539 - RNA, 19 nt, Artificial Sequence
  Description of Artificial Sequence: Synthetic oligonucleotide
  Antisense strand to SEQ ID NO: 183538
cgauugagcagaaaucucg

SEQ ID NO: 183540 - RNA, 19 nt, Artificial Sequence
  Description of Artificial Sequence: Synthetic oligonucleotide
  Sense strand starting at position 827 of SEQ ID NO: 2366
uaagaaacuucucuucggu

SEQ ID NO: 183541 - RNA, 19 nt, Artificial Sequence
  Description of Artificial Sequence: Synthetic oligonucleotide
  Antisense strand to SEQ ID NO: 183540
accgaagagaaguuucuua

SEQ ID NO: 183542 - RNA, 19 nt, Artificial Sequence
  Description of Artificial Sequence: Synthetic oligonucleotide
  Sense strand starting at position 1156 of SEQ ID NO: 2366
uguggcucguacccauaau

SEQ ID NO: 183543 - RNA, 19 nt, Artificial Sequence
  Description of Artificial Sequence: Synthetic oligonucleotide
  Antisense strand to SEQ ID NO: 183542
auuauggguacgagccaca

SEQ ID NO: 183544 - RNA, 19 nt, Artificial Sequence
  Description of Artificial Sequence: Synthetic oligonucleotide
  Sense strand starting at position 1323 of SEQ ID NO: 2366
gacagaguauugcuauguc

SEQ ID NO: 183545 - RNA, 19 nt, Artificial Sequence
  Description of Artificial Sequence: Synthetic oligonucleotide
  Antisense strand to SEQ ID NO: 183544
gacauagcaauacucuguc

SEQ ID NO: 183546 - RNA, 19 nt, Artificial Sequence
  Description of Artificial Sequence: Synthetic oligonucleotide
  Sense strand starting at position 1326 of SEQ ID NO: 2366
agaguauugcuaugucacc

SEQ ID NO: 183547 - RNA, 19 nt, Artificial Sequence
  Description of Artificial Sequence: Synthetic oligonucleotide
  Antisense strand to SEQ ID NO: 183546
ggugacauagcaauacucu

SEQ ID NO: 183548 - RNA, 19 nt, Artificial Sequence
  Description of Artificial Sequence: Synthetic oligonucleotide
  Sense strand starting at position 1509 of SEQ ID NO: 2366
auggaaucacugcgaauua

SEQ ID NO: 183549 - RNA, 19 nt, Artificial Sequence
  Description of Artificial Sequence: Synthetic oligonucleotide
  Antisense strand to SEQ ID NO: 183548
uaauucgcagugauuccau

SEQ ID NO: 183550 - RNA, 19 nt, Artificial Sequence
  Description of Artificial Sequence: Synthetic oligonucleotide
  Sense strand starting at position 1609 of SEQ ID NO: 2366
ccgaaaccauaaggaaaua

SEQ ID NO: 183551 - RNA, 19 nt, Artificial Sequence
  Description of Artificial Sequence: Synthetic oligonucleotide
  Antisense strand to SEQ ID NO: 183550
uauuuccuuaugguuucgg

SEQ ID NO: 183552 - RNA, 19 nt, Artificial Sequence
  Description of Artificial Sequence: Synthetic oligonucleotide
  Sense strand starting at position 1626 of SEQ ID NO: 2366
uauucugaugcccagauga

SEQ ID NO: 183553 - RNA, 19 nt, Artificial Sequence
  Description of Artificial Sequence: Synthetic oligonucleotide
  Antisense strand to SEQ ID NO: 183552
ucaucugggcaucagaaua

SEQ ID NO: 183554 - RNA, 19 nt, Artificial Sequence
  Description of Artificial Sequence: Synthetic oligonucleotide
  Sense strand starting at position 1628 of SEQ ID NO: 2366
uucugaugcccagaugaug

SEQ ID NO: 183555 - RNA, 19 nt, Artificial Sequence
  Description of Artificial Sequence: Synthetic oligonucleotide
  Antisense strand to SEQ ID NO: 183554
caucaucugggcaucagaa

SEQ ID NO: 183556 - RNA, 19 nt, Artificial Sequence
  Description of Artificial Sequence: Synthetic oligonucleotide
  Sense strand starting at position 1656 of SEQ ID NO: 2366
gugaauuaaguccacacau

SEQ ID NO: 183557 - RNA, 19 nt, Artificial Sequence
  Description of Artificial Sequence: Synthetic oligonucleotide
  Antisense strand to SEQ ID NO: 183556
auguguggacuuaauucac

SEQ ID NO: 183558 - RNA, 19 nt, Artificial Sequence
  Description of Artificial Sequence: Synthetic oligonucleotide
  Sense strand starting at position 1712 of SEQ ID NO: 2366
ugguccuuugcaugcaaga

SEQ ID NO: 183559 - RNA, 19 nt, Artificial Sequence
  Description of Artificial Sequence: Synthetic oligonucleotide
  Antisense strand to SEQ ID NO: 183558
ucuugcaugcaaaggacca

SEQ ID NO: 183560 - RNA, 19 nt, Artificial Sequence
  Description of Artificial Sequence: Synthetic oligonucleotide
  Sense strand starting at position 1714 of SEQ ID NO: 2366
guccuuugcaugcaagaag

SEQ ID NO: 183561 - RNA, 19 nt, Artificial Sequence
  Description of Artificial Sequence: Synthetic oligonucleotide
  Antisense strand to SEQ ID NO: 183560
cuucuugcaugcaaaggac

SEQ ID NO: 183562 - RNA, 19 nt, Artificial Sequence
  Description of Artificial Sequence: Synthetic oligonucleotide
  Sense strand starting at position 1736 of SEQ ID NO: 2366
aagagcuccuccgugcaau

SEQ ID NO: 183563 - RNA, 19 nt, Artificial Sequence
  Description of Artificial Sequence: Synthetic oligonucleotide
  Antisense strand to SEQ ID NO: 183562
auugcacggaggagcucuu

SEQ ID NO: 183564 - RNA, 19 nt, Artificial Sequence
  Description of Artificial Sequence: Synthetic oligonucleotide
  Sense strand starting at position 1748 of SEQ ID NO: 2366
gugcaauccucuucuguau

SEQ ID NO: 183565 - RNA, 19 nt, Artificial Sequence
  Description of Artificial Sequence: Synthetic oligonucleotide
  Antisense strand to SEQ ID NO: 183564
auacagaagaggauugcac

SEQ ID NO: 183566 - RNA, 19 nt, Artificial Sequence
  Description of Artificial Sequence: Synthetic oligonucleotide
  Sense strand starting at position 1756 of SEQ ID NO: 2366
cucuucuguaugugaucga

SEQ ID NO: 183567 - RNA, 19 nt, Artificial Sequence
  Description of Artificial Sequence: Synthetic oligonucleotide
  Antisense strand to SEQ ID NO: 183566
ucgaucacauacagaagag

SEQ ID NO: 183568 - RNA, 19 nt, Artificial Sequence
  Description of Artificial Sequence: Synthetic oligonucleotide
  Sense strand starting at position 1759 of SEQ ID NO: 2366
uucuguaugugaucgagag

SEQ ID NO: 183569 - RNA, 19 nt, Artificial Sequence
  Description of Artificial Sequence: Synthetic oligonucleotide
  Antisense strand to SEQ ID NO: 183568
cucucgaucacauacagaa

SEQ ID NO: 183570 - RNA, 19 nt, Artificial Sequence
  Description of Artificial Sequence: Synthetic oligonucleotide
  Sense strand starting at position 1761 of SEQ ID NO: 2366
cuguaugugaucgagagga

SEQ ID NO: 183571 - RNA, 19 nt, Artificial Sequence
  Description of Artificial Sequence: Synthetic oligonucleotide
  Antisense strand to SEQ ID NO: 183570
uccucucgaucacauacag

SEQ ID NO: 183572 - RNA, 19 nt, Artificial Sequence
  Description of Artificial Sequence: Synthetic oligonucleotide
  Sense strand starting at position 1763 of SEQ ID NO: 2366
guaugugaucgagaggaua

SEQ ID NO: 183573 - RNA, 19 nt, Artificial Sequence
  Description of Artificial Sequence: Synthetic oligonucleotide
  Antisense strand to SEQ ID NO: 183572
uauccucucgaucacauac

SEQ ID NO: 183574 - RNA, 19 nt, Artificial Sequence
  Description of Artificial Sequence: Synthetic oligonucleotide
  Sense strand starting at position 1765 of SEQ ID NO: 2366
augugaucgagaggauaca

SEQ ID NO: 183575 - RNA, 19 nt, Artificial Sequence
  Description of Artificial Sequence: Synthetic oligonucleotide
  Antisense strand to SEQ ID NO: 183574
uguauccucucgaucacau

SEQ ID NO: 183576 - RNA, 19 nt, Artificial Sequence
  Description of Artificial Sequence: Synthetic oligonucleotide
  Sense strand starting at position 1775 of SEQ ID NO: 2366
gaggauacaugcucaucau

SEQ ID NO: 183577 - RNA, 19 nt, Artificial Sequence
  Description of Artificial Sequence: Synthetic oligonucleotide
  Antisense strand to SEQ ID NO: 183576
augaugagcauguauccuc

SEQ ID NO: 183578 - RNA, 19 nt, Artificial Sequence
  Description of Artificial Sequence: Synthetic oligonucleotide
  Sense strand starting at position 1837 of SEQ ID NO: 2366
cucgcauugcucucucacu

SEQ ID NO: 183579 - RNA, 19 nt, Artificial Sequence
  Description of Artificial Sequence: Synthetic oligonucleotide
  Antisense strand to SEQ ID NO: 183578
agugagagagcaaugcgag

SEQ ID NO: 183580 - RNA, 19 nt, Artificial Sequence
  Description of Artificial Sequence: Synthetic oligonucleotide
  Sense strand starting at position 2249 of SEQ ID NO: 2366
gagggcggaucacuugaau

SEQ ID NO: 183581 - RNA, 19 nt, Artificial Sequence
  Description of Artificial Sequence: Synthetic oligonucleotide
  Antisense strand to SEQ ID NO: 183580
auucaagugauccgcccuc

SEQ ID NO: 183582 - RNA, 19 nt, Artificial Sequence
  Description of Artificial Sequence: Synthetic oligonucleotide
  Sense strand starting at position 2700 of SEQ ID NO: 2366
guguguggugccucaaguu

SEQ ID NO: 183583 - RNA, 19 nt, Artificial Sequence
  Description of Artificial Sequence: Synthetic oligonucleotide
  Antisense strand to SEQ ID NO: 183582
aacuugaggcaccacacac

SEQ ID NO: 183584 - RNA, 19 nt, Artificial Sequence
  Description of Artificial Sequence: Synthetic oligonucleotide
  Sense strand starting at position 2712 of SEQ ID NO: 2366
ucaaguuuccguaguggug

SEQ ID NO: 183585 - RNA, 19 nt, Artificial Sequence
  Description of Artificial Sequence: Synthetic oligonucleotide
  Antisense strand to SEQ ID NO: 183584
caccacuacggaaacuuga

SEQ ID NO: 183586 - RNA, 19 nt, Artificial Sequence
  Description of Artificial Sequence: Synthetic oligonucleotide
  Sense strand starting at position 2770 of SEQ ID NO: 2366
aggcuuaccuuucuguaau

SEQ ID NO: 183587 - RNA, 19 nt, Artificial Sequence
  Description of Artificial Sequence: Synthetic oligonucleotide
  Antisense strand to SEQ ID NO: 183586
auuacagaaagguaagccu

SEQ ID NO: 183588 - RNA, 19 nt, Artificial Sequence
  Description of Artificial Sequence: Synthetic oligonucleotide
  Sense strand starting at position 3087 of SEQ ID NO: 2366
cuggccaccuuucuguaau

SEQ ID NO: 183589 - RNA, 19 nt, Artificial Sequence
  Description of Artificial Sequence: Synthetic oligonucleotide
  Antisense strand to SEQ ID NO: 183588
auuacagaaagguggccag

SEQ ID NO: 183590 - RNA, 19 nt, Artificial Sequence
  Description of Artificial Sequence: Synthetic oligonucleotide
  Sense strand starting at position 3089 of SEQ ID NO: 2366
ggccaccuuucuguaauua

SEQ ID NO: 183591 - RNA, 19 nt, Artificial Sequence
  Description of Artificial Sequence: Synthetic oligonucleotide
  Antisense strand to SEQ ID NO: 183590
uaauuacagaaagguggcc

SEQ ID NO: 183592 - RNA, 19 nt, Artificial Sequence
  Description of Artificial Sequence: Synthetic oligonucleotide
  Sense strand starting at position 3109 of SEQ ID NO: 2366
uacugauaguuuguguaau

SEQ ID NO: 183593 - RNA, 19 nt, Artificial Sequence
  Description of Artificial Sequence: Synthetic oligonucleotide
  Antisense strand to SEQ ID NO: 183592
auuacacaaacuaucagua

SEQ ID NO: 183594 - RNA, 19 nt, Artificial Sequence
  Description of Artificial Sequence: Synthetic oligonucleotide
  Sense strand starting at position 3111 of SEQ ID NO: 2366
cugauaguuuguguaauac

SEQ ID NO: 183595 - RNA, 19 nt, Artificial Sequence
  Description of Artificial Sequence: Synthetic oligonucleotide
  Antisense strand to SEQ ID NO: 183594
guauuacacaaacuaucag

SEQ ID NO: 183596 - RNA, 19 nt, Artificial Sequence
  Description of Artificial Sequence: Synthetic oligonucleotide
  Sense strand starting at position 3216 of SEQ ID NO: 2366
gugauuguuaacugguguu

SEQ ID NO: 183597 - RNA, 19 nt, Artificial Sequence
  Description of Artificial Sequence: Synthetic oligonucleotide
  Antisense strand to SEQ ID NO: 183596
aacaccaguuaacaaucac

SEQ ID NO: 183598 - RNA, 19 nt, Artificial Sequence
  Description of Artificial Sequence: Synthetic oligonucleotide
  Sense strand starting at position 3260 of SEQ ID NO: 2366
uugaauuuaucaggacuca

SEQ ID NO: 183599 - RNA, 19 nt, Artificial Sequence
  Description of Artificial Sequence: Synthetic oligonucleotide
  Antisense strand to SEQ ID NO: 183598
ugaguccugauaaauucaa

SEQ ID NO: 183600 - RNA, 19 nt, Artificial Sequence
  Description of Artificial Sequence: Synthetic oligonucleotide
  Sense strand starting at position 3294 of SEQ ID NO: 2366
gaagaaagcucucucaggu

SEQ ID NO: 183601 - RNA, 19 nt, Artificial Sequence
  Description of Artificial Sequence: Synthetic oligonucleotide
  Antisense strand to SEQ ID NO: 183600
accugagagagcuuucuuc

SEQ ID NO: 183602 - RNA, 19 nt, Artificial Sequence
  Description of Artificial Sequence: Synthetic oligonucleotide
  Sense strand starting at position 3300 of SEQ ID NO: 2366
agcucucucaggugagaca

SEQ ID NO: 183603 - RNA, 19 nt, Artificial Sequence
  Description of Artificial Sequence: Synthetic oligonucleotide
  Antisense strand to SEQ ID NO: 183602
ugucucaccugagagagcu

SEQ ID NO: 183604 - RNA, 19 nt, Artificial Sequence
  Description of Artificial Sequence: Synthetic oligonucleotide
  Sense strand starting at position 3418 of SEQ ID NO: 2366
aguccuaguccacagguaa

SEQ ID NO: 183605 - RNA, 19 nt, Artificial Sequence
  Description of Artificial Sequence: Synthetic oligonucleotide
  Antisense strand to SEQ ID NO: 183604
uuaccuguggacuaggacu

SEQ ID NO: 183606 - RNA, 19 nt, Artificial Sequence
  Description of Artificial Sequence: Synthetic oligonucleotide
  Sense strand starting at position 3540 of SEQ ID NO: 2366
ugccauuuauccugggauu

SEQ ID NO: 183607 - RNA, 19 nt, Artificial Sequence
  Description of Artificial Sequence: Synthetic oligonucleotide
  Antisense strand to SEQ ID NO: 183606
aaucccaggauaaauggca

SEQ ID NO: 183608 - RNA, 19 nt, Artificial Sequence
  Description of Artificial Sequence: Synthetic oligonucleotide
  Sense strand starting at position 3556 of SEQ ID NO: 2366
auuccuggcaucugaggaa

SEQ ID NO: 183609 - RNA, 19 nt, Artificial Sequence
  Description of Artificial Sequence: Synthetic oligonucleotide
  Antisense strand to SEQ ID NO: 183608
uuccucagaugccaggaau

SEQ ID NO: 183610 - RNA, 19 nt, Artificial Sequence
  Description of Artificial Sequence: Synthetic oligonucleotide
  Sense strand starting at position 3911 of SEQ ID NO: 2366
cugacugacccugauucuu

SEQ ID NO: 183611 - RNA, 19 nt, Artificial Sequence
  Description of Artificial Sequence: Synthetic oligonucleotide
  Antisense strand to SEQ ID NO: 183610
aagaaucagggucagucag

SEQ ID NO: 183612 - RNA, 19 nt, Artificial Sequence
  Description of Artificial Sequence: Synthetic oligonucleotide
  Sense strand starting at position 3924 of SEQ ID NO: 2366
auucuuucuccagggccaa

SEQ ID NO: 183613 - RNA, 19 nt, Artificial Sequence
  Description of Artificial Sequence: Synthetic oligonucleotide
  Antisense strand to SEQ ID NO: 183612
uuggcccuggagaaagaau

SEQ ID NO: 183614 - RNA, 19 nt, Artificial Sequence
  Description of Artificial Sequence: Synthetic oligonucleotide
  Sense strand starting at position 3925 of SEQ ID NO: 2366
uucuuucuccagggccaaa

SEQ ID NO: 183615 - RNA, 19 nt, Artificial Sequence
  Description of Artificial Sequence: Synthetic oligonucleotide
  Antisense strand to SEQ ID NO: 183614
uuuggcccuggagaaagaa

SEQ ID NO: 183616 - RNA, 19 nt, Artificial Sequence
  Description of Artificial Sequence: Synthetic oligonucleotide
  Sense strand starting at position 3954 of SEQ ID NO: 2367
aaauuaguguaucuuggaa

SEQ ID NO: 183617 - RNA, 19 nt, Artificial Sequence
  Description of Artificial Sequence: Synthetic oligonucleotide
  Antisense strand to SEQ ID NO: 183616
uuccaagauacacuaauuu

SEQ ID NO: 183618 - RNA, 19 nt, Artificial Sequence
  Description of Artificial Sequence: Synthetic oligonucleotide
  Sense strand starting at position 3822 of SEQ ID NO: 2367
uugcguuaaauggaauaua

SEQ ID NO: 183619 - RNA, 19 nt, Artificial Sequence
  Description of Artificial Sequence: Synthetic oligonucleotide
  Antisense strand to SEQ ID NO: 183618
uauauuccauuuaacgcaa

SEQ ID NO: 183620 - RNA, 19 nt, Artificial Sequence
  Description of Artificial Sequence: Synthetic oligonucleotide
  Sense strand starting at position 3752 of SEQ ID NO: 2367
agcuaaauguuagcuauua

SEQ ID NO: 183621 - RNA, 19 nt, Artificial Sequence
  Description of Artificial Sequence: Synthetic oligonucleotide
  Antisense strand to SEQ ID NO: 183620
uaauagcuaacauuuagcu

SEQ ID NO: 183622 - RNA, 19 nt, Artificial Sequence
  Description of Artificial Sequence: Synthetic oligonucleotide
  Sense strand starting at position 3566 of SEQ ID NO: 2367
acuguaguuuccucaucua

SEQ ID NO: 183623 - RNA, 19 nt, Artificial Sequence
  Description of Artificial Sequence: Synthetic oligonucleotide
  Antisense strand to SEQ ID NO: 183622
uagaugaggaaacuacagu

SEQ ID NO: 183624 - RNA, 19 nt, Artificial Sequence
  Description of Artificial Sequence: Synthetic oligonucleotide
  Sense strand starting at position 3551 of SEQ ID NO: 2367
gcauaaccucucugaacug

SEQ ID NO: 183625 - RNA, 19 nt, Artificial Sequence
  Description of Artificial Sequence: Synthetic oligonucleotide
  Antisense strand to SEQ ID NO: 183624
caguucagagagguuaugc

SEQ ID NO: 183626 - RNA, 19 nt, Artificial Sequence
  Description of Artificial Sequence: Synthetic oligonucleotide
  Sense strand starting at position 3500 of SEQ ID NO: 2367
uggauagagcuuggugaca

SEQ ID NO: 183627 - RNA, 19 nt, Artificial Sequence
  Description of Artificial Sequence: Synthetic oligonucleotide
  Antisense strand to SEQ ID NO: 183626
ugucaccaagcucuaucca

SEQ ID NO: 183628 - RNA, 19 nt, Artificial Sequence
  Description of Artificial Sequence: Synthetic oligonucleotide
  Sense strand starting at position 3489 of SEQ ID NO: 2367
gcauaauguaguggauaga

SEQ ID NO: 183629 - RNA, 19 nt, Artificial Sequence
  Description of Artificial Sequence: Synthetic oligonucleotide
  Antisense strand to SEQ ID NO: 183628
ucuauccacuacauuaugc

SEQ ID NO: 183630 - RNA, 19 nt, Artificial Sequence
  Description of Artificial Sequence: Synthetic oligonucleotide
  Sense strand starting at position 3439 of SEQ ID NO: 2367
ugugcuuaauagguuaaau

SEQ ID NO: 183631 - RNA, 19 nt, Artificial Sequence
  Description of Artificial Sequence: Synthetic oligonucleotide
  Antisense strand to SEQ ID NO: 183630
auuuaaccuauuaagcaca

SEQ ID NO: 183632 - RNA, 19 nt, Artificial Sequence
  Description of Artificial Sequence: Synthetic oligonucleotide
  Sense strand starting at position 3305 of SEQ ID NO: 2367
gugcggagcgugucuuaua

SEQ ID NO: 183633 - RNA, 19 nt, Artificial Sequence
  Description of Artificial Sequence: Synthetic oligonucleotide
  Antisense strand to SEQ ID NO: 183632
uauaagacacgcuccgcac

SEQ ID NO: 183634 - RNA, 19 nt, Artificial Sequence
  Description of Artificial Sequence: Synthetic oligonucleotide
  Sense strand starting at position 3284 of SEQ ID NO: 2367
cugugcugagaggaacauu

SEQ ID NO: 183635 - RNA, 19 nt, Artificial Sequence
  Description of Artificial Sequence: Synthetic oligonucleotide
  Antisense strand to SEQ ID NO: 183634
aauguuccucucagcacag

SEQ ID NO: 183636 - RNA, 19 nt, Artificial Sequence
  Description of Artificial Sequence: Synthetic oligonucleotide
  Sense strand starting at position 3222 of SEQ ID NO: 2367
cuaaacugaccuugcagau

SEQ ID NO: 183637 - RNA, 19 nt, Artificial Sequence
  Description of Artificial Sequence: Synthetic oligonucleotide
  Antisense strand to SEQ ID NO: 183636
aucugcaaggucaguuuag

SEQ ID NO: 183638 - RNA, 19 nt, Artificial Sequence
  Description of Artificial Sequence: Synthetic oligonucleotide
  Sense strand starting at position 3166 of SEQ ID NO: 2367
cugggaucagaagguaagu

SEQ ID NO: 183639 - RNA, 19 nt, Artificial Sequence
  Description of Artificial Sequence: Synthetic oligonucleotide
  Antisense strand to SEQ ID NO: 183638
acuuaccuucugaucccag

SEQ ID NO: 183640 - RNA, 19 nt, Artificial Sequence
  Description of Artificial Sequence: Synthetic oligonucleotide
  Sense strand starting at position 3049 of SEQ ID NO: 2367
guuagaaacagugguguca

SEQ ID NO: 183641 - RNA, 19 nt, Artificial Sequence
  Description of Artificial Sequence: Synthetic oligonucleotide
  Antisense strand to SEQ ID NO: 183640
ugacaccacuguuucuaac

SEQ ID NO: 183642 - RNA, 19 nt, Artificial Sequence
  Description of Artificial Sequence: Synthetic oligonucleotide
  Sense strand starting at position 3036 of SEQ ID NO: 2367
aagugaguggaugguuaga

SEQ ID NO: 183643 - RNA, 19 nt, Artificial Sequence
  Description of Artificial Sequence: Synthetic oligonucleotide
  Antisense strand to SEQ ID NO: 183642
ucuaaccauccacucacuu

SEQ ID NO: 183644 - RNA, 19 nt, Artificial Sequence
  Description of Artificial Sequence: Synthetic oligonucleotide
  Sense strand starting at position 2923 of SEQ ID NO: 2367
gccucaugacagcaaggua

SEQ ID NO: 183645 - RNA, 19 nt, Artificial Sequence
  Description of Artificial Sequence: Synthetic oligonucleotide
  Antisense strand to SEQ ID NO: 183644
uaccuugcugucaugaggc

SEQ ID NO: 183646 - RNA, 19 nt, Artificial Sequence
  Description of Artificial Sequence: Synthetic oligonucleotide
  Sense strand starting at position 2777 of SEQ ID NO: 2367
cggcgaagucgggauucaa

SEQ ID NO: 183647 - RNA, 19 nt, Artificial Sequence
  Description of Artificial Sequence: Synthetic oligonucleotide
  Antisense strand to SEQ ID NO: 183646
uugaaucccgacuucgccg

SEQ ID NO: 183648 - RNA, 19 nt, Artificial Sequence
  Description of Artificial Sequence: Synthetic oligonucleotide
  Sense strand starting at position 2767 of SEQ ID NO: 2367
aaugucuuugcggcgaagu

SEQ ID NO: 183649 - RNA, 19 nt, Artificial Sequence
  Description of Artificial Sequence: Synthetic oligonucleotide
  Antisense strand to SEQ ID NO: 183648
acuucgccgcaaagacauu

SEQ ID NO: 183650 - RNA, 19 nt, Artificial Sequence
  Description of Artificial Sequence: Synthetic oligonucleotide
  Sense strand starting at position 1676 of SEQ ID NO: 2367
gggaguucgccuucgcgaa

SEQ ID NO: 183651 - RNA, 19 nt, Artificial Sequence
  Description of Artificial Sequence: Synthetic oligonucleotide
  Antisense strand to SEQ ID NO: 183650
uucgcgaaggcgaacuccc

SEQ ID NO: 183652 - RNA, 19 nt, Artificial Sequence
  Description of Artificial Sequence: Synthetic oligonucleotide
  Sense strand starting at position 1474 of SEQ ID NO: 2367
auaacagguguuugcugaa

SEQ ID NO: 183653 - RNA, 19 nt, Artificial Sequence
  Description of Artificial Sequence: Synthetic oligonucleotide
  Antisense strand to SEQ ID NO: 183652
uucagcaaacaccuguuau

SEQ ID NO: 183654 - RNA, 19 nt, Artificial Sequence
  Description of Artificial Sequence: Synthetic oligonucleotide
  Sense strand starting at position 1361 of SEQ ID NO: 2367
cgucaagugcugucaguuu

SEQ ID NO: 183655 - RNA, 19 nt, Artificial Sequence
  Description of Artificial Sequence: Synthetic oligonucleotide
  Antisense strand to SEQ ID NO: 183654
aaacugacagcacuugacg

SEQ ID NO: 183656 - RNA, 19 nt, Artificial Sequence
  Description of Artificial Sequence: Synthetic oligonucleotide
  Sense strand starting at position 1360 of SEQ ID NO: 2367
acgucaagugcugucaguu

SEQ ID NO: 183657 - RNA, 19 nt, Artificial Sequence
  Description of Artificial Sequence: Synthetic oligonucleotide
  Antisense strand to SEQ ID NO: 183656
aacugacagcacuugacgu

SEQ ID NO: 183658 - RNA, 19 nt, Artificial Sequence
  Description of Artificial Sequence: Synthetic oligonucleotide
  Sense strand starting at position 1257 of SEQ ID NO: 2367
uaaacuuggcuuugaguuu

SEQ ID NO: 183659 - RNA, 19 nt, Artificial Sequence
  Description of Artificial Sequence: Synthetic oligonucleotide
  Antisense strand to SEQ ID NO: 183658
aaacucaaagccaaguuua

SEQ ID NO: 183660 - RNA, 19 nt, Artificial Sequence
  Description of Artificial Sequence: Synthetic oligonucleotide
  Sense strand starting at position 1254 of SEQ ID NO: 2367
ggguaaacuuggcuuugag

SEQ ID NO: 183661 - RNA, 19 nt, Artificial Sequence
  Description of Artificial Sequence: Synthetic oligonucleotide
  Antisense strand to SEQ ID NO: 183660
cucaaagccaaguuuaccc

SEQ ID NO: 183662 - RNA, 19 nt, Artificial Sequence
  Description of Artificial Sequence: Synthetic oligonucleotide
  Sense strand starting at position 1253 of SEQ ID NO: 2367
uggguaaacuuggcuuuga

SEQ ID NO: 183663 - RNA, 19 nt, Artificial Sequence
  Description of Artificial Sequence: Synthetic oligonucleotide
  Antisense strand to SEQ ID NO: 183662
ucaaagccaaguuuaccca

SEQ ID NO: 183664 - RNA, 19 nt, Artificial Sequence
  Description of Artificial Sequence: Synthetic oligonucleotide
  Sense strand starting at position 1244 of SEQ ID NO: 2367
cuauuaaacuggguaaacu

SEQ ID NO: 183665 - RNA, 19 nt, Artificial Sequence
  Description of Artificial Sequence: Synthetic oligonucleotide
  Antisense strand to SEQ ID NO: 183664
aguuuacccaguuuaauag

SEQ ID NO: 183666 - RNA, 19 nt, Artificial Sequence
  Description of Artificial Sequence: Synthetic oligonucleotide
  Sense strand starting at position 1018 of SEQ ID NO: 2367
guaauaugucuccaaguga

SEQ ID NO: 183667 - RNA, 19 nt, Artificial Sequence
  Description of Artificial Sequence: Synthetic oligonucleotide
  Antisense strand to SEQ ID NO: 183666
ucacuuggagacauauuac

SEQ ID NO: 183668 - RNA, 19 nt, Artificial Sequence
  Description of Artificial Sequence: Synthetic oligonucleotide
  Sense strand starting at position 1017 of SEQ ID NO: 2367
aguaauaugucuccaagug

SEQ ID NO: 183669 - RNA, 19 nt, Artificial Sequence
  Description of Artificial Sequence: Synthetic oligonucleotide
  Antisense strand to SEQ ID NO: 183668
cacuuggagacauauuacu

SEQ ID NO: 183670 - RNA, 19 nt, Artificial Sequence
  Description of Artificial Sequence: Synthetic oligonucleotide
  Sense strand starting at position 1002 of SEQ ID NO: 2367
gcaauauccggagaaagua

SEQ ID NO: 183671 - RNA, 19 nt, Artificial Sequence
  Description of Artificial Sequence: Synthetic oligonucleotide
  Antisense strand to SEQ ID NO: 183670
uacuuucuccggauauugc

SEQ ID NO: 183672 - RNA, 19 nt, Artificial Sequence
  Description of Artificial Sequence: Synthetic oligonucleotide
  Sense strand starting at position 895 of SEQ ID NO: 2367
aaaggugaguguucaggaa

SEQ ID NO: 183673 - RNA, 19 nt, Artificial Sequence
  Description of Artificial Sequence: Synthetic oligonucleotide
  Antisense strand to SEQ ID NO: 183672
uuccugaacacucaccuuu

SEQ ID NO: 183674 - RNA, 19 nt, Artificial Sequence
  Description of Artificial Sequence: Synthetic oligonucleotide
  Sense strand starting at position 863 of SEQ ID NO: 2367
guauuccagcuaugaucaa

SEQ ID NO: 183675 - RNA, 19 nt, Artificial Sequence
  Description of Artificial Sequence: Synthetic oligonucleotide
  Antisense strand to SEQ ID NO: 183674
uugaucauagcuggaauac

SEQ ID NO: 183676 - RNA, 19 nt, Artificial Sequence
  Description of Artificial Sequence: Synthetic oligonucleotide
  Sense strand starting at position 700 of SEQ ID NO: 2367
guaucuuguuuaccuaaua

SEQ ID NO: 183677 - RNA, 19 nt, Artificial Sequence
  Description of Artificial Sequence: Synthetic oligonucleotide
  Antisense strand to SEQ ID NO: 183676
uauuagguaaacaagauac

SEQ ID NO: 183678 - RNA, 19 nt, Artificial Sequence
  Description of Artificial Sequence: Synthetic oligonucleotide
  Sense strand starting at position 698 of SEQ ID NO: 2367
cuguaucuuguuuaccuaa

SEQ ID NO: 183679 - RNA, 19 nt, Artificial Sequence
  Description of Artificial Sequence: Synthetic oligonucleotide
  Antisense strand to SEQ ID NO: 183678
uuagguaaacaagauacag

SEQ ID NO: 183680 - RNA, 19 nt, Artificial Sequence
  Description of Artificial Sequence: Synthetic oligonucleotide
  Sense strand starting at position 697 of SEQ ID NO: 2367
acuguaucuuguuuaccua

SEQ ID NO: 183681 - RNA, 19 nt, Artificial Sequence
  Description of Artificial Sequence: Synthetic oligonucleotide
  Antisense strand to SEQ ID NO: 183680
uagguaaacaagauacagu

SEQ ID NO: 183682 - RNA, 19 nt, Artificial Sequence
  Description of Artificial Sequence: Synthetic oligonucleotide
  Sense strand starting at position 684 of SEQ ID NO: 2367
acaguauugcaguacugua

SEQ ID NO: 183683 - RNA, 19 nt, Artificial Sequence
  Description of Artificial Sequence: Synthetic oligonucleotide
  Antisense strand to SEQ ID NO: 183682
uacaguacugcaauacugu

SEQ ID NO: 183684 - RNA, 19 nt, Artificial Sequence
  Description of Artificial Sequence: Synthetic oligonucleotide
  Sense strand starting at position 600 of SEQ ID NO: 2367
auggcuaggcuuuaucuaa

SEQ ID NO: 183685 - RNA, 19 nt, Artificial Sequence
  Description of Artificial Sequence: Synthetic oligonucleotide
  Antisense strand to SEQ ID NO: 183684
uuagauaaagccuagccau

SEQ ID NO: 183686 - RNA, 19 nt, Artificial Sequence
  Description of Artificial Sequence: Synthetic oligonucleotide
  Sense strand starting at position 423 of SEQ ID NO: 2367
agugauaauuaucuugaca

SEQ ID NO: 183687 - RNA, 19 nt, Artificial Sequence
  Description of Artificial Sequence: Synthetic oligonucleotide
  Antisense strand to SEQ ID NO: 183686
ugucaagauaauuaucacu

SEQ ID NO: 183688 - RNA, 19 nt, Artificial Sequence
  Description of Artificial Sequence: Synthetic oligonucleotide
  Sense strand starting at position 308 of SEQ ID NO: 2367
guaccugacucauuacuuu

SEQ ID NO: 183689 - RNA, 19 nt, Artificial Sequence
  Description of Artificial Sequence: Synthetic oligonucleotide
  Antisense strand to SEQ ID NO: 183688
aaaguaaugagucagguac

SEQ ID NO: 183690 - RNA, 19 nt, Artificial Sequence
  Description of Artificial Sequence: Synthetic oligonucleotide
  Sense strand starting at position 304 of SEQ ID NO: 2367
ugaaguaccugacucauua

SEQ ID NO: 183691 - RNA, 19 nt, Artificial Sequence
  Description of Artificial Sequence: Synthetic oligonucleotide
  Antisense strand to SEQ ID NO: 183690
uaaugagucagguacuuca

SEQ ID NO: 183692 - RNA, 19 nt, Artificial Sequence
  Description of Artificial Sequence: Synthetic oligonucleotide
  Sense strand starting at position 175 of SEQ ID NO: 2367
uccagucuggucuagaacu

SEQ ID NO: 183693 - RNA, 19 nt, Artificial Sequence
  Description of Artificial Sequence: Synthetic oligonucleotide
  Antisense strand to SEQ ID NO: 183692
aguucuagaccagacugga

SEQ ID NO: 183694 - RNA, 19 nt, Artificial Sequence
  Description of Artificial Sequence: Synthetic oligonucleotide
  Sense strand starting at position 173 of SEQ ID NO: 2367
uguccagucuggucuagaa

SEQ ID NO: 183695 - RNA, 19 nt, Artificial Sequence
  Description of Artificial Sequence: Synthetic oligonucleotide
  Antisense strand to SEQ ID NO: 183694
uucuagaccagacuggaca

SEQ ID NO: 183696 - RNA, 19 nt, Artificial Sequence
  Description of Artificial Sequence: Synthetic oligonucleotide
  Sense strand starting at position 3932 of SEQ ID NO: 2368
cugugagugagcuggaaug

SEQ ID NO: 183697 - RNA, 19 nt, Artificial Sequence
  Description of Artificial Sequence: Synthetic oligonucleotide
  Antisense strand to SEQ ID NO: 183696
cauuccagcucacucacag

SEQ ID NO: 183698 - RNA, 19 nt, Artificial Sequence
  Description of Artificial Sequence: Synthetic oligonucleotide
  Sense strand starting at position 3322 of SEQ ID NO: 2368
ccuguauugaguuggcauu

SEQ ID NO: 183699 - RNA, 19 nt, Artificial Sequence
  Description of Artificial Sequence: Synthetic oligonucleotide
  Antisense strand to SEQ ID NO: 183698
aaugccaacucaauacagg

SEQ ID NO: 183700 - RNA, 19 nt, Artificial Sequence
  Description of Artificial Sequence: Synthetic oligonucleotide
  Sense strand starting at position 3290 of SEQ ID NO: 2368
cagagaaaccucuggcugu

SEQ ID NO: 183701 - RNA, 19 nt, Artificial Sequence
  Description of Artificial Sequence: Synthetic oligonucleotide
  Antisense strand to SEQ ID NO: 183700
acagccagagguuucucug

SEQ ID NO: 183702 - RNA, 19 nt, Artificial Sequence
  Description of Artificial Sequence: Synthetic oligonucleotide
  Sense strand starting at position 2745 of SEQ ID NO: 2368
gcgcuuaguccagaacaua

SEQ ID NO: 183703 - RNA, 19 nt, Artificial Sequence
  Description of Artificial Sequence: Synthetic oligonucleotide
  Antisense strand to SEQ ID NO: 183702
uauguucuggacuaagcgc

SEQ ID NO: 183704 - RNA, 19 nt, Artificial Sequence
  Description of Artificial Sequence: Synthetic oligonucleotide
  Sense strand starting at position 2743 of SEQ ID NO: 2368
gugcgcuuaguccagaaca

SEQ ID NO: 183705 - RNA, 19 nt, Artificial Sequence
  Description of Artificial Sequence: Synthetic oligonucleotide
  Antisense strand to SEQ ID NO: 183704
uguucuggacuaagcgcac

SEQ ID NO: 183706 - RNA, 19 nt, Artificial Sequence
  Description of Artificial Sequence: Synthetic oligonucleotide
  Sense strand starting at position 2691 of SEQ ID NO: 2368
aaguaauaugguugagugu

SEQ ID NO: 183707 - RNA, 19 nt, Artificial Sequence
  Description of Artificial Sequence: Synthetic oligonucleotide
  Antisense strand to SEQ ID NO: 183706
acacucaaccauauuacuu

SEQ ID NO: 183708 - RNA, 19 nt, Artificial Sequence
  Description of Artificial Sequence: Synthetic oligonucleotide
  Sense strand starting at position 2690 of SEQ ID NO: 2368
uaaguaauaugguugagug

SEQ ID NO: 183709 - RNA, 19 nt, Artificial Sequence
  Description of Artificial Sequence: Synthetic oligonucleotide
  Antisense strand to SEQ ID NO: 183708
cacucaaccauauuacuua

SEQ ID NO: 183710 - RNA, 19 nt, Artificial Sequence
  Description of Artificial Sequence: Synthetic oligonucleotide
  Sense strand starting at position 2687 of SEQ ID NO: 2368
agauaaguaauaugguuga

SEQ ID NO: 183711 - RNA, 19 nt, Artificial Sequence
  Description of Artificial Sequence: Synthetic oligonucleotide
  Antisense strand to SEQ ID NO: 183710
ucaaccauauuacuuaucu

SEQ ID NO: 183712 - RNA, 19 nt, Artificial Sequence
  Description of Artificial Sequence: Synthetic oligonucleotide
  Sense strand starting at position 2637 of SEQ ID NO: 2368
gguagcaaucaccaaucuu

SEQ ID NO: 183713 - RNA, 19 nt, Artificial Sequence
  Description of Artificial Sequence: Synthetic oligonucleotide
  Antisense strand to SEQ ID NO: 183712
aagauuggugauugcuacc

SEQ ID NO: 183714 - RNA, 19 nt, Artificial Sequence
  Description of Artificial Sequence: Synthetic oligonucleotide
  Sense strand starting at position 2578 of SEQ ID NO: 2368
guaguagcaguagagauaa

SEQ ID NO: 183715 - RNA, 19 nt, Artificial Sequence
  Description of Artificial Sequence: Synthetic oligonucleotide
  Antisense strand to SEQ ID NO: 183714
uuaucucuacugcuacuac

SEQ ID NO: 183716 - RNA, 19 nt, Artificial Sequence
  Description of Artificial Sequence: Synthetic oligonucleotide
  Sense strand starting at position 2555 of SEQ ID NO: 2368
cuagaauggugacuugaau

SEQ ID NO: 183717 - RNA, 19 nt, Artificial Sequence
  Description of Artificial Sequence: Synthetic oligonucleotide
  Antisense strand to SEQ ID NO: 183716
auucaagucaccauucuag

SEQ ID NO: 183718 - RNA, 19 nt, Artificial Sequence
  Description of Artificial Sequence: Synthetic oligonucleotide
  Sense strand starting at position 2526 of SEQ ID NO: 2368
aaaugacuguuggcaauga

SEQ ID NO: 183719 - RNA, 19 nt, Artificial Sequence
  Description of Artificial Sequence: Synthetic oligonucleotide
  Antisense strand to SEQ ID NO: 183718
ucauugccaacagucauuu

SEQ ID NO: 183720 - RNA, 19 nt, Artificial Sequence
  Description of Artificial Sequence: Synthetic oligonucleotide
  Sense strand starting at position 2348 of SEQ ID NO: 2368
uccaguguccuugggauua

SEQ ID NO: 183721 - RNA, 19 nt, Artificial Sequence
  Description of Artificial Sequence: Synthetic oligonucleotide
  Antisense strand to SEQ ID NO: 183720
uaaucccaaggacacugga

SEQ ID NO: 183722 - RNA, 19 nt, Artificial Sequence
  Description of Artificial Sequence: Synthetic oligonucleotide
  Sense strand starting at position 2346 of SEQ ID NO: 2368
ucuccaguguccuugggau

SEQ ID NO: 183723 - RNA, 19 nt, Artificial Sequence
  Description of Artificial Sequence: Synthetic oligonucleotide
  Antisense strand to SEQ ID NO: 183722
aucccaaggacacuggaga

SEQ ID NO: 183724 - RNA, 19 nt, Artificial Sequence
  Description of Artificial Sequence: Synthetic oligonucleotide
  Sense strand starting at position 2337 of SEQ ID NO: 2368
gaauaaugaucuccagugu

SEQ ID NO: 183725 - RNA, 19 nt, Artificial Sequence
  Description of Artificial Sequence: Synthetic oligonucleotide
  Antisense strand to SEQ ID NO: 183724
acacuggagaucauuauuc

SEQ ID NO: 183726 - RNA, 19 nt, Artificial Sequence
  Description of Artificial Sequence: Synthetic oligonucleotide
  Sense strand starting at position 2258 of SEQ ID NO: 2368
guuagcucugcucaagaca

SEQ ID NO: 183727 - RNA, 19 nt, Artificial Sequence
  Description of Artificial Sequence: Synthetic oligonucleotide
  Antisense strand to SEQ ID NO: 183726
ugucuugagcagagcuaac

SEQ ID NO: 183728 - RNA, 19 nt, Artificial Sequence
  Description of Artificial Sequence: Synthetic oligonucleotide
  Sense strand starting at position 2255 of SEQ ID NO: 2368
gagguuagcucugcucaag

SEQ ID NO: 183729 - RNA, 19 nt, Artificial Sequence
  Description of Artificial Sequence: Synthetic oligonucleotide
  Antisense strand to SEQ ID NO: 183728
cuugagcagagcuaaccuc

SEQ ID NO: 183730 - RNA, 19 nt, Artificial Sequence
  Description of Artificial Sequence: Synthetic oligonucleotide
  Sense strand starting at position 2254 of SEQ ID NO: 2368
agagguuagcucugcucaa

SEQ ID NO: 183731 - RNA, 19 nt, Artificial Sequence
  Description of Artificial Sequence: Synthetic oligonucleotide
  Antisense strand to SEQ ID NO: 183730
uugagcagagcuaaccucu

SEQ ID NO: 183732 - RNA, 19 nt, Artificial Sequence
  Description of Artificial Sequence: Synthetic oligonucleotide
  Sense strand starting at position 2238 of SEQ ID NO: 2368
gaccuauaguaggugcaga

SEQ ID NO: 183733 - RNA, 19 nt, Artificial Sequence
  Description of Artificial Sequence: Synthetic oligonucleotide
  Antisense strand to SEQ ID NO: 183732
ucugcaccuacuauagguc

SEQ ID NO: 183734 - RNA, 19 nt, Artificial Sequence
  Description of Artificial Sequence: Synthetic oligonucleotide
  Sense strand starting at position 2225 of SEQ ID NO: 2368
auacuauagccuggaccua

SEQ ID NO: 183735 - RNA, 19 nt, Artificial Sequence
  Description of Artificial Sequence: Synthetic oligonucleotide
  Antisense strand to SEQ ID NO: 183734
uagguccaggcuauaguau

SEQ ID NO: 183736 - RNA, 19 nt, Artificial Sequence
  Description of Artificial Sequence: Synthetic oligonucleotide
  Sense strand starting at position 2137 of SEQ ID NO: 2368
ggaauuuguucucaucuga

SEQ ID NO: 183737 - RNA, 19 nt, Artificial Sequence
  Description of Artificial Sequence: Synthetic oligonucleotide
  Antisense strand to SEQ ID NO: 183736
ucagaugagaacaaauucc

SEQ ID NO: 183738 - RNA, 19 nt, Artificial Sequence
  Description of Artificial Sequence: Synthetic oligonucleotide
  Sense strand starting at position 2118 of SEQ ID NO: 2368
guaucuuacggugacauga

SEQ ID NO: 183739 - RNA, 19 nt, Artificial Sequence
  Description of Artificial Sequence: Synthetic oligonucleotide
  Antisense strand to SEQ ID NO: 183738
ucaugucaccguaagauac

SEQ ID NO: 183740 - RNA, 19 nt, Artificial Sequence
  Description of Artificial Sequence: Synthetic oligonucleotide
  Sense strand starting at position 2117 of SEQ ID NO: 2368
uguaucuuacggugacaug

SEQ ID NO: 183741 - RNA, 19 nt, Artificial Sequence
  Description of Artificial Sequence: Synthetic oligonucleotide
  Antisense strand to SEQ ID NO: 183740
caugucaccguaagauaca

SEQ ID NO: 183742 - RNA, 19 nt, Artificial Sequence
  Description of Artificial Sequence: Synthetic oligonucleotide
  Sense strand starting at position 1829 of SEQ ID NO: 2368
gcgugcucuggagaacuca

SEQ ID NO: 183743 - RNA, 19 nt, Artificial Sequence
  Description of Artificial Sequence: Synthetic oligonucleotide
  Antisense strand to SEQ ID NO: 183742
ugaguucuccagagcacgc

SEQ ID NO: 183744 - RNA, 19 nt, Artificial Sequence
  Description of Artificial Sequence: Synthetic oligonucleotide
  Sense strand starting at position 1781 of SEQ ID NO: 2368
agaguccugaguuggaaga

SEQ ID NO: 183745 - RNA, 19 nt, Artificial Sequence
  Description of Artificial Sequence: Synthetic oligonucleotide
  Antisense strand to SEQ ID NO: 183744
ucuuccaacucaggacucu

SEQ ID NO: 183746 - RNA, 19 nt, Artificial Sequence
  Description of Artificial Sequence: Synthetic oligonucleotide
  Sense strand starting at position 1666 of SEQ ID NO: 2368
gaauuaaggcccugggaug

SEQ ID NO: 183747 - RNA, 19 nt, Artificial Sequence
  Description of Artificial Sequence: Synthetic oligonucleotide
  Antisense strand to SEQ ID NO: 183746
caucccagggccuuaauuc

SEQ ID NO: 183748 - RNA, 19 nt, Artificial Sequence
  Description of Artificial Sequence: Synthetic oligonucleotide
  Sense strand starting at position 1653 of SEQ ID NO: 2368
ugaggcaucccuugaauua

SEQ ID NO: 183749 - RNA, 19 nt, Artificial Sequence
  Description of Artificial Sequence: Synthetic oligonucleotide
  Antisense strand to SEQ ID NO: 183748
uaauucaagggaugccuca

SEQ ID NO: 183750 - RNA, 19 nt, Artificial Sequence
  Description of Artificial Sequence: Synthetic oligonucleotide
  Sense strand starting at position 1642 of SEQ ID NO: 2368
guuggaaauccugaggcau

SEQ ID NO: 183751 - RNA, 19 nt, Artificial Sequence
  Description of Artificial Sequence: Synthetic oligonucleotide
  Antisense strand to SEQ ID NO: 183750
augccucaggauuuccaac

SEQ ID NO: 183752 - RNA, 19 nt, Artificial Sequence
  Description of Artificial Sequence: Synthetic oligonucleotide
  Sense strand starting at position 1611 of SEQ ID NO: 2368
cagaguugauggucccaga

SEQ ID NO: 183753 - RNA, 19 nt, Artificial Sequence
  Description of Artificial Sequence: Synthetic oligonucleotide
  Antisense strand to SEQ ID NO: 183752
ucugggaccaucaacucug

SEQ ID NO: 183754 - RNA, 19 nt, Artificial Sequence
  Description of Artificial Sequence: Synthetic oligonucleotide
  Sense strand starting at position 1530 of SEQ ID NO: 2368
acuagugagccucagaaac

SEQ ID NO: 183755 - RNA, 19 nt, Artificial Sequence
  Description of Artificial Sequence: Synthetic oligonucleotide
  Antisense strand to SEQ ID NO: 183754
guuucugaggcucacuagu

SEQ ID NO: 183756 - RNA, 19 nt, Artificial Sequence
  Description of Artificial Sequence: Synthetic oligonucleotide
  Sense strand starting at position 1105 of SEQ ID NO: 2368
ugacucuuaccugguaagu

SEQ ID NO: 183757 - RNA, 19 nt, Artificial Sequence
  Description of Artificial Sequence: Synthetic oligonucleotide
  Antisense strand to SEQ ID NO: 183756
acuuaccagguaagaguca

SEQ ID NO: 183758 - RNA, 19 nt, Artificial Sequence
  Description of Artificial Sequence: Synthetic oligonucleotide
  Sense strand starting at position 1103 of SEQ ID NO: 2368
ccugacucuuaccugguaa

SEQ ID NO: 183759 - RNA, 19 nt, Artificial Sequence
  Description of Artificial Sequence: Synthetic oligonucleotide
  Antisense strand to SEQ ID NO: 183758
uuaccagguaagagucagg

SEQ ID NO: 183760 - RNA, 19 nt, Artificial Sequence
  Description of Artificial Sequence: Synthetic oligonucleotide
  Sense strand starting at position 1102 of SEQ ID NO: 2368
cccugacucuuaccuggua

SEQ ID NO: 183761 - RNA, 19 nt, Artificial Sequence
  Description of Artificial Sequence: Synthetic oligonucleotide
  Antisense strand to SEQ ID NO: 183760
uaccagguaagagucaggg

SEQ ID NO: 183762 - RNA, 19 nt, Artificial Sequence
  Description of Artificial Sequence: Synthetic oligonucleotide
  Sense strand starting at position 743 of SEQ ID NO: 2368
cuuggauuauauucuagga

SEQ ID NO: 183763 - RNA, 19 nt, Artificial Sequence
  Description of Artificial Sequence: Synthetic oligonucleotide
  Antisense strand to SEQ ID NO: 183762
uccuagaauauaauccaag

SEQ ID NO: 183764 - RNA, 19 nt, Artificial Sequence
  Description of Artificial Sequence: Synthetic oligonucleotide
  Sense strand starting at position 734 of SEQ ID NO: 2368
caaggcguccuuggauuau

SEQ ID NO: 183765 - RNA, 19 nt, Artificial Sequence
  Description of Artificial Sequence: Synthetic oligonucleotide
  Antisense strand to SEQ ID NO: 183764
auaauccaaggacgccuug

SEQ ID NO: 183766 - RNA, 19 nt, Artificial Sequence
  Description of Artificial Sequence: Synthetic oligonucleotide
  Sense strand starting at position 686 of SEQ ID NO: 2368
aggauaagugcuuauugua

SEQ ID NO: 183767 - RNA, 19 nt, Artificial Sequence
  Description of Artificial Sequence: Synthetic oligonucleotide
  Antisense strand to SEQ ID NO: 183766
uacaauaagcacuuauccu

SEQ ID NO: 183768 - RNA, 19 nt, Artificial Sequence
  Description of Artificial Sequence: Synthetic oligonucleotide
  Sense strand starting at position 685 of SEQ ID NO: 2368
uaggauaagugcuuauugu

SEQ ID NO: 183769 - RNA, 19 nt, Artificial Sequence
  Description of Artificial Sequence: Synthetic oligonucleotide
  Antisense strand to SEQ ID NO: 183768
acaauaagcacuuauccua

SEQ ID NO: 183770 - RNA, 19 nt, Artificial Sequence
  Description of Artificial Sequence: Synthetic oligonucleotide
  Sense strand starting at position 681 of SEQ ID NO: 2368
caguuaggauaagugcuua

SEQ ID NO: 183771 - RNA, 19 nt, Artificial Sequence
  Description of Artificial Sequence: Synthetic oligonucleotide
  Antisense strand to SEQ ID NO: 183770
uaagcacuuauccuaacug

SEQ ID NO: 183772 - RNA, 19 nt, Artificial Sequence
  Description of Artificial Sequence: Synthetic oligonucleotide
  Sense strand starting at position 673 of SEQ ID NO: 2368
ccucgauccaguuaggaua

SEQ ID NO: 183773 - RNA, 19 nt, Artificial Sequence
  Description of Artificial Sequence: Synthetic oligonucleotide
  Antisense strand to SEQ ID NO: 183772
uauccuaacuggaucgagg

SEQ ID NO: 183774 - RNA, 19 nt, Artificial Sequence
  Description of Artificial Sequence: Synthetic oligonucleotide
  Sense strand starting at position 600 of SEQ ID NO: 2368
cagcucauuccaggaggaa

SEQ ID NO: 183775 - RNA, 19 nt, Artificial Sequence
  Description of Artificial Sequence: Synthetic oligonucleotide
  Antisense strand to SEQ ID NO: 183774
uuccuccuggaaugagcug

SEQ ID NO: 183776 - RNA, 19 nt, Artificial Sequence
  Description of Artificial Sequence: Synthetic oligonucleotide
  Sense strand starting at position 10 of SEQ ID NO: 2369
aguaacauauggcugcaaa

SEQ ID NO: 183777 - RNA, 19 nt, Artificial Sequence
  Description of Artificial Sequence: Synthetic oligonucleotide
  Antisense strand to SEQ ID NO: 183776
uuugcagccauauguuacu

SEQ ID NO: 183778 - RNA, 19 nt, Artificial Sequence
  Description of Artificial Sequence: Synthetic oligonucleotide
  Sense strand starting at position 83 of SEQ ID NO: 2369
acuguuuacuauguacaua

SEQ ID NO: 183779 - RNA, 19 nt, Artificial Sequence
  Description of Artificial Sequence: Synthetic oligonucleotide
  Antisense strand to SEQ ID NO: 183778
uauguacauaguaaacagu

SEQ ID NO: 183780 - RNA, 19 nt, Artificial Sequence
  Description of Artificial Sequence: Synthetic oligonucleotide
  Sense strand starting at position 95 of SEQ ID NO: 2369
guacauaagcacuaagcua

SEQ ID NO: 183781 - RNA, 19 nt, Artificial Sequence
  Description of Artificial Sequence: Synthetic oligonucleotide
  Antisense strand to SEQ ID NO: 183780
uagcuuagugcuuauguac

SEQ ID NO: 183782 - RNA, 19 nt, Artificial Sequence
  Description of Artificial Sequence: Synthetic oligonucleotide
  Sense strand starting at position 467 of SEQ ID NO: 2369
caguaucucugguucuaga

SEQ ID NO: 183783 - RNA, 19 nt, Artificial Sequence
  Description of Artificial Sequence: Synthetic oligonucleotide
  Antisense strand to SEQ ID NO: 183782
ucuagaaccagagauacug

SEQ ID NO: 183784 - RNA, 19 nt, Artificial Sequence
  Description of Artificial Sequence: Synthetic oligonucleotide
  Sense strand starting at position 480 of SEQ ID NO: 2369
ucuagaacuuagguuccau

SEQ ID NO: 183785 - RNA, 19 nt, Artificial Sequence
  Description of Artificial Sequence: Synthetic oligonucleotide
  Antisense strand to SEQ ID NO: 183784
auggaaccuaaguucuaga

SEQ ID NO: 183786 - RNA, 19 nt, Artificial Sequence
  Description of Artificial Sequence: Synthetic oligonucleotide
  Sense strand starting at position 571 of SEQ ID NO: 2369
cuggccuacagugauugaa

SEQ ID NO: 183787 - RNA, 19 nt, Artificial Sequence
  Description of Artificial Sequence: Synthetic oligonucleotide
  Antisense strand to SEQ ID NO: 183786
uucaaucacuguaggccag

SEQ ID NO: 183788 - RNA, 19 nt, Artificial Sequence
  Description of Artificial Sequence: Synthetic oligonucleotide
  Sense strand starting at position 903 of SEQ ID NO: 2369
ucucgaacuccugagagca

SEQ ID NO: 183789 - RNA, 19 nt, Artificial Sequence
  Description of Artificial Sequence: Synthetic oligonucleotide
  Antisense strand to SEQ ID NO: 183788
ugcucucaggaguucgaga

SEQ ID NO: 183790 - RNA, 19 nt, Artificial Sequence
  Description of Artificial Sequence: Synthetic oligonucleotide
  Sense strand starting at position 2000 of SEQ ID NO: 2369
auggauaagccucggaaag

SEQ ID NO: 183791 - RNA, 19 nt, Artificial Sequence
  Description of Artificial Sequence: Synthetic oligonucleotide
  Antisense strand to SEQ ID NO: 183790
cuuuccgaggcuuauccau

SEQ ID NO: 183792 - RNA, 19 nt, Artificial Sequence
  Description of Artificial Sequence: Synthetic oligonucleotide
  Sense strand starting at position 2001 of SEQ ID NO: 2369
uggauaagccucggaaaga

SEQ ID NO: 183793 - RNA, 19 nt, Artificial Sequence
  Description of Artificial Sequence: Synthetic oligonucleotide
  Antisense strand to SEQ ID NO: 183792
ucuuuccgaggcuuaucca

SEQ ID NO: 183794 - RNA, 19 nt, Artificial Sequence
  Description of Artificial Sequence: Synthetic oligonucleotide
  Sense strand starting at position 2087 of SEQ ID NO: 2369
ggagaucccagucgauaag

SEQ ID NO: 183795 - RNA, 19 nt, Artificial Sequence
  Description of Artificial Sequence: Synthetic oligonucleotide
  Antisense strand to SEQ ID NO: 183794
cuuaucgacugggaucucc

SEQ ID NO: 183796 - RNA, 19 nt, Artificial Sequence
  Description of Artificial Sequence: Synthetic oligonucleotide
  Sense strand starting at position 2160 of SEQ ID NO: 2369
gaggaaaugcccugcgaag

SEQ ID NO: 183797 - RNA, 19 nt, Artificial Sequence
  Description of Artificial Sequence: Synthetic oligonucleotide
  Antisense strand to SEQ ID NO: 183796
cuucgcagggcauuuccuc

SEQ ID NO: 183798 - RNA, 19 nt, Artificial Sequence
  Description of Artificial Sequence: Synthetic oligonucleotide
  Sense strand starting at position 2290 of SEQ ID NO: 2369
gggucaggguacuuauuca

SEQ ID NO: 183799 - RNA, 19 nt, Artificial Sequence
  Description of Artificial Sequence: Synthetic oligonucleotide
  Antisense strand to SEQ ID NO: 183798
ugaauaaguacccugaccc

SEQ ID NO: 183800 - RNA, 19 nt, Artificial Sequence
  Description of Artificial Sequence: Synthetic oligonucleotide
  Sense strand starting at position 2316 of SEQ ID NO: 2369
guuggacauccggaagcau

SEQ ID NO: 183801 - RNA, 19 nt, Artificial Sequence
  Description of Artificial Sequence: Synthetic oligonucleotide
  Antisense strand to SEQ ID NO: 183800
augcuuccggauguccaac

SEQ ID NO: 183802 - RNA, 19 nt, Artificial Sequence
  Description of Artificial Sequence: Synthetic oligonucleotide
  Sense strand starting at position 2342 of SEQ ID NO: 2369
gcauuagggaucggugaca

SEQ ID NO: 183803 - RNA, 19 nt, Artificial Sequence
  Description of Artificial Sequence: Synthetic oligonucleotide
  Antisense strand to SEQ ID NO: 183802
ugucaccgaucccuaaugc

SEQ ID NO: 183804 - RNA, 19 nt, Artificial Sequence
  Description of Artificial Sequence: Synthetic oligonucleotide
  Sense strand starting at position 2423 of SEQ ID NO: 2369
uugcuaagucuggacacaa

SEQ ID NO: 183805 - RNA, 19 nt, Artificial Sequence
  Description of Artificial Sequence: Synthetic oligonucleotide
  Antisense strand to SEQ ID NO: 183804
uuguguccagacuuagcaa

SEQ ID NO: 183806 - RNA, 19 nt, Artificial Sequence
  Description of Artificial Sequence: Synthetic oligonucleotide
  Sense strand starting at position 2478 of SEQ ID NO: 2369
ccuagaccuugccuuagaa

SEQ ID NO: 183807 - RNA, 19 nt, Artificial Sequence
  Description of Artificial Sequence: Synthetic oligonucleotide
  Antisense strand to SEQ ID NO: 183806
uucuaaggcaaggucuagg

SEQ ID NO: 183808 - RNA, 19 nt, Artificial Sequence
  Description of Artificial Sequence: Synthetic oligonucleotide
  Sense strand starting at position 2743 of SEQ ID NO: 2369
gagagaguuuggcccacaa

SEQ ID NO: 183809 - RNA, 19 nt, Artificial Sequence
  Description of Artificial Sequence: Synthetic oligonucleotide
  Antisense strand to SEQ ID NO: 183808
uugugggccaaacucucuc

SEQ ID NO: 183810 - RNA, 19 nt, Artificial Sequence
  Description of Artificial Sequence: Synthetic oligonucleotide
  Sense strand starting at position 2747 of SEQ ID NO: 2369
gaguuuggcccacaaagca

SEQ ID NO: 183811 - RNA, 19 nt, Artificial Sequence
  Description of Artificial Sequence: Synthetic oligonucleotide
  Antisense strand to SEQ ID NO: 183810
ugcuuugugggccaaacuc

SEQ ID NO: 183812 - RNA, 19 nt, Artificial Sequence
  Description of Artificial Sequence: Synthetic oligonucleotide
  Sense strand starting at position 2759 of SEQ ID NO: 2369
caaagcaggguaugagaua

SEQ ID NO: 183813 - RNA, 19 nt, Artificial Sequence
  Description of Artificial Sequence: Synthetic oligonucleotide
  Antisense strand to SEQ ID NO: 183812
uaucucauacccugcuuug

SEQ ID NO: 183814 - RNA, 19 nt, Artificial Sequence
  Description of Artificial Sequence: Synthetic oligonucleotide
  Sense strand starting at position 2823 of SEQ ID NO: 2369
agcaguguucucuaacuug

SEQ ID NO: 183815 - RNA, 19 nt, Artificial Sequence
  Description of Artificial Sequence: Synthetic oligonucleotide
  Antisense strand to SEQ ID NO: 183814
caaguuagagaacacugcu

SEQ ID NO: 183816 - RNA, 19 nt, Artificial Sequence
  Description of Artificial Sequence: Synthetic oligonucleotide
  Sense strand starting at position 2826 of SEQ ID NO: 2369
aguguucucuaacuugaaa

SEQ ID NO: 183817 - RNA, 19 nt, Artificial Sequence
  Description of Artificial Sequence: Synthetic oligonucleotide
  Antisense strand to SEQ ID NO: 183816
uuucaaguuagagaacacu

SEQ ID NO: 183818 - RNA, 19 nt, Artificial Sequence
  Description of Artificial Sequence: Synthetic oligonucleotide
  Sense strand starting at position 3101 of SEQ ID NO: 2369
cuccaucuugaugagaguu

SEQ ID NO: 183819 - RNA, 19 nt, Artificial Sequence
  Description of Artificial Sequence: Synthetic oligonucleotide
  Antisense strand to SEQ ID NO: 183818
aacucucaucaagauggag

SEQ ID NO: 183820 - RNA, 19 nt, Artificial Sequence
  Description of Artificial Sequence: Synthetic oligonucleotide
  Sense strand starting at position 3119 of SEQ ID NO: 2369
ugguguuuguggguuauuu

SEQ ID NO: 183821 - RNA, 19 nt, Artificial Sequence
  Description of Artificial Sequence: Synthetic oligonucleotide
  Antisense strand to SEQ ID NO: 183820
aaauaacccacaaacacca

SEQ ID NO: 183822 - RNA, 19 nt, Artificial Sequence
  Description of Artificial Sequence: Synthetic oligonucleotide
  Sense strand starting at position 3121 of SEQ ID NO: 2369
guguuuguggguuauuugu

SEQ ID NO: 183823 - RNA, 19 nt, Artificial Sequence
  Description of Artificial Sequence: Synthetic oligonucleotide
  Antisense strand to SEQ ID NO: 183822
acaaauaacccacaaacac

SEQ ID NO: 183824 - RNA, 19 nt, Artificial Sequence
  Description of Artificial Sequence: Synthetic oligonucleotide
  Sense strand starting at position 3123 of SEQ ID NO: 2369
guuuguggguuauuuguga

SEQ ID NO: 183825 - RNA, 19 nt, Artificial Sequence
  Description of Artificial Sequence: Synthetic oligonucleotide
  Antisense strand to SEQ ID NO: 183824
ucacaaauaacccacaaac

SEQ ID NO: 183826 - RNA, 19 nt, Artificial Sequence
  Description of Artificial Sequence: Synthetic oligonucleotide
  Sense strand starting at position 3130 of SEQ ID NO: 2369
gguuauuugugaagccgga

SEQ ID NO: 183827 - RNA, 19 nt, Artificial Sequence
  Description of Artificial Sequence: Synthetic oligonucleotide
  Antisense strand to SEQ ID NO: 183826
uccggcuucacaaauaacc

SEQ ID NO: 183828 - RNA, 19 nt, Artificial Sequence
  Description of Artificial Sequence: Synthetic oligonucleotide
  Sense strand starting at position 3153 of SEQ ID NO: 2369
agccguguccuggagaaug

SEQ ID NO: 183829 - RNA, 19 nt, Artificial Sequence
  Description of Artificial Sequence: Synthetic oligonucleotide
  Antisense strand to SEQ ID NO: 183828
cauucuccaggacacggcu

SEQ ID NO: 183830 - RNA, 19 nt, Artificial Sequence
  Description of Artificial Sequence: Synthetic oligonucleotide
  Sense strand starting at position 3155 of SEQ ID NO: 2369
ccguguccuggagaaugua

SEQ ID NO: 183831 - RNA, 19 nt, Artificial Sequence
  Description of Artificial Sequence: Synthetic oligonucleotide
  Antisense strand to SEQ ID NO: 183830
uacauucuccaggacacgg

SEQ ID NO: 183832 - RNA, 19 nt, Artificial Sequence
  Description of Artificial Sequence: Synthetic oligonucleotide
  Sense strand starting at position 3367 of SEQ ID NO: 2369
uuugaaagguuaccugcua

SEQ ID NO: 183833 - RNA, 19 nt, Artificial Sequence
  Description of Artificial Sequence: Synthetic oligonucleotide
  Antisense strand to SEQ ID NO: 183832
uagcagguaaccuuucaaa

SEQ ID NO: 183834 - RNA, 19 nt, Artificial Sequence
  Description of Artificial Sequence: Synthetic oligonucleotide
  Sense strand starting at position 3374 of SEQ ID NO: 2369
gguuaccugcuagagauua

SEQ ID NO: 183835 - RNA, 19 nt, Artificial Sequence
  Description of Artificial Sequence: Synthetic oligonucleotide
  Antisense strand to SEQ ID NO: 183834
uaaucucuagcagguaacc

SEQ ID NO: 183836 - RNA, 19 nt, Artificial Sequence
  Description of Artificial Sequence: Synthetic oligonucleotide
  Sense strand starting at position 3429 of SEQ ID NO: 2369
cuuguuauucgcgucagca

SEQ ID NO: 183837 - RNA, 19 nt, Artificial Sequence
  Description of Artificial Sequence: Synthetic oligonucleotide
  Antisense strand to SEQ ID NO: 183836
ugcugacgcgaauaacaag

SEQ ID NO: 183838 - RNA, 19 nt, Artificial Sequence
  Description of Artificial Sequence: Synthetic oligonucleotide
  Sense strand starting at position 3430 of SEQ ID NO: 2369
uuguuauucgcgucagcag

SEQ ID NO: 183839 - RNA, 19 nt, Artificial Sequence
  Description of Artificial Sequence: Synthetic oligonucleotide
  Antisense strand to SEQ ID NO: 183838
cugcugacgcgaauaacaa

SEQ ID NO: 183840 - RNA, 19 nt, Artificial Sequence
  Description of Artificial Sequence: Synthetic oligonucleotide
  Sense strand starting at position 3641 of SEQ ID NO: 2369
cucugagaccuuuggcaaa

SEQ ID NO: 183841 - RNA, 19 nt, Artificial Sequence
  Description of Artificial Sequence: Synthetic oligonucleotide
  Antisense strand to SEQ ID NO: 183840
uuugccaaaggucucagag

SEQ ID NO: 183842 - RNA, 19 nt, Artificial Sequence
  Description of Artificial Sequence: Synthetic oligonucleotide
  Sense strand starting at position 3643 of SEQ ID NO: 2369
cugagaccuuuggcaaaca

SEQ ID NO: 183843 - RNA, 19 nt, Artificial Sequence
  Description of Artificial Sequence: Synthetic oligonucleotide
  Antisense strand to SEQ ID NO: 183842
uguuugccaaaggucucag

SEQ ID NO: 183844 - RNA, 19 nt, Artificial Sequence
  Description of Artificial Sequence: Synthetic oligonucleotide
  Sense strand starting at position 3669 of SEQ ID NO: 2369
uuaauugagccuuaguuuc

SEQ ID NO: 183845 - RNA, 19 nt, Artificial Sequence
  Description of Artificial Sequence: Synthetic oligonucleotide
  Antisense strand to SEQ ID NO: 183844
gaaacuaaggcucaauuaa

SEQ ID NO: 183846 - RNA, 19 nt, Artificial Sequence
  Description of Artificial Sequence: Synthetic oligonucleotide
  Sense strand starting at position 3722 of SEQ ID NO: 2369
uccagaauuguguggauua

SEQ ID NO: 183847 - RNA, 19 nt, Artificial Sequence
  Description of Artificial Sequence: Synthetic oligonucleotide
  Antisense strand to SEQ ID NO: 183846
uaauccacacaauucugga

SEQ ID NO: 183848 - RNA, 19 nt, Artificial Sequence
  Description of Artificial Sequence: Synthetic oligonucleotide
  Sense strand starting at position 3771 of SEQ ID NO: 2369
acaggauacuuaguccagu

SEQ ID NO: 183849 - RNA, 19 nt, Artificial Sequence
  Description of Artificial Sequence: Synthetic oligonucleotide
  Antisense strand to SEQ ID NO: 183848
acuggacuaaguauccugu

SEQ ID NO: 183850 - RNA, 19 nt, Artificial Sequence
  Description of Artificial Sequence: Synthetic oligonucleotide
  Sense strand starting at position 3772 of SEQ ID NO: 2369
caggauacuuaguccaguu

SEQ ID NO: 183851 - RNA, 19 nt, Artificial Sequence
  Description of Artificial Sequence: Synthetic oligonucleotide
  Antisense strand to SEQ ID NO: 183850
aacuggacuaaguauccug

SEQ ID NO: 183852 - RNA, 19 nt, Artificial Sequence
  Description of Artificial Sequence: Synthetic oligonucleotide
  Sense strand starting at position 3795 of SEQ ID NO: 2369
gcacauaaugaacgcauua

SEQ ID NO: 183853 - RNA, 19 nt, Artificial Sequence
  Description of Artificial Sequence: Synthetic oligonucleotide
  Antisense strand to SEQ ID NO: 183852
uaaugcguucauuaugugc

SEQ ID NO: 183854 - RNA, 19 nt, Artificial Sequence
  Description of Artificial Sequence: Synthetic oligonucleotide
  Sense strand starting at position 3874 of SEQ ID NO: 2369
gccacuagucuccaugaca

SEQ ID NO: 183855 - RNA, 19 nt, Artificial Sequence
  Description of Artificial Sequence: Synthetic oligonucleotide
  Antisense strand to SEQ ID NO: 183854
ugucauggagacuaguggc

SEQ ID NO: 183856 - RNA, 19 nt, Artificial Sequence
  Description of Artificial Sequence: Synthetic oligonucleotide
  Sense strand starting at position 958 of SEQ ID NO: 2370
auggauaagccucggaaag

SEQ ID NO: 183857 - RNA, 19 nt, Artificial Sequence
  Description of Artificial Sequence: Synthetic oligonucleotide
  Antisense strand to SEQ ID NO: 183856
cuuuccgaggcuuauccau

SEQ ID NO: 183858 - RNA, 19 nt, Artificial Sequence
  Description of Artificial Sequence: Synthetic oligonucleotide
  Sense strand starting at position 959 of SEQ ID NO: 2370
uggauaagccucggaaaga

SEQ ID NO: 183859 - RNA, 19 nt, Artificial Sequence
  Description of Artificial Sequence: Synthetic oligonucleotide
  Antisense strand to SEQ ID NO: 183858
ucuuuccgaggcuuaucca

SEQ ID NO: 183860 - RNA, 19 nt, Artificial Sequence
  Description of Artificial Sequence: Synthetic oligonucleotide
  Sense strand starting at position 1045 of SEQ ID NO: 2370
ggagaucccagucgauaag

SEQ ID NO: 183861 - RNA, 19 nt, Artificial Sequence
  Description of Artificial Sequence: Synthetic oligonucleotide
  Antisense strand to SEQ ID NO: 183860
cuuaucgacugggaucucc

SEQ ID NO: 183862 - RNA, 19 nt, Artificial Sequence
  Description of Artificial Sequence: Synthetic oligonucleotide
  Sense strand starting at position 1118 of SEQ ID NO: 2370
gaggaaaugcccugcgaag

SEQ ID NO: 183863 - RNA, 19 nt, Artificial Sequence
  Description of Artificial Sequence: Synthetic oligonucleotide
  Antisense strand to SEQ ID NO: 183862
cuucgcagggcauuuccuc

SEQ ID NO: 183864 - RNA, 19 nt, Artificial Sequence
  Description of Artificial Sequence: Synthetic oligonucleotide
  Sense strand starting at position 1248 of SEQ ID NO: 2370
gggucaggguacuuauuca

SEQ ID NO: 183865 - RNA, 19 nt, Artificial Sequence
  Description of Artificial Sequence: Synthetic oligonucleotide
  Antisense strand to SEQ ID NO: 183864
ugaauaaguacccugaccc

SEQ ID NO: 183866 - RNA, 19 nt, Artificial Sequence
  Description of Artificial Sequence: Synthetic oligonucleotide
  Sense strand starting at position 1274 of SEQ ID NO: 2370
guuggacauccggaagcau

SEQ ID NO: 183867 - RNA, 19 nt, Artificial Sequence
  Description of Artificial Sequence: Synthetic oligonucleotide
  Antisense strand to SEQ ID NO: 183866
augcuuccggauguccaac

SEQ ID NO: 183868 - RNA, 19 nt, Artificial Sequence
  Description of Artificial Sequence: Synthetic oligonucleotide
  Sense strand starting at position 1300 of SEQ ID NO: 2370
gcauuagggaucggugaca

SEQ ID NO: 183869 - RNA, 19 nt, Artificial Sequence
  Description of Artificial Sequence: Synthetic oligonucleotide
  Antisense strand to SEQ ID NO: 183868
ugucaccgaucccuaaugc

SEQ ID NO: 183870 - RNA, 19 nt, Artificial Sequence
  Description of Artificial Sequence: Synthetic oligonucleotide
  Sense strand starting at position 1381 of SEQ ID NO: 2370
uugcuaagucuggacacaa

SEQ ID NO: 183871 - RNA, 19 nt, Artificial Sequence
  Description of Artificial Sequence: Synthetic oligonucleotide
  Antisense strand to SEQ ID NO: 183870
uuguguccagacuuagcaa

SEQ ID NO: 183872 - RNA, 19 nt, Artificial Sequence
  Description of Artificial Sequence: Synthetic oligonucleotide
  Sense strand starting at position 1436 of SEQ ID NO: 2370
ccuagaccuugccuuagaa

SEQ ID NO: 183873 - RNA, 19 nt, Artificial Sequence
  Description of Artificial Sequence: Synthetic oligonucleotide
  Antisense strand to SEQ ID NO: 183872
uucuaaggcaaggucuagg

SEQ ID NO: 183874 - RNA, 19 nt, Artificial Sequence
  Description of Artificial Sequence: Synthetic oligonucleotide
  Sense strand starting at position 1701 of SEQ ID NO: 2370
gagagaguuuggcccacaa

SEQ ID NO: 183875 - RNA, 19 nt, Artificial Sequence
  Description of Artificial Sequence: Synthetic oligonucleotide
  Antisense strand to SEQ ID NO: 183874
uugugggccaaacucucuc

SEQ ID NO: 183876 - RNA, 19 nt, Artificial Sequence
  Description of Artificial Sequence: Synthetic oligonucleotide
  Sense strand starting at position 1705 of SEQ ID NO: 2370
gaguuuggcccacaaagca

SEQ ID NO: 183877 - RNA, 19 nt, Artificial Sequence
  Description of Artificial Sequence: Synthetic oligonucleotide
  Antisense strand to SEQ ID NO: 183876
ugcuuugugggccaaacuc

SEQ ID NO: 183878 - RNA, 19 nt, Artificial Sequence
  Description of Artificial Sequence: Synthetic oligonucleotide
  Sense strand starting at position 1717 of SEQ ID NO: 2370
caaagcaggguaugagaua

SEQ ID NO: 183879 - RNA, 19 nt, Artificial Sequence
  Description of Artificial Sequence: Synthetic oligonucleotide
  Antisense strand to SEQ ID NO: 183878
uaucucauacccugcuuug

SEQ ID NO: 183880 - RNA, 19 nt, Artificial Sequence
  Description of Artificial Sequence: Synthetic oligonucleotide
  Sense strand starting at position 1781 of SEQ ID NO: 2370
agcaguguucucuaacuug

SEQ ID NO: 183881 - RNA, 19 nt, Artificial Sequence
  Description of Artificial Sequence: Synthetic oligonucleotide
  Antisense strand to SEQ ID NO: 183880
caaguuagagaacacugcu

SEQ ID NO: 183882 - RNA, 19 nt, Artificial Sequence
  Description of Artificial Sequence: Synthetic oligonucleotide
  Sense strand starting at position 1784 of SEQ ID NO: 2370
aguguucucuaacuugaaa

SEQ ID NO: 183883 - RNA, 19 nt, Artificial Sequence
  Description of Artificial Sequence: Synthetic oligonucleotide
  Antisense strand to SEQ ID NO: 183882
uuucaaguuagagaacacu

SEQ ID NO: 183884 - RNA, 19 nt, Artificial Sequence
  Description of Artificial Sequence: Synthetic oligonucleotide
  Sense strand starting at position 2059 of SEQ ID NO: 2370
cuccaucuugaugagaguu

SEQ ID NO: 183885 - RNA, 19 nt, Artificial Sequence
  Description of Artificial Sequence: Synthetic oligonucleotide
  Antisense strand to SEQ ID NO: 183884
aacucucaucaagauggag

SEQ ID NO: 183886 - RNA, 19 nt, Artificial Sequence
  Description of Artificial Sequence: Synthetic oligonucleotide
  Sense strand starting at position 2077 of SEQ ID NO: 2370
ugguguuuguggguuauuu

SEQ ID NO: 183887 - RNA, 19 nt, Artificial Sequence
  Description of Artificial Sequence: Synthetic oligonucleotide
  Antisense strand to SEQ ID NO: 183886
aaauaacccacaaacacca

SEQ ID NO: 183888 - RNA, 19 nt, Artificial Sequence
  Description of Artificial Sequence: Synthetic oligonucleotide
  Sense strand starting at position 2079 of SEQ ID NO: 2370
guguuuguggguuauuugu

SEQ ID NO: 183889 - RNA, 19 nt, Artificial Sequence
  Description of Artificial Sequence: Synthetic oligonucleotide
  Antisense strand to SEQ ID NO: 183888
acaaauaacccacaaacac

SEQ ID NO: 183890 - RNA, 19 nt, Artificial Sequence
  Description of Artificial Sequence: Synthetic oligonucleotide
  Sense strand starting at position 2081 of SEQ ID NO: 2370
guuuguggguuauuuguga

SEQ ID NO: 183891 - RNA, 19 nt, Artificial Sequence
  Description of Artificial Sequence: Synthetic oligonucleotide
  Antisense strand to SEQ ID NO: 183890
ucacaaauaacccacaaac

SEQ ID NO: 183892 - RNA, 19 nt, Artificial Sequence
  Description of Artificial Sequence: Synthetic oligonucleotide
  Sense strand starting at position 2088 of SEQ ID NO: 2370
gguuauuugugaagccgga

SEQ ID NO: 183893 - RNA, 19 nt, Artificial Sequence
  Description of Artificial Sequence: Synthetic oligonucleotide
  Antisense strand to SEQ ID NO: 183892
uccggcuucacaaauaacc

SEQ ID NO: 183894 - RNA, 19 nt, Artificial Sequence
  Description of Artificial Sequence: Synthetic oligonucleotide
  Sense strand starting at position 2111 of SEQ ID NO: 2370
agccguguccuggagaaug

SEQ ID NO: 183895 - RNA, 19 nt, Artificial Sequence
  Description of Artificial Sequence: Synthetic oligonucleotide
  Antisense strand to SEQ ID NO: 183894
cauucuccaggacacggcu

SEQ ID NO: 183896 - RNA, 19 nt, Artificial Sequence
  Description of Artificial Sequence: Synthetic oligonucleotide
  Sense strand starting at position 2113 of SEQ ID NO: 2370
ccguguccuggagaaugua

SEQ ID NO: 183897 - RNA, 19 nt, Artificial Sequence
  Description of Artificial Sequence: Synthetic oligonucleotide
  Antisense strand to SEQ ID NO: 183896
uacauucuccaggacacgg

SEQ ID NO: 183898 - RNA, 19 nt, Artificial Sequence
  Description of Artificial Sequence: Synthetic oligonucleotide
  Sense strand starting at position 2325 of SEQ ID NO: 2370
uuugaaagguuaccugcua

SEQ ID NO: 183899 - RNA, 19 nt, Artificial Sequence
  Description of Artificial Sequence: Synthetic oligonucleotide
  Antisense strand to SEQ ID NO: 183898
uagcagguaaccuuucaaa

SEQ ID NO: 183900 - RNA, 19 nt, Artificial Sequence
  Description of Artificial Sequence: Synthetic oligonucleotide
  Sense strand starting at position 2332 of SEQ ID NO: 2370
gguuaccugcuagagauua

SEQ ID NO: 183901 - RNA, 19 nt, Artificial Sequence
  Description of Artificial Sequence: Synthetic oligonucleotide
  Antisense strand to SEQ ID NO: 183900
uaaucucuagcagguaacc

SEQ ID NO: 183902 - RNA, 19 nt, Artificial Sequence
  Description of Artificial Sequence: Synthetic oligonucleotide
  Sense strand starting at position 2375 of SEQ ID NO: 2370
uuggauauguuccuuguua

SEQ ID NO: 183903 - RNA, 19 nt, Artificial Sequence
  Description of Artificial Sequence: Synthetic oligonucleotide
  Antisense strand to SEQ ID NO: 183902
uaacaaggaacauauccaa

SEQ ID NO: 183904 - RNA, 19 nt, Artificial Sequence
  Description of Artificial Sequence: Synthetic oligonucleotide
  Sense strand starting at position 2376 of SEQ ID NO: 2370
uggauauguuccuuguuau

SEQ ID NO: 183905 - RNA, 19 nt, Artificial Sequence
  Description of Artificial Sequence: Synthetic oligonucleotide
  Antisense strand to SEQ ID NO: 183904
auaacaaggaacauaucca

SEQ ID NO: 183906 - RNA, 19 nt, Artificial Sequence
  Description of Artificial Sequence: Synthetic oligonucleotide
  Sense strand starting at position 2387 of SEQ ID NO: 2370
cuuguuauucgcgucagca

SEQ ID NO: 183907 - RNA, 19 nt, Artificial Sequence
  Description of Artificial Sequence: Synthetic oligonucleotide
  Antisense strand to SEQ ID NO: 183906
ugcugacgcgaauaacaag

SEQ ID NO: 183908 - RNA, 19 nt, Artificial Sequence
  Description of Artificial Sequence: Synthetic oligonucleotide
  Sense strand starting at position 2388 of SEQ ID NO: 2370
uuguuauucgcgucagcag

SEQ ID NO: 183909 - RNA, 19 nt, Artificial Sequence
  Description of Artificial Sequence: Synthetic oligonucleotide
  Antisense strand to SEQ ID NO: 183908
cugcugacgcgaauaacaa

SEQ ID NO: 183910 - RNA, 19 nt, Artificial Sequence
  Description of Artificial Sequence: Synthetic oligonucleotide
  Sense strand starting at position 2599 of SEQ ID NO: 2370
cucugagaccuuuggcaaa

SEQ ID NO: 183911 - RNA, 19 nt, Artificial Sequence
  Description of Artificial Sequence: Synthetic oligonucleotide
  Antisense strand to SEQ ID NO: 183910
uuugccaaaggucucagag

SEQ ID NO: 183912 - RNA, 19 nt, Artificial Sequence
  Description of Artificial Sequence: Synthetic oligonucleotide
  Sense strand starting at position 2601 of SEQ ID NO: 2370
cugagaccuuuggcaaaca

SEQ ID NO: 183913 - RNA, 19 nt, Artificial Sequence
  Description of Artificial Sequence: Synthetic oligonucleotide
  Antisense strand to SEQ ID NO: 183912
uguuugccaaaggucucag

SEQ ID NO: 183914 - RNA, 19 nt, Artificial Sequence
  Description of Artificial Sequence: Synthetic oligonucleotide
  Sense strand starting at position 2627 of SEQ ID NO: 2370
uuaauugagccuuaguuuc

SEQ ID NO: 183915 - RNA, 19 nt, Artificial Sequence
  Description of Artificial Sequence: Synthetic oligonucleotide
  Antisense strand to SEQ ID NO: 183914
gaaacuaaggcucaauuaa

SEQ ID NO: 183916 - RNA, 19 nt, Artificial Sequence
  Description of Artificial Sequence: Synthetic oligonucleotide
  Sense strand starting at position 2680 of SEQ ID NO: 2370
uccagaauuguguggauua

SEQ ID NO: 183917 - RNA, 19 nt, Artificial Sequence
  Description of Artificial Sequence: Synthetic oligonucleotide
  Antisense strand to SEQ ID NO: 183916
uaauccacacaauucugga

SEQ ID NO: 183918 - RNA, 19 nt, Artificial Sequence
  Description of Artificial Sequence: Synthetic oligonucleotide
  Sense strand starting at position 2729 of SEQ ID NO: 2370
acaggauacuuaguccagu

SEQ ID NO: 183919 - RNA, 19 nt, Artificial Sequence
  Description of Artificial Sequence: Synthetic oligonucleotide
  Antisense strand to SEQ ID NO: 183918
acuggacuaaguauccugu

SEQ ID NO: 183920 - RNA, 19 nt, Artificial Sequence
  Description of Artificial Sequence: Synthetic oligonucleotide
  Sense strand starting at position 2730 of SEQ ID NO: 2370
caggauacuuaguccaguu

SEQ ID NO: 183921 - RNA, 19 nt, Artificial Sequence
  Description of Artificial Sequence: Synthetic oligonucleotide
  Antisense strand to SEQ ID NO: 183920
aacuggacuaaguauccug

SEQ ID NO: 183922 - RNA, 19 nt, Artificial Sequence
  Description of Artificial Sequence: Synthetic oligonucleotide
  Sense strand starting at position 2753 of SEQ ID NO: 2370
gcacauaaugaacgcauua

SEQ ID NO: 183923 - RNA, 19 nt, Artificial Sequence
  Description of Artificial Sequence: Synthetic oligonucleotide
  Antisense strand to SEQ ID NO: 183922
uaaugcguucauuaugugc

SEQ ID NO: 183924 - RNA, 19 nt, Artificial Sequence
  Description of Artificial Sequence: Synthetic oligonucleotide
  Sense strand starting at position 2832 of SEQ ID NO: 2370
gccacuagucuccaugaca

SEQ ID NO: 183925 - RNA, 19 nt, Artificial Sequence
  Description of Artificial Sequence: Synthetic oligonucleotide
  Antisense strand to SEQ ID NO: 183924
ugucauggagacuaguggc

SEQ ID NO: 183926 - RNA, 19 nt, Artificial Sequence
  Description of Artificial Sequence: Synthetic oligonucleotide
  Sense strand starting at position 2954 of SEQ ID NO: 2370
acuccacacuauguguaaa

SEQ ID NO: 183927 - RNA, 19 nt, Artificial Sequence
  Description of Artificial Sequence: Synthetic oligonucleotide
  Antisense strand to SEQ ID NO: 183926
uuuacacauaguguggagu

SEQ ID NO: 183928 - RNA, 19 nt, Artificial Sequence
  Description of Artificial Sequence: Synthetic oligonucleotide
  Sense strand starting at position 3509 of SEQ ID NO: 2370
guugacuuucuugggaauc

SEQ ID NO: 183929 - RNA, 19 nt, Artificial Sequence
  Description of Artificial Sequence: Synthetic oligonucleotide
  Antisense strand to SEQ ID NO: 183928
gauucccaagaaagucaac

SEQ ID NO: 183930 - RNA, 19 nt, Artificial Sequence
  Description of Artificial Sequence: Synthetic oligonucleotide
  Sense strand starting at position 3544 of SEQ ID NO: 2370
cuuugugucggagacaagu

SEQ ID NO: 183931 - RNA, 19 nt, Artificial Sequence
  Description of Artificial Sequence: Synthetic oligonucleotide
  Antisense strand to SEQ ID NO: 183930
acuugucuccgacacaaag

SEQ ID NO: 183932 - RNA, 19 nt, Artificial Sequence
  Description of Artificial Sequence: Synthetic oligonucleotide
  Sense strand starting at position 3616 of SEQ ID NO: 2370
ggccaaagccuauagaguu

SEQ ID NO: 183933 - RNA, 19 nt, Artificial Sequence
  Description of Artificial Sequence: Synthetic oligonucleotide
  Antisense strand to SEQ ID NO: 183932
aacucuauaggcuuuggcc

SEQ ID NO: 183934 - RNA, 19 nt, Artificial Sequence
  Description of Artificial Sequence: Synthetic oligonucleotide
  Sense strand starting at position 3662 of SEQ ID NO: 2370
ggagacagcuagucaggaa

SEQ ID NO: 183935 - RNA, 19 nt, Artificial Sequence
  Description of Artificial Sequence: Synthetic oligonucleotide
  Antisense strand to SEQ ID NO: 183934
uuccugacuagcugucucc

SEQ ID NO: 183936 - RNA, 19 nt, Artificial Sequence
  Description of Artificial Sequence: Synthetic oligonucleotide
  Sense strand starting at position 29 of SEQ ID NO: 2371
ggagaacuaucugccuaau

SEQ ID NO: 183937 - RNA, 19 nt, Artificial Sequence
  Description of Artificial Sequence: Synthetic oligonucleotide
  Antisense strand to SEQ ID NO: 183936
auuaggcagauaguucucc

SEQ ID NO: 183938 - RNA, 19 nt, Artificial Sequence
  Description of Artificial Sequence: Synthetic oligonucleotide
  Sense strand starting at position 31 of SEQ ID NO: 2371
agaacuaucugccuaauga

SEQ ID NO: 183939 - RNA, 19 nt, Artificial Sequence
  Description of Artificial Sequence: Synthetic oligonucleotide
  Antisense strand to SEQ ID NO: 183938
ucauuaggcagauaguucu

SEQ ID NO: 183940 - RNA, 19 nt, Artificial Sequence
  Description of Artificial Sequence: Synthetic oligonucleotide
  Sense strand starting at position 62 of SEQ ID NO: 2371
cuaguaaggaaauguugau

SEQ ID NO: 183941 - RNA, 19 nt, Artificial Sequence
  Description of Artificial Sequence: Synthetic oligonucleotide
  Antisense strand to SEQ ID NO: 183940
aucaacauuuccuuacuag

SEQ ID NO: 183942 - RNA, 19 nt, Artificial Sequence
  Description of Artificial Sequence: Synthetic oligonucleotide
  Sense strand starting at position 662 of SEQ ID NO: 2371
ugaagaucuguaugggcaa

SEQ ID NO: 183943 - RNA, 19 nt, Artificial Sequence
  Description of Artificial Sequence: Synthetic oligonucleotide
  Antisense strand to SEQ ID NO: 183942
uugcccauacagaucuuca

SEQ ID NO: 183944 - RNA, 19 nt, Artificial Sequence
  Description of Artificial Sequence: Synthetic oligonucleotide
  Sense strand starting at position 839 of SEQ ID NO: 2371
ucgugacucagucaaggau

SEQ ID NO: 183945 - RNA, 19 nt, Artificial Sequence
  Description of Artificial Sequence: Synthetic oligonucleotide
  Antisense strand to SEQ ID NO: 183944
auccuugacugagucacga

SEQ ID NO: 183946 - RNA, 19 nt, Artificial Sequence
  Description of Artificial Sequence: Synthetic oligonucleotide
  Sense strand starting at position 842 of SEQ ID NO: 2371
ugacucagucaaggauauu

SEQ ID NO: 183947 - RNA, 19 nt, Artificial Sequence
  Description of Artificial Sequence: Synthetic oligonucleotide
  Antisense strand to SEQ ID NO: 183946
aauauccuugacugaguca

SEQ ID NO: 183948 - RNA, 19 nt, Artificial Sequence
  Description of Artificial Sequence: Synthetic oligonucleotide
  Sense strand starting at position 908 of SEQ ID NO: 2371
gccagagcccaaugaaaga

SEQ ID NO: 183949 - RNA, 19 nt, Artificial Sequence
  Description of Artificial Sequence: Synthetic oligonucleotide
  Antisense strand to SEQ ID NO: 183948
ucuuucauugggcucuggc

SEQ ID NO: 183950 - RNA, 19 nt, Artificial Sequence
  Description of Artificial Sequence: Synthetic oligonucleotide
  Sense strand starting at position 1076 of SEQ ID NO: 2371
acguucucagaguaaggua

SEQ ID NO: 183951 - RNA, 19 nt, Artificial Sequence
  Description of Artificial Sequence: Synthetic oligonucleotide
  Antisense strand to SEQ ID NO: 183950
uaccuuacucugagaacgu

SEQ ID NO: 183952 - RNA, 19 nt, Artificial Sequence
  Description of Artificial Sequence: Synthetic oligonucleotide
  Sense strand starting at position 1215 of SEQ ID NO: 2371
ugaggacuuugagcuccua

SEQ ID NO: 183953 - RNA, 19 nt, Artificial Sequence
  Description of Artificial Sequence: Synthetic oligonucleotide
  Antisense strand to SEQ ID NO: 183952
uaggagcucaaaguccuca

SEQ ID NO: 183954 - RNA, 19 nt, Artificial Sequence
  Description of Artificial Sequence: Synthetic oligonucleotide
  Sense strand starting at position 1270 of SEQ ID NO: 2371
aagcacagugcucagagua

SEQ ID NO: 183955 - RNA, 19 nt, Artificial Sequence
  Description of Artificial Sequence: Synthetic oligonucleotide
  Antisense strand to SEQ ID NO: 183954
uacucugagcacugugcuu

SEQ ID NO: 183956 - RNA, 19 nt, Artificial Sequence
  Description of Artificial Sequence: Synthetic oligonucleotide
  Sense strand starting at position 1302 of SEQ ID NO: 2371
uuugguaaaucucuugauu

SEQ ID NO: 183957 - RNA, 19 nt, Artificial Sequence
  Description of Artificial Sequence: Synthetic oligonucleotide
  Antisense strand to SEQ ID NO: 183956
aaucaagagauuuaccaaa

SEQ ID NO: 183958 - RNA, 19 nt, Artificial Sequence
  Description of Artificial Sequence: Synthetic oligonucleotide
  Sense strand starting at position 1305 of SEQ ID NO: 2371
gguaaaucucuugauugca

SEQ ID NO: 183959 - RNA, 19 nt, Artificial Sequence
  Description of Artificial Sequence: Synthetic oligonucleotide
  Antisense strand to SEQ ID NO: 183958
ugcaaucaagagauuuacc

SEQ ID NO: 183960 - RNA, 19 nt, Artificial Sequence
  Description of Artificial Sequence: Synthetic oligonucleotide
  Sense strand starting at position 1317 of SEQ ID NO: 2371
gauugcauugggcaaauca

SEQ ID NO: 183961 - RNA, 19 nt, Artificial Sequence
  Description of Artificial Sequence: Synthetic oligonucleotide
  Antisense strand to SEQ ID NO: 183960
ugauuugcccaaugcaauc

SEQ ID NO: 183962 - RNA, 19 nt, Artificial Sequence
  Description of Artificial Sequence: Synthetic oligonucleotide
  Sense strand starting at position 1483 of SEQ ID NO: 2371
gggaauuagcaauggcauu

SEQ ID NO: 183963 - RNA, 19 nt, Artificial Sequence
  Description of Artificial Sequence: Synthetic oligonucleotide
  Antisense strand to SEQ ID NO: 183962
aaugccauugcuaauuccc

SEQ ID NO: 183964 - RNA, 19 nt, Artificial Sequence
  Description of Artificial Sequence: Synthetic oligonucleotide
  Sense strand starting at position 1660 of SEQ ID NO: 2371
gaguaaagcugauuagaaa

SEQ ID NO: 183965 - RNA, 19 nt, Artificial Sequence
  Description of Artificial Sequence: Synthetic oligonucleotide
  Antisense strand to SEQ ID NO: 183964
uuucuaaucagcuuuacuc

SEQ ID NO: 183966 - RNA, 19 nt, Artificial Sequence
  Description of Artificial Sequence: Synthetic oligonucleotide
  Sense strand starting at position 1773 of SEQ ID NO: 2371
ccuaauacugugcaaguaa

SEQ ID NO: 183967 - RNA, 19 nt, Artificial Sequence
  Description of Artificial Sequence: Synthetic oligonucleotide
  Antisense strand to SEQ ID NO: 183966
uuacuugcacaguauuagg

SEQ ID NO: 183968 - RNA, 19 nt, Artificial Sequence
  Description of Artificial Sequence: Synthetic oligonucleotide
  Sense strand starting at position 1914 of SEQ ID NO: 2371
ccugguuacucagcaaaua

SEQ ID NO: 183969 - RNA, 19 nt, Artificial Sequence
  Description of Artificial Sequence: Synthetic oligonucleotide
  Antisense strand to SEQ ID NO: 183968
uauuugcugaguaaccagg

SEQ ID NO: 183970 - RNA, 19 nt, Artificial Sequence
  Description of Artificial Sequence: Synthetic oligonucleotide
  Sense strand starting at position 1978 of SEQ ID NO: 2371
uaaaguauucugcagagca

SEQ ID NO: 183971 - RNA, 19 nt, Artificial Sequence
  Description of Artificial Sequence: Synthetic oligonucleotide
  Antisense strand to SEQ ID NO: 183970
ugcucugcagaauacuuua

SEQ ID NO: 183972 - RNA, 19 nt, Artificial Sequence
  Description of Artificial Sequence: Synthetic oligonucleotide
  Sense strand starting at position 1980 of SEQ ID NO: 2371
aaguauucugcagagcaaa

SEQ ID NO: 183973 - RNA, 19 nt, Artificial Sequence
  Description of Artificial Sequence: Synthetic oligonucleotide
  Antisense strand to SEQ ID NO: 183972
uuugcucugcagaauacuu

SEQ ID NO: 183974 - RNA, 19 nt, Artificial Sequence
  Description of Artificial Sequence: Synthetic oligonucleotide
  Sense strand starting at position 2097 of SEQ ID NO: 2371
ccuggaugggaucaugcau

SEQ ID NO: 183975 - RNA, 19 nt, Artificial Sequence
  Description of Artificial Sequence: Synthetic oligonucleotide
  Antisense strand to SEQ ID NO: 183974
augcaugaucccauccagg

SEQ ID NO: 183976 - RNA, 19 nt, Artificial Sequence
  Description of Artificial Sequence: Synthetic oligonucleotide
  Sense strand starting at position 2131 of SEQ ID NO: 2371
agcaguacaccuuauccua

SEQ ID NO: 183977 - RNA, 19 nt, Artificial Sequence
  Description of Artificial Sequence: Synthetic oligonucleotide
  Antisense strand to SEQ ID NO: 183976
uaggauaagguguacugcu

SEQ ID NO: 183978 - RNA, 19 nt, Artificial Sequence
  Description of Artificial Sequence: Synthetic oligonucleotide
  Sense strand starting at position 2337 of SEQ ID NO: 2371
ggcccauugauagaaguuu

SEQ ID NO: 183979 - RNA, 19 nt, Artificial Sequence
  Description of Artificial Sequence: Synthetic oligonucleotide
  Antisense strand to SEQ ID NO: 183978
aaacuucuaucaaugggcc

SEQ ID NO: 183980 - RNA, 19 nt, Artificial Sequence
  Description of Artificial Sequence: Synthetic oligonucleotide
  Sense strand starting at position 2349 of SEQ ID NO: 2371
gaaguuucgguugacuauu

SEQ ID NO: 183981 - RNA, 19 nt, Artificial Sequence
  Description of Artificial Sequence: Synthetic oligonucleotide
  Antisense strand to SEQ ID NO: 183980
aauagucaaccgaaacuuc

SEQ ID NO: 183982 - RNA, 19 nt, Artificial Sequence
  Description of Artificial Sequence: Synthetic oligonucleotide
  Sense strand starting at position 2415 of SEQ ID NO: 2371
gcuuccuuacauuaugagu

SEQ ID NO: 183983 - RNA, 19 nt, Artificial Sequence
  Description of Artificial Sequence: Synthetic oligonucleotide
  Antisense strand to SEQ ID NO: 183982
acucauaauguaaggaagc

SEQ ID NO: 183984 - RNA, 19 nt, Artificial Sequence
  Description of Artificial Sequence: Synthetic oligonucleotide
  Sense strand starting at position 2420 of SEQ ID NO: 2371
cuuacauuaugaguagcau

SEQ ID NO: 183985 - RNA, 19 nt, Artificial Sequence
  Description of Artificial Sequence: Synthetic oligonucleotide
  Antisense strand to SEQ ID NO: 183984
augcuacucauaauguaag

SEQ ID NO: 183986 - RNA, 19 nt, Artificial Sequence
  Description of Artificial Sequence: Synthetic oligonucleotide
  Sense strand starting at position 2440 of SEQ ID NO: 2371
ugaugugaucucuaaaugu

SEQ ID NO: 183987 - RNA, 19 nt, Artificial Sequence
  Description of Artificial Sequence: Synthetic oligonucleotide
  Antisense strand to SEQ ID NO: 183986
acauuuagagaucacauca

SEQ ID NO: 183988 - RNA, 19 nt, Artificial Sequence
  Description of Artificial Sequence: Synthetic oligonucleotide
  Sense strand starting at position 2450 of SEQ ID NO: 2371
ucuaaauguuggguuugga

SEQ ID NO: 183989 - RNA, 19 nt, Artificial Sequence
  Description of Artificial Sequence: Synthetic oligonucleotide
  Antisense strand to SEQ ID NO: 183988
uccaaacccaacauuuaga

SEQ ID NO: 183990 - RNA, 19 nt, Artificial Sequence
  Description of Artificial Sequence: Synthetic oligonucleotide
  Sense strand starting at position 2625 of SEQ ID NO: 2371
ugggacaucucauccuaga

SEQ ID NO: 183991 - RNA, 19 nt, Artificial Sequence
  Description of Artificial Sequence: Synthetic oligonucleotide
  Antisense strand to SEQ ID NO: 183990
ucuaggaugagauguccca

SEQ ID NO: 183992 - RNA, 19 nt, Artificial Sequence
  Description of Artificial Sequence: Synthetic oligonucleotide
  Sense strand starting at position 2711 of SEQ ID NO: 2371
uugggaaauaacuggucga

SEQ ID NO: 183993 - RNA, 19 nt, Artificial Sequence
  Description of Artificial Sequence: Synthetic oligonucleotide
  Antisense strand to SEQ ID NO: 183992
ucgaccaguuauuucccaa

SEQ ID NO: 183994 - RNA, 19 nt, Artificial Sequence
  Description of Artificial Sequence: Synthetic oligonucleotide
  Sense strand starting at position 2712 of SEQ ID NO: 2371
ugggaaauaacuggucgau

SEQ ID NO: 183995 - RNA, 19 nt, Artificial Sequence
  Description of Artificial Sequence: Synthetic oligonucleotide
  Antisense strand to SEQ ID NO: 183994
aucgaccaguuauuuccca

SEQ ID NO: 183996 - RNA, 19 nt, Artificial Sequence
  Description of Artificial Sequence: Synthetic oligonucleotide
  Sense strand starting at position 2714 of SEQ ID NO: 2371
ggaaauaacuggucgauug

SEQ ID NO: 183997 - RNA, 19 nt, Artificial Sequence
  Description of Artificial Sequence: Synthetic oligonucleotide
  Antisense strand to SEQ ID NO: 183996
caaucgaccaguuauuucc

SEQ ID NO: 183998 - RNA, 19 nt, Artificial Sequence
  Description of Artificial Sequence: Synthetic oligonucleotide
  Sense strand starting at position 3100 of SEQ ID NO: 2371
gaccaugcugugcaacaua

SEQ ID NO: 183999 - RNA, 19 nt, Artificial Sequence
  Description of Artificial Sequence: Synthetic oligonucleotide
  Antisense strand to SEQ ID NO: 183998
uauguugcacagcaugguc

SEQ ID NO: 184000 - RNA, 19 nt, Artificial Sequence
  Description of Artificial Sequence: Synthetic oligonucleotide
  Sense strand starting at position 3235 of SEQ ID NO: 2371
gguuguugagcccaggauu

SEQ ID NO: 184001 - RNA, 19 nt, Artificial Sequence
  Description of Artificial Sequence: Synthetic oligonucleotide
  Antisense strand to SEQ ID NO: 184000
aauccugggcucaacaacc

SEQ ID NO: 184002 - RNA, 19 nt, Artificial Sequence
  Description of Artificial Sequence: Synthetic oligonucleotide
  Sense strand starting at position 3356 of SEQ ID NO: 2371
aguauaaagucagcuaaua

SEQ ID NO: 184003 - RNA, 19 nt, Artificial Sequence
  Description of Artificial Sequence: Synthetic oligonucleotide
  Antisense strand to SEQ ID NO: 184002
uauuagcugacuuuauacu

SEQ ID NO: 184004 - RNA, 19 nt, Artificial Sequence
  Description of Artificial Sequence: Synthetic oligonucleotide
  Sense strand starting at position 3422 of SEQ ID NO: 2371
uauagagcacagugaauua

SEQ ID NO: 184005 - RNA, 19 nt, Artificial Sequence
  Description of Artificial Sequence: Synthetic oligonucleotide
  Antisense strand to SEQ ID NO: 184004
uaauucacugugcucuaua

SEQ ID NO: 184006 - RNA, 19 nt, Artificial Sequence
  Description of Artificial Sequence: Synthetic oligonucleotide
  Sense strand starting at position 3589 of SEQ ID NO: 2371
uuuggagguuuguuauaua

SEQ ID NO: 184007 - RNA, 19 nt, Artificial Sequence
  Description of Artificial Sequence: Synthetic oligonucleotide
  Antisense strand to SEQ ID NO: 184006
uauauaacaaaccuccaaa

SEQ ID NO: 184008 - RNA, 19 nt, Artificial Sequence
  Description of Artificial Sequence: Synthetic oligonucleotide
  Sense strand starting at position 3646 of SEQ ID NO: 2371
ugucaucauccagguaaua

SEQ ID NO: 184009 - RNA, 19 nt, Artificial Sequence
  Description of Artificial Sequence: Synthetic oligonucleotide
  Antisense strand to SEQ ID NO: 184008
uauuaccuggaugaugaca

SEQ ID NO: 184010 - RNA, 19 nt, Artificial Sequence
  Description of Artificial Sequence: Synthetic oligonucleotide
  Sense strand starting at position 3812 of SEQ ID NO: 2371
uuugucauuccugggauaa

SEQ ID NO: 184011 - RNA, 19 nt, Artificial Sequence
  Description of Artificial Sequence: Synthetic oligonucleotide
  Antisense strand to SEQ ID NO: 184010
uuaucccaggaaugacaaa

SEQ ID NO: 184012 - RNA, 19 nt, Artificial Sequence
  Description of Artificial Sequence: Synthetic oligonucleotide
  Sense strand starting at position 3813 of SEQ ID NO: 2371
uugucauuccugggauaaa

SEQ ID NO: 184013 - RNA, 19 nt, Artificial Sequence
  Description of Artificial Sequence: Synthetic oligonucleotide
  Antisense strand to SEQ ID NO: 184012
uuuaucccaggaaugacaa

SEQ ID NO: 184014 - RNA, 19 nt, Artificial Sequence
  Description of Artificial Sequence: Synthetic oligonucleotide
  Sense strand starting at position 3859 of SEQ ID NO: 2371
cuuuguauaguaggaaauc

SEQ ID NO: 184015 - RNA, 19 nt, Artificial Sequence
  Description of Artificial Sequence: Synthetic oligonucleotide
  Antisense strand to SEQ ID NO: 184014
gauuuccuacuauacaaag

SEQ ID NO: 184016 - RNA, 19 nt, Artificial Sequence
  Description of Artificial Sequence: Synthetic oligonucleotide
  Sense strand starting at position 3834 of SEQ ID NO: 2373
guauauaggucagucuuag

SEQ ID NO: 184017 - RNA, 19 nt, Artificial Sequence
  Description of Artificial Sequence: Synthetic oligonucleotide
  Antisense strand to SEQ ID NO: 184016
cuaagacugaccuauauac

SEQ ID NO: 184018 - RNA, 19 nt, Artificial Sequence
  Description of Artificial Sequence: Synthetic oligonucleotide
  Sense strand starting at position 3775 of SEQ ID NO: 2373
cguacaaacagauguugaa

SEQ ID NO: 184019 - RNA, 19 nt, Artificial Sequence
  Description of Artificial Sequence: Synthetic oligonucleotide
  Antisense strand to SEQ ID NO: 184018
uucaacaucuguuuguacg

SEQ ID NO: 184020 - RNA, 19 nt, Artificial Sequence
  Description of Artificial Sequence: Synthetic oligonucleotide
  Sense strand starting at position 3765 of SEQ ID NO: 2373
agguguuuaacguacaaac

SEQ ID NO: 184021 - RNA, 19 nt, Artificial Sequence
  Description of Artificial Sequence: Synthetic oligonucleotide
  Antisense strand to SEQ ID NO: 184020
guuuguacguuaaacaccu

SEQ ID NO: 184022 - RNA, 19 nt, Artificial Sequence
  Description of Artificial Sequence: Synthetic oligonucleotide
  Sense strand starting at position 3760 of SEQ ID NO: 2373
gauugagguguuuaacgua

SEQ ID NO: 184023 - RNA, 19 nt, Artificial Sequence
  Description of Artificial Sequence: Synthetic oligonucleotide
  Antisense strand to SEQ ID NO: 184022
uacguuaaacaccucaauc

SEQ ID NO: 184024 - RNA, 19 nt, Artificial Sequence
  Description of Artificial Sequence: Synthetic oligonucleotide
  Sense strand starting at position 3756 of SEQ ID NO: 2373
uuaagauugagguguuuaa

SEQ ID NO: 184025 - RNA, 19 nt, Artificial Sequence
  Description of Artificial Sequence: Synthetic oligonucleotide
  Antisense strand to SEQ ID NO: 184024
uuaaacaccucaaucuuaa

SEQ ID NO: 184026 - RNA, 19 nt, Artificial Sequence
  Description of Artificial Sequence: Synthetic oligonucleotide
  Sense strand starting at position 3742 of SEQ ID NO: 2373
ucguucuuagaauauuaag

SEQ ID NO: 184027 - RNA, 19 nt, Artificial Sequence
  Description of Artificial Sequence: Synthetic oligonucleotide
  Antisense strand to SEQ ID NO: 184026
cuuaauauucuaagaacga

SEQ ID NO: 184028 - RNA, 19 nt, Artificial Sequence
  Description of Artificial Sequence: Synthetic oligonucleotide
  Sense strand starting at position 3736 of SEQ ID NO: 2373
ggaucaucguucuuagaau

SEQ ID NO: 184029 - RNA, 19 nt, Artificial Sequence
  Description of Artificial Sequence: Synthetic oligonucleotide
  Antisense strand to SEQ ID NO: 184028
auucuaagaacgaugaucc

SEQ ID NO: 184030 - RNA, 19 nt, Artificial Sequence
  Description of Artificial Sequence: Synthetic oligonucleotide
  Sense strand starting at position 3733 of SEQ ID NO: 2373
gaaggaucaucguucuuag

SEQ ID NO: 184031 - RNA, 19 nt, Artificial Sequence
  Description of Artificial Sequence: Synthetic oligonucleotide
  Antisense strand to SEQ ID NO: 184030
cuaagaacgaugauccuuc

SEQ ID NO: 184032 - RNA, 19 nt, Artificial Sequence
  Description of Artificial Sequence: Synthetic oligonucleotide
  Sense strand starting at position 3724 of SEQ ID NO: 2373
gcucaaugggaaggaucau

SEQ ID NO: 184033 - RNA, 19 nt, Artificial Sequence
  Description of Artificial Sequence: Synthetic oligonucleotide
  Antisense strand to SEQ ID NO: 184032
augauccuucccauugagc

SEQ ID NO: 184034 - RNA, 19 nt, Artificial Sequence
  Description of Artificial Sequence: Synthetic oligonucleotide
  Sense strand starting at position 3712 of SEQ ID NO: 2373
gggucuuaguaggcucaau

SEQ ID NO: 184035 - RNA, 19 nt, Artificial Sequence
  Description of Artificial Sequence: Synthetic oligonucleotide
  Antisense strand to SEQ ID NO: 184034
auugagccuacuaagaccc

SEQ ID NO: 184036 - RNA, 19 nt, Artificial Sequence
  Description of Artificial Sequence: Synthetic oligonucleotide
  Sense strand starting at position 3358 of SEQ ID NO: 2373
auggauuggcuguaugaua

SEQ ID NO: 184037 - RNA, 19 nt, Artificial Sequence
  Description of Artificial Sequence: Synthetic oligonucleotide
  Antisense strand to SEQ ID NO: 184036
uaucauacagccaauccau

SEQ ID NO: 184038 - RNA, 19 nt, Artificial Sequence
  Description of Artificial Sequence: Synthetic oligonucleotide
  Sense strand starting at position 3345 of SEQ ID NO: 2373
acgagcucuacugauggau

SEQ ID NO: 184039 - RNA, 19 nt, Artificial Sequence
  Description of Artificial Sequence: Synthetic oligonucleotide
  Antisense strand to SEQ ID NO: 184038
auccaucaguagagcucgu

SEQ ID NO: 184040 - RNA, 19 nt, Artificial Sequence
  Description of Artificial Sequence: Synthetic oligonucleotide
  Sense strand starting at position 3341 of SEQ ID NO: 2373
gccaacgagcucuacugau

SEQ ID NO: 184041 - RNA, 19 nt, Artificial Sequence
  Description of Artificial Sequence: Synthetic oligonucleotide
  Antisense strand to SEQ ID NO: 184040
aucaguagagcucguuggc

SEQ ID NO: 184042 - RNA, 19 nt, Artificial Sequence
  Description of Artificial Sequence: Synthetic oligonucleotide
  Sense strand starting at position 3269 of SEQ ID NO: 2373
aaauuaugguagucuggaa

SEQ ID NO: 184043 - RNA, 19 nt, Artificial Sequence
  Description of Artificial Sequence: Synthetic oligonucleotide
  Antisense strand to SEQ ID NO: 184042
uuccagacuaccauaauuu

SEQ ID NO: 184044 - RNA, 19 nt, Artificial Sequence
  Description of Artificial Sequence: Synthetic oligonucleotide
  Sense strand starting at position 3226 of SEQ ID NO: 2373
gcggaaaggucagccaaga

SEQ ID NO: 184045 - RNA, 19 nt, Artificial Sequence
  Description of Artificial Sequence: Synthetic oligonucleotide
  Antisense strand to SEQ ID NO: 184044
ucuuggcugaccuuuccgc

SEQ ID NO: 184046 - RNA, 19 nt, Artificial Sequence
  Description of Artificial Sequence: Synthetic oligonucleotide
  Sense strand starting at position 2986 of SEQ ID NO: 2373
ucucuugaggucgggaauu

SEQ ID NO: 184047 - RNA, 19 nt, Artificial Sequence
  Description of Artificial Sequence: Synthetic oligonucleotide
  Antisense strand to SEQ ID NO: 184046
aauucccgaccucaagaga

SEQ ID NO: 184048 - RNA, 19 nt, Artificial Sequence
  Description of Artificial Sequence: Synthetic oligonucleotide
  Sense strand starting at position 2985 of SEQ ID NO: 2373
aucucuugaggucgggaau

SEQ ID NO: 184049 - RNA, 19 nt, Artificial Sequence
  Description of Artificial Sequence: Synthetic oligonucleotide
  Antisense strand to SEQ ID NO: 184048
auucccgaccucaagagau

SEQ ID NO: 184050 - RNA, 19 nt, Artificial Sequence
  Description of Artificial Sequence: Synthetic oligonucleotide
  Sense strand starting at position 2892 of SEQ ID NO: 2373
gggauuacacguugaccuu

SEQ ID NO: 184051 - RNA, 19 nt, Artificial Sequence
  Description of Artificial Sequence: Synthetic oligonucleotide
  Antisense strand to SEQ ID NO: 184050
aaggucaacguguaauccc

SEQ ID NO: 184052 - RNA, 19 nt, Artificial Sequence
  Description of Artificial Sequence: Synthetic oligonucleotide
  Sense strand starting at position 2858 of SEQ ID NO: 2373
ggagucguuagaugauucu

SEQ ID NO: 184053 - RNA, 19 nt, Artificial Sequence
  Description of Artificial Sequence: Synthetic oligonucleotide
  Antisense strand to SEQ ID NO: 184052
agaaucaucuaacgacucc

SEQ ID NO: 184054 - RNA, 19 nt, Artificial Sequence
  Description of Artificial Sequence: Synthetic oligonucleotide
  Sense strand starting at position 2853 of SEQ ID NO: 2373
agaugggagucguuagaug

SEQ ID NO: 184055 - RNA, 19 nt, Artificial Sequence
  Description of Artificial Sequence: Synthetic oligonucleotide
  Antisense strand to SEQ ID NO: 184054
caucuaacgacucccaucu

SEQ ID NO: 184056 - RNA, 19 nt, Artificial Sequence
  Description of Artificial Sequence: Synthetic oligonucleotide
  Sense strand starting at position 2851 of SEQ ID NO: 2373
ggagaugggagucguuaga

SEQ ID NO: 184057 - RNA, 19 nt, Artificial Sequence
  Description of Artificial Sequence: Synthetic oligonucleotide
  Antisense strand to SEQ ID NO: 184056
ucuaacgacucccaucucc

SEQ ID NO: 184058 - RNA, 19 nt, Artificial Sequence
  Description of Artificial Sequence: Synthetic oligonucleotide
  Sense strand starting at position 2708 of SEQ ID NO: 2373
uacaaacguccugaagcuu

SEQ ID NO: 184059 - RNA, 19 nt, Artificial Sequence
  Description of Artificial Sequence: Synthetic oligonucleotide
  Antisense strand to SEQ ID NO: 184058
aagcuucaggacguuugua

SEQ ID NO: 184060 - RNA, 19 nt, Artificial Sequence
  Description of Artificial Sequence: Synthetic oligonucleotide
  Sense strand starting at position 2616 of SEQ ID NO: 2373
agaccucuuugaguugaca

SEQ ID NO: 184061 - RNA, 19 nt, Artificial Sequence
  Description of Artificial Sequence: Synthetic oligonucleotide
  Antisense strand to SEQ ID NO: 184060
ugucaacucaaagaggucu

SEQ ID NO: 184062 - RNA, 19 nt, Artificial Sequence
  Description of Artificial Sequence: Synthetic oligonucleotide
  Sense strand starting at position 2613 of SEQ ID NO: 2373
gaaagaccucuuugaguug

SEQ ID NO: 184063 - RNA, 19 nt, Artificial Sequence
  Description of Artificial Sequence: Synthetic oligonucleotide
  Antisense strand to SEQ ID NO: 184062
caacucaaagaggucuuuc

SEQ ID NO: 184064 - RNA, 19 nt, Artificial Sequence
  Description of Artificial Sequence: Synthetic oligonucleotide
  Sense strand starting at position 2600 of SEQ ID NO: 2373
auacgauagccuggaaaga

SEQ ID NO: 184065 - RNA, 19 nt, Artificial Sequence
  Description of Artificial Sequence: Synthetic oligonucleotide
  Antisense strand to SEQ ID NO: 184064
ucuuuccaggcuaucguau

SEQ ID NO: 184066 - RNA, 19 nt, Artificial Sequence
  Description of Artificial Sequence: Synthetic oligonucleotide
  Sense strand starting at position 2585 of SEQ ID NO: 2373
uaagauaagugauagauac

SEQ ID NO: 184067 - RNA, 19 nt, Artificial Sequence
  Description of Artificial Sequence: Synthetic oligonucleotide
  Antisense strand to SEQ ID NO: 184066
guaucuaucacuuaucuua

SEQ ID NO: 184068 - RNA, 19 nt, Artificial Sequence
  Description of Artificial Sequence: Synthetic oligonucleotide
  Sense strand starting at position 2582 of SEQ ID NO: 2373
cgcuaagauaagugauaga

SEQ ID NO: 184069 - RNA, 19 nt, Artificial Sequence
  Description of Artificial Sequence: Synthetic oligonucleotide
  Antisense strand to SEQ ID NO: 184068
ucuaucacuuaucuuagcg

SEQ ID NO: 184070 - RNA, 19 nt, Artificial Sequence
  Description of Artificial Sequence: Synthetic oligonucleotide
  Sense strand starting at position 2430 of SEQ ID NO: 2373
gcaguuaagcaggauacgu

SEQ ID NO: 184071 - RNA, 19 nt, Artificial Sequence
  Description of Artificial Sequence: Synthetic oligonucleotide
  Antisense strand to SEQ ID NO: 184070
acguauccugcuuaacugc

SEQ ID NO: 184072 - RNA, 19 nt, Artificial Sequence
  Description of Artificial Sequence: Synthetic oligonucleotide
  Sense strand starting at position 2418 of SEQ ID NO: 2373
agcucaagugcugcaguua

SEQ ID NO: 184073 - RNA, 19 nt, Artificial Sequence
  Description of Artificial Sequence: Synthetic oligonucleotide
  Antisense strand to SEQ ID NO: 184072
uaacugcagcacuugagcu

SEQ ID NO: 184074 - RNA, 19 nt, Artificial Sequence
  Description of Artificial Sequence: Synthetic oligonucleotide
  Sense strand starting at position 2124 of SEQ ID NO: 2373
agggccauccaaugagaca

SEQ ID NO: 184075 - RNA, 19 nt, Artificial Sequence
  Description of Artificial Sequence: Synthetic oligonucleotide
  Antisense strand to SEQ ID NO: 184074
ugucucauuggauggcccu

SEQ ID NO: 184076 - RNA, 19 nt, Artificial Sequence
  Description of Artificial Sequence: Synthetic oligonucleotide
  Sense strand starting at position 429 of SEQ ID NO: 2373
ggacaucuucgccaagguu

SEQ ID NO: 184077 - RNA, 19 nt, Artificial Sequence
  Description of Artificial Sequence: Synthetic oligonucleotide
  Antisense strand to SEQ ID NO: 184076
aaccuuggcgaagaugucc

SEQ ID NO: 184078 - RNA, 19 nt, Artificial Sequence
  Description of Artificial Sequence: Synthetic oligonucleotide
  Sense strand starting at position 428 of SEQ ID NO: 2373
aggacaucuucgccaaggu

SEQ ID NO: 184079 - RNA, 19 nt, Artificial Sequence
  Description of Artificial Sequence: Synthetic oligonucleotide
  Antisense strand to SEQ ID NO: 184078
accuuggcgaagauguccu

SEQ ID NO: 184080 - RNA, 19 nt, Artificial Sequence
  Description of Artificial Sequence: Synthetic oligonucleotide
  Sense strand starting at position 328 of SEQ ID NO: 2373
cgaccauuaucuguugaca

SEQ ID NO: 184081 - RNA, 19 nt, Artificial Sequence
  Description of Artificial Sequence: Synthetic oligonucleotide
  Antisense strand to SEQ ID NO: 184080
ugucaacagauaauggucg

SEQ ID NO: 184082 - RNA, 19 nt, Artificial Sequence
  Description of Artificial Sequence: Synthetic oligonucleotide
  Sense strand starting at position 320 of SEQ ID NO: 2373
cgacgaaucgaccauuauc

SEQ ID NO: 184083 - RNA, 19 nt, Artificial Sequence
  Description of Artificial Sequence: Synthetic oligonucleotide
  Antisense strand to SEQ ID NO: 184082
gauaauggucgauucgucg

SEQ ID NO: 184084 - RNA, 19 nt, Artificial Sequence
  Description of Artificial Sequence: Synthetic oligonucleotide
  Sense strand starting at position 301 of SEQ ID NO: 2373
ucaacuuucgcagaaagca

SEQ ID NO: 184085 - RNA, 19 nt, Artificial Sequence
  Description of Artificial Sequence: Synthetic oligonucleotide
  Antisense strand to SEQ ID NO: 184084
ugcuuucugcgaaaguuga

SEQ ID NO: 184086 - RNA, 19 nt, Artificial Sequence
  Description of Artificial Sequence: Synthetic oligonucleotide
  Sense strand starting at position 182 of SEQ ID NO: 2373
agcucacaccgagaaugua

SEQ ID NO: 184087 - RNA, 19 nt, Artificial Sequence
  Description of Artificial Sequence: Synthetic oligonucleotide
  Antisense strand to SEQ ID NO: 184086
uacauucucggugugagcu

SEQ ID NO: 184088 - RNA, 19 nt, Artificial Sequence
  Description of Artificial Sequence: Synthetic oligonucleotide
  Sense strand starting at position 131 of SEQ ID NO: 2373
gcggaucgucagcuuaauc

SEQ ID NO: 184089 - RNA, 19 nt, Artificial Sequence
  Description of Artificial Sequence: Synthetic oligonucleotide
  Antisense strand to SEQ ID NO: 184088
gauuaagcugacgauccgc

SEQ ID NO: 184090 - RNA, 19 nt, Artificial Sequence
  Description of Artificial Sequence: Synthetic oligonucleotide
  Sense strand starting at position 112 of SEQ ID NO: 2373
ugauuaggcaggugaaaua

SEQ ID NO: 184091 - RNA, 19 nt, Artificial Sequence
  Description of Artificial Sequence: Synthetic oligonucleotide
  Antisense strand to SEQ ID NO: 184090
uauuucaccugccuaauca

SEQ ID NO: 184092 - RNA, 19 nt, Artificial Sequence
  Description of Artificial Sequence: Synthetic oligonucleotide
  Sense strand starting at position 110 of SEQ ID NO: 2373
aaugauuaggcaggugaaa

SEQ ID NO: 184093 - RNA, 19 nt, Artificial Sequence
  Description of Artificial Sequence: Synthetic oligonucleotide
  Antisense strand to SEQ ID NO: 184092
uuucaccugccuaaucauu

SEQ ID NO: 184094 - RNA, 19 nt, Artificial Sequence
  Description of Artificial Sequence: Synthetic oligonucleotide
  Sense strand starting at position 40 of SEQ ID NO: 2373
gagccaauuuaauggauga

SEQ ID NO: 184095 - RNA, 19 nt, Artificial Sequence
  Description of Artificial Sequence: Synthetic oligonucleotide
  Antisense strand to SEQ ID NO: 184094
ucauccauuaaauuggcuc

SEQ ID NO: 184096 - RNA, 19 nt, Artificial Sequence
  Description of Artificial Sequence: Synthetic oligonucleotide
  Sense strand starting at position 3766 of SEQ ID NO: 2372
auggauuggcuguaugaua

SEQ ID NO: 184097 - RNA, 19 nt, Artificial Sequence
  Description of Artificial Sequence: Synthetic oligonucleotide
  Antisense strand to SEQ ID NO: 184096
uaucauacagccaauccau

SEQ ID NO: 184098 - RNA, 19 nt, Artificial Sequence
  Description of Artificial Sequence: Synthetic oligonucleotide
  Sense strand starting at position 3753 of SEQ ID NO: 2372
acgagcucuacugauggau

SEQ ID NO: 184099 - RNA, 19 nt, Artificial Sequence
  Description of Artificial Sequence: Synthetic oligonucleotide
  Antisense strand to SEQ ID NO: 184098
auccaucaguagagcucgu

SEQ ID NO: 184100 - RNA, 19 nt, Artificial Sequence
  Description of Artificial Sequence: Synthetic oligonucleotide
  Sense strand starting at position 3749 of SEQ ID NO: 2372
gccaacgagcucuacugau

SEQ ID NO: 184101 - RNA, 19 nt, Artificial Sequence
  Description of Artificial Sequence: Synthetic oligonucleotide
  Antisense strand to SEQ ID NO: 184100
aucaguagagcucguuggc

SEQ ID NO: 184102 - RNA, 19 nt, Artificial Sequence
  Description of Artificial Sequence: Synthetic oligonucleotide
  Sense strand starting at position 3677 of SEQ ID NO: 2372
aaauuaugguagucuggaa

SEQ ID NO: 184103 - RNA, 19 nt, Artificial Sequence
  Description of Artificial Sequence: Synthetic oligonucleotide
  Antisense strand to SEQ ID NO: 184102
uuccagacuaccauaauuu

SEQ ID NO: 184104 - RNA, 19 nt, Artificial Sequence
  Description of Artificial Sequence: Synthetic oligonucleotide
  Sense strand starting at position 3634 of SEQ ID NO: 2372
gcggaaaggucagccaaga

SEQ ID NO: 184105 - RNA, 19 nt, Artificial Sequence
  Description of Artificial Sequence: Synthetic oligonucleotide
  Antisense strand to SEQ ID NO: 184104
ucuuggcugaccuuuccgc

SEQ ID NO: 184106 - RNA, 19 nt, Artificial Sequence
  Description of Artificial Sequence: Synthetic oligonucleotide
  Sense strand starting at position 3394 of SEQ ID NO: 2372
ucucuugaggucgggaauu

SEQ ID NO: 184107 - RNA, 19 nt, Artificial Sequence
  Description of Artificial Sequence: Synthetic oligonucleotide
  Antisense strand to SEQ ID NO: 184106
aauucccgaccucaagaga

SEQ ID NO: 184108 - RNA, 19 nt, Artificial Sequence
  Description of Artificial Sequence: Synthetic oligonucleotide
  Sense strand starting at position 3393 of SEQ ID NO: 2372
aucucuugaggucgggaau

SEQ ID NO: 184109 - RNA, 19 nt, Artificial Sequence
  Description of Artificial Sequence: Synthetic oligonucleotide
  Antisense strand to SEQ ID NO: 184108
auucccgaccucaagagau

SEQ ID NO: 184110 - RNA, 19 nt, Artificial Sequence
  Description of Artificial Sequence: Synthetic oligonucleotide
  Sense strand starting at position 3300 of SEQ ID NO: 2372
gggauuacacguugaccuu

SEQ ID NO: 184111 - RNA, 19 nt, Artificial Sequence
  Description of Artificial Sequence: Synthetic oligonucleotide
  Antisense strand to SEQ ID NO: 184110
aaggucaacguguaauccc

SEQ ID NO: 184112 - RNA, 19 nt, Artificial Sequence
  Description of Artificial Sequence: Synthetic oligonucleotide
  Sense strand starting at position 3266 of SEQ ID NO: 2372
ggagucguuagaugauucu

SEQ ID NO: 184113 - RNA, 19 nt, Artificial Sequence
  Description of Artificial Sequence: Synthetic oligonucleotide
  Antisense strand to SEQ ID NO: 184112
agaaucaucuaacgacucc

SEQ ID NO: 184114 - RNA, 19 nt, Artificial Sequence
  Description of Artificial Sequence: Synthetic oligonucleotide
  Sense strand starting at position 3261 of SEQ ID NO: 2372
agaugggagucguuagaug

SEQ ID NO: 184115 - RNA, 19 nt, Artificial Sequence
  Description of Artificial Sequence: Synthetic oligonucleotide
  Antisense strand to SEQ ID NO: 184114
caucuaacgacucccaucu

SEQ ID NO: 184116 - RNA, 19 nt, Artificial Sequence
  Description of Artificial Sequence: Synthetic oligonucleotide
  Sense strand starting at position 3259 of SEQ ID NO: 2372
ggagaugggagucguuaga

SEQ ID NO: 184117 - RNA, 19 nt, Artificial Sequence
  Description of Artificial Sequence: Synthetic oligonucleotide
  Antisense strand to SEQ ID NO: 184116
ucuaacgacucccaucucc

SEQ ID NO: 184118 - RNA, 19 nt, Artificial Sequence
  Description of Artificial Sequence: Synthetic oligonucleotide
  Sense strand starting at position 3185 of SEQ ID NO: 2372
gcagucaauuugggaaaua

SEQ ID NO: 184119 - RNA, 19 nt, Artificial Sequence
  Description of Artificial Sequence: Synthetic oligonucleotide
  Antisense strand to SEQ ID NO: 184118
uauuucccaaauugacugc

SEQ ID NO: 184120 - RNA, 19 nt, Artificial Sequence
  Description of Artificial Sequence: Synthetic oligonucleotide
  Sense strand starting at position 3116 of SEQ ID NO: 2372
uacaaacguccugaagcuu

SEQ ID NO: 184121 - RNA, 19 nt, Artificial Sequence
  Description of Artificial Sequence: Synthetic oligonucleotide
  Antisense strand to SEQ ID NO: 184120
aagcuucaggacguuugua

SEQ ID NO: 184122 - RNA, 19 nt, Artificial Sequence
  Description of Artificial Sequence: Synthetic oligonucleotide
  Sense strand starting at position 3024 of SEQ ID NO: 2372
agaccucuuugaguugaca

SEQ ID NO: 184123 - RNA, 19 nt, Artificial Sequence
  Description of Artificial Sequence: Synthetic oligonucleotide
  Antisense strand to SEQ ID NO: 184122
ugucaacucaaagaggucu

SEQ ID NO: 184124 - RNA, 19 nt, Artificial Sequence
  Description of Artificial Sequence: Synthetic oligonucleotide
  Sense strand starting at position 3021 of SEQ ID NO: 2372
gaaagaccucuuugaguug

SEQ ID NO: 184125 - RNA, 19 nt, Artificial Sequence
  Description of Artificial Sequence: Synthetic oligonucleotide
  Antisense strand to SEQ ID NO: 184124
caacucaaagaggucuuuc

SEQ ID NO: 184126 - RNA, 19 nt, Artificial Sequence
  Description of Artificial Sequence: Synthetic oligonucleotide
  Sense strand starting at position 3008 of SEQ ID NO: 2372
auacgauagccuggaaaga

SEQ ID NO: 184127 - RNA, 19 nt, Artificial Sequence
  Description of Artificial Sequence: Synthetic oligonucleotide
  Antisense strand to SEQ ID NO: 184126
ucuuuccaggcuaucguau

SEQ ID NO: 184128 - RNA, 19 nt, Artificial Sequence
  Description of Artificial Sequence: Synthetic oligonucleotide
  Sense strand starting at position 2993 of SEQ ID NO: 2372
uaagauaagugauagauac

SEQ ID NO: 184129 - RNA, 19 nt, Artificial Sequence
  Description of Artificial Sequence: Synthetic oligonucleotide
  Antisense strand to SEQ ID NO: 184128
guaucuaucacuuaucuua

SEQ ID NO: 184130 - RNA, 19 nt, Artificial Sequence
  Description of Artificial Sequence: Synthetic oligonucleotide
  Sense strand starting at position 2990 of SEQ ID NO: 2372
cgcuaagauaagugauaga

SEQ ID NO: 184131 - RNA, 19 nt, Artificial Sequence
  Description of Artificial Sequence: Synthetic oligonucleotide
  Antisense strand to SEQ ID NO: 184130
ucuaucacuuaucuuagcg

SEQ ID NO: 184132 - RNA, 19 nt, Artificial Sequence
  Description of Artificial Sequence: Synthetic oligonucleotide
  Sense strand starting at position 2838 of SEQ ID NO: 2372
gcaguuaagcaggauacgu

SEQ ID NO: 184133 - RNA, 19 nt, Artificial Sequence
  Description of Artificial Sequence: Synthetic oligonucleotide
  Antisense strand to SEQ ID NO: 184132
acguauccugcuuaacugc

SEQ ID NO: 184134 - RNA, 19 nt, Artificial Sequence
  Description of Artificial Sequence: Synthetic oligonucleotide
  Sense strand starting at position 2826 of SEQ ID NO: 2372
agcucaagugcugcaguua

SEQ ID NO: 184135 - RNA, 19 nt, Artificial Sequence
  Description of Artificial Sequence: Synthetic oligonucleotide
  Antisense strand to SEQ ID NO: 184134
uaacugcagcacuugagcu

SEQ ID NO: 184136 - RNA, 19 nt, Artificial Sequence
  Description of Artificial Sequence: Synthetic oligonucleotide
  Sense strand starting at position 2581 of SEQ ID NO: 2372
aggcgaaugcuguagagcu

SEQ ID NO: 184137 - RNA, 19 nt, Artificial Sequence
  Description of Artificial Sequence: Synthetic oligonucleotide
  Antisense strand to SEQ ID NO: 184136
agcucuacagcauucgccu

SEQ ID NO: 184138 - RNA, 19 nt, Artificial Sequence
  Description of Artificial Sequence: Synthetic oligonucleotide
  Sense strand starting at position 2532 of SEQ ID NO: 2372
agggccauccaaugagaca

SEQ ID NO: 184139 - RNA, 19 nt, Artificial Sequence
  Description of Artificial Sequence: Synthetic oligonucleotide
  Antisense strand to SEQ ID NO: 184138
ugucucauuggauggcccu

SEQ ID NO: 184140 - RNA, 19 nt, Artificial Sequence
  Description of Artificial Sequence: Synthetic oligonucleotide
  Sense strand starting at position 840 of SEQ ID NO: 2372
caucuucgccaagguuuaa

SEQ ID NO: 184141 - RNA, 19 nt, Artificial Sequence
  Description of Artificial Sequence: Synthetic oligonucleotide
  Antisense strand to SEQ ID NO: 184140
uuaaaccuuggcgaagaug

SEQ ID NO: 184142 - RNA, 19 nt, Artificial Sequence
  Description of Artificial Sequence: Synthetic oligonucleotide
  Sense strand starting at position 837 of SEQ ID NO: 2372
ggacaucuucgccaagguu

SEQ ID NO: 184143 - RNA, 19 nt, Artificial Sequence
  Description of Artificial Sequence: Synthetic oligonucleotide
  Antisense strand to SEQ ID NO: 184142
aaccuuggcgaagaugucc

SEQ ID NO: 184144 - RNA, 19 nt, Artificial Sequence
  Description of Artificial Sequence: Synthetic oligonucleotide
  Sense strand starting at position 836 of SEQ ID NO: 2372
aggacaucuucgccaaggu

SEQ ID NO: 184145 - RNA, 19 nt, Artificial Sequence
  Description of Artificial Sequence: Synthetic oligonucleotide
  Antisense strand to SEQ ID NO: 184144
accuuggcgaagauguccu

SEQ ID NO: 184146 - RNA, 19 nt, Artificial Sequence
  Description of Artificial Sequence: Synthetic oligonucleotide
  Sense strand starting at position 736 of SEQ ID NO: 2372
cgaccauuaucuguugaca

SEQ ID NO: 184147 - RNA, 19 nt, Artificial Sequence
  Description of Artificial Sequence: Synthetic oligonucleotide
  Antisense strand to SEQ ID NO: 184146
ugucaacagauaauggucg

SEQ ID NO: 184148 - RNA, 19 nt, Artificial Sequence
  Description of Artificial Sequence: Synthetic oligonucleotide
  Sense strand starting at position 728 of SEQ ID NO: 2372
cgacgaaucgaccauuauc

SEQ ID NO: 184149 - RNA, 19 nt, Artificial Sequence
  Description of Artificial Sequence: Synthetic oligonucleotide
  Antisense strand to SEQ ID NO: 184148
gauaauggucgauucgucg

SEQ ID NO: 184150 - RNA, 19 nt, Artificial Sequence
  Description of Artificial Sequence: Synthetic oligonucleotide
  Sense strand starting at position 709 of SEQ ID NO: 2372
ucaacuuucgcagaaagca

SEQ ID NO: 184151 - RNA, 19 nt, Artificial Sequence
  Description of Artificial Sequence: Synthetic oligonucleotide
  Antisense strand to SEQ ID NO: 184150
ugcuuucugcgaaaguuga

SEQ ID NO: 184152 - RNA, 19 nt, Artificial Sequence
  Description of Artificial Sequence: Synthetic oligonucleotide
  Sense strand starting at position 590 of SEQ ID NO: 2372
agcucacaccgagaaugua

SEQ ID NO: 184153 - RNA, 19 nt, Artificial Sequence
  Description of Artificial Sequence: Synthetic oligonucleotide
  Antisense strand to SEQ ID NO: 184152
uacauucucggugugagcu

SEQ ID NO: 184154 - RNA, 19 nt, Artificial Sequence
  Description of Artificial Sequence: Synthetic oligonucleotide
  Sense strand starting at position 539 of SEQ ID NO: 2372
gcggaucgucagcuuaauc

SEQ ID NO: 184155 - RNA, 19 nt, Artificial Sequence
  Description of Artificial Sequence: Synthetic oligonucleotide
  Antisense strand to SEQ ID NO: 184154
gauuaagcugacgauccgc

SEQ ID NO: 184156 - RNA, 19 nt, Artificial Sequence
  Description of Artificial Sequence: Synthetic oligonucleotide
  Sense strand starting at position 520 of SEQ ID NO: 2372
ugauuaggcaggugaaaua

SEQ ID NO: 184157 - RNA, 19 nt, Artificial Sequence
  Description of Artificial Sequence: Synthetic oligonucleotide
  Antisense strand to SEQ ID NO: 184156
uauuucaccugccuaauca

SEQ ID NO: 184158 - RNA, 19 nt, Artificial Sequence
  Description of Artificial Sequence: Synthetic oligonucleotide
  Sense strand starting at position 518 of SEQ ID NO: 2372
aaugauuaggcaggugaaa

SEQ ID NO: 184159 - RNA, 19 nt, Artificial Sequence
  Description of Artificial Sequence: Synthetic oligonucleotide
  Antisense strand to SEQ ID NO: 184158
uuucaccugccuaaucauu

SEQ ID NO: 184160 - RNA, 19 nt, Artificial Sequence
  Description of Artificial Sequence: Synthetic oligonucleotide
  Sense strand starting at position 448 of SEQ ID NO: 2372
gagccaauuuaauggauga

SEQ ID NO: 184161 - RNA, 19 nt, Artificial Sequence
  Description of Artificial Sequence: Synthetic oligonucleotide
  Antisense strand to SEQ ID NO: 184160
ucauccauuaaauuggcuc

SEQ ID NO: 184162 - RNA, 19 nt, Artificial Sequence
  Description of Artificial Sequence: Synthetic oligonucleotide
  Sense strand starting at position 404 of SEQ ID NO: 2372
gggaucgccaagcauuaau

SEQ ID NO: 184163 - RNA, 19 nt, Artificial Sequence
  Description of Artificial Sequence: Synthetic oligonucleotide
  Antisense strand to SEQ ID NO: 184162
auuaaugcuuggcgauccc

SEQ ID NO: 184164 - RNA, 19 nt, Artificial Sequence
  Description of Artificial Sequence: Synthetic oligonucleotide
  Sense strand starting at position 364 of SEQ ID NO: 2372
cugucuucugaaugauaaa

SEQ ID NO: 184165 - RNA, 19 nt, Artificial Sequence
  Description of Artificial Sequence: Synthetic oligonucleotide
  Antisense strand to SEQ ID NO: 184164
uuuaucauucagaagacag

SEQ ID NO: 184166 - RNA, 19 nt, Artificial Sequence
  Description of Artificial Sequence: Synthetic oligonucleotide
  Sense strand starting at position 286 of SEQ ID NO: 2372
cuggaaagcugauccaucu

SEQ ID NO: 184167 - RNA, 19 nt, Artificial Sequence
  Description of Artificial Sequence: Synthetic oligonucleotide
  Antisense strand to SEQ ID NO: 184166
agauggaucagcuuuccag

SEQ ID NO: 184168 - RNA, 19 nt, Artificial Sequence
  Description of Artificial Sequence: Synthetic oligonucleotide
  Sense strand starting at position 212 of SEQ ID NO: 2372
ggcugacacugaucuagga

SEQ ID NO: 184169 - RNA, 19 nt, Artificial Sequence
  Description of Artificial Sequence: Synthetic oligonucleotide
  Antisense strand to SEQ ID NO: 184168
uccuagaucagugucagcc

SEQ ID NO: 184170 - RNA, 19 nt, Artificial Sequence
  Description of Artificial Sequence: Synthetic oligonucleotide
  Sense strand starting at position 17 of SEQ ID NO: 2372
gaguguaggaguuaauauu

SEQ ID NO: 184171 - RNA, 19 nt, Artificial Sequence
  Description of Artificial Sequence: Synthetic oligonucleotide
  Antisense strand to SEQ ID NO: 184170
aauauuaacuccuacacuc

SEQ ID NO: 184172 - RNA, 19 nt, Artificial Sequence
  Description of Artificial Sequence: Synthetic oligonucleotide
  Sense strand starting at position 5 of SEQ ID NO: 2372
caacauuuguaggagugua

SEQ ID NO: 184173 - RNA, 19 nt, Artificial Sequence
  Description of Artificial Sequence: Synthetic oligonucleotide
  Antisense strand to SEQ ID NO: 184172
uacacuccuacaaauguug

SEQ ID NO: 184174 - RNA, 19 nt, Artificial Sequence
  Description of Artificial Sequence: Synthetic oligonucleotide
  Sense strand starting at position 4 of SEQ ID NO: 2372
gcaacauuuguaggagugu

SEQ ID NO: 184175 - RNA, 19 nt, Artificial Sequence
  Description of Artificial Sequence: Synthetic oligonucleotide
  Antisense strand to SEQ ID NO: 184174
acacuccuacaaauguugc

SEQ ID NO: 184176 - RNA, 19 nt, Artificial Sequence
  Description of Artificial Sequence: Synthetic oligonucleotide
  Sense strand starting at position 3976 of SEQ ID NO: 2374
ggauucuggauguggagau

SEQ ID NO: 184177 - RNA, 19 nt, Artificial Sequence
  Description of Artificial Sequence: Synthetic oligonucleotide
  Antisense strand to SEQ ID NO: 184176
aucuccacauccagaaucc

SEQ ID NO: 184178 - RNA, 19 nt, Artificial Sequence
  Description of Artificial Sequence: Synthetic oligonucleotide
  Sense strand starting at position 3717 of SEQ ID NO: 2374
gaaguucuuccuuaaggcu

SEQ ID NO: 184179 - RNA, 19 nt, Artificial Sequence
  Description of Artificial Sequence: Synthetic oligonucleotide
  Antisense strand to SEQ ID NO: 184178
agccuuaaggaagaacuuc

SEQ ID NO: 184180 - RNA, 19 nt, Artificial Sequence
  Description of Artificial Sequence: Synthetic oligonucleotide
  Sense strand starting at position 3713 of SEQ ID NO: 2374
ccacgaaguucuuccuuaa

SEQ ID NO: 184181 - RNA, 19 nt, Artificial Sequence
  Description of Artificial Sequence: Synthetic oligonucleotide
  Antisense strand to SEQ ID NO: 184180
uuaaggaagaacuucgugg

SEQ ID NO: 184182 - RNA, 19 nt, Artificial Sequence
  Description of Artificial Sequence: Synthetic oligonucleotide
  Sense strand starting at position 3623 of SEQ ID NO: 2374
gugccauggugauuuacac

SEQ ID NO: 184183 - RNA, 19 nt, Artificial Sequence
  Description of Artificial Sequence: Synthetic oligonucleotide
  Antisense strand to SEQ ID NO: 184182
guguaaaucaccauggcac

SEQ ID NO: 184184 - RNA, 19 nt, Artificial Sequence
  Description of Artificial Sequence: Synthetic oligonucleotide
  Sense strand starting at position 3464 of SEQ ID NO: 2374
uuugcuuaggcucagcaaa

SEQ ID NO: 184185 - RNA, 19 nt, Artificial Sequence
  Description of Artificial Sequence: Synthetic oligonucleotide
  Antisense strand to SEQ ID NO: 184184
uuugcugagccuaagcaaa

SEQ ID NO: 184186 - RNA, 19 nt, Artificial Sequence
  Description of Artificial Sequence: Synthetic oligonucleotide
  Sense strand starting at position 3422 of SEQ ID NO: 2374
gacuacuagugaucagaau

SEQ ID NO: 184187 - RNA, 19 nt, Artificial Sequence
  Description of Artificial Sequence: Synthetic oligonucleotide
  Antisense strand to SEQ ID NO: 184186
auucugaucacuaguaguc

SEQ ID NO: 184188 - RNA, 19 nt, Artificial Sequence
  Description of Artificial Sequence: Synthetic oligonucleotide
  Sense strand starting at position 3416 of SEQ ID NO: 2374
uaggaagacuacuagugau

SEQ ID NO: 184189 - RNA, 19 nt, Artificial Sequence
  Description of Artificial Sequence: Synthetic oligonucleotide
  Antisense strand to SEQ ID NO: 184188
aucacuaguagucuuccua

SEQ ID NO: 184190 - RNA, 19 nt, Artificial Sequence
  Description of Artificial Sequence: Synthetic oligonucleotide
  Sense strand starting at position 3376 of SEQ ID NO: 2374
ugcaaaguuuaccauaaag

SEQ ID NO: 184191 - RNA, 19 nt, Artificial Sequence
  Description of Artificial Sequence: Synthetic oligonucleotide
  Antisense strand to SEQ ID NO: 184190
cuuuaugguaaacuuugca

SEQ ID NO: 184192 - RNA, 19 nt, Artificial Sequence
  Description of Artificial Sequence: Synthetic oligonucleotide
  Sense strand starting at position 3366 of SEQ ID NO: 2374
gguguugacaugcaaaguu

SEQ ID NO: 184193 - RNA, 19 nt, Artificial Sequence
  Description of Artificial Sequence: Synthetic oligonucleotide
  Antisense strand to SEQ ID NO: 184192
aacuuugcaugucaacacc

SEQ ID NO: 184194 - RNA, 19 nt, Artificial Sequence
  Description of Artificial Sequence: Synthetic oligonucleotide
  Sense strand starting at position 3152 of SEQ ID NO: 2374
aagggacaucacuguuauu

SEQ ID NO: 184195 - RNA, 19 nt, Artificial Sequence
  Description of Artificial Sequence: Synthetic oligonucleotide
  Antisense strand to SEQ ID NO: 184194
aauaacagugaugucccuu

SEQ ID NO: 184196 - RNA, 19 nt, Artificial Sequence
  Description of Artificial Sequence: Synthetic oligonucleotide
  Sense strand starting at position 3095 of SEQ ID NO: 2374
ugcuucuuguuccauuaga

SEQ ID NO: 184197 - RNA, 19 nt, Artificial Sequence
  Description of Artificial Sequence: Synthetic oligonucleotide
  Antisense strand to SEQ ID NO: 184196
ucuaauggaacaagaagca

SEQ ID NO: 184198 - RNA, 19 nt, Artificial Sequence
  Description of Artificial Sequence: Synthetic oligonucleotide
  Sense strand starting at position 3076 of SEQ ID NO: 2374
ugagauuacuaccagucaa

SEQ ID NO: 184199 - RNA, 19 nt, Artificial Sequence
  Description of Artificial Sequence: Synthetic oligonucleotide
  Antisense strand to SEQ ID NO: 184198
uugacugguaguaaucuca

SEQ ID NO: 184200 - RNA, 19 nt, Artificial Sequence
  Description of Artificial Sequence: Synthetic oligonucleotide
  Sense strand starting at position 3073 of SEQ ID NO: 2374
cugugagauuacuaccagu

SEQ ID NO: 184201 - RNA, 19 nt, Artificial Sequence
  Description of Artificial Sequence: Synthetic oligonucleotide
  Antisense strand to SEQ ID NO: 184200
acugguaguaaucucacag

SEQ ID NO: 184202 - RNA, 19 nt, Artificial Sequence
  Description of Artificial Sequence: Synthetic oligonucleotide
  Sense strand starting at position 2314 of SEQ ID NO: 2374
uggagaagcaucuagcacu

SEQ ID NO: 184203 - RNA, 19 nt, Artificial Sequence
  Description of Artificial Sequence: Synthetic oligonucleotide
  Antisense strand to SEQ ID NO: 184202
agugcuagaugcuucucca

SEQ ID NO: 184204 - RNA, 19 nt, Artificial Sequence
  Description of Artificial Sequence: Synthetic oligonucleotide
  Sense strand starting at position 2231 of SEQ ID NO: 2374
cgaggcuuacagcacagau

SEQ ID NO: 184205 - RNA, 19 nt, Artificial Sequence
  Description of Artificial Sequence: Synthetic oligonucleotide
  Antisense strand to SEQ ID NO: 184204
aucugugcuguaagccucg

SEQ ID NO: 184206 - RNA, 19 nt, Artificial Sequence
  Description of Artificial Sequence: Synthetic oligonucleotide
  Sense strand starting at position 2208 of SEQ ID NO: 2374
aucugacagucguaguaug

SEQ ID NO: 184207 - RNA, 19 nt, Artificial Sequence
  Description of Artificial Sequence: Synthetic oligonucleotide
  Antisense strand to SEQ ID NO: 184206
cauacuacgacugucagau

SEQ ID NO: 184208 - RNA, 19 nt, Artificial Sequence
  Description of Artificial Sequence: Synthetic oligonucleotide
  Sense strand starting at position 2206 of SEQ ID NO: 2374
agaucugacagucguagua

SEQ ID NO: 184209 - RNA, 19 nt, Artificial Sequence
  Description of Artificial Sequence: Synthetic oligonucleotide
  Antisense strand to SEQ ID NO: 184208
uacuacgacugucagaucu

SEQ ID NO: 184210 - RNA, 19 nt, Artificial Sequence
  Description of Artificial Sequence: Synthetic oligonucleotide
  Sense strand starting at position 2185 of SEQ ID NO: 2374
uccuauagcccauagggau

SEQ ID NO: 184211 - RNA, 19 nt, Artificial Sequence
  Description of Artificial Sequence: Synthetic oligonucleotide
  Antisense strand to SEQ ID NO: 184210
aucccuaugggcuauagga

SEQ ID NO: 184212 - RNA, 19 nt, Artificial Sequence
  Description of Artificial Sequence: Synthetic oligonucleotide
  Sense strand starting at position 2149 of SEQ ID NO: 2374
aagcaagucccugagguau

SEQ ID NO: 184213 - RNA, 19 nt, Artificial Sequence
  Description of Artificial Sequence: Synthetic oligonucleotide
  Antisense strand to SEQ ID NO: 184212
auaccucagggacuugcuu

SEQ ID NO: 184214 - RNA, 19 nt, Artificial Sequence
  Description of Artificial Sequence: Synthetic oligonucleotide
  Sense strand starting at position 2148 of SEQ ID NO: 2374
aaagcaagucccugaggua

SEQ ID NO: 184215 - RNA, 19 nt, Artificial Sequence
  Description of Artificial Sequence: Synthetic oligonucleotide
  Antisense strand to SEQ ID NO: 184214
uaccucagggacuugcuuu

SEQ ID NO: 184216 - RNA, 19 nt, Artificial Sequence
  Description of Artificial Sequence: Synthetic oligonucleotide
  Sense strand starting at position 2125 of SEQ ID NO: 2374
agaggucuuuaauccauga

SEQ ID NO: 184217 - RNA, 19 nt, Artificial Sequence
  Description of Artificial Sequence: Synthetic oligonucleotide
  Antisense strand to SEQ ID NO: 184216
ucauggauuaaagaccucu

SEQ ID NO: 184218 - RNA, 19 nt, Artificial Sequence
  Description of Artificial Sequence: Synthetic oligonucleotide
  Sense strand starting at position 1415 of SEQ ID NO: 2374
agacuauaugggugacuua

SEQ ID NO: 184219 - RNA, 19 nt, Artificial Sequence
  Description of Artificial Sequence: Synthetic oligonucleotide
  Antisense strand to SEQ ID NO: 184218
uaagucacccauauagucu

SEQ ID NO: 184220 - RNA, 19 nt, Artificial Sequence
  Description of Artificial Sequence: Synthetic oligonucleotide
  Sense strand starting at position 1327 of SEQ ID NO: 2374
gccaaaugguaguguagau

SEQ ID NO: 184221 - RNA, 19 nt, Artificial Sequence
  Description of Artificial Sequence: Synthetic oligonucleotide
  Antisense strand to SEQ ID NO: 184220
aucuacacuaccauuuggc

SEQ ID NO: 184222 - RNA, 19 nt, Artificial Sequence
  Description of Artificial Sequence: Synthetic oligonucleotide
  Sense strand starting at position 1276 of SEQ ID NO: 2374
cccauacccggcuaguaaa

SEQ ID NO: 184223 - RNA, 19 nt, Artificial Sequence
  Description of Artificial Sequence: Synthetic oligonucleotide
  Antisense strand to SEQ ID NO: 184222
uuuacuagccggguauggg

SEQ ID NO: 184224 - RNA, 19 nt, Artificial Sequence
  Description of Artificial Sequence: Synthetic oligonucleotide
  Sense strand starting at position 1248 of SEQ ID NO: 2374
cuaucucggcucuaacgua

SEQ ID NO: 184225 - RNA, 19 nt, Artificial Sequence
  Description of Artificial Sequence: Synthetic oligonucleotide
  Antisense strand to SEQ ID NO: 184224
uacguuagagccgagauag

SEQ ID NO: 184226 - RNA, 19 nt, Artificial Sequence
  Description of Artificial Sequence: Synthetic oligonucleotide
  Sense strand starting at position 1244 of SEQ ID NO: 2374
acuccuaucucggcucuaa

SEQ ID NO: 184227 - RNA, 19 nt, Artificial Sequence
  Description of Artificial Sequence: Synthetic oligonucleotide
  Antisense strand to SEQ ID NO: 184226
uuagagccgagauaggagu

SEQ ID NO: 184228 - RNA, 19 nt, Artificial Sequence
  Description of Artificial Sequence: Synthetic oligonucleotide
  Sense strand starting at position 1132 of SEQ ID NO: 2374
aguaucuauuggguaaaca

SEQ ID NO: 184229 - RNA, 19 nt, Artificial Sequence
  Description of Artificial Sequence: Synthetic oligonucleotide
  Antisense strand to SEQ ID NO: 184228
uguuuacccaauagauacu

SEQ ID NO: 184230 - RNA, 19 nt, Artificial Sequence
  Description of Artificial Sequence: Synthetic oligonucleotide
  Sense strand starting at position 1131 of SEQ ID NO: 2374
uaguaucuauuggguaaac

SEQ ID NO: 184231 - RNA, 19 nt, Artificial Sequence
  Description of Artificial Sequence: Synthetic oligonucleotide
  Antisense strand to SEQ ID NO: 184230
guuuacccaauagauacua

SEQ ID NO: 184232 - RNA, 19 nt, Artificial Sequence
  Description of Artificial Sequence: Synthetic oligonucleotide
  Sense strand starting at position 1129 of SEQ ID NO: 2374
cuuaguaucuauuggguaa

SEQ ID NO: 184233 - RNA, 19 nt, Artificial Sequence
  Description of Artificial Sequence: Synthetic oligonucleotide
  Antisense strand to SEQ ID NO: 184232
uuacccaauagauacuaag

SEQ ID NO: 184234 - RNA, 19 nt, Artificial Sequence
  Description of Artificial Sequence: Synthetic oligonucleotide
  Sense strand starting at position 1106 of SEQ ID NO: 2374
ucguguuugguacaaagua

SEQ ID NO: 184235 - RNA, 19 nt, Artificial Sequence
  Description of Artificial Sequence: Synthetic oligonucleotide
  Antisense strand to SEQ ID NO: 184234
uacuuuguaccaaacacga

SEQ ID NO: 184236 - RNA, 19 nt, Artificial Sequence
  Description of Artificial Sequence: Synthetic oligonucleotide
  Sense strand starting at position 1104 of SEQ ID NO: 2374
caucguguuugguacaaag

SEQ ID NO: 184237 - RNA, 19 nt, Artificial Sequence
  Description of Artificial Sequence: Synthetic oligonucleotide
  Antisense strand to SEQ ID NO: 184236
cuuuguaccaaacacgaug

SEQ ID NO: 184238 - RNA, 19 nt, Artificial Sequence
  Description of Artificial Sequence: Synthetic oligonucleotide
  Sense strand starting at position 1101 of SEQ ID NO: 2374
uggcaucguguuugguaca

SEQ ID NO: 184239 - RNA, 19 nt, Artificial Sequence
  Description of Artificial Sequence: Synthetic oligonucleotide
  Antisense strand to SEQ ID NO: 184238
uguaccaaacacgaugcca

SEQ ID NO: 184240 - RNA, 19 nt, Artificial Sequence
  Description of Artificial Sequence: Synthetic oligonucleotide
  Sense strand starting at position 1099 of SEQ ID NO: 2374
ccuggcaucguguuuggua

SEQ ID NO: 184241 - RNA, 19 nt, Artificial Sequence
  Description of Artificial Sequence: Synthetic oligonucleotide
  Antisense strand to SEQ ID NO: 184240
uaccaaacacgaugccagg

SEQ ID NO: 184242 - RNA, 19 nt, Artificial Sequence
  Description of Artificial Sequence: Synthetic oligonucleotide
  Sense strand starting at position 862 of SEQ ID NO: 2374
gugucagcauuugaauaug

SEQ ID NO: 184243 - RNA, 19 nt, Artificial Sequence
  Description of Artificial Sequence: Synthetic oligonucleotide
  Antisense strand to SEQ ID NO: 184242
cauauucaaaugcugacac

SEQ ID NO: 184244 - RNA, 19 nt, Artificial Sequence
  Description of Artificial Sequence: Synthetic oligonucleotide
  Sense strand starting at position 854 of SEQ ID NO: 2374
agaagagagugucagcauu

SEQ ID NO: 184245 - RNA, 19 nt, Artificial Sequence
  Description of Artificial Sequence: Synthetic oligonucleotide
  Antisense strand to SEQ ID NO: 184244
aaugcugacacucucuucu

SEQ ID NO: 184246 - RNA, 19 nt, Artificial Sequence
  Description of Artificial Sequence: Synthetic oligonucleotide
  Sense strand starting at position 221 of SEQ ID NO: 2374
ucaccaucuugucaucaga

SEQ ID NO: 184247 - RNA, 19 nt, Artificial Sequence
  Description of Artificial Sequence: Synthetic oligonucleotide
  Antisense strand to SEQ ID NO: 184246
ucugaugacaagaugguga

SEQ ID NO: 184248 - RNA, 19 nt, Artificial Sequence
  Description of Artificial Sequence: Synthetic oligonucleotide
  Sense strand starting at position 193 of SEQ ID NO: 2374
gcaugaaggccaugugugu

SEQ ID NO: 184249 - RNA, 19 nt, Artificial Sequence
  Description of Artificial Sequence: Synthetic oligonucleotide
  Antisense strand to SEQ ID NO: 184248
acacacauggccuucaugc

SEQ ID NO: 184250 - RNA, 19 nt, Artificial Sequence
  Description of Artificial Sequence: Synthetic oligonucleotide
  Sense strand starting at position 99 of SEQ ID NO: 2374
uccaaacugcuguaaugaa

SEQ ID NO: 184251 - RNA, 19 nt, Artificial Sequence
  Description of Artificial Sequence: Synthetic oligonucleotide
  Antisense strand to SEQ ID NO: 184250
uucauuacagcaguuugga

SEQ ID NO: 184252 - RNA, 19 nt, Artificial Sequence
  Description of Artificial Sequence: Synthetic oligonucleotide
  Sense strand starting at position 97 of SEQ ID NO: 2374
uguccaaacugcuguaaug

SEQ ID NO: 184253 - RNA, 19 nt, Artificial Sequence
  Description of Artificial Sequence: Synthetic oligonucleotide
  Antisense strand to SEQ ID NO: 184252
cauuacagcaguuuggaca

SEQ ID NO: 184254 - RNA, 19 nt, Artificial Sequence
  Description of Artificial Sequence: Synthetic oligonucleotide
  Sense strand starting at position 28 of SEQ ID NO: 2374
gcugaagagucaccaacaa

SEQ ID NO: 184255 - RNA, 19 nt, Artificial Sequence
  Description of Artificial Sequence: Synthetic oligonucleotide
  Antisense strand to SEQ ID NO: 184254
uuguuggugacucuucagc

SEQ ID NO: 184256 - RNA, 19 nt, Artificial Sequence
  Description of Artificial Sequence: Synthetic oligonucleotide
  Sense strand starting at position 117 of SEQ ID NO: 2375
auauaacacugcucaggaa

SEQ ID NO: 184257 - RNA, 19 nt, Artificial Sequence
  Description of Artificial Sequence: Synthetic oligonucleotide
  Antisense strand to SEQ ID NO: 184256
uuccugagcaguguuauau

SEQ ID NO: 184258 - RNA, 19 nt, Artificial Sequence
  Description of Artificial Sequence: Synthetic oligonucleotide
  Sense strand starting at position 222 of SEQ ID NO: 2375
ccaauaauuugagaucugu

SEQ ID NO: 184259 - RNA, 19 nt, Artificial Sequence
  Description of Artificial Sequence: Synthetic oligonucleotide
  Antisense strand to SEQ ID NO: 184258
acagaucucaaauuauugg

SEQ ID NO: 184260 - RNA, 19 nt, Artificial Sequence
  Description of Artificial Sequence: Synthetic oligonucleotide
  Sense strand starting at position 323 of SEQ ID NO: 2375
gcuacuauguuucugcaaa

SEQ ID NO: 184261 - RNA, 19 nt, Artificial Sequence
  Description of Artificial Sequence: Synthetic oligonucleotide
  Antisense strand to SEQ ID NO: 184260
uuugcagaaacauaguagc

SEQ ID NO: 184262 - RNA, 19 nt, Artificial Sequence
  Description of Artificial Sequence: Synthetic oligonucleotide
  Sense strand starting at position 324 of SEQ ID NO: 2375
cuacuauguuucugcaaag

SEQ ID NO: 184263 - RNA, 19 nt, Artificial Sequence
  Description of Artificial Sequence: Synthetic oligonucleotide
  Antisense strand to SEQ ID NO: 184262
cuuugcagaaacauaguag

SEQ ID NO: 184264 - RNA, 19 nt, Artificial Sequence
  Description of Artificial Sequence: Synthetic oligonucleotide
  Sense strand starting at position 467 of SEQ ID NO: 2375
acuugaggucucugaucaa

SEQ ID NO: 184265 - RNA, 19 nt, Artificial Sequence
  Description of Artificial Sequence: Synthetic oligonucleotide
  Antisense strand to SEQ ID NO: 184264
uugaucagagaccucaagu

SEQ ID NO: 184266 - RNA, 19 nt, Artificial Sequence
  Description of Artificial Sequence: Synthetic oligonucleotide
  Sense strand starting at position 486 of SEQ ID NO: 2375
agccauuagccucaagacu

SEQ ID NO: 184267 - RNA, 19 nt, Artificial Sequence
  Description of Artificial Sequence: Synthetic oligonucleotide
  Antisense strand to SEQ ID NO: 184266
agucuugaggcuaauggcu

SEQ ID NO: 184268 - RNA, 19 nt, Artificial Sequence
  Description of Artificial Sequence: Synthetic oligonucleotide
  Sense strand starting at position 609 of SEQ ID NO: 2375
gaccuuaucgaugaccagu

SEQ ID NO: 184269 - RNA, 19 nt, Artificial Sequence
  Description of Artificial Sequence: Synthetic oligonucleotide
  Antisense strand to SEQ ID NO: 184268
acuggucaucgauaagguc

SEQ ID NO: 184270 - RNA, 19 nt, Artificial Sequence
  Description of Artificial Sequence: Synthetic oligonucleotide
  Sense strand starting at position 894 of SEQ ID NO: 2375
cugugauccugucaaagac

SEQ ID NO: 184271 - RNA, 19 nt, Artificial Sequence
  Description of Artificial Sequence: Synthetic oligonucleotide
  Antisense strand to SEQ ID NO: 184270
gucuuugacaggaucacag

SEQ ID NO: 184272 - RNA, 19 nt, Artificial Sequence
  Description of Artificial Sequence: Synthetic oligonucleotide
  Sense strand starting at position 977 of SEQ ID NO: 2375
acugaaaccucgugccaca

SEQ ID NO: 184273 - RNA, 19 nt, Artificial Sequence
  Description of Artificial Sequence: Synthetic oligonucleotide
  Antisense strand to SEQ ID NO: 184272
uguggcacgagguuucagu

SEQ ID NO: 184274 - RNA, 19 nt, Artificial Sequence
  Description of Artificial Sequence: Synthetic oligonucleotide
  Sense strand starting at position 1060 of SEQ ID NO: 2375
ccacuauaugcucaagugu

SEQ ID NO: 184275 - RNA, 19 nt, Artificial Sequence
  Description of Artificial Sequence: Synthetic oligonucleotide
  Antisense strand to SEQ ID NO: 184274
acacuugagcauauagugg

SEQ ID NO: 184276 - RNA, 19 nt, Artificial Sequence
  Description of Artificial Sequence: Synthetic oligonucleotide
  Sense strand starting at position 1083 of SEQ ID NO: 2375
ccucccaucucggaugaua

SEQ ID NO: 184277 - RNA, 19 nt, Artificial Sequence
  Description of Artificial Sequence: Synthetic oligonucleotide
  Antisense strand to SEQ ID NO: 184276
uaucauccgagaugggagg

SEQ ID NO: 184278 - RNA, 19 nt, Artificial Sequence
  Description of Artificial Sequence: Synthetic oligonucleotide
  Sense strand starting at position 1630 of SEQ ID NO: 2375
gugccacggccucguuaau

SEQ ID NO: 184279 - RNA, 19 nt, Artificial Sequence
  Description of Artificial Sequence: Synthetic oligonucleotide
  Antisense strand to SEQ ID NO: 184278
auuaacgaggccguggcac

SEQ ID NO: 184280 - RNA, 19 nt, Artificial Sequence
  Description of Artificial Sequence: Synthetic oligonucleotide
  Sense strand starting at position 1 of SEQ ID NO: 2376
guguaagugaaaggucaca

SEQ ID NO: 184281 - RNA, 19 nt, Artificial Sequence
  Description of Artificial Sequence: Synthetic oligonucleotide
  Antisense strand to SEQ ID NO: 184280
ugugaccuuucacuuacac

SEQ ID NO: 184282 - RNA, 19 nt, Artificial Sequence
  Description of Artificial Sequence: Synthetic oligonucleotide
  Sense strand starting at position 111 of SEQ ID NO: 2376
gucauuaaacugcaguuau

SEQ ID NO: 184283 - RNA, 19 nt, Artificial Sequence
  Description of Artificial Sequence: Synthetic oligonucleotide
  Antisense strand to SEQ ID NO: 184282
auaacugcaguuuaaugac

SEQ ID NO: 184284 - RNA, 19 nt, Artificial Sequence
  Description of Artificial Sequence: Synthetic oligonucleotide
  Sense strand starting at position 142 of SEQ ID NO: 2376
gcuuacuguuaaguuauaa

SEQ ID NO: 184285 - RNA, 19 nt, Artificial Sequence
  Description of Artificial Sequence: Synthetic oligonucleotide
  Antisense strand to SEQ ID NO: 184284
uuauaacuuaacaguaagc

SEQ ID NO: 184286 - RNA, 19 nt, Artificial Sequence
  Description of Artificial Sequence: Synthetic oligonucleotide
  Sense strand starting at position 642 of SEQ ID NO: 2376
ccuagcauuguguaacuau

SEQ ID NO: 184287 - RNA, 19 nt, Artificial Sequence
  Description of Artificial Sequence: Synthetic oligonucleotide
  Antisense strand to SEQ ID NO: 184286
auaguuacacaaugcuagg

SEQ ID NO: 184288 - RNA, 19 nt, Artificial Sequence
  Description of Artificial Sequence: Synthetic oligonucleotide
  Sense strand starting at position 682 of SEQ ID NO: 2376
cuagcauugucuuuaagau

SEQ ID NO: 184289 - RNA, 19 nt, Artificial Sequence
  Description of Artificial Sequence: Synthetic oligonucleotide
  Antisense strand to SEQ ID NO: 184288
aucuuaaagacaaugcuag

SEQ ID NO: 184290 - RNA, 19 nt, Artificial Sequence
  Description of Artificial Sequence: Synthetic oligonucleotide
  Sense strand starting at position 764 of SEQ ID NO: 2376
ucaaauagccuaugacgau

SEQ ID NO: 184291 - RNA, 19 nt, Artificial Sequence
  Description of Artificial Sequence: Synthetic oligonucleotide
  Antisense strand to SEQ ID NO: 184290
aucgucauaggcuauuuga

SEQ ID NO: 184292 - RNA, 19 nt, Artificial Sequence
  Description of Artificial Sequence: Synthetic oligonucleotide
  Sense strand starting at position 780 of SEQ ID NO: 2376
gauaaugugacuuggucag

SEQ ID NO: 184293 - RNA, 19 nt, Artificial Sequence
  Description of Artificial Sequence: Synthetic oligonucleotide
  Antisense strand to SEQ ID NO: 184292
cugaccaagucacauuauc

SEQ ID NO: 184294 - RNA, 19 nt, Artificial Sequence
  Description of Artificial Sequence: Synthetic oligonucleotide
  Sense strand starting at position 935 of SEQ ID NO: 2376
ccuagagaucguuacggua

SEQ ID NO: 184295 - RNA, 19 nt, Artificial Sequence
  Description of Artificial Sequence: Synthetic oligonucleotide
  Antisense strand to SEQ ID NO: 184294
uaccguaacgaucucuagg

SEQ ID NO: 184296 - RNA, 19 nt, Artificial Sequence
  Description of Artificial Sequence: Synthetic oligonucleotide
  Sense strand starting at position 1018 of SEQ ID NO: 2376
gccuaauacugauucuaug

SEQ ID NO: 184297 - RNA, 19 nt, Artificial Sequence
  Description of Artificial Sequence: Synthetic oligonucleotide
  Antisense strand to SEQ ID NO: 184296
cauagaaucaguauuaggc

SEQ ID NO: 184298 - RNA, 19 nt, Artificial Sequence
  Description of Artificial Sequence: Synthetic oligonucleotide
  Sense strand starting at position 1038 of SEQ ID NO: 2376
gaauguaaacuccaacggu

SEQ ID NO: 184299 - RNA, 19 nt, Artificial Sequence
  Description of Artificial Sequence: Synthetic oligonucleotide
  Antisense strand to SEQ ID NO: 184298
accguuggaguuuacauuc

SEQ ID NO: 184300 - RNA, 19 nt, Artificial Sequence
  Description of Artificial Sequence: Synthetic oligonucleotide
  Sense strand starting at position 1051 of SEQ ID NO: 2376
aacgguacuugagugcaaa

SEQ ID NO: 184301 - RNA, 19 nt, Artificial Sequence
  Description of Artificial Sequence: Synthetic oligonucleotide
  Antisense strand to SEQ ID NO: 184300
uuugcacucaaguaccguu

SEQ ID NO: 184302 - RNA, 19 nt, Artificial Sequence
  Description of Artificial Sequence: Synthetic oligonucleotide
  Sense strand starting at position 1089 of SEQ ID NO: 2376
cguccaagagcucaacgua

SEQ ID NO: 184303 - RNA, 19 nt, Artificial Sequence
  Description of Artificial Sequence: Synthetic oligonucleotide
  Antisense strand to SEQ ID NO: 184302
uacguugagcucuuggacg

SEQ ID NO: 184304 - RNA, 19 nt, Artificial Sequence
  Description of Artificial Sequence: Synthetic oligonucleotide
  Sense strand starting at position 1230 of SEQ ID NO: 2376
gguaaccucucagucaaga

SEQ ID NO: 184305 - RNA, 19 nt, Artificial Sequence
  Description of Artificial Sequence: Synthetic oligonucleotide
  Antisense strand to SEQ ID NO: 184304
ucuugacugagagguuacc

SEQ ID NO: 184306 - RNA, 19 nt, Artificial Sequence
  Description of Artificial Sequence: Synthetic oligonucleotide
  Sense strand starting at position 1246 of SEQ ID NO: 2376
agaucaaacauuggucgaa

SEQ ID NO: 184307 - RNA, 19 nt, Artificial Sequence
  Description of Artificial Sequence: Synthetic oligonucleotide
  Antisense strand to SEQ ID NO: 184306
uucgaccaauguuugaucu

SEQ ID NO: 184308 - RNA, 19 nt, Artificial Sequence
  Description of Artificial Sequence: Synthetic oligonucleotide
  Sense strand starting at position 1248 of SEQ ID NO: 2376
aucaaacauuggucgaaga

SEQ ID NO: 184309 - RNA, 19 nt, Artificial Sequence
  Description of Artificial Sequence: Synthetic oligonucleotide
  Antisense strand to SEQ ID NO: 184308
ucuucgaccaauguuugau

SEQ ID NO: 184310 - RNA, 19 nt, Artificial Sequence
  Description of Artificial Sequence: Synthetic oligonucleotide
  Sense strand starting at position 1249 of SEQ ID NO: 2376
ucaaacauuggucgaagaa

SEQ ID NO: 184311 - RNA, 19 nt, Artificial Sequence
  Description of Artificial Sequence: Synthetic oligonucleotide
  Antisense strand to SEQ ID NO: 184310
uucuucgaccaauguuuga

SEQ ID NO: 184312 - RNA, 19 nt, Artificial Sequence
  Description of Artificial Sequence: Synthetic oligonucleotide
  Sense strand starting at position 1499 of SEQ ID NO: 2376
ugaggacccuuccucaaau

SEQ ID NO: 184313 - RNA, 19 nt, Artificial Sequence
  Description of Artificial Sequence: Synthetic oligonucleotide
  Antisense strand to SEQ ID NO: 184312
auuugaggaaggguccuca

SEQ ID NO: 184314 - RNA, 19 nt, Artificial Sequence
  Description of Artificial Sequence: Synthetic oligonucleotide
  Sense strand starting at position 1552 of SEQ ID NO: 2376
cagggcgaccacuagauua

SEQ ID NO: 184315 - RNA, 19 nt, Artificial Sequence
  Description of Artificial Sequence: Synthetic oligonucleotide
  Antisense strand to SEQ ID NO: 184314
uaaucuaguggucgcccug

SEQ ID NO: 184316 - RNA, 19 nt, Artificial Sequence
  Description of Artificial Sequence: Synthetic oligonucleotide
  Sense strand starting at position 1554 of SEQ ID NO: 2376
gggcgaccacuagauuauc

SEQ ID NO: 184317 - RNA, 19 nt, Artificial Sequence
  Description of Artificial Sequence: Synthetic oligonucleotide
  Antisense strand to SEQ ID NO: 184316
gauaaucuaguggucgccc

SEQ ID NO: 184318 - RNA, 19 nt, Artificial Sequence
  Description of Artificial Sequence: Synthetic oligonucleotide
  Sense strand starting at position 1563 of SEQ ID NO: 2376
cuagauuaucucugcaacg

SEQ ID NO: 184319 - RNA, 19 nt, Artificial Sequence
  Description of Artificial Sequence: Synthetic oligonucleotide
  Antisense strand to SEQ ID NO: 184318
cguugcagagauaaucuag

SEQ ID NO: 184320 - RNA, 19 nt, Artificial Sequence
  Description of Artificial Sequence: Synthetic oligonucleotide
  Sense strand starting at position 1565 of SEQ ID NO: 2376
agauuaucucugcaacgca

SEQ ID NO: 184321 - RNA, 19 nt, Artificial Sequence
  Description of Artificial Sequence: Synthetic oligonucleotide
  Antisense strand to SEQ ID NO: 184320
ugcguugcagagauaaucu

SEQ ID NO: 184322 - RNA, 19 nt, Artificial Sequence
  Description of Artificial Sequence: Synthetic oligonucleotide
  Sense strand starting at position 2215 of SEQ ID NO: 2376
aggucuugucucgaugcau

SEQ ID NO: 184323 - RNA, 19 nt, Artificial Sequence
  Description of Artificial Sequence: Synthetic oligonucleotide
  Antisense strand to SEQ ID NO: 184322
augcaucgagacaagaccu

SEQ ID NO: 184324 - RNA, 19 nt, Artificial Sequence
  Description of Artificial Sequence: Synthetic oligonucleotide
  Sense strand starting at position 2274 of SEQ ID NO: 2376
guuuccaaacuugagcaaa

SEQ ID NO: 184325 - RNA, 19 nt, Artificial Sequence
  Description of Artificial Sequence: Synthetic oligonucleotide
  Antisense strand to SEQ ID NO: 184324
uuugcucaaguuuggaaac

SEQ ID NO: 184326 - RNA, 19 nt, Artificial Sequence
  Description of Artificial Sequence: Synthetic oligonucleotide
  Sense strand starting at position 2276 of SEQ ID NO: 2376
uuccaaacuugagcaaaga

SEQ ID NO: 184327 - RNA, 19 nt, Artificial Sequence
  Description of Artificial Sequence: Synthetic oligonucleotide
  Antisense strand to SEQ ID NO: 184326
ucuuugcucaaguuuggaa

SEQ ID NO: 184328 - RNA, 19 nt, Artificial Sequence
  Description of Artificial Sequence: Synthetic oligonucleotide
  Sense strand starting at position 2496 of SEQ ID NO: 2376
ugcuuaaugccuggagcau

SEQ ID NO: 184329 - RNA, 19 nt, Artificial Sequence
  Description of Artificial Sequence: Synthetic oligonucleotide
  Antisense strand to SEQ ID NO: 184328
augcuccaggcauuaagca

SEQ ID NO: 184330 - RNA, 19 nt, Artificial Sequence
  Description of Artificial Sequence: Synthetic oligonucleotide
  Sense strand starting at position 2497 of SEQ ID NO: 2376
gcuuaaugccuggagcaug

SEQ ID NO: 184331 - RNA, 19 nt, Artificial Sequence
  Description of Artificial Sequence: Synthetic oligonucleotide
  Antisense strand to SEQ ID NO: 184330
caugcuccaggcauuaagc

SEQ ID NO: 184332 - RNA, 19 nt, Artificial Sequence
  Description of Artificial Sequence: Synthetic oligonucleotide
  Sense strand starting at position 2551 of SEQ ID NO: 2376
aaugcacucgauugagguu

SEQ ID NO: 184333 - RNA, 19 nt, Artificial Sequence
  Description of Artificial Sequence: Synthetic oligonucleotide
  Antisense strand to SEQ ID NO: 184332
aaccucaaucgagugcauu

SEQ ID NO: 184334 - RNA, 19 nt, Artificial Sequence
  Description of Artificial Sequence: Synthetic oligonucleotide
  Sense strand starting at position 2689 of SEQ ID NO: 2376
gcaagaugcucagucucca

SEQ ID NO: 184335 - RNA, 19 nt, Artificial Sequence
  Description of Artificial Sequence: Synthetic oligonucleotide
  Antisense strand to SEQ ID NO: 184334
uggagacugagcaucuugc

SEQ ID NO: 184336 - RNA, 19 nt, Artificial Sequence
  Description of Artificial Sequence: Synthetic oligonucleotide
  Sense strand starting at position 2697 of SEQ ID NO: 2376
cucagucuccauuggaaua

SEQ ID NO: 184337 - RNA, 19 nt, Artificial Sequence
  Description of Artificial Sequence: Synthetic oligonucleotide
  Antisense strand to SEQ ID NO: 184336
uauuccaauggagacugag

SEQ ID NO: 184338 - RNA, 19 nt, Artificial Sequence
  Description of Artificial Sequence: Synthetic oligonucleotide
  Sense strand starting at position 2946 of SEQ ID NO: 2376
aucacuugaguucgagacu

SEQ ID NO: 184339 - RNA, 19 nt, Artificial Sequence
  Description of Artificial Sequence: Synthetic oligonucleotide
  Antisense strand to SEQ ID NO: 184338
agucucgaacucaagugau

SEQ ID NO: 184340 - RNA, 19 nt, Artificial Sequence
  Description of Artificial Sequence: Synthetic oligonucleotide
  Sense strand starting at position 3146 of SEQ ID NO: 2376
gugagauauucucugggaa

SEQ ID NO: 184341 - RNA, 19 nt, Artificial Sequence
  Description of Artificial Sequence: Synthetic oligonucleotide
  Antisense strand to SEQ ID NO: 184340
uucccagagaauaucucac

SEQ ID NO: 184342 - RNA, 19 nt, Artificial Sequence
  Description of Artificial Sequence: Synthetic oligonucleotide
  Sense strand starting at position 3623 of SEQ ID NO: 2376
ggcucaacuccauauguau

SEQ ID NO: 184343 - RNA, 19 nt, Artificial Sequence
  Description of Artificial Sequence: Synthetic oligonucleotide
  Antisense strand to SEQ ID NO: 184342
auacauauggaguugagcc

SEQ ID NO: 184344 - RNA, 19 nt, Artificial Sequence
  Description of Artificial Sequence: Synthetic oligonucleotide
  Sense strand starting at position 3736 of SEQ ID NO: 2376
gguauucuguucuuacagu

SEQ ID NO: 184345 - RNA, 19 nt, Artificial Sequence
  Description of Artificial Sequence: Synthetic oligonucleotide
  Antisense strand to SEQ ID NO: 184344
acuguaagaacagaauacc

SEQ ID NO: 184346 - RNA, 19 nt, Artificial Sequence
  Description of Artificial Sequence: Synthetic oligonucleotide
  Sense strand starting at position 3742 of SEQ ID NO: 2376
cuguucuuacaguguccua

SEQ ID NO: 184347 - RNA, 19 nt, Artificial Sequence
  Description of Artificial Sequence: Synthetic oligonucleotide
  Antisense strand to SEQ ID NO: 184346
uaggacacuguaagaacag

SEQ ID NO: 184348 - RNA, 19 nt, Artificial Sequence
  Description of Artificial Sequence: Synthetic oligonucleotide
  Sense strand starting at position 3826 of SEQ ID NO: 2376
uuaccuguccuggaggagu

SEQ ID NO: 184349 - RNA, 19 nt, Artificial Sequence
  Description of Artificial Sequence: Synthetic oligonucleotide
  Antisense strand to SEQ ID NO: 184348
acuccuccaggacagguaa

SEQ ID NO: 184350 - RNA, 19 nt, Artificial Sequence
  Description of Artificial Sequence: Synthetic oligonucleotide
  Sense strand starting at position 3837 of SEQ ID NO: 2376
ggaggaguucuagggcagu

SEQ ID NO: 184351 - RNA, 19 nt, Artificial Sequence
  Description of Artificial Sequence: Synthetic oligonucleotide
  Antisense strand to SEQ ID NO: 184350
acugcccuagaacuccucc

SEQ ID NO: 184352 - RNA, 19 nt, Artificial Sequence
  Description of Artificial Sequence: Synthetic oligonucleotide
  Sense strand starting at position 3843 of SEQ ID NO: 2376
guucuagggcagugucaau

SEQ ID NO: 184353 - RNA, 19 nt, Artificial Sequence
  Description of Artificial Sequence: Synthetic oligonucleotide
  Antisense strand to SEQ ID NO: 184352
auugacacugcccuagaac

SEQ ID NO: 184354 - RNA, 19 nt, Artificial Sequence
  Description of Artificial Sequence: Synthetic oligonucleotide
  Sense strand starting at position 3973 of SEQ ID NO: 2376
uugagacuagugcguagau

SEQ ID NO: 184355 - RNA, 19 nt, Artificial Sequence
  Description of Artificial Sequence: Synthetic oligonucleotide
  Antisense strand to SEQ ID NO: 184354
aucuacgcacuagucucaa

SEQ ID NO: 184356 - RNA, 19 nt, Artificial Sequence
  Description of Artificial Sequence: Synthetic oligonucleotide
  Sense strand starting at position 3974 of SEQ ID NO: 2376
ugagacuagugcguagaua

SEQ ID NO: 184357 - RNA, 19 nt, Artificial Sequence
  Description of Artificial Sequence: Synthetic oligonucleotide
  Antisense strand to SEQ ID NO: 184356
uaucuacgcacuagucuca

SEQ ID NO: 184358 - RNA, 19 nt, Artificial Sequence
  Description of Artificial Sequence: Synthetic oligonucleotide
  Sense strand starting at position 3975 of SEQ ID NO: 2376
gagacuagugcguagauaa

SEQ ID NO: 184359 - RNA, 19 nt, Artificial Sequence
  Description of Artificial Sequence: Synthetic oligonucleotide
  Antisense strand to SEQ ID NO: 184358
uuaucuacgcacuagucuc

SEQ ID NO: 184360 - RNA, 19 nt, Artificial Sequence
  Description of Artificial Sequence: Synthetic oligonucleotide
  Sense strand starting at position 547 of SEQ ID NO: 2377
ccagaacuauuaguaguuu

SEQ ID NO: 184361 - RNA, 19 nt, Artificial Sequence
  Description of Artificial Sequence: Synthetic oligonucleotide
  Antisense strand to SEQ ID NO: 184360
aaacuacuaauaguucugg

SEQ ID NO: 184362 - RNA, 19 nt, Artificial Sequence
  Description of Artificial Sequence: Synthetic oligonucleotide
  Sense strand starting at position 573 of SEQ ID NO: 2377
uugguuagucuggaaacua

SEQ ID NO: 184363 - RNA, 19 nt, Artificial Sequence
  Description of Artificial Sequence: Synthetic oligonucleotide
  Antisense strand to SEQ ID NO: 184362
uaguuuccagacuaaccaa

SEQ ID NO: 184364 - RNA, 19 nt, Artificial Sequence
  Description of Artificial Sequence: Synthetic oligonucleotide
  Sense strand starting at position 585 of SEQ ID NO: 2377
gaaacuaauuacguugaga

SEQ ID NO: 184365 - RNA, 19 nt, Artificial Sequence
  Description of Artificial Sequence: Synthetic oligonucleotide
  Antisense strand to SEQ ID NO: 184364
ucucaacguaauuaguuuc

SEQ ID NO: 184366 - RNA, 19 nt, Artificial Sequence
  Description of Artificial Sequence: Synthetic oligonucleotide
  Sense strand starting at position 606 of SEQ ID NO: 2377
cugacugaagcuugauuau

SEQ ID NO: 184367 - RNA, 19 nt, Artificial Sequence
  Description of Artificial Sequence: Synthetic oligonucleotide
  Antisense strand to SEQ ID NO: 184366
auaaucaagcuucagucag

SEQ ID NO: 184368 - RNA, 19 nt, Artificial Sequence
  Description of Artificial Sequence: Synthetic oligonucleotide
  Sense strand starting at position 662 of SEQ ID NO: 2377
cuguuaaagucagauuuac

SEQ ID NO: 184369 - RNA, 19 nt, Artificial Sequence
  Description of Artificial Sequence: Synthetic oligonucleotide
  Antisense strand to SEQ ID NO: 184368
guaaaucugacuuuaacag

SEQ ID NO: 184370 - RNA, 19 nt, Artificial Sequence
  Description of Artificial Sequence: Synthetic oligonucleotide
  Sense strand starting at position 709 of SEQ ID NO: 2377
uggacuuauucguuugcuu

SEQ ID NO: 184371 - RNA, 19 nt, Artificial Sequence
  Description of Artificial Sequence: Synthetic oligonucleotide
  Antisense strand to SEQ ID NO: 184370
aagcaaacgaauaagucca

SEQ ID NO: 184372 - RNA, 19 nt, Artificial Sequence
  Description of Artificial Sequence: Synthetic oligonucleotide
  Sense strand starting at position 711 of SEQ ID NO: 2377
gacuuauucguuugcuuua

SEQ ID NO: 184373 - RNA, 19 nt, Artificial Sequence
  Description of Artificial Sequence: Synthetic oligonucleotide
  Antisense strand to SEQ ID NO: 184372
uaaagcaaacgaauaaguc

SEQ ID NO: 184374 - RNA, 19 nt, Artificial Sequence
  Description of Artificial Sequence: Synthetic oligonucleotide
  Sense strand starting at position 713 of SEQ ID NO: 2377
cuuauucguuugcuuuaua

SEQ ID NO: 184375 - RNA, 19 nt, Artificial Sequence
  Description of Artificial Sequence: Synthetic oligonucleotide
  Antisense strand to SEQ ID NO: 184374
uauaaagcaaacgaauaag

SEQ ID NO: 184376 - RNA, 19 nt, Artificial Sequence
  Description of Artificial Sequence: Synthetic oligonucleotide
  Sense strand starting at position 716 of SEQ ID NO: 2377
auucguuugcuuuauagaa

SEQ ID NO: 184377 - RNA, 19 nt, Artificial Sequence
  Description of Artificial Sequence: Synthetic oligonucleotide
  Antisense strand to SEQ ID NO: 184376
uucuauaaagcaaacgaau

SEQ ID NO: 184378 - RNA, 19 nt, Artificial Sequence
  Description of Artificial Sequence: Synthetic oligonucleotide
  Sense strand starting at position 1063 of SEQ ID NO: 2377
uaaacuugguacucgguaa

SEQ ID NO: 184379 - RNA, 19 nt, Artificial Sequence
  Description of Artificial Sequence: Synthetic oligonucleotide
  Antisense strand to SEQ ID NO: 184378
uuaccgaguaccaaguuua

SEQ ID NO: 184380 - RNA, 19 nt, Artificial Sequence
  Description of Artificial Sequence: Synthetic oligonucleotide
  Sense strand starting at position 1067 of SEQ ID NO: 2377
cuugguacucgguaaacug

SEQ ID NO: 184381 - RNA, 19 nt, Artificial Sequence
  Description of Artificial Sequence: Synthetic oligonucleotide
  Antisense strand to SEQ ID NO: 184380
caguuuaccgaguaccaag

SEQ ID NO: 184382 - RNA, 19 nt, Artificial Sequence
  Description of Artificial Sequence: Synthetic oligonucleotide
  Sense strand starting at position 1128 of SEQ ID NO: 2377
uagauuaacgagugaggga

SEQ ID NO: 184383 - RNA, 19 nt, Artificial Sequence
  Description of Artificial Sequence: Synthetic oligonucleotide
  Antisense strand to SEQ ID NO: 184382
ucccucacucguuaaucua

SEQ ID NO: 184384 - RNA, 19 nt, Artificial Sequence
  Description of Artificial Sequence: Synthetic oligonucleotide
  Sense strand starting at position 1161 of SEQ ID NO: 2377
gcaggguaucgaugacgua

SEQ ID NO: 184385 - RNA, 19 nt, Artificial Sequence
  Description of Artificial Sequence: Synthetic oligonucleotide
  Antisense strand to SEQ ID NO: 184384
uacgucaucgauacccugc

SEQ ID NO: 184386 - RNA, 19 nt, Artificial Sequence
  Description of Artificial Sequence: Synthetic oligonucleotide
  Sense strand starting at position 1259 of SEQ ID NO: 2377
aagauacacugugaugaag

SEQ ID NO: 184387 - RNA, 19 nt, Artificial Sequence
  Description of Artificial Sequence: Synthetic oligonucleotide
  Antisense strand to SEQ ID NO: 184386
cuucaucacaguguaucuu

SEQ ID NO: 184388 - RNA, 19 nt, Artificial Sequence
  Description of Artificial Sequence: Synthetic oligonucleotide
  Sense strand starting at position 1270 of SEQ ID NO: 2377
ugaugaagcucacuuccaa

SEQ ID NO: 184389 - RNA, 19 nt, Artificial Sequence
  Description of Artificial Sequence: Synthetic oligonucleotide
  Antisense strand to SEQ ID NO: 184388
uuggaagugagcuucauca

SEQ ID NO: 184390 - RNA, 19 nt, Artificial Sequence
  Description of Artificial Sequence: Synthetic oligonucleotide
  Sense strand starting at position 1315 of SEQ ID NO: 2377
ccgugcuguggccaagaua

SEQ ID NO: 184391 - RNA, 19 nt, Artificial Sequence
  Description of Artificial Sequence: Synthetic oligonucleotide
  Antisense strand to SEQ ID NO: 184390
uaucuuggccacagcacgg

SEQ ID NO: 184392 - RNA, 19 nt, Artificial Sequence
  Description of Artificial Sequence: Synthetic oligonucleotide
  Sense strand starting at position 1384 of SEQ ID NO: 2377
cgccaucuucuggauggga

SEQ ID NO: 184393 - RNA, 19 nt, Artificial Sequence
  Description of Artificial Sequence: Synthetic oligonucleotide
  Antisense strand to SEQ ID NO: 184392
ucccauccagaagauggcg

SEQ ID NO: 184394 - RNA, 19 nt, Artificial Sequence
  Description of Artificial Sequence: Synthetic oligonucleotide
  Sense strand starting at position 1663 of SEQ ID NO: 2377
ugcgguaagcggucucgau

SEQ ID NO: 184395 - RNA, 19 nt, Artificial Sequence
  Description of Artificial Sequence: Synthetic oligonucleotide
  Antisense strand to SEQ ID NO: 184394
aucgagaccgcuuaccgca

SEQ ID NO: 184396 - RNA, 19 nt, Artificial Sequence
  Description of Artificial Sequence: Synthetic oligonucleotide
  Sense strand starting at position 2305 of SEQ ID NO: 2377
gcgggaccuguuuagagua

SEQ ID NO: 184397 - RNA, 19 nt, Artificial Sequence
  Description of Artificial Sequence: Synthetic oligonucleotide
  Antisense strand to SEQ ID NO: 184396
uacucuaaacaggucccgc

SEQ ID NO: 184398 - RNA, 19 nt, Artificial Sequence
  Description of Artificial Sequence: Synthetic oligonucleotide
  Sense strand starting at position 2352 of SEQ ID NO: 2377
uggcucuuuagagggagau

SEQ ID NO: 184399 - RNA, 19 nt, Artificial Sequence
  Description of Artificial Sequence: Synthetic oligonucleotide
  Antisense strand to SEQ ID NO: 184398
aucucccucuaaagagcca

SEQ ID NO: 184400 - RNA, 19 nt, Artificial Sequence
  Description of Artificial Sequence: Synthetic oligonucleotide
  Sense strand starting at position 2353 of SEQ ID NO: 2377
ggcucuuuagagggagauu

SEQ ID NO: 184401 - RNA, 19 nt, Artificial Sequence
  Description of Artificial Sequence: Synthetic oligonucleotide
  Antisense strand to SEQ ID NO: 184400
aaucucccucuaaagagcc

SEQ ID NO: 184402 - RNA, 19 nt, Artificial Sequence
  Description of Artificial Sequence: Synthetic oligonucleotide
  Sense strand starting at position 2501 of SEQ ID NO: 2377
gaggcaugcugggauuugu

SEQ ID NO: 184403 - RNA, 19 nt, Artificial Sequence
  Description of Artificial Sequence: Synthetic oligonucleotide
  Antisense strand to SEQ ID NO: 184402
acaaaucccagcaugccuc

SEQ ID NO: 184404 - RNA, 19 nt, Artificial Sequence
  Description of Artificial Sequence: Synthetic oligonucleotide
  Sense strand starting at position 2510 of SEQ ID NO: 2377
ugggauuuguagucuucga

SEQ ID NO: 184405 - RNA, 19 nt, Artificial Sequence
  Description of Artificial Sequence: Synthetic oligonucleotide
  Antisense strand to SEQ ID NO: 184404
ucgaagacuacaaauccca

SEQ ID NO: 184406 - RNA, 19 nt, Artificial Sequence
  Description of Artificial Sequence: Synthetic oligonucleotide
  Sense strand starting at position 2517 of SEQ ID NO: 2377
uguagucuucgagguggga

SEQ ID NO: 184407 - RNA, 19 nt, Artificial Sequence
  Description of Artificial Sequence: Synthetic oligonucleotide
  Antisense strand to SEQ ID NO: 184406
ucccaccucgaagacuaca

SEQ ID NO: 184408 - RNA, 19 nt, Artificial Sequence
  Description of Artificial Sequence: Synthetic oligonucleotide
  Sense strand starting at position 2519 of SEQ ID NO: 2377
uagucuucgaggugggagu

SEQ ID NO: 184409 - RNA, 19 nt, Artificial Sequence
  Description of Artificial Sequence: Synthetic oligonucleotide
  Antisense strand to SEQ ID NO: 184408
acucccaccucgaagacua

SEQ ID NO: 184410 - RNA, 19 nt, Artificial Sequence
  Description of Artificial Sequence: Synthetic oligonucleotide
  Sense strand starting at position 2586 of SEQ ID NO: 2377
ggaguuucucuggugcgca

SEQ ID NO: 184411 - RNA, 19 nt, Artificial Sequence
  Description of Artificial Sequence: Synthetic oligonucleotide
  Antisense strand to SEQ ID NO: 184410
ugcgcaccagagaaacucc

SEQ ID NO: 184412 - RNA, 19 nt, Artificial Sequence
  Description of Artificial Sequence: Synthetic oligonucleotide
  Sense strand starting at position 2670 of SEQ ID NO: 2377
ucucuagcuccugguuuaa

SEQ ID NO: 184413 - RNA, 19 nt, Artificial Sequence
  Description of Artificial Sequence: Synthetic oligonucleotide
  Antisense strand to SEQ ID NO: 184412
uuaaaccaggagcuagaga

SEQ ID NO: 184414 - RNA, 19 nt, Artificial Sequence
  Description of Artificial Sequence: Synthetic oligonucleotide
  Sense strand starting at position 2803 of SEQ ID NO: 2377
gaauuagagcucugccaga

SEQ ID NO: 184415 - RNA, 19 nt, Artificial Sequence
  Description of Artificial Sequence: Synthetic oligonucleotide
  Antisense strand to SEQ ID NO: 184414
ucuggcagagcucuaauuc

SEQ ID NO: 184416 - RNA, 19 nt, Artificial Sequence
  Description of Artificial Sequence: Synthetic oligonucleotide
  Sense strand starting at position 2808 of SEQ ID NO: 2377
agagcucugccagaaucua

SEQ ID NO: 184417 - RNA, 19 nt, Artificial Sequence
  Description of Artificial Sequence: Synthetic oligonucleotide
  Antisense strand to SEQ ID NO: 184416
uagauucuggcagagcucu

SEQ ID NO: 184418 - RNA, 19 nt, Artificial Sequence
  Description of Artificial Sequence: Synthetic oligonucleotide
  Sense strand starting at position 2816 of SEQ ID NO: 2377
gccagaaucuaagcgcuaa

SEQ ID NO: 184419 - RNA, 19 nt, Artificial Sequence
  Description of Artificial Sequence: Synthetic oligonucleotide
  Antisense strand to SEQ ID NO: 184418
uuagcgcuuagauucuggc

SEQ ID NO: 184420 - RNA, 19 nt, Artificial Sequence
  Description of Artificial Sequence: Synthetic oligonucleotide
  Sense strand starting at position 2846 of SEQ ID NO: 2377
gcugcuugccugcuggaaa

SEQ ID NO: 184421 - RNA, 19 nt, Artificial Sequence
  Description of Artificial Sequence: Synthetic oligonucleotide
  Antisense strand to SEQ ID NO: 184420
uuuccagcaggcaagcagc

SEQ ID NO: 184422 - RNA, 19 nt, Artificial Sequence
  Description of Artificial Sequence: Synthetic oligonucleotide
  Sense strand starting at position 3252 of SEQ ID NO: 2377
gggagugagcgguagaaau

SEQ ID NO: 184423 - RNA, 19 nt, Artificial Sequence
  Description of Artificial Sequence: Synthetic oligonucleotide
  Antisense strand to SEQ ID NO: 184422
auuucuaccgcucacuccc

SEQ ID NO: 184424 - RNA, 19 nt, Artificial Sequence
  Description of Artificial Sequence: Synthetic oligonucleotide
  Sense strand starting at position 3358 of SEQ ID NO: 2377
gugaguuggacuuauccag

SEQ ID NO: 184425 - RNA, 19 nt, Artificial Sequence
  Description of Artificial Sequence: Synthetic oligonucleotide
  Antisense strand to SEQ ID NO: 184424
cuggauaaguccaacucac

SEQ ID NO: 184426 - RNA, 19 nt, Artificial Sequence
  Description of Artificial Sequence: Synthetic oligonucleotide
  Sense strand starting at position 3447 of SEQ ID NO: 2377
gcgugagagggccacaauu

SEQ ID NO: 184427 - RNA, 19 nt, Artificial Sequence
  Description of Artificial Sequence: Synthetic oligonucleotide
  Antisense strand to SEQ ID NO: 184426
aauuguggcccucucacgc

SEQ ID NO: 184428 - RNA, 19 nt, Artificial Sequence
  Description of Artificial Sequence: Synthetic oligonucleotide
  Sense strand starting at position 3456 of SEQ ID NO: 2377
ggccacaauuucugagaca

SEQ ID NO: 184429 - RNA, 19 nt, Artificial Sequence
  Description of Artificial Sequence: Synthetic oligonucleotide
  Antisense strand to SEQ ID NO: 184428
ugucucagaaauuguggcc

SEQ ID NO: 184430 - RNA, 19 nt, Artificial Sequence
  Description of Artificial Sequence: Synthetic oligonucleotide
  Sense strand starting at position 3457 of SEQ ID NO: 2377
gccacaauuucugagacag

SEQ ID NO: 184431 - RNA, 19 nt, Artificial Sequence
  Description of Artificial Sequence: Synthetic oligonucleotide
  Antisense strand to SEQ ID NO: 184430
cugucucagaaauuguggc

SEQ ID NO: 184432 - RNA, 19 nt, Artificial Sequence
  Description of Artificial Sequence: Synthetic oligonucleotide
  Sense strand starting at position 3485 of SEQ ID NO: 2377
agaguuauggcuugaaagg

SEQ ID NO: 184433 - RNA, 19 nt, Artificial Sequence
  Description of Artificial Sequence: Synthetic oligonucleotide
  Antisense strand to SEQ ID NO: 184432
ccuuucaagccauaacucu

SEQ ID NO: 184434 - RNA, 19 nt, Artificial Sequence
  Description of Artificial Sequence: Synthetic oligonucleotide
  Sense strand starting at position 3913 of SEQ ID NO: 2377
acagcuguugagugcuaua

SEQ ID NO: 184435 - RNA, 19 nt, Artificial Sequence
  Description of Artificial Sequence: Synthetic oligonucleotide
  Antisense strand to SEQ ID NO: 184434
uauagcacucaacagcugu

SEQ ID NO: 184436 - RNA, 19 nt, Artificial Sequence
  Description of Artificial Sequence: Synthetic oligonucleotide
  Sense strand starting at position 3918 of SEQ ID NO: 2377
uguugagugcuauaaugga

SEQ ID NO: 184437 - RNA, 19 nt, Artificial Sequence
  Description of Artificial Sequence: Synthetic oligonucleotide
  Antisense strand to SEQ ID NO: 184436
uccauuauagcacucaaca

SEQ ID NO: 184438 - RNA, 19 nt, Artificial Sequence
  Description of Artificial Sequence: Synthetic oligonucleotide
  Sense strand starting at position 3948 of SEQ ID NO: 2377
uguauagugaggcagagaa

SEQ ID NO: 184439 - RNA, 19 nt, Artificial Sequence
  Description of Artificial Sequence: Synthetic oligonucleotide
  Antisense strand to SEQ ID NO: 184438
uucucugccucacuauaca

SEQ ID NO: 184440 - RNA, 19 nt, Artificial Sequence
  Description of Artificial Sequence: Synthetic oligonucleotide
  Sense strand starting at position 3978 of SEQ ID NO: 2378
uagagcauuccagagguau

SEQ ID NO: 184441 - RNA, 19 nt, Artificial Sequence
  Description of Artificial Sequence: Synthetic oligonucleotide
  Antisense strand to SEQ ID NO: 184440
auaccucuggaaugcucua

SEQ ID NO: 184442 - RNA, 19 nt, Artificial Sequence
  Description of Artificial Sequence: Synthetic oligonucleotide
  Sense strand starting at position 3942 of SEQ ID NO: 2378
accugcuucuaaguuuaga

SEQ ID NO: 184443 - RNA, 19 nt, Artificial Sequence
  Description of Artificial Sequence: Synthetic oligonucleotide
  Antisense strand to SEQ ID NO: 184442
ucuaaacuuagaagcaggu

SEQ ID NO: 184444 - RNA, 19 nt, Artificial Sequence
  Description of Artificial Sequence: Synthetic oligonucleotide
  Sense strand starting at position 3849 of SEQ ID NO: 2378
aacgaacuauguuuaaagu

SEQ ID NO: 184445 - RNA, 19 nt, Artificial Sequence
  Description of Artificial Sequence: Synthetic oligonucleotide
  Antisense strand to SEQ ID NO: 184444
acuuuaaacauaguucguu

SEQ ID NO: 184446 - RNA, 19 nt, Artificial Sequence
  Description of Artificial Sequence: Synthetic oligonucleotide
  Sense strand starting at position 3394 of SEQ ID NO: 2378
gguaaugacccaugaggug

SEQ ID NO: 184447 - RNA, 19 nt, Artificial Sequence
  Description of Artificial Sequence: Synthetic oligonucleotide
  Antisense strand to SEQ ID NO: 184446
caccucaugggucauuacc

SEQ ID NO: 184448 - RNA, 19 nt, Artificial Sequence
  Description of Artificial Sequence: Synthetic oligonucleotide
  Sense strand starting at position 3327 of SEQ ID NO: 2378
aguucugagucccucacau

SEQ ID NO: 184449 - RNA, 19 nt, Artificial Sequence
  Description of Artificial Sequence: Synthetic oligonucleotide
  Antisense strand to SEQ ID NO: 184448
augugagggacucagaacu

SEQ ID NO: 184450 - RNA, 19 nt, Artificial Sequence
  Description of Artificial Sequence: Synthetic oligonucleotide
  Sense strand starting at position 3312 of SEQ ID NO: 2378
ugacaauagcuauaaaguu

SEQ ID NO: 184451 - RNA, 19 nt, Artificial Sequence
  Description of Artificial Sequence: Synthetic oligonucleotide
  Antisense strand to SEQ ID NO: 184450
aacuuuauagcuauuguca

SEQ ID NO: 184452 - RNA, 19 nt, Artificial Sequence
  Description of Artificial Sequence: Synthetic oligonucleotide
  Sense strand starting at position 3272 of SEQ ID NO: 2378
ggagucauaucuguaaaga

SEQ ID NO: 184453 - RNA, 19 nt, Artificial Sequence
  Description of Artificial Sequence: Synthetic oligonucleotide
  Antisense strand to SEQ ID NO: 184452
ucuuuacagauaugacucc

SEQ ID NO: 184454 - RNA, 19 nt, Artificial Sequence
  Description of Artificial Sequence: Synthetic oligonucleotide
  Sense strand starting at position 3271 of SEQ ID NO: 2378
aggagucauaucuguaaag

SEQ ID NO: 184455 - RNA, 19 nt, Artificial Sequence
  Description of Artificial Sequence: Synthetic oligonucleotide
  Antisense strand to SEQ ID NO: 184454
cuuuacagauaugacuccu

SEQ ID NO: 184456 - RNA, 19 nt, Artificial Sequence
  Description of Artificial Sequence: Synthetic oligonucleotide
  Sense strand starting at position 3172 of SEQ ID NO: 2378
ugacuuuaaugagcaucau

SEQ ID NO: 184457 - RNA, 19 nt, Artificial Sequence
  Description of Artificial Sequence: Synthetic oligonucleotide
  Antisense strand to SEQ ID NO: 184456
augaugcucauuaaaguca

SEQ ID NO: 184458 - RNA, 19 nt, Artificial Sequence
  Description of Artificial Sequence: Synthetic oligonucleotide
  Sense strand starting at position 3166 of SEQ ID NO: 2378
guuucuugacuuuaaugag

SEQ ID NO: 184459 - RNA, 19 nt, Artificial Sequence
  Description of Artificial Sequence: Synthetic oligonucleotide
  Antisense strand to SEQ ID NO: 184458
cucauuaaagucaagaaac

SEQ ID NO: 184460 - RNA, 19 nt, Artificial Sequence
  Description of Artificial Sequence: Synthetic oligonucleotide
  Sense strand starting at position 2900 of SEQ ID NO: 2378
auuacuuccugagagauuu

SEQ ID NO: 184461 - RNA, 19 nt, Artificial Sequence
  Description of Artificial Sequence: Synthetic oligonucleotide
  Antisense strand to SEQ ID NO: 184460
aaaucucucaggaaguaau

SEQ ID NO: 184462 - RNA, 19 nt, Artificial Sequence
  Description of Artificial Sequence: Synthetic oligonucleotide
  Sense strand starting at position 2866 of SEQ ID NO: 2378
ugagguaucugugucaaga

SEQ ID NO: 184463 - RNA, 19 nt, Artificial Sequence
  Description of Artificial Sequence: Synthetic oligonucleotide
  Antisense strand to SEQ ID NO: 184462
ucuugacacagauaccuca

SEQ ID NO: 184464 - RNA, 19 nt, Artificial Sequence
  Description of Artificial Sequence: Synthetic oligonucleotide
  Sense strand starting at position 2762 of SEQ ID NO: 2378
gcugguuaugcugagaaac

SEQ ID NO: 184465 - RNA, 19 nt, Artificial Sequence
  Description of Artificial Sequence: Synthetic oligonucleotide
  Antisense strand to SEQ ID NO: 184464
guuucucagcauaaccagc

SEQ ID NO: 184466 - RNA, 19 nt, Artificial Sequence
  Description of Artificial Sequence: Synthetic oligonucleotide
  Sense strand starting at position 2737 of SEQ ID NO: 2378
auauuucucuggcuuguuu

SEQ ID NO: 184467 - RNA, 19 nt, Artificial Sequence
  Description of Artificial Sequence: Synthetic oligonucleotide
  Antisense strand to SEQ ID NO: 184466
aaacaagccagagaaauau

SEQ ID NO: 184468 - RNA, 19 nt, Artificial Sequence
  Description of Artificial Sequence: Synthetic oligonucleotide
  Sense strand starting at position 2324 of SEQ ID NO: 2378
uguuuaaagcuagagcagu

SEQ ID NO: 184469 - RNA, 19 nt, Artificial Sequence
  Description of Artificial Sequence: Synthetic oligonucleotide
  Antisense strand to SEQ ID NO: 184468
acugcucuagcuuuaaaca

SEQ ID NO: 184470 - RNA, 19 nt, Artificial Sequence
  Description of Artificial Sequence: Synthetic oligonucleotide
  Sense strand starting at position 2313 of SEQ ID NO: 2378
ucuagaagguauguuuaaa

SEQ ID NO: 184471 - RNA, 19 nt, Artificial Sequence
  Description of Artificial Sequence: Synthetic oligonucleotide
  Antisense strand to SEQ ID NO: 184470
uuuaaacauaccuucuaga

SEQ ID NO: 184472 - RNA, 19 nt, Artificial Sequence
  Description of Artificial Sequence: Synthetic oligonucleotide
  Sense strand starting at position 2310 of SEQ ID NO: 2378
guaucuagaagguauguuu

SEQ ID NO: 184473 - RNA, 19 nt, Artificial Sequence
  Description of Artificial Sequence: Synthetic oligonucleotide
  Antisense strand to SEQ ID NO: 184472
aaacauaccuucuagauac

SEQ ID NO: 184474 - RNA, 19 nt, Artificial Sequence
  Description of Artificial Sequence: Synthetic oligonucleotide
  Sense strand starting at position 2272 of SEQ ID NO: 2378
gcgcaugugcagucacuua

SEQ ID NO: 184475 - RNA, 19 nt, Artificial Sequence
  Description of Artificial Sequence: Synthetic oligonucleotide
  Antisense strand to SEQ ID NO: 184474
uaagugacugcacaugcgc

SEQ ID NO: 184476 - RNA, 19 nt, Artificial Sequence
  Description of Artificial Sequence: Synthetic oligonucleotide
  Sense strand starting at position 2128 of SEQ ID NO: 2378
auagucucgugacucuaua

SEQ ID NO: 184477 - RNA, 19 nt, Artificial Sequence
  Description of Artificial Sequence: Synthetic oligonucleotide
  Antisense strand to SEQ ID NO: 184476
uauagagucacgagacuau

SEQ ID NO: 184478 - RNA, 19 nt, Artificial Sequence
  Description of Artificial Sequence: Synthetic oligonucleotide
  Sense strand starting at position 2113 of SEQ ID NO: 2378
uguaguuucccagauauag

SEQ ID NO: 184479 - RNA, 19 nt, Artificial Sequence
  Description of Artificial Sequence: Synthetic oligonucleotide
  Antisense strand to SEQ ID NO: 184478
cuauaucugggaaacuaca

SEQ ID NO: 184480 - RNA, 19 nt, Artificial Sequence
  Description of Artificial Sequence: Synthetic oligonucleotide
  Sense strand starting at position 2110 of SEQ ID NO: 2378
aaguguaguuucccagaua

SEQ ID NO: 184481 - RNA, 19 nt, Artificial Sequence
  Description of Artificial Sequence: Synthetic oligonucleotide
  Antisense strand to SEQ ID NO: 184480
uaucugggaaacuacacuu

SEQ ID NO: 184482 - RNA, 19 nt, Artificial Sequence
  Description of Artificial Sequence: Synthetic oligonucleotide
  Sense strand starting at position 1481 of SEQ ID NO: 2378
ccauuagacgugggaucca

SEQ ID NO: 184483 - RNA, 19 nt, Artificial Sequence
  Description of Artificial Sequence: Synthetic oligonucleotide
  Antisense strand to SEQ ID NO: 184482
uggaucccacgucuaaugg

SEQ ID NO: 184484 - RNA, 19 nt, Artificial Sequence
  Description of Artificial Sequence: Synthetic oligonucleotide
  Sense strand starting at position 1479 of SEQ ID NO: 2378
gcccauuagacgugggauc

SEQ ID NO: 184485 - RNA, 19 nt, Artificial Sequence
  Description of Artificial Sequence: Synthetic oligonucleotide
  Antisense strand to SEQ ID NO: 184484
gaucccacgucuaaugggc

SEQ ID NO: 184486 - RNA, 19 nt, Artificial Sequence
  Description of Artificial Sequence: Synthetic oligonucleotide
  Sense strand starting at position 1470 of SEQ ID NO: 2378
ggcggagcugcccauuaga

SEQ ID NO: 184487 - RNA, 19 nt, Artificial Sequence
  Description of Artificial Sequence: Synthetic oligonucleotide
  Antisense strand to SEQ ID NO: 184486
ucuaaugggcagcuccgcc

SEQ ID NO: 184488 - RNA, 19 nt, Artificial Sequence
  Description of Artificial Sequence: Synthetic oligonucleotide
  Sense strand starting at position 1272 of SEQ ID NO: 2378
guguuuguaacuggacaag

SEQ ID NO: 184489 - RNA, 19 nt, Artificial Sequence
  Description of Artificial Sequence: Synthetic oligonucleotide
  Antisense strand to SEQ ID NO: 184488
cuuguccaguuacaaacac

SEQ ID NO: 184490 - RNA, 19 nt, Artificial Sequence
  Description of Artificial Sequence: Synthetic oligonucleotide
  Sense strand starting at position 1271 of SEQ ID NO: 2378
gguguuuguaacuggacaa

SEQ ID NO: 184491 - RNA, 19 nt, Artificial Sequence
  Description of Artificial Sequence: Synthetic oligonucleotide
  Antisense strand to SEQ ID NO: 184490
uuguccaguuacaaacacc

SEQ ID NO: 184492 - RNA, 19 nt, Artificial Sequence
  Description of Artificial Sequence: Synthetic oligonucleotide
  Sense strand starting at position 1270 of SEQ ID NO: 2378
ugguguuuguaacuggaca

SEQ ID NO: 184493 - RNA, 19 nt, Artificial Sequence
  Description of Artificial Sequence: Synthetic oligonucleotide
  Antisense strand to SEQ ID NO: 184492
uguccaguuacaaacacca

SEQ ID NO: 184494 - RNA, 19 nt, Artificial Sequence
  Description of Artificial Sequence: Synthetic oligonucleotide
  Sense strand starting at position 1265 of SEQ ID NO: 2378
gaaucugguguuuguaacu

SEQ ID NO: 184495 - RNA, 19 nt, Artificial Sequence
  Description of Artificial Sequence: Synthetic oligonucleotide
  Antisense strand to SEQ ID NO: 184494
aguuacaaacaccagauuc

SEQ ID NO: 184496 - RNA, 19 nt, Artificial Sequence
  Description of Artificial Sequence: Synthetic oligonucleotide
  Sense strand starting at position 1249 of SEQ ID NO: 2378
acuguuuacucugccugaa

SEQ ID NO: 184497 - RNA, 19 nt, Artificial Sequence
  Description of Artificial Sequence: Synthetic oligonucleotide
  Antisense strand to SEQ ID NO: 184496
uucaggcagaguaaacagu

SEQ ID NO: 184498 - RNA, 19 nt, Artificial Sequence
  Description of Artificial Sequence: Synthetic oligonucleotide
  Sense strand starting at position 1159 of SEQ ID NO: 2378
gauuccugacaguguauca

SEQ ID NO: 184499 - RNA, 19 nt, Artificial Sequence
  Description of Artificial Sequence: Synthetic oligonucleotide
  Antisense strand to SEQ ID NO: 184498
ugauacacugucaggaauc

SEQ ID NO: 184500 - RNA, 19 nt, Artificial Sequence
  Description of Artificial Sequence: Synthetic oligonucleotide
  Sense strand starting at position 1144 of SEQ ID NO: 2378
agauauuaagcacgggauu

SEQ ID NO: 184501 - RNA, 19 nt, Artificial Sequence
  Description of Artificial Sequence: Synthetic oligonucleotide
  Antisense strand to SEQ ID NO: 184500
aaucccgugcuuaauaucu

SEQ ID NO: 184502 - RNA, 19 nt, Artificial Sequence
  Description of Artificial Sequence: Synthetic oligonucleotide
  Sense strand starting at position 1110 of SEQ ID NO: 2378
agcacauauguaugucuaa

SEQ ID NO: 184503 - RNA, 19 nt, Artificial Sequence
  Description of Artificial Sequence: Synthetic oligonucleotide
  Antisense strand to SEQ ID NO: 184502
uuagacauacauaugugcu

SEQ ID NO: 184504 - RNA, 19 nt, Artificial Sequence
  Description of Artificial Sequence: Synthetic oligonucleotide
  Sense strand starting at position 1014 of SEQ ID NO: 2378
ggaagacugaacuguaguu

SEQ ID NO: 184505 - RNA, 19 nt, Artificial Sequence
  Description of Artificial Sequence: Synthetic oligonucleotide
  Antisense strand to SEQ ID NO: 184504
aacuacaguucagucuucc

SEQ ID NO: 184506 - RNA, 19 nt, Artificial Sequence
  Description of Artificial Sequence: Synthetic oligonucleotide
  Sense strand starting at position 1003 of SEQ ID NO: 2378
gcuauuaagcaggaagacu

SEQ ID NO: 184507 - RNA, 19 nt, Artificial Sequence
  Description of Artificial Sequence: Synthetic oligonucleotide
  Antisense strand to SEQ ID NO: 184506
agucuuccugcuuaauagc

SEQ ID NO: 184508 - RNA, 19 nt, Artificial Sequence
  Description of Artificial Sequence: Synthetic oligonucleotide
  Sense strand starting at position 622 of SEQ ID NO: 2378
aggauuacaugagacaauu

SEQ ID NO: 184509 - RNA, 19 nt, Artificial Sequence
  Description of Artificial Sequence: Synthetic oligonucleotide
  Antisense strand to SEQ ID NO: 184508
aauugucucauguaauccu

SEQ ID NO: 184510 - RNA, 19 nt, Artificial Sequence
  Description of Artificial Sequence: Synthetic oligonucleotide
  Sense strand starting at position 604 of SEQ ID NO: 2378
acuucagagggauguugua

SEQ ID NO: 184511 - RNA, 19 nt, Artificial Sequence
  Description of Artificial Sequence: Synthetic oligonucleotide
  Antisense strand to SEQ ID NO: 184510
uacaacaucccucugaagu

SEQ ID NO: 184512 - RNA, 19 nt, Artificial Sequence
  Description of Artificial Sequence: Synthetic oligonucleotide
  Sense strand starting at position 367 of SEQ ID NO: 2378
acguuugugucaacgguuu

SEQ ID NO: 184513 - RNA, 19 nt, Artificial Sequence
  Description of Artificial Sequence: Synthetic oligonucleotide
  Antisense strand to SEQ ID NO: 184512
aaaccguugacacaaacgu

SEQ ID NO: 184514 - RNA, 19 nt, Artificial Sequence
  Description of Artificial Sequence: Synthetic oligonucleotide
  Sense strand starting at position 252 of SEQ ID NO: 2378
ucugaaauaguuuacguaa

SEQ ID NO: 184515 - RNA, 19 nt, Artificial Sequence
  Description of Artificial Sequence: Synthetic oligonucleotide
  Antisense strand to SEQ ID NO: 184514
uuacguaaacuauuucaga

SEQ ID NO: 184516 - RNA, 19 nt, Artificial Sequence
  Description of Artificial Sequence: Synthetic oligonucleotide
  Sense strand starting at position 241 of SEQ ID NO: 2378
cugguauuguaucugaaau

SEQ ID NO: 184517 - RNA, 19 nt, Artificial Sequence
  Description of Artificial Sequence: Synthetic oligonucleotide
  Antisense strand to SEQ ID NO: 184516
auuucagauacaauaccag

SEQ ID NO: 184518 - RNA, 19 nt, Artificial Sequence
  Description of Artificial Sequence: Synthetic oligonucleotide
  Sense strand starting at position 200 of SEQ ID NO: 2378
ucauguccaccugaaugua

SEQ ID NO: 184519 - RNA, 19 nt, Artificial Sequence
  Description of Artificial Sequence: Synthetic oligonucleotide
  Antisense strand to SEQ ID NO: 184518
uacauucagguggacauga

SEQ ID NO: 184520 - RNA, 19 nt, Artificial Sequence
  Description of Artificial Sequence: Synthetic oligonucleotide
  Sense strand starting at position 392 of SEQ ID NO: 2379
cuguaaggaacuugauugu

SEQ ID NO: 184521 - RNA, 19 nt, Artificial Sequence
  Description of Artificial Sequence: Synthetic oligonucleotide
  Antisense strand to SEQ ID NO: 184520
acaaucaaguuccuuacag

SEQ ID NO: 184522 - RNA, 19 nt, Artificial Sequence
  Description of Artificial Sequence: Synthetic oligonucleotide
  Sense strand starting at position 424 of SEQ ID NO: 2379
ugaaauguggucgaccaga

SEQ ID NO: 184523 - RNA, 19 nt, Artificial Sequence
  Description of Artificial Sequence: Synthetic oligonucleotide
  Antisense strand to SEQ ID NO: 184522
ucuggucgaccacauuuca

SEQ ID NO: 184524 - RNA, 19 nt, Artificial Sequence
  Description of Artificial Sequence: Synthetic oligonucleotide
  Sense strand starting at position 445 of SEQ ID NO: 2379
gcauauagaaugcauggua

SEQ ID NO: 184525 - RNA, 19 nt, Artificial Sequence
  Description of Artificial Sequence: Synthetic oligonucleotide
  Antisense strand to SEQ ID NO: 184524
uaccaugcauucuauaugc

SEQ ID NO: 184526 - RNA, 19 nt, Artificial Sequence
  Description of Artificial Sequence: Synthetic oligonucleotide
  Sense strand starting at position 448 of SEQ ID NO: 2379
uauagaaugcaugguaagu

SEQ ID NO: 184527 - RNA, 19 nt, Artificial Sequence
  Description of Artificial Sequence: Synthetic oligonucleotide
  Antisense strand to SEQ ID NO: 184526
acuuaccaugcauucuaua

SEQ ID NO: 184528 - RNA, 19 nt, Artificial Sequence
  Description of Artificial Sequence: Synthetic oligonucleotide
  Sense strand starting at position 459 of SEQ ID NO: 2379
ugguaagugcgcuuaaggu

SEQ ID NO: 184529 - RNA, 19 nt, Artificial Sequence
  Description of Artificial Sequence: Synthetic oligonucleotide
  Antisense strand to SEQ ID NO: 184528
accuuaagcgcacuuacca

SEQ ID NO: 184530 - RNA, 19 nt, Artificial Sequence
  Description of Artificial Sequence: Synthetic oligonucleotide
  Sense strand starting at position 586 of SEQ ID NO: 2379
gugccacaggcuuacaaau

SEQ ID NO: 184531 - RNA, 19 nt, Artificial Sequence
  Description of Artificial Sequence: Synthetic oligonucleotide
  Antisense strand to SEQ ID NO: 184530
auuuguaagccuguggcac

SEQ ID NO: 184532 - RNA, 19 nt, Artificial Sequence
  Description of Artificial Sequence: Synthetic oligonucleotide
  Sense strand starting at position 627 of SEQ ID NO: 2379
cagugagcagaucaucaua

SEQ ID NO: 184533 - RNA, 19 nt, Artificial Sequence
  Description of Artificial Sequence: Synthetic oligonucleotide
  Antisense strand to SEQ ID NO: 184532
uaugaugaucugcucacug

SEQ ID NO: 184534 - RNA, 19 nt, Artificial Sequence
  Description of Artificial Sequence: Synthetic oligonucleotide
  Sense strand starting at position 629 of SEQ ID NO: 2379
gugagcagaucaucauaaa

SEQ ID NO: 184535 - RNA, 19 nt, Artificial Sequence
  Description of Artificial Sequence: Synthetic oligonucleotide
  Antisense strand to SEQ ID NO: 184534
uuuaugaugaucugcucac

SEQ ID NO: 184536 - RNA, 19 nt, Artificial Sequence
  Description of Artificial Sequence: Synthetic oligonucleotide
  Sense strand starting at position 711 of SEQ ID NO: 2379
ucuguaaaugcugauagga

SEQ ID NO: 184537 - RNA, 19 nt, Artificial Sequence
  Description of Artificial Sequence: Synthetic oligonucleotide
  Antisense strand to SEQ ID NO: 184536
uccuaucagcauuuacaga

SEQ ID NO: 184538 - RNA, 19 nt, Artificial Sequence
  Description of Artificial Sequence: Synthetic oligonucleotide
  Sense strand starting at position 755 of SEQ ID NO: 2379
agaacaaauucugcgauaa

SEQ ID NO: 184539 - RNA, 19 nt, Artificial Sequence
  Description of Artificial Sequence: Synthetic oligonucleotide
  Antisense strand to SEQ ID NO: 184538
uuaucgcagaauuuguucu

SEQ ID NO: 184540 - RNA, 19 nt, Artificial Sequence
  Description of Artificial Sequence: Synthetic oligonucleotide
  Sense strand starting at position 756 of SEQ ID NO: 2379
gaacaaauucugcgauaag

SEQ ID NO: 184541 - RNA, 19 nt, Artificial Sequence
  Description of Artificial Sequence: Synthetic oligonucleotide
  Antisense strand to SEQ ID NO: 184540
cuuaucgcagaauuuguuc

SEQ ID NO: 184542 - RNA, 19 nt, Artificial Sequence
  Description of Artificial Sequence: Synthetic oligonucleotide
  Sense strand starting at position 759 of SEQ ID NO: 2379
caaauucugcgauaagcug

SEQ ID NO: 184543 - RNA, 19 nt, Artificial Sequence
  Description of Artificial Sequence: Synthetic oligonucleotide
  Antisense strand to SEQ ID NO: 184542
cagcuuaucgcagaauuug

SEQ ID NO: 184544 - RNA, 19 nt, Artificial Sequence
  Description of Artificial Sequence: Synthetic oligonucleotide
  Sense strand starting at position 782 of SEQ ID NO: 2379
uuguuucgaauuuguguga

SEQ ID NO: 184545 - RNA, 19 nt, Artificial Sequence
  Description of Artificial Sequence: Synthetic oligonucleotide
  Antisense strand to SEQ ID NO: 184544
ucacacaaauucgaaacaa

SEQ ID NO: 184546 - RNA, 19 nt, Artificial Sequence
  Description of Artificial Sequence: Synthetic oligonucleotide
  Sense strand starting at position 858 of SEQ ID NO: 2379
acaguaguagcugaguauu

SEQ ID NO: 184547 - RNA, 19 nt, Artificial Sequence
  Description of Artificial Sequence: Synthetic oligonucleotide
  Antisense strand to SEQ ID NO: 184546
aauacucagcuacuacugu

SEQ ID NO: 184548 - RNA, 19 nt, Artificial Sequence
  Description of Artificial Sequence: Synthetic oligonucleotide
  Sense strand starting at position 1002 of SEQ ID NO: 2379
uuggcagugccugaugaca

SEQ ID NO: 184549 - RNA, 19 nt, Artificial Sequence
  Description of Artificial Sequence: Synthetic oligonucleotide
  Antisense strand to SEQ ID NO: 184548
ugucaucaggcacugccaa

SEQ ID NO: 184550 - RNA, 19 nt, Artificial Sequence
  Description of Artificial Sequence: Synthetic oligonucleotide
  Sense strand starting at position 1021 of SEQ ID NO: 2379
gugcuugacgaucaucaga

SEQ ID NO: 184551 - RNA, 19 nt, Artificial Sequence
  Description of Artificial Sequence: Synthetic oligonucleotide
  Antisense strand to SEQ ID NO: 184550
ucugaugaucgucaagcac

SEQ ID NO: 184552 - RNA, 19 nt, Artificial Sequence
  Description of Artificial Sequence: Synthetic oligonucleotide
  Sense strand starting at position 1023 of SEQ ID NO: 2379
gcuugacgaucaucagaaa

SEQ ID NO: 184553 - RNA, 19 nt, Artificial Sequence
  Description of Artificial Sequence: Synthetic oligonucleotide
  Antisense strand to SEQ ID NO: 184552
uuucugaugaucgucaagc

SEQ ID NO: 184554 - RNA, 19 nt, Artificial Sequence
  Description of Artificial Sequence: Synthetic oligonucleotide
  Sense strand starting at position 1035 of SEQ ID NO: 2379
ucagaaagcugcuugggau

SEQ ID NO: 184555 - RNA, 19 nt, Artificial Sequence
  Description of Artificial Sequence: Synthetic oligonucleotide
  Antisense strand to SEQ ID NO: 184554
aucccaagcagcuuucuga

SEQ ID NO: 184556 - RNA, 19 nt, Artificial Sequence
  Description of Artificial Sequence: Synthetic oligonucleotide
  Sense strand starting at position 1257 of SEQ ID NO: 2379
gaaacuacuugacugaugu

SEQ ID NO: 184557 - RNA, 19 nt, Artificial Sequence
  Description of Artificial Sequence: Synthetic oligonucleotide
  Antisense strand to SEQ ID NO: 184556
acaucagucaaguaguuuc

SEQ ID NO: 184558 - RNA, 19 nt, Artificial Sequence
  Description of Artificial Sequence: Synthetic oligonucleotide
  Sense strand starting at position 1331 of SEQ ID NO: 2379
cgaucaauauacuuggaag

SEQ ID NO: 184559 - RNA, 19 nt, Artificial Sequence
  Description of Artificial Sequence: Synthetic oligonucleotide
  Antisense strand to SEQ ID NO: 184558
cuuccaaguauauugaucg

SEQ ID NO: 184560 - RNA, 19 nt, Artificial Sequence
  Description of Artificial Sequence: Synthetic oligonucleotide
  Sense strand starting at position 1342 of SEQ ID NO: 2379
cuuggaagucuaugaacuc

SEQ ID NO: 184561 - RNA, 19 nt, Artificial Sequence
  Description of Artificial Sequence: Synthetic oligonucleotide
  Antisense strand to SEQ ID NO: 184560
gaguucauagacuuccaag

SEQ ID NO: 184562 - RNA, 19 nt, Artificial Sequence
  Description of Artificial Sequence: Synthetic oligonucleotide
  Sense strand starting at position 1366 of SEQ ID NO: 2379
uucccuaguuugucauuua

SEQ ID NO: 184563 - RNA, 19 nt, Artificial Sequence
  Description of Artificial Sequence: Synthetic oligonucleotide
  Antisense strand to SEQ ID NO: 184562
uaaaugacaaacuagggaa

SEQ ID NO: 184564 - RNA, 19 nt, Artificial Sequence
  Description of Artificial Sequence: Synthetic oligonucleotide
  Sense strand starting at position 1757 of SEQ ID NO: 2379
gacuccuucgagcaggaau

SEQ ID NO: 184565 - RNA, 19 nt, Artificial Sequence
  Description of Artificial Sequence: Synthetic oligonucleotide
  Antisense strand to SEQ ID NO: 184564
auuccugcucgaaggaguc

SEQ ID NO: 184566 - RNA, 19 nt, Artificial Sequence
  Description of Artificial Sequence: Synthetic oligonucleotide
  Sense strand starting at position 1954 of SEQ ID NO: 2379
auacaugaucgccacaaga

SEQ ID NO: 184567 - RNA, 19 nt, Artificial Sequence
  Description of Artificial Sequence: Synthetic oligonucleotide
  Antisense strand to SEQ ID NO: 184566
ucuuguggcgaucauguau

SEQ ID NO: 184568 - RNA, 19 nt, Artificial Sequence
  Description of Artificial Sequence: Synthetic oligonucleotide
  Sense strand starting at position 1956 of SEQ ID NO: 2379
acaugaucgccacaagaua

SEQ ID NO: 184569 - RNA, 19 nt, Artificial Sequence
  Description of Artificial Sequence: Synthetic oligonucleotide
  Antisense strand to SEQ ID NO: 184568
uaucuuguggcgaucaugu

SEQ ID NO: 184570 - RNA, 19 nt, Artificial Sequence
  Description of Artificial Sequence: Synthetic oligonucleotide
  Sense strand starting at position 1991 of SEQ ID NO: 2379
gcuucuguuguagagaacu

SEQ ID NO: 184571 - RNA, 19 nt, Artificial Sequence
  Description of Artificial Sequence: Synthetic oligonucleotide
  Antisense strand to SEQ ID NO: 184570
aguucucuacaacagaagc

SEQ ID NO: 184572 - RNA, 19 nt, Artificial Sequence
  Description of Artificial Sequence: Synthetic oligonucleotide
  Sense strand starting at position 2199 of SEQ ID NO: 2379
uguacaaaguagguauuau

SEQ ID NO: 184573 - RNA, 19 nt, Artificial Sequence
  Description of Artificial Sequence: Synthetic oligonucleotide
  Antisense strand to SEQ ID NO: 184572
auaauaccuacuuuguaca

SEQ ID NO: 184574 - RNA, 19 nt, Artificial Sequence
  Description of Artificial Sequence: Synthetic oligonucleotide
  Sense strand starting at position 2200 of SEQ ID NO: 2379
guacaaaguagguauuaua

SEQ ID NO: 184575 - RNA, 19 nt, Artificial Sequence
  Description of Artificial Sequence: Synthetic oligonucleotide
  Antisense strand to SEQ ID NO: 184574
uauaauaccuacuuuguac

SEQ ID NO: 184576 - RNA, 19 nt, Artificial Sequence
  Description of Artificial Sequence: Synthetic oligonucleotide
  Sense strand starting at position 2217 of SEQ ID NO: 2379
uauaaagaacagugaguuu

SEQ ID NO: 184577 - RNA, 19 nt, Artificial Sequence
  Description of Artificial Sequence: Synthetic oligonucleotide
  Antisense strand to SEQ ID NO: 184576
aaacucacuguucuuuaua

SEQ ID NO: 184578 - RNA, 19 nt, Artificial Sequence
  Description of Artificial Sequence: Synthetic oligonucleotide
  Sense strand starting at position 2291 of SEQ ID NO: 2379
uuggauaugaguugaagug

SEQ ID NO: 184579 - RNA, 19 nt, Artificial Sequence
  Description of Artificial Sequence: Synthetic oligonucleotide
  Antisense strand to SEQ ID NO: 184578
cacuucaacucauauccaa

SEQ ID NO: 184580 - RNA, 19 nt, Artificial Sequence
  Description of Artificial Sequence: Synthetic oligonucleotide
  Sense strand starting at position 2297 of SEQ ID NO: 2379
augaguugaaguggccaaa

SEQ ID NO: 184581 - RNA, 19 nt, Artificial Sequence
  Description of Artificial Sequence: Synthetic oligonucleotide
  Antisense strand to SEQ ID NO: 184580
uuuggccacuucaacucau

SEQ ID NO: 184582 - RNA, 19 nt, Artificial Sequence
  Description of Artificial Sequence: Synthetic oligonucleotide
  Sense strand starting at position 2346 of SEQ ID NO: 2379
agaagugacgcagagcaua

SEQ ID NO: 184583 - RNA, 19 nt, Artificial Sequence
  Description of Artificial Sequence: Synthetic oligonucleotide
  Antisense strand to SEQ ID NO: 184582
uaugcucugcgucacuucu

SEQ ID NO: 184584 - RNA, 19 nt, Artificial Sequence
  Description of Artificial Sequence: Synthetic oligonucleotide
  Sense strand starting at position 2452 of SEQ ID NO: 2379
gaaugacaaucuguggauu

SEQ ID NO: 184585 - RNA, 19 nt, Artificial Sequence
  Description of Artificial Sequence: Synthetic oligonucleotide
  Antisense strand to SEQ ID NO: 184584
aauccacagauugucauuc

SEQ ID NO: 184586 - RNA, 19 nt, Artificial Sequence
  Description of Artificial Sequence: Synthetic oligonucleotide
  Sense strand starting at position 2453 of SEQ ID NO: 2379
aaugacaaucuguggauua

SEQ ID NO: 184587 - RNA, 19 nt, Artificial Sequence
  Description of Artificial Sequence: Synthetic oligonucleotide
  Antisense strand to SEQ ID NO: 184586
uaauccacagauugucauu

SEQ ID NO: 184588 - RNA, 19 nt, Artificial Sequence
  Description of Artificial Sequence: Synthetic oligonucleotide
  Sense strand starting at position 2824 of SEQ ID NO: 2379
gaagcaucugcauaaguca

SEQ ID NO: 184589 - RNA, 19 nt, Artificial Sequence
  Description of Artificial Sequence: Synthetic oligonucleotide
  Antisense strand to SEQ ID NO: 184588
ugacuuaugcagaugcuuc

SEQ ID NO: 184590 - RNA, 19 nt, Artificial Sequence
  Description of Artificial Sequence: Synthetic oligonucleotide
  Sense strand starting at position 2837 of SEQ ID NO: 2379
aagucagaucaugguaguu

SEQ ID NO: 184591 - RNA, 19 nt, Artificial Sequence
  Description of Artificial Sequence: Synthetic oligonucleotide
  Antisense strand to SEQ ID NO: 184590
aacuaccaugaucugacuu

SEQ ID NO: 184592 - RNA, 19 nt, Artificial Sequence
  Description of Artificial Sequence: Synthetic oligonucleotide
  Sense strand starting at position 3497 of SEQ ID NO: 2379
gugguuacaacguaaugau

SEQ ID NO: 184593 - RNA, 19 nt, Artificial Sequence
  Description of Artificial Sequence: Synthetic oligonucleotide
  Antisense strand to SEQ ID NO: 184592
aucauuacguuguaaccac

SEQ ID NO: 184594 - RNA, 19 nt, Artificial Sequence
  Description of Artificial Sequence: Synthetic oligonucleotide
  Sense strand starting at position 3627 of SEQ ID NO: 2379
ucaagagaucuauguaccu

SEQ ID NO: 184595 - RNA, 19 nt, Artificial Sequence
  Description of Artificial Sequence: Synthetic oligonucleotide
  Antisense strand to SEQ ID NO: 184594
agguacauagaucucuuga

SEQ ID NO: 184596 - RNA, 19 nt, Artificial Sequence
  Description of Artificial Sequence: Synthetic oligonucleotide
  Sense strand starting at position 3648 of SEQ ID NO: 2379
gggugacucugauuaauaa

SEQ ID NO: 184597 - RNA, 19 nt, Artificial Sequence
  Description of Artificial Sequence: Synthetic oligonucleotide
  Antisense strand to SEQ ID NO: 184596
uuauuaaucagagucaccc

SEQ ID NO: 184598 - RNA, 19 nt, Artificial Sequence
  Description of Artificial Sequence: Synthetic oligonucleotide
  Sense strand starting at position 3733 of SEQ ID NO: 2379
ugaaguaauacacaugcga

SEQ ID NO: 184599 - RNA, 19 nt, Artificial Sequence
  Description of Artificial Sequence: Synthetic oligonucleotide
  Antisense strand to SEQ ID NO: 184598
ucgcauguguauuacuuca

SEQ ID NO: 184600 - RNA, 19 nt, Artificial Sequence
  Description of Artificial Sequence: Synthetic oligonucleotide
  Sense strand starting at position 1 of SEQ ID NO: 2380
uauagaaugcaugguaagu

SEQ ID NO: 184601 - RNA, 19 nt, Artificial Sequence
  Description of Artificial Sequence: Synthetic oligonucleotide
  Antisense strand to SEQ ID NO: 184600
acuuaccaugcauucuaua

SEQ ID NO: 184602 - RNA, 19 nt, Artificial Sequence
  Description of Artificial Sequence: Synthetic oligonucleotide
  Sense strand starting at position 12 of SEQ ID NO: 2380
ugguaagugcgcuuaaggu

SEQ ID NO: 184603 - RNA, 19 nt, Artificial Sequence
  Description of Artificial Sequence: Synthetic oligonucleotide
  Antisense strand to SEQ ID NO: 184602
accuuaagcgcacuuacca

SEQ ID NO: 184604 - RNA, 19 nt, Artificial Sequence
  Description of Artificial Sequence: Synthetic oligonucleotide
  Sense strand starting at position 139 of SEQ ID NO: 2380
gugccacaggcuuacaaau

SEQ ID NO: 184605 - RNA, 19 nt, Artificial Sequence
  Description of Artificial Sequence: Synthetic oligonucleotide
  Antisense strand to SEQ ID NO: 184604
auuuguaagccuguggcac

SEQ ID NO: 184606 - RNA, 19 nt, Artificial Sequence
  Description of Artificial Sequence: Synthetic oligonucleotide
  Sense strand starting at position 180 of SEQ ID NO: 2380
cagugagcagaucaucaua

SEQ ID NO: 184607 - RNA, 19 nt, Artificial Sequence
  Description of Artificial Sequence: Synthetic oligonucleotide
  Antisense strand to SEQ ID NO: 184606
uaugaugaucugcucacug

SEQ ID NO: 184608 - RNA, 19 nt, Artificial Sequence
  Description of Artificial Sequence: Synthetic oligonucleotide
  Sense strand starting at position 182 of SEQ ID NO: 2380
gugagcagaucaucauaaa

SEQ ID NO: 184609 - RNA, 19 nt, Artificial Sequence
  Description of Artificial Sequence: Synthetic oligonucleotide
  Antisense strand to SEQ ID NO: 184608
uuuaugaugaucugcucac

SEQ ID NO: 184610 - RNA, 19 nt, Artificial Sequence
  Description of Artificial Sequence: Synthetic oligonucleotide
  Sense strand starting at position 264 of SEQ ID NO: 2380
ucuguaaaugcugauagga

SEQ ID NO: 184611 - RNA, 19 nt, Artificial Sequence
  Description of Artificial Sequence: Synthetic oligonucleotide
  Antisense strand to SEQ ID NO: 184610
uccuaucagcauuuacaga

SEQ ID NO: 184612 - RNA, 19 nt, Artificial Sequence
  Description of Artificial Sequence: Synthetic oligonucleotide
  Sense strand starting at position 308 of SEQ ID NO: 2380
agaacaaauucugcgauaa

SEQ ID NO: 184613 - RNA, 19 nt, Artificial Sequence
  Description of Artificial Sequence: Synthetic oligonucleotide
  Antisense strand to SEQ ID NO: 184612
uuaucgcagaauuuguucu

SEQ ID NO: 184614 - RNA, 19 nt, Artificial Sequence
  Description of Artificial Sequence: Synthetic oligonucleotide
  Sense strand starting at position 309 of SEQ ID NO: 2380
gaacaaauucugcgauaag

SEQ ID NO: 184615 - RNA, 19 nt, Artificial Sequence
  Description of Artificial Sequence: Synthetic oligonucleotide
  Antisense strand to SEQ ID NO: 184614
cuuaucgcagaauuuguuc

SEQ ID NO: 184616 - RNA, 19 nt, Artificial Sequence
  Description of Artificial Sequence: Synthetic oligonucleotide
  Sense strand starting at position 312 of SEQ ID NO: 2380
caaauucugcgauaagcug

SEQ ID NO: 184617 - RNA, 19 nt, Artificial Sequence
  Description of Artificial Sequence: Synthetic oligonucleotide
  Antisense strand to SEQ ID NO: 184616
cagcuuaucgcagaauuug

SEQ ID NO: 184618 - RNA, 19 nt, Artificial Sequence
  Description of Artificial Sequence: Synthetic oligonucleotide
  Sense strand starting at position 335 of SEQ ID NO: 2380
uuguuucgaauuuguguga

SEQ ID NO: 184619 - RNA, 19 nt, Artificial Sequence
  Description of Artificial Sequence: Synthetic oligonucleotide
  Antisense strand to SEQ ID NO: 184618
ucacacaaauucgaaacaa

SEQ ID NO: 184620 - RNA, 19 nt, Artificial Sequence
  Description of Artificial Sequence: Synthetic oligonucleotide
  Sense strand starting at position 411 of SEQ ID NO: 2380
acaguaguagcugaguauu

SEQ ID NO: 184621 - RNA, 19 nt, Artificial Sequence
  Description of Artificial Sequence: Synthetic oligonucleotide
  Antisense strand to SEQ ID NO: 184620
aauacucagcuacuacugu

SEQ ID NO: 184622 - RNA, 19 nt, Artificial Sequence
  Description of Artificial Sequence: Synthetic oligonucleotide
  Sense strand starting at position 555 of SEQ ID NO: 2380
uuggcagugccugaugaca

SEQ ID NO: 184623 - RNA, 19 nt, Artificial Sequence
  Description of Artificial Sequence: Synthetic oligonucleotide
  Antisense strand to SEQ ID NO: 184622
ugucaucaggcacugccaa

SEQ ID NO: 184624 - RNA, 19 nt, Artificial Sequence
  Description of Artificial Sequence: Synthetic oligonucleotide
  Sense strand starting at position 574 of SEQ ID NO: 2380
gugcuugacgaucaucaga

SEQ ID NO: 184625 - RNA, 19 nt, Artificial Sequence
  Description of Artificial Sequence: Synthetic oligonucleotide
  Antisense strand to SEQ ID NO: 184624
ucugaugaucgucaagcac

SEQ ID NO: 184626 - RNA, 19 nt, Artificial Sequence
  Description of Artificial Sequence: Synthetic oligonucleotide
  Sense strand starting at position 576 of SEQ ID NO: 2380
gcuugacgaucaucagaaa

SEQ ID NO: 184627 - RNA, 19 nt, Artificial Sequence
  Description of Artificial Sequence: Synthetic oligonucleotide
  Antisense strand to SEQ ID NO: 184626
uuucugaugaucgucaagc

SEQ ID NO: 184628 - RNA, 19 nt, Artificial Sequence
  Description of Artificial Sequence: Synthetic oligonucleotide
  Sense strand starting at position 588 of SEQ ID NO: 2380
ucagaaagcugcuugggau

SEQ ID NO: 184629 - RNA, 19 nt, Artificial Sequence
  Description of Artificial Sequence: Synthetic oligonucleotide
  Antisense strand to SEQ ID NO: 184628
aucccaagcagcuuucuga

SEQ ID NO: 184630 - RNA, 19 nt, Artificial Sequence
  Description of Artificial Sequence: Synthetic oligonucleotide
  Sense strand starting at position 810 of SEQ ID NO: 2380
gaaacuacuugacugaugu

SEQ ID NO: 184631 - RNA, 19 nt, Artificial Sequence
  Description of Artificial Sequence: Synthetic oligonucleotide
  Antisense strand to SEQ ID NO: 184630
acaucagucaaguaguuuc

SEQ ID NO: 184632 - RNA, 19 nt, Artificial Sequence
  Description of Artificial Sequence: Synthetic oligonucleotide
  Sense strand starting at position 884 of SEQ ID NO: 2380
cgaucaauauacuuggaag

SEQ ID NO: 184633 - RNA, 19 nt, Artificial Sequence
  Description of Artificial Sequence: Synthetic oligonucleotide
  Antisense strand to SEQ ID NO: 184632
cuuccaaguauauugaucg

SEQ ID NO: 184634 - RNA, 19 nt, Artificial Sequence
  Description of Artificial Sequence: Synthetic oligonucleotide
  Sense strand starting at position 895 of SEQ ID NO: 2380
cuuggaagucuaugaacuc

SEQ ID NO: 184635 - RNA, 19 nt, Artificial Sequence
  Description of Artificial Sequence: Synthetic oligonucleotide
  Antisense strand to SEQ ID NO: 184634
gaguucauagacuuccaag

SEQ ID NO: 184636 - RNA, 19 nt, Artificial Sequence
  Description of Artificial Sequence: Synthetic oligonucleotide
  Sense strand starting at position 919 of SEQ ID NO: 2380
uucccuaguuugucauuua

SEQ ID NO: 184637 - RNA, 19 nt, Artificial Sequence
  Description of Artificial Sequence: Synthetic oligonucleotide
  Antisense strand to SEQ ID NO: 184636
uaaaugacaaacuagggaa

SEQ ID NO: 184638 - RNA, 19 nt, Artificial Sequence
  Description of Artificial Sequence: Synthetic oligonucleotide
  Sense strand starting at position 1310 of SEQ ID NO: 2380
gacuccuucgagcaggaau

SEQ ID NO: 184639 - RNA, 19 nt, Artificial Sequence
  Description of Artificial Sequence: Synthetic oligonucleotide
  Antisense strand to SEQ ID NO: 184638
auuccugcucgaaggaguc

SEQ ID NO: 184640 - RNA, 19 nt, Artificial Sequence
  Description of Artificial Sequence: Synthetic oligonucleotide
  Sense strand starting at position 1507 of SEQ ID NO: 2380
auacaugaucgccacaaga

SEQ ID NO: 184641 - RNA, 19 nt, Artificial Sequence
  Description of Artificial Sequence: Synthetic oligonucleotide
  Antisense strand to SEQ ID NO: 184640
ucuuguggcgaucauguau

SEQ ID NO: 184642 - RNA, 19 nt, Artificial Sequence
  Description of Artificial Sequence: Synthetic oligonucleotide
  Sense strand starting at position 1509 of SEQ ID NO: 2380
acaugaucgccacaagaua

SEQ ID NO: 184643 - RNA, 19 nt, Artificial Sequence
  Description of Artificial Sequence: Synthetic oligonucleotide
  Antisense strand to SEQ ID NO: 184642
uaucuuguggcgaucaugu

SEQ ID NO: 184644 - RNA, 19 nt, Artificial Sequence
  Description of Artificial Sequence: Synthetic oligonucleotide
  Sense strand starting at position 1544 of SEQ ID NO: 2380
gcuucuguuguagagaacu

SEQ ID NO: 184645 - RNA, 19 nt, Artificial Sequence
  Description of Artificial Sequence: Synthetic oligonucleotide
  Antisense strand to SEQ ID NO: 184644
aguucucuacaacagaagc

SEQ ID NO: 184646 - RNA, 19 nt, Artificial Sequence
  Description of Artificial Sequence: Synthetic oligonucleotide
  Sense strand starting at position 1752 of SEQ ID NO: 2380
uguacaaaguagguauuau

SEQ ID NO: 184647 - RNA, 19 nt, Artificial Sequence
  Description of Artificial Sequence: Synthetic oligonucleotide
  Antisense strand to SEQ ID NO: 184646
auaauaccuacuuuguaca

SEQ ID NO: 184648 - RNA, 19 nt, Artificial Sequence
  Description of Artificial Sequence: Synthetic oligonucleotide
  Sense strand starting at position 1753 of SEQ ID NO: 2380
guacaaaguagguauuaua

SEQ ID NO: 184649 - RNA, 19 nt, Artificial Sequence
  Description of Artificial Sequence: Synthetic oligonucleotide
  Antisense strand to SEQ ID NO: 184648
uauaauaccuacuuuguac

SEQ ID NO: 184650 - RNA, 19 nt, Artificial Sequence
  Description of Artificial Sequence: Synthetic oligonucleotide
  Sense strand starting at position 1770 of SEQ ID NO: 2380
uauaaagaacagugaguuu

SEQ ID NO: 184651 - RNA, 19 nt, Artificial Sequence
  Description of Artificial Sequence: Synthetic oligonucleotide
  Antisense strand to SEQ ID NO: 184650
aaacucacuguucuuuaua

SEQ ID NO: 184652 - RNA, 19 nt, Artificial Sequence
  Description of Artificial Sequence: Synthetic oligonucleotide
  Sense strand starting at position 1844 of SEQ ID NO: 2380
uuggauaugaguugaagug

SEQ ID NO: 184653 - RNA, 19 nt, Artificial Sequence
  Description of Artificial Sequence: Synthetic oligonucleotide
  Antisense strand to SEQ ID NO: 184652
cacuucaacucauauccaa

SEQ ID NO: 184654 - RNA, 19 nt, Artificial Sequence
  Description of Artificial Sequence: Synthetic oligonucleotide
  Sense strand starting at position 1850 of SEQ ID NO: 2380
augaguugaaguggccaaa

SEQ ID NO: 184655 - RNA, 19 nt, Artificial Sequence
  Description of Artificial Sequence: Synthetic oligonucleotide
  Antisense strand to SEQ ID NO: 184654
uuuggccacuucaacucau

SEQ ID NO: 184656 - RNA, 19 nt, Artificial Sequence
  Description of Artificial Sequence: Synthetic oligonucleotide
  Sense strand starting at position 1899 of SEQ ID NO: 2380
agaagugacgcagagcaua

SEQ ID NO: 184657 - RNA, 19 nt, Artificial Sequence
  Description of Artificial Sequence: Synthetic oligonucleotide
  Antisense strand to SEQ ID NO: 184656
uaugcucugcgucacuucu

SEQ ID NO: 184658 - RNA, 19 nt, Artificial Sequence
  Description of Artificial Sequence: Synthetic oligonucleotide
  Sense strand starting at position 1919 of SEQ ID NO: 2380
gaugaaauacguugguuuc

SEQ ID NO: 184659 - RNA, 19 nt, Artificial Sequence
  Description of Artificial Sequence: Synthetic oligonucleotide
  Antisense strand to SEQ ID NO: 184658
gaaaccaacguauuucauc

SEQ ID NO: 184660 - RNA, 19 nt, Artificial Sequence
  Description of Artificial Sequence: Synthetic oligonucleotide
  Sense strand starting at position 2005 of SEQ ID NO: 2380
gaaugacaaucuguggauu

SEQ ID NO: 184661 - RNA, 19 nt, Artificial Sequence
  Description of Artificial Sequence: Synthetic oligonucleotide
  Antisense strand to SEQ ID NO: 184660
aauccacagauugucauuc

SEQ ID NO: 184662 - RNA, 19 nt, Artificial Sequence
  Description of Artificial Sequence: Synthetic oligonucleotide
  Sense strand starting at position 2006 of SEQ ID NO: 2380
aaugacaaucuguggauua

SEQ ID NO: 184663 - RNA, 19 nt, Artificial Sequence
  Description of Artificial Sequence: Synthetic oligonucleotide
  Antisense strand to SEQ ID NO: 184662
uaauccacagauugucauu

SEQ ID NO: 184664 - RNA, 19 nt, Artificial Sequence
  Description of Artificial Sequence: Synthetic oligonucleotide
  Sense strand starting at position 2377 of SEQ ID NO: 2380
gaagcaucugcauaaguca

SEQ ID NO: 184665 - RNA, 19 nt, Artificial Sequence
  Description of Artificial Sequence: Synthetic oligonucleotide
  Antisense strand to SEQ ID NO: 184664
ugacuuaugcagaugcuuc

SEQ ID NO: 184666 - RNA, 19 nt, Artificial Sequence
  Description of Artificial Sequence: Synthetic oligonucleotide
  Sense strand starting at position 2390 of SEQ ID NO: 2380
aagucagaucaugguaguu

SEQ ID NO: 184667 - RNA, 19 nt, Artificial Sequence
  Description of Artificial Sequence: Synthetic oligonucleotide
  Antisense strand to SEQ ID NO: 184666
aacuaccaugaucugacuu

SEQ ID NO: 184668 - RNA, 19 nt, Artificial Sequence
  Description of Artificial Sequence: Synthetic oligonucleotide
  Sense strand starting at position 3050 of SEQ ID NO: 2380
gugguuacaacguaaugau

SEQ ID NO: 184669 - RNA, 19 nt, Artificial Sequence
  Description of Artificial Sequence: Synthetic oligonucleotide
  Antisense strand to SEQ ID NO: 184668
aucauuacguuguaaccac

SEQ ID NO: 184670 - RNA, 19 nt, Artificial Sequence
  Description of Artificial Sequence: Synthetic oligonucleotide
  Sense strand starting at position 3180 of SEQ ID NO: 2380
ucaagagaucuauguaccu

SEQ ID NO: 184671 - RNA, 19 nt, Artificial Sequence
  Description of Artificial Sequence: Synthetic oligonucleotide
  Antisense strand to SEQ ID NO: 184670
agguacauagaucucuuga

SEQ ID NO: 184672 - RNA, 19 nt, Artificial Sequence
  Description of Artificial Sequence: Synthetic oligonucleotide
  Sense strand starting at position 3201 of SEQ ID NO: 2380
gggugacucugauuaauaa

SEQ ID NO: 184673 - RNA, 19 nt, Artificial Sequence
  Description of Artificial Sequence: Synthetic oligonucleotide
  Antisense strand to SEQ ID NO: 184672
uuauuaaucagagucaccc

SEQ ID NO: 184674 - RNA, 19 nt, Artificial Sequence
  Description of Artificial Sequence: Synthetic oligonucleotide
  Sense strand starting at position 3286 of SEQ ID NO: 2380
ugaaguaauacacaugcga

SEQ ID NO: 184675 - RNA, 19 nt, Artificial Sequence
  Description of Artificial Sequence: Synthetic oligonucleotide
  Antisense strand to SEQ ID NO: 184674
ucgcauguguauuacuuca

SEQ ID NO: 184676 - RNA, 19 nt, Artificial Sequence
  Description of Artificial Sequence: Synthetic oligonucleotide
  Sense strand starting at position 3685 of SEQ ID NO: 2380
agucaugauguauaccaua

SEQ ID NO: 184677 - RNA, 19 nt, Artificial Sequence
  Description of Artificial Sequence: Synthetic oligonucleotide
  Antisense strand to SEQ ID NO: 184676
uaugguauacaucaugacu

SEQ ID NO: 184678 - RNA, 19 nt, Artificial Sequence
  Description of Artificial Sequence: Synthetic oligonucleotide
  Sense strand starting at position 3778 of SEQ ID NO: 2380
gcucaagauacugguaaga

SEQ ID NO: 184679 - RNA, 19 nt, Artificial Sequence
  Description of Artificial Sequence: Synthetic oligonucleotide
  Antisense strand to SEQ ID NO: 184678
ucuuaccaguaucuugagc

SEQ ID NO: 184680 - RNA, 19 nt, Artificial Sequence
  Description of Artificial Sequence: Synthetic oligonucleotide
  Sense strand starting at position 3526 of SEQ ID NO: 2381
ucacuacccggucauauua

SEQ ID NO: 184681 - RNA, 19 nt, Artificial Sequence
  Description of Artificial Sequence: Synthetic oligonucleotide
  Antisense strand to SEQ ID NO: 184680
uaauaugaccggguaguga

SEQ ID NO: 184682 - RNA, 19 nt, Artificial Sequence
  Description of Artificial Sequence: Synthetic oligonucleotide
  Sense strand starting at position 3380 of SEQ ID NO: 2381
cugaaugguggcuggaaga

SEQ ID NO: 184683 - RNA, 19 nt, Artificial Sequence
  Description of Artificial Sequence: Synthetic oligonucleotide
  Antisense strand to SEQ ID NO: 184682
ucuuccagccaccauucag

SEQ ID NO: 184684 - RNA, 19 nt, Artificial Sequence
  Description of Artificial Sequence: Synthetic oligonucleotide
  Sense strand starting at position 3345 of SEQ ID NO: 2381
uugagaggugccuggaaag

SEQ ID NO: 184685 - RNA, 19 nt, Artificial Sequence
  Description of Artificial Sequence: Synthetic oligonucleotide
  Antisense strand to SEQ ID NO: 184684
cuuuccaggcaccucucaa

SEQ ID NO: 184686 - RNA, 19 nt, Artificial Sequence
  Description of Artificial Sequence: Synthetic oligonucleotide
  Sense strand starting at position 3256 of SEQ ID NO: 2381
acuuuagaggauuguaacu

SEQ ID NO: 184687 - RNA, 19 nt, Artificial Sequence
  Description of Artificial Sequence: Synthetic oligonucleotide
  Antisense strand to SEQ ID NO: 184686
aguuacaauccucuaaagu

SEQ ID NO: 184688 - RNA, 19 nt, Artificial Sequence
  Description of Artificial Sequence: Synthetic oligonucleotide
  Sense strand starting at position 3082 of SEQ ID NO: 2381
gugggagauccaugaugca

SEQ ID NO: 184689 - RNA, 19 nt, Artificial Sequence
  Description of Artificial Sequence: Synthetic oligonucleotide
  Antisense strand to SEQ ID NO: 184688
ugcaucauggaucucccac

SEQ ID NO: 184690 - RNA, 19 nt, Artificial Sequence
  Description of Artificial Sequence: Synthetic oligonucleotide
  Sense strand starting at position 3058 of SEQ ID NO: 2381
ccuggaaaccauugacuua

SEQ ID NO: 184691 - RNA, 19 nt, Artificial Sequence
  Description of Artificial Sequence: Synthetic oligonucleotide
  Antisense strand to SEQ ID NO: 184690
uaagucaaugguuuccagg

SEQ ID NO: 184692 - RNA, 19 nt, Artificial Sequence
  Description of Artificial Sequence: Synthetic oligonucleotide
  Sense strand starting at position 2830 of SEQ ID NO: 2381
guauauaucgaauaaacga

SEQ ID NO: 184693 - RNA, 19 nt, Artificial Sequence
  Description of Artificial Sequence: Synthetic oligonucleotide
  Antisense strand to SEQ ID NO: 184692
ucguuuauucgauauauac

SEQ ID NO: 184694 - RNA, 19 nt, Artificial Sequence
  Description of Artificial Sequence: Synthetic oligonucleotide
  Sense strand starting at position 2818 of SEQ ID NO: 2381
agggaaacguuaguauaua

SEQ ID NO: 184695 - RNA, 19 nt, Artificial Sequence
  Description of Artificial Sequence: Synthetic oligonucleotide
  Antisense strand to SEQ ID NO: 184694
uauauacuaacguuucccu

SEQ ID NO: 184696 - RNA, 19 nt, Artificial Sequence
  Description of Artificial Sequence: Synthetic oligonucleotide
  Sense strand starting at position 2738 of SEQ ID NO: 2381
ggucucuuagaugagaagu

SEQ ID NO: 184697 - RNA, 19 nt, Artificial Sequence
  Description of Artificial Sequence: Synthetic oligonucleotide
  Antisense strand to SEQ ID NO: 184696
acuucucaucuaagagacc

SEQ ID NO: 184698 - RNA, 19 nt, Artificial Sequence
  Description of Artificial Sequence: Synthetic oligonucleotide
  Sense strand starting at position 2737 of SEQ ID NO: 2381
gggucucuuagaugagaag

SEQ ID NO: 184699 - RNA, 19 nt, Artificial Sequence
  Description of Artificial Sequence: Synthetic oligonucleotide
  Antisense strand to SEQ ID NO: 184698
cuucucaucuaagagaccc

SEQ ID NO: 184700 - RNA, 19 nt, Artificial Sequence
  Description of Artificial Sequence: Synthetic oligonucleotide
  Sense strand starting at position 2595 of SEQ ID NO: 2381
agaauagguccucagguuu

SEQ ID NO: 184701 - RNA, 19 nt, Artificial Sequence
  Description of Artificial Sequence: Synthetic oligonucleotide
  Antisense strand to SEQ ID NO: 184700
aaaccugaggaccuauucu

SEQ ID NO: 184702 - RNA, 19 nt, Artificial Sequence
  Description of Artificial Sequence: Synthetic oligonucleotide
  Sense strand starting at position 2594 of SEQ ID NO: 2381
cagaauagguccucagguu

SEQ ID NO: 184703 - RNA, 19 nt, Artificial Sequence
  Description of Artificial Sequence: Synthetic oligonucleotide
  Antisense strand to SEQ ID NO: 184702
aaccugaggaccuauucug

SEQ ID NO: 184704 - RNA, 19 nt, Artificial Sequence
  Description of Artificial Sequence: Synthetic oligonucleotide
  Sense strand starting at position 2561 of SEQ ID NO: 2381
guuccuuuauuucuguauu

SEQ ID NO: 184705 - RNA, 19 nt, Artificial Sequence
  Description of Artificial Sequence: Synthetic oligonucleotide
  Antisense strand to SEQ ID NO: 184704
aauacagaaauaaaggaac

SEQ ID NO: 184706 - RNA, 19 nt, Artificial Sequence
  Description of Artificial Sequence: Synthetic oligonucleotide
  Sense strand starting at position 2554 of SEQ ID NO: 2381
ggcuguaguuccuuuauuu

SEQ ID NO: 184707 - RNA, 19 nt, Artificial Sequence
  Description of Artificial Sequence: Synthetic oligonucleotide
  Antisense strand to SEQ ID NO: 184706
aaauaaaggaacuacagcc

SEQ ID NO: 184708 - RNA, 19 nt, Artificial Sequence
  Description of Artificial Sequence: Synthetic oligonucleotide
  Sense strand starting at position 2522 of SEQ ID NO: 2381
uuauaaucugcuuacgaga

SEQ ID NO: 184709 - RNA, 19 nt, Artificial Sequence
  Description of Artificial Sequence: Synthetic oligonucleotide
  Antisense strand to SEQ ID NO: 184708
ucucguaagcagauuauaa

SEQ ID NO: 184710 - RNA, 19 nt, Artificial Sequence
  Description of Artificial Sequence: Synthetic oligonucleotide
  Sense strand starting at position 2506 of SEQ ID NO: 2381
gucacugcagaucauauua

SEQ ID NO: 184711 - RNA, 19 nt, Artificial Sequence
  Description of Artificial Sequence: Synthetic oligonucleotide
  Antisense strand to SEQ ID NO: 184710
uaauaugaucugcagugac

SEQ ID NO: 184712 - RNA, 19 nt, Artificial Sequence
  Description of Artificial Sequence: Synthetic oligonucleotide
  Sense strand starting at position 2503 of SEQ ID NO: 2381
uuugucacugcagaucaua

SEQ ID NO: 184713 - RNA, 19 nt, Artificial Sequence
  Description of Artificial Sequence: Synthetic oligonucleotide
  Antisense strand to SEQ ID NO: 184712
uaugaucugcagugacaaa

SEQ ID NO: 184714 - RNA, 19 nt, Artificial Sequence
  Description of Artificial Sequence: Synthetic oligonucleotide
  Sense strand starting at position 2443 of SEQ ID NO: 2381
guauuugucacaugguguu

SEQ ID NO: 184715 - RNA, 19 nt, Artificial Sequence
  Description of Artificial Sequence: Synthetic oligonucleotide
  Antisense strand to SEQ ID NO: 184714
aacaccaugugacaaauac

SEQ ID NO: 184716 - RNA, 19 nt, Artificial Sequence
  Description of Artificial Sequence: Synthetic oligonucleotide
  Sense strand starting at position 2408 of SEQ ID NO: 2381
ucucuaaaguaguugaaau

SEQ ID NO: 184717 - RNA, 19 nt, Artificial Sequence
  Description of Artificial Sequence: Synthetic oligonucleotide
  Antisense strand to SEQ ID NO: 184716
auuucaacuacuuuagaga

SEQ ID NO: 184718 - RNA, 19 nt, Artificial Sequence
  Description of Artificial Sequence: Synthetic oligonucleotide
  Sense strand starting at position 2405 of SEQ ID NO: 2381
guuucucuaaaguaguuga

SEQ ID NO: 184719 - RNA, 19 nt, Artificial Sequence
  Description of Artificial Sequence: Synthetic oligonucleotide
  Antisense strand to SEQ ID NO: 184718
ucaacuacuuuagagaaac

SEQ ID NO: 184720 - RNA, 19 nt, Artificial Sequence
  Description of Artificial Sequence: Synthetic oligonucleotide
  Sense strand starting at position 2382 of SEQ ID NO: 2381
ccuagugauccugagggca

SEQ ID NO: 184721 - RNA, 19 nt, Artificial Sequence
  Description of Artificial Sequence: Synthetic oligonucleotide
  Antisense strand to SEQ ID NO: 184720
ugcccucaggaucacuagg

SEQ ID NO: 184722 - RNA, 19 nt, Artificial Sequence
  Description of Artificial Sequence: Synthetic oligonucleotide
  Sense strand starting at position 2367 of SEQ ID NO: 2381
aguguuccagaguaaccua

SEQ ID NO: 184723 - RNA, 19 nt, Artificial Sequence
  Description of Artificial Sequence: Synthetic oligonucleotide
  Antisense strand to SEQ ID NO: 184722
uagguuacucuggaacacu

SEQ ID NO: 184724 - RNA, 19 nt, Artificial Sequence
  Description of Artificial Sequence: Synthetic oligonucleotide
  Sense strand starting at position 2364 of SEQ ID NO: 2381
cugaguguuccagaguaac

SEQ ID NO: 184725 - RNA, 19 nt, Artificial Sequence
  Description of Artificial Sequence: Synthetic oligonucleotide
  Antisense strand to SEQ ID NO: 184724
guuacucuggaacacucag

SEQ ID NO: 184726 - RNA, 19 nt, Artificial Sequence
  Description of Artificial Sequence: Synthetic oligonucleotide
  Sense strand starting at position 1870 of SEQ ID NO: 2381
cguagcgucacucacauuu

SEQ ID NO: 184727 - RNA, 19 nt, Artificial Sequence
  Description of Artificial Sequence: Synthetic oligonucleotide
  Antisense strand to SEQ ID NO: 184726
aaaugugagugacgcuacg

SEQ ID NO: 184728 - RNA, 19 nt, Artificial Sequence
  Description of Artificial Sequence: Synthetic oligonucleotide
  Sense strand starting at position 1375 of SEQ ID NO: 2381
acgugcuuucgcuuaagag

SEQ ID NO: 184729 - RNA, 19 nt, Artificial Sequence
  Description of Artificial Sequence: Synthetic oligonucleotide
  Antisense strand to SEQ ID NO: 184728
cucuuaagcgaaagcacgu

SEQ ID NO: 184730 - RNA, 19 nt, Artificial Sequence
  Description of Artificial Sequence: Synthetic oligonucleotide
  Sense strand starting at position 1345 of SEQ ID NO: 2381
gagucuuaccacuggaagc

SEQ ID NO: 184731 - RNA, 19 nt, Artificial Sequence
  Description of Artificial Sequence: Synthetic oligonucleotide
  Antisense strand to SEQ ID NO: 184730
gcuuccagugguaagacuc

SEQ ID NO: 184732 - RNA, 19 nt, Artificial Sequence
  Description of Artificial Sequence: Synthetic oligonucleotide
  Sense strand starting at position 1318 of SEQ ID NO: 2381
ugugauucuuaaccauuag

SEQ ID NO: 184733 - RNA, 19 nt, Artificial Sequence
  Description of Artificial Sequence: Synthetic oligonucleotide
  Antisense strand to SEQ ID NO: 184732
cuaaugguuaagaaucaca

SEQ ID NO: 184734 - RNA, 19 nt, Artificial Sequence
  Description of Artificial Sequence: Synthetic oligonucleotide
  Sense strand starting at position 1168 of SEQ ID NO: 2381
guaccuuggcucuagaucu

SEQ ID NO: 184735 - RNA, 19 nt, Artificial Sequence
  Description of Artificial Sequence: Synthetic oligonucleotide
  Antisense strand to SEQ ID NO: 184734
agaucuagagccaagguac

SEQ ID NO: 184736 - RNA, 19 nt, Artificial Sequence
  Description of Artificial Sequence: Synthetic oligonucleotide
  Sense strand starting at position 1095 of SEQ ID NO: 2381
aaaugaguaaagugagguu

SEQ ID NO: 184737 - RNA, 19 nt, Artificial Sequence
  Description of Artificial Sequence: Synthetic oligonucleotide
  Antisense strand to SEQ ID NO: 184736
aaccucacuuuacucauuu

SEQ ID NO: 184738 - RNA, 19 nt, Artificial Sequence
  Description of Artificial Sequence: Synthetic oligonucleotide
  Sense strand starting at position 989 of SEQ ID NO: 2381
guaucugguagauaaguaa

SEQ ID NO: 184739 - RNA, 19 nt, Artificial Sequence
  Description of Artificial Sequence: Synthetic oligonucleotide
  Antisense strand to SEQ ID NO: 184738
uuacuuaucuaccagauac

SEQ ID NO: 184740 - RNA, 19 nt, Artificial Sequence
  Description of Artificial Sequence: Synthetic oligonucleotide
  Sense strand starting at position 987 of SEQ ID NO: 2381
uaguaucugguagauaagu

SEQ ID NO: 184741 - RNA, 19 nt, Artificial Sequence
  Description of Artificial Sequence: Synthetic oligonucleotide
  Antisense strand to SEQ ID NO: 184740
acuuaucuaccagauacua

SEQ ID NO: 184742 - RNA, 19 nt, Artificial Sequence
  Description of Artificial Sequence: Synthetic oligonucleotide
  Sense strand starting at position 852 of SEQ ID NO: 2381
cucuguauccuagauagca

SEQ ID NO: 184743 - RNA, 19 nt, Artificial Sequence
  Description of Artificial Sequence: Synthetic oligonucleotide
  Antisense strand to SEQ ID NO: 184742
ugcuaucuaggauacagag

SEQ ID NO: 184744 - RNA, 19 nt, Artificial Sequence
  Description of Artificial Sequence: Synthetic oligonucleotide
  Sense strand starting at position 769 of SEQ ID NO: 2381
uggaaaguaucacuuuggu

SEQ ID NO: 184745 - RNA, 19 nt, Artificial Sequence
  Description of Artificial Sequence: Synthetic oligonucleotide
  Antisense strand to SEQ ID NO: 184744
accaaagugauacuuucca

SEQ ID NO: 184746 - RNA, 19 nt, Artificial Sequence
  Description of Artificial Sequence: Synthetic oligonucleotide
  Sense strand starting at position 757 of SEQ ID NO: 2381
ggcuccauuacuuggaaag

SEQ ID NO: 184747 - RNA, 19 nt, Artificial Sequence
  Description of Artificial Sequence: Synthetic oligonucleotide
  Antisense strand to SEQ ID NO: 184746
cuuuccaaguaauggagcc

SEQ ID NO: 184748 - RNA, 19 nt, Artificial Sequence
  Description of Artificial Sequence: Synthetic oligonucleotide
  Sense strand starting at position 756 of SEQ ID NO: 2381
uggcuccauuacuuggaaa

SEQ ID NO: 184749 - RNA, 19 nt, Artificial Sequence
  Description of Artificial Sequence: Synthetic oligonucleotide
  Antisense strand to SEQ ID NO: 184748
uuuccaaguaauggagcca

SEQ ID NO: 184750 - RNA, 19 nt, Artificial Sequence
  Description of Artificial Sequence: Synthetic oligonucleotide
  Sense strand starting at position 663 of SEQ ID NO: 2381
ccaggaagguacucaucuu

SEQ ID NO: 184751 - RNA, 19 nt, Artificial Sequence
  Description of Artificial Sequence: Synthetic oligonucleotide
  Antisense strand to SEQ ID NO: 184750
aagaugaguaccuuccugg

SEQ ID NO: 184752 - RNA, 19 nt, Artificial Sequence
  Description of Artificial Sequence: Synthetic oligonucleotide
  Sense strand starting at position 311 of SEQ ID NO: 2381
aguggaaagguguguugaa

SEQ ID NO: 184753 - RNA, 19 nt, Artificial Sequence
  Description of Artificial Sequence: Synthetic oligonucleotide
  Antisense strand to SEQ ID NO: 184752
uucaacacaccuuuccacu

SEQ ID NO: 184754 - RNA, 19 nt, Artificial Sequence
  Description of Artificial Sequence: Synthetic oligonucleotide
  Sense strand starting at position 144 of SEQ ID NO: 2381
acacaucugcuugaaugua

SEQ ID NO: 184755 - RNA, 19 nt, Artificial Sequence
  Description of Artificial Sequence: Synthetic oligonucleotide
  Antisense strand to SEQ ID NO: 184754
uacauucaagcagaugugu

SEQ ID NO: 184756 - RNA, 19 nt, Artificial Sequence
  Description of Artificial Sequence: Synthetic oligonucleotide
  Sense strand starting at position 88 of SEQ ID NO: 2381
aucugaucccacgauaggu

SEQ ID NO: 184757 - RNA, 19 nt, Artificial Sequence
  Description of Artificial Sequence: Synthetic oligonucleotide
  Antisense strand to SEQ ID NO: 184756
accuaucgugggaucagau

SEQ ID NO: 184758 - RNA, 19 nt, Artificial Sequence
  Description of Artificial Sequence: Synthetic oligonucleotide
  Sense strand starting at position 71 of SEQ ID NO: 2381
cuuuguaucccugaaguau

SEQ ID NO: 184759 - RNA, 19 nt, Artificial Sequence
  Description of Artificial Sequence: Synthetic oligonucleotide
  Antisense strand to SEQ ID NO: 184758
auacuucagggauacaaag

SEQ ID NO: 184760 - RNA, 19 nt, Artificial Sequence
  Description of Artificial Sequence: Synthetic oligonucleotide
  Sense strand starting at position 88 of SEQ ID NO: 2382
ccuuuaaauuagguauagu

SEQ ID NO: 184761 - RNA, 19 nt, Artificial Sequence
  Description of Artificial Sequence: Synthetic oligonucleotide
  Antisense strand to SEQ ID NO: 184760
acuauaccuaauuuaaagg

SEQ ID NO: 184762 - RNA, 19 nt, Artificial Sequence
  Description of Artificial Sequence: Synthetic oligonucleotide
  Sense strand starting at position 99 of SEQ ID NO: 2382
gguauaguuagacaucagu

SEQ ID NO: 184763 - RNA, 19 nt, Artificial Sequence
  Description of Artificial Sequence: Synthetic oligonucleotide
  Antisense strand to SEQ ID NO: 184762
acugaugucuaacuauacc

SEQ ID NO: 184764 - RNA, 19 nt, Artificial Sequence
  Description of Artificial Sequence: Synthetic oligonucleotide
  Sense strand starting at position 301 of SEQ ID NO: 2382
guaacagcucuugaguucu

SEQ ID NO: 184765 - RNA, 19 nt, Artificial Sequence
  Description of Artificial Sequence: Synthetic oligonucleotide
  Antisense strand to SEQ ID NO: 184764
agaacucaagagcuguuac

SEQ ID NO: 184766 - RNA, 19 nt, Artificial Sequence
  Description of Artificial Sequence: Synthetic oligonucleotide
  Sense strand starting at position 678 of SEQ ID NO: 2382
cuugaugaacuuugauguu

SEQ ID NO: 184767 - RNA, 19 nt, Artificial Sequence
  Description of Artificial Sequence: Synthetic oligonucleotide
  Antisense strand to SEQ ID NO: 184766
aacaucaaaguucaucaag

SEQ ID NO: 184768 - RNA, 19 nt, Artificial Sequence
  Description of Artificial Sequence: Synthetic oligonucleotide
  Sense strand starting at position 698 of SEQ ID NO: 2382
uuugcaacugauuauuagu

SEQ ID NO: 184769 - RNA, 19 nt, Artificial Sequence
  Description of Artificial Sequence: Synthetic oligonucleotide
  Antisense strand to SEQ ID NO: 184768
acuaauaaucaguugcaaa

SEQ ID NO: 184770 - RNA, 19 nt, Artificial Sequence
  Description of Artificial Sequence: Synthetic oligonucleotide
  Sense strand starting at position 700 of SEQ ID NO: 2382
ugcaacugauuauuaguaa

SEQ ID NO: 184771 - RNA, 19 nt, Artificial Sequence
  Description of Artificial Sequence: Synthetic oligonucleotide
  Antisense strand to SEQ ID NO: 184770
uuacuaauaaucaguugca

SEQ ID NO: 184772 - RNA, 19 nt, Artificial Sequence
  Description of Artificial Sequence: Synthetic oligonucleotide
  Sense strand starting at position 715 of SEQ ID NO: 2382
guaacugauauguguauca

SEQ ID NO: 184773 - RNA, 19 nt, Artificial Sequence
  Description of Artificial Sequence: Synthetic oligonucleotide
  Antisense strand to SEQ ID NO: 184772
ugauacacauaucaguuac

SEQ ID NO: 184774 - RNA, 19 nt, Artificial Sequence
  Description of Artificial Sequence: Synthetic oligonucleotide
  Sense strand starting at position 772 of SEQ ID NO: 2382
uaggauauagucugccuaa

SEQ ID NO: 184775 - RNA, 19 nt, Artificial Sequence
  Description of Artificial Sequence: Synthetic oligonucleotide
  Antisense strand to SEQ ID NO: 184774
uuaggcagacuauauccua

SEQ ID NO: 184776 - RNA, 19 nt, Artificial Sequence
  Description of Artificial Sequence: Synthetic oligonucleotide
  Sense strand starting at position 773 of SEQ ID NO: 2382
aggauauagucugccuaag

SEQ ID NO: 184777 - RNA, 19 nt, Artificial Sequence
  Description of Artificial Sequence: Synthetic oligonucleotide
  Antisense strand to SEQ ID NO: 184776
cuuaggcagacuauauccu

SEQ ID NO: 184778 - RNA, 19 nt, Artificial Sequence
  Description of Artificial Sequence: Synthetic oligonucleotide
  Sense strand starting at position 775 of SEQ ID NO: 2382
gauauagucugccuaagau

SEQ ID NO: 184779 - RNA, 19 nt, Artificial Sequence
  Description of Artificial Sequence: Synthetic oligonucleotide
  Antisense strand to SEQ ID NO: 184778
aucuuaggcagacuauauc

SEQ ID NO: 184780 - RNA, 19 nt, Artificial Sequence
  Description of Artificial Sequence: Synthetic oligonucleotide
  Sense strand starting at position 827 of SEQ ID NO: 2382
guuugugacuagguauaca

SEQ ID NO: 184781 - RNA, 19 nt, Artificial Sequence
  Description of Artificial Sequence: Synthetic oligonucleotide
  Antisense strand to SEQ ID NO: 184780
uguauaccuagucacaaac

SEQ ID NO: 184782 - RNA, 19 nt, Artificial Sequence
  Description of Artificial Sequence: Synthetic oligonucleotide
  Sense strand starting at position 867 of SEQ ID NO: 2382
guacuuccacauugaggau

SEQ ID NO: 184783 - RNA, 19 nt, Artificial Sequence
  Description of Artificial Sequence: Synthetic oligonucleotide
  Antisense strand to SEQ ID NO: 184782
auccucaauguggaaguac

SEQ ID NO: 184784 - RNA, 19 nt, Artificial Sequence
  Description of Artificial Sequence: Synthetic oligonucleotide
  Sense strand starting at position 979 of SEQ ID NO: 2382
uaaguaguacguuaucuag

SEQ ID NO: 184785 - RNA, 19 nt, Artificial Sequence
  Description of Artificial Sequence: Synthetic oligonucleotide
  Antisense strand to SEQ ID NO: 184784
cuagauaacguacuacuua

SEQ ID NO: 184786 - RNA, 19 nt, Artificial Sequence
  Description of Artificial Sequence: Synthetic oligonucleotide
  Sense strand starting at position 986 of SEQ ID NO: 2382
uacguuaucuagucaauag

SEQ ID NO: 184787 - RNA, 19 nt, Artificial Sequence
  Description of Artificial Sequence: Synthetic oligonucleotide
  Antisense strand to SEQ ID NO: 184786
cuauugacuagauaacgua

SEQ ID NO: 184788 - RNA, 19 nt, Artificial Sequence
  Description of Artificial Sequence: Synthetic oligonucleotide
  Sense strand starting at position 993 of SEQ ID NO: 2382
ucuagucaauagcuuugaa

SEQ ID NO: 184789 - RNA, 19 nt, Artificial Sequence
  Description of Artificial Sequence: Synthetic oligonucleotide
  Antisense strand to SEQ ID NO: 184788
uucaaagcuauugacuaga

SEQ ID NO: 184790 - RNA, 19 nt, Artificial Sequence
  Description of Artificial Sequence: Synthetic oligonucleotide
  Sense strand starting at position 996 of SEQ ID NO: 2382
agucaauagcuuugaaucu

SEQ ID NO: 184791 - RNA, 19 nt, Artificial Sequence
  Description of Artificial Sequence: Synthetic oligonucleotide
  Antisense strand to SEQ ID NO: 184790
agauucaaagcuauugacu

SEQ ID NO: 184792 - RNA, 19 nt, Artificial Sequence
  Description of Artificial Sequence: Synthetic oligonucleotide
  Sense strand starting at position 1154 of SEQ ID NO: 2382
accugucaaguguaacgau

SEQ ID NO: 184793 - RNA, 19 nt, Artificial Sequence
  Description of Artificial Sequence: Synthetic oligonucleotide
  Antisense strand to SEQ ID NO: 184792
aucguuacacuugacaggu

SEQ ID NO: 184794 - RNA, 19 nt, Artificial Sequence
  Description of Artificial Sequence: Synthetic oligonucleotide
  Sense strand starting at position 1179 of SEQ ID NO: 2382
ccaccuuccggucauuaua

SEQ ID NO: 184795 - RNA, 19 nt, Artificial Sequence
  Description of Artificial Sequence: Synthetic oligonucleotide
  Antisense strand to SEQ ID NO: 184794
uauaaugaccggaaggugg

SEQ ID NO: 184796 - RNA, 19 nt, Artificial Sequence
  Description of Artificial Sequence: Synthetic oligonucleotide
  Sense strand starting at position 1181 of SEQ ID NO: 2382
accuuccggucauuauaaa

SEQ ID NO: 184797 - RNA, 19 nt, Artificial Sequence
  Description of Artificial Sequence: Synthetic oligonucleotide
  Antisense strand to SEQ ID NO: 184796
uuuauaaugaccggaaggu

SEQ ID NO: 184798 - RNA, 19 nt, Artificial Sequence
  Description of Artificial Sequence: Synthetic oligonucleotide
  Sense strand starting at position 1882 of SEQ ID NO: 2382
cggagauaaucgaggaagu

SEQ ID NO: 184799 - RNA, 19 nt, Artificial Sequence
  Description of Artificial Sequence: Synthetic oligonucleotide
  Antisense strand to SEQ ID NO: 184798
acuuccucgauuaucuccg

SEQ ID NO: 184800 - RNA, 19 nt, Artificial Sequence
  Description of Artificial Sequence: Synthetic oligonucleotide
  Sense strand starting at position 1883 of SEQ ID NO: 2382
ggagauaaucgaggaaguc

SEQ ID NO: 184801 - RNA, 19 nt, Artificial Sequence
  Description of Artificial Sequence: Synthetic oligonucleotide
  Antisense strand to SEQ ID NO: 184800
gacuuccucgauuaucucc

SEQ ID NO: 184802 - RNA, 19 nt, Artificial Sequence
  Description of Artificial Sequence: Synthetic oligonucleotide
  Sense strand starting at position 2115 of SEQ ID NO: 2382
gugaugaggcguuagaaag

SEQ ID NO: 184803 - RNA, 19 nt, Artificial Sequence
  Description of Artificial Sequence: Synthetic oligonucleotide
  Antisense strand to SEQ ID NO: 184802
cuuucuaacgccucaucac

SEQ ID NO: 184804 - RNA, 19 nt, Artificial Sequence
  Description of Artificial Sequence: Synthetic oligonucleotide
  Sense strand starting at position 2369 of SEQ ID NO: 2382
aguuaacacggcuaguuua

SEQ ID NO: 184805 - RNA, 19 nt, Artificial Sequence
  Description of Artificial Sequence: Synthetic oligonucleotide
  Antisense strand to SEQ ID NO: 184804
uaaacuagccguguuaacu

SEQ ID NO: 184806 - RNA, 19 nt, Artificial Sequence
  Description of Artificial Sequence: Synthetic oligonucleotide
  Sense strand starting at position 2527 of SEQ ID NO: 2382
uugguaucauguuuagauc

SEQ ID NO: 184807 - RNA, 19 nt, Artificial Sequence
  Description of Artificial Sequence: Synthetic oligonucleotide
  Antisense strand to SEQ ID NO: 184806
gaucuaaacaugauaccaa

SEQ ID NO: 184808 - RNA, 19 nt, Artificial Sequence
  Description of Artificial Sequence: Synthetic oligonucleotide
  Sense strand starting at position 2560 of SEQ ID NO: 2382
agcugucuaccagaaacaa

SEQ ID NO: 184809 - RNA, 19 nt, Artificial Sequence
  Description of Artificial Sequence: Synthetic oligonucleotide
  Antisense strand to SEQ ID NO: 184808
uuguuucugguagacagcu

SEQ ID NO: 184810 - RNA, 19 nt, Artificial Sequence
  Description of Artificial Sequence: Synthetic oligonucleotide
  Sense strand starting at position 2595 of SEQ ID NO: 2382
uccguucucuuauuuguuu

SEQ ID NO: 184811 - RNA, 19 nt, Artificial Sequence
  Description of Artificial Sequence: Synthetic oligonucleotide
  Antisense strand to SEQ ID NO: 184810
aaacaaauaagagaacgga

SEQ ID NO: 184812 - RNA, 19 nt, Artificial Sequence
  Description of Artificial Sequence: Synthetic oligonucleotide
  Sense strand starting at position 2782 of SEQ ID NO: 2382
gguguucaagaacaagagu

SEQ ID NO: 184813 - RNA, 19 nt, Artificial Sequence
  Description of Artificial Sequence: Synthetic oligonucleotide
  Antisense strand to SEQ ID NO: 184812
acucuuguucuugaacacc

SEQ ID NO: 184814 - RNA, 19 nt, Artificial Sequence
  Description of Artificial Sequence: Synthetic oligonucleotide
  Sense strand starting at position 2818 of SEQ ID NO: 2382
gaggaaagaucugcggaca

SEQ ID NO: 184815 - RNA, 19 nt, Artificial Sequence
  Description of Artificial Sequence: Synthetic oligonucleotide
  Antisense strand to SEQ ID NO: 184814
uguccgcagaucuuuccuc

SEQ ID NO: 184816 - RNA, 19 nt, Artificial Sequence
  Description of Artificial Sequence: Synthetic oligonucleotide
  Sense strand starting at position 2919 of SEQ ID NO: 2382
acuaacgaauuugaaagau

SEQ ID NO: 184817 - RNA, 19 nt, Artificial Sequence
  Description of Artificial Sequence: Synthetic oligonucleotide
  Antisense strand to SEQ ID NO: 184816
aucuuucaaauucguuagu

SEQ ID NO: 184818 - RNA, 19 nt, Artificial Sequence
  Description of Artificial Sequence: Synthetic oligonucleotide
  Sense strand starting at position 3049 of SEQ ID NO: 2382
uucugagauuuagaaacag

SEQ ID NO: 184819 - RNA, 19 nt, Artificial Sequence
  Description of Artificial Sequence: Synthetic oligonucleotide
  Antisense strand to SEQ ID NO: 184818
cuguuucuaaaucucagaa

SEQ ID NO: 184820 - RNA, 19 nt, Artificial Sequence
  Description of Artificial Sequence: Synthetic oligonucleotide
  Sense strand starting at position 3066 of SEQ ID NO: 2382
agccguugaguugucaguu

SEQ ID NO: 184821 - RNA, 19 nt, Artificial Sequence
  Description of Artificial Sequence: Synthetic oligonucleotide
  Antisense strand to SEQ ID NO: 184820
aacugacaacucaacggcu

SEQ ID NO: 184822 - RNA, 19 nt, Artificial Sequence
  Description of Artificial Sequence: Synthetic oligonucleotide
  Sense strand starting at position 3069 of SEQ ID NO: 2382
cguugaguugucaguugaa

SEQ ID NO: 184823 - RNA, 19 nt, Artificial Sequence
  Description of Artificial Sequence: Synthetic oligonucleotide
  Antisense strand to SEQ ID NO: 184822
uucaacugacaacucaacg

SEQ ID NO: 184824 - RNA, 19 nt, Artificial Sequence
  Description of Artificial Sequence: Synthetic oligonucleotide
  Sense strand starting at position 3364 of SEQ ID NO: 2382
cucugaacuccugagcuaa

SEQ ID NO: 184825 - RNA, 19 nt, Artificial Sequence
  Description of Artificial Sequence: Synthetic oligonucleotide
  Antisense strand to SEQ ID NO: 184824
uuagcucaggaguucagag

SEQ ID NO: 184826 - RNA, 19 nt, Artificial Sequence
  Description of Artificial Sequence: Synthetic oligonucleotide
  Sense strand starting at position 3465 of SEQ ID NO: 2382
gucuguauauuugcauguu

SEQ ID NO: 184827 - RNA, 19 nt, Artificial Sequence
  Description of Artificial Sequence: Synthetic oligonucleotide
  Antisense strand to SEQ ID NO: 184826
aacaugcaaauauacagac

SEQ ID NO: 184828 - RNA, 19 nt, Artificial Sequence
  Description of Artificial Sequence: Synthetic oligonucleotide
  Sense strand starting at position 3468 of SEQ ID NO: 2382
uguauauuugcauguuaug

SEQ ID NO: 184829 - RNA, 19 nt, Artificial Sequence
  Description of Artificial Sequence: Synthetic oligonucleotide
  Antisense strand to SEQ ID NO: 184828
cauaacaugcaaauauaca

SEQ ID NO: 184830 - RNA, 19 nt, Artificial Sequence
  Description of Artificial Sequence: Synthetic oligonucleotide
  Sense strand starting at position 3517 of SEQ ID NO: 2382
auuagaguuuagcuaguua

SEQ ID NO: 184831 - RNA, 19 nt, Artificial Sequence
  Description of Artificial Sequence: Synthetic oligonucleotide
  Antisense strand to SEQ ID NO: 184830
uaacuagcuaaacucuaau

SEQ ID NO: 184832 - RNA, 19 nt, Artificial Sequence
  Description of Artificial Sequence: Synthetic oligonucleotide
  Sense strand starting at position 3671 of SEQ ID NO: 2382
uuggaaugaucgcuuagga

SEQ ID NO: 184833 - RNA, 19 nt, Artificial Sequence
  Description of Artificial Sequence: Synthetic oligonucleotide
  Antisense strand to SEQ ID NO: 184832
uccuaagcgaucauuccaa

SEQ ID NO: 184834 - RNA, 19 nt, Artificial Sequence
  Description of Artificial Sequence: Synthetic oligonucleotide
  Sense strand starting at position 3819 of SEQ ID NO: 2382
uuauaauagcacugagcuu

SEQ ID NO: 184835 - RNA, 19 nt, Artificial Sequence
  Description of Artificial Sequence: Synthetic oligonucleotide
  Antisense strand to SEQ ID NO: 184834
aagcucagugcuauuauaa

SEQ ID NO: 184836 - RNA, 19 nt, Artificial Sequence
  Description of Artificial Sequence: Synthetic oligonucleotide
  Sense strand starting at position 3831 of SEQ ID NO: 2382
ugagcuuagagucagaacu

SEQ ID NO: 184837 - RNA, 19 nt, Artificial Sequence
  Description of Artificial Sequence: Synthetic oligonucleotide
  Antisense strand to SEQ ID NO: 184836
aguucugacucuaagcuca

SEQ ID NO: 184838 - RNA, 19 nt, Artificial Sequence
  Description of Artificial Sequence: Synthetic oligonucleotide
  Sense strand starting at position 3908 of SEQ ID NO: 2382
agauguuaguccucuaauu

SEQ ID NO: 184839 - RNA, 19 nt, Artificial Sequence
  Description of Artificial Sequence: Synthetic oligonucleotide
  Antisense strand to SEQ ID NO: 184838
aauuagaggacuaacaucu

SEQ ID NO: 184840 - RNA, 19 nt, Artificial Sequence
  Description of Artificial Sequence: Synthetic oligonucleotide
  Sense strand starting at position 3689 of SEQ ID NO: 2383
cuuuaaaugccauguagag

SEQ ID NO: 184841 - RNA, 19 nt, Artificial Sequence
  Description of Artificial Sequence: Synthetic oligonucleotide
  Antisense strand to SEQ ID NO: 184840
cucuacauggcauuuaaag

SEQ ID NO: 184842 - RNA, 19 nt, Artificial Sequence
  Description of Artificial Sequence: Synthetic oligonucleotide
  Sense strand starting at position 3524 of SEQ ID NO: 2383
cuagucauguaccugaaua

SEQ ID NO: 184843 - RNA, 19 nt, Artificial Sequence
  Description of Artificial Sequence: Synthetic oligonucleotide
  Antisense strand to SEQ ID NO: 184842
uauucagguacaugacuag

SEQ ID NO: 184844 - RNA, 19 nt, Artificial Sequence
  Description of Artificial Sequence: Synthetic oligonucleotide
  Sense strand starting at position 3516 of SEQ ID NO: 2383
uuccaauucuagucaugua

SEQ ID NO: 184845 - RNA, 19 nt, Artificial Sequence
  Description of Artificial Sequence: Synthetic oligonucleotide
  Antisense strand to SEQ ID NO: 184844
uacaugacuagaauuggaa

SEQ ID NO: 184846 - RNA, 19 nt, Artificial Sequence
  Description of Artificial Sequence: Synthetic oligonucleotide
  Sense strand starting at position 3394 of SEQ ID NO: 2383
gguaaagccaauggucuau

SEQ ID NO: 184847 - RNA, 19 nt, Artificial Sequence
  Description of Artificial Sequence: Synthetic oligonucleotide
  Antisense strand to SEQ ID NO: 184846
auagaccauuggcuuuacc

SEQ ID NO: 184848 - RNA, 19 nt, Artificial Sequence
  Description of Artificial Sequence: Synthetic oligonucleotide
  Sense strand starting at position 3393 of SEQ ID NO: 2383
ggguaaagccaauggucua

SEQ ID NO: 184849 - RNA, 19 nt, Artificial Sequence
  Description of Artificial Sequence: Synthetic oligonucleotide
  Antisense strand to SEQ ID NO: 184848
uagaccauuggcuuuaccc

SEQ ID NO: 184850 - RNA, 19 nt, Artificial Sequence
  Description of Artificial Sequence: Synthetic oligonucleotide
  Sense strand starting at position 3382 of SEQ ID NO: 2383
cagguuccuauggguaaag

SEQ ID NO: 184851 - RNA, 19 nt, Artificial Sequence
  Description of Artificial Sequence: Synthetic oligonucleotide
  Antisense strand to SEQ ID NO: 184850
cuuuacccauaggaaccug

SEQ ID NO: 184852 - RNA, 19 nt, Artificial Sequence
  Description of Artificial Sequence: Synthetic oligonucleotide
  Sense strand starting at position 3222 of SEQ ID NO: 2383
acauuuccuugagaagaca

SEQ ID NO: 184853 - RNA, 19 nt, Artificial Sequence
  Description of Artificial Sequence: Synthetic oligonucleotide
  Antisense strand to SEQ ID NO: 184852
ugucuucucaaggaaaugu

SEQ ID NO: 184854 - RNA, 19 nt, Artificial Sequence
  Description of Artificial Sequence: Synthetic oligonucleotide
  Sense strand starting at position 3127 of SEQ ID NO: 2383
agccuuaaucagggaaccu

SEQ ID NO: 184855 - RNA, 19 nt, Artificial Sequence
  Description of Artificial Sequence: Synthetic oligonucleotide
  Antisense strand to SEQ ID NO: 184854
agguucccugauuaaggcu

SEQ ID NO: 184856 - RNA, 19 nt, Artificial Sequence
  Description of Artificial Sequence: Synthetic oligonucleotide
  Sense strand starting at position 3078 of SEQ ID NO: 2383
aggaguauugcgggcauuu

SEQ ID NO: 184857 - RNA, 19 nt, Artificial Sequence
  Description of Artificial Sequence: Synthetic oligonucleotide
  Antisense strand to SEQ ID NO: 184856
aaaugcccgcaauacuccu

SEQ ID NO: 184858 - RNA, 19 nt, Artificial Sequence
  Description of Artificial Sequence: Synthetic oligonucleotide
  Sense strand starting at position 3068 of SEQ ID NO: 2383
aguugucuacaggaguauu

SEQ ID NO: 184859 - RNA, 19 nt, Artificial Sequence
  Description of Artificial Sequence: Synthetic oligonucleotide
  Antisense strand to SEQ ID NO: 184858
aauacuccuguagacaacu

SEQ ID NO: 184860 - RNA, 19 nt, Artificial Sequence
  Description of Artificial Sequence: Synthetic oligonucleotide
  Sense strand starting at position 3065 of SEQ ID NO: 2383
aagaguugucuacaggagu

SEQ ID NO: 184861 - RNA, 19 nt, Artificial Sequence
  Description of Artificial Sequence: Synthetic oligonucleotide
  Antisense strand to SEQ ID NO: 184860
acuccuguagacaacucuu

SEQ ID NO: 184862 - RNA, 19 nt, Artificial Sequence
  Description of Artificial Sequence: Synthetic oligonucleotide
  Sense strand starting at position 3061 of SEQ ID NO: 2383
uccuaagaguugucuacag

SEQ ID NO: 184863 - RNA, 19 nt, Artificial Sequence
  Description of Artificial Sequence: Synthetic oligonucleotide
  Antisense strand to SEQ ID NO: 184862
cuguagacaacucuuagga

SEQ ID NO: 184864 - RNA, 19 nt, Artificial Sequence
  Description of Artificial Sequence: Synthetic oligonucleotide
  Sense strand starting at position 3030 of SEQ ID NO: 2383
guggaagcaguguauaaug

SEQ ID NO: 184865 - RNA, 19 nt, Artificial Sequence
  Description of Artificial Sequence: Synthetic oligonucleotide
  Antisense strand to SEQ ID NO: 184864
cauuauacacugcuuccac

SEQ ID NO: 184866 - RNA, 19 nt, Artificial Sequence
  Description of Artificial Sequence: Synthetic oligonucleotide
  Sense strand starting at position 2962 of SEQ ID NO: 2383
uaggguuccuuacugauca

SEQ ID NO: 184867 - RNA, 19 nt, Artificial Sequence
  Description of Artificial Sequence: Synthetic oligonucleotide
  Antisense strand to SEQ ID NO: 184866
ugaucaguaaggaacccua

SEQ ID NO: 184868 - RNA, 19 nt, Artificial Sequence
  Description of Artificial Sequence: Synthetic oligonucleotide
  Sense strand starting at position 2935 of SEQ ID NO: 2383
uucuuaguugucuuguguu

SEQ ID NO: 184869 - RNA, 19 nt, Artificial Sequence
  Description of Artificial Sequence: Synthetic oligonucleotide
  Antisense strand to SEQ ID NO: 184868
aacacaagacaacuaagaa

SEQ ID NO: 184870 - RNA, 19 nt, Artificial Sequence
  Description of Artificial Sequence: Synthetic oligonucleotide
  Sense strand starting at position 2727 of SEQ ID NO: 2383
ccagccuagucuccuagaa

SEQ ID NO: 184871 - RNA, 19 nt, Artificial Sequence
  Description of Artificial Sequence: Synthetic oligonucleotide
  Antisense strand to SEQ ID NO: 184870
uucuaggagacuaggcugg

SEQ ID NO: 184872 - RNA, 19 nt, Artificial Sequence
  Description of Artificial Sequence: Synthetic oligonucleotide
  Sense strand starting at position 2597 of SEQ ID NO: 2383
cauguagcccuggaaauga

SEQ ID NO: 184873 - RNA, 19 nt, Artificial Sequence
  Description of Artificial Sequence: Synthetic oligonucleotide
  Antisense strand to SEQ ID NO: 184872
ucauuuccagggcuacaug

SEQ ID NO: 184874 - RNA, 19 nt, Artificial Sequence
  Description of Artificial Sequence: Synthetic oligonucleotide
  Sense strand starting at position 2596 of SEQ ID NO: 2383
acauguagcccuggaaaug

SEQ ID NO: 184875 - RNA, 19 nt, Artificial Sequence
  Description of Artificial Sequence: Synthetic oligonucleotide
  Antisense strand to SEQ ID NO: 184874
cauuuccagggcuacaugu

SEQ ID NO: 184876 - RNA, 19 nt, Artificial Sequence
  Description of Artificial Sequence: Synthetic oligonucleotide
  Sense strand starting at position 2336 of SEQ ID NO: 2383
agggauugaucuccgacac

SEQ ID NO: 184877 - RNA, 19 nt, Artificial Sequence
  Description of Artificial Sequence: Synthetic oligonucleotide
  Antisense strand to SEQ ID NO: 184876
gugucggagaucaaucccu

SEQ ID NO: 184878 - RNA, 19 nt, Artificial Sequence
  Description of Artificial Sequence: Synthetic oligonucleotide
  Sense strand starting at position 2294 of SEQ ID NO: 2383
acucucuucugggcagaca

SEQ ID NO: 184879 - RNA, 19 nt, Artificial Sequence
  Description of Artificial Sequence: Synthetic oligonucleotide
  Antisense strand to SEQ ID NO: 184878
ugucugcccagaagagagu

SEQ ID NO: 184880 - RNA, 19 nt, Artificial Sequence
  Description of Artificial Sequence: Synthetic oligonucleotide
  Sense strand starting at position 1645 of SEQ ID NO: 2383
ggagaagaguggagucaga

SEQ ID NO: 184881 - RNA, 19 nt, Artificial Sequence
  Description of Artificial Sequence: Synthetic oligonucleotide
  Antisense strand to SEQ ID NO: 184880
ucugacuccacucuucucc

SEQ ID NO: 184882 - RNA, 19 nt, Artificial Sequence
  Description of Artificial Sequence: Synthetic oligonucleotide
  Sense strand starting at position 1042 of SEQ ID NO: 2383
cacggacgcguuuaaauuu

SEQ ID NO: 184883 - RNA, 19 nt, Artificial Sequence
  Description of Artificial Sequence: Synthetic oligonucleotide
  Antisense strand to SEQ ID NO: 184882
aaauuuaaacgcguccgug

SEQ ID NO: 184884 - RNA, 19 nt, Artificial Sequence
  Description of Artificial Sequence: Synthetic oligonucleotide
  Sense strand starting at position 983 of SEQ ID NO: 2383
gucucaucugcucaucaca

SEQ ID NO: 184885 - RNA, 19 nt, Artificial Sequence
  Description of Artificial Sequence: Synthetic oligonucleotide
  Antisense strand to SEQ ID NO: 184884
ugugaugagcagaugagac

SEQ ID NO: 184886 - RNA, 19 nt, Artificial Sequence
  Description of Artificial Sequence: Synthetic oligonucleotide
  Sense strand starting at position 926 of SEQ ID NO: 2383
gggcauuagaccugguuug

SEQ ID NO: 184887 - RNA, 19 nt, Artificial Sequence
  Description of Artificial Sequence: Synthetic oligonucleotide
  Antisense strand to SEQ ID NO: 184886
caaaccaggucuaaugccc

SEQ ID NO: 184888 - RNA, 19 nt, Artificial Sequence
  Description of Artificial Sequence: Synthetic oligonucleotide
  Sense strand starting at position 774 of SEQ ID NO: 2383
uggacuaagugucuaagaa

SEQ ID NO: 184889 - RNA, 19 nt, Artificial Sequence
  Description of Artificial Sequence: Synthetic oligonucleotide
  Antisense strand to SEQ ID NO: 184888
uucuuagacacuuagucca

SEQ ID NO: 184890 - RNA, 19 nt, Artificial Sequence
  Description of Artificial Sequence: Synthetic oligonucleotide
  Sense strand starting at position 655 of SEQ ID NO: 2383
ggagaaugcuaauuagcau

SEQ ID NO: 184891 - RNA, 19 nt, Artificial Sequence
  Description of Artificial Sequence: Synthetic oligonucleotide
  Antisense strand to SEQ ID NO: 184890
augcuaauuagcauucucc

SEQ ID NO: 184892 - RNA, 19 nt, Artificial Sequence
  Description of Artificial Sequence: Synthetic oligonucleotide
  Sense strand starting at position 622 of SEQ ID NO: 2383
cugggagcuguguacucaa

SEQ ID NO: 184893 - RNA, 19 nt, Artificial Sequence
  Description of Artificial Sequence: Synthetic oligonucleotide
  Antisense strand to SEQ ID NO: 184892
uugaguacacagcucccag

SEQ ID NO: 184894 - RNA, 19 nt, Artificial Sequence
  Description of Artificial Sequence: Synthetic oligonucleotide
  Sense strand starting at position 545 of SEQ ID NO: 2383
uauaauuagugguuacaga

SEQ ID NO: 184895 - RNA, 19 nt, Artificial Sequence
  Description of Artificial Sequence: Synthetic oligonucleotide
  Antisense strand to SEQ ID NO: 184894
ucuguaaccacuaauuaua

SEQ ID NO: 184896 - RNA, 19 nt, Artificial Sequence
  Description of Artificial Sequence: Synthetic oligonucleotide
  Sense strand starting at position 541 of SEQ ID NO: 2383
acucuauaauuagugguua

SEQ ID NO: 184897 - RNA, 19 nt, Artificial Sequence
  Description of Artificial Sequence: Synthetic oligonucleotide
  Antisense strand to SEQ ID NO: 184896
uaaccacuaauuauagagu

SEQ ID NO: 184898 - RNA, 19 nt, Artificial Sequence
  Description of Artificial Sequence: Synthetic oligonucleotide
  Sense strand starting at position 450 of SEQ ID NO: 2383
cguguuauuucuuugaacu

SEQ ID NO: 184899 - RNA, 19 nt, Artificial Sequence
  Description of Artificial Sequence: Synthetic oligonucleotide
  Antisense strand to SEQ ID NO: 184898
aguucaaagaaauaacacg

SEQ ID NO: 184900 - RNA, 19 nt, Artificial Sequence
  Description of Artificial Sequence: Synthetic oligonucleotide
  Sense strand starting at position 449 of SEQ ID NO: 2383
gcguguuauuucuuugaac

SEQ ID NO: 184901 - RNA, 19 nt, Artificial Sequence
  Description of Artificial Sequence: Synthetic oligonucleotide
  Antisense strand to SEQ ID NO: 184900
guucaaagaaauaacacgc

SEQ ID NO: 184902 - RNA, 19 nt, Artificial Sequence
  Description of Artificial Sequence: Synthetic oligonucleotide
  Sense strand starting at position 445 of SEQ ID NO: 2383
ugaagcguguuauuucuuu

SEQ ID NO: 184903 - RNA, 19 nt, Artificial Sequence
  Description of Artificial Sequence: Synthetic oligonucleotide
  Antisense strand to SEQ ID NO: 184902
aaagaaauaacacgcuuca

SEQ ID NO: 184904 - RNA, 19 nt, Artificial Sequence
  Description of Artificial Sequence: Synthetic oligonucleotide
  Sense strand starting at position 423 of SEQ ID NO: 2383
auguuuaaugcucauggau

SEQ ID NO: 184905 - RNA, 19 nt, Artificial Sequence
  Description of Artificial Sequence: Synthetic oligonucleotide
  Antisense strand to SEQ ID NO: 184904
auccaugagcauuaaacau

SEQ ID NO: 184906 - RNA, 19 nt, Artificial Sequence
  Description of Artificial Sequence: Synthetic oligonucleotide
  Sense strand starting at position 422 of SEQ ID NO: 2383
aauguuuaaugcucaugga

SEQ ID NO: 184907 - RNA, 19 nt, Artificial Sequence
  Description of Artificial Sequence: Synthetic oligonucleotide
  Antisense strand to SEQ ID NO: 184906
uccaugagcauuaaacauu

SEQ ID NO: 184908 - RNA, 19 nt, Artificial Sequence
  Description of Artificial Sequence: Synthetic oligonucleotide
  Sense strand starting at position 412 of SEQ ID NO: 2383
aacguuugggaauguuuaa

SEQ ID NO: 184909 - RNA, 19 nt, Artificial Sequence
  Description of Artificial Sequence: Synthetic oligonucleotide
  Antisense strand to SEQ ID NO: 184908
uuaaacauucccaaacguu

SEQ ID NO: 184910 - RNA, 19 nt, Artificial Sequence
  Description of Artificial Sequence: Synthetic oligonucleotide
  Sense strand starting at position 406 of SEQ ID NO: 2383
gacaucaacguuugggaau

SEQ ID NO: 184911 - RNA, 19 nt, Artificial Sequence
  Description of Artificial Sequence: Synthetic oligonucleotide
  Antisense strand to SEQ ID NO: 184910
auucccaaacguugauguc

SEQ ID NO: 184912 - RNA, 19 nt, Artificial Sequence
  Description of Artificial Sequence: Synthetic oligonucleotide
  Sense strand starting at position 367 of SEQ ID NO: 2383
gaaauuccacacugagugu

SEQ ID NO: 184913 - RNA, 19 nt, Artificial Sequence
  Description of Artificial Sequence: Synthetic oligonucleotide
  Antisense strand to SEQ ID NO: 184912
acacucaguguggaauuuc

SEQ ID NO: 184914 - RNA, 19 nt, Artificial Sequence
  Description of Artificial Sequence: Synthetic oligonucleotide
  Sense strand starting at position 268 of SEQ ID NO: 2383
gcaagcaguccuuacaaau

SEQ ID NO: 184915 - RNA, 19 nt, Artificial Sequence
  Description of Artificial Sequence: Synthetic oligonucleotide
  Antisense strand to SEQ ID NO: 184914
auuuguaaggacugcuugc

SEQ ID NO: 184916 - RNA, 19 nt, Artificial Sequence
  Description of Artificial Sequence: Synthetic oligonucleotide
  Sense strand starting at position 181 of SEQ ID NO: 2383
aauuguugcuugguaaaga

SEQ ID NO: 184917 - RNA, 19 nt, Artificial Sequence
  Description of Artificial Sequence: Synthetic oligonucleotide
  Antisense strand to SEQ ID NO: 184916
ucuuuaccaagcaacaauu

SEQ ID NO: 184918 - RNA, 19 nt, Artificial Sequence
  Description of Artificial Sequence: Synthetic oligonucleotide
  Sense strand starting at position 62 of SEQ ID NO: 2383
gcugauaaggccuagggua

SEQ ID NO: 184919 - RNA, 19 nt, Artificial Sequence
  Description of Artificial Sequence: Synthetic oligonucleotide
  Antisense strand to SEQ ID NO: 184918
uacccuaggccuuaucagc

SEQ ID NO: 184920 - RNA, 19 nt, Artificial Sequence
  Description of Artificial Sequence: Synthetic oligonucleotide
  Sense strand starting at position 3898 of SEQ ID NO: 2384
acauuuccuugagaagaca

SEQ ID NO: 184921 - RNA, 19 nt, Artificial Sequence
  Description of Artificial Sequence: Synthetic oligonucleotide
  Antisense strand to SEQ ID NO: 184920
ugucuucucaaggaaaugu

SEQ ID NO: 184922 - RNA, 19 nt, Artificial Sequence
  Description of Artificial Sequence: Synthetic oligonucleotide
  Sense strand starting at position 3803 of SEQ ID NO: 2384
agccuuaaucagggaaccu

SEQ ID NO: 184923 - RNA, 19 nt, Artificial Sequence
  Description of Artificial Sequence: Synthetic oligonucleotide
  Antisense strand to SEQ ID NO: 184922
agguucccugauuaaggcu

SEQ ID NO: 184924 - RNA, 19 nt, Artificial Sequence
  Description of Artificial Sequence: Synthetic oligonucleotide
  Sense strand starting at position 3754 of SEQ ID NO: 2384
aggaguauugcgggcauuu

SEQ ID NO: 184925 - RNA, 19 nt, Artificial Sequence
  Description of Artificial Sequence: Synthetic oligonucleotide
  Antisense strand to SEQ ID NO: 184924
aaaugcccgcaauacuccu

SEQ ID NO: 184926 - RNA, 19 nt, Artificial Sequence
  Description of Artificial Sequence: Synthetic oligonucleotide
  Sense strand starting at position 3744 of SEQ ID NO: 2384
aguugucuacaggaguauu

SEQ ID NO: 184927 - RNA, 19 nt, Artificial Sequence
  Description of Artificial Sequence: Synthetic oligonucleotide
  Antisense strand to SEQ ID NO: 184926
aauacuccuguagacaacu

SEQ ID NO: 184928 - RNA, 19 nt, Artificial Sequence
  Description of Artificial Sequence: Synthetic oligonucleotide
  Sense strand starting at position 3741 of SEQ ID NO: 2384
aagaguugucuacaggagu

SEQ ID NO: 184929 - RNA, 19 nt, Artificial Sequence
  Description of Artificial Sequence: Synthetic oligonucleotide
  Antisense strand to SEQ ID NO: 184928
acuccuguagacaacucuu

SEQ ID NO: 184930 - RNA, 19 nt, Artificial Sequence
  Description of Artificial Sequence: Synthetic oligonucleotide
  Sense strand starting at position 3737 of SEQ ID NO: 2384
uccuaagaguugucuacag

SEQ ID NO: 184931 - RNA, 19 nt, Artificial Sequence
  Description of Artificial Sequence: Synthetic oligonucleotide
  Antisense strand to SEQ ID NO: 184930
cuguagacaacucuuagga

SEQ ID NO: 184932 - RNA, 19 nt, Artificial Sequence
  Description of Artificial Sequence: Synthetic oligonucleotide
  Sense strand starting at position 3706 of SEQ ID NO: 2384
guggaagcaguguauaaug

SEQ ID NO: 184933 - RNA, 19 nt, Artificial Sequence
  Description of Artificial Sequence: Synthetic oligonucleotide
  Antisense strand to SEQ ID NO: 184932
cauuauacacugcuuccac

SEQ ID NO: 184934 - RNA, 19 nt, Artificial Sequence
  Description of Artificial Sequence: Synthetic oligonucleotide
  Sense strand starting at position 3638 of SEQ ID NO: 2384
uaggguuccuuacugauca

SEQ ID NO: 184935 - RNA, 19 nt, Artificial Sequence
  Description of Artificial Sequence: Synthetic oligonucleotide
  Antisense strand to SEQ ID NO: 184934
ugaucaguaaggaacccua

SEQ ID NO: 184936 - RNA, 19 nt, Artificial Sequence
  Description of Artificial Sequence: Synthetic oligonucleotide
  Sense strand starting at position 3611 of SEQ ID NO: 2384
uucuuaguugucuuguguu

SEQ ID NO: 184937 - RNA, 19 nt, Artificial Sequence
  Description of Artificial Sequence: Synthetic oligonucleotide
  Antisense strand to SEQ ID NO: 184936
aacacaagacaacuaagaa

SEQ ID NO: 184938 - RNA, 19 nt, Artificial Sequence
  Description of Artificial Sequence: Synthetic oligonucleotide
  Sense strand starting at position 3403 of SEQ ID NO: 2384
ccagccuagucuccuagaa

SEQ ID NO: 184939 - RNA, 19 nt, Artificial Sequence
  Description of Artificial Sequence: Synthetic oligonucleotide
  Antisense strand to SEQ ID NO: 184938
uucuaggagacuaggcugg

SEQ ID NO: 184940 - RNA, 19 nt, Artificial Sequence
  Description of Artificial Sequence: Synthetic oligonucleotide
  Sense strand starting at position 3273 of SEQ ID NO: 2384
cauguagcccuggaaauga

SEQ ID NO: 184941 - RNA, 19 nt, Artificial Sequence
  Description of Artificial Sequence: Synthetic oligonucleotide
  Antisense strand to SEQ ID NO: 184940
ucauuuccagggcuacaug

SEQ ID NO: 184942 - RNA, 19 nt, Artificial Sequence
  Description of Artificial Sequence: Synthetic oligonucleotide
  Sense strand starting at position 3272 of SEQ ID NO: 2384
acauguagcccuggaaaug

SEQ ID NO: 184943 - RNA, 19 nt, Artificial Sequence
  Description of Artificial Sequence: Synthetic oligonucleotide
  Antisense strand to SEQ ID NO: 184942
cauuuccagggcuacaugu

SEQ ID NO: 184944 - RNA, 19 nt, Artificial Sequence
  Description of Artificial Sequence: Synthetic oligonucleotide
  Sense strand starting at position 3012 of SEQ ID NO: 2384
agggauugaucuccgacac

SEQ ID NO: 184945 - RNA, 19 nt, Artificial Sequence
  Description of Artificial Sequence: Synthetic oligonucleotide
  Antisense strand to SEQ ID NO: 184944
gugucggagaucaaucccu

SEQ ID NO: 184946 - RNA, 19 nt, Artificial Sequence
  Description of Artificial Sequence: Synthetic oligonucleotide
  Sense strand starting at position 2970 of SEQ ID NO: 2384
acucucuucugggcagaca

SEQ ID NO: 184947 - RNA, 19 nt, Artificial Sequence
  Description of Artificial Sequence: Synthetic oligonucleotide
  Antisense strand to SEQ ID NO: 184946
ugucugcccagaagagagu

SEQ ID NO: 184948 - RNA, 19 nt, Artificial Sequence
  Description of Artificial Sequence: Synthetic oligonucleotide
  Sense strand starting at position 2321 of SEQ ID NO: 2384
ggagaagaguggagucaga

SEQ ID NO: 184949 - RNA, 19 nt, Artificial Sequence
  Description of Artificial Sequence: Synthetic oligonucleotide
  Antisense strand to SEQ ID NO: 184948
ucugacuccacucuucucc

SEQ ID NO: 184950 - RNA, 19 nt, Artificial Sequence
  Description of Artificial Sequence: Synthetic oligonucleotide
  Sense strand starting at position 1718 of SEQ ID NO: 2384
cacggacgcguuuaaauuu

SEQ ID NO: 184951 - RNA, 19 nt, Artificial Sequence
  Description of Artificial Sequence: Synthetic oligonucleotide
  Antisense strand to SEQ ID NO: 184950
aaauuuaaacgcguccgug

SEQ ID NO: 184952 - RNA, 19 nt, Artificial Sequence
  Description of Artificial Sequence: Synthetic oligonucleotide
  Sense strand starting at position 1659 of SEQ ID NO: 2384
gucucaucugcucaucaca

SEQ ID NO: 184953 - RNA, 19 nt, Artificial Sequence
  Description of Artificial Sequence: Synthetic oligonucleotide
  Antisense strand to SEQ ID NO: 184952
ugugaugagcagaugagac

SEQ ID NO: 184954 - RNA, 19 nt, Artificial Sequence
  Description of Artificial Sequence: Synthetic oligonucleotide
  Sense strand starting at position 1602 of SEQ ID NO: 2384
gggcauuagaccugguuug

SEQ ID NO: 184955 - RNA, 19 nt, Artificial Sequence
  Description of Artificial Sequence: Synthetic oligonucleotide
  Antisense strand to SEQ ID NO: 184954
caaaccaggucuaaugccc

SEQ ID NO: 184956 - RNA, 19 nt, Artificial Sequence
  Description of Artificial Sequence: Synthetic oligonucleotide
  Sense strand starting at position 1450 of SEQ ID NO: 2384
uggacuaagugucuaagaa

SEQ ID NO: 184957 - RNA, 19 nt, Artificial Sequence
  Description of Artificial Sequence: Synthetic oligonucleotide
  Antisense strand to SEQ ID NO: 184956
uucuuagacacuuagucca

SEQ ID NO: 184958 - RNA, 19 nt, Artificial Sequence
  Description of Artificial Sequence: Synthetic oligonucleotide
  Sense strand starting at position 1331 of SEQ ID NO: 2384
ggagaaugcuaauuagcau

SEQ ID NO: 184959 - RNA, 19 nt, Artificial Sequence
  Description of Artificial Sequence: Synthetic oligonucleotide
  Antisense strand to SEQ ID NO: 184958
augcuaauuagcauucucc

SEQ ID NO: 184960 - RNA, 19 nt, Artificial Sequence
  Description of Artificial Sequence: Synthetic oligonucleotide
  Sense strand starting at position 1298 of SEQ ID NO: 2384
cugggagcuguguacucaa

SEQ ID NO: 184961 - RNA, 19 nt, Artificial Sequence
  Description of Artificial Sequence: Synthetic oligonucleotide
  Antisense strand to SEQ ID NO: 184960
uugaguacacagcucccag

SEQ ID NO: 184962 - RNA, 19 nt, Artificial Sequence
  Description of Artificial Sequence: Synthetic oligonucleotide
  Sense strand starting at position 1221 of SEQ ID NO: 2384
uauaauuagugguuacaga

SEQ ID NO: 184963 - RNA, 19 nt, Artificial Sequence
  Description of Artificial Sequence: Synthetic oligonucleotide
  Antisense strand to SEQ ID NO: 184962
ucuguaaccacuaauuaua

SEQ ID NO: 184964 - RNA, 19 nt, Artificial Sequence
  Description of Artificial Sequence: Synthetic oligonucleotide
  Sense strand starting at position 1217 of SEQ ID NO: 2384
acucuauaauuagugguua

SEQ ID NO: 184965 - RNA, 19 nt, Artificial Sequence
  Description of Artificial Sequence: Synthetic oligonucleotide
  Antisense strand to SEQ ID NO: 184964
uaaccacuaauuauagagu

SEQ ID NO: 184966 - RNA, 19 nt, Artificial Sequence
  Description of Artificial Sequence: Synthetic oligonucleotide
  Sense strand starting at position 1126 of SEQ ID NO: 2384
cguguuauuucuuugaacu

SEQ ID NO: 184967 - RNA, 19 nt, Artificial Sequence
  Description of Artificial Sequence: Synthetic oligonucleotide
  Antisense strand to SEQ ID NO: 184966
aguucaaagaaauaacacg

SEQ ID NO: 184968 - RNA, 19 nt, Artificial Sequence
  Description of Artificial Sequence: Synthetic oligonucleotide
  Sense strand starting at position 1125 of SEQ ID NO: 2384
gcguguuauuucuuugaac

SEQ ID NO: 184969 - RNA, 19 nt, Artificial Sequence
  Description of Artificial Sequence: Synthetic oligonucleotide
  Antisense strand to SEQ ID NO: 184968
guucaaagaaauaacacgc

SEQ ID NO: 184970 - RNA, 19 nt, Artificial Sequence
  Description of Artificial Sequence: Synthetic oligonucleotide
  Sense strand starting at position 1121 of SEQ ID NO: 2384
ugaagcguguuauuucuuu

SEQ ID NO: 184971 - RNA, 19 nt, Artificial Sequence
  Description of Artificial Sequence: Synthetic oligonucleotide
  Antisense strand to SEQ ID NO: 184970
aaagaaauaacacgcuuca

SEQ ID NO: 184972 - RNA, 19 nt, Artificial Sequence
  Description of Artificial Sequence: Synthetic oligonucleotide
  Sense strand starting at position 1099 of SEQ ID NO: 2384
auguuuaaugcucauggau

SEQ ID NO: 184973 - RNA, 19 nt, Artificial Sequence
  Description of Artificial Sequence: Synthetic oligonucleotide
  Antisense strand to SEQ ID NO: 184972
auccaugagcauuaaacau

SEQ ID NO: 184974 - RNA, 19 nt, Artificial Sequence
  Description of Artificial Sequence: Synthetic oligonucleotide
  Sense strand starting at position 1098 of SEQ ID NO: 2384
aauguuuaaugcucaugga

SEQ ID NO: 184975 - RNA, 19 nt, Artificial Sequence
  Description of Artificial Sequence: Synthetic oligonucleotide
  Antisense strand to SEQ ID NO: 184974
uccaugagcauuaaacauu

SEQ ID NO: 184976 - RNA, 19 nt, Artificial Sequence
  Description of Artificial Sequence: Synthetic oligonucleotide
  Sense strand starting at position 1088 of SEQ ID NO: 2384
aacguuugggaauguuuaa

SEQ ID NO: 184977 - RNA, 19 nt, Artificial Sequence
  Description of Artificial Sequence: Synthetic oligonucleotide
  Antisense strand to SEQ ID NO: 184976
uuaaacauucccaaacguu

SEQ ID NO: 184978 - RNA, 19 nt, Artificial Sequence
  Description of Artificial Sequence: Synthetic oligonucleotide
  Sense strand starting at position 1082 of SEQ ID NO: 2384
gacaucaacguuugggaau

SEQ ID NO: 184979 - RNA, 19 nt, Artificial Sequence
  Description of Artificial Sequence: Synthetic oligonucleotide
  Antisense strand to SEQ ID NO: 184978
auucccaaacguugauguc

SEQ ID NO: 184980 - RNA, 19 nt, Artificial Sequence
  Description of Artificial Sequence: Synthetic oligonucleotide
  Sense strand starting at position 1043 of SEQ ID NO: 2384
gaaauuccacacugagugu

SEQ ID NO: 184981 - RNA, 19 nt, Artificial Sequence
  Description of Artificial Sequence: Synthetic oligonucleotide
  Antisense strand to SEQ ID NO: 184980
acacucaguguggaauuuc

SEQ ID NO: 184982 - RNA, 19 nt, Artificial Sequence
  Description of Artificial Sequence: Synthetic oligonucleotide
  Sense strand starting at position 944 of SEQ ID NO: 2384
gcaagcaguccuuacaaau

SEQ ID NO: 184983 - RNA, 19 nt, Artificial Sequence
  Description of Artificial Sequence: Synthetic oligonucleotide
  Antisense strand to SEQ ID NO: 184982
auuuguaaggacugcuugc

SEQ ID NO: 184984 - RNA, 19 nt, Artificial Sequence
  Description of Artificial Sequence: Synthetic oligonucleotide
  Sense strand starting at position 857 of SEQ ID NO: 2384
aauuguugcuugguaaaga

SEQ ID NO: 184985 - RNA, 19 nt, Artificial Sequence
  Description of Artificial Sequence: Synthetic oligonucleotide
  Antisense strand to SEQ ID NO: 184984
ucuuuaccaagcaacaauu

SEQ ID NO: 184986 - RNA, 19 nt, Artificial Sequence
  Description of Artificial Sequence: Synthetic oligonucleotide
  Sense strand starting at position 738 of SEQ ID NO: 2384
gcugauaaggccuagggua

SEQ ID NO: 184987 - RNA, 19 nt, Artificial Sequence
  Description of Artificial Sequence: Synthetic oligonucleotide
  Antisense strand to SEQ ID NO: 184986
uacccuaggccuuaucagc

SEQ ID NO: 184988 - RNA, 19 nt, Artificial Sequence
  Description of Artificial Sequence: Synthetic oligonucleotide
  Sense strand starting at position 503 of SEQ ID NO: 2384
uguuuauauagaggaguau

SEQ ID NO: 184989 - RNA, 19 nt, Artificial Sequence
  Description of Artificial Sequence: Synthetic oligonucleotide
  Antisense strand to SEQ ID NO: 184988
auacuccucuauauaaaca

SEQ ID NO: 184990 - RNA, 19 nt, Artificial Sequence
  Description of Artificial Sequence: Synthetic oligonucleotide
  Sense strand starting at position 501 of SEQ ID NO: 2384
uuuguuuauauagaggagu

SEQ ID NO: 184991 - RNA, 19 nt, Artificial Sequence
  Description of Artificial Sequence: Synthetic oligonucleotide
  Antisense strand to SEQ ID NO: 184990
acuccucuauauaaacaaa

SEQ ID NO: 184992 - RNA, 19 nt, Artificial Sequence
  Description of Artificial Sequence: Synthetic oligonucleotide
  Sense strand starting at position 418 of SEQ ID NO: 2384
ggcuuaaacguugagaguc

SEQ ID NO: 184993 - RNA, 19 nt, Artificial Sequence
  Description of Artificial Sequence: Synthetic oligonucleotide
  Antisense strand to SEQ ID NO: 184992
gacucucaacguuuaagcc

SEQ ID NO: 184994 - RNA, 19 nt, Artificial Sequence
  Description of Artificial Sequence: Synthetic oligonucleotide
  Sense strand starting at position 376 of SEQ ID NO: 2384
auaucauguuaguuaggga

SEQ ID NO: 184995 - RNA, 19 nt, Artificial Sequence
  Description of Artificial Sequence: Synthetic oligonucleotide
  Antisense strand to SEQ ID NO: 184994
ucccuaacuaacaugauau

SEQ ID NO: 184996 - RNA, 19 nt, Artificial Sequence
  Description of Artificial Sequence: Synthetic oligonucleotide
  Sense strand starting at position 334 of SEQ ID NO: 2384
acuuaauccgcauaacaag

SEQ ID NO: 184997 - RNA, 19 nt, Artificial Sequence
  Description of Artificial Sequence: Synthetic oligonucleotide
  Antisense strand to SEQ ID NO: 184996
cuuguuaugcggauuaagu

SEQ ID NO: 184998 - RNA, 19 nt, Artificial Sequence
  Description of Artificial Sequence: Synthetic oligonucleotide
  Sense strand starting at position 251 of SEQ ID NO: 2384
augguaauagucuaacagu

SEQ ID NO: 184999 - RNA, 19 nt, Artificial Sequence
  Description of Artificial Sequence: Synthetic oligonucleotide
  Antisense strand to SEQ ID NO: 184998
acuguuagacuauuaccau

SEQ ID NO: 185000 - RNA, 19 nt, Artificial Sequence
  Description of Artificial Sequence: Synthetic oligonucleotide
  Sense strand starting at position 3964 of SEQ ID NO: 2385
caggcaucaggcuagaaua

SEQ ID NO: 185001 - RNA, 19 nt, Artificial Sequence
  Description of Artificial Sequence: Synthetic oligonucleotide
  Antisense strand to SEQ ID NO: 185000
uauucuagccugaugccug

SEQ ID NO: 185002 - RNA, 19 nt, Artificial Sequence
  Description of Artificial Sequence: Synthetic oligonucleotide
  Sense strand starting at position 3937 of SEQ ID NO: 2385
agacaaggcuucccaauua

SEQ ID NO: 185003 - RNA, 19 nt, Artificial Sequence
  Description of Artificial Sequence: Synthetic oligonucleotide
  Antisense strand to SEQ ID NO: 185002
uaauugggaagccuugucu

SEQ ID NO: 185004 - RNA, 19 nt, Artificial Sequence
  Description of Artificial Sequence: Synthetic oligonucleotide
  Sense strand starting at position 3924 of SEQ ID NO: 2385
ucaggauguuaacagacaa

SEQ ID NO: 185005 - RNA, 19 nt, Artificial Sequence
  Description of Artificial Sequence: Synthetic oligonucleotide
  Antisense strand to SEQ ID NO: 185004
uugucuguuaacauccuga

SEQ ID NO: 185006 - RNA, 19 nt, Artificial Sequence
  Description of Artificial Sequence: Synthetic oligonucleotide
  Sense strand starting at position 3915 of SEQ ID NO: 2385
aaaccuaagucaggauguu

SEQ ID NO: 185007 - RNA, 19 nt, Artificial Sequence
  Description of Artificial Sequence: Synthetic oligonucleotide
  Antisense strand to SEQ ID NO: 185006
aacauccugacuuagguuu

SEQ ID NO: 185008 - RNA, 19 nt, Artificial Sequence
  Description of Artificial Sequence: Synthetic oligonucleotide
  Sense strand starting at position 3867 of SEQ ID NO: 2385
augccagaauuacagauaa

SEQ ID NO: 185009 - RNA, 19 nt, Artificial Sequence
  Description of Artificial Sequence: Synthetic oligonucleotide
  Antisense strand to SEQ ID NO: 185008
uuaucuguaauucuggcau

SEQ ID NO: 185010 - RNA, 19 nt, Artificial Sequence
  Description of Artificial Sequence: Synthetic oligonucleotide
  Sense strand starting at position 3859 of SEQ ID NO: 2385
ggcuucugaugccagaauu

SEQ ID NO: 185011 - RNA, 19 nt, Artificial Sequence
  Description of Artificial Sequence: Synthetic oligonucleotide
  Antisense strand to SEQ ID NO: 185010
aauucuggcaucagaagcc

SEQ ID NO: 185012 - RNA, 19 nt, Artificial Sequence
  Description of Artificial Sequence: Synthetic oligonucleotide
  Sense strand starting at position 3781 of SEQ ID NO: 2385
cagauuuagugugaauuau

SEQ ID NO: 185013 - RNA, 19 nt, Artificial Sequence
  Description of Artificial Sequence: Synthetic oligonucleotide
  Antisense strand to SEQ ID NO: 185012
auaauucacacuaaaucug

SEQ ID NO: 185014 - RNA, 19 nt, Artificial Sequence
  Description of Artificial Sequence: Synthetic oligonucleotide
  Sense strand starting at position 3767 of SEQ ID NO: 2385
ucuugacucucaggcagau

SEQ ID NO: 185015 - RNA, 19 nt, Artificial Sequence
  Description of Artificial Sequence: Synthetic oligonucleotide
  Antisense strand to SEQ ID NO: 185014
aucugccugagagucaaga

SEQ ID NO: 185016 - RNA, 19 nt, Artificial Sequence
  Description of Artificial Sequence: Synthetic oligonucleotide
  Sense strand starting at position 3728 of SEQ ID NO: 2385
uguguaauuugacacagag

SEQ ID NO: 185017 - RNA, 19 nt, Artificial Sequence
  Description of Artificial Sequence: Synthetic oligonucleotide
  Antisense strand to SEQ ID NO: 185016
cucugugucaaauuacaca

SEQ ID NO: 185018 - RNA, 19 nt, Artificial Sequence
  Description of Artificial Sequence: Synthetic oligonucleotide
  Sense strand starting at position 3723 of SEQ ID NO: 2385
gcuaguguguaauuugaca

SEQ ID NO: 185019 - RNA, 19 nt, Artificial Sequence
  Description of Artificial Sequence: Synthetic oligonucleotide
  Antisense strand to SEQ ID NO: 185018
ugucaaauuacacacuagc

SEQ ID NO: 185020 - RNA, 19 nt, Artificial Sequence
  Description of Artificial Sequence: Synthetic oligonucleotide
  Sense strand starting at position 3719 of SEQ ID NO: 2385
ggcagcuaguguguaauuu

SEQ ID NO: 185021 - RNA, 19 nt, Artificial Sequence
  Description of Artificial Sequence: Synthetic oligonucleotide
  Antisense strand to SEQ ID NO: 185020
aaauuacacacuagcugcc

SEQ ID NO: 185022 - RNA, 19 nt, Artificial Sequence
  Description of Artificial Sequence: Synthetic oligonucleotide
  Sense strand starting at position 3474 of SEQ ID NO: 2385
gugacucagcaucaagacu

SEQ ID NO: 185023 - RNA, 19 nt, Artificial Sequence
  Description of Artificial Sequence: Synthetic oligonucleotide
  Antisense strand to SEQ ID NO: 185022
agucuugaugcugagucac

SEQ ID NO: 185024 - RNA, 19 nt, Artificial Sequence
  Description of Artificial Sequence: Synthetic oligonucleotide
  Sense strand starting at position 3470 of SEQ ID NO: 2385
gcaggugacucagcaucaa

SEQ ID NO: 185025 - RNA, 19 nt, Artificial Sequence
  Description of Artificial Sequence: Synthetic oligonucleotide
  Antisense strand to SEQ ID NO: 185024
uugaugcugagucaccugc

SEQ ID NO: 185026 - RNA, 19 nt, Artificial Sequence
  Description of Artificial Sequence: Synthetic oligonucleotide
  Sense strand starting at position 3451 of SEQ ID NO: 2385
ccuccaguaguauggguaa

SEQ ID NO: 185027 - RNA, 19 nt, Artificial Sequence
  Description of Artificial Sequence: Synthetic oligonucleotide
  Antisense strand to SEQ ID NO: 185026
uuacccauacuacuggagg

SEQ ID NO: 185028 - RNA, 19 nt, Artificial Sequence
  Description of Artificial Sequence: Synthetic oligonucleotide
  Sense strand starting at position 3275 of SEQ ID NO: 2385
uugcuccucccugaugaaa

SEQ ID NO: 185029 - RNA, 19 nt, Artificial Sequence
  Description of Artificial Sequence: Synthetic oligonucleotide
  Antisense strand to SEQ ID NO: 185028
uuucaucagggaggagcaa

SEQ ID NO: 185030 - RNA, 19 nt, Artificial Sequence
  Description of Artificial Sequence: Synthetic oligonucleotide
  Sense strand starting at position 3274 of SEQ ID NO: 2385
uuugcuccucccugaugaa

SEQ ID NO: 185031 - RNA, 19 nt, Artificial Sequence
  Description of Artificial Sequence: Synthetic oligonucleotide
  Antisense strand to SEQ ID NO: 185030
uucaucagggaggagcaaa

SEQ ID NO: 185032 - RNA, 19 nt, Artificial Sequence
  Description of Artificial Sequence: Synthetic oligonucleotide
  Sense strand starting at position 3256 of SEQ ID NO: 2385
cucacuuguuugggaauuu

SEQ ID NO: 185033 - RNA, 19 nt, Artificial Sequence
  Description of Artificial Sequence: Synthetic oligonucleotide
  Antisense strand to SEQ ID NO: 185032
aaauucccaaacaagugag

SEQ ID NO: 185034 - RNA, 19 nt, Artificial Sequence
  Description of Artificial Sequence: Synthetic oligonucleotide
  Sense strand starting at position 3255 of SEQ ID NO: 2385
ccucacuuguuugggaauu

SEQ ID NO: 185035 - RNA, 19 nt, Artificial Sequence
  Description of Artificial Sequence: Synthetic oligonucleotide
  Antisense strand to SEQ ID NO: 185034
aauucccaaacaagugagg

SEQ ID NO: 185036 - RNA, 19 nt, Artificial Sequence
  Description of Artificial Sequence: Synthetic oligonucleotide
  Sense strand starting at position 3254 of SEQ ID NO: 2385
uccucacuuguuugggaau

SEQ ID NO: 185037 - RNA, 19 nt, Artificial Sequence
  Description of Artificial Sequence: Synthetic oligonucleotide
  Antisense strand to SEQ ID NO: 185036
auucccaaacaagugagga

SEQ ID NO: 185038 - RNA, 19 nt, Artificial Sequence
  Description of Artificial Sequence: Synthetic oligonucleotide
  Sense strand starting at position 3253 of SEQ ID NO: 2385
uuccucacuuguuugggaa

SEQ ID NO: 185039 - RNA, 19 nt, Artificial Sequence
  Description of Artificial Sequence: Synthetic oligonucleotide
  Antisense strand to SEQ ID NO: 185038
uucccaaacaagugaggaa

SEQ ID NO: 185040 - RNA, 19 nt, Artificial Sequence
  Description of Artificial Sequence: Synthetic oligonucleotide
  Sense strand starting at position 3252 of SEQ ID NO: 2385
guuccucacuuguuuggga

SEQ ID NO: 185041 - RNA, 19 nt, Artificial Sequence
  Description of Artificial Sequence: Synthetic oligonucleotide
  Antisense strand to SEQ ID NO: 185040
ucccaaacaagugaggaac

SEQ ID NO: 185042 - RNA, 19 nt, Artificial Sequence
  Description of Artificial Sequence: Synthetic oligonucleotide
  Sense strand starting at position 3200 of SEQ ID NO: 2385
cuugaacaacccugugauu

SEQ ID NO: 185043 - RNA, 19 nt, Artificial Sequence
  Description of Artificial Sequence: Synthetic oligonucleotide
  Antisense strand to SEQ ID NO: 185042
aaucacaggguuguucaag

SEQ ID NO: 185044 - RNA, 19 nt, Artificial Sequence
  Description of Artificial Sequence: Synthetic oligonucleotide
  Sense strand starting at position 3071 of SEQ ID NO: 2385
aauguuauugccgugcaac

SEQ ID NO: 185045 - RNA, 19 nt, Artificial Sequence
  Description of Artificial Sequence: Synthetic oligonucleotide
  Antisense strand to SEQ ID NO: 185044
guugcacggcaauaacauu

SEQ ID NO: 185046 - RNA, 19 nt, Artificial Sequence
  Description of Artificial Sequence: Synthetic oligonucleotide
  Sense strand starting at position 2938 of SEQ ID NO: 2385
ccaguaugccaagaaacca

SEQ ID NO: 185047 - RNA, 19 nt, Artificial Sequence
  Description of Artificial Sequence: Synthetic oligonucleotide
  Antisense strand to SEQ ID NO: 185046
ugguuucuuggcauacugg

SEQ ID NO: 185048 - RNA, 19 nt, Artificial Sequence
  Description of Artificial Sequence: Synthetic oligonucleotide
  Sense strand starting at position 2935 of SEQ ID NO: 2385
cucccaguaugccaagaaa

SEQ ID NO: 185049 - RNA, 19 nt, Artificial Sequence
  Description of Artificial Sequence: Synthetic oligonucleotide
  Antisense strand to SEQ ID NO: 185048
uuucuuggcauacugggag

SEQ ID NO: 185050 - RNA, 19 nt, Artificial Sequence
  Description of Artificial Sequence: Synthetic oligonucleotide
  Sense strand starting at position 2884 of SEQ ID NO: 2385
cagggauuguaggaucuca

SEQ ID NO: 185051 - RNA, 19 nt, Artificial Sequence
  Description of Artificial Sequence: Synthetic oligonucleotide
  Antisense strand to SEQ ID NO: 185050
ugagauccuacaaucccug

SEQ ID NO: 185052 - RNA, 19 nt, Artificial Sequence
  Description of Artificial Sequence: Synthetic oligonucleotide
  Sense strand starting at position 2859 of SEQ ID NO: 2385
auacuuuagaguugaaggu

SEQ ID NO: 185053 - RNA, 19 nt, Artificial Sequence
  Description of Artificial Sequence: Synthetic oligonucleotide
  Antisense strand to SEQ ID NO: 185052
accuucaacucuaaaguau

SEQ ID NO: 185054 - RNA, 19 nt, Artificial Sequence
  Description of Artificial Sequence: Synthetic oligonucleotide
  Sense strand starting at position 2855 of SEQ ID NO: 2385
ucagauacuuuagaguuga

SEQ ID NO: 185055 - RNA, 19 nt, Artificial Sequence
  Description of Artificial Sequence: Synthetic oligonucleotide
  Antisense strand to SEQ ID NO: 185054
ucaacucuaaaguaucuga

SEQ ID NO: 185056 - RNA, 19 nt, Artificial Sequence
  Description of Artificial Sequence: Synthetic oligonucleotide
  Sense strand starting at position 2837 of SEQ ID NO: 2385
uuguccaucccaggaguuu

SEQ ID NO: 185057 - RNA, 19 nt, Artificial Sequence
  Description of Artificial Sequence: Synthetic oligonucleotide
  Antisense strand to SEQ ID NO: 185056
aaacuccugggauggacaa

SEQ ID NO: 185058 - RNA, 19 nt, Artificial Sequence
  Description of Artificial Sequence: Synthetic oligonucleotide
  Sense strand starting at position 2667 of SEQ ID NO: 2385
gaguguugggauuaauuac

SEQ ID NO: 185059 - RNA, 19 nt, Artificial Sequence
  Description of Artificial Sequence: Synthetic oligonucleotide
  Antisense strand to SEQ ID NO: 185058
guaauuaaucccaacacuc

SEQ ID NO: 185060 - RNA, 19 nt, Artificial Sequence
  Description of Artificial Sequence: Synthetic oligonucleotide
  Sense strand starting at position 2623 of SEQ ID NO: 2385
cugggacgcucccucauua

SEQ ID NO: 185061 - RNA, 19 nt, Artificial Sequence
  Description of Artificial Sequence: Synthetic oligonucleotide
  Antisense strand to SEQ ID NO: 185060
uaaugagggagcgucccag

SEQ ID NO: 185062 - RNA, 19 nt, Artificial Sequence
  Description of Artificial Sequence: Synthetic oligonucleotide
  Sense strand starting at position 1167 of SEQ ID NO: 2385
cauccucggucuguacaua

SEQ ID NO: 185063 - RNA, 19 nt, Artificial Sequence
  Description of Artificial Sequence: Synthetic oligonucleotide
  Antisense strand to SEQ ID NO: 185062
uauguacagaccgaggaug

SEQ ID NO: 185064 - RNA, 19 nt, Artificial Sequence
  Description of Artificial Sequence: Synthetic oligonucleotide
  Sense strand starting at position 494 of SEQ ID NO: 2385
ucagauacuuaagguacua

SEQ ID NO: 185065 - RNA, 19 nt, Artificial Sequence
  Description of Artificial Sequence: Synthetic oligonucleotide
  Antisense strand to SEQ ID NO: 185064
uaguaccuuaaguaucuga

SEQ ID NO: 185066 - RNA, 19 nt, Artificial Sequence
  Description of Artificial Sequence: Synthetic oligonucleotide
  Sense strand starting at position 490 of SEQ ID NO: 2385
ggucucagauacuuaaggu

SEQ ID NO: 185067 - RNA, 19 nt, Artificial Sequence
  Description of Artificial Sequence: Synthetic oligonucleotide
  Antisense strand to SEQ ID NO: 185066
accuuaaguaucugagacc

SEQ ID NO: 185068 - RNA, 19 nt, Artificial Sequence
  Description of Artificial Sequence: Synthetic oligonucleotide
  Sense strand starting at position 323 of SEQ ID NO: 2385
ggaaguuccucuuauucuu

SEQ ID NO: 185069 - RNA, 19 nt, Artificial Sequence
  Description of Artificial Sequence: Synthetic oligonucleotide
  Antisense strand to SEQ ID NO: 185068
aagaauaagaggaacuucc

SEQ ID NO: 185070 - RNA, 19 nt, Artificial Sequence
  Description of Artificial Sequence: Synthetic oligonucleotide
  Sense strand starting at position 320 of SEQ ID NO: 2385
ggaggaaguuccucuuauu

SEQ ID NO: 185071 - RNA, 19 nt, Artificial Sequence
  Description of Artificial Sequence: Synthetic oligonucleotide
  Antisense strand to SEQ ID NO: 185070
aauaagaggaacuuccucc

SEQ ID NO: 185072 - RNA, 19 nt, Artificial Sequence
  Description of Artificial Sequence: Synthetic oligonucleotide
  Sense strand starting at position 231 of SEQ ID NO: 2385
agagaacuguggccugaag

SEQ ID NO: 185073 - RNA, 19 nt, Artificial Sequence
  Description of Artificial Sequence: Synthetic oligonucleotide
  Antisense strand to SEQ ID NO: 185072
cuucaggccacaguucucu

SEQ ID NO: 185074 - RNA, 19 nt, Artificial Sequence
  Description of Artificial Sequence: Synthetic oligonucleotide
  Sense strand starting at position 222 of SEQ ID NO: 2385
ggcuuuccaagagaacugu

SEQ ID NO: 185075 - RNA, 19 nt, Artificial Sequence
  Description of Artificial Sequence: Synthetic oligonucleotide
  Antisense strand to SEQ ID NO: 185074
acaguucucuuggaaagcc

SEQ ID NO: 185076 - RNA, 19 nt, Artificial Sequence
  Description of Artificial Sequence: Synthetic oligonucleotide
  Sense strand starting at position 220 of SEQ ID NO: 2385
acggcuuuccaagagaacu

SEQ ID NO: 185077 - RNA, 19 nt, Artificial Sequence
  Description of Artificial Sequence: Synthetic oligonucleotide
  Antisense strand to SEQ ID NO: 185076
aguucucuuggaaagccgu

SEQ ID NO: 185078 - RNA, 19 nt, Artificial Sequence
  Description of Artificial Sequence: Synthetic oligonucleotide
  Sense strand starting at position 189 of SEQ ID NO: 2385
guuagaaggcuaugaagca

SEQ ID NO: 185079 - RNA, 19 nt, Artificial Sequence
  Description of Artificial Sequence: Synthetic oligonucleotide
  Antisense strand to SEQ ID NO: 185078
ugcuucauagccuucuaac

SEQ ID NO: 185080 - RNA, 19 nt, Artificial Sequence
  Description of Artificial Sequence: Synthetic oligonucleotide
  Sense strand starting at position 3931 of SEQ ID NO: 2386
uugcgagaauugucauaaa

SEQ ID NO: 185081 - RNA, 19 nt, Artificial Sequence
  Description of Artificial Sequence: Synthetic oligonucleotide
  Antisense strand to SEQ ID NO: 185080
uuuaugacaauucucgcaa

SEQ ID NO: 185082 - RNA, 19 nt, Artificial Sequence
  Description of Artificial Sequence: Synthetic oligonucleotide
  Sense strand starting at position 3929 of SEQ ID NO: 2386
ucuugcgagaauugucaua

SEQ ID NO: 185083 - RNA, 19 nt, Artificial Sequence
  Description of Artificial Sequence: Synthetic oligonucleotide
  Antisense strand to SEQ ID NO: 185082
uaugacaauucucgcaaga

SEQ ID NO: 185084 - RNA, 19 nt, Artificial Sequence
  Description of Artificial Sequence: Synthetic oligonucleotide
  Sense strand starting at position 3925 of SEQ ID NO: 2386
uuacucuugcgagaauugu

SEQ ID NO: 185085 - RNA, 19 nt, Artificial Sequence
  Description of Artificial Sequence: Synthetic oligonucleotide
  Antisense strand to SEQ ID NO: 185084
acaauucucgcaagaguaa

SEQ ID NO: 185086 - RNA, 19 nt, Artificial Sequence
  Description of Artificial Sequence: Synthetic oligonucleotide
  Sense strand starting at position 3173 of SEQ ID NO: 2386
ugcacugcucccugagaca

SEQ ID NO: 185087 - RNA, 19 nt, Artificial Sequence
  Description of Artificial Sequence: Synthetic oligonucleotide
  Antisense strand to SEQ ID NO: 185086
ugucucagggagcagugca

SEQ ID NO: 185088 - RNA, 19 nt, Artificial Sequence
  Description of Artificial Sequence: Synthetic oligonucleotide
  Sense strand starting at position 3058 of SEQ ID NO: 2386
ugacaaguugccugucaug

SEQ ID NO: 185089 - RNA, 19 nt, Artificial Sequence
  Description of Artificial Sequence: Synthetic oligonucleotide
  Antisense strand to SEQ ID NO: 185088
caugacaggcaacuuguca

SEQ ID NO: 185090 - RNA, 19 nt, Artificial Sequence
  Description of Artificial Sequence: Synthetic oligonucleotide
  Sense strand starting at position 3057 of SEQ ID NO: 2386
cugacaaguugccugucau

SEQ ID NO: 185091 - RNA, 19 nt, Artificial Sequence
  Description of Artificial Sequence: Synthetic oligonucleotide
  Antisense strand to SEQ ID NO: 185090
augacaggcaacuugucag

SEQ ID NO: 185092 - RNA, 19 nt, Artificial Sequence
  Description of Artificial Sequence: Synthetic oligonucleotide
  Sense strand starting at position 3047 of SEQ ID NO: 2386
gaugcuuauccugacaagu

SEQ ID NO: 185093 - RNA, 19 nt, Artificial Sequence
  Description of Artificial Sequence: Synthetic oligonucleotide
  Antisense strand to SEQ ID NO: 185092
acuugucaggauaagcauc

SEQ ID NO: 185094 - RNA, 19 nt, Artificial Sequence
  Description of Artificial Sequence: Synthetic oligonucleotide
  Sense strand starting at position 3044 of SEQ ID NO: 2386
cuggaugcuuauccugaca

SEQ ID NO: 185095 - RNA, 19 nt, Artificial Sequence
  Description of Artificial Sequence: Synthetic oligonucleotide
  Antisense strand to SEQ ID NO: 185094
ugucaggauaagcauccag

SEQ ID NO: 185096 - RNA, 19 nt, Artificial Sequence
  Description of Artificial Sequence: Synthetic oligonucleotide
  Sense strand starting at position 3037 of SEQ ID NO: 2386
ucaguuucuggaugcuuau

SEQ ID NO: 185097 - RNA, 19 nt, Artificial Sequence
  Description of Artificial Sequence: Synthetic oligonucleotide
  Antisense strand to SEQ ID NO: 185096
auaagcauccagaaacuga

SEQ ID NO: 185098 - RNA, 19 nt, Artificial Sequence
  Description of Artificial Sequence: Synthetic oligonucleotide
  Sense strand starting at position 2984 of SEQ ID NO: 2386
cuaagugaaccuugaauua

SEQ ID NO: 185099 - RNA, 19 nt, Artificial Sequence
  Description of Artificial Sequence: Synthetic oligonucleotide
  Antisense strand to SEQ ID NO: 185098
uaauucaagguucacuuag

SEQ ID NO: 185100 - RNA, 19 nt, Artificial Sequence
  Description of Artificial Sequence: Synthetic oligonucleotide
  Sense strand starting at position 2970 of SEQ ID NO: 2386
uuaugagaccuaugcuaag

SEQ ID NO: 185101 - RNA, 19 nt, Artificial Sequence
  Description of Artificial Sequence: Synthetic oligonucleotide
  Antisense strand to SEQ ID NO: 185100
cuuagcauaggucucauaa

SEQ ID NO: 185102 - RNA, 19 nt, Artificial Sequence
  Description of Artificial Sequence: Synthetic oligonucleotide
  Sense strand starting at position 2879 of SEQ ID NO: 2386
cugacuuccucucuuguga

SEQ ID NO: 185103 - RNA, 19 nt, Artificial Sequence
  Description of Artificial Sequence: Synthetic oligonucleotide
  Antisense strand to SEQ ID NO: 185102
ucacaagagaggaagucag

SEQ ID NO: 185104 - RNA, 19 nt, Artificial Sequence
  Description of Artificial Sequence: Synthetic oligonucleotide
  Sense strand starting at position 2859 of SEQ ID NO: 2386
cuguaagguucugugauuc

SEQ ID NO: 185105 - RNA, 19 nt, Artificial Sequence
  Description of Artificial Sequence: Synthetic oligonucleotide
  Antisense strand to SEQ ID NO: 185104
gaaucacagaaccuuacag

SEQ ID NO: 185106 - RNA, 19 nt, Artificial Sequence
  Description of Artificial Sequence: Synthetic oligonucleotide
  Sense strand starting at position 2850 of SEQ ID NO: 2386
cuguucuggcuguaagguu

SEQ ID NO: 185107 - RNA, 19 nt, Artificial Sequence
  Description of Artificial Sequence: Synthetic oligonucleotide
  Antisense strand to SEQ ID NO: 185106
aaccuuacagccagaacag

SEQ ID NO: 185108 - RNA, 19 nt, Artificial Sequence
  Description of Artificial Sequence: Synthetic oligonucleotide
  Sense strand starting at position 2739 of SEQ ID NO: 2386
gguccagguuugucacuuu

SEQ ID NO: 185109 - RNA, 19 nt, Artificial Sequence
  Description of Artificial Sequence: Synthetic oligonucleotide
  Antisense strand to SEQ ID NO: 185108
aaagugacaaaccuggacc

SEQ ID NO: 185110 - RNA, 19 nt, Artificial Sequence
  Description of Artificial Sequence: Synthetic oligonucleotide
  Sense strand starting at position 2478 of SEQ ID NO: 2386
gguauuagucaugguuaau

SEQ ID NO: 185111 - RNA, 19 nt, Artificial Sequence
  Description of Artificial Sequence: Synthetic oligonucleotide
  Antisense strand to SEQ ID NO: 185110
auuaaccaugacuaauacc

SEQ ID NO: 185112 - RNA, 19 nt, Artificial Sequence
  Description of Artificial Sequence: Synthetic oligonucleotide
  Sense strand starting at position 2475 of SEQ ID NO: 2386
ucugguauuagucaugguu

SEQ ID NO: 185113 - RNA, 19 nt, Artificial Sequence
  Description of Artificial Sequence: Synthetic oligonucleotide
  Antisense strand to SEQ ID NO: 185112
aaccaugacuaauaccaga

SEQ ID NO: 185114 - RNA, 19 nt, Artificial Sequence
  Description of Artificial Sequence: Synthetic oligonucleotide
  Sense strand starting at position 2463 of SEQ ID NO: 2386
agcuuuggauccucuggua

SEQ ID NO: 185115 - RNA, 19 nt, Artificial Sequence
  Description of Artificial Sequence: Synthetic oligonucleotide
  Antisense strand to SEQ ID NO: 185114
uaccagaggauccaaagcu

SEQ ID NO: 185116 - RNA, 19 nt, Artificial Sequence
  Description of Artificial Sequence: Synthetic oligonucleotide
  Sense strand starting at position 2391 of SEQ ID NO: 2386
auaccuaugcgugaaauua

SEQ ID NO: 185117 - RNA, 19 nt, Artificial Sequence
  Description of Artificial Sequence: Synthetic oligonucleotide
  Antisense strand to SEQ ID NO: 185116
uaauuucacgcauagguau

SEQ ID NO: 185118 - RNA, 19 nt, Artificial Sequence
  Description of Artificial Sequence: Synthetic oligonucleotide
  Sense strand starting at position 2390 of SEQ ID NO: 2386
cauaccuaugcgugaaauu

SEQ ID NO: 185119 - RNA, 19 nt, Artificial Sequence
  Description of Artificial Sequence: Synthetic oligonucleotide
  Antisense strand to SEQ ID NO: 185118
aauuucacgcauagguaug

SEQ ID NO: 185120 - RNA, 19 nt, Artificial Sequence
  Description of Artificial Sequence: Synthetic oligonucleotide
  Sense strand starting at position 2389 of SEQ ID NO: 2386
ucauaccuaugcgugaaau

SEQ ID NO: 185121 - RNA, 19 nt, Artificial Sequence
  Description of Artificial Sequence: Synthetic oligonucleotide
  Antisense strand to SEQ ID NO: 185120
auuucacgcauagguauga

SEQ ID NO: 185122 - RNA, 19 nt, Artificial Sequence
  Description of Artificial Sequence: Synthetic oligonucleotide
  Sense strand starting at position 2360 of SEQ ID NO: 2386
auccucuaccugggaugau

SEQ ID NO: 185123 - RNA, 19 nt, Artificial Sequence
  Description of Artificial Sequence: Synthetic oligonucleotide
  Antisense strand to SEQ ID NO: 185122
aucaucccagguagaggau

SEQ ID NO: 185124 - RNA, 19 nt, Artificial Sequence
  Description of Artificial Sequence: Synthetic oligonucleotide
  Sense strand starting at position 2332 of SEQ ID NO: 2386
ugccucuacccgggaugau

SEQ ID NO: 185125 - RNA, 19 nt, Artificial Sequence
  Description of Artificial Sequence: Synthetic oligonucleotide
  Antisense strand to SEQ ID NO: 185124
aucaucccggguagaggca

SEQ ID NO: 185126 - RNA, 19 nt, Artificial Sequence
  Description of Artificial Sequence: Synthetic oligonucleotide
  Sense strand starting at position 2296 of SEQ ID NO: 2386
aagagcauucccugaggga

SEQ ID NO: 185127 - RNA, 19 nt, Artificial Sequence
  Description of Artificial Sequence: Synthetic oligonucleotide
  Antisense strand to SEQ ID NO: 185126
ucccucagggaaugcucuu

SEQ ID NO: 185128 - RNA, 19 nt, Artificial Sequence
  Description of Artificial Sequence: Synthetic oligonucleotide
  Sense strand starting at position 2216 of SEQ ID NO: 2386
aggguuugcaacuguggaa

SEQ ID NO: 185129 - RNA, 19 nt, Artificial Sequence
  Description of Artificial Sequence: Synthetic oligonucleotide
  Antisense strand to SEQ ID NO: 185128
uuccacaguugcaaacccu

SEQ ID NO: 185130 - RNA, 19 nt, Artificial Sequence
  Description of Artificial Sequence: Synthetic oligonucleotide
  Sense strand starting at position 2176 of SEQ ID NO: 2386
ggacuuaagaucgaguuuc

SEQ ID NO: 185131 - RNA, 19 nt, Artificial Sequence
  Description of Artificial Sequence: Synthetic oligonucleotide
  Antisense strand to SEQ ID NO: 185130
gaaacucgaucuuaagucc

SEQ ID NO: 185132 - RNA, 19 nt, Artificial Sequence
  Description of Artificial Sequence: Synthetic oligonucleotide
  Sense strand starting at position 2175 of SEQ ID NO: 2386
gggacuuaagaucgaguuu

SEQ ID NO: 185133 - RNA, 19 nt, Artificial Sequence
  Description of Artificial Sequence: Synthetic oligonucleotide
  Antisense strand to SEQ ID NO: 185132
aaacucgaucuuaaguccc

SEQ ID NO: 185134 - RNA, 19 nt, Artificial Sequence
  Description of Artificial Sequence: Synthetic oligonucleotide
  Sense strand starting at position 2162 of SEQ ID NO: 2386
agcguuuggccaugggacu

SEQ ID NO: 185135 - RNA, 19 nt, Artificial Sequence
  Description of Artificial Sequence: Synthetic oligonucleotide
  Antisense strand to SEQ ID NO: 185134
agucccauggccaaacgcu

SEQ ID NO: 185136 - RNA, 19 nt, Artificial Sequence
  Description of Artificial Sequence: Synthetic oligonucleotide
  Sense strand starting at position 2160 of SEQ ID NO: 2386
ggagcguuuggccauggga

SEQ ID NO: 185137 - RNA, 19 nt, Artificial Sequence
  Description of Artificial Sequence: Synthetic oligonucleotide
  Antisense strand to SEQ ID NO: 185136
ucccauggccaaacgcucc

SEQ ID NO: 185138 - RNA, 19 nt, Artificial Sequence
  Description of Artificial Sequence: Synthetic oligonucleotide
  Sense strand starting at position 2117 of SEQ ID NO: 2386
cgcgaaauccgaucgcugu

SEQ ID NO: 185139 - RNA, 19 nt, Artificial Sequence
  Description of Artificial Sequence: Synthetic oligonucleotide
  Antisense strand to SEQ ID NO: 185138
acagcgaucggauuucgcg

SEQ ID NO: 185140 - RNA, 19 nt, Artificial Sequence
  Description of Artificial Sequence: Synthetic oligonucleotide
  Sense strand starting at position 1463 of SEQ ID NO: 2386
gcuuguguagcaugaagga

SEQ ID NO: 185141 - RNA, 19 nt, Artificial Sequence
  Description of Artificial Sequence: Synthetic oligonucleotide
  Antisense strand to SEQ ID NO: 185140
uccuucaugcuacacaagc

SEQ ID NO: 185142 - RNA, 19 nt, Artificial Sequence
  Description of Artificial Sequence: Synthetic oligonucleotide
  Sense strand starting at position 1328 of SEQ ID NO: 2386
cccugcgauuaccuagaaa

SEQ ID NO: 185143 - RNA, 19 nt, Artificial Sequence
  Description of Artificial Sequence: Synthetic oligonucleotide
  Antisense strand to SEQ ID NO: 185142
uuucuagguaaucgcaggg

SEQ ID NO: 185144 - RNA, 19 nt, Artificial Sequence
  Description of Artificial Sequence: Synthetic oligonucleotide
  Sense strand starting at position 1182 of SEQ ID NO: 2386
ccugaaaucagcggagaca

SEQ ID NO: 185145 - RNA, 19 nt, Artificial Sequence
  Description of Artificial Sequence: Synthetic oligonucleotide
  Antisense strand to SEQ ID NO: 185144
ugucuccgcugauuucagg

SEQ ID NO: 185146 - RNA, 19 nt, Artificial Sequence
  Description of Artificial Sequence: Synthetic oligonucleotide
  Sense strand starting at position 625 of SEQ ID NO: 2386
ugcuauguauaggcugaaa

SEQ ID NO: 185147 - RNA, 19 nt, Artificial Sequence
  Description of Artificial Sequence: Synthetic oligonucleotide
  Antisense strand to SEQ ID NO: 185146
uuucagccuauacauagca

SEQ ID NO: 185148 - RNA, 19 nt, Artificial Sequence
  Description of Artificial Sequence: Synthetic oligonucleotide
  Sense strand starting at position 606 of SEQ ID NO: 2386
aauggagauugccuguguu

SEQ ID NO: 185149 - RNA, 19 nt, Artificial Sequence
  Description of Artificial Sequence: Synthetic oligonucleotide
  Antisense strand to SEQ ID NO: 185148
aacacaggcaaucuccauu

SEQ ID NO: 185150 - RNA, 19 nt, Artificial Sequence
  Description of Artificial Sequence: Synthetic oligonucleotide
  Sense strand starting at position 427 of SEQ ID NO: 2386
uagaguuuggcuggagcuu

SEQ ID NO: 185151 - RNA, 19 nt, Artificial Sequence
  Description of Artificial Sequence: Synthetic oligonucleotide
  Antisense strand to SEQ ID NO: 185150
aagcuccagccaaacucua

SEQ ID NO: 185152 - RNA, 19 nt, Artificial Sequence
  Description of Artificial Sequence: Synthetic oligonucleotide
  Sense strand starting at position 224 of SEQ ID NO: 2386
agaagucugacugguugau

SEQ ID NO: 185153 - RNA, 19 nt, Artificial Sequence
  Description of Artificial Sequence: Synthetic oligonucleotide
  Antisense strand to SEQ ID NO: 185152
aucaaccagucagacuucu

SEQ ID NO: 185154 - RNA, 19 nt, Artificial Sequence
  Description of Artificial Sequence: Synthetic oligonucleotide
  Sense strand starting at position 222 of SEQ ID NO: 2386
ugagaagucugacugguug

SEQ ID NO: 185155 - RNA, 19 nt, Artificial Sequence
  Description of Artificial Sequence: Synthetic oligonucleotide
  Antisense strand to SEQ ID NO: 185154
caaccagucagacuucuca

SEQ ID NO: 185156 - RNA, 19 nt, Artificial Sequence
  Description of Artificial Sequence: Synthetic oligonucleotide
  Sense strand starting at position 135 of SEQ ID NO: 2386
ggugaaagucacugucaca

SEQ ID NO: 185157 - RNA, 19 nt, Artificial Sequence
  Description of Artificial Sequence: Synthetic oligonucleotide
  Antisense strand to SEQ ID NO: 185156
ugugacagugacuuucacc

SEQ ID NO: 185158 - RNA, 19 nt, Artificial Sequence
  Description of Artificial Sequence: Synthetic oligonucleotide
  Sense strand starting at position 22 of SEQ ID NO: 2386
ucauguguacuggaaaguc

SEQ ID NO: 185159 - RNA, 19 nt, Artificial Sequence
  Description of Artificial Sequence: Synthetic oligonucleotide
  Antisense strand to SEQ ID NO: 185158
gacuuuccaguacacauga

SEQ ID NO: 185160 - RNA, 19 nt, Artificial Sequence
  Description of Artificial Sequence: Synthetic oligonucleotide
  Sense strand starting at position 89 of SEQ ID NO: 2387
uggauugacuagccucaga

SEQ ID NO: 185161 - RNA, 19 nt, Artificial Sequence
  Description of Artificial Sequence: Synthetic oligonucleotide
  Antisense strand to SEQ ID NO: 185160
ucugaggcuagucaaucca

SEQ ID NO: 185162 - RNA, 19 nt, Artificial Sequence
  Description of Artificial Sequence: Synthetic oligonucleotide
  Sense strand starting at position 99 of SEQ ID NO: 2387
agccucagagcuuacuaua

SEQ ID NO: 185163 - RNA, 19 nt, Artificial Sequence
  Description of Artificial Sequence: Synthetic oligonucleotide
  Antisense strand to SEQ ID NO: 185162
uauaguaagcucugaggcu

SEQ ID NO: 185164 - RNA, 19 nt, Artificial Sequence
  Description of Artificial Sequence: Synthetic oligonucleotide
  Sense strand starting at position 257 of SEQ ID NO: 2387
guaucauaggcuuacaugu

SEQ ID NO: 185165 - RNA, 19 nt, Artificial Sequence
  Description of Artificial Sequence: Synthetic oligonucleotide
  Antisense strand to SEQ ID NO: 185164
acauguaagccuaugauac

SEQ ID NO: 185166 - RNA, 19 nt, Artificial Sequence
  Description of Artificial Sequence: Synthetic oligonucleotide
  Sense strand starting at position 452 of SEQ ID NO: 2387
guaacacugagguaaaguu

SEQ ID NO: 185167 - RNA, 19 nt, Artificial Sequence
  Description of Artificial Sequence: Synthetic oligonucleotide
  Antisense strand to SEQ ID NO: 185166
aacuuuaccucaguguuac

SEQ ID NO: 185168 - RNA, 19 nt, Artificial Sequence
  Description of Artificial Sequence: Synthetic oligonucleotide
  Sense strand starting at position 549 of SEQ ID NO: 2387
uuggcacugcuggaagaau

SEQ ID NO: 185169 - RNA, 19 nt, Artificial Sequence
  Description of Artificial Sequence: Synthetic oligonucleotide
  Antisense strand to SEQ ID NO: 185168
auucuuccagcagugccaa

SEQ ID NO: 185170 - RNA, 19 nt, Artificial Sequence
  Description of Artificial Sequence: Synthetic oligonucleotide
  Sense strand starting at position 567 of SEQ ID NO: 2387
uccugauagcccuagugaa

SEQ ID NO: 185171 - RNA, 19 nt, Artificial Sequence
  Description of Artificial Sequence: Synthetic oligonucleotide
  Antisense strand to SEQ ID NO: 185170
uucacuagggcuaucagga

SEQ ID NO: 185172 - RNA, 19 nt, Artificial Sequence
  Description of Artificial Sequence: Synthetic oligonucleotide
  Sense strand starting at position 613 of SEQ ID NO: 2387
aggaacucuuugguuaauu

SEQ ID NO: 185173 - RNA, 19 nt, Artificial Sequence
  Description of Artificial Sequence: Synthetic oligonucleotide
  Antisense strand to SEQ ID NO: 185172
aauuaaccaaagaguuccu

SEQ ID NO: 185174 - RNA, 19 nt, Artificial Sequence
  Description of Artificial Sequence: Synthetic oligonucleotide
  Sense strand starting at position 688 of SEQ ID NO: 2387
uucuuuggucuagacuuua

SEQ ID NO: 185175 - RNA, 19 nt, Artificial Sequence
  Description of Artificial Sequence: Synthetic oligonucleotide
  Antisense strand to SEQ ID NO: 185174
uaaagucuagaccaaagaa

SEQ ID NO: 185176 - RNA, 19 nt, Artificial Sequence
  Description of Artificial Sequence: Synthetic oligonucleotide
  Sense strand starting at position 733 of SEQ ID NO: 2387
acugauuaggugcauauga

SEQ ID NO: 185177 - RNA, 19 nt, Artificial Sequence
  Description of Artificial Sequence: Synthetic oligonucleotide
  Antisense strand to SEQ ID NO: 185176
ucauaugcaccuaaucagu

SEQ ID NO: 185178 - RNA, 19 nt, Artificial Sequence
  Description of Artificial Sequence: Synthetic oligonucleotide
  Sense strand starting at position 770 of SEQ ID NO: 2387
cuugauauccuauauguuc

SEQ ID NO: 185179 - RNA, 19 nt, Artificial Sequence
  Description of Artificial Sequence: Synthetic oligonucleotide
  Antisense strand to SEQ ID NO: 185178
gaacauauaggauaucaag

SEQ ID NO: 185180 - RNA, 19 nt, Artificial Sequence
  Description of Artificial Sequence: Synthetic oligonucleotide
  Sense strand starting at position 856 of SEQ ID NO: 2387
uuacuagauguuggauuaa

SEQ ID NO: 185181 - RNA, 19 nt, Artificial Sequence
  Description of Artificial Sequence: Synthetic oligonucleotide
  Antisense strand to SEQ ID NO: 185180
uuaauccaacaucuaguaa

SEQ ID NO: 185182 - RNA, 19 nt, Artificial Sequence
  Description of Artificial Sequence: Synthetic oligonucleotide
  Sense strand starting at position 1106 of SEQ ID NO: 2387
aggcaaugauugucuggga

SEQ ID NO: 185183 - RNA, 19 nt, Artificial Sequence
  Description of Artificial Sequence: Synthetic oligonucleotide
  Antisense strand to SEQ ID NO: 185182
ucccagacaaucauugccu

SEQ ID NO: 185184 - RNA, 19 nt, Artificial Sequence
  Description of Artificial Sequence: Synthetic oligonucleotide
  Sense strand starting at position 1107 of SEQ ID NO: 2387
ggcaaugauugucugggaa

SEQ ID NO: 185185 - RNA, 19 nt, Artificial Sequence
  Description of Artificial Sequence: Synthetic oligonucleotide
  Antisense strand to SEQ ID NO: 185184
uucccagacaaucauugcc

SEQ ID NO: 185186 - RNA, 19 nt, Artificial Sequence
  Description of Artificial Sequence: Synthetic oligonucleotide
  Sense strand starting at position 1110 of SEQ ID NO: 2387
aaugauugucugggaacca

SEQ ID NO: 185187 - RNA, 19 nt, Artificial Sequence
  Description of Artificial Sequence: Synthetic oligonucleotide
  Antisense strand to SEQ ID NO: 185186
ugguucccagacaaucauu

SEQ ID NO: 185188 - RNA, 19 nt, Artificial Sequence
  Description of Artificial Sequence: Synthetic oligonucleotide
  Sense strand starting at position 1359 of SEQ ID NO: 2387
aggagacucuauguuaaac

SEQ ID NO: 185189 - RNA, 19 nt, Artificial Sequence
  Description of Artificial Sequence: Synthetic oligonucleotide
  Antisense strand to SEQ ID NO: 185188
guuuaacauagagucuccu

SEQ ID NO: 185190 - RNA, 19 nt, Artificial Sequence
  Description of Artificial Sequence: Synthetic oligonucleotide
  Sense strand starting at position 1431 of SEQ ID NO: 2387
aucuuucugcucuaaugga

SEQ ID NO: 185191 - RNA, 19 nt, Artificial Sequence
  Description of Artificial Sequence: Synthetic oligonucleotide
  Antisense strand to SEQ ID NO: 185190
uccauuagagcagaaagau

SEQ ID NO: 185192 - RNA, 19 nt, Artificial Sequence
  Description of Artificial Sequence: Synthetic oligonucleotide
  Sense strand starting at position 1501 of SEQ ID NO: 2387
gcacuaauucuacggaauu

SEQ ID NO: 185193 - RNA, 19 nt, Artificial Sequence
  Description of Artificial Sequence: Synthetic oligonucleotide
  Antisense strand to SEQ ID NO: 185192
aauuccguagaauuagugc

SEQ ID NO: 185194 - RNA, 19 nt, Artificial Sequence
  Description of Artificial Sequence: Synthetic oligonucleotide
  Sense strand starting at position 1539 of SEQ ID NO: 2387
cgggcagugacacaacauu

SEQ ID NO: 185195 - RNA, 19 nt, Artificial Sequence
  Description of Artificial Sequence: Synthetic oligonucleotide
  Antisense strand to SEQ ID NO: 185194
aauguugugucacugcccg

SEQ ID NO: 185196 - RNA, 19 nt, Artificial Sequence
  Description of Artificial Sequence: Synthetic oligonucleotide
  Sense strand starting at position 1691 of SEQ ID NO: 2387
cagugaacauuccuuggau

SEQ ID NO: 185197 - RNA, 19 nt, Artificial Sequence
  Description of Artificial Sequence: Synthetic oligonucleotide
  Antisense strand to SEQ ID NO: 185196
auccaaggaauguucacug

SEQ ID NO: 185198 - RNA, 19 nt, Artificial Sequence
  Description of Artificial Sequence: Synthetic oligonucleotide
  Sense strand starting at position 1692 of SEQ ID NO: 2387
agugaacauuccuuggauu

SEQ ID NO: 185199 - RNA, 19 nt, Artificial Sequence
  Description of Artificial Sequence: Synthetic oligonucleotide
  Antisense strand to SEQ ID NO: 185198
aauccaaggaauguucacu

SEQ ID NO: 185200 - RNA, 19 nt, Artificial Sequence
  Description of Artificial Sequence: Synthetic oligonucleotide
  Sense strand starting at position 2084 of SEQ ID NO: 2387
ccuauuggcuugucaggaa

SEQ ID NO: 185201 - RNA, 19 nt, Artificial Sequence
  Description of Artificial Sequence: Synthetic oligonucleotide
  Antisense strand to SEQ ID NO: 185200
uuccugacaagccaauagg

SEQ ID NO: 185202 - RNA, 19 nt, Artificial Sequence
  Description of Artificial Sequence: Synthetic oligonucleotide
  Sense strand starting at position 2119 of SEQ ID NO: 2387
aaaugacuucuagguuaug

SEQ ID NO: 185203 - RNA, 19 nt, Artificial Sequence
  Description of Artificial Sequence: Synthetic oligonucleotide
  Antisense strand to SEQ ID NO: 185202
cauaaccuagaagucauuu

SEQ ID NO: 185204 - RNA, 19 nt, Artificial Sequence
  Description of Artificial Sequence: Synthetic oligonucleotide
  Sense strand starting at position 2128 of SEQ ID NO: 2387
cuagguuaugcuuaacuuu

SEQ ID NO: 185205 - RNA, 19 nt, Artificial Sequence
  Description of Artificial Sequence: Synthetic oligonucleotide
  Antisense strand to SEQ ID NO: 185204
aaaguuaagcauaaccuag

SEQ ID NO: 185206 - RNA, 19 nt, Artificial Sequence
  Description of Artificial Sequence: Synthetic oligonucleotide
  Sense strand starting at position 2340 of SEQ ID NO: 2387
guacaacauuucgugugaa

SEQ ID NO: 185207 - RNA, 19 nt, Artificial Sequence
  Description of Artificial Sequence: Synthetic oligonucleotide
  Antisense strand to SEQ ID NO: 185206
uucacacgaaauguuguac

SEQ ID NO: 185208 - RNA, 19 nt, Artificial Sequence
  Description of Artificial Sequence: Synthetic oligonucleotide
  Sense strand starting at position 2403 of SEQ ID NO: 2387
agaaauacaguuugaguua

SEQ ID NO: 185209 - RNA, 19 nt, Artificial Sequence
  Description of Artificial Sequence: Synthetic oligonucleotide
  Antisense strand to SEQ ID NO: 185208
uaacucaaacuguauuucu

SEQ ID NO: 185210 - RNA, 19 nt, Artificial Sequence
  Description of Artificial Sequence: Synthetic oligonucleotide
  Sense strand starting at position 2406 of SEQ ID NO: 2387
aauacaguuugaguuaaag

SEQ ID NO: 185211 - RNA, 19 nt, Artificial Sequence
  Description of Artificial Sequence: Synthetic oligonucleotide
  Antisense strand to SEQ ID NO: 185210
cuuuaacucaaacuguauu

SEQ ID NO: 185212 - RNA, 19 nt, Artificial Sequence
  Description of Artificial Sequence: Synthetic oligonucleotide
  Sense strand starting at position 2553 of SEQ ID NO: 2387
uuauaagggcccugagauc

SEQ ID NO: 185213 - RNA, 19 nt, Artificial Sequence
  Description of Artificial Sequence: Synthetic oligonucleotide
  Antisense strand to SEQ ID NO: 185212
gaucucagggcccuuauaa

SEQ ID NO: 185214 - RNA, 19 nt, Artificial Sequence
  Description of Artificial Sequence: Synthetic oligonucleotide
  Sense strand starting at position 2575 of SEQ ID NO: 2387
aaaugcguacuauaguaga

SEQ ID NO: 185215 - RNA, 19 nt, Artificial Sequence
  Description of Artificial Sequence: Synthetic oligonucleotide
  Antisense strand to SEQ ID NO: 185214
ucuacuauaguacgcauuu

SEQ ID NO: 185216 - RNA, 19 nt, Artificial Sequence
  Description of Artificial Sequence: Synthetic oligonucleotide
  Sense strand starting at position 2847 of SEQ ID NO: 2387
gcaggauguuucuuuaaga

SEQ ID NO: 185217 - RNA, 19 nt, Artificial Sequence
  Description of Artificial Sequence: Synthetic oligonucleotide
  Antisense strand to SEQ ID NO: 185216
ucuuaaagaaacauccugc

SEQ ID NO: 185218 - RNA, 19 nt, Artificial Sequence
  Description of Artificial Sequence: Synthetic oligonucleotide
  Sense strand starting at position 2848 of SEQ ID NO: 2387
caggauguuucuuuaagag

SEQ ID NO: 185219 - RNA, 19 nt, Artificial Sequence
  Description of Artificial Sequence: Synthetic oligonucleotide
  Antisense strand to SEQ ID NO: 185218
cucuuaaagaaacauccug

SEQ ID NO: 185220 - RNA, 19 nt, Artificial Sequence
  Description of Artificial Sequence: Synthetic oligonucleotide
  Sense strand starting at position 3176 of SEQ ID NO: 2387
uuugcuagcccugaaauca

SEQ ID NO: 185221 - RNA, 19 nt, Artificial Sequence
  Description of Artificial Sequence: Synthetic oligonucleotide
  Antisense strand to SEQ ID NO: 185220
ugauuucagggcuagcaaa

SEQ ID NO: 185222 - RNA, 19 nt, Artificial Sequence
  Description of Artificial Sequence: Synthetic oligonucleotide
  Sense strand starting at position 3275 of SEQ ID NO: 2387
gaagaaagaucgcccaaga

SEQ ID NO: 185223 - RNA, 19 nt, Artificial Sequence
  Description of Artificial Sequence: Synthetic oligonucleotide
  Antisense strand to SEQ ID NO: 185222
ucuugggcgaucuuucuuc

SEQ ID NO: 185224 - RNA, 19 nt, Artificial Sequence
  Description of Artificial Sequence: Synthetic oligonucleotide
  Sense strand starting at position 3378 of SEQ ID NO: 2387
acagaacagcugugagacu

SEQ ID NO: 185225 - RNA, 19 nt, Artificial Sequence
  Description of Artificial Sequence: Synthetic oligonucleotide
  Antisense strand to SEQ ID NO: 185224
agucucacagcuguucugu

SEQ ID NO: 185226 - RNA, 19 nt, Artificial Sequence
  Description of Artificial Sequence: Synthetic oligonucleotide
  Sense strand starting at position 3404 of SEQ ID NO: 2387
cugguuugcccagaaagac

SEQ ID NO: 185227 - RNA, 19 nt, Artificial Sequence
  Description of Artificial Sequence: Synthetic oligonucleotide
  Antisense strand to SEQ ID NO: 185226
gucuuucugggcaaaccag

SEQ ID NO: 185228 - RNA, 19 nt, Artificial Sequence
  Description of Artificial Sequence: Synthetic oligonucleotide
  Sense strand starting at position 3458 of SEQ ID NO: 2387
ugaguuagagccugaacug

SEQ ID NO: 185229 - RNA, 19 nt, Artificial Sequence
  Description of Artificial Sequence: Synthetic oligonucleotide
  Antisense strand to SEQ ID NO: 185228
caguucaggcucuaacuca

SEQ ID NO: 185230 - RNA, 19 nt, Artificial Sequence
  Description of Artificial Sequence: Synthetic oligonucleotide
  Sense strand starting at position 3655 of SEQ ID NO: 2387
ugauucuucccauagaagu

SEQ ID NO: 185231 - RNA, 19 nt, Artificial Sequence
  Description of Artificial Sequence: Synthetic oligonucleotide
  Antisense strand to SEQ ID NO: 185230
acuucuaugggaagaauca

SEQ ID NO: 185232 - RNA, 19 nt, Artificial Sequence
  Description of Artificial Sequence: Synthetic oligonucleotide
  Sense strand starting at position 3822 of SEQ ID NO: 2387
ugguauuuacgguggucaa

SEQ ID NO: 185233 - RNA, 19 nt, Artificial Sequence
  Description of Artificial Sequence: Synthetic oligonucleotide
  Antisense strand to SEQ ID NO: 185232
uugaccaccguaaauacca

SEQ ID NO: 185234 - RNA, 19 nt, Artificial Sequence
  Description of Artificial Sequence: Synthetic oligonucleotide
  Sense strand starting at position 3823 of SEQ ID NO: 2387
gguauuuacgguggucaag

SEQ ID NO: 185235 - RNA, 19 nt, Artificial Sequence
  Description of Artificial Sequence: Synthetic oligonucleotide
  Antisense strand to SEQ ID NO: 185234
cuugaccaccguaaauacc

SEQ ID NO: 185236 - RNA, 19 nt, Artificial Sequence
  Description of Artificial Sequence: Synthetic oligonucleotide
  Sense strand starting at position 3825 of SEQ ID NO: 2387
uauuuacgguggucaagua

SEQ ID NO: 185237 - RNA, 19 nt, Artificial Sequence
  Description of Artificial Sequence: Synthetic oligonucleotide
  Antisense strand to SEQ ID NO: 185236
uacuugaccaccguaaaua

SEQ ID NO: 185238 - RNA, 19 nt, Artificial Sequence
  Description of Artificial Sequence: Synthetic oligonucleotide
  Sense strand starting at position 3950 of SEQ ID NO: 2387
cagcucuuggcagaagaga

SEQ ID NO: 185239 - RNA, 19 nt, Artificial Sequence
  Description of Artificial Sequence: Synthetic oligonucleotide
  Antisense strand to SEQ ID NO: 185238
ucucuucugccaagagcug

SEQ ID NO: 185240 - RNA, 19 nt, Artificial Sequence
  Description of Artificial Sequence: Synthetic oligonucleotide
  Sense strand starting at position 14 of SEQ ID NO: 2388
gaacucuuagagcauugua

SEQ ID NO: 185241 - RNA, 19 nt, Artificial Sequence
  Description of Artificial Sequence: Synthetic oligonucleotide
  Antisense strand to SEQ ID NO: 185240
uacaaugcucuaagaguuc

SEQ ID NO: 185242 - RNA, 19 nt, Artificial Sequence
  Description of Artificial Sequence: Synthetic oligonucleotide
  Sense strand starting at position 17 of SEQ ID NO: 2388
cucuuagagcauuguaugu

SEQ ID NO: 185243 - RNA, 19 nt, Artificial Sequence
  Description of Artificial Sequence: Synthetic oligonucleotide
  Antisense strand to SEQ ID NO: 185242
acauacaaugcucuaagag

SEQ ID NO: 185244 - RNA, 19 nt, Artificial Sequence
  Description of Artificial Sequence: Synthetic oligonucleotide
  Sense strand starting at position 64 of SEQ ID NO: 2388
ugacaaucuuuggucauca

SEQ ID NO: 185245 - RNA, 19 nt, Artificial Sequence
  Description of Artificial Sequence: Synthetic oligonucleotide
  Antisense strand to SEQ ID NO: 185244
ugaugaccaaagauuguca

SEQ ID NO: 185246 - RNA, 19 nt, Artificial Sequence
  Description of Artificial Sequence: Synthetic oligonucleotide
  Sense strand starting at position 161 of SEQ ID NO: 2388
aaauaaaggcuucgagguu

SEQ ID NO: 185247 - RNA, 19 nt, Artificial Sequence
  Description of Artificial Sequence: Synthetic oligonucleotide
  Antisense strand to SEQ ID NO: 185246
aaccucgaagccuuuauuu

SEQ ID NO: 185248 - RNA, 19 nt, Artificial Sequence
  Description of Artificial Sequence: Synthetic oligonucleotide
  Sense strand starting at position 218 of SEQ ID NO: 2388
agagcaacugcugagaguu

SEQ ID NO: 185249 - RNA, 19 nt, Artificial Sequence
  Description of Artificial Sequence: Synthetic oligonucleotide
  Antisense strand to SEQ ID NO: 185248
aacucucagcaguugcucu

SEQ ID NO: 185250 - RNA, 19 nt, Artificial Sequence
  Description of Artificial Sequence: Synthetic oligonucleotide
  Sense strand starting at position 240 of SEQ ID NO: 2388
ggaaacaaguuccaggaaa

SEQ ID NO: 185251 - RNA, 19 nt, Artificial Sequence
  Description of Artificial Sequence: Synthetic oligonucleotide
  Antisense strand to SEQ ID NO: 185250
uuuccuggaacuuguuucc

SEQ ID NO: 185252 - RNA, 19 nt, Artificial Sequence
  Description of Artificial Sequence: Synthetic oligonucleotide
  Sense strand starting at position 251 of SEQ ID NO: 2388
ccaggaaaugugcacagua

SEQ ID NO: 185253 - RNA, 19 nt, Artificial Sequence
  Description of Artificial Sequence: Synthetic oligonucleotide
  Antisense strand to SEQ ID NO: 185252
uacugugcacauuuccugg

SEQ ID NO: 185254 - RNA, 19 nt, Artificial Sequence
  Description of Artificial Sequence: Synthetic oligonucleotide
  Sense strand starting at position 450 of SEQ ID NO: 2388
gguagcaaucaccaugcau

SEQ ID NO: 185255 - RNA, 19 nt, Artificial Sequence
  Description of Artificial Sequence: Synthetic oligonucleotide
  Antisense strand to SEQ ID NO: 185254
augcauggugauugcuacc

SEQ ID NO: 185256 - RNA, 19 nt, Artificial Sequence
  Description of Artificial Sequence: Synthetic oligonucleotide
  Sense strand starting at position 532 of SEQ ID NO: 2388
gccuguucuuucuuaggga

SEQ ID NO: 185257 - RNA, 19 nt, Artificial Sequence
  Description of Artificial Sequence: Synthetic oligonucleotide
  Antisense strand to SEQ ID NO: 185256
ucccuaagaaagaacaggc

SEQ ID NO: 185258 - RNA, 19 nt, Artificial Sequence
  Description of Artificial Sequence: Synthetic oligonucleotide
  Sense strand starting at position 741 of SEQ ID NO: 2388
cucugcgucauagaggauu

SEQ ID NO: 185259 - RNA, 19 nt, Artificial Sequence
  Description of Artificial Sequence: Synthetic oligonucleotide
  Antisense strand to SEQ ID NO: 185258
aauccucuaugacgcagag

SEQ ID NO: 185260 - RNA, 19 nt, Artificial Sequence
  Description of Artificial Sequence: Synthetic oligonucleotide
  Sense strand starting at position 744 of SEQ ID NO: 2388
ugcgucauagaggauuagu

SEQ ID NO: 185261 - RNA, 19 nt, Artificial Sequence
  Description of Artificial Sequence: Synthetic oligonucleotide
  Antisense strand to SEQ ID NO: 185260
acuaauccucuaugacgca

SEQ ID NO: 185262 - RNA, 19 nt, Artificial Sequence
  Description of Artificial Sequence: Synthetic oligonucleotide
  Sense strand starting at position 754 of SEQ ID NO: 2388
aggauuagugcugaaaugu

SEQ ID NO: 185263 - RNA, 19 nt, Artificial Sequence
  Description of Artificial Sequence: Synthetic oligonucleotide
  Antisense strand to SEQ ID NO: 185262
acauuucagcacuaauccu

SEQ ID NO: 185264 - RNA, 19 nt, Artificial Sequence
  Description of Artificial Sequence: Synthetic oligonucleotide
  Sense strand starting at position 870 of SEQ ID NO: 2388
aguuuaacauccuucugua

SEQ ID NO: 185265 - RNA, 19 nt, Artificial Sequence
  Description of Artificial Sequence: Synthetic oligonucleotide
  Antisense strand to SEQ ID NO: 185264
uacagaaggauguuaaacu

SEQ ID NO: 185266 - RNA, 19 nt, Artificial Sequence
  Description of Artificial Sequence: Synthetic oligonucleotide
  Sense strand starting at position 923 of SEQ ID NO: 2388
uccacugaacugugacuuu

SEQ ID NO: 185267 - RNA, 19 nt, Artificial Sequence
  Description of Artificial Sequence: Synthetic oligonucleotide
  Antisense strand to SEQ ID NO: 185266
aaagucacaguucagugga

SEQ ID NO: 185268 - RNA, 19 nt, Artificial Sequence
  Description of Artificial Sequence: Synthetic oligonucleotide
  Sense strand starting at position 970 of SEQ ID NO: 2388
uccagaggugucuggcuua

SEQ ID NO: 185269 - RNA, 19 nt, Artificial Sequence
  Description of Artificial Sequence: Synthetic oligonucleotide
  Antisense strand to SEQ ID NO: 185268
uaagccagacaccucugga

SEQ ID NO: 185270 - RNA, 19 nt, Artificial Sequence
  Description of Artificial Sequence: Synthetic oligonucleotide
  Sense strand starting at position 1235 of SEQ ID NO: 2388
aaugucacuccuggacaga

SEQ ID NO: 185271 - RNA, 19 nt, Artificial Sequence
  Description of Artificial Sequence: Synthetic oligonucleotide
  Antisense strand to SEQ ID NO: 185270
ucuguccaggagugacauu

SEQ ID NO: 185272 - RNA, 19 nt, Artificial Sequence
  Description of Artificial Sequence: Synthetic oligonucleotide
  Sense strand starting at position 1282 of SEQ ID NO: 2388
cgaguccucauguauguca

SEQ ID NO: 185273 - RNA, 19 nt, Artificial Sequence
  Description of Artificial Sequence: Synthetic oligonucleotide
  Antisense strand to SEQ ID NO: 185272
ugacauacaugaggacucg

SEQ ID NO: 185274 - RNA, 19 nt, Artificial Sequence
  Description of Artificial Sequence: Synthetic oligonucleotide
  Sense strand starting at position 1651 of SEQ ID NO: 2388
caccuagacguuugcauuu

SEQ ID NO: 185275 - RNA, 19 nt, Artificial Sequence
  Description of Artificial Sequence: Synthetic oligonucleotide
  Antisense strand to SEQ ID NO: 185274
aaaugcaaacgucuaggug

SEQ ID NO: 185276 - RNA, 19 nt, Artificial Sequence
  Description of Artificial Sequence: Synthetic oligonucleotide
  Sense strand starting at position 1676 of SEQ ID NO: 2388
agaaauuagccgcaugauu

SEQ ID NO: 185277 - RNA, 19 nt, Artificial Sequence
  Description of Artificial Sequence: Synthetic oligonucleotide
  Antisense strand to SEQ ID NO: 185276
aaucaugcggcuaauuucu

SEQ ID NO: 185278 - RNA, 19 nt, Artificial Sequence
  Description of Artificial Sequence: Synthetic oligonucleotide
  Sense strand starting at position 1687 of SEQ ID NO: 2388
gcaugauuaaugggagcug

SEQ ID NO: 185279 - RNA, 19 nt, Artificial Sequence
  Description of Artificial Sequence: Synthetic oligonucleotide
  Antisense strand to SEQ ID NO: 185278
cagcucccauuaaucaugc

SEQ ID NO: 185280 - RNA, 19 nt, Artificial Sequence
  Description of Artificial Sequence: Synthetic oligonucleotide
  Sense strand starting at position 2497 of SEQ ID NO: 2388
gggaguguggcugaauacu

SEQ ID NO: 185281 - RNA, 19 nt, Artificial Sequence
  Description of Artificial Sequence: Synthetic oligonucleotide
  Antisense strand to SEQ ID NO: 185280
aguauucagccacacuccc

SEQ ID NO: 185282 - RNA, 19 nt, Artificial Sequence
  Description of Artificial Sequence: Synthetic oligonucleotide
  Sense strand starting at position 2705 of SEQ ID NO: 2388
gcugauuccucagccuauu

SEQ ID NO: 185283 - RNA, 19 nt, Artificial Sequence
  Description of Artificial Sequence: Synthetic oligonucleotide
  Antisense strand to SEQ ID NO: 185282
aauaggcugaggaaucagc

SEQ ID NO: 185284 - RNA, 19 nt, Artificial Sequence
  Description of Artificial Sequence: Synthetic oligonucleotide
  Sense strand starting at position 2756 of SEQ ID NO: 2388
ccucaaagugagugagagu

SEQ ID NO: 185285 - RNA, 19 nt, Artificial Sequence
  Description of Artificial Sequence: Synthetic oligonucleotide
  Antisense strand to SEQ ID NO: 185284
acucucacucacuuugagg

SEQ ID NO: 185286 - RNA, 19 nt, Artificial Sequence
  Description of Artificial Sequence: Synthetic oligonucleotide
  Sense strand starting at position 2818 of SEQ ID NO: 2388
cuauuuccucgcgagguga

SEQ ID NO: 185287 - RNA, 19 nt, Artificial Sequence
  Description of Artificial Sequence: Synthetic oligonucleotide
  Antisense strand to SEQ ID NO: 185286
ucaccucgcgaggaaauag

SEQ ID NO: 185288 - RNA, 19 nt, Artificial Sequence
  Description of Artificial Sequence: Synthetic oligonucleotide
  Sense strand starting at position 2820 of SEQ ID NO: 2388
auuuccucgcgaggugauu

SEQ ID NO: 185289 - RNA, 19 nt, Artificial Sequence
  Description of Artificial Sequence: Synthetic oligonucleotide
  Antisense strand to SEQ ID NO: 185288
aaucaccucgcgaggaaau

SEQ ID NO: 185290 - RNA, 19 nt, Artificial Sequence
  Description of Artificial Sequence: Synthetic oligonucleotide
  Sense strand starting at position 3037 of SEQ ID NO: 2388
cugggauccuuagugaaag

SEQ ID NO: 185291 - RNA, 19 nt, Artificial Sequence
  Description of Artificial Sequence: Synthetic oligonucleotide
  Antisense strand to SEQ ID NO: 185290
cuuucacuaaggaucccag

SEQ ID NO: 185292 - RNA, 19 nt, Artificial Sequence
  Description of Artificial Sequence: Synthetic oligonucleotide
  Sense strand starting at position 3039 of SEQ ID NO: 2388
gggauccuuagugaaaguu

SEQ ID NO: 185293 - RNA, 19 nt, Artificial Sequence
  Description of Artificial Sequence: Synthetic oligonucleotide
  Antisense strand to SEQ ID NO: 185292
aacuuucacuaaggauccc

SEQ ID NO: 185294 - RNA, 19 nt, Artificial Sequence
  Description of Artificial Sequence: Synthetic oligonucleotide
  Sense strand starting at position 3045 of SEQ ID NO: 2388
cuuagugaaaguuggaacu

SEQ ID NO: 185295 - RNA, 19 nt, Artificial Sequence
  Description of Artificial Sequence: Synthetic oligonucleotide
  Antisense strand to SEQ ID NO: 185294
aguuccaacuuucacuaag

SEQ ID NO: 185296 - RNA, 19 nt, Artificial Sequence
  Description of Artificial Sequence: Synthetic oligonucleotide
  Sense strand starting at position 3094 of SEQ ID NO: 2388
cagugcauucguguuucuu

SEQ ID NO: 185297 - RNA, 19 nt, Artificial Sequence
  Description of Artificial Sequence: Synthetic oligonucleotide
  Antisense strand to SEQ ID NO: 185296
aagaaacacgaaugcacug

SEQ ID NO: 185298 - RNA, 19 nt, Artificial Sequence
  Description of Artificial Sequence: Synthetic oligonucleotide
  Sense strand starting at position 3095 of SEQ ID NO: 2388
agugcauucguguuucuua

SEQ ID NO: 185299 - RNA, 19 nt, Artificial Sequence
  Description of Artificial Sequence: Synthetic oligonucleotide
  Antisense strand to SEQ ID NO: 185298
uaagaaacacgaaugcacu

SEQ ID NO: 185300 - RNA, 19 nt, Artificial Sequence
  Description of Artificial Sequence: Synthetic oligonucleotide
  Sense strand starting at position 3103 of SEQ ID NO: 2388
cguguuucuuaaguaaauc

SEQ ID NO: 185301 - RNA, 19 nt, Artificial Sequence
  Description of Artificial Sequence: Synthetic oligonucleotide
  Antisense strand to SEQ ID NO: 185300
gauuuacuuaagaaacacg

SEQ ID NO: 185302 - RNA, 19 nt, Artificial Sequence
  Description of Artificial Sequence: Synthetic oligonucleotide
  Sense strand starting at position 3194 of SEQ ID NO: 2388
aauuauuuguggcaagaua

SEQ ID NO: 185303 - RNA, 19 nt, Artificial Sequence
  Description of Artificial Sequence: Synthetic oligonucleotide
  Antisense strand to SEQ ID NO: 185302
uaucuugccacaaauaauu

SEQ ID NO: 185304 - RNA, 19 nt, Artificial Sequence
  Description of Artificial Sequence: Synthetic oligonucleotide
  Sense strand starting at position 3224 of SEQ ID NO: 2388
aauuauugcuguucgauag

SEQ ID NO: 185305 - RNA, 19 nt, Artificial Sequence
  Description of Artificial Sequence: Synthetic oligonucleotide
  Antisense strand to SEQ ID NO: 185304
cuaucgaacagcaauaauu

SEQ ID NO: 185306 - RNA, 19 nt, Artificial Sequence
  Description of Artificial Sequence: Synthetic oligonucleotide
  Sense strand starting at position 3228 of SEQ ID NO: 2388
auugcuguucgauaggaau

SEQ ID NO: 185307 - RNA, 19 nt, Artificial Sequence
  Description of Artificial Sequence: Synthetic oligonucleotide
  Antisense strand to SEQ ID NO: 185306
auuccuaucgaacagcaau

SEQ ID NO: 185308 - RNA, 19 nt, Artificial Sequence
  Description of Artificial Sequence: Synthetic oligonucleotide
  Sense strand starting at position 3230 of SEQ ID NO: 2388
ugcuguucgauaggaaugu

SEQ ID NO: 185309 - RNA, 19 nt, Artificial Sequence
  Description of Artificial Sequence: Synthetic oligonucleotide
  Antisense strand to SEQ ID NO: 185308
acauuccuaucgaacagca

SEQ ID NO: 185310 - RNA, 19 nt, Artificial Sequence
  Description of Artificial Sequence: Synthetic oligonucleotide
  Sense strand starting at position 3671 of SEQ ID NO: 2388
gcuuuauaagcaggccaaa

SEQ ID NO: 185311 - RNA, 19 nt, Artificial Sequence
  Description of Artificial Sequence: Synthetic oligonucleotide
  Antisense strand to SEQ ID NO: 185310
uuuggccugcuuauaaagc

SEQ ID NO: 185312 - RNA, 19 nt, Artificial Sequence
  Description of Artificial Sequence: Synthetic oligonucleotide
  Sense strand starting at position 3708 of SEQ ID NO: 2388
ugaucuguucaggauagug

SEQ ID NO: 185313 - RNA, 19 nt, Artificial Sequence
  Description of Artificial Sequence: Synthetic oligonucleotide
  Antisense strand to SEQ ID NO: 185312
cacuauccugaacagauca

SEQ ID NO: 185314 - RNA, 19 nt, Artificial Sequence
  Description of Artificial Sequence: Synthetic oligonucleotide
  Sense strand starting at position 3773 of SEQ ID NO: 2388
acacucagcgcugaacaau

SEQ ID NO: 185315 - RNA, 19 nt, Artificial Sequence
  Description of Artificial Sequence: Synthetic oligonucleotide
  Antisense strand to SEQ ID NO: 185314
auuguucagcgcugagugu

SEQ ID NO: 185316 - RNA, 19 nt, Artificial Sequence
  Description of Artificial Sequence: Synthetic oligonucleotide
  Sense strand starting at position 3822 of SEQ ID NO: 2388
cgcauccuucccuagcaau

SEQ ID NO: 185317 - RNA, 19 nt, Artificial Sequence
  Description of Artificial Sequence: Synthetic oligonucleotide
  Antisense strand to SEQ ID NO: 185316
auugcuagggaaggaugcg

SEQ ID NO: 185318 - RNA, 19 nt, Artificial Sequence
  Description of Artificial Sequence: Synthetic oligonucleotide
  Sense strand starting at position 3865 of SEQ ID NO: 2388
ccaucaauagcacgacauu

SEQ ID NO: 185319 - RNA, 19 nt, Artificial Sequence
  Description of Artificial Sequence: Synthetic oligonucleotide
  Antisense strand to SEQ ID NO: 185318
aaugucgugcuauugaugg

SEQ ID NO: 185320 - RNA, 19 nt, Artificial Sequence
  Description of Artificial Sequence: Synthetic oligonucleotide
  Sense strand starting at position 3942 of SEQ ID NO: 2389
agacuaaccugucugaaua

SEQ ID NO: 185321 - RNA, 19 nt, Artificial Sequence
  Description of Artificial Sequence: Synthetic oligonucleotide
  Antisense strand to SEQ ID NO: 185320
uauucagacagguuagucu

SEQ ID NO: 185322 - RNA, 19 nt, Artificial Sequence
  Description of Artificial Sequence: Synthetic oligonucleotide
  Sense strand starting at position 3763 of SEQ ID NO: 2389
ugcauauugauggagcauu

SEQ ID NO: 185323 - RNA, 19 nt, Artificial Sequence
  Description of Artificial Sequence: Synthetic oligonucleotide
  Antisense strand to SEQ ID NO: 185322
aaugcuccaucaauaugca

SEQ ID NO: 185324 - RNA, 19 nt, Artificial Sequence
  Description of Artificial Sequence: Synthetic oligonucleotide
  Sense strand starting at position 3755 of SEQ ID NO: 2389
acaacaagugcauauugau

SEQ ID NO: 185325 - RNA, 19 nt, Artificial Sequence
  Description of Artificial Sequence: Synthetic oligonucleotide
  Antisense strand to SEQ ID NO: 185324
aucaauaugcacuuguugu

SEQ ID NO: 185326 - RNA, 19 nt, Artificial Sequence
  Description of Artificial Sequence: Synthetic oligonucleotide
  Sense strand starting at position 3677 of SEQ ID NO: 2389
cuuugaguuggaugacauc

SEQ ID NO: 185327 - RNA, 19 nt, Artificial Sequence
  Description of Artificial Sequence: Synthetic oligonucleotide
  Antisense strand to SEQ ID NO: 185326
gaugucauccaacucaaag

SEQ ID NO: 185328 - RNA, 19 nt, Artificial Sequence
  Description of Artificial Sequence: Synthetic oligonucleotide
  Sense strand starting at position 3673 of SEQ ID NO: 2389
auaucuuugaguuggauga

SEQ ID NO: 185329 - RNA, 19 nt, Artificial Sequence
  Description of Artificial Sequence: Synthetic oligonucleotide
  Antisense strand to SEQ ID NO: 185328
ucauccaacucaaagauau

SEQ ID NO: 185330 - RNA, 19 nt, Artificial Sequence
  Description of Artificial Sequence: Synthetic oligonucleotide
  Sense strand starting at position 3671 of SEQ ID NO: 2389
cuauaucuuugaguuggau

SEQ ID NO: 185331 - RNA, 19 nt, Artificial Sequence
  Description of Artificial Sequence: Synthetic oligonucleotide
  Antisense strand to SEQ ID NO: 185330
auccaacucaaagauauag

SEQ ID NO: 185332 - RNA, 19 nt, Artificial Sequence
  Description of Artificial Sequence: Synthetic oligonucleotide
  Sense strand starting at position 3668 of SEQ ID NO: 2389
ucacuauaucuuugaguug

SEQ ID NO: 185333 - RNA, 19 nt, Artificial Sequence
  Description of Artificial Sequence: Synthetic oligonucleotide
  Antisense strand to SEQ ID NO: 185332
caacucaaagauauaguga

SEQ ID NO: 185334 - RNA, 19 nt, Artificial Sequence
  Description of Artificial Sequence: Synthetic oligonucleotide
  Sense strand starting at position 3544 of SEQ ID NO: 2389
ggaucauuaugaccaagcu

SEQ ID NO: 185335 - RNA, 19 nt, Artificial Sequence
  Description of Artificial Sequence: Synthetic oligonucleotide
  Antisense strand to SEQ ID NO: 185334
agcuuggucauaaugaucc

SEQ ID NO: 185336 - RNA, 19 nt, Artificial Sequence
  Description of Artificial Sequence: Synthetic oligonucleotide
  Sense strand starting at position 3496 of SEQ ID NO: 2389
uuaauauguuccuuugagg

SEQ ID NO: 185337 - RNA, 19 nt, Artificial Sequence
  Description of Artificial Sequence: Synthetic oligonucleotide
  Antisense strand to SEQ ID NO: 185336
ccucaaaggaacauauuaa

SEQ ID NO: 185338 - RNA, 19 nt, Artificial Sequence
  Description of Artificial Sequence: Synthetic oligonucleotide
  Sense strand starting at position 3328 of SEQ ID NO: 2389
gauauauagguaugacuuc

SEQ ID NO: 185339 - RNA, 19 nt, Artificial Sequence
  Description of Artificial Sequence: Synthetic oligonucleotide
  Antisense strand to SEQ ID NO: 185338
gaagucauaccuauauauc

SEQ ID NO: 185340 - RNA, 19 nt, Artificial Sequence
  Description of Artificial Sequence: Synthetic oligonucleotide
  Sense strand starting at position 3244 of SEQ ID NO: 2389
ggaucuccucuuggauacu

SEQ ID NO: 185341 - RNA, 19 nt, Artificial Sequence
  Description of Artificial Sequence: Synthetic oligonucleotide
  Antisense strand to SEQ ID NO: 185340
aguauccaagaggagaucc

SEQ ID NO: 185342 - RNA, 19 nt, Artificial Sequence
  Description of Artificial Sequence: Synthetic oligonucleotide
  Sense strand starting at position 3194 of SEQ ID NO: 2389
agcugaggucuggaaucua

SEQ ID NO: 185343 - RNA, 19 nt, Artificial Sequence
  Description of Artificial Sequence: Synthetic oligonucleotide
  Antisense strand to SEQ ID NO: 185342
uagauuccagaccucagcu

SEQ ID NO: 185344 - RNA, 19 nt, Artificial Sequence
  Description of Artificial Sequence: Synthetic oligonucleotide
  Sense strand starting at position 3131 of SEQ ID NO: 2389
cucaaugggauguguacaa

SEQ ID NO: 185345 - RNA, 19 nt, Artificial Sequence
  Description of Artificial Sequence: Synthetic oligonucleotide
  Antisense strand to SEQ ID NO: 185344
uuguacacaucccauugag

SEQ ID NO: 185346 - RNA, 19 nt, Artificial Sequence
  Description of Artificial Sequence: Synthetic oligonucleotide
  Sense strand starting at position 3129 of SEQ ID NO: 2389
gacucaaugggauguguac

SEQ ID NO: 185347 - RNA, 19 nt, Artificial Sequence
  Description of Artificial Sequence: Synthetic oligonucleotide
  Antisense strand to SEQ ID NO: 185346
guacacaucccauugaguc

SEQ ID NO: 185348 - RNA, 19 nt, Artificial Sequence
  Description of Artificial Sequence: Synthetic oligonucleotide
  Sense strand starting at position 3072 of SEQ ID NO: 2389
auguaaauacggcaugaaa

SEQ ID NO: 185349 - RNA, 19 nt, Artificial Sequence
  Description of Artificial Sequence: Synthetic oligonucleotide
  Antisense strand to SEQ ID NO: 185348
uuucaugccguauuuacau

SEQ ID NO: 185350 - RNA, 19 nt, Artificial Sequence
  Description of Artificial Sequence: Synthetic oligonucleotide
  Sense strand starting at position 3030 of SEQ ID NO: 2389
guuauacauuuggagaaga

SEQ ID NO: 185351 - RNA, 19 nt, Artificial Sequence
  Description of Artificial Sequence: Synthetic oligonucleotide
  Antisense strand to SEQ ID NO: 185350
ucuucuccaaauguauaac

SEQ ID NO: 185352 - RNA, 19 nt, Artificial Sequence
  Description of Artificial Sequence: Synthetic oligonucleotide
  Sense strand starting at position 2631 of SEQ ID NO: 2389
auggaauccaucugaagug

SEQ ID NO: 185353 - RNA, 19 nt, Artificial Sequence
  Description of Artificial Sequence: Synthetic oligonucleotide
  Antisense strand to SEQ ID NO: 185352
cacuucagauggauuccau

SEQ ID NO: 185354 - RNA, 19 nt, Artificial Sequence
  Description of Artificial Sequence: Synthetic oligonucleotide
  Sense strand starting at position 2627 of SEQ ID NO: 2389
guguauggaauccaucuga

SEQ ID NO: 185355 - RNA, 19 nt, Artificial Sequence
  Description of Artificial Sequence: Synthetic oligonucleotide
  Antisense strand to SEQ ID NO: 185354
ucagauggauuccauacac

SEQ ID NO: 185356 - RNA, 19 nt, Artificial Sequence
  Description of Artificial Sequence: Synthetic oligonucleotide
  Sense strand starting at position 2581 of SEQ ID NO: 2389
guuaaauugcuggauaauu

SEQ ID NO: 185357 - RNA, 19 nt, Artificial Sequence
  Description of Artificial Sequence: Synthetic oligonucleotide
  Antisense strand to SEQ ID NO: 185356
aauuauccagcaauuuaac

SEQ ID NO: 185358 - RNA, 19 nt, Artificial Sequence
  Description of Artificial Sequence: Synthetic oligonucleotide
  Sense strand starting at position 2580 of SEQ ID NO: 2389
gguuaaauugcuggauaau

SEQ ID NO: 185359 - RNA, 19 nt, Artificial Sequence
  Description of Artificial Sequence: Synthetic oligonucleotide
  Antisense strand to SEQ ID NO: 185358
auuauccagcaauuuaacc

SEQ ID NO: 185360 - RNA, 19 nt, Artificial Sequence
  Description of Artificial Sequence: Synthetic oligonucleotide
  Sense strand starting at position 2499 of SEQ ID NO: 2389
aaaguaaaggacuguaacu

SEQ ID NO: 185361 - RNA, 19 nt, Artificial Sequence
  Description of Artificial Sequence: Synthetic oligonucleotide
  Antisense strand to SEQ ID NO: 185360
aguuacaguccuuuacuuu

SEQ ID NO: 185362 - RNA, 19 nt, Artificial Sequence
  Description of Artificial Sequence: Synthetic oligonucleotide
  Sense strand starting at position 2313 of SEQ ID NO: 2389
ggaaauauguuugcaauuc

SEQ ID NO: 185363 - RNA, 19 nt, Artificial Sequence
  Description of Artificial Sequence: Synthetic oligonucleotide
  Antisense strand to SEQ ID NO: 185362
gaauugcaaacauauuucc

SEQ ID NO: 185364 - RNA, 19 nt, Artificial Sequence
  Description of Artificial Sequence: Synthetic oligonucleotide
  Sense strand starting at position 2312 of SEQ ID NO: 2389
aggaaauauguuugcaauu

SEQ ID NO: 185365 - RNA, 19 nt, Artificial Sequence
  Description of Artificial Sequence: Synthetic oligonucleotide
  Antisense strand to SEQ ID NO: 185364
aauugcaaacauauuuccu

SEQ ID NO: 185366 - RNA, 19 nt, Artificial Sequence
  Description of Artificial Sequence: Synthetic oligonucleotide
  Sense strand starting at position 2162 of SEQ ID NO: 2389
gacaaugcugauugcagaa

SEQ ID NO: 185367 - RNA, 19 nt, Artificial Sequence
  Description of Artificial Sequence: Synthetic oligonucleotide
  Antisense strand to SEQ ID NO: 185366
uucugcaaucagcauuguc

SEQ ID NO: 185368 - RNA, 19 nt, Artificial Sequence
  Description of Artificial Sequence: Synthetic oligonucleotide
  Sense strand starting at position 2161 of SEQ ID NO: 2389
ggacaaugcugauugcaga

SEQ ID NO: 185369 - RNA, 19 nt, Artificial Sequence
  Description of Artificial Sequence: Synthetic oligonucleotide
  Antisense strand to SEQ ID NO: 185368
ucugcaaucagcauugucc

SEQ ID NO: 185370 - RNA, 19 nt, Artificial Sequence
  Description of Artificial Sequence: Synthetic oligonucleotide
  Sense strand starting at position 2136 of SEQ ID NO: 2389
aggcuaucuuuacuggaaa

SEQ ID NO: 185371 - RNA, 19 nt, Artificial Sequence
  Description of Artificial Sequence: Synthetic oligonucleotide
  Antisense strand to SEQ ID NO: 185370
uuuccaguaaagauagccu

SEQ ID NO: 185372 - RNA, 19 nt, Artificial Sequence
  Description of Artificial Sequence: Synthetic oligonucleotide
  Sense strand starting at position 1674 of SEQ ID NO: 2389
auugaaugcuaacauuuga

SEQ ID NO: 185373 - RNA, 19 nt, Artificial Sequence
  Description of Artificial Sequence: Synthetic oligonucleotide
  Antisense strand to SEQ ID NO: 185372
ucaaauguuagcauucaau

SEQ ID NO: 185374 - RNA, 19 nt, Artificial Sequence
  Description of Artificial Sequence: Synthetic oligonucleotide
  Sense strand starting at position 1535 of SEQ ID NO: 2389
augacaguacaaugguaua

SEQ ID NO: 185375 - RNA, 19 nt, Artificial Sequence
  Description of Artificial Sequence: Synthetic oligonucleotide
  Antisense strand to SEQ ID NO: 185374
uauaccauuguacugucau

SEQ ID NO: 185376 - RNA, 19 nt, Artificial Sequence
  Description of Artificial Sequence: Synthetic oligonucleotide
  Sense strand starting at position 1355 of SEQ ID NO: 2389
agagaauucucaguuccaa

SEQ ID NO: 185377 - RNA, 19 nt, Artificial Sequence
  Description of Artificial Sequence: Synthetic oligonucleotide
  Antisense strand to SEQ ID NO: 185376
uuggaacugagaauucucu

SEQ ID NO: 185378 - RNA, 19 nt, Artificial Sequence
  Description of Artificial Sequence: Synthetic oligonucleotide
  Sense strand starting at position 1352 of SEQ ID NO: 2389
uagagagaauucucaguuc

SEQ ID NO: 185379 - RNA, 19 nt, Artificial Sequence
  Description of Artificial Sequence: Synthetic oligonucleotide
  Antisense strand to SEQ ID NO: 185378
gaacugagaauucucucua

SEQ ID NO: 185380 - RNA, 19 nt, Artificial Sequence
  Description of Artificial Sequence: Synthetic oligonucleotide
  Sense strand starting at position 1252 of SEQ ID NO: 2389
ugaucagacugaucucuuu

SEQ ID NO: 185381 - RNA, 19 nt, Artificial Sequence
  Description of Artificial Sequence: Synthetic oligonucleotide
  Antisense strand to SEQ ID NO: 185380
aaagagaucagucugauca

SEQ ID NO: 185382 - RNA, 19 nt, Artificial Sequence
  Description of Artificial Sequence: Synthetic oligonucleotide
  Sense strand starting at position 1249 of SEQ ID NO: 2389
auaugaucagacugaucuc

SEQ ID NO: 185383 - RNA, 19 nt, Artificial Sequence
  Description of Artificial Sequence: Synthetic oligonucleotide
  Antisense strand to SEQ ID NO: 185382
gagaucagucugaucauau

SEQ ID NO: 185384 - RNA, 19 nt, Artificial Sequence
  Description of Artificial Sequence: Synthetic oligonucleotide
  Sense strand starting at position 776 of SEQ ID NO: 2389
agccaagaaucuguacaug

SEQ ID NO: 185385 - RNA, 19 nt, Artificial Sequence
  Description of Artificial Sequence: Synthetic oligonucleotide
  Antisense strand to SEQ ID NO: 185384
cauguacagauucuuggcu

SEQ ID NO: 185386 - RNA, 19 nt, Artificial Sequence
  Description of Artificial Sequence: Synthetic oligonucleotide
  Sense strand starting at position 673 of SEQ ID NO: 2389
uguguuuguggcagaggua

SEQ ID NO: 185387 - RNA, 19 nt, Artificial Sequence
  Description of Artificial Sequence: Synthetic oligonucleotide
  Antisense strand to SEQ ID NO: 185386
uaccucugccacaaacaca

SEQ ID NO: 185388 - RNA, 19 nt, Artificial Sequence
  Description of Artificial Sequence: Synthetic oligonucleotide
  Sense strand starting at position 644 of SEQ ID NO: 2389
cagagagguugagucuuau

SEQ ID NO: 185389 - RNA, 19 nt, Artificial Sequence
  Description of Artificial Sequence: Synthetic oligonucleotide
  Antisense strand to SEQ ID NO: 185388
auaagacucaaccucucug

SEQ ID NO: 185390 - RNA, 19 nt, Artificial Sequence
  Description of Artificial Sequence: Synthetic oligonucleotide
  Sense strand starting at position 368 of SEQ ID NO: 2389
auugaaauguuuccagaua

SEQ ID NO: 185391 - RNA, 19 nt, Artificial Sequence
  Description of Artificial Sequence: Synthetic oligonucleotide
  Antisense strand to SEQ ID NO: 185390
uaucuggaaacauuucaau

SEQ ID NO: 185392 - RNA, 19 nt, Artificial Sequence
  Description of Artificial Sequence: Synthetic oligonucleotide
  Sense strand starting at position 175 of SEQ ID NO: 2389
uuguuugcugaauggagaa

SEQ ID NO: 185393 - RNA, 19 nt, Artificial Sequence
  Description of Artificial Sequence: Synthetic oligonucleotide
  Antisense strand to SEQ ID NO: 185392
uucuccauucagcaaacaa

SEQ ID NO: 185394 - RNA, 19 nt, Artificial Sequence
  Description of Artificial Sequence: Synthetic oligonucleotide
  Sense strand starting at position 137 of SEQ ID NO: 2389
auuuaugucugguuaguuu

SEQ ID NO: 185395 - RNA, 19 nt, Artificial Sequence
  Description of Artificial Sequence: Synthetic oligonucleotide
  Antisense strand to SEQ ID NO: 185394
aaacuaaccagacauaaau

SEQ ID NO: 185396 - RNA, 19 nt, Artificial Sequence
  Description of Artificial Sequence: Synthetic oligonucleotide
  Sense strand starting at position 70 of SEQ ID NO: 2389
ugaagacaugaccguaaau

SEQ ID NO: 185397 - RNA, 19 nt, Artificial Sequence
  Description of Artificial Sequence: Synthetic oligonucleotide
  Antisense strand to SEQ ID NO: 185396
auuuacggucaugucuuca

SEQ ID NO: 185398 - RNA, 19 nt, Artificial Sequence
  Description of Artificial Sequence: Synthetic oligonucleotide
  Sense strand starting at position 14 of SEQ ID NO: 2389
ugagcuccgguacaauaaa

SEQ ID NO: 185399 - RNA, 19 nt, Artificial Sequence
  Description of Artificial Sequence: Synthetic oligonucleotide
  Antisense strand to SEQ ID NO: 185398
uuuauuguaccggagcuca

SEQ ID NO: 185400 - RNA, 19 nt, Artificial Sequence
  Description of Artificial Sequence: Synthetic oligonucleotide
  Sense strand starting at position 1021 of SEQ ID NO: 2390
ucaaucacauuuggaugau

SEQ ID NO: 185401 - RNA, 19 nt, Artificial Sequence
  Description of Artificial Sequence: Synthetic oligonucleotide
  Antisense strand to SEQ ID NO: 185400
aucauccaaaugugauuga

SEQ ID NO: 185402 - RNA, 19 nt, Artificial Sequence
  Description of Artificial Sequence: Synthetic oligonucleotide
  Sense strand starting at position 1030 of SEQ ID NO: 2390
uuuggaugaucuuccagau

SEQ ID NO: 185403 - RNA, 19 nt, Artificial Sequence
  Description of Artificial Sequence: Synthetic oligonucleotide
  Antisense strand to SEQ ID NO: 185402
aucuggaagaucauccaaa

SEQ ID NO: 185404 - RNA, 19 nt, Artificial Sequence
  Description of Artificial Sequence: Synthetic oligonucleotide
  Sense strand starting at position 1037 of SEQ ID NO: 2390
gaucuuccagaucgucaua

SEQ ID NO: 185405 - RNA, 19 nt, Artificial Sequence
  Description of Artificial Sequence: Synthetic oligonucleotide
  Antisense strand to SEQ ID NO: 185404
uaugacgaucuggaagauc

SEQ ID NO: 185406 - RNA, 19 nt, Artificial Sequence
  Description of Artificial Sequence: Synthetic oligonucleotide
  Sense strand starting at position 1039 of SEQ ID NO: 2390
ucuuccagaucgucauaga

SEQ ID NO: 185407 - RNA, 19 nt, Artificial Sequence
  Description of Artificial Sequence: Synthetic oligonucleotide
  Antisense strand to SEQ ID NO: 185406
ucuaugacgaucuggaaga

SEQ ID NO: 185408 - RNA, 19 nt, Artificial Sequence
  Description of Artificial Sequence: Synthetic oligonucleotide
  Sense strand starting at position 1042 of SEQ ID NO: 2390
uccagaucgucauagagug

SEQ ID NO: 185409 - RNA, 19 nt, Artificial Sequence
  Description of Artificial Sequence: Synthetic oligonucleotide
  Antisense strand to SEQ ID NO: 185408
cacucuaugacgaucugga

SEQ ID NO: 185410 - RNA, 19 nt, Artificial Sequence
  Description of Artificial Sequence: Synthetic oligonucleotide
  Sense strand starting at position 1044 of SEQ ID NO: 2390
cagaucgucauagagugau

SEQ ID NO: 185411 - RNA, 19 nt, Artificial Sequence
  Description of Artificial Sequence: Synthetic oligonucleotide
  Antisense strand to SEQ ID NO: 185410
aucacucuaugacgaucug

SEQ ID NO: 185412 - RNA, 19 nt, Artificial Sequence
  Description of Artificial Sequence: Synthetic oligonucleotide
  Sense strand starting at position 1048 of SEQ ID NO: 2390
ucgucauagagugaucuga

SEQ ID NO: 185413 - RNA, 19 nt, Artificial Sequence
  Description of Artificial Sequence: Synthetic oligonucleotide
  Antisense strand to SEQ ID NO: 185412
ucagaucacucuaugacga

SEQ ID NO: 185414 - RNA, 19 nt, Artificial Sequence
  Description of Artificial Sequence: Synthetic oligonucleotide
  Sense strand starting at position 1068 of SEQ ID NO: 2390
gauguccagucuccuguaa

SEQ ID NO: 185415 - RNA, 19 nt, Artificial Sequence
  Description of Artificial Sequence: Synthetic oligonucleotide
  Antisense strand to SEQ ID NO: 185414
uuacaggagacuggacauc

SEQ ID NO: 185416 - RNA, 19 nt, Artificial Sequence
  Description of Artificial Sequence: Synthetic oligonucleotide
  Sense strand starting at position 1072 of SEQ ID NO: 2390
uccagucuccuguaauucu

SEQ ID NO: 185417 - RNA, 19 nt, Artificial Sequence
  Description of Artificial Sequence: Synthetic oligonucleotide
  Antisense strand to SEQ ID NO: 185416
agaauuacaggagacugga

SEQ ID NO: 185418 - RNA, 19 nt, Artificial Sequence
  Description of Artificial Sequence: Synthetic oligonucleotide
  Sense strand starting at position 1174 of SEQ ID NO: 2390
guccauuaacauuggaaga

SEQ ID NO: 185419 - RNA, 19 nt, Artificial Sequence
  Description of Artificial Sequence: Synthetic oligonucleotide
  Antisense strand to SEQ ID NO: 185418
ucuuccaauguuaauggac

SEQ ID NO: 185420 - RNA, 19 nt, Artificial Sequence
  Description of Artificial Sequence: Synthetic oligonucleotide
  Sense strand starting at position 1176 of SEQ ID NO: 2390
ccauuaacauuggaagaug

SEQ ID NO: 185421 - RNA, 19 nt, Artificial Sequence
  Description of Artificial Sequence: Synthetic oligonucleotide
  Antisense strand to SEQ ID NO: 185420
caucuuccaauguuaaugg

SEQ ID NO: 185422 - RNA, 19 nt, Artificial Sequence
  Description of Artificial Sequence: Synthetic oligonucleotide
  Sense strand starting at position 1210 of SEQ ID NO: 2390
uuugguuaaccagaagcuu

SEQ ID NO: 185423 - RNA, 19 nt, Artificial Sequence
  Description of Artificial Sequence: Synthetic oligonucleotide
  Antisense strand to SEQ ID NO: 185422
aagcuucugguuaaccaaa

SEQ ID NO: 185424 - RNA, 19 nt, Artificial Sequence
  Description of Artificial Sequence: Synthetic oligonucleotide
  Sense strand starting at position 1236 of SEQ ID NO: 2390
guccuugcaucucugaaga

SEQ ID NO: 185425 - RNA, 19 nt, Artificial Sequence
  Description of Artificial Sequence: Synthetic oligonucleotide
  Antisense strand to SEQ ID NO: 185424
ucuucagagaugcaaggac

SEQ ID NO: 185426 - RNA, 19 nt, Artificial Sequence
  Description of Artificial Sequence: Synthetic oligonucleotide
  Sense strand starting at position 1270 of SEQ ID NO: 2390
ggaaguuguggaugcggaa

SEQ ID NO: 185427 - RNA, 19 nt, Artificial Sequence
  Description of Artificial Sequence: Synthetic oligonucleotide
  Antisense strand to SEQ ID NO: 185426
uuccgcauccacaacuucc

SEQ ID NO: 185428 - RNA, 19 nt, Artificial Sequence
  Description of Artificial Sequence: Synthetic oligonucleotide
  Sense strand starting at position 1320 of SEQ ID NO: 2390
agcagcuugccauaguagu

SEQ ID NO: 185429 - RNA, 19 nt, Artificial Sequence
  Description of Artificial Sequence: Synthetic oligonucleotide
  Antisense strand to SEQ ID NO: 185428
acuacuauggcaagcugcu

SEQ ID NO: 185430 - RNA, 19 nt, Artificial Sequence
  Description of Artificial Sequence: Synthetic oligonucleotide
  Sense strand starting at position 1355 of SEQ ID NO: 2390
cacgauucgugggcuguga

SEQ ID NO: 185431 - RNA, 19 nt, Artificial Sequence
  Description of Artificial Sequence: Synthetic oligonucleotide
  Antisense strand to SEQ ID NO: 185430
ucacagcccacgaaucgug

SEQ ID NO: 185432 - RNA, 19 nt, Artificial Sequence
  Description of Artificial Sequence: Synthetic oligonucleotide
  Sense strand starting at position 1357 of SEQ ID NO: 2390
cgauucgugggcugugauu

SEQ ID NO: 185433 - RNA, 19 nt, Artificial Sequence
  Description of Artificial Sequence: Synthetic oligonucleotide
  Antisense strand to SEQ ID NO: 185432
aaucacagcccacgaaucg

SEQ ID NO: 185434 - RNA, 19 nt, Artificial Sequence
  Description of Artificial Sequence: Synthetic oligonucleotide
  Sense strand starting at position 1363 of SEQ ID NO: 2390
gugggcugugauugcagau

SEQ ID NO: 185435 - RNA, 19 nt, Artificial Sequence
  Description of Artificial Sequence: Synthetic oligonucleotide
  Antisense strand to SEQ ID NO: 185434
aucugcaaucacagcccac

SEQ ID NO: 185436 - RNA, 19 nt, Artificial Sequence
  Description of Artificial Sequence: Synthetic oligonucleotide
  Sense strand starting at position 1369 of SEQ ID NO: 2390
ugugauugcagaugaugau

SEQ ID NO: 185437 - RNA, 19 nt, Artificial Sequence
  Description of Artificial Sequence: Synthetic oligonucleotide
  Antisense strand to SEQ ID NO: 185436
aucaucaucugcaaucaca

SEQ ID NO: 185438 - RNA, 19 nt, Artificial Sequence
  Description of Artificial Sequence: Synthetic oligonucleotide
  Sense strand starting at position 1390 of SEQ ID NO: 2390
gggagagcucgcgugaguu

SEQ ID NO: 185439 - RNA, 19 nt, Artificial Sequence
  Description of Artificial Sequence: Synthetic oligonucleotide
  Antisense strand to SEQ ID NO: 185438
aacucacgcgagcucuccc

SEQ ID NO: 185440 - RNA, 19 nt, Artificial Sequence
  Description of Artificial Sequence: Synthetic oligonucleotide
  Sense strand starting at position 1396 of SEQ ID NO: 2390
gcucgcgugaguucacaga

SEQ ID NO: 185441 - RNA, 19 nt, Artificial Sequence
  Description of Artificial Sequence: Synthetic oligonucleotide
  Antisense strand to SEQ ID NO: 185440
ucugugaacucacgcgagc

SEQ ID NO: 185442 - RNA, 19 nt, Artificial Sequence
  Description of Artificial Sequence: Synthetic oligonucleotide
  Sense strand starting at position 1462 of SEQ ID NO: 2390
ccaacucuuccuggcagua

SEQ ID NO: 185443 - RNA, 19 nt, Artificial Sequence
  Description of Artificial Sequence: Synthetic oligonucleotide
  Antisense strand to SEQ ID NO: 185442
uacugccaggaagaguugg

SEQ ID NO: 185444 - RNA, 19 nt, Artificial Sequence
  Description of Artificial Sequence: Synthetic oligonucleotide
  Sense strand starting at position 1647 of SEQ ID NO: 2390
ucagaaaggcugggaguau

SEQ ID NO: 185445 - RNA, 19 nt, Artificial Sequence
  Description of Artificial Sequence: Synthetic oligonucleotide
  Antisense strand to SEQ ID NO: 185444
auacucccagccuuucuga

SEQ ID NO: 185446 - RNA, 19 nt, Artificial Sequence
  Description of Artificial Sequence: Synthetic oligonucleotide
  Sense strand starting at position 1648 of SEQ ID NO: 2390
cagaaaggcugggaguaua

SEQ ID NO: 185447 - RNA, 19 nt, Artificial Sequence
  Description of Artificial Sequence: Synthetic oligonucleotide
  Antisense strand to SEQ ID NO: 185446
uauacucccagccuuucug

SEQ ID NO: 185448 - RNA, 19 nt, Artificial Sequence
  Description of Artificial Sequence: Synthetic oligonucleotide
  Sense strand starting at position 1748 of SEQ ID NO: 2390
ugaagagcuaccuauagug

SEQ ID NO: 185449 - RNA, 19 nt, Artificial Sequence
  Description of Artificial Sequence: Synthetic oligonucleotide
  Antisense strand to SEQ ID NO: 185448
cacuauagguagcucuuca

SEQ ID NO: 185450 - RNA, 19 nt, Artificial Sequence
  Description of Artificial Sequence: Synthetic oligonucleotide
  Sense strand starting at position 1756 of SEQ ID NO: 2390
uaccuauagugggagagau

SEQ ID NO: 185451 - RNA, 19 nt, Artificial Sequence
  Description of Artificial Sequence: Synthetic oligonucleotide
  Antisense strand to SEQ ID NO: 185450
aucucucccacuauaggua

SEQ ID NO: 185452 - RNA, 19 nt, Artificial Sequence
  Description of Artificial Sequence: Synthetic oligonucleotide
  Sense strand starting at position 1791 of SEQ ID NO: 2390
uaauacaacugugauagga

SEQ ID NO: 185453 - RNA, 19 nt, Artificial Sequence
  Description of Artificial Sequence: Synthetic oligonucleotide
  Antisense strand to SEQ ID NO: 185452
uccuaucacaguuguauua

SEQ ID NO: 185454 - RNA, 19 nt, Artificial Sequence
  Description of Artificial Sequence: Synthetic oligonucleotide
  Sense strand starting at position 1793 of SEQ ID NO: 2390
auacaacugugauaggaag

SEQ ID NO: 185455 - RNA, 19 nt, Artificial Sequence
  Description of Artificial Sequence: Synthetic oligonucleotide
  Antisense strand to SEQ ID NO: 185454
cuuccuaucacaguuguau

SEQ ID NO: 185456 - RNA, 19 nt, Artificial Sequence
  Description of Artificial Sequence: Synthetic oligonucleotide
  Sense strand starting at position 1818 of SEQ ID NO: 2390
agaggaauuugaggguauu

SEQ ID NO: 185457 - RNA, 19 nt, Artificial Sequence
  Description of Artificial Sequence: Synthetic oligonucleotide
  Antisense strand to SEQ ID NO: 185456
aauacccucaaauuccucu

SEQ ID NO: 185458 - RNA, 19 nt, Artificial Sequence
  Description of Artificial Sequence: Synthetic oligonucleotide
  Sense strand starting at position 1831 of SEQ ID NO: 2390
gguauuccaugagauagca

SEQ ID NO: 185459 - RNA, 19 nt, Artificial Sequence
  Description of Artificial Sequence: Synthetic oligonucleotide
  Antisense strand to SEQ ID NO: 185458
ugcuaucucauggaauacc

SEQ ID NO: 185460 - RNA, 19 nt, Artificial Sequence
  Description of Artificial Sequence: Synthetic oligonucleotide
  Sense strand starting at position 1851 of SEQ ID NO: 2390
accugaggguucuuuaugu

SEQ ID NO: 185461 - RNA, 19 nt, Artificial Sequence
  Description of Artificial Sequence: Synthetic oligonucleotide
  Antisense strand to SEQ ID NO: 185460
acauaaagaacccucaggu

SEQ ID NO: 185462 - RNA, 19 nt, Artificial Sequence
  Description of Artificial Sequence: Synthetic oligonucleotide
  Sense strand starting at position 2702 of SEQ ID NO: 2390
agugcaucccaccagauau

SEQ ID NO: 185463 - RNA, 19 nt, Artificial Sequence
  Description of Artificial Sequence: Synthetic oligonucleotide
  Antisense strand to SEQ ID NO: 185462
auaucuggugggaugcacu

SEQ ID NO: 185464 - RNA, 19 nt, Artificial Sequence
  Description of Artificial Sequence: Synthetic oligonucleotide
  Sense strand starting at position 2732 of SEQ ID NO: 2390
uuugacaaguacuuguauu

SEQ ID NO: 185465 - RNA, 19 nt, Artificial Sequence
  Description of Artificial Sequence: Synthetic oligonucleotide
  Antisense strand to SEQ ID NO: 185464
aauacaaguacuugucaaa

SEQ ID NO: 185466 - RNA, 19 nt, Artificial Sequence
  Description of Artificial Sequence: Synthetic oligonucleotide
  Sense strand starting at position 2891 of SEQ ID NO: 2390
cgagauguggucuaggucu

SEQ ID NO: 185467 - RNA, 19 nt, Artificial Sequence
  Description of Artificial Sequence: Synthetic oligonucleotide
  Antisense strand to SEQ ID NO: 185466
agaccuagaccacaucucg

SEQ ID NO: 185468 - RNA, 19 nt, Artificial Sequence
  Description of Artificial Sequence: Synthetic oligonucleotide
  Sense strand starting at position 2937 of SEQ ID NO: 2390
ggucucggcuggucucaaa

SEQ ID NO: 185469 - RNA, 19 nt, Artificial Sequence
  Description of Artificial Sequence: Synthetic oligonucleotide
  Antisense strand to SEQ ID NO: 185468
uuugagaccagccgagacc

SEQ ID NO: 185470 - RNA, 19 nt, Artificial Sequence
  Description of Artificial Sequence: Synthetic oligonucleotide
  Sense strand starting at position 3145 of SEQ ID NO: 2390
guggaaggaugucuugagu

SEQ ID NO: 185471 - RNA, 19 nt, Artificial Sequence
  Description of Artificial Sequence: Synthetic oligonucleotide
  Antisense strand to SEQ ID NO: 185470
acucaagacauccuuccac

SEQ ID NO: 185472 - RNA, 19 nt, Artificial Sequence
  Description of Artificial Sequence: Synthetic oligonucleotide
  Sense strand starting at position 3148 of SEQ ID NO: 2390
gaaggaugucuugaguccu

SEQ ID NO: 185473 - RNA, 19 nt, Artificial Sequence
  Description of Artificial Sequence: Synthetic oligonucleotide
  Antisense strand to SEQ ID NO: 185472
aggacucaagacauccuuc

SEQ ID NO: 185474 - RNA, 19 nt, Artificial Sequence
  Description of Artificial Sequence: Synthetic oligonucleotide
  Sense strand starting at position 3440 of SEQ ID NO: 2390
agcuacaaguccucgguaa

SEQ ID NO: 185475 - RNA, 19 nt, Artificial Sequence
  Description of Artificial Sequence: Synthetic oligonucleotide
  Antisense strand to SEQ ID NO: 185474
uuaccgaggacuuguagcu

SEQ ID NO: 185476 - RNA, 19 nt, Artificial Sequence
  Description of Artificial Sequence: Synthetic oligonucleotide
  Sense strand starting at position 3441 of SEQ ID NO: 2390
gcuacaaguccucgguaaa

SEQ ID NO: 185477 - RNA, 19 nt, Artificial Sequence
  Description of Artificial Sequence: Synthetic oligonucleotide
  Antisense strand to SEQ ID NO: 185476
uuuaccgaggacuuguagc

SEQ ID NO: 185478 - RNA, 19 nt, Artificial Sequence
  Description of Artificial Sequence: Synthetic oligonucleotide
  Sense strand starting at position 3442 of SEQ ID NO: 2390
cuacaaguccucgguaaau

SEQ ID NO: 185479 - RNA, 19 nt, Artificial Sequence
  Description of Artificial Sequence: Synthetic oligonucleotide
  Antisense strand to SEQ ID NO: 185478
auuuaccgaggacuuguag

SEQ ID NO: 185480 - RNA, 19 nt, Artificial Sequence
  Description of Artificial Sequence: Synthetic oligonucleotide
  Sense strand starting at position 3795 of SEQ ID NO: 2391
aggaaacucugucauuuau

SEQ ID NO: 185481 - RNA, 19 nt, Artificial Sequence
  Description of Artificial Sequence: Synthetic oligonucleotide
  Antisense strand to SEQ ID NO: 185480
auaaaugacagaguuuccu

SEQ ID NO: 185482 - RNA, 19 nt, Artificial Sequence
  Description of Artificial Sequence: Synthetic oligonucleotide
  Sense strand starting at position 3585 of SEQ ID NO: 2391
gguuuaaauguccauacau

SEQ ID NO: 185483 - RNA, 19 nt, Artificial Sequence
  Description of Artificial Sequence: Synthetic oligonucleotide
  Antisense strand to SEQ ID NO: 185482
auguauggacauuuaaacc

SEQ ID NO: 185484 - RNA, 19 nt, Artificial Sequence
  Description of Artificial Sequence: Synthetic oligonucleotide
  Sense strand starting at position 3584 of SEQ ID NO: 2391
agguuuaaauguccauaca

SEQ ID NO: 185485 - RNA, 19 nt, Artificial Sequence
  Description of Artificial Sequence: Synthetic oligonucleotide
  Antisense strand to SEQ ID NO: 185484
uguauggacauuuaaaccu

SEQ ID NO: 185486 - RNA, 19 nt, Artificial Sequence
  Description of Artificial Sequence: Synthetic oligonucleotide
  Sense strand starting at position 3545 of SEQ ID NO: 2391
gaauguagaucaguacaac

SEQ ID NO: 185487 - RNA, 19 nt, Artificial Sequence
  Description of Artificial Sequence: Synthetic oligonucleotide
  Antisense strand to SEQ ID NO: 185486
guuguacugaucuacauuc

SEQ ID NO: 185488 - RNA, 19 nt, Artificial Sequence
  Description of Artificial Sequence: Synthetic oligonucleotide
  Sense strand starting at position 3529 of SEQ ID NO: 2391
guuagacuguugguaggaa

SEQ ID NO: 185489 - RNA, 19 nt, Artificial Sequence
  Description of Artificial Sequence: Synthetic oligonucleotide
  Antisense strand to SEQ ID NO: 185488
uuccuaccaacagucuaac

SEQ ID NO: 185490 - RNA, 19 nt, Artificial Sequence
  Description of Artificial Sequence: Synthetic oligonucleotide
  Sense strand starting at position 3483 of SEQ ID NO: 2391
aaauuaugagagcaagugu

SEQ ID NO: 185491 - RNA, 19 nt, Artificial Sequence
  Description of Artificial Sequence: Synthetic oligonucleotide
  Antisense strand to SEQ ID NO: 185490
acacuugcucucauaauuu

SEQ ID NO: 185492 - RNA, 19 nt, Artificial Sequence
  Description of Artificial Sequence: Synthetic oligonucleotide
  Sense strand starting at position 3405 of SEQ ID NO: 2391
gaaguucuaccaugaauag

SEQ ID NO: 185493 - RNA, 19 nt, Artificial Sequence
  Description of Artificial Sequence: Synthetic oligonucleotide
  Antisense strand to SEQ ID NO: 185492
cuauucaugguagaacuuc

SEQ ID NO: 185494 - RNA, 19 nt, Artificial Sequence
  Description of Artificial Sequence: Synthetic oligonucleotide
  Sense strand starting at position 3354 of SEQ ID NO: 2391
uaugucauuguagacauga

SEQ ID NO: 185495 - RNA, 19 nt, Artificial Sequence
  Description of Artificial Sequence: Synthetic oligonucleotide
  Antisense strand to SEQ ID NO: 185494
ucaugucuacaaugacaua

SEQ ID NO: 185496 - RNA, 19 nt, Artificial Sequence
  Description of Artificial Sequence: Synthetic oligonucleotide
  Sense strand starting at position 3349 of SEQ ID NO: 2391
gcaucuaugucauuguaga

SEQ ID NO: 185497 - RNA, 19 nt, Artificial Sequence
  Description of Artificial Sequence: Synthetic oligonucleotide
  Antisense strand to SEQ ID NO: 185496
ucuacaaugacauagaugc

SEQ ID NO: 185498 - RNA, 19 nt, Artificial Sequence
  Description of Artificial Sequence: Synthetic oligonucleotide
  Sense strand starting at position 3347 of SEQ ID NO: 2391
aggcaucuaugucauugua

SEQ ID NO: 185499 - RNA, 19 nt, Artificial Sequence
  Description of Artificial Sequence: Synthetic oligonucleotide
  Antisense strand to SEQ ID NO: 185498
uacaaugacauagaugccu

SEQ ID NO: 185500 - RNA, 19 nt, Artificial Sequence
  Description of Artificial Sequence: Synthetic oligonucleotide
  Sense strand starting at position 3322 of SEQ ID NO: 2391
cuguuacuagaauguuuau

SEQ ID NO: 185501 - RNA, 19 nt, Artificial Sequence
  Description of Artificial Sequence: Synthetic oligonucleotide
  Antisense strand to SEQ ID NO: 185500
auaaacauucuaguaacag

SEQ ID NO: 185502 - RNA, 19 nt, Artificial Sequence
  Description of Artificial Sequence: Synthetic oligonucleotide
  Sense strand starting at position 3314 of SEQ ID NO: 2391
guucuauccuguuacuaga

SEQ ID NO: 185503 - RNA, 19 nt, Artificial Sequence
  Description of Artificial Sequence: Synthetic oligonucleotide
  Antisense strand to SEQ ID NO: 185502
ucuaguaacaggauagaac

SEQ ID NO: 185504 - RNA, 19 nt, Artificial Sequence
  Description of Artificial Sequence: Synthetic oligonucleotide
  Sense strand starting at position 3293 of SEQ ID NO: 2391
ggauauacgguuuaguuca

SEQ ID NO: 185505 - RNA, 19 nt, Artificial Sequence
  Description of Artificial Sequence: Synthetic oligonucleotide
  Antisense strand to SEQ ID NO: 185504
ugaacuaaaccguauaucc

SEQ ID NO: 185506 - RNA, 19 nt, Artificial Sequence
  Description of Artificial Sequence: Synthetic oligonucleotide
  Sense strand starting at position 3286 of SEQ ID NO: 2391
gugaauuggauauacgguu

SEQ ID NO: 185507 - RNA, 19 nt, Artificial Sequence
  Description of Artificial Sequence: Synthetic oligonucleotide
  Antisense strand to SEQ ID NO: 185506
aaccguauauccaauucac

SEQ ID NO: 185508 - RNA, 19 nt, Artificial Sequence
  Description of Artificial Sequence: Synthetic oligonucleotide
  Sense strand starting at position 3280 of SEQ ID NO: 2391
uggcaagugaauuggauau

SEQ ID NO: 185509 - RNA, 19 nt, Artificial Sequence
  Description of Artificial Sequence: Synthetic oligonucleotide
  Antisense strand to SEQ ID NO: 185508
auauccaauucacuugcca

SEQ ID NO: 185510 - RNA, 19 nt, Artificial Sequence
  Description of Artificial Sequence: Synthetic oligonucleotide
  Sense strand starting at position 3271 of SEQ ID NO: 2391
ucacuucuuuggcaaguga

SEQ ID NO: 185511 - RNA, 19 nt, Artificial Sequence
  Description of Artificial Sequence: Synthetic oligonucleotide
  Antisense strand to SEQ ID NO: 185510
ucacuugccaaagaaguga

SEQ ID NO: 185512 - RNA, 19 nt, Artificial Sequence
  Description of Artificial Sequence: Synthetic oligonucleotide
  Sense strand starting at position 3262 of SEQ ID NO: 2391
cgcagacuaucacuucuuu

SEQ ID NO: 185513 - RNA, 19 nt, Artificial Sequence
  Description of Artificial Sequence: Synthetic oligonucleotide
  Antisense strand to SEQ ID NO: 185512
aaagaagugauagucugcg

SEQ ID NO: 185514 - RNA, 19 nt, Artificial Sequence
  Description of Artificial Sequence: Synthetic oligonucleotide
  Sense strand starting at position 3213 of SEQ ID NO: 2391
uuaggaaacuuuggaauuc

SEQ ID NO: 185515 - RNA, 19 nt, Artificial Sequence
  Description of Artificial Sequence: Synthetic oligonucleotide
  Antisense strand to SEQ ID NO: 185514
gaauuccaaaguuuccuaa

SEQ ID NO: 185516 - RNA, 19 nt, Artificial Sequence
  Description of Artificial Sequence: Synthetic oligonucleotide
  Sense strand starting at position 2828 of SEQ ID NO: 2391
uaucauaggccaugugaca

SEQ ID NO: 185517 - RNA, 19 nt, Artificial Sequence
  Description of Artificial Sequence: Synthetic oligonucleotide
  Antisense strand to SEQ ID NO: 185516
ugucacauggccuaugaua

SEQ ID NO: 185518 - RNA, 19 nt, Artificial Sequence
  Description of Artificial Sequence: Synthetic oligonucleotide
  Sense strand starting at position 2826 of SEQ ID NO: 2391
guuaucauaggccauguga

SEQ ID NO: 185519 - RNA, 19 nt, Artificial Sequence
  Description of Artificial Sequence: Synthetic oligonucleotide
  Antisense strand to SEQ ID NO: 185518
ucacauggccuaugauaac

SEQ ID NO: 185520 - RNA, 19 nt, Artificial Sequence
  Description of Artificial Sequence: Synthetic oligonucleotide
  Sense strand starting at position 2550 of SEQ ID NO: 2391
cagggaugagcacgucuaa

SEQ ID NO: 185521 - RNA, 19 nt, Artificial Sequence
  Description of Artificial Sequence: Synthetic oligonucleotide
  Antisense strand to SEQ ID NO: 185520
uuagacgugcucaucccug

SEQ ID NO: 185522 - RNA, 19 nt, Artificial Sequence
  Description of Artificial Sequence: Synthetic oligonucleotide
  Sense strand starting at position 2347 of SEQ ID NO: 2391
uggccuauagcuuaaaucu

SEQ ID NO: 185523 - RNA, 19 nt, Artificial Sequence
  Description of Artificial Sequence: Synthetic oligonucleotide
  Antisense strand to SEQ ID NO: 185522
agauuuaagcuauaggcca

SEQ ID NO: 185524 - RNA, 19 nt, Artificial Sequence
  Description of Artificial Sequence: Synthetic oligonucleotide
  Sense strand starting at position 2011 of SEQ ID NO: 2391
cuggaaucauuaguuucua

SEQ ID NO: 185525 - RNA, 19 nt, Artificial Sequence
  Description of Artificial Sequence: Synthetic oligonucleotide
  Antisense strand to SEQ ID NO: 185524
uagaaacuaaugauuccag

SEQ ID NO: 185526 - RNA, 19 nt, Artificial Sequence
  Description of Artificial Sequence: Synthetic oligonucleotide
  Sense strand starting at position 2001 of SEQ ID NO: 2391
ucucuaugaucuggaauca

SEQ ID NO: 185527 - RNA, 19 nt, Artificial Sequence
  Description of Artificial Sequence: Synthetic oligonucleotide
  Antisense strand to SEQ ID NO: 185526
ugauuccagaucauagaga

SEQ ID NO: 185528 - RNA, 19 nt, Artificial Sequence
  Description of Artificial Sequence: Synthetic oligonucleotide
  Sense strand starting at position 781 of SEQ ID NO: 2391
gugggaauucuguaguguc

SEQ ID NO: 185529 - RNA, 19 nt, Artificial Sequence
  Description of Artificial Sequence: Synthetic oligonucleotide
  Antisense strand to SEQ ID NO: 185528
gacacuacagaauucccac

SEQ ID NO: 185530 - RNA, 19 nt, Artificial Sequence
  Description of Artificial Sequence: Synthetic oligonucleotide
  Sense strand starting at position 742 of SEQ ID NO: 2391
gguccaauaucucaccaga

SEQ ID NO: 185531 - RNA, 19 nt, Artificial Sequence
  Description of Artificial Sequence: Synthetic oligonucleotide
  Antisense strand to SEQ ID NO: 185530
ucuggugagauauuggacc

SEQ ID NO: 185532 - RNA, 19 nt, Artificial Sequence
  Description of Artificial Sequence: Synthetic oligonucleotide
  Sense strand starting at position 730 of SEQ ID NO: 2391
acaguuauggaagguccaa

SEQ ID NO: 185533 - RNA, 19 nt, Artificial Sequence
  Description of Artificial Sequence: Synthetic oligonucleotide
  Antisense strand to SEQ ID NO: 185532
uuggaccuuccauaacugu

SEQ ID NO: 185534 - RNA, 19 nt, Artificial Sequence
  Description of Artificial Sequence: Synthetic oligonucleotide
  Sense strand starting at position 695 of SEQ ID NO: 2391
cugggcaauuucuaaugaa

SEQ ID NO: 185535 - RNA, 19 nt, Artificial Sequence
  Description of Artificial Sequence: Synthetic oligonucleotide
  Antisense strand to SEQ ID NO: 185534
uucauuagaaauugcccag

SEQ ID NO: 185536 - RNA, 19 nt, Artificial Sequence
  Description of Artificial Sequence: Synthetic oligonucleotide
  Sense strand starting at position 660 of SEQ ID NO: 2391
uccauuuacuguugcuuau

SEQ ID NO: 185537 - RNA, 19 nt, Artificial Sequence
  Description of Artificial Sequence: Synthetic oligonucleotide
  Antisense strand to SEQ ID NO: 185536
auaagcaacaguaaaugga

SEQ ID NO: 185538 - RNA, 19 nt, Artificial Sequence
  Description of Artificial Sequence: Synthetic oligonucleotide
  Sense strand starting at position 645 of SEQ ID NO: 2391
guaagaagaucuuagucca

SEQ ID NO: 185539 - RNA, 19 nt, Artificial Sequence
  Description of Artificial Sequence: Synthetic oligonucleotide
  Antisense strand to SEQ ID NO: 185538
uggacuaagaucuucuuac

SEQ ID NO: 185540 - RNA, 19 nt, Artificial Sequence
  Description of Artificial Sequence: Synthetic oligonucleotide
  Sense strand starting at position 634 of SEQ ID NO: 2391
cugacaacuuaguaagaag

SEQ ID NO: 185541 - RNA, 19 nt, Artificial Sequence
  Description of Artificial Sequence: Synthetic oligonucleotide
  Antisense strand to SEQ ID NO: 185540
cuucuuacuaaguugucag

SEQ ID NO: 185542 - RNA, 19 nt, Artificial Sequence
  Description of Artificial Sequence: Synthetic oligonucleotide
  Sense strand starting at position 481 of SEQ ID NO: 2391
guuccuaaaucagaugcaa

SEQ ID NO: 185543 - RNA, 19 nt, Artificial Sequence
  Description of Artificial Sequence: Synthetic oligonucleotide
  Antisense strand to SEQ ID NO: 185542
uugcaucugauuuaggaac

SEQ ID NO: 185544 - RNA, 19 nt, Artificial Sequence
  Description of Artificial Sequence: Synthetic oligonucleotide
  Sense strand starting at position 414 of SEQ ID NO: 2391
gacauauaugauugaugua

SEQ ID NO: 185545 - RNA, 19 nt, Artificial Sequence
  Description of Artificial Sequence: Synthetic oligonucleotide
  Antisense strand to SEQ ID NO: 185544
uacaucaaucauauauguc

SEQ ID NO: 185546 - RNA, 19 nt, Artificial Sequence
  Description of Artificial Sequence: Synthetic oligonucleotide
  Sense strand starting at position 413 of SEQ ID NO: 2391
agacauauaugauugaugu

SEQ ID NO: 185547 - RNA, 19 nt, Artificial Sequence
  Description of Artificial Sequence: Synthetic oligonucleotide
  Antisense strand to SEQ ID NO: 185546
acaucaaucauauaugucu

SEQ ID NO: 185548 - RNA, 19 nt, Artificial Sequence
  Description of Artificial Sequence: Synthetic oligonucleotide
  Sense strand starting at position 269 of SEQ ID NO: 2391
uugacugcuggguaaauau

SEQ ID NO: 185549 - RNA, 19 nt, Artificial Sequence
  Description of Artificial Sequence: Synthetic oligonucleotide
  Antisense strand to SEQ ID NO: 185548
auauuuacccagcagucaa

SEQ ID NO: 185550 - RNA, 19 nt, Artificial Sequence
  Description of Artificial Sequence: Synthetic oligonucleotide
  Sense strand starting at position 268 of SEQ ID NO: 2391
cuugacugcuggguaaaua

SEQ ID NO: 185551 - RNA, 19 nt, Artificial Sequence
  Description of Artificial Sequence: Synthetic oligonucleotide
  Antisense strand to SEQ ID NO: 185550
uauuuacccagcagucaag

SEQ ID NO: 185552 - RNA, 19 nt, Artificial Sequence
  Description of Artificial Sequence: Synthetic oligonucleotide
  Sense strand starting at position 267 of SEQ ID NO: 2391
ccuugacugcuggguaaau

SEQ ID NO: 185553 - RNA, 19 nt, Artificial Sequence
  Description of Artificial Sequence: Synthetic oligonucleotide
  Antisense strand to SEQ ID NO: 185552
auuuacccagcagucaagg

SEQ ID NO: 185554 - RNA, 19 nt, Artificial Sequence
  Description of Artificial Sequence: Synthetic oligonucleotide
  Sense strand starting at position 246 of SEQ ID NO: 2391
uaaugucuuuguuuagguu

SEQ ID NO: 185555 - RNA, 19 nt, Artificial Sequence
  Description of Artificial Sequence: Synthetic oligonucleotide
  Antisense strand to SEQ ID NO: 185554
aaccuaaacaaagacauua

SEQ ID NO: 185556 - RNA, 19 nt, Artificial Sequence
  Description of Artificial Sequence: Synthetic oligonucleotide
  Sense strand starting at position 130 of SEQ ID NO: 2391
ucaggaguuuaauacuaac

SEQ ID NO: 185557 - RNA, 19 nt, Artificial Sequence
  Description of Artificial Sequence: Synthetic oligonucleotide
  Antisense strand to SEQ ID NO: 185556
guuaguauuaaacuccuga

SEQ ID NO: 185558 - RNA, 19 nt, Artificial Sequence
  Description of Artificial Sequence: Synthetic oligonucleotide
  Sense strand starting at position 127 of SEQ ID NO: 2391
agcucaggaguuuaauacu

SEQ ID NO: 185559 - RNA, 19 nt, Artificial Sequence
  Description of Artificial Sequence: Synthetic oligonucleotide
  Antisense strand to SEQ ID NO: 185558
aguauuaaacuccugagcu

SEQ ID NO: 185560 - RNA, 19 nt, Artificial Sequence
  Description of Artificial Sequence: Synthetic oligonucleotide
  Sense strand starting at position 3817 of SEQ ID NO: 2392
ugggaagcuuguuagaaau

SEQ ID NO: 185561 - RNA, 19 nt, Artificial Sequence
  Description of Artificial Sequence: Synthetic oligonucleotide
  Antisense strand to SEQ ID NO: 185560
auuucuaacaagcuuccca

SEQ ID NO: 185562 - RNA, 19 nt, Artificial Sequence
  Description of Artificial Sequence: Synthetic oligonucleotide
  Sense strand starting at position 3816 of SEQ ID NO: 2392
cugggaagcuuguuagaaa

SEQ ID NO: 185563 - RNA, 19 nt, Artificial Sequence
  Description of Artificial Sequence: Synthetic oligonucleotide
  Antisense strand to SEQ ID NO: 185562
uuucuaacaagcuucccag

SEQ ID NO: 185564 - RNA, 19 nt, Artificial Sequence
  Description of Artificial Sequence: Synthetic oligonucleotide
  Sense strand starting at position 3699 of SEQ ID NO: 2392
ggcugagguuugggaguaa

SEQ ID NO: 185565 - RNA, 19 nt, Artificial Sequence
  Description of Artificial Sequence: Synthetic oligonucleotide
  Antisense strand to SEQ ID NO: 185564
uuacucccaaaccucagcc

SEQ ID NO: 185566 - RNA, 19 nt, Artificial Sequence
  Description of Artificial Sequence: Synthetic oligonucleotide
  Sense strand starting at position 3659 of SEQ ID NO: 2392
ggaucaaccucucagaauc

SEQ ID NO: 185567 - RNA, 19 nt, Artificial Sequence
  Description of Artificial Sequence: Synthetic oligonucleotide
  Antisense strand to SEQ ID NO: 185566
gauucugagagguugaucc

SEQ ID NO: 185568 - RNA, 19 nt, Artificial Sequence
  Description of Artificial Sequence: Synthetic oligonucleotide
  Sense strand starting at position 3648 of SEQ ID NO: 2392
ccuguauggugggaucaac

SEQ ID NO: 185569 - RNA, 19 nt, Artificial Sequence
  Description of Artificial Sequence: Synthetic oligonucleotide
  Antisense strand to SEQ ID NO: 185568
guugaucccaccauacagg

SEQ ID NO: 185570 - RNA, 19 nt, Artificial Sequence
  Description of Artificial Sequence: Synthetic oligonucleotide
  Sense strand starting at position 3647 of SEQ ID NO: 2392
uccuguauggugggaucaa

SEQ ID NO: 185571 - RNA, 19 nt, Artificial Sequence
  Description of Artificial Sequence: Synthetic oligonucleotide
  Antisense strand to SEQ ID NO: 185570
uugaucccaccauacagga

SEQ ID NO: 185572 - RNA, 19 nt, Artificial Sequence
  Description of Artificial Sequence: Synthetic oligonucleotide
  Sense strand starting at position 3619 of SEQ ID NO: 2392
cugacucacuccugagcaa

SEQ ID NO: 185573 - RNA, 19 nt, Artificial Sequence
  Description of Artificial Sequence: Synthetic oligonucleotide
  Antisense strand to SEQ ID NO: 185572
uugcucaggagugagucag

SEQ ID NO: 185574 - RNA, 19 nt, Artificial Sequence
  Description of Artificial Sequence: Synthetic oligonucleotide
  Sense strand starting at position 3582 of SEQ ID NO: 2392
cccucaugaugcuaagcua

SEQ ID NO: 185575 - RNA, 19 nt, Artificial Sequence
  Description of Artificial Sequence: Synthetic oligonucleotide
  Antisense strand to SEQ ID NO: 185574
uagcuuagcaucaugaggg

SEQ ID NO: 185576 - RNA, 19 nt, Artificial Sequence
  Description of Artificial Sequence: Synthetic oligonucleotide
  Sense strand starting at position 3546 of SEQ ID NO: 2392
agguuacaaucauguauuu

SEQ ID NO: 185577 - RNA, 19 nt, Artificial Sequence
  Description of Artificial Sequence: Synthetic oligonucleotide
  Antisense strand to SEQ ID NO: 185576
aaauacaugauuguaaccu

SEQ ID NO: 185578 - RNA, 19 nt, Artificial Sequence
  Description of Artificial Sequence: Synthetic oligonucleotide
  Sense strand starting at position 3434 of SEQ ID NO: 2392
augaguguguaugaaugaa

SEQ ID NO: 185579 - RNA, 19 nt, Artificial Sequence
  Description of Artificial Sequence: Synthetic oligonucleotide
  Antisense strand to SEQ ID NO: 185578
uucauucauacacacucau

SEQ ID NO: 185580 - RNA, 19 nt, Artificial Sequence
  Description of Artificial Sequence: Synthetic oligonucleotide
  Sense strand starting at position 3430 of SEQ ID NO: 2392
cucaaugaguguguaugaa

SEQ ID NO: 185581 - RNA, 19 nt, Artificial Sequence
  Description of Artificial Sequence: Synthetic oligonucleotide
  Antisense strand to SEQ ID NO: 185580
uucauacacacucauugag

SEQ ID NO: 185582 - RNA, 19 nt, Artificial Sequence
  Description of Artificial Sequence: Synthetic oligonucleotide
  Sense strand starting at position 3429 of SEQ ID NO: 2392
acucaaugaguguguauga

SEQ ID NO: 185583 - RNA, 19 nt, Artificial Sequence
  Description of Artificial Sequence: Synthetic oligonucleotide
  Antisense strand to SEQ ID NO: 185582
ucauacacacucauugagu

SEQ ID NO: 185584 - RNA, 19 nt, Artificial Sequence
  Description of Artificial Sequence: Synthetic oligonucleotide
  Sense strand starting at position 3427 of SEQ ID NO: 2392
agacucaaugaguguguau

SEQ ID NO: 185585 - RNA, 19 nt, Artificial Sequence
  Description of Artificial Sequence: Synthetic oligonucleotide
  Antisense strand to SEQ ID NO: 185584
auacacacucauugagucu

SEQ ID NO: 185586 - RNA, 19 nt, Artificial Sequence
  Description of Artificial Sequence: Synthetic oligonucleotide
  Sense strand starting at position 3404 of SEQ ID NO: 2392
cuagacauugccuagcaca

SEQ ID NO: 185587 - RNA, 19 nt, Artificial Sequence
  Description of Artificial Sequence: Synthetic oligonucleotide
  Antisense strand to SEQ ID NO: 185586
ugugcuaggcaaugucuag

SEQ ID NO: 185588 - RNA, 19 nt, Artificial Sequence
  Description of Artificial Sequence: Synthetic oligonucleotide
  Sense strand starting at position 3313 of SEQ ID NO: 2392
gagauuaucuuguuuguuu

SEQ ID NO: 185589 - RNA, 19 nt, Artificial Sequence
  Description of Artificial Sequence: Synthetic oligonucleotide
  Antisense strand to SEQ ID NO: 185588
aaacaaacaagauaaucuc

SEQ ID NO: 185590 - RNA, 19 nt, Artificial Sequence
  Description of Artificial Sequence: Synthetic oligonucleotide
  Sense strand starting at position 3309 of SEQ ID NO: 2392
cccugagauuaucuuguuu

SEQ ID NO: 185591 - RNA, 19 nt, Artificial Sequence
  Description of Artificial Sequence: Synthetic oligonucleotide
  Antisense strand to SEQ ID NO: 185590
aaacaagauaaucucaggg

SEQ ID NO: 185592 - RNA, 19 nt, Artificial Sequence
  Description of Artificial Sequence: Synthetic oligonucleotide
  Sense strand starting at position 3270 of SEQ ID NO: 2392
ccauuacccuguuguauuu

SEQ ID NO: 185593 - RNA, 19 nt, Artificial Sequence
  Description of Artificial Sequence: Synthetic oligonucleotide
  Antisense strand to SEQ ID NO: 185592
aaauacaacaggguaaugg

SEQ ID NO: 185594 - RNA, 19 nt, Artificial Sequence
  Description of Artificial Sequence: Synthetic oligonucleotide
  Sense strand starting at position 2935 of SEQ ID NO: 2392
aggacuugugccuaucuac

SEQ ID NO: 185595 - RNA, 19 nt, Artificial Sequence
  Description of Artificial Sequence: Synthetic oligonucleotide
  Antisense strand to SEQ ID NO: 185594
guagauaggcacaaguccu

SEQ ID NO: 185596 - RNA, 19 nt, Artificial Sequence
  Description of Artificial Sequence: Synthetic oligonucleotide
  Sense strand starting at position 2934 of SEQ ID NO: 2392
gaggacuugugccuaucua

SEQ ID NO: 185597 - RNA, 19 nt, Artificial Sequence
  Description of Artificial Sequence: Synthetic oligonucleotide
  Antisense strand to SEQ ID NO: 185596
uagauaggcacaaguccuc

SEQ ID NO: 185598 - RNA, 19 nt, Artificial Sequence
  Description of Artificial Sequence: Synthetic oligonucleotide
  Sense strand starting at position 2885 of SEQ ID NO: 2392
uggauauucguauagcuga

SEQ ID NO: 185599 - RNA, 19 nt, Artificial Sequence
  Description of Artificial Sequence: Synthetic oligonucleotide
  Antisense strand to SEQ ID NO: 185598
ucagcuauacgaauaucca

SEQ ID NO: 185600 - RNA, 19 nt, Artificial Sequence
  Description of Artificial Sequence: Synthetic oligonucleotide
  Sense strand starting at position 2880 of SEQ ID NO: 2392
agcucuggauauucguaua

SEQ ID NO: 185601 - RNA, 19 nt, Artificial Sequence
  Description of Artificial Sequence: Synthetic oligonucleotide
  Antisense strand to SEQ ID NO: 185600
uauacgaauauccagagcu

SEQ ID NO: 185602 - RNA, 19 nt, Artificial Sequence
  Description of Artificial Sequence: Synthetic oligonucleotide
  Sense strand starting at position 2873 of SEQ ID NO: 2392
acagaauagcucuggauau

SEQ ID NO: 185603 - RNA, 19 nt, Artificial Sequence
  Description of Artificial Sequence: Synthetic oligonucleotide
  Antisense strand to SEQ ID NO: 185602
auauccagagcuauucugu

SEQ ID NO: 185604 - RNA, 19 nt, Artificial Sequence
  Description of Artificial Sequence: Synthetic oligonucleotide
  Sense strand starting at position 2828 of SEQ ID NO: 2392
ccagaauuccagugcucaa

SEQ ID NO: 185605 - RNA, 19 nt, Artificial Sequence
  Description of Artificial Sequence: Synthetic oligonucleotide
  Antisense strand to SEQ ID NO: 185604
uugagcacuggaauucugg

SEQ ID NO: 185606 - RNA, 19 nt, Artificial Sequence
  Description of Artificial Sequence: Synthetic oligonucleotide
  Sense strand starting at position 2816 of SEQ ID NO: 2392
aguacaaacuagccagaau

SEQ ID NO: 185607 - RNA, 19 nt, Artificial Sequence
  Description of Artificial Sequence: Synthetic oligonucleotide
  Antisense strand to SEQ ID NO: 185606
auucuggcuaguuuguacu

SEQ ID NO: 185608 - RNA, 19 nt, Artificial Sequence
  Description of Artificial Sequence: Synthetic oligonucleotide
  Sense strand starting at position 2805 of SEQ ID NO: 2392
cugcgcaucucaguacaaa

SEQ ID NO: 185609 - RNA, 19 nt, Artificial Sequence
  Description of Artificial Sequence: Synthetic oligonucleotide
  Antisense strand to SEQ ID NO: 185608
uuuguacugagaugcgcag

SEQ ID NO: 185610 - RNA, 19 nt, Artificial Sequence
  Description of Artificial Sequence: Synthetic oligonucleotide
  Sense strand starting at position 1465 of SEQ ID NO: 2392
ccacucuucggcguaaugu

SEQ ID NO: 185611 - RNA, 19 nt, Artificial Sequence
  Description of Artificial Sequence: Synthetic oligonucleotide
  Antisense strand to SEQ ID NO: 185610
acauuacgccgaagagugg

SEQ ID NO: 185612 - RNA, 19 nt, Artificial Sequence
  Description of Artificial Sequence: Synthetic oligonucleotide
  Sense strand starting at position 1389 of SEQ ID NO: 2392
gaugucuccacgcgagagu

SEQ ID NO: 185613 - RNA, 19 nt, Artificial Sequence
  Description of Artificial Sequence: Synthetic oligonucleotide
  Antisense strand to SEQ ID NO: 185612
acucucgcguggagacauc

SEQ ID NO: 185614 - RNA, 19 nt, Artificial Sequence
  Description of Artificial Sequence: Synthetic oligonucleotide
  Sense strand starting at position 1385 of SEQ ID NO: 2392
gccugaugucuccacgcga

SEQ ID NO: 185615 - RNA, 19 nt, Artificial Sequence
  Description of Artificial Sequence: Synthetic oligonucleotide
  Antisense strand to SEQ ID NO: 185614
ucgcguggagacaucaggc

SEQ ID NO: 185616 - RNA, 19 nt, Artificial Sequence
  Description of Artificial Sequence: Synthetic oligonucleotide
  Sense strand starting at position 790 of SEQ ID NO: 2392
gucccaaaguguuuacacu

SEQ ID NO: 185617 - RNA, 19 nt, Artificial Sequence
  Description of Artificial Sequence: Synthetic oligonucleotide
  Antisense strand to SEQ ID NO: 185616
aguguaaacacuuugggac

SEQ ID NO: 185618 - RNA, 19 nt, Artificial Sequence
  Description of Artificial Sequence: Synthetic oligonucleotide
  Sense strand starting at position 710 of SEQ ID NO: 2392
gcaucuagaccgugcuuga

SEQ ID NO: 185619 - RNA, 19 nt, Artificial Sequence
  Description of Artificial Sequence: Synthetic oligonucleotide
  Antisense strand to SEQ ID NO: 185618
ucaagcacggucuagaugc

SEQ ID NO: 185620 - RNA, 19 nt, Artificial Sequence
  Description of Artificial Sequence: Synthetic oligonucleotide
  Sense strand starting at position 650 of SEQ ID NO: 2392
gcaaccuggucaguaacau

SEQ ID NO: 185621 - RNA, 19 nt, Artificial Sequence
  Description of Artificial Sequence: Synthetic oligonucleotide
  Antisense strand to SEQ ID NO: 185620
auguuacugaccagguugc

SEQ ID NO: 185622 - RNA, 19 nt, Artificial Sequence
  Description of Artificial Sequence: Synthetic oligonucleotide
  Sense strand starting at position 647 of SEQ ID NO: 2392
gaggcaaccuggucaguaa

SEQ ID NO: 185623 - RNA, 19 nt, Artificial Sequence
  Description of Artificial Sequence: Synthetic oligonucleotide
  Antisense strand to SEQ ID NO: 185622
uuacugaccagguugccuc

SEQ ID NO: 185624 - RNA, 19 nt, Artificial Sequence
  Description of Artificial Sequence: Synthetic oligonucleotide
  Sense strand starting at position 625 of SEQ ID NO: 2392
aagcaugagugauuagcau

SEQ ID NO: 185625 - RNA, 19 nt, Artificial Sequence
  Description of Artificial Sequence: Synthetic oligonucleotide
  Antisense strand to SEQ ID NO: 185624
augcuaaucacucaugcuu

SEQ ID NO: 185626 - RNA, 19 nt, Artificial Sequence
  Description of Artificial Sequence: Synthetic oligonucleotide
  Sense strand starting at position 549 of SEQ ID NO: 2392
acugucaguuuguaaacaa

SEQ ID NO: 185627 - RNA, 19 nt, Artificial Sequence
  Description of Artificial Sequence: Synthetic oligonucleotide
  Antisense strand to SEQ ID NO: 185626
uuguuuacaaacugacagu

SEQ ID NO: 185628 - RNA, 19 nt, Artificial Sequence
  Description of Artificial Sequence: Synthetic oligonucleotide
  Sense strand starting at position 501 of SEQ ID NO: 2392
gccaacucugagugccaau

SEQ ID NO: 185629 - RNA, 19 nt, Artificial Sequence
  Description of Artificial Sequence: Synthetic oligonucleotide
  Antisense strand to SEQ ID NO: 185628
auuggcacucagaguuggc

SEQ ID NO: 185630 - RNA, 19 nt, Artificial Sequence
  Description of Artificial Sequence: Synthetic oligonucleotide
  Sense strand starting at position 447 of SEQ ID NO: 2392
aggucagaguacucuuuau

SEQ ID NO: 185631 - RNA, 19 nt, Artificial Sequence
  Description of Artificial Sequence: Synthetic oligonucleotide
  Antisense strand to SEQ ID NO: 185630
auaaagaguacucugaccu

SEQ ID NO: 185632 - RNA, 19 nt, Artificial Sequence
  Description of Artificial Sequence: Synthetic oligonucleotide
  Sense strand starting at position 390 of SEQ ID NO: 2392
augugaaacugacuaaucu

SEQ ID NO: 185633 - RNA, 19 nt, Artificial Sequence
  Description of Artificial Sequence: Synthetic oligonucleotide
  Antisense strand to SEQ ID NO: 185632
agauuagucaguuucacau

SEQ ID NO: 185634 - RNA, 19 nt, Artificial Sequence
  Description of Artificial Sequence: Synthetic oligonucleotide
  Sense strand starting at position 267 of SEQ ID NO: 2392
gucugaaauccugaccuua

SEQ ID NO: 185635 - RNA, 19 nt, Artificial Sequence
  Description of Artificial Sequence: Synthetic oligonucleotide
  Antisense strand to SEQ ID NO: 185634
uaaggucaggauuucagac

SEQ ID NO: 185636 - RNA, 19 nt, Artificial Sequence
  Description of Artificial Sequence: Synthetic oligonucleotide
  Sense strand starting at position 11 of SEQ ID NO: 2392
gcucaacagucugaauaaa

SEQ ID NO: 185637 - RNA, 19 nt, Artificial Sequence
  Description of Artificial Sequence: Synthetic oligonucleotide
  Antisense strand to SEQ ID NO: 185636
uuuauucagacuguugagc

SEQ ID NO: 185638 - RNA, 19 nt, Artificial Sequence
  Description of Artificial Sequence: Synthetic oligonucleotide
  Sense strand starting at position 10 of SEQ ID NO: 2392
ugcucaacagucugaauaa

SEQ ID NO: 185639 - RNA, 19 nt, Artificial Sequence
  Description of Artificial Sequence: Synthetic oligonucleotide
  Antisense strand to SEQ ID NO: 185638
uuauucagacuguugagca

SEQ ID NO: 185640 - RNA, 19 nt, Artificial Sequence
  Description of Artificial Sequence: Synthetic oligonucleotide
  Sense strand starting at position 3872 of SEQ ID NO: 2394
aaaucagugcuuuaaggau

SEQ ID NO: 185641 - RNA, 19 nt, Artificial Sequence
  Description of Artificial Sequence: Synthetic oligonucleotide
  Antisense strand to SEQ ID NO: 185640
auccuuaaagcacugauuu

SEQ ID NO: 185642 - RNA, 19 nt, Artificial Sequence
  Description of Artificial Sequence: Synthetic oligonucleotide
  Sense strand starting at position 3867 of SEQ ID NO: 2394
ccaagaaaucagugcuuua

SEQ ID NO: 185643 - RNA, 19 nt, Artificial Sequence
  Description of Artificial Sequence: Synthetic oligonucleotide
  Antisense strand to SEQ ID NO: 185642
uaaagcacugauuucuugg

SEQ ID NO: 185644 - RNA, 19 nt, Artificial Sequence
  Description of Artificial Sequence: Synthetic oligonucleotide
  Sense strand starting at position 3697 of SEQ ID NO: 2394
auaugaagugccuacuuau

SEQ ID NO: 185645 - RNA, 19 nt, Artificial Sequence
  Description of Artificial Sequence: Synthetic oligonucleotide
  Antisense strand to SEQ ID NO: 185644
auaaguaggcacuucauau

SEQ ID NO: 185646 - RNA, 19 nt, Artificial Sequence
  Description of Artificial Sequence: Synthetic oligonucleotide
  Sense strand starting at position 3634 of SEQ ID NO: 2394
gugacucauccaggauaaa

SEQ ID NO: 185647 - RNA, 19 nt, Artificial Sequence
  Description of Artificial Sequence: Synthetic oligonucleotide
  Antisense strand to SEQ ID NO: 185646
uuuauccuggaugagucac

SEQ ID NO: 185648 - RNA, 19 nt, Artificial Sequence
  Description of Artificial Sequence: Synthetic oligonucleotide
  Sense strand starting at position 3630 of SEQ ID NO: 2394
cuuugugacucauccagga

SEQ ID NO: 185649 - RNA, 19 nt, Artificial Sequence
  Description of Artificial Sequence: Synthetic oligonucleotide
  Antisense strand to SEQ ID NO: 185648
uccuggaugagucacaaag

SEQ ID NO: 185650 - RNA, 19 nt, Artificial Sequence
  Description of Artificial Sequence: Synthetic oligonucleotide
  Sense strand starting at position 3484 of SEQ ID NO: 2394
ugugaugguccugaaguua

SEQ ID NO: 185651 - RNA, 19 nt, Artificial Sequence
  Description of Artificial Sequence: Synthetic oligonucleotide
  Antisense strand to SEQ ID NO: 185650
uaacuucaggaccaucaca

SEQ ID NO: 185652 - RNA, 19 nt, Artificial Sequence
  Description of Artificial Sequence: Synthetic oligonucleotide
  Sense strand starting at position 3422 of SEQ ID NO: 2394
agcgauaagauauggaaca

SEQ ID NO: 185653 - RNA, 19 nt, Artificial Sequence
  Description of Artificial Sequence: Synthetic oligonucleotide
  Antisense strand to SEQ ID NO: 185652
uguuccauaucuuaucgcu

SEQ ID NO: 185654 - RNA, 19 nt, Artificial Sequence
  Description of Artificial Sequence: Synthetic oligonucleotide
  Sense strand starting at position 3412 of SEQ ID NO: 2394
uuauacauugagcgauaag

SEQ ID NO: 185655 - RNA, 19 nt, Artificial Sequence
  Description of Artificial Sequence: Synthetic oligonucleotide
  Antisense strand to SEQ ID NO: 185654
cuuaucgcucaauguauaa

SEQ ID NO: 185656 - RNA, 19 nt, Artificial Sequence
  Description of Artificial Sequence: Synthetic oligonucleotide
  Sense strand starting at position 3411 of SEQ ID NO: 2394
uuuauacauugagcgauaa

SEQ ID NO: 185657 - RNA, 19 nt, Artificial Sequence
  Description of Artificial Sequence: Synthetic oligonucleotide
  Antisense strand to SEQ ID NO: 185656
uuaucgcucaauguauaaa

SEQ ID NO: 185658 - RNA, 19 nt, Artificial Sequence
  Description of Artificial Sequence: Synthetic oligonucleotide
  Sense strand starting at position 3302 of SEQ ID NO: 2394
uuuauacuugggcacauaa

SEQ ID NO: 185659 - RNA, 19 nt, Artificial Sequence
  Description of Artificial Sequence: Synthetic oligonucleotide
  Antisense strand to SEQ ID NO: 185658
uuaugugcccaaguauaaa

SEQ ID NO: 185660 - RNA, 19 nt, Artificial Sequence
  Description of Artificial Sequence: Synthetic oligonucleotide
  Sense strand starting at position 3213 of SEQ ID NO: 2394
gauaaagacuugucuauga

SEQ ID NO: 185661 - RNA, 19 nt, Artificial Sequence
  Description of Artificial Sequence: Synthetic oligonucleotide
  Antisense strand to SEQ ID NO: 185660
ucauagacaagucuuuauc

SEQ ID NO: 185662 - RNA, 19 nt, Artificial Sequence
  Description of Artificial Sequence: Synthetic oligonucleotide
  Sense strand starting at position 3154 of SEQ ID NO: 2394
uuuagauugcaguauagaa

SEQ ID NO: 185663 - RNA, 19 nt, Artificial Sequence
  Description of Artificial Sequence: Synthetic oligonucleotide
  Antisense strand to SEQ ID NO: 185662
uucuauacugcaaucuaaa

SEQ ID NO: 185664 - RNA, 19 nt, Artificial Sequence
  Description of Artificial Sequence: Synthetic oligonucleotide
  Sense strand starting at position 3071 of SEQ ID NO: 2394
cuguaaauccuguaaauua

SEQ ID NO: 185665 - RNA, 19 nt, Artificial Sequence
  Description of Artificial Sequence: Synthetic oligonucleotide
  Antisense strand to SEQ ID NO: 185664
uaauuuacaggauuuacag

SEQ ID NO: 185666 - RNA, 19 nt, Artificial Sequence
  Description of Artificial Sequence: Synthetic oligonucleotide
  Sense strand starting at position 2743 of SEQ ID NO: 2394
ucagcuuaagauuaugcaa

SEQ ID NO: 185667 - RNA, 19 nt, Artificial Sequence
  Description of Artificial Sequence: Synthetic oligonucleotide
  Antisense strand to SEQ ID NO: 185666
uugcauaaucuuaagcuga

SEQ ID NO: 185668 - RNA, 19 nt, Artificial Sequence
  Description of Artificial Sequence: Synthetic oligonucleotide
  Sense strand starting at position 2647 of SEQ ID NO: 2394
uugugaggucaauagauuc

SEQ ID NO: 185669 - RNA, 19 nt, Artificial Sequence
  Description of Artificial Sequence: Synthetic oligonucleotide
  Antisense strand to SEQ ID NO: 185668
gaaucuauugaccucacaa

SEQ ID NO: 185670 - RNA, 19 nt, Artificial Sequence
  Description of Artificial Sequence: Synthetic oligonucleotide
  Sense strand starting at position 2567 of SEQ ID NO: 2394
ggaagauaauaagaaacaa

SEQ ID NO: 185671 - RNA, 19 nt, Artificial Sequence
  Description of Artificial Sequence: Synthetic oligonucleotide
  Antisense strand to SEQ ID NO: 185670
uuguuucuuauuaucuucc

SEQ ID NO: 185672 - RNA, 19 nt, Artificial Sequence
  Description of Artificial Sequence: Synthetic oligonucleotide
  Sense strand starting at position 2564 of SEQ ID NO: 2394
ucaggaagauaauaagaaa

SEQ ID NO: 185673 - RNA, 19 nt, Artificial Sequence
  Description of Artificial Sequence: Synthetic oligonucleotide
  Antisense strand to SEQ ID NO: 185672
uuucuuauuaucuuccuga

SEQ ID NO: 185674 - RNA, 19 nt, Artificial Sequence
  Description of Artificial Sequence: Synthetic oligonucleotide
  Sense strand starting at position 2457 of SEQ ID NO: 2394
gucugcauuugucuuuaca

SEQ ID NO: 185675 - RNA, 19 nt, Artificial Sequence
  Description of Artificial Sequence: Synthetic oligonucleotide
  Antisense strand to SEQ ID NO: 185674
uguaaagacaaaugcagac

SEQ ID NO: 185676 - RNA, 19 nt, Artificial Sequence
  Description of Artificial Sequence: Synthetic oligonucleotide
  Sense strand starting at position 2368 of SEQ ID NO: 2394
acguauccgguagaacuaa

SEQ ID NO: 185677 - RNA, 19 nt, Artificial Sequence
  Description of Artificial Sequence: Synthetic oligonucleotide
  Antisense strand to SEQ ID NO: 185676
uuaguucuaccggauacgu

SEQ ID NO: 185678 - RNA, 19 nt, Artificial Sequence
  Description of Artificial Sequence: Synthetic oligonucleotide
  Sense strand starting at position 2337 of SEQ ID NO: 2394
gugacuggguccuuugaaa

SEQ ID NO: 185679 - RNA, 19 nt, Artificial Sequence
  Description of Artificial Sequence: Synthetic oligonucleotide
  Antisense strand to SEQ ID NO: 185678
uuucaaaggacccagucac

SEQ ID NO: 185680 - RNA, 19 nt, Artificial Sequence
  Description of Artificial Sequence: Synthetic oligonucleotide
  Sense strand starting at position 2014 of SEQ ID NO: 2394
ucauuaauaggcgggaaca

SEQ ID NO: 185681 - RNA, 19 nt, Artificial Sequence
  Description of Artificial Sequence: Synthetic oligonucleotide
  Antisense strand to SEQ ID NO: 185680
uguucccgccuauuaauga

SEQ ID NO: 185682 - RNA, 19 nt, Artificial Sequence
  Description of Artificial Sequence: Synthetic oligonucleotide
  Sense strand starting at position 1992 of SEQ ID NO: 2394
ucgucuucccggguucauu

SEQ ID NO: 185683 - RNA, 19 nt, Artificial Sequence
  Description of Artificial Sequence: Synthetic oligonucleotide
  Antisense strand to SEQ ID NO: 185682
aaugaacccgggaagacga

SEQ ID NO: 185684 - RNA, 19 nt, Artificial Sequence
  Description of Artificial Sequence: Synthetic oligonucleotide
  Sense strand starting at position 1275 of SEQ ID NO: 2394
guggaaugggacgagcaau

SEQ ID NO: 185685 - RNA, 19 nt, Artificial Sequence
  Description of Artificial Sequence: Synthetic oligonucleotide
  Antisense strand to SEQ ID NO: 185684
auugcucgucccauuccac

SEQ ID NO: 185686 - RNA, 19 nt, Artificial Sequence
  Description of Artificial Sequence: Synthetic oligonucleotide
  Sense strand starting at position 1128 of SEQ ID NO: 2394
aauuguuccggguagaagu

SEQ ID NO: 185687 - RNA, 19 nt, Artificial Sequence
  Description of Artificial Sequence: Synthetic oligonucleotide
  Antisense strand to SEQ ID NO: 185686
acuucuacccggaacaauu

SEQ ID NO: 185688 - RNA, 19 nt, Artificial Sequence
  Description of Artificial Sequence: Synthetic oligonucleotide
  Sense strand starting at position 1019 of SEQ ID NO: 2394
acacaauguugaguggaaa

SEQ ID NO: 185689 - RNA, 19 nt, Artificial Sequence
  Description of Artificial Sequence: Synthetic oligonucleotide
  Antisense strand to SEQ ID NO: 185688
uuuccacucaacauugugu

SEQ ID NO: 185690 - RNA, 19 nt, Artificial Sequence
  Description of Artificial Sequence: Synthetic oligonucleotide
  Sense strand starting at position 959 of SEQ ID NO: 2394
gucuguggccaacaaauaa

SEQ ID NO: 185691 - RNA, 19 nt, Artificial Sequence
  Description of Artificial Sequence: Synthetic oligonucleotide
  Antisense strand to SEQ ID NO: 185690
uuauuuguuggccacagac

SEQ ID NO: 185692 - RNA, 19 nt, Artificial Sequence
  Description of Artificial Sequence: Synthetic oligonucleotide
  Sense strand starting at position 956 of SEQ ID NO: 2394
cuggucuguggccaacaaa

SEQ ID NO: 185693 - RNA, 19 nt, Artificial Sequence
  Description of Artificial Sequence: Synthetic oligonucleotide
  Antisense strand to SEQ ID NO: 185692
uuuguuggccacagaccag

SEQ ID NO: 185694 - RNA, 19 nt, Artificial Sequence
  Description of Artificial Sequence: Synthetic oligonucleotide
  Sense strand starting at position 809 of SEQ ID NO: 2394
guagguaacauacgagaau

SEQ ID NO: 185695 - RNA, 19 nt, Artificial Sequence
  Description of Artificial Sequence: Synthetic oligonucleotide
  Antisense strand to SEQ ID NO: 185694
auucucguauguuaccuac

SEQ ID NO: 185696 - RNA, 19 nt, Artificial Sequence
  Description of Artificial Sequence: Synthetic oligonucleotide
  Sense strand starting at position 752 of SEQ ID NO: 2394
uuagcuggauaacuuaaau

SEQ ID NO: 185697 - RNA, 19 nt, Artificial Sequence
  Description of Artificial Sequence: Synthetic oligonucleotide
  Antisense strand to SEQ ID NO: 185696
auuuaaguuauccagcuaa

SEQ ID NO: 185698 - RNA, 19 nt, Artificial Sequence
  Description of Artificial Sequence: Synthetic oligonucleotide
  Sense strand starting at position 744 of SEQ ID NO: 2394
auuaauacuuagcuggaua

SEQ ID NO: 185699 - RNA, 19 nt, Artificial Sequence
  Description of Artificial Sequence: Synthetic oligonucleotide
  Antisense strand to SEQ ID NO: 185698
uauccagcuaaguauuaau

SEQ ID NO: 185700 - RNA, 19 nt, Artificial Sequence
  Description of Artificial Sequence: Synthetic oligonucleotide
  Sense strand starting at position 688 of SEQ ID NO: 2394
aaaguaugcuagucuagaa

SEQ ID NO: 185701 - RNA, 19 nt, Artificial Sequence
  Description of Artificial Sequence: Synthetic oligonucleotide
  Antisense strand to SEQ ID NO: 185700
uucuagacuagcauacuuu

SEQ ID NO: 185702 - RNA, 19 nt, Artificial Sequence
  Description of Artificial Sequence: Synthetic oligonucleotide
  Sense strand starting at position 505 of SEQ ID NO: 2394
gauggaagcucaguuuaug

SEQ ID NO: 185703 - RNA, 19 nt, Artificial Sequence
  Description of Artificial Sequence: Synthetic oligonucleotide
  Antisense strand to SEQ ID NO: 185702
cauaaacugagcuuccauc

SEQ ID NO: 185704 - RNA, 19 nt, Artificial Sequence
  Description of Artificial Sequence: Synthetic oligonucleotide
  Sense strand starting at position 481 of SEQ ID NO: 2394
gaguguucugcaucugccu

SEQ ID NO: 185705 - RNA, 19 nt, Artificial Sequence
  Description of Artificial Sequence: Synthetic oligonucleotide
  Antisense strand to SEQ ID NO: 185704
aggcagaugcagaacacuc

SEQ ID NO: 185706 - RNA, 19 nt, Artificial Sequence
  Description of Artificial Sequence: Synthetic oligonucleotide
  Sense strand starting at position 232 of SEQ ID NO: 2394
gacagauacggagguuaau

SEQ ID NO: 185707 - RNA, 19 nt, Artificial Sequence
  Description of Artificial Sequence: Synthetic oligonucleotide
  Antisense strand to SEQ ID NO: 185706
auuaaccuccguaucuguc

SEQ ID NO: 185708 - RNA, 19 nt, Artificial Sequence
  Description of Artificial Sequence: Synthetic oligonucleotide
  Sense strand starting at position 230 of SEQ ID NO: 2394
gugacagauacggagguua

SEQ ID NO: 185709 - RNA, 19 nt, Artificial Sequence
  Description of Artificial Sequence: Synthetic oligonucleotide
  Antisense strand to SEQ ID NO: 185708
uaaccuccguaucugucac

SEQ ID NO: 185710 - RNA, 19 nt, Artificial Sequence
  Description of Artificial Sequence: Synthetic oligonucleotide
  Sense strand starting at position 184 of SEQ ID NO: 2394
agacacucauagcuguaua

SEQ ID NO: 185711 - RNA, 19 nt, Artificial Sequence
  Description of Artificial Sequence: Synthetic oligonucleotide
  Antisense strand to SEQ ID NO: 185710
uauacagcuaugagugucu

SEQ ID NO: 185712 - RNA, 19 nt, Artificial Sequence
  Description of Artificial Sequence: Synthetic oligonucleotide
  Sense strand starting at position 159 of SEQ ID NO: 2394
augugaauaaaguggcaaa

SEQ ID NO: 185713 - RNA, 19 nt, Artificial Sequence
  Description of Artificial Sequence: Synthetic oligonucleotide
  Antisense strand to SEQ ID NO: 185712
uuugccacuuuauucacau

SEQ ID NO: 185714 - RNA, 19 nt, Artificial Sequence
  Description of Artificial Sequence: Synthetic oligonucleotide
  Sense strand starting at position 144 of SEQ ID NO: 2394
gguuccugagcauaaaugu

SEQ ID NO: 185715 - RNA, 19 nt, Artificial Sequence
  Description of Artificial Sequence: Synthetic oligonucleotide
  Antisense strand to SEQ ID NO: 185714
acauuuaugcucaggaacc

SEQ ID NO: 185716 - RNA, 19 nt, Artificial Sequence
  Description of Artificial Sequence: Synthetic oligonucleotide
  Sense strand starting at position 142 of SEQ ID NO: 2394
cagguuccugagcauaaau

SEQ ID NO: 185717 - RNA, 19 nt, Artificial Sequence
  Description of Artificial Sequence: Synthetic oligonucleotide
  Antisense strand to SEQ ID NO: 185716
auuuaugcucaggaaccug

SEQ ID NO: 185718 - RNA, 19 nt, Artificial Sequence
  Description of Artificial Sequence: Synthetic oligonucleotide
  Sense strand starting at position 141 of SEQ ID NO: 2394
acagguuccugagcauaaa

SEQ ID NO: 185719 - RNA, 19 nt, Artificial Sequence
  Description of Artificial Sequence: Synthetic oligonucleotide
  Antisense strand to SEQ ID NO: 185718
uuuaugcucaggaaccugu

SEQ ID NO: 185720 - RNA, 19 nt, Artificial Sequence
  Description of Artificial Sequence: Synthetic oligonucleotide
  Sense strand starting at position 3859 of SEQ ID NO: 2393
ugugaugguccugaaguua

SEQ ID NO: 185721 - RNA, 19 nt, Artificial Sequence
  Description of Artificial Sequence: Synthetic oligonucleotide
  Antisense strand to SEQ ID NO: 185720
uaacuucaggaccaucaca

SEQ ID NO: 185722 - RNA, 19 nt, Artificial Sequence
  Description of Artificial Sequence: Synthetic oligonucleotide
  Sense strand starting at position 3797 of SEQ ID NO: 2393
agcgauaagauauggaaca

SEQ ID NO: 185723 - RNA, 19 nt, Artificial Sequence
  Description of Artificial Sequence: Synthetic oligonucleotide
  Antisense strand to SEQ ID NO: 185722
uguuccauaucuuaucgcu

SEQ ID NO: 185724 - RNA, 19 nt, Artificial Sequence
  Description of Artificial Sequence: Synthetic oligonucleotide
  Sense strand starting at position 3787 of SEQ ID NO: 2393
uuauacauugagcgauaag

SEQ ID NO: 185725 - RNA, 19 nt, Artificial Sequence
  Description of Artificial Sequence: Synthetic oligonucleotide
  Antisense strand to SEQ ID NO: 185724
cuuaucgcucaauguauaa

SEQ ID NO: 185726 - RNA, 19 nt, Artificial Sequence
  Description of Artificial Sequence: Synthetic oligonucleotide
  Sense strand starting at position 3786 of SEQ ID NO: 2393
uuuauacauugagcgauaa

SEQ ID NO: 185727 - RNA, 19 nt, Artificial Sequence
  Description of Artificial Sequence: Synthetic oligonucleotide
  Antisense strand to SEQ ID NO: 185726
uuaucgcucaauguauaaa

SEQ ID NO: 185728 - RNA, 19 nt, Artificial Sequence
  Description of Artificial Sequence: Synthetic oligonucleotide
  Sense strand starting at position 3677 of SEQ ID NO: 2393
uuuauacuugggcacauaa

SEQ ID NO: 185729 - RNA, 19 nt, Artificial Sequence
  Description of Artificial Sequence: Synthetic oligonucleotide
  Antisense strand to SEQ ID NO: 185728
uuaugugcccaaguauaaa

SEQ ID NO: 185730 - RNA, 19 nt, Artificial Sequence
  Description of Artificial Sequence: Synthetic oligonucleotide
  Sense strand starting at position 3627 of SEQ ID NO: 2393
auagucagucuguaagcaa

SEQ ID NO: 185731 - RNA, 19 nt, Artificial Sequence
  Description of Artificial Sequence: Synthetic oligonucleotide
  Antisense strand to SEQ ID NO: 185730
uugcuuacagacugacuau

SEQ ID NO: 185732 - RNA, 19 nt, Artificial Sequence
  Description of Artificial Sequence: Synthetic oligonucleotide
  Sense strand starting at position 3588 of SEQ ID NO: 2393
gauaaagacuugucuauga

SEQ ID NO: 185733 - RNA, 19 nt, Artificial Sequence
  Description of Artificial Sequence: Synthetic oligonucleotide
  Antisense strand to SEQ ID NO: 185732
ucauagacaagucuuuauc

SEQ ID NO: 185734 - RNA, 19 nt, Artificial Sequence
  Description of Artificial Sequence: Synthetic oligonucleotide
  Sense strand starting at position 3529 of SEQ ID NO: 2393
uuuagauugcaguauagaa

SEQ ID NO: 185735 - RNA, 19 nt, Artificial Sequence
  Description of Artificial Sequence: Synthetic oligonucleotide
  Antisense strand to SEQ ID NO: 185734
uucuauacugcaaucuaaa

SEQ ID NO: 185736 - RNA, 19 nt, Artificial Sequence
  Description of Artificial Sequence: Synthetic oligonucleotide
  Sense strand starting at position 3446 of SEQ ID NO: 2393
cuguaaauccuguaaauua

SEQ ID NO: 185737 - RNA, 19 nt, Artificial Sequence
  Description of Artificial Sequence: Synthetic oligonucleotide
  Antisense strand to SEQ ID NO: 185736
uaauuuacaggauuuacag

SEQ ID NO: 185738 - RNA, 19 nt, Artificial Sequence
  Description of Artificial Sequence: Synthetic oligonucleotide
  Sense strand starting at position 3118 of SEQ ID NO: 2393
ucagcuuaagauuaugcaa

SEQ ID NO: 185739 - RNA, 19 nt, Artificial Sequence
  Description of Artificial Sequence: Synthetic oligonucleotide
  Antisense strand to SEQ ID NO: 185738
uugcauaaucuuaagcuga

SEQ ID NO: 185740 - RNA, 19 nt, Artificial Sequence
  Description of Artificial Sequence: Synthetic oligonucleotide
  Sense strand starting at position 3022 of SEQ ID NO: 2393
uugugaggucaauagauuc

SEQ ID NO: 185741 - RNA, 19 nt, Artificial Sequence
  Description of Artificial Sequence: Synthetic oligonucleotide
  Antisense strand to SEQ ID NO: 185740
gaaucuauugaccucacaa

SEQ ID NO: 185742 - RNA, 19 nt, Artificial Sequence
  Description of Artificial Sequence: Synthetic oligonucleotide
  Sense strand starting at position 2942 of SEQ ID NO: 2393
ggaagauaauaagaaacaa

SEQ ID NO: 185743 - RNA, 19 nt, Artificial Sequence
  Description of Artificial Sequence: Synthetic oligonucleotide
  Antisense strand to SEQ ID NO: 185742
uuguuucuuauuaucuucc

SEQ ID NO: 185744 - RNA, 19 nt, Artificial Sequence
  Description of Artificial Sequence: Synthetic oligonucleotide
  Sense strand starting at position 2939 of SEQ ID NO: 2393
ucaggaagauaauaagaaa

SEQ ID NO: 185745 - RNA, 19 nt, Artificial Sequence
  Description of Artificial Sequence: Synthetic oligonucleotide
  Antisense strand to SEQ ID NO: 185744
uuucuuauuaucuuccuga

SEQ ID NO: 185746 - RNA, 19 nt, Artificial Sequence
  Description of Artificial Sequence: Synthetic oligonucleotide
  Sense strand starting at position 2832 of SEQ ID NO: 2393
gucugcauuugucuuuaca

SEQ ID NO: 185747 - RNA, 19 nt, Artificial Sequence
  Description of Artificial Sequence: Synthetic oligonucleotide
  Antisense strand to SEQ ID NO: 185746
uguaaagacaaaugcagac

SEQ ID NO: 185748 - RNA, 19 nt, Artificial Sequence
  Description of Artificial Sequence: Synthetic oligonucleotide
  Sense strand starting at position 2743 of SEQ ID NO: 2393
acguauccgguagaacuaa

SEQ ID NO: 185749 - RNA, 19 nt, Artificial Sequence
  Description of Artificial Sequence: Synthetic oligonucleotide
  Antisense strand to SEQ ID NO: 185748
uuaguucuaccggauacgu

SEQ ID NO: 185750 - RNA, 19 nt, Artificial Sequence
  Description of Artificial Sequence: Synthetic oligonucleotide
  Sense strand starting at position 2712 of SEQ ID NO: 2393
gugacuggguccuuugaaa

SEQ ID NO: 185751 - RNA, 19 nt, Artificial Sequence
  Description of Artificial Sequence: Synthetic oligonucleotide
  Antisense strand to SEQ ID NO: 185750
uuucaaaggacccagucac

SEQ ID NO: 185752 - RNA, 19 nt, Artificial Sequence
  Description of Artificial Sequence: Synthetic oligonucleotide
  Sense strand starting at position 2389 of SEQ ID NO: 2393
ucauuaauaggcgggaaca

SEQ ID NO: 185753 - RNA, 19 nt, Artificial Sequence
  Description of Artificial Sequence: Synthetic oligonucleotide
  Antisense strand to SEQ ID NO: 185752
uguucccgccuauuaauga

SEQ ID NO: 185754 - RNA, 19 nt, Artificial Sequence
  Description of Artificial Sequence: Synthetic oligonucleotide
  Sense strand starting at position 2367 of SEQ ID NO: 2393
ucgucuucccggguucauu

SEQ ID NO: 185755 - RNA, 19 nt, Artificial Sequence
  Description of Artificial Sequence: Synthetic oligonucleotide
  Antisense strand to SEQ ID NO: 185754
aaugaacccgggaagacga

SEQ ID NO: 185756 - RNA, 19 nt, Artificial Sequence
  Description of Artificial Sequence: Synthetic oligonucleotide
  Sense strand starting at position 1650 of SEQ ID NO: 2393
guggaaugggacgagcaau

SEQ ID NO: 185757 - RNA, 19 nt, Artificial Sequence
  Description of Artificial Sequence: Synthetic oligonucleotide
  Antisense strand to SEQ ID NO: 185756
auugcucgucccauuccac

SEQ ID NO: 185758 - RNA, 19 nt, Artificial Sequence
  Description of Artificial Sequence: Synthetic oligonucleotide
  Sense strand starting at position 1564 of SEQ ID NO: 2393
ccgggcaagcuuuauauaa

SEQ ID NO: 185759 - RNA, 19 nt, Artificial Sequence
  Description of Artificial Sequence: Synthetic oligonucleotide
  Antisense strand to SEQ ID NO: 185758
uuauauaaagcuugcccgg

SEQ ID NO: 185760 - RNA, 19 nt, Artificial Sequence
  Description of Artificial Sequence: Synthetic oligonucleotide
  Sense strand starting at position 1503 of SEQ ID NO: 2393
aauuguuccggguagaagu

SEQ ID NO: 185761 - RNA, 19 nt, Artificial Sequence
  Description of Artificial Sequence: Synthetic oligonucleotide
  Antisense strand to SEQ ID NO: 185760
acuucuacccggaacaauu

SEQ ID NO: 185762 - RNA, 19 nt, Artificial Sequence
  Description of Artificial Sequence: Synthetic oligonucleotide
  Sense strand starting at position 1394 of SEQ ID NO: 2393
acacaauguugaguggaaa

SEQ ID NO: 185763 - RNA, 19 nt, Artificial Sequence
  Description of Artificial Sequence: Synthetic oligonucleotide
  Antisense strand to SEQ ID NO: 185762
uuuccacucaacauugugu

SEQ ID NO: 185764 - RNA, 19 nt, Artificial Sequence
  Description of Artificial Sequence: Synthetic oligonucleotide
  Sense strand starting at position 1334 of SEQ ID NO: 2393
gucuguggccaacaaauaa

SEQ ID NO: 185765 - RNA, 19 nt, Artificial Sequence
  Description of Artificial Sequence: Synthetic oligonucleotide
  Antisense strand to SEQ ID NO: 185764
uuauuuguuggccacagac

SEQ ID NO: 185766 - RNA, 19 nt, Artificial Sequence
  Description of Artificial Sequence: Synthetic oligonucleotide
  Sense strand starting at position 1331 of SEQ ID NO: 2393
cuggucuguggccaacaaa

SEQ ID NO: 185767 - RNA, 19 nt, Artificial Sequence
  Description of Artificial Sequence: Synthetic oligonucleotide
  Antisense strand to SEQ ID NO: 185766
uuuguuggccacagaccag

SEQ ID NO: 185768 - RNA, 19 nt, Artificial Sequence
  Description of Artificial Sequence: Synthetic oligonucleotide
  Sense strand starting at position 1184 of SEQ ID NO: 2393
guagguaacauacgagaau

SEQ ID NO: 185769 - RNA, 19 nt, Artificial Sequence
  Description of Artificial Sequence: Synthetic oligonucleotide
  Antisense strand to SEQ ID NO: 185768
auucucguauguuaccuac

SEQ ID NO: 185770 - RNA, 19 nt, Artificial Sequence
  Description of Artificial Sequence: Synthetic oligonucleotide
  Sense strand starting at position 1127 of SEQ ID NO: 2393
uuagcuggauaacuuaaau

SEQ ID NO: 185771 - RNA, 19 nt, Artificial Sequence
  Description of Artificial Sequence: Synthetic oligonucleotide
  Antisense strand to SEQ ID NO: 185770
auuuaaguuauccagcuaa

SEQ ID NO: 185772 - RNA, 19 nt, Artificial Sequence
  Description of Artificial Sequence: Synthetic oligonucleotide
  Sense strand starting at position 1119 of SEQ ID NO: 2393
auuaauacuuagcuggaua

SEQ ID NO: 185773 - RNA, 19 nt, Artificial Sequence
  Description of Artificial Sequence: Synthetic oligonucleotide
  Antisense strand to SEQ ID NO: 185772
uauccagcuaaguauuaau

SEQ ID NO: 185774 - RNA, 19 nt, Artificial Sequence
  Description of Artificial Sequence: Synthetic oligonucleotide
  Sense strand starting at position 1063 of SEQ ID NO: 2393
aaaguaugcuagucuagaa

SEQ ID NO: 185775 - RNA, 19 nt, Artificial Sequence
  Description of Artificial Sequence: Synthetic oligonucleotide
  Antisense strand to SEQ ID NO: 185774
uucuagacuagcauacuuu

SEQ ID NO: 185776 - RNA, 19 nt, Artificial Sequence
  Description of Artificial Sequence: Synthetic oligonucleotide
  Sense strand starting at position 880 of SEQ ID NO: 2393
gauggaagcucaguuuaug

SEQ ID NO: 185777 - RNA, 19 nt, Artificial Sequence
  Description of Artificial Sequence: Synthetic oligonucleotide
  Antisense strand to SEQ ID NO: 185776
cauaaacugagcuuccauc

SEQ ID NO: 185778 - RNA, 19 nt, Artificial Sequence
  Description of Artificial Sequence: Synthetic oligonucleotide
  Sense strand starting at position 856 of SEQ ID NO: 2393
gaguguucugcaucugccu

SEQ ID NO: 185779 - RNA, 19 nt, Artificial Sequence
  Description of Artificial Sequence: Synthetic oligonucleotide
  Antisense strand to SEQ ID NO: 185778
aggcagaugcagaacacuc

SEQ ID NO: 185780 - RNA, 19 nt, Artificial Sequence
  Description of Artificial Sequence: Synthetic oligonucleotide
  Sense strand starting at position 607 of SEQ ID NO: 2393
gacagauacggagguuaau

SEQ ID NO: 185781 - RNA, 19 nt, Artificial Sequence
  Description of Artificial Sequence: Synthetic oligonucleotide
  Antisense strand to SEQ ID NO: 185780
auuaaccuccguaucuguc

SEQ ID NO: 185782 - RNA, 19 nt, Artificial Sequence
  Description of Artificial Sequence: Synthetic oligonucleotide
  Sense strand starting at position 605 of SEQ ID NO: 2393
gugacagauacggagguua

SEQ ID NO: 185783 - RNA, 19 nt, Artificial Sequence
  Description of Artificial Sequence: Synthetic oligonucleotide
  Antisense strand to SEQ ID NO: 185782
uaaccuccguaucugucac

SEQ ID NO: 185784 - RNA, 19 nt, Artificial Sequence
  Description of Artificial Sequence: Synthetic oligonucleotide
  Sense strand starting at position 559 of SEQ ID NO: 2393
agacacucauagcuguaua

SEQ ID NO: 185785 - RNA, 19 nt, Artificial Sequence
  Description of Artificial Sequence: Synthetic oligonucleotide
  Antisense strand to SEQ ID NO: 185784
uauacagcuaugagugucu

SEQ ID NO: 185786 - RNA, 19 nt, Artificial Sequence
  Description of Artificial Sequence: Synthetic oligonucleotide
  Sense strand starting at position 534 of SEQ ID NO: 2393
augugaauaaaguggcaaa

SEQ ID NO: 185787 - RNA, 19 nt, Artificial Sequence
  Description of Artificial Sequence: Synthetic oligonucleotide
  Antisense strand to SEQ ID NO: 185786
uuugccacuuuauucacau

SEQ ID NO: 185788 - RNA, 19 nt, Artificial Sequence
  Description of Artificial Sequence: Synthetic oligonucleotide
  Sense strand starting at position 519 of SEQ ID NO: 2393
gguuccugagcauaaaugu

SEQ ID NO: 185789 - RNA, 19 nt, Artificial Sequence
  Description of Artificial Sequence: Synthetic oligonucleotide
  Antisense strand to SEQ ID NO: 185788
acauuuaugcucaggaacc

SEQ ID NO: 185790 - RNA, 19 nt, Artificial Sequence
  Description of Artificial Sequence: Synthetic oligonucleotide
  Sense strand starting at position 517 of SEQ ID NO: 2393
cagguuccugagcauaaau

SEQ ID NO: 185791 - RNA, 19 nt, Artificial Sequence
  Description of Artificial Sequence: Synthetic oligonucleotide
  Antisense strand to SEQ ID NO: 185790
auuuaugcucaggaaccug

SEQ ID NO: 185792 - RNA, 19 nt, Artificial Sequence
  Description of Artificial Sequence: Synthetic oligonucleotide
  Sense strand starting at position 516 of SEQ ID NO: 2393
acagguuccugagcauaaa

SEQ ID NO: 185793 - RNA, 19 nt, Artificial Sequence
  Description of Artificial Sequence: Synthetic oligonucleotide
  Antisense strand to SEQ ID NO: 185792
uuuaugcucaggaaccugu

SEQ ID NO: 185794 - RNA, 19 nt, Artificial Sequence
  Description of Artificial Sequence: Synthetic oligonucleotide
  Sense strand starting at position 354 of SEQ ID NO: 2393
uguagaauugcucauucca

SEQ ID NO: 185795 - RNA, 19 nt, Artificial Sequence
  Description of Artificial Sequence: Synthetic oligonucleotide
  Antisense strand to SEQ ID NO: 185794
uggaaugagcaauucuaca

SEQ ID NO: 185796 - RNA, 19 nt, Artificial Sequence
  Description of Artificial Sequence: Synthetic oligonucleotide
  Sense strand starting at position 342 of SEQ ID NO: 2393
caggaaugagcauguagaa

SEQ ID NO: 185797 - RNA, 19 nt, Artificial Sequence
  Description of Artificial Sequence: Synthetic oligonucleotide
  Antisense strand to SEQ ID NO: 185796
uucuacaugcucauuccug

SEQ ID NO: 185798 - RNA, 19 nt, Artificial Sequence
  Description of Artificial Sequence: Synthetic oligonucleotide
  Sense strand starting at position 259 of SEQ ID NO: 2393
aagcuagauuuagaagaug

SEQ ID NO: 185799 - RNA, 19 nt, Artificial Sequence
  Description of Artificial Sequence: Synthetic oligonucleotide
  Antisense strand to SEQ ID NO: 185798
caucuucuaaaucuagcuu

SEQ ID NO: 185800 - RNA, 19 nt, Artificial Sequence
  Description of Artificial Sequence: Synthetic oligonucleotide
  Sense strand starting at position 124 of SEQ ID NO: 2395
cuaaguccuguggguucua

SEQ ID NO: 185801 - RNA, 19 nt, Artificial Sequence
  Description of Artificial Sequence: Synthetic oligonucleotide
  Antisense strand to SEQ ID NO: 185800
uagaacccacaggacuuag

SEQ ID NO: 185802 - RNA, 19 nt, Artificial Sequence
  Description of Artificial Sequence: Synthetic oligonucleotide
  Sense strand starting at position 134 of SEQ ID NO: 2395
uggguucuauuccuuaauu

SEQ ID NO: 185803 - RNA, 19 nt, Artificial Sequence
  Description of Artificial Sequence: Synthetic oligonucleotide
  Antisense strand to SEQ ID NO: 185802
aauuaaggaauagaaccca

SEQ ID NO: 185804 - RNA, 19 nt, Artificial Sequence
  Description of Artificial Sequence: Synthetic oligonucleotide
  Sense strand starting at position 197 of SEQ ID NO: 2395
ccauucucauuacagagua

SEQ ID NO: 185805 - RNA, 19 nt, Artificial Sequence
  Description of Artificial Sequence: Synthetic oligonucleotide
  Antisense strand to SEQ ID NO: 185804
uacucuguaaugagaaugg

SEQ ID NO: 185806 - RNA, 19 nt, Artificial Sequence
  Description of Artificial Sequence: Synthetic oligonucleotide
  Sense strand starting at position 252 of SEQ ID NO: 2395
ucugaugacucuucucagu

SEQ ID NO: 185807 - RNA, 19 nt, Artificial Sequence
  Description of Artificial Sequence: Synthetic oligonucleotide
  Antisense strand to SEQ ID NO: 185806
acugagaagagucaucaga

SEQ ID NO: 185808 - RNA, 19 nt, Artificial Sequence
  Description of Artificial Sequence: Synthetic oligonucleotide
  Sense strand starting at position 261 of SEQ ID NO: 2395
ucuucucaguccucuggau

SEQ ID NO: 185809 - RNA, 19 nt, Artificial Sequence
  Description of Artificial Sequence: Synthetic oligonucleotide
  Antisense strand to SEQ ID NO: 185808
auccagaggacugagaaga

SEQ ID NO: 185810 - RNA, 19 nt, Artificial Sequence
  Description of Artificial Sequence: Synthetic oligonucleotide
  Sense strand starting at position 263 of SEQ ID NO: 2395
uucucaguccucuggauga

SEQ ID NO: 185811 - RNA, 19 nt, Artificial Sequence
  Description of Artificial Sequence: Synthetic oligonucleotide
  Antisense strand to SEQ ID NO: 185810
ucauccagaggacugagaa

SEQ ID NO: 185812 - RNA, 19 nt, Artificial Sequence
  Description of Artificial Sequence: Synthetic oligonucleotide
  Sense strand starting at position 410 of SEQ ID NO: 2395
ccaggaucucaaugucuuu

SEQ ID NO: 185813 - RNA, 19 nt, Artificial Sequence
  Description of Artificial Sequence: Synthetic oligonucleotide
  Antisense strand to SEQ ID NO: 185812
aaagacauugagauccugg

SEQ ID NO: 185814 - RNA, 19 nt, Artificial Sequence
  Description of Artificial Sequence: Synthetic oligonucleotide
  Sense strand starting at position 413 of SEQ ID NO: 2395
ggaucucaaugucuuuaca

SEQ ID NO: 185815 - RNA, 19 nt, Artificial Sequence
  Description of Artificial Sequence: Synthetic oligonucleotide
  Antisense strand to SEQ ID NO: 185814
uguaaagacauugagaucc

SEQ ID NO: 185816 - RNA, 19 nt, Artificial Sequence
  Description of Artificial Sequence: Synthetic oligonucleotide
  Sense strand starting at position 923 of SEQ ID NO: 2395
cugugcucggccuaucaca

SEQ ID NO: 185817 - RNA, 19 nt, Artificial Sequence
  Description of Artificial Sequence: Synthetic oligonucleotide
  Antisense strand to SEQ ID NO: 185816
ugugauaggccgagcacag

SEQ ID NO: 185818 - RNA, 19 nt, Artificial Sequence
  Description of Artificial Sequence: Synthetic oligonucleotide
  Sense strand starting at position 985 of SEQ ID NO: 2395
uggaguauguaaggacaga

SEQ ID NO: 185819 - RNA, 19 nt, Artificial Sequence
  Description of Artificial Sequence: Synthetic oligonucleotide
  Antisense strand to SEQ ID NO: 185818
ucuguccuuacauacucca

SEQ ID NO: 185820 - RNA, 19 nt, Artificial Sequence
  Description of Artificial Sequence: Synthetic oligonucleotide
  Sense strand starting at position 1020 of SEQ ID NO: 2395
ucuguuucccuagagccua

SEQ ID NO: 185821 - RNA, 19 nt, Artificial Sequence
  Description of Artificial Sequence: Synthetic oligonucleotide
  Antisense strand to SEQ ID NO: 185820
uaggcucuagggaaacaga

SEQ ID NO: 185822 - RNA, 19 nt, Artificial Sequence
  Description of Artificial Sequence: Synthetic oligonucleotide
  Sense strand starting at position 1044 of SEQ ID NO: 2395
accuauuaccgauggcaug

SEQ ID NO: 185823 - RNA, 19 nt, Artificial Sequence
  Description of Artificial Sequence: Synthetic oligonucleotide
  Antisense strand to SEQ ID NO: 185822
caugccaucgguaauaggu

SEQ ID NO: 185824 - RNA, 19 nt, Artificial Sequence
  Description of Artificial Sequence: Synthetic oligonucleotide
  Sense strand starting at position 1058 of SEQ ID NO: 2395
gcaugcucuggguacucaa

SEQ ID NO: 185825 - RNA, 19 nt, Artificial Sequence
  Description of Artificial Sequence: Synthetic oligonucleotide
  Antisense strand to SEQ ID NO: 185824
uugaguacccagagcaugc

SEQ ID NO: 185826 - RNA, 19 nt, Artificial Sequence
  Description of Artificial Sequence: Synthetic oligonucleotide
  Sense strand starting at position 1245 of SEQ ID NO: 2395
ugaaauauguucuguggaa

SEQ ID NO: 185827 - RNA, 19 nt, Artificial Sequence
  Description of Artificial Sequence: Synthetic oligonucleotide
  Antisense strand to SEQ ID NO: 185826
uuccacagaacauauuuca

SEQ ID NO: 185828 - RNA, 19 nt, Artificial Sequence
  Description of Artificial Sequence: Synthetic oligonucleotide
  Sense strand starting at position 1246 of SEQ ID NO: 2395
gaaauauguucuguggaag

SEQ ID NO: 185829 - RNA, 19 nt, Artificial Sequence
  Description of Artificial Sequence: Synthetic oligonucleotide
  Antisense strand to SEQ ID NO: 185828
cuuccacagaacauauuuc

SEQ ID NO: 185830 - RNA, 19 nt, Artificial Sequence
  Description of Artificial Sequence: Synthetic oligonucleotide
  Sense strand starting at position 1247 of SEQ ID NO: 2395
aaauauguucuguggaaga

SEQ ID NO: 185831 - RNA, 19 nt, Artificial Sequence
  Description of Artificial Sequence: Synthetic oligonucleotide
  Antisense strand to SEQ ID NO: 185830
ucuuccacagaacauauuu

SEQ ID NO: 185832 - RNA, 19 nt, Artificial Sequence
  Description of Artificial Sequence: Synthetic oligonucleotide
  Sense strand starting at position 1281 of SEQ ID NO: 2395
uuguuaggauagucaagga

SEQ ID NO: 185833 - RNA, 19 nt, Artificial Sequence
  Description of Artificial Sequence: Synthetic oligonucleotide
  Antisense strand to SEQ ID NO: 185832
uccuugacuauccuaacaa

SEQ ID NO: 185834 - RNA, 19 nt, Artificial Sequence
  Description of Artificial Sequence: Synthetic oligonucleotide
  Sense strand starting at position 1300 of SEQ ID NO: 2395
aggguuaucuuccugagaa

SEQ ID NO: 185835 - RNA, 19 nt, Artificial Sequence
  Description of Artificial Sequence: Synthetic oligonucleotide
  Antisense strand to SEQ ID NO: 185834
uucucaggaagauaacccu

SEQ ID NO: 185836 - RNA, 19 nt, Artificial Sequence
  Description of Artificial Sequence: Synthetic oligonucleotide
  Sense strand starting at position 1301 of SEQ ID NO: 2395
ggguuaucuuccugagaaa

SEQ ID NO: 185837 - RNA, 19 nt, Artificial Sequence
  Description of Artificial Sequence: Synthetic oligonucleotide
  Antisense strand to SEQ ID NO: 185836
uuucucaggaagauaaccc

SEQ ID NO: 185838 - RNA, 19 nt, Artificial Sequence
  Description of Artificial Sequence: Synthetic oligonucleotide
  Sense strand starting at position 1356 of SEQ ID NO: 2395
gggcuaagcuccucuacuu

SEQ ID NO: 185839 - RNA, 19 nt, Artificial Sequence
  Description of Artificial Sequence: Synthetic oligonucleotide
  Antisense strand to SEQ ID NO: 185838
aaguagaggagcuuagccc

SEQ ID NO: 185840 - RNA, 19 nt, Artificial Sequence
  Description of Artificial Sequence: Synthetic oligonucleotide
  Sense strand starting at position 1382 of SEQ ID NO: 2395
gguuccuuuccaugucuca

SEQ ID NO: 185841 - RNA, 19 nt, Artificial Sequence
  Description of Artificial Sequence: Synthetic oligonucleotide
  Antisense strand to SEQ ID NO: 185840
ugagacauggaaaggaacc

SEQ ID NO: 185842 - RNA, 19 nt, Artificial Sequence
  Description of Artificial Sequence: Synthetic oligonucleotide
  Sense strand starting at position 1400 of SEQ ID NO: 2395
aggugaauaauccagcagu

SEQ ID NO: 185843 - RNA, 19 nt, Artificial Sequence
  Description of Artificial Sequence: Synthetic oligonucleotide
  Antisense strand to SEQ ID NO: 185842
acugcuggauuauucaccu

SEQ ID NO: 185844 - RNA, 19 nt, Artificial Sequence
  Description of Artificial Sequence: Synthetic oligonucleotide
  Sense strand starting at position 1425 of SEQ ID NO: 2395
acgaguauacaucgagcaa

SEQ ID NO: 185845 - RNA, 19 nt, Artificial Sequence
  Description of Artificial Sequence: Synthetic oligonucleotide
  Antisense strand to SEQ ID NO: 185844
uugcucgauguauacucgu

SEQ ID NO: 185846 - RNA, 19 nt, Artificial Sequence
  Description of Artificial Sequence: Synthetic oligonucleotide
  Sense strand starting at position 1426 of SEQ ID NO: 2395
cgaguauacaucgagcaac

SEQ ID NO: 185847 - RNA, 19 nt, Artificial Sequence
  Description of Artificial Sequence: Synthetic oligonucleotide
  Antisense strand to SEQ ID NO: 185846
guugcucgauguauacucg

SEQ ID NO: 185848 - RNA, 19 nt, Artificial Sequence
  Description of Artificial Sequence: Synthetic oligonucleotide
  Sense strand starting at position 1429 of SEQ ID NO: 2395
guauacaucgagcaacugu

SEQ ID NO: 185849 - RNA, 19 nt, Artificial Sequence
  Description of Artificial Sequence: Synthetic oligonucleotide
  Antisense strand to SEQ ID NO: 185848
acaguugcucgauguauac

SEQ ID NO: 185850 - RNA, 19 nt, Artificial Sequence
  Description of Artificial Sequence: Synthetic oligonucleotide
  Sense strand starting at position 1437 of SEQ ID NO: 2395
cgagcaacugucuacuacu

SEQ ID NO: 185851 - RNA, 19 nt, Artificial Sequence
  Description of Artificial Sequence: Synthetic oligonucleotide
  Antisense strand to SEQ ID NO: 185850
aguaguagacaguugcucg

SEQ ID NO: 185852 - RNA, 19 nt, Artificial Sequence
  Description of Artificial Sequence: Synthetic oligonucleotide
  Sense strand starting at position 1467 of SEQ ID NO: 2395
ucguguaugcuggacguca

SEQ ID NO: 185853 - RNA, 19 nt, Artificial Sequence
  Description of Artificial Sequence: Synthetic oligonucleotide
  Antisense strand to SEQ ID NO: 185852
ugacguccagcauacacga

SEQ ID NO: 185854 - RNA, 19 nt, Artificial Sequence
  Description of Artificial Sequence: Synthetic oligonucleotide
  Sense strand starting at position 1469 of SEQ ID NO: 2395
guguaugcuggacgucaga

SEQ ID NO: 185855 - RNA, 19 nt, Artificial Sequence
  Description of Artificial Sequence: Synthetic oligonucleotide
  Antisense strand to SEQ ID NO: 185854
ucugacguccagcauacac

SEQ ID NO: 185856 - RNA, 19 nt, Artificial Sequence
  Description of Artificial Sequence: Synthetic oligonucleotide
  Sense strand starting at position 1511 of SEQ ID NO: 2395
gcaaguauacgguagguuu

SEQ ID NO: 185857 - RNA, 19 nt, Artificial Sequence
  Description of Artificial Sequence: Synthetic oligonucleotide
  Antisense strand to SEQ ID NO: 185856
aaaccuaccguauacuugc

SEQ ID NO: 185858 - RNA, 19 nt, Artificial Sequence
  Description of Artificial Sequence: Synthetic oligonucleotide
  Sense strand starting at position 1783 of SEQ ID NO: 2395
ggaucuugccucugugaaa

SEQ ID NO: 185859 - RNA, 19 nt, Artificial Sequence
  Description of Artificial Sequence: Synthetic oligonucleotide
  Antisense strand to SEQ ID NO: 185858
uuucacagaggcaagaucc

SEQ ID NO: 185860 - RNA, 19 nt, Artificial Sequence
  Description of Artificial Sequence: Synthetic oligonucleotide
  Sense strand starting at position 1784 of SEQ ID NO: 2395
gaucuugccucugugaaac

SEQ ID NO: 185861 - RNA, 19 nt, Artificial Sequence
  Description of Artificial Sequence: Synthetic oligonucleotide
  Antisense strand to SEQ ID NO: 185860
guuucacagaggcaagauc

SEQ ID NO: 185862 - RNA, 19 nt, Artificial Sequence
  Description of Artificial Sequence: Synthetic oligonucleotide
  Sense strand starting at position 1805 of SEQ ID NO: 2395
ccauaagucgucugguaga

SEQ ID NO: 185863 - RNA, 19 nt, Artificial Sequence
  Description of Artificial Sequence: Synthetic oligonucleotide
  Antisense strand to SEQ ID NO: 185862
ucuaccagacgacuuaugg

SEQ ID NO: 185864 - RNA, 19 nt, Artificial Sequence
  Description of Artificial Sequence: Synthetic oligonucleotide
  Sense strand starting at position 2016 of SEQ ID NO: 2395
ggcguuuacaggcagaagu

SEQ ID NO: 185865 - RNA, 19 nt, Artificial Sequence
  Description of Artificial Sequence: Synthetic oligonucleotide
  Antisense strand to SEQ ID NO: 185864
acuucugccuguaaacgcc

SEQ ID NO: 185866 - RNA, 19 nt, Artificial Sequence
  Description of Artificial Sequence: Synthetic oligonucleotide
  Sense strand starting at position 2018 of SEQ ID NO: 2395
cguuuacaggcagaaguaa

SEQ ID NO: 185867 - RNA, 19 nt, Artificial Sequence
  Description of Artificial Sequence: Synthetic oligonucleotide
  Antisense strand to SEQ ID NO: 185866
uuacuucugccuguaaacg

SEQ ID NO: 185868 - RNA, 19 nt, Artificial Sequence
  Description of Artificial Sequence: Synthetic oligonucleotide
  Sense strand starting at position 2138 of SEQ ID NO: 2395
agcgaucucccuugcucaa

SEQ ID NO: 185869 - RNA, 19 nt, Artificial Sequence
  Description of Artificial Sequence: Synthetic oligonucleotide
  Antisense strand to SEQ ID NO: 185868
uugagcaagggagaucgcu

SEQ ID NO: 185870 - RNA, 19 nt, Artificial Sequence
  Description of Artificial Sequence: Synthetic oligonucleotide
  Sense strand starting at position 2779 of SEQ ID NO: 2395
aagccaauuuaggaggaaa

SEQ ID NO: 185871 - RNA, 19 nt, Artificial Sequence
  Description of Artificial Sequence: Synthetic oligonucleotide
  Antisense strand to SEQ ID NO: 185870
uuuccuccuaaauuggcuu

SEQ ID NO: 185872 - RNA, 19 nt, Artificial Sequence
  Description of Artificial Sequence: Synthetic oligonucleotide
  Sense strand starting at position 2812 of SEQ ID NO: 2395
caguauauccaagagacgu

SEQ ID NO: 185873 - RNA, 19 nt, Artificial Sequence
  Description of Artificial Sequence: Synthetic oligonucleotide
  Antisense strand to SEQ ID NO: 185872
acgucucuuggauauacug

SEQ ID NO: 185874 - RNA, 19 nt, Artificial Sequence
  Description of Artificial Sequence: Synthetic oligonucleotide
  Sense strand starting at position 2827 of SEQ ID NO: 2395
acgucugcacuccauauuu

SEQ ID NO: 185875 - RNA, 19 nt, Artificial Sequence
  Description of Artificial Sequence: Synthetic oligonucleotide
  Antisense strand to SEQ ID NO: 185874
aaauauggagugcagacgu

SEQ ID NO: 185876 - RNA, 19 nt, Artificial Sequence
  Description of Artificial Sequence: Synthetic oligonucleotide
  Sense strand starting at position 2902 of SEQ ID NO: 2395
cucuguguccaacaacaga

SEQ ID NO: 185877 - RNA, 19 nt, Artificial Sequence
  Description of Artificial Sequence: Synthetic oligonucleotide
  Antisense strand to SEQ ID NO: 185876
ucuguuguuggacacagag

SEQ ID NO: 185878 - RNA, 19 nt, Artificial Sequence
  Description of Artificial Sequence: Synthetic oligonucleotide
  Sense strand starting at position 3018 of SEQ ID NO: 2395
aggacauguuaacugacuu

SEQ ID NO: 185879 - RNA, 19 nt, Artificial Sequence
  Description of Artificial Sequence: Synthetic oligonucleotide
  Antisense strand to SEQ ID NO: 185878
aagucaguuaacauguccu

SEQ ID NO: 185880 - RNA, 19 nt, Artificial Sequence
  Description of Artificial Sequence: Synthetic oligonucleotide
  Sense strand starting at position 149 of SEQ ID NO: 2396
ggacucucuccaugccaua

SEQ ID NO: 185881 - RNA, 19 nt, Artificial Sequence
  Description of Artificial Sequence: Synthetic oligonucleotide
  Antisense strand to SEQ ID NO: 185880
uauggcauggagagagucc

SEQ ID NO: 185882 - RNA, 19 nt, Artificial Sequence
  Description of Artificial Sequence: Synthetic oligonucleotide
  Sense strand starting at position 376 of SEQ ID NO: 2396
uugggaaguugcuccuaau

SEQ ID NO: 185883 - RNA, 19 nt, Artificial Sequence
  Description of Artificial Sequence: Synthetic oligonucleotide
  Antisense strand to SEQ ID NO: 185882
auuaggagcaacuucccaa

SEQ ID NO: 185884 - RNA, 19 nt, Artificial Sequence
  Description of Artificial Sequence: Synthetic oligonucleotide
  Sense strand starting at position 591 of SEQ ID NO: 2396
agaaacuggccaugcuuua

SEQ ID NO: 185885 - RNA, 19 nt, Artificial Sequence
  Description of Artificial Sequence: Synthetic oligonucleotide
  Antisense strand to SEQ ID NO: 185884
uaaagcauggccaguuucu

SEQ ID NO: 185886 - RNA, 19 nt, Artificial Sequence
  Description of Artificial Sequence: Synthetic oligonucleotide
  Sense strand starting at position 614 of SEQ ID NO: 2396
gugucaucucaauaguggu

SEQ ID NO: 185887 - RNA, 19 nt, Artificial Sequence
  Description of Artificial Sequence: Synthetic oligonucleotide
  Antisense strand to SEQ ID NO: 185886
accacuauugagaugacac

SEQ ID NO: 185888 - RNA, 19 nt, Artificial Sequence
  Description of Artificial Sequence: Synthetic oligonucleotide
  Sense strand starting at position 766 of SEQ ID NO: 2396
cugaguuguccucacacac

SEQ ID NO: 185889 - RNA, 19 nt, Artificial Sequence
  Description of Artificial Sequence: Synthetic oligonucleotide
  Antisense strand to SEQ ID NO: 185888
gugugugaggacaacucag

SEQ ID NO: 185890 - RNA, 19 nt, Artificial Sequence
  Description of Artificial Sequence: Synthetic oligonucleotide
  Sense strand starting at position 1051 of SEQ ID NO: 2396
gcccuuuccagugauguug

SEQ ID NO: 185891 - RNA, 19 nt, Artificial Sequence
  Description of Artificial Sequence: Synthetic oligonucleotide
  Antisense strand to SEQ ID NO: 185890
caacaucacuggaaagggc

SEQ ID NO: 185892 - RNA, 19 nt, Artificial Sequence
  Description of Artificial Sequence: Synthetic oligonucleotide
  Sense strand starting at position 1164 of SEQ ID NO: 2396
gugagaagucucuggaguu

SEQ ID NO: 185893 - RNA, 19 nt, Artificial Sequence
  Description of Artificial Sequence: Synthetic oligonucleotide
  Antisense strand to SEQ ID NO: 185892
aacuccagagacuucucac

SEQ ID NO: 185894 - RNA, 19 nt, Artificial Sequence
  Description of Artificial Sequence: Synthetic oligonucleotide
  Sense strand starting at position 1382 of SEQ ID NO: 2396
aggaguagcguugggaaua

SEQ ID NO: 185895 - RNA, 19 nt, Artificial Sequence
  Description of Artificial Sequence: Synthetic oligonucleotide
  Antisense strand to SEQ ID NO: 185894
uauucccaacgcuacuccu

SEQ ID NO: 185896 - RNA, 19 nt, Artificial Sequence
  Description of Artificial Sequence: Synthetic oligonucleotide
  Sense strand starting at position 1841 of SEQ ID NO: 2396
guggaaugcuccuccaacu

SEQ ID NO: 185897 - RNA, 19 nt, Artificial Sequence
  Description of Artificial Sequence: Synthetic oligonucleotide
  Antisense strand to SEQ ID NO: 185896
aguuggaggagcauuccac

SEQ ID NO: 185898 - RNA, 19 nt, Artificial Sequence
  Description of Artificial Sequence: Synthetic oligonucleotide
  Sense strand starting at position 2019 of SEQ ID NO: 2396
uggaguuauuucuauggga

SEQ ID NO: 185899 - RNA, 19 nt, Artificial Sequence
  Description of Artificial Sequence: Synthetic oligonucleotide
  Antisense strand to SEQ ID NO: 185898
ucccauagaaauaacucca

SEQ ID NO: 185900 - RNA, 19 nt, Artificial Sequence
  Description of Artificial Sequence: Synthetic oligonucleotide
  Sense strand starting at position 2081 of SEQ ID NO: 2396
ccuaauuagcagggugaca

SEQ ID NO: 185901 - RNA, 19 nt, Artificial Sequence
  Description of Artificial Sequence: Synthetic oligonucleotide
  Antisense strand to SEQ ID NO: 185900
ugucacccugcuaauuagg

SEQ ID NO: 185902 - RNA, 19 nt, Artificial Sequence
  Description of Artificial Sequence: Synthetic oligonucleotide
  Sense strand starting at position 2446 of SEQ ID NO: 2396
caggccuccugagcugaaa

SEQ ID NO: 185903 - RNA, 19 nt, Artificial Sequence
  Description of Artificial Sequence: Synthetic oligonucleotide
  Antisense strand to SEQ ID NO: 185902
uuucagcucaggaggccug

SEQ ID NO: 185904 - RNA, 19 nt, Artificial Sequence
  Description of Artificial Sequence: Synthetic oligonucleotide
  Sense strand starting at position 2448 of SEQ ID NO: 2396
ggccuccugagcugaaaga

SEQ ID NO: 185905 - RNA, 19 nt, Artificial Sequence
  Description of Artificial Sequence: Synthetic oligonucleotide
  Antisense strand to SEQ ID NO: 185904
ucuuucagcucaggaggcc

SEQ ID NO: 185906 - RNA, 19 nt, Artificial Sequence
  Description of Artificial Sequence: Synthetic oligonucleotide
  Sense strand starting at position 2749 of SEQ ID NO: 2396
cagggugucucugugagga

SEQ ID NO: 185907 - RNA, 19 nt, Artificial Sequence
  Description of Artificial Sequence: Synthetic oligonucleotide
  Antisense strand to SEQ ID NO: 185906
uccucacagagacacccug

SEQ ID NO: 185908 - RNA, 19 nt, Artificial Sequence
  Description of Artificial Sequence: Synthetic oligonucleotide
  Sense strand starting at position 2815 of SEQ ID NO: 2396
uggcuucucugcccagaaa

SEQ ID NO: 185909 - RNA, 19 nt, Artificial Sequence
  Description of Artificial Sequence: Synthetic oligonucleotide
  Antisense strand to SEQ ID NO: 185908
uuucugggcagagaagcca

SEQ ID NO: 185910 - RNA, 19 nt, Artificial Sequence
  Description of Artificial Sequence: Synthetic oligonucleotide
  Sense strand starting at position 2840 of SEQ ID NO: 2396
ccaggucuugaggguuaau

SEQ ID NO: 185911 - RNA, 19 nt, Artificial Sequence
  Description of Artificial Sequence: Synthetic oligonucleotide
  Antisense strand to SEQ ID NO: 185910
auuaacccucaagaccugg

SEQ ID NO: 185912 - RNA, 19 nt, Artificial Sequence
  Description of Artificial Sequence: Synthetic oligonucleotide
  Sense strand starting at position 2843 of SEQ ID NO: 2396
ggucuugaggguuaaugca

SEQ ID NO: 185913 - RNA, 19 nt, Artificial Sequence
  Description of Artificial Sequence: Synthetic oligonucleotide
  Antisense strand to SEQ ID NO: 185912
ugcauuaacccucaagacc

SEQ ID NO: 185914 - RNA, 19 nt, Artificial Sequence
  Description of Artificial Sequence: Synthetic oligonucleotide
  Sense strand starting at position 2912 of SEQ ID NO: 2396
uggucaucgggcugacuaa

SEQ ID NO: 185915 - RNA, 19 nt, Artificial Sequence
  Description of Artificial Sequence: Synthetic oligonucleotide
  Antisense strand to SEQ ID NO: 185914
uuagucagcccgaugacca

SEQ ID NO: 185916 - RNA, 19 nt, Artificial Sequence
  Description of Artificial Sequence: Synthetic oligonucleotide
  Sense strand starting at position 2913 of SEQ ID NO: 2396
ggucaucgggcugacuaaa

SEQ ID NO: 185917 - RNA, 19 nt, Artificial Sequence
  Description of Artificial Sequence: Synthetic oligonucleotide
  Antisense strand to SEQ ID NO: 185916
uuuagucagcccgaugacc

SEQ ID NO: 185918 - RNA, 19 nt, Artificial Sequence
  Description of Artificial Sequence: Synthetic oligonucleotide
  Sense strand starting at position 2936 of SEQ ID NO: 2396
cacaguucuggguaaguuc

SEQ ID NO: 185919 - RNA, 19 nt, Artificial Sequence
  Description of Artificial Sequence: Synthetic oligonucleotide
  Antisense strand to SEQ ID NO: 185918
gaacuuacccagaacugug

SEQ ID NO: 185920 - RNA, 19 nt, Artificial Sequence
  Description of Artificial Sequence: Synthetic oligonucleotide
  Sense strand starting at position 3067 of SEQ ID NO: 2396
ggagucaggacaugaguga

SEQ ID NO: 185921 - RNA, 19 nt, Artificial Sequence
  Description of Artificial Sequence: Synthetic oligonucleotide
  Antisense strand to SEQ ID NO: 185920
ucacucauguccugacucc

SEQ ID NO: 185922 - RNA, 19 nt, Artificial Sequence
  Description of Artificial Sequence: Synthetic oligonucleotide
  Sense strand starting at position 3170 of SEQ ID NO: 2396
gaguguuagggagaguuau

SEQ ID NO: 185923 - RNA, 19 nt, Artificial Sequence
  Description of Artificial Sequence: Synthetic oligonucleotide
  Antisense strand to SEQ ID NO: 185922
auaacucucccuaacacuc

SEQ ID NO: 185924 - RNA, 19 nt, Artificial Sequence
  Description of Artificial Sequence: Synthetic oligonucleotide
  Sense strand starting at position 3317 of SEQ ID NO: 2396
cgcucugagaccuaccaga

SEQ ID NO: 185925 - RNA, 19 nt, Artificial Sequence
  Description of Artificial Sequence: Synthetic oligonucleotide
  Antisense strand to SEQ ID NO: 185924
ucugguaggucucagagcg

SEQ ID NO: 185926 - RNA, 19 nt, Artificial Sequence
  Description of Artificial Sequence: Synthetic oligonucleotide
  Sense strand starting at position 3514 of SEQ ID NO: 2396
ggugucaguccagagaggu

SEQ ID NO: 185927 - RNA, 19 nt, Artificial Sequence
  Description of Artificial Sequence: Synthetic oligonucleotide
  Antisense strand to SEQ ID NO: 185926
accucucuggacugacacc

SEQ ID NO: 185928 - RNA, 19 nt, Artificial Sequence
  Description of Artificial Sequence: Synthetic oligonucleotide
  Sense strand starting at position 3548 of SEQ ID NO: 2396
ggugauccuguggauuacu

SEQ ID NO: 185929 - RNA, 19 nt, Artificial Sequence
  Description of Artificial Sequence: Synthetic oligonucleotide
  Antisense strand to SEQ ID NO: 185928
aguaauccacaggaucacc

SEQ ID NO: 185930 - RNA, 19 nt, Artificial Sequence
  Description of Artificial Sequence: Synthetic oligonucleotide
  Sense strand starting at position 3711 of SEQ ID NO: 2396
cuggaugugggcuaauguu

SEQ ID NO: 185931 - RNA, 19 nt, Artificial Sequence
  Description of Artificial Sequence: Synthetic oligonucleotide
  Antisense strand to SEQ ID NO: 185930
aacauuagcccacauccag

SEQ ID NO: 185932 - RNA, 19 nt, Artificial Sequence
  Description of Artificial Sequence: Synthetic oligonucleotide
  Sense strand starting at position 3756 of SEQ ID NO: 2396
uugaauuaugaaugagguu

SEQ ID NO: 185933 - RNA, 19 nt, Artificial Sequence
  Description of Artificial Sequence: Synthetic oligonucleotide
  Antisense strand to SEQ ID NO: 185932
aaccucauucauaauucaa

SEQ ID NO: 185934 - RNA, 19 nt, Artificial Sequence
  Description of Artificial Sequence: Synthetic oligonucleotide
  Sense strand starting at position 3783 of SEQ ID NO: 2396
auuugagguugggauuaga

SEQ ID NO: 185935 - RNA, 19 nt, Artificial Sequence
  Description of Artificial Sequence: Synthetic oligonucleotide
  Antisense strand to SEQ ID NO: 185934
ucuaaucccaaccucaaau

SEQ ID NO: 185936 - RNA, 19 nt, Artificial Sequence
  Description of Artificial Sequence: Synthetic oligonucleotide
  Sense strand starting at position 3798 of SEQ ID NO: 2396
uagaguuaagguugggauu

SEQ ID NO: 185937 - RNA, 19 nt, Artificial Sequence
  Description of Artificial Sequence: Synthetic oligonucleotide
  Antisense strand to SEQ ID NO: 185936
aaucccaaccuuaacucua

SEQ ID NO: 185938 - RNA, 19 nt, Artificial Sequence
  Description of Artificial Sequence: Synthetic oligonucleotide
  Sense strand starting at position 3799 of SEQ ID NO: 2396
agaguuaagguugggauua

SEQ ID NO: 185939 - RNA, 19 nt, Artificial Sequence
  Description of Artificial Sequence: Synthetic oligonucleotide
  Antisense strand to SEQ ID NO: 185938
uaaucccaaccuuaacucu

SEQ ID NO: 185940 - RNA, 19 nt, Artificial Sequence
  Description of Artificial Sequence: Synthetic oligonucleotide
  Sense strand starting at position 3835 of SEQ ID NO: 2396
agaauugaggcucagguuu

SEQ ID NO: 185941 - RNA, 19 nt, Artificial Sequence
  Description of Artificial Sequence: Synthetic oligonucleotide
  Antisense strand to SEQ ID NO: 185940
aaaccugagccucaauucu

SEQ ID NO: 185942 - RNA, 19 nt, Artificial Sequence
  Description of Artificial Sequence: Synthetic oligonucleotide
  Sense strand starting at position 3846 of SEQ ID NO: 2396
ucagguuuauggcugggau

SEQ ID NO: 185943 - RNA, 19 nt, Artificial Sequence
  Description of Artificial Sequence: Synthetic oligonucleotide
  Antisense strand to SEQ ID NO: 185942
aucccagccauaaaccuga

SEQ ID NO: 185944 - RNA, 19 nt, Artificial Sequence
  Description of Artificial Sequence: Synthetic oligonucleotide
  Sense strand starting at position 3847 of SEQ ID NO: 2396
cagguuuauggcugggauu

SEQ ID NO: 185945 - RNA, 19 nt, Artificial Sequence
  Description of Artificial Sequence: Synthetic oligonucleotide
  Antisense strand to SEQ ID NO: 185944
aaucccagccauaaaccug

SEQ ID NO: 185946 - RNA, 19 nt, Artificial Sequence
  Description of Artificial Sequence: Synthetic oligonucleotide
  Sense strand starting at position 3854 of SEQ ID NO: 2396
auggcugggauuuguguua

SEQ ID NO: 185947 - RNA, 19 nt, Artificial Sequence
  Description of Artificial Sequence: Synthetic oligonucleotide
  Antisense strand to SEQ ID NO: 185946
uaacacaaaucccagccau

SEQ ID NO: 185948 - RNA, 19 nt, Artificial Sequence
  Description of Artificial Sequence: Synthetic oligonucleotide
  Sense strand starting at position 3901 of SEQ ID NO: 2396
uacagcucugccugggaau

SEQ ID NO: 185949 - RNA, 19 nt, Artificial Sequence
  Description of Artificial Sequence: Synthetic oligonucleotide
  Antisense strand to SEQ ID NO: 185948
auucccaggcagagcugua

SEQ ID NO: 185950 - RNA, 19 nt, Artificial Sequence
  Description of Artificial Sequence: Synthetic oligonucleotide
  Sense strand starting at position 3902 of SEQ ID NO: 2396
acagcucugccugggaaua

SEQ ID NO: 185951 - RNA, 19 nt, Artificial Sequence
  Description of Artificial Sequence: Synthetic oligonucleotide
  Antisense strand to SEQ ID NO: 185950
uauucccaggcagagcugu

SEQ ID NO: 185952 - RNA, 19 nt, Artificial Sequence
  Description of Artificial Sequence: Synthetic oligonucleotide
  Sense strand starting at position 3919 of SEQ ID NO: 2396
uacaguuagggcuaaauca

SEQ ID NO: 185953 - RNA, 19 nt, Artificial Sequence
  Description of Artificial Sequence: Synthetic oligonucleotide
  Antisense strand to SEQ ID NO: 185952
ugauuuagcccuaacugua

SEQ ID NO: 185954 - RNA, 19 nt, Artificial Sequence
  Description of Artificial Sequence: Synthetic oligonucleotide
  Sense strand starting at position 3958 of SEQ ID NO: 2396
uuagcauuggguuagaacu

SEQ ID NO: 185955 - RNA, 19 nt, Artificial Sequence
  Description of Artificial Sequence: Synthetic oligonucleotide
  Antisense strand to SEQ ID NO: 185954
aguucuaacccaaugcuaa

SEQ ID NO: 185956 - RNA, 19 nt, Artificial Sequence
  Description of Artificial Sequence: Synthetic oligonucleotide
  Sense strand starting at position 3964 of SEQ ID NO: 2396
uuggguuagaacuaaguuu

SEQ ID NO: 185957 - RNA, 19 nt, Artificial Sequence
  Description of Artificial Sequence: Synthetic oligonucleotide
  Antisense strand to SEQ ID NO: 185956
aaacuuaguucuaacccaa

SEQ ID NO: 185958 - RNA, 19 nt, Artificial Sequence
  Description of Artificial Sequence: Synthetic oligonucleotide
  Sense strand starting at position 3970 of SEQ ID NO: 2396
uagaacuaaguuugagauu

SEQ ID NO: 185959 - RNA, 19 nt, Artificial Sequence
  Description of Artificial Sequence: Synthetic oligonucleotide
  Antisense strand to SEQ ID NO: 185958
aaucucaaacuuaguucua

SEQ ID NO: 185960 - RNA, 19 nt, Artificial Sequence
  Description of Artificial Sequence: Synthetic oligonucleotide
  Sense strand starting at position 58 of SEQ ID NO: 2397
ggcaguuuccuuggaugag

SEQ ID NO: 185961 - RNA, 19 nt, Artificial Sequence
  Description of Artificial Sequence: Synthetic oligonucleotide
  Antisense strand to SEQ ID NO: 185960
cucauccaaggaaacugcc

SEQ ID NO: 185962 - RNA, 19 nt, Artificial Sequence
  Description of Artificial Sequence: Synthetic oligonucleotide
  Sense strand starting at position 195 of SEQ ID NO: 2397
ggcuccucuggaugugaaa

SEQ ID NO: 185963 - RNA, 19 nt, Artificial Sequence
  Description of Artificial Sequence: Synthetic oligonucleotide
  Antisense strand to SEQ ID NO: 185962
uuucacauccagaggagcc

SEQ ID NO: 185964 - RNA, 19 nt, Artificial Sequence
  Description of Artificial Sequence: Synthetic oligonucleotide
  Sense strand starting at position 305 of SEQ ID NO: 2397
ggauaauuguucucauacu

SEQ ID NO: 185965 - RNA, 19 nt, Artificial Sequence
  Description of Artificial Sequence: Synthetic oligonucleotide
  Antisense strand to SEQ ID NO: 185964
aguaugagaacaauuaucc

SEQ ID NO: 185966 - RNA, 19 nt, Artificial Sequence
  Description of Artificial Sequence: Synthetic oligonucleotide
  Sense strand starting at position 409 of SEQ ID NO: 2397
ccuuguaccugacuacaga

SEQ ID NO: 185967 - RNA, 19 nt, Artificial Sequence
  Description of Artificial Sequence: Synthetic oligonucleotide
  Antisense strand to SEQ ID NO: 185966
ucuguagucagguacaagg

SEQ ID NO: 185968 - RNA, 19 nt, Artificial Sequence
  Description of Artificial Sequence: Synthetic oligonucleotide
  Sense strand starting at position 511 of SEQ ID NO: 2397
gcuugaugucaggagugag

SEQ ID NO: 185969 - RNA, 19 nt, Artificial Sequence
  Description of Artificial Sequence: Synthetic oligonucleotide
  Antisense strand to SEQ ID NO: 185968
cucacuccugacaucaagc

SEQ ID NO: 185970 - RNA, 19 nt, Artificial Sequence
  Description of Artificial Sequence: Synthetic oligonucleotide
  Sense strand starting at position 554 of SEQ ID NO: 2397
uguagugucauggaaacca

SEQ ID NO: 185971 - RNA, 19 nt, Artificial Sequence
  Description of Artificial Sequence: Synthetic oligonucleotide
  Antisense strand to SEQ ID NO: 185970
ugguuuccaugacacuaca

SEQ ID NO: 185972 - RNA, 19 nt, Artificial Sequence
  Description of Artificial Sequence: Synthetic oligonucleotide
  Sense strand starting at position 600 of SEQ ID NO: 2397
ugaggacaucuguguugaa

SEQ ID NO: 185973 - RNA, 19 nt, Artificial Sequence
  Description of Artificial Sequence: Synthetic oligonucleotide
  Antisense strand to SEQ ID NO: 185972
uucaacacagauguccuca

SEQ ID NO: 185974 - RNA, 19 nt, Artificial Sequence
  Description of Artificial Sequence: Synthetic oligonucleotide
  Sense strand starting at position 655 of SEQ ID NO: 2397
acauuagacucagcaaugu

SEQ ID NO: 185975 - RNA, 19 nt, Artificial Sequence
  Description of Artificial Sequence: Synthetic oligonucleotide
  Antisense strand to SEQ ID NO: 185974
acauugcugagucuaaugu

SEQ ID NO: 185976 - RNA, 19 nt, Artificial Sequence
  Description of Artificial Sequence: Synthetic oligonucleotide
  Sense strand starting at position 665 of SEQ ID NO: 2397
cagcaauguggaggugauu

SEQ ID NO: 185977 - RNA, 19 nt, Artificial Sequence
  Description of Artificial Sequence: Synthetic oligonucleotide
  Antisense strand to SEQ ID NO: 185976
aaucaccuccacauugcug

SEQ ID NO: 185978 - RNA, 19 nt, Artificial Sequence
  Description of Artificial Sequence: Synthetic oligonucleotide
  Sense strand starting at position 699 of SEQ ID NO: 2397
aacaguaucuugguauagu

SEQ ID NO: 185979 - RNA, 19 nt, Artificial Sequence
  Description of Artificial Sequence: Synthetic oligonucleotide
  Antisense strand to SEQ ID NO: 185978
acuauaccaagauacuguu

SEQ ID NO: 185980 - RNA, 19 nt, Artificial Sequence
  Description of Artificial Sequence: Synthetic oligonucleotide
  Sense strand starting at position 730 of SEQ ID NO: 2397
caucuagaguaaguugaaa

SEQ ID NO: 185981 - RNA, 19 nt, Artificial Sequence
  Description of Artificial Sequence: Synthetic oligonucleotide
  Antisense strand to SEQ ID NO: 185980
uuucaacuuacucuagaug

SEQ ID NO: 185982 - RNA, 19 nt, Artificial Sequence
  Description of Artificial Sequence: Synthetic oligonucleotide
  Sense strand starting at position 764 of SEQ ID NO: 2397
gcugcuaagcgcuuuaugu

SEQ ID NO: 185983 - RNA, 19 nt, Artificial Sequence
  Description of Artificial Sequence: Synthetic oligonucleotide
  Antisense strand to SEQ ID NO: 185982
acauaaagcgcuuagcagc

SEQ ID NO: 185984 - RNA, 19 nt, Artificial Sequence
  Description of Artificial Sequence: Synthetic oligonucleotide
  Sense strand starting at position 809 of SEQ ID NO: 2397
ucuuaugauguagauucua

SEQ ID NO: 185985 - RNA, 19 nt, Artificial Sequence
  Description of Artificial Sequence: Synthetic oligonucleotide
  Antisense strand to SEQ ID NO: 185984
uagaaucuacaucauaaga

SEQ ID NO: 185986 - RNA, 19 nt, Artificial Sequence
  Description of Artificial Sequence: Synthetic oligonucleotide
  Sense strand starting at position 1242 of SEQ ID NO: 2397
uugauaggagcucagcaaa

SEQ ID NO: 185987 - RNA, 19 nt, Artificial Sequence
  Description of Artificial Sequence: Synthetic oligonucleotide
  Antisense strand to SEQ ID NO: 185986
uuugcugagcuccuaucaa

SEQ ID NO: 185988 - RNA, 19 nt, Artificial Sequence
  Description of Artificial Sequence: Synthetic oligonucleotide
  Sense strand starting at position 1252 of SEQ ID NO: 2397
cucagcaaauccucuggua

SEQ ID NO: 185989 - RNA, 19 nt, Artificial Sequence
  Description of Artificial Sequence: Synthetic oligonucleotide
  Antisense strand to SEQ ID NO: 185988
uaccagaggauuugcugag

SEQ ID NO: 185990 - RNA, 19 nt, Artificial Sequence
  Description of Artificial Sequence: Synthetic oligonucleotide
  Sense strand starting at position 1453 of SEQ ID NO: 2397
agagguaugaaauggccau

SEQ ID NO: 185991 - RNA, 19 nt, Artificial Sequence
  Description of Artificial Sequence: Synthetic oligonucleotide
  Antisense strand to SEQ ID NO: 185990
auggccauuucauaccucu

SEQ ID NO: 185992 - RNA, 19 nt, Artificial Sequence
  Description of Artificial Sequence: Synthetic oligonucleotide
  Sense strand starting at position 1690 of SEQ ID NO: 2397
agugaugugauaggaaauc

SEQ ID NO: 185993 - RNA, 19 nt, Artificial Sequence
  Description of Artificial Sequence: Synthetic oligonucleotide
  Antisense strand to SEQ ID NO: 185992
gauuuccuaucacaucacu

SEQ ID NO: 185994 - RNA, 19 nt, Artificial Sequence
  Description of Artificial Sequence: Synthetic oligonucleotide
  Sense strand starting at position 1726 of SEQ ID NO: 2397
augguuugggauugugaaa

SEQ ID NO: 185995 - RNA, 19 nt, Artificial Sequence
  Description of Artificial Sequence: Synthetic oligonucleotide
  Antisense strand to SEQ ID NO: 185994
uuucacaaucccaaaccau

SEQ ID NO: 185996 - RNA, 19 nt, Artificial Sequence
  Description of Artificial Sequence: Synthetic oligonucleotide
  Sense strand starting at position 1770 of SEQ ID NO: 2397
uggguuucuuaccuguaga

SEQ ID NO: 185997 - RNA, 19 nt, Artificial Sequence
  Description of Artificial Sequence: Synthetic oligonucleotide
  Antisense strand to SEQ ID NO: 185996
ucuacagguaagaaaccca

SEQ ID NO: 185998 - RNA, 19 nt, Artificial Sequence
  Description of Artificial Sequence: Synthetic oligonucleotide
  Sense strand starting at position 1771 of SEQ ID NO: 2397
ggguuucuuaccuguagaa

SEQ ID NO: 185999 - RNA, 19 nt, Artificial Sequence
  Description of Artificial Sequence: Synthetic oligonucleotide
  Antisense strand to SEQ ID NO: 185998
uucuacagguaagaaaccc

SEQ ID NO: 186000 - RNA, 19 nt, Artificial Sequence
  Description of Artificial Sequence: Synthetic oligonucleotide
  Sense strand starting at position 1773 of SEQ ID NO: 2397
guuucuuaccuguagaaac

SEQ ID NO: 186001 - RNA, 19 nt, Artificial Sequence
  Description of Artificial Sequence: Synthetic oligonucleotide
  Antisense strand to SEQ ID NO: 186000
guuucuacagguaagaaac

SEQ ID NO: 186002 - RNA, 19 nt, Artificial Sequence
  Description of Artificial Sequence: Synthetic oligonucleotide
  Sense strand starting at position 1978 of SEQ ID NO: 2397
cuuguuacgccacagauua

SEQ ID NO: 186003 - RNA, 19 nt, Artificial Sequence
  Description of Artificial Sequence: Synthetic oligonucleotide
  Antisense strand to SEQ ID NO: 186002
uaaucuguggcguaacaag

SEQ ID NO: 186004 - RNA, 19 nt, Artificial Sequence
  Description of Artificial Sequence: Synthetic oligonucleotide
  Sense strand starting at position 2017 of SEQ ID NO: 2397
uucugauucuuugcaggau

SEQ ID NO: 186005 - RNA, 19 nt, Artificial Sequence
  Description of Artificial Sequence: Synthetic oligonucleotide
  Antisense strand to SEQ ID NO: 186004
auccugcaaagaaucagaa

SEQ ID NO: 186006 - RNA, 19 nt, Artificial Sequence
  Description of Artificial Sequence: Synthetic oligonucleotide
  Sense strand starting at position 2103 of SEQ ID NO: 2397
uacuuugaacaucgaguuu

SEQ ID NO: 186007 - RNA, 19 nt, Artificial Sequence
  Description of Artificial Sequence: Synthetic oligonucleotide
  Antisense strand to SEQ ID NO: 186006
aaacucgauguucaaagua

SEQ ID NO: 186008 - RNA, 19 nt, Artificial Sequence
  Description of Artificial Sequence: Synthetic oligonucleotide
  Sense strand starting at position 2200 of SEQ ID NO: 2397
cuagaaagacgaugucuga

SEQ ID NO: 186009 - RNA, 19 nt, Artificial Sequence
  Description of Artificial Sequence: Synthetic oligonucleotide
  Antisense strand to SEQ ID NO: 186008
ucagacaucgucuuucuag

SEQ ID NO: 186010 - RNA, 19 nt, Artificial Sequence
  Description of Artificial Sequence: Synthetic oligonucleotide
  Sense strand starting at position 2210 of SEQ ID NO: 2397
gaugucugaguccauugaa

SEQ ID NO: 186011 - RNA, 19 nt, Artificial Sequence
  Description of Artificial Sequence: Synthetic oligonucleotide
  Antisense strand to SEQ ID NO: 186010
uucaauggacucagacauc

SEQ ID NO: 186012 - RNA, 19 nt, Artificial Sequence
  Description of Artificial Sequence: Synthetic oligonucleotide
  Sense strand starting at position 2213 of SEQ ID NO: 2397
gucugaguccauugaaauc

SEQ ID NO: 186013 - RNA, 19 nt, Artificial Sequence
  Description of Artificial Sequence: Synthetic oligonucleotide
  Antisense strand to SEQ ID NO: 186012
gauuucaauggacucagac

SEQ ID NO: 186014 - RNA, 19 nt, Artificial Sequence
  Description of Artificial Sequence: Synthetic oligonucleotide
  Sense strand starting at position 2468 of SEQ ID NO: 2397
ccaauuuacugauaaggua

SEQ ID NO: 186015 - RNA, 19 nt, Artificial Sequence
  Description of Artificial Sequence: Synthetic oligonucleotide
  Antisense strand to SEQ ID NO: 186014
uaccuuaucaguaaauugg

SEQ ID NO: 186016 - RNA, 19 nt, Artificial Sequence
  Description of Artificial Sequence: Synthetic oligonucleotide
  Sense strand starting at position 2505 of SEQ ID NO: 2397
uaaguaacuuccuugaggu

SEQ ID NO: 186017 - RNA, 19 nt, Artificial Sequence
  Description of Artificial Sequence: Synthetic oligonucleotide
  Antisense strand to SEQ ID NO: 186016
accucaaggaaguuacuua

SEQ ID NO: 186018 - RNA, 19 nt, Artificial Sequence
  Description of Artificial Sequence: Synthetic oligonucleotide
  Sense strand starting at position 2506 of SEQ ID NO: 2397
aaguaacuuccuugagguc

SEQ ID NO: 186019 - RNA, 19 nt, Artificial Sequence
  Description of Artificial Sequence: Synthetic oligonucleotide
  Antisense strand to SEQ ID NO: 186018
gaccucaaggaaguuacuu

SEQ ID NO: 186020 - RNA, 19 nt, Artificial Sequence
  Description of Artificial Sequence: Synthetic oligonucleotide
  Sense strand starting at position 2627 of SEQ ID NO: 2397
aagucuuggucucucagau

SEQ ID NO: 186021 - RNA, 19 nt, Artificial Sequence
  Description of Artificial Sequence: Synthetic oligonucleotide
  Antisense strand to SEQ ID NO: 186020
aucugagagaccaagacuu

SEQ ID NO: 186022 - RNA, 19 nt, Artificial Sequence
  Description of Artificial Sequence: Synthetic oligonucleotide
  Sense strand starting at position 3071 of SEQ ID NO: 2397
auguauggcccuuggacaa

SEQ ID NO: 186023 - RNA, 19 nt, Artificial Sequence
  Description of Artificial Sequence: Synthetic oligonucleotide
  Antisense strand to SEQ ID NO: 186022
uuguccaagggccauacau

SEQ ID NO: 186024 - RNA, 19 nt, Artificial Sequence
  Description of Artificial Sequence: Synthetic oligonucleotide
  Sense strand starting at position 3084 of SEQ ID NO: 2397
ggacaagcugccuacuuua

SEQ ID NO: 186025 - RNA, 19 nt, Artificial Sequence
  Description of Artificial Sequence: Synthetic oligonucleotide
  Antisense strand to SEQ ID NO: 186024
uaaaguaggcagcuugucc

SEQ ID NO: 186026 - RNA, 19 nt, Artificial Sequence
  Description of Artificial Sequence: Synthetic oligonucleotide
  Sense strand starting at position 3131 of SEQ ID NO: 2397
uguacugacuuucugaacu

SEQ ID NO: 186027 - RNA, 19 nt, Artificial Sequence
  Description of Artificial Sequence: Synthetic oligonucleotide
  Antisense strand to SEQ ID NO: 186026
aguucagaaagucaguaca

SEQ ID NO: 186028 - RNA, 19 nt, Artificial Sequence
  Description of Artificial Sequence: Synthetic oligonucleotide
  Sense strand starting at position 3816 of SEQ ID NO: 2397
aaggguucugcuuaacuag

SEQ ID NO: 186029 - RNA, 19 nt, Artificial Sequence
  Description of Artificial Sequence: Synthetic oligonucleotide
  Antisense strand to SEQ ID NO: 186028
cuaguuaagcagaacccuu

SEQ ID NO: 186030 - RNA, 19 nt, Artificial Sequence
  Description of Artificial Sequence: Synthetic oligonucleotide
  Sense strand starting at position 3851 of SEQ ID NO: 2397
gcugauuagaaagguaauu

SEQ ID NO: 186031 - RNA, 19 nt, Artificial Sequence
  Description of Artificial Sequence: Synthetic oligonucleotide
  Antisense strand to SEQ ID NO: 186030
aauuaccuuucuaaucagc

SEQ ID NO: 186032 - RNA, 19 nt, Artificial Sequence
  Description of Artificial Sequence: Synthetic oligonucleotide
  Sense strand starting at position 3922 of SEQ ID NO: 2397
auuggcugccuaggagaua

SEQ ID NO: 186033 - RNA, 19 nt, Artificial Sequence
  Description of Artificial Sequence: Synthetic oligonucleotide
  Antisense strand to SEQ ID NO: 186032
uaucuccuaggcagccaau

SEQ ID NO: 186034 - RNA, 19 nt, Artificial Sequence
  Description of Artificial Sequence: Synthetic oligonucleotide
  Sense strand starting at position 3933 of SEQ ID NO: 2397
aggagauauugagcaaggu

SEQ ID NO: 186035 - RNA, 19 nt, Artificial Sequence
  Description of Artificial Sequence: Synthetic oligonucleotide
  Antisense strand to SEQ ID NO: 186034
accuugcucaauaucuccu

SEQ ID NO: 186036 - RNA, 19 nt, Artificial Sequence
  Description of Artificial Sequence: Synthetic oligonucleotide
  Sense strand starting at position 3937 of SEQ ID NO: 2397
gauauugagcaagguaacu

SEQ ID NO: 186037 - RNA, 19 nt, Artificial Sequence
  Description of Artificial Sequence: Synthetic oligonucleotide
  Antisense strand to SEQ ID NO: 186036
aguuaccuugcucaauauc

SEQ ID NO: 186038 - RNA, 19 nt, Artificial Sequence
  Description of Artificial Sequence: Synthetic oligonucleotide
  Sense strand starting at position 3949 of SEQ ID NO: 2397
gguaacuugccucaacauu

SEQ ID NO: 186039 - RNA, 19 nt, Artificial Sequence
  Description of Artificial Sequence: Synthetic oligonucleotide
  Antisense strand to SEQ ID NO: 186038
aauguugaggcaaguuacc

SEQ ID NO: 186040 - RNA, 19 nt, Artificial Sequence
  Description of Artificial Sequence: Synthetic oligonucleotide
  Sense strand starting at position 7 of SEQ ID NO: 2398
gguuauuagggucaagagu

SEQ ID NO: 186041 - RNA, 19 nt, Artificial Sequence
  Description of Artificial Sequence: Synthetic oligonucleotide
  Antisense strand to SEQ ID NO: 186040
acucuugacccuaauaacc

SEQ ID NO: 186042 - RNA, 19 nt, Artificial Sequence
  Description of Artificial Sequence: Synthetic oligonucleotide
  Sense strand starting at position 41 of SEQ ID NO: 2398
ccaccugcaucccugagau

SEQ ID NO: 186043 - RNA, 19 nt, Artificial Sequence
  Description of Artificial Sequence: Synthetic oligonucleotide
  Antisense strand to SEQ ID NO: 186042
aucucagggaugcaggugg

SEQ ID NO: 186044 - RNA, 19 nt, Artificial Sequence
  Description of Artificial Sequence: Synthetic oligonucleotide
  Sense strand starting at position 43 of SEQ ID NO: 2398
accugcaucccugagauga

SEQ ID NO: 186045 - RNA, 19 nt, Artificial Sequence
  Description of Artificial Sequence: Synthetic oligonucleotide
  Antisense strand to SEQ ID NO: 186044
ucaucucagggaugcaggu

SEQ ID NO: 186046 - RNA, 19 nt, Artificial Sequence
  Description of Artificial Sequence: Synthetic oligonucleotide
  Sense strand starting at position 209 of SEQ ID NO: 2398
agaggagucucuguugauu

SEQ ID NO: 186047 - RNA, 19 nt, Artificial Sequence
  Description of Artificial Sequence: Synthetic oligonucleotide
  Antisense strand to SEQ ID NO: 186046
aaucaacagagacuccucu

SEQ ID NO: 186048 - RNA, 19 nt, Artificial Sequence
  Description of Artificial Sequence: Synthetic oligonucleotide
  Sense strand starting at position 309 of SEQ ID NO: 2398
gaugcaaagcauuacgaga

SEQ ID NO: 186049 - RNA, 19 nt, Artificial Sequence
  Description of Artificial Sequence: Synthetic oligonucleotide
  Antisense strand to SEQ ID NO: 186048
ucucguaaugcuuugcauc

SEQ ID NO: 186050 - RNA, 19 nt, Artificial Sequence
  Description of Artificial Sequence: Synthetic oligonucleotide
  Sense strand starting at position 516 of SEQ ID NO: 2398
acagucaucuggccuuaac

SEQ ID NO: 186051 - RNA, 19 nt, Artificial Sequence
  Description of Artificial Sequence: Synthetic oligonucleotide
  Antisense strand to SEQ ID NO: 186050
guuaaggccagaugacugu

SEQ ID NO: 186052 - RNA, 19 nt, Artificial Sequence
  Description of Artificial Sequence: Synthetic oligonucleotide
  Sense strand starting at position 527 of SEQ ID NO: 2398
gccuuaacuucucugaggu

SEQ ID NO: 186053 - RNA, 19 nt, Artificial Sequence
  Description of Artificial Sequence: Synthetic oligonucleotide
  Antisense strand to SEQ ID NO: 186052
accucagagaaguuaaggc

SEQ ID NO: 186054 - RNA, 19 nt, Artificial Sequence
  Description of Artificial Sequence: Synthetic oligonucleotide
  Sense strand starting at position 528 of SEQ ID NO: 2398
ccuuaacuucucugaggug

SEQ ID NO: 186055 - RNA, 19 nt, Artificial Sequence
  Description of Artificial Sequence: Synthetic oligonucleotide
  Antisense strand to SEQ ID NO: 186054
caccucagagaaguuaagg

SEQ ID NO: 186056 - RNA, 19 nt, Artificial Sequence
  Description of Artificial Sequence: Synthetic oligonucleotide
  Sense strand starting at position 540 of SEQ ID NO: 2398
ugaggugauaacgagucuu

SEQ ID NO: 186057 - RNA, 19 nt, Artificial Sequence
  Description of Artificial Sequence: Synthetic oligonucleotide
  Antisense strand to SEQ ID NO: 186056
aagacucguuaucaccuca

SEQ ID NO: 186058 - RNA, 19 nt, Artificial Sequence
  Description of Artificial Sequence: Synthetic oligonucleotide
  Sense strand starting at position 827 of SEQ ID NO: 2398
agauaaacgugagucgagu

SEQ ID NO: 186059 - RNA, 19 nt, Artificial Sequence
  Description of Artificial Sequence: Synthetic oligonucleotide
  Antisense strand to SEQ ID NO: 186058
acucgacucacguuuaucu

SEQ ID NO: 186060 - RNA, 19 nt, Artificial Sequence
  Description of Artificial Sequence: Synthetic oligonucleotide
  Sense strand starting at position 891 of SEQ ID NO: 2398
gccucugggaaguaacauu

SEQ ID NO: 186061 - RNA, 19 nt, Artificial Sequence
  Description of Artificial Sequence: Synthetic oligonucleotide
  Antisense strand to SEQ ID NO: 186060
aauguuacuucccagaggc

SEQ ID NO: 186062 - RNA, 19 nt, Artificial Sequence
  Description of Artificial Sequence: Synthetic oligonucleotide
  Sense strand starting at position 1077 of SEQ ID NO: 2398
cugaguugugacugacacu

SEQ ID NO: 186063 - RNA, 19 nt, Artificial Sequence
  Description of Artificial Sequence: Synthetic oligonucleotide
  Antisense strand to SEQ ID NO: 186062
agugucagucacaacucag

SEQ ID NO: 186064 - RNA, 19 nt, Artificial Sequence
  Description of Artificial Sequence: Synthetic oligonucleotide
  Sense strand starting at position 1149 of SEQ ID NO: 2398
gguaaaugcuguucugagg

SEQ ID NO: 186065 - RNA, 19 nt, Artificial Sequence
  Description of Artificial Sequence: Synthetic oligonucleotide
  Antisense strand to SEQ ID NO: 186064
ccucagaacagcauuuacc

SEQ ID NO: 186066 - RNA, 19 nt, Artificial Sequence
  Description of Artificial Sequence: Synthetic oligonucleotide
  Sense strand starting at position 1355 of SEQ ID NO: 2398
gguguuggugugaauugcu

SEQ ID NO: 186067 - RNA, 19 nt, Artificial Sequence
  Description of Artificial Sequence: Synthetic oligonucleotide
  Antisense strand to SEQ ID NO: 186066
agcaauucacaccaacacc

SEQ ID NO: 186068 - RNA, 19 nt, Artificial Sequence
  Description of Artificial Sequence: Synthetic oligonucleotide
  Sense strand starting at position 1360 of SEQ ID NO: 2398
uggugugaauugcucaaga

SEQ ID NO: 186069 - RNA, 19 nt, Artificial Sequence
  Description of Artificial Sequence: Synthetic oligonucleotide
  Antisense strand to SEQ ID NO: 186068
ucuugagcaauucacacca

SEQ ID NO: 186070 - RNA, 19 nt, Artificial Sequence
  Description of Artificial Sequence: Synthetic oligonucleotide
  Sense strand starting at position 1362 of SEQ ID NO: 2398
gugugaauugcucaagagu

SEQ ID NO: 186071 - RNA, 19 nt, Artificial Sequence
  Description of Artificial Sequence: Synthetic oligonucleotide
  Antisense strand to SEQ ID NO: 186070
acucuugagcaauucacac

SEQ ID NO: 186072 - RNA, 19 nt, Artificial Sequence
  Description of Artificial Sequence: Synthetic oligonucleotide
  Sense strand starting at position 1683 of SEQ ID NO: 2398
gugggauguuaagucaaau

SEQ ID NO: 186073 - RNA, 19 nt, Artificial Sequence
  Description of Artificial Sequence: Synthetic oligonucleotide
  Antisense strand to SEQ ID NO: 186072
auuugacuuaacaucccac

SEQ ID NO: 186074 - RNA, 19 nt, Artificial Sequence
  Description of Artificial Sequence: Synthetic oligonucleotide
  Sense strand starting at position 1735 of SEQ ID NO: 2398
ggcccaaugcuggaucaga

SEQ ID NO: 186075 - RNA, 19 nt, Artificial Sequence
  Description of Artificial Sequence: Synthetic oligonucleotide
  Antisense strand to SEQ ID NO: 186074
ucugauccagcauugggcc

SEQ ID NO: 186076 - RNA, 19 nt, Artificial Sequence
  Description of Artificial Sequence: Synthetic oligonucleotide
  Sense strand starting at position 1852 of SEQ ID NO: 2398
aguauauacuaccuccaga

SEQ ID NO: 186077 - RNA, 19 nt, Artificial Sequence
  Description of Artificial Sequence: Synthetic oligonucleotide
  Antisense strand to SEQ ID NO: 186076
ucuggagguaguauauacu

SEQ ID NO: 186078 - RNA, 19 nt, Artificial Sequence
  Description of Artificial Sequence: Synthetic oligonucleotide
  Sense strand starting at position 1979 of SEQ ID NO: 2398
guguauuggccuuaaauag

SEQ ID NO: 186079 - RNA, 19 nt, Artificial Sequence
  Description of Artificial Sequence: Synthetic oligonucleotide
  Antisense strand to SEQ ID NO: 186078
cuauuuaaggccaauacac

SEQ ID NO: 186080 - RNA, 19 nt, Artificial Sequence
  Description of Artificial Sequence: Synthetic oligonucleotide
  Sense strand starting at position 2375 of SEQ ID NO: 2398
aggucucucguggaggaga

SEQ ID NO: 186081 - RNA, 19 nt, Artificial Sequence
  Description of Artificial Sequence: Synthetic oligonucleotide
  Antisense strand to SEQ ID NO: 186080
ucuccuccacgagagaccu

SEQ ID NO: 186082 - RNA, 19 nt, Artificial Sequence
  Description of Artificial Sequence: Synthetic oligonucleotide
  Sense strand starting at position 2432 of SEQ ID NO: 2398
ugacaagaccacugaguuu

SEQ ID NO: 186083 - RNA, 19 nt, Artificial Sequence
  Description of Artificial Sequence: Synthetic oligonucleotide
  Antisense strand to SEQ ID NO: 186082
aaacucaguggucuuguca

SEQ ID NO: 186084 - RNA, 19 nt, Artificial Sequence
  Description of Artificial Sequence: Synthetic oligonucleotide
  Sense strand starting at position 2443 of SEQ ID NO: 2398
cugaguuugucacucaaga

SEQ ID NO: 186085 - RNA, 19 nt, Artificial Sequence
  Description of Artificial Sequence: Synthetic oligonucleotide
  Antisense strand to SEQ ID NO: 186084
ucuugagugacaaacucag

SEQ ID NO: 186086 - RNA, 19 nt, Artificial Sequence
  Description of Artificial Sequence: Synthetic oligonucleotide
  Sense strand starting at position 2451 of SEQ ID NO: 2398
gucacucaagacugaacuu

SEQ ID NO: 186087 - RNA, 19 nt, Artificial Sequence
  Description of Artificial Sequence: Synthetic oligonucleotide
  Antisense strand to SEQ ID NO: 186086
aaguucagucuugagugac

SEQ ID NO: 186088 - RNA, 19 nt, Artificial Sequence
  Description of Artificial Sequence: Synthetic oligonucleotide
  Sense strand starting at position 2468 of SEQ ID NO: 2398
uugccuaggucuccugaga

SEQ ID NO: 186089 - RNA, 19 nt, Artificial Sequence
  Description of Artificial Sequence: Synthetic oligonucleotide
  Antisense strand to SEQ ID NO: 186088
ucucaggagaccuaggcaa

SEQ ID NO: 186090 - RNA, 19 nt, Artificial Sequence
  Description of Artificial Sequence: Synthetic oligonucleotide
  Sense strand starting at position 2652 of SEQ ID NO: 2398
gucaaaggugaguggguua

SEQ ID NO: 186091 - RNA, 19 nt, Artificial Sequence
  Description of Artificial Sequence: Synthetic oligonucleotide
  Antisense strand to SEQ ID NO: 186090
uaacccacucaccuuugac

SEQ ID NO: 186092 - RNA, 19 nt, Artificial Sequence
  Description of Artificial Sequence: Synthetic oligonucleotide
  Sense strand starting at position 2657 of SEQ ID NO: 2398
aggugaguggguuagcaaa

SEQ ID NO: 186093 - RNA, 19 nt, Artificial Sequence
  Description of Artificial Sequence: Synthetic oligonucleotide
  Antisense strand to SEQ ID NO: 186092
uuugcuaacccacucaccu

SEQ ID NO: 186094 - RNA, 19 nt, Artificial Sequence
  Description of Artificial Sequence: Synthetic oligonucleotide
  Sense strand starting at position 2709 of SEQ ID NO: 2398
uaggcaagauucucguuaa

SEQ ID NO: 186095 - RNA, 19 nt, Artificial Sequence
  Description of Artificial Sequence: Synthetic oligonucleotide
  Antisense strand to SEQ ID NO: 186094
uuaacgagaaucuugccua

SEQ ID NO: 186096 - RNA, 19 nt, Artificial Sequence
  Description of Artificial Sequence: Synthetic oligonucleotide
  Sense strand starting at position 2798 of SEQ ID NO: 2398
guaccuuggaugggaaagu

SEQ ID NO: 186097 - RNA, 19 nt, Artificial Sequence
  Description of Artificial Sequence: Synthetic oligonucleotide
  Antisense strand to SEQ ID NO: 186096
acuuucccauccaagguac

SEQ ID NO: 186098 - RNA, 19 nt, Artificial Sequence
  Description of Artificial Sequence: Synthetic oligonucleotide
  Sense strand starting at position 2923 of SEQ ID NO: 2398
uggagcaaccauugaguaa

SEQ ID NO: 186099 - RNA, 19 nt, Artificial Sequence
  Description of Artificial Sequence: Synthetic oligonucleotide
  Antisense strand to SEQ ID NO: 186098
uuacucaaugguugcucca

SEQ ID NO: 186100 - RNA, 19 nt, Artificial Sequence
  Description of Artificial Sequence: Synthetic oligonucleotide
  Sense strand starting at position 2926 of SEQ ID NO: 2398
agcaaccauugaguaaaga

SEQ ID NO: 186101 - RNA, 19 nt, Artificial Sequence
  Description of Artificial Sequence: Synthetic oligonucleotide
  Antisense strand to SEQ ID NO: 186100
ucuuuacucaaugguugcu

SEQ ID NO: 186102 - RNA, 19 nt, Artificial Sequence
  Description of Artificial Sequence: Synthetic oligonucleotide
  Sense strand starting at position 3036 of SEQ ID NO: 2398
auuccuggguuccuaauua

SEQ ID NO: 186103 - RNA, 19 nt, Artificial Sequence
  Description of Artificial Sequence: Synthetic oligonucleotide
  Antisense strand to SEQ ID NO: 186102
uaauuaggaacccaggaau

SEQ ID NO: 186104 - RNA, 19 nt, Artificial Sequence
  Description of Artificial Sequence: Synthetic oligonucleotide
  Sense strand starting at position 3040 of SEQ ID NO: 2398
cuggguuccuaauuaauca

SEQ ID NO: 186105 - RNA, 19 nt, Artificial Sequence
  Description of Artificial Sequence: Synthetic oligonucleotide
  Antisense strand to SEQ ID NO: 186104
ugauuaauuaggaacccag

SEQ ID NO: 186106 - RNA, 19 nt, Artificial Sequence
  Description of Artificial Sequence: Synthetic oligonucleotide
  Sense strand starting at position 3061 of SEQ ID NO: 2398
uggcuuugagaacaucacu

SEQ ID NO: 186107 - RNA, 19 nt, Artificial Sequence
  Description of Artificial Sequence: Synthetic oligonucleotide
  Antisense strand to SEQ ID NO: 186106
agugauguucucaaagcca

SEQ ID NO: 186108 - RNA, 19 nt, Artificial Sequence
  Description of Artificial Sequence: Synthetic oligonucleotide
  Sense strand starting at position 3103 of SEQ ID NO: 2398
gguugcagugagggauaaa

SEQ ID NO: 186109 - RNA, 19 nt, Artificial Sequence
  Description of Artificial Sequence: Synthetic oligonucleotide
  Antisense strand to SEQ ID NO: 186108
uuuaucccucacugcaacc

SEQ ID NO: 186110 - RNA, 19 nt, Artificial Sequence
  Description of Artificial Sequence: Synthetic oligonucleotide
  Sense strand starting at position 3104 of SEQ ID NO: 2398
guugcagugagggauaaau

SEQ ID NO: 186111 - RNA, 19 nt, Artificial Sequence
  Description of Artificial Sequence: Synthetic oligonucleotide
  Antisense strand to SEQ ID NO: 186110
auuuaucccucacugcaac

SEQ ID NO: 186112 - RNA, 19 nt, Artificial Sequence
  Description of Artificial Sequence: Synthetic oligonucleotide
  Sense strand starting at position 3119 of SEQ ID NO: 2398
aaaugagaggcgggucuau

SEQ ID NO: 186113 - RNA, 19 nt, Artificial Sequence
  Description of Artificial Sequence: Synthetic oligonucleotide
  Antisense strand to SEQ ID NO: 186112
auagacccgccucucauuu

SEQ ID NO: 186114 - RNA, 19 nt, Artificial Sequence
  Description of Artificial Sequence: Synthetic oligonucleotide
  Sense strand starting at position 3166 of SEQ ID NO: 2398
gggugaugcccuggaaucu

SEQ ID NO: 186115 - RNA, 19 nt, Artificial Sequence
  Description of Artificial Sequence: Synthetic oligonucleotide
  Antisense strand to SEQ ID NO: 186114
agauuccagggcaucaccc

SEQ ID NO: 186116 - RNA, 19 nt, Artificial Sequence
  Description of Artificial Sequence: Synthetic oligonucleotide
  Sense strand starting at position 3167 of SEQ ID NO: 2398
ggugaugcccuggaaucua

SEQ ID NO: 186117 - RNA, 19 nt, Artificial Sequence
  Description of Artificial Sequence: Synthetic oligonucleotide
  Antisense strand to SEQ ID NO: 186116
uagauuccagggcaucacc

SEQ ID NO: 186118 - RNA, 19 nt, Artificial Sequence
  Description of Artificial Sequence: Synthetic oligonucleotide
  Sense strand starting at position 3186 of SEQ ID NO: 2398
ugcagugccagugcugaau

SEQ ID NO: 186119 - RNA, 19 nt, Artificial Sequence
  Description of Artificial Sequence: Synthetic oligonucleotide
  Antisense strand to SEQ ID NO: 186118
auucagcacuggcacugca

SEQ ID NO: 186120 - RNA, 19 nt, Artificial Sequence
  Description of Artificial Sequence: Synthetic oligonucleotide
  Sense strand starting at position 3514 of SEQ ID NO: 2399
ucuucuuggcugugacuca

SEQ ID NO: 186121 - RNA, 19 nt, Artificial Sequence
  Description of Artificial Sequence: Synthetic oligonucleotide
  Antisense strand to SEQ ID NO: 186120
ugagucacagccaagaaga

SEQ ID NO: 186122 - RNA, 19 nt, Artificial Sequence
  Description of Artificial Sequence: Synthetic oligonucleotide
  Sense strand starting at position 3479 of SEQ ID NO: 2399
ggaaguuucccucacuucu

SEQ ID NO: 186123 - RNA, 19 nt, Artificial Sequence
  Description of Artificial Sequence: Synthetic oligonucleotide
  Antisense strand to SEQ ID NO: 186122
agaagugagggaaacuucc

SEQ ID NO: 186124 - RNA, 19 nt, Artificial Sequence
  Description of Artificial Sequence: Synthetic oligonucleotide
  Sense strand starting at position 3140 of SEQ ID NO: 2399
ccagaaaugccuggugcuu

SEQ ID NO: 186125 - RNA, 19 nt, Artificial Sequence
  Description of Artificial Sequence: Synthetic oligonucleotide
  Antisense strand to SEQ ID NO: 186124
aagcaccaggcauuucugg

SEQ ID NO: 186126 - RNA, 19 nt, Artificial Sequence
  Description of Artificial Sequence: Synthetic oligonucleotide
  Sense strand starting at position 2975 of SEQ ID NO: 2399
gcacucgacuuugccuaaa

SEQ ID NO: 186127 - RNA, 19 nt, Artificial Sequence
  Description of Artificial Sequence: Synthetic oligonucleotide
  Antisense strand to SEQ ID NO: 186126
uuuaggcaaagucgagugc

SEQ ID NO: 186128 - RNA, 19 nt, Artificial Sequence
  Description of Artificial Sequence: Synthetic oligonucleotide
  Sense strand starting at position 2611 of SEQ ID NO: 2399
acaggagcucuugagucuu

SEQ ID NO: 186129 - RNA, 19 nt, Artificial Sequence
  Description of Artificial Sequence: Synthetic oligonucleotide
  Antisense strand to SEQ ID NO: 186128
aagacucaagagcuccugu

SEQ ID NO: 186130 - RNA, 19 nt, Artificial Sequence
  Description of Artificial Sequence: Synthetic oligonucleotide
  Sense strand starting at position 2593 of SEQ ID NO: 2399
gagggucccacuggugaga

SEQ ID NO: 186131 - RNA, 19 nt, Artificial Sequence
  Description of Artificial Sequence: Synthetic oligonucleotide
  Antisense strand to SEQ ID NO: 186130
ucucaccagugggacccuc

SEQ ID NO: 186132 - RNA, 19 nt, Artificial Sequence
  Description of Artificial Sequence: Synthetic oligonucleotide
  Sense strand starting at position 2517 of SEQ ID NO: 2399
ugggccuguuacccauaua

SEQ ID NO: 186133 - RNA, 19 nt, Artificial Sequence
  Description of Artificial Sequence: Synthetic oligonucleotide
  Antisense strand to SEQ ID NO: 186132
uauauggguaacaggccca

SEQ ID NO: 186134 - RNA, 19 nt, Artificial Sequence
  Description of Artificial Sequence: Synthetic oligonucleotide
  Sense strand starting at position 2322 of SEQ ID NO: 2399
cauguaucccagggacuga

SEQ ID NO: 186135 - RNA, 19 nt, Artificial Sequence
  Description of Artificial Sequence: Synthetic oligonucleotide
  Antisense strand to SEQ ID NO: 186134
ucagucccugggauacaug

SEQ ID NO: 186136 - RNA, 19 nt, Artificial Sequence
  Description of Artificial Sequence: Synthetic oligonucleotide
  Sense strand starting at position 2297 of SEQ ID NO: 2399
cggauaggugucuggagua

SEQ ID NO: 186137 - RNA, 19 nt, Artificial Sequence
  Description of Artificial Sequence: Synthetic oligonucleotide
  Antisense strand to SEQ ID NO: 186136
uacuccagacaccuauccg

SEQ ID NO: 186138 - RNA, 19 nt, Artificial Sequence
  Description of Artificial Sequence: Synthetic oligonucleotide
  Sense strand starting at position 2296 of SEQ ID NO: 2399
gcggauaggugucuggagu

SEQ ID NO: 186139 - RNA, 19 nt, Artificial Sequence
  Description of Artificial Sequence: Synthetic oligonucleotide
  Antisense strand to SEQ ID NO: 186138
acuccagacaccuauccgc

SEQ ID NO: 186140 - RNA, 19 nt, Artificial Sequence
  Description of Artificial Sequence: Synthetic oligonucleotide
  Sense strand starting at position 1454 of SEQ ID NO: 2399
ccgcgaucccgcagagaug

SEQ ID NO: 186141 - RNA, 19 nt, Artificial Sequence
  Description of Artificial Sequence: Synthetic oligonucleotide
  Antisense strand to SEQ ID NO: 186140
caucucugcgggaucgcgg

SEQ ID NO: 186142 - RNA, 19 nt, Artificial Sequence
  Description of Artificial Sequence: Synthetic oligonucleotide
  Sense strand starting at position 943 of SEQ ID NO: 2399
ggcuguucccuccaggcau

SEQ ID NO: 186143 - RNA, 19 nt, Artificial Sequence
  Description of Artificial Sequence: Synthetic oligonucleotide
  Antisense strand to SEQ ID NO: 186142
augccuggagggaacagcc

SEQ ID NO: 186144 - RNA, 19 nt, Artificial Sequence
  Description of Artificial Sequence: Synthetic oligonucleotide
  Sense strand starting at position 808 of SEQ ID NO: 2399
gggcuuguguuaucccauc

SEQ ID NO: 186145 - RNA, 19 nt, Artificial Sequence
  Description of Artificial Sequence: Synthetic oligonucleotide
  Antisense strand to SEQ ID NO: 186144
gaugggauaacacaagccc

SEQ ID NO: 186146 - RNA, 19 nt, Artificial Sequence
  Description of Artificial Sequence: Synthetic oligonucleotide
  Sense strand starting at position 801 of SEQ ID NO: 2399
ucucucugggcuuguguua

SEQ ID NO: 186147 - RNA, 19 nt, Artificial Sequence
  Description of Artificial Sequence: Synthetic oligonucleotide
  Antisense strand to SEQ ID NO: 186146
uaacacaagcccagagaga

SEQ ID NO: 186148 - RNA, 19 nt, Artificial Sequence
  Description of Artificial Sequence: Synthetic oligonucleotide
  Sense strand starting at position 743 of SEQ ID NO: 2399
aagcaagaggccuguacuu

SEQ ID NO: 186149 - RNA, 19 nt, Artificial Sequence
  Description of Artificial Sequence: Synthetic oligonucleotide
  Antisense strand to SEQ ID NO: 186148
aaguacaggccucuugcuu

SEQ ID NO: 186150 - RNA, 19 nt, Artificial Sequence
  Description of Artificial Sequence: Synthetic oligonucleotide
  Sense strand starting at position 3929 of SEQ ID NO: 2400
agccuuucugcaugcauua

SEQ ID NO: 186151 - RNA, 19 nt, Artificial Sequence
  Description of Artificial Sequence: Synthetic oligonucleotide
  Antisense strand to SEQ ID NO: 186150
uaaugcaugcagaaaggcu

SEQ ID NO: 186152 - RNA, 19 nt, Artificial Sequence
  Description of Artificial Sequence: Synthetic oligonucleotide
  Sense strand starting at position 3785 of SEQ ID NO: 2400
ucaguucgauacuuacacu

SEQ ID NO: 186153 - RNA, 19 nt, Artificial Sequence
  Description of Artificial Sequence: Synthetic oligonucleotide
  Antisense strand to SEQ ID NO: 186152
aguguaaguaucgaacuga

SEQ ID NO: 186154 - RNA, 19 nt, Artificial Sequence
  Description of Artificial Sequence: Synthetic oligonucleotide
  Sense strand starting at position 3737 of SEQ ID NO: 2400
gugccucugucauacaaga

SEQ ID NO: 186155 - RNA, 19 nt, Artificial Sequence
  Description of Artificial Sequence: Synthetic oligonucleotide
  Antisense strand to SEQ ID NO: 186154
ucuuguaugacagaggcac

SEQ ID NO: 186156 - RNA, 19 nt, Artificial Sequence
  Description of Artificial Sequence: Synthetic oligonucleotide
  Sense strand starting at position 3735 of SEQ ID NO: 2400
aggugccucugucauacaa

SEQ ID NO: 186157 - RNA, 19 nt, Artificial Sequence
  Description of Artificial Sequence: Synthetic oligonucleotide
  Antisense strand to SEQ ID NO: 186156
uuguaugacagaggcaccu

SEQ ID NO: 186158 - RNA, 19 nt, Artificial Sequence
  Description of Artificial Sequence: Synthetic oligonucleotide
  Sense strand starting at position 3712 of SEQ ID NO: 2400
aaaugauagguugggcaau

SEQ ID NO: 186159 - RNA, 19 nt, Artificial Sequence
  Description of Artificial Sequence: Synthetic oligonucleotide
  Antisense strand to SEQ ID NO: 186158
auugcccaaccuaucauuu

SEQ ID NO: 186160 - RNA, 19 nt, Artificial Sequence
  Description of Artificial Sequence: Synthetic oligonucleotide
  Sense strand starting at position 3695 of SEQ ID NO: 2400
gucauaggcugaggagaaa

SEQ ID NO: 186161 - RNA, 19 nt, Artificial Sequence
  Description of Artificial Sequence: Synthetic oligonucleotide
  Antisense strand to SEQ ID NO: 186160
uuucuccucagccuaugac

SEQ ID NO: 186162 - RNA, 19 nt, Artificial Sequence
  Description of Artificial Sequence: Synthetic oligonucleotide
  Sense strand starting at position 3693 of SEQ ID NO: 2400
cugucauaggcugaggaga

SEQ ID NO: 186163 - RNA, 19 nt, Artificial Sequence
  Description of Artificial Sequence: Synthetic oligonucleotide
  Antisense strand to SEQ ID NO: 186162
ucuccucagccuaugacag

SEQ ID NO: 186164 - RNA, 19 nt, Artificial Sequence
  Description of Artificial Sequence: Synthetic oligonucleotide
  Sense strand starting at position 3662 of SEQ ID NO: 2400
uuggaucagucuccagaga

SEQ ID NO: 186165 - RNA, 19 nt, Artificial Sequence
  Description of Artificial Sequence: Synthetic oligonucleotide
  Antisense strand to SEQ ID NO: 186164
ucucuggagacugauccaa

SEQ ID NO: 186166 - RNA, 19 nt, Artificial Sequence
  Description of Artificial Sequence: Synthetic oligonucleotide
  Sense strand starting at position 3472 of SEQ ID NO: 2400
gaaggugucagacaguuga

SEQ ID NO: 186167 - RNA, 19 nt, Artificial Sequence
  Description of Artificial Sequence: Synthetic oligonucleotide
  Antisense strand to SEQ ID NO: 186166
ucaacugucugacaccuuc

SEQ ID NO: 186168 - RNA, 19 nt, Artificial Sequence
  Description of Artificial Sequence: Synthetic oligonucleotide
  Sense strand starting at position 3433 of SEQ ID NO: 2400
gaaacaugcuaccugaagu

SEQ ID NO: 186169 - RNA, 19 nt, Artificial Sequence
  Description of Artificial Sequence: Synthetic oligonucleotide
  Antisense strand to SEQ ID NO: 186168
acuucagguagcauguuuc

SEQ ID NO: 186170 - RNA, 19 nt, Artificial Sequence
  Description of Artificial Sequence: Synthetic oligonucleotide
  Sense strand starting at position 3345 of SEQ ID NO: 2400
gccagaaguccaugaacca

SEQ ID NO: 186171 - RNA, 19 nt, Artificial Sequence
  Description of Artificial Sequence: Synthetic oligonucleotide
  Antisense strand to SEQ ID NO: 186170
ugguucauggacuucuggc

SEQ ID NO: 186172 - RNA, 19 nt, Artificial Sequence
  Description of Artificial Sequence: Synthetic oligonucleotide
  Sense strand starting at position 3335 of SEQ ID NO: 2400
ugugaucuuagccagaagu

SEQ ID NO: 186173 - RNA, 19 nt, Artificial Sequence
  Description of Artificial Sequence: Synthetic oligonucleotide
  Antisense strand to SEQ ID NO: 186172
acuucuggcuaagaucaca

SEQ ID NO: 186174 - RNA, 19 nt, Artificial Sequence
  Description of Artificial Sequence: Synthetic oligonucleotide
  Sense strand starting at position 3334 of SEQ ID NO: 2400
augugaucuuagccagaag

SEQ ID NO: 186175 - RNA, 19 nt, Artificial Sequence
  Description of Artificial Sequence: Synthetic oligonucleotide
  Antisense strand to SEQ ID NO: 186174
cuucuggcuaagaucacau

SEQ ID NO: 186176 - RNA, 19 nt, Artificial Sequence
  Description of Artificial Sequence: Synthetic oligonucleotide
  Sense strand starting at position 3328 of SEQ ID NO: 2400
gaugauaugugaucuuagc

SEQ ID NO: 186177 - RNA, 19 nt, Artificial Sequence
  Description of Artificial Sequence: Synthetic oligonucleotide
  Antisense strand to SEQ ID NO: 186176
gcuaagaucacauaucauc

SEQ ID NO: 186178 - RNA, 19 nt, Artificial Sequence
  Description of Artificial Sequence: Synthetic oligonucleotide
  Sense strand starting at position 3321 of SEQ ID NO: 2400
gguaacagaugauauguga

SEQ ID NO: 186179 - RNA, 19 nt, Artificial Sequence
  Description of Artificial Sequence: Synthetic oligonucleotide
  Antisense strand to SEQ ID NO: 186178
ucacauaucaucuguuacc

SEQ ID NO: 186180 - RNA, 19 nt, Artificial Sequence
  Description of Artificial Sequence: Synthetic oligonucleotide
  Sense strand starting at position 3074 of SEQ ID NO: 2400
acgugaguuuccuuaggcu

SEQ ID NO: 186181 - RNA, 19 nt, Artificial Sequence
  Description of Artificial Sequence: Synthetic oligonucleotide
  Antisense strand to SEQ ID NO: 186180
agccuaaggaaacucacgu

SEQ ID NO: 186182 - RNA, 19 nt, Artificial Sequence
  Description of Artificial Sequence: Synthetic oligonucleotide
  Sense strand starting at position 3000 of SEQ ID NO: 2400
ucacuuguucuguaccaaa

SEQ ID NO: 186183 - RNA, 19 nt, Artificial Sequence
  Description of Artificial Sequence: Synthetic oligonucleotide
  Antisense strand to SEQ ID NO: 186182
uuugguacagaacaaguga

SEQ ID NO: 186184 - RNA, 19 nt, Artificial Sequence
  Description of Artificial Sequence: Synthetic oligonucleotide
  Sense strand starting at position 2999 of SEQ ID NO: 2400
cucacuuguucuguaccaa

SEQ ID NO: 186185 - RNA, 19 nt, Artificial Sequence
  Description of Artificial Sequence: Synthetic oligonucleotide
  Antisense strand to SEQ ID NO: 186184
uugguacagaacaagugag

SEQ ID NO: 186186 - RNA, 19 nt, Artificial Sequence
  Description of Artificial Sequence: Synthetic oligonucleotide
  Sense strand starting at position 2995 of SEQ ID NO: 2400
gcaucucacuuguucugua

SEQ ID NO: 186187 - RNA, 19 nt, Artificial Sequence
  Description of Artificial Sequence: Synthetic oligonucleotide
  Antisense strand to SEQ ID NO: 186186
uacagaacaagugagaugc

SEQ ID NO: 186188 - RNA, 19 nt, Artificial Sequence
  Description of Artificial Sequence: Synthetic oligonucleotide
  Sense strand starting at position 2973 of SEQ ID NO: 2400
gcacacauagccuggaaga

SEQ ID NO: 186189 - RNA, 19 nt, Artificial Sequence
  Description of Artificial Sequence: Synthetic oligonucleotide
  Antisense strand to SEQ ID NO: 186188
ucuuccaggcuaugugugc

SEQ ID NO: 186190 - RNA, 19 nt, Artificial Sequence
  Description of Artificial Sequence: Synthetic oligonucleotide
  Sense strand starting at position 2860 of SEQ ID NO: 2400
gguacagagccaugaaaug

SEQ ID NO: 186191 - RNA, 19 nt, Artificial Sequence
  Description of Artificial Sequence: Synthetic oligonucleotide
  Antisense strand to SEQ ID NO: 186190
cauuucauggcucuguacc

SEQ ID NO: 186192 - RNA, 19 nt, Artificial Sequence
  Description of Artificial Sequence: Synthetic oligonucleotide
  Sense strand starting at position 2845 of SEQ ID NO: 2400
gagugacuugcugaaggua

SEQ ID NO: 186193 - RNA, 19 nt, Artificial Sequence
  Description of Artificial Sequence: Synthetic oligonucleotide
  Antisense strand to SEQ ID NO: 186192
uaccuucagcaagucacuc

SEQ ID NO: 186194 - RNA, 19 nt, Artificial Sequence
  Description of Artificial Sequence: Synthetic oligonucleotide
  Sense strand starting at position 2807 of SEQ ID NO: 2400
cuuccaaguuuacagagaa

SEQ ID NO: 186195 - RNA, 19 nt, Artificial Sequence
  Description of Artificial Sequence: Synthetic oligonucleotide
  Antisense strand to SEQ ID NO: 186194
uucucuguaaacuuggaag

SEQ ID NO: 186196 - RNA, 19 nt, Artificial Sequence
  Description of Artificial Sequence: Synthetic oligonucleotide
  Sense strand starting at position 2799 of SEQ ID NO: 2400
gggccuuucuuccaaguuu

SEQ ID NO: 186197 - RNA, 19 nt, Artificial Sequence
  Description of Artificial Sequence: Synthetic oligonucleotide
  Antisense strand to SEQ ID NO: 186196
aaacuuggaagaaaggccc

SEQ ID NO: 186198 - RNA, 19 nt, Artificial Sequence
  Description of Artificial Sequence: Synthetic oligonucleotide
  Sense strand starting at position 2587 of SEQ ID NO: 2400
aggucuggccuuuggagau

SEQ ID NO: 186199 - RNA, 19 nt, Artificial Sequence
  Description of Artificial Sequence: Synthetic oligonucleotide
  Antisense strand to SEQ ID NO: 186198
aucuccaaaggccagaccu

SEQ ID NO: 186200 - RNA, 19 nt, Artificial Sequence
  Description of Artificial Sequence: Synthetic oligonucleotide
  Sense strand starting at position 2540 of SEQ ID NO: 2400
ggaaauugcuaggauucua

SEQ ID NO: 186201 - RNA, 19 nt, Artificial Sequence
  Description of Artificial Sequence: Synthetic oligonucleotide
  Antisense strand to SEQ ID NO: 186200
uagaauccuagcaauuucc

SEQ ID NO: 186202 - RNA, 19 nt, Artificial Sequence
  Description of Artificial Sequence: Synthetic oligonucleotide
  Sense strand starting at position 2539 of SEQ ID NO: 2400
gggaaauugcuaggauucu

SEQ ID NO: 186203 - RNA, 19 nt, Artificial Sequence
  Description of Artificial Sequence: Synthetic oligonucleotide
  Antisense strand to SEQ ID NO: 186202
agaauccuagcaauuuccc

SEQ ID NO: 186204 - RNA, 19 nt, Artificial Sequence
  Description of Artificial Sequence: Synthetic oligonucleotide
  Sense strand starting at position 2537 of SEQ ID NO: 2400
acgggaaauugcuaggauu

SEQ ID NO: 186205 - RNA, 19 nt, Artificial Sequence
  Description of Artificial Sequence: Synthetic oligonucleotide
  Antisense strand to SEQ ID NO: 186204
aauccuagcaauuucccgu

SEQ ID NO: 186206 - RNA, 19 nt, Artificial Sequence
  Description of Artificial Sequence: Synthetic oligonucleotide
  Sense strand starting at position 2196 of SEQ ID NO: 2400
gggccuggccugugauaac

SEQ ID NO: 186207 - RNA, 19 nt, Artificial Sequence
  Description of Artificial Sequence: Synthetic oligonucleotide
  Antisense strand to SEQ ID NO: 186206
guuaucacaggccaggccc

SEQ ID NO: 186208 - RNA, 19 nt, Artificial Sequence
  Description of Artificial Sequence: Synthetic oligonucleotide
  Sense strand starting at position 2194 of SEQ ID NO: 2400
aagggccuggccugugaua

SEQ ID NO: 186209 - RNA, 19 nt, Artificial Sequence
  Description of Artificial Sequence: Synthetic oligonucleotide
  Antisense strand to SEQ ID NO: 186208
uaucacaggccaggcccuu

SEQ ID NO: 186210 - RNA, 19 nt, Artificial Sequence
  Description of Artificial Sequence: Synthetic oligonucleotide
  Sense strand starting at position 2047 of SEQ ID NO: 2400
gagcguaaccaugacaauc

SEQ ID NO: 186211 - RNA, 19 nt, Artificial Sequence
  Description of Artificial Sequence: Synthetic oligonucleotide
  Antisense strand to SEQ ID NO: 186210
gauugucaugguuacgcuc

SEQ ID NO: 186212 - RNA, 19 nt, Artificial Sequence
  Description of Artificial Sequence: Synthetic oligonucleotide
  Sense strand starting at position 2040 of SEQ ID NO: 2400
uuugucagagcguaaccau

SEQ ID NO: 186213 - RNA, 19 nt, Artificial Sequence
  Description of Artificial Sequence: Synthetic oligonucleotide
  Antisense strand to SEQ ID NO: 186212
augguuacgcucugacaaa

SEQ ID NO: 186214 - RNA, 19 nt, Artificial Sequence
  Description of Artificial Sequence: Synthetic oligonucleotide
  Sense strand starting at position 1995 of SEQ ID NO: 2400
uugcgauagcuguuuaggu

SEQ ID NO: 186215 - RNA, 19 nt, Artificial Sequence
  Description of Artificial Sequence: Synthetic oligonucleotide
  Antisense strand to SEQ ID NO: 186214
accuaaacagcuaucgcaa

SEQ ID NO: 186216 - RNA, 19 nt, Artificial Sequence
  Description of Artificial Sequence: Synthetic oligonucleotide
  Sense strand starting at position 1628 of SEQ ID NO: 2400
acuucuuaugcugaagcau

SEQ ID NO: 186217 - RNA, 19 nt, Artificial Sequence
  Description of Artificial Sequence: Synthetic oligonucleotide
  Antisense strand to SEQ ID NO: 186216
augcuucagcauaagaagu

SEQ ID NO: 186218 - RNA, 19 nt, Artificial Sequence
  Description of Artificial Sequence: Synthetic oligonucleotide
  Sense strand starting at position 1140 of SEQ ID NO: 2400
ccucuuaccuugcaggaga

SEQ ID NO: 186219 - RNA, 19 nt, Artificial Sequence
  Description of Artificial Sequence: Synthetic oligonucleotide
  Antisense strand to SEQ ID NO: 186218
ucuccugcaagguaagagg

SEQ ID NO: 186220 - RNA, 19 nt, Artificial Sequence
  Description of Artificial Sequence: Synthetic oligonucleotide
  Sense strand starting at position 1046 of SEQ ID NO: 2400
gaggcuugaugcguuagca

SEQ ID NO: 186221 - RNA, 19 nt, Artificial Sequence
  Description of Artificial Sequence: Synthetic oligonucleotide
  Antisense strand to SEQ ID NO: 186220
ugcuaacgcaucaagccuc

SEQ ID NO: 186222 - RNA, 19 nt, Artificial Sequence
  Description of Artificial Sequence: Synthetic oligonucleotide
  Sense strand starting at position 1021 of SEQ ID NO: 2400
agacguuaugguggaacuu

SEQ ID NO: 186223 - RNA, 19 nt, Artificial Sequence
  Description of Artificial Sequence: Synthetic oligonucleotide
  Antisense strand to SEQ ID NO: 186222
aaguuccaccauaacgucu

SEQ ID NO: 186224 - RNA, 19 nt, Artificial Sequence
  Description of Artificial Sequence: Synthetic oligonucleotide
  Sense strand starting at position 908 of SEQ ID NO: 2400
uguugcucuucagaaggga

SEQ ID NO: 186225 - RNA, 19 nt, Artificial Sequence
  Description of Artificial Sequence: Synthetic oligonucleotide
  Antisense strand to SEQ ID NO: 186224
ucccuucugaagagcaaca

SEQ ID NO: 186226 - RNA, 19 nt, Artificial Sequence
  Description of Artificial Sequence: Synthetic oligonucleotide
  Sense strand starting at position 471 of SEQ ID NO: 2400
agcauaugccugcaugcau

SEQ ID NO: 186227 - RNA, 19 nt, Artificial Sequence
  Description of Artificial Sequence: Synthetic oligonucleotide
  Antisense strand to SEQ ID NO: 186226
augcaugcaggcauaugcu

SEQ ID NO: 186228 - RNA, 19 nt, Artificial Sequence
  Description of Artificial Sequence: Synthetic oligonucleotide
  Sense strand starting at position 385 of SEQ ID NO: 2400
cuuaccaacucauguaguu

SEQ ID NO: 186229 - RNA, 19 nt, Artificial Sequence
  Description of Artificial Sequence: Synthetic oligonucleotide
  Antisense strand to SEQ ID NO: 186228
aacuacaugaguugguaag

SEQ ID NO: 186230 - RNA, 19 nt, Artificial Sequence
  Description of Artificial Sequence: Synthetic oligonucleotide
  Sense strand starting at position 266 of SEQ ID NO: 2401
augacuuagugucuuaaac

SEQ ID NO: 186231 - RNA, 19 nt, Artificial Sequence
  Description of Artificial Sequence: Synthetic oligonucleotide
  Antisense strand to SEQ ID NO: 186230
guuuaagacacuaagucau

SEQ ID NO: 186232 - RNA, 19 nt, Artificial Sequence
  Description of Artificial Sequence: Synthetic oligonucleotide
  Sense strand starting at position 363 of SEQ ID NO: 2401
ucaauucuuuaguuuggaa

SEQ ID NO: 186233 - RNA, 19 nt, Artificial Sequence
  Description of Artificial Sequence: Synthetic oligonucleotide
  Antisense strand to SEQ ID NO: 186232
uuccaaacuaaagaauuga

SEQ ID NO: 186234 - RNA, 19 nt, Artificial Sequence
  Description of Artificial Sequence: Synthetic oligonucleotide
  Sense strand starting at position 462 of SEQ ID NO: 2401
auucuaguucugcagaauc

SEQ ID NO: 186235 - RNA, 19 nt, Artificial Sequence
  Description of Artificial Sequence: Synthetic oligonucleotide
  Antisense strand to SEQ ID NO: 186234
gauucugcagaacuagaau

SEQ ID NO: 186236 - RNA, 19 nt, Artificial Sequence
  Description of Artificial Sequence: Synthetic oligonucleotide
  Sense strand starting at position 464 of SEQ ID NO: 2401
ucuaguucugcagaaucaa

SEQ ID NO: 186237 - RNA, 19 nt, Artificial Sequence
  Description of Artificial Sequence: Synthetic oligonucleotide
  Antisense strand to SEQ ID NO: 186236
uugauucugcagaacuaga

SEQ ID NO: 186238 - RNA, 19 nt, Artificial Sequence
  Description of Artificial Sequence: Synthetic oligonucleotide
  Sense strand starting at position 865 of SEQ ID NO: 2401
gagagauugugacuuguca

SEQ ID NO: 186239 - RNA, 19 nt, Artificial Sequence
  Description of Artificial Sequence: Synthetic oligonucleotide
  Antisense strand to SEQ ID NO: 186238
ugacaagucacaaucucuc

SEQ ID NO: 186240 - RNA, 19 nt, Artificial Sequence
  Description of Artificial Sequence: Synthetic oligonucleotide
  Sense strand starting at position 869 of SEQ ID NO: 2401
gauugugacuugucacaca

SEQ ID NO: 186241 - RNA, 19 nt, Artificial Sequence
  Description of Artificial Sequence: Synthetic oligonucleotide
  Antisense strand to SEQ ID NO: 186240
ugugugacaagucacaauc

SEQ ID NO: 186242 - RNA, 19 nt, Artificial Sequence
  Description of Artificial Sequence: Synthetic oligonucleotide
  Sense strand starting at position 1009 of SEQ ID NO: 2401
gcaaaugaugccgggaaau

SEQ ID NO: 186243 - RNA, 19 nt, Artificial Sequence
  Description of Artificial Sequence: Synthetic oligonucleotide
  Antisense strand to SEQ ID NO: 186242
auuucccggcaucauuugc

SEQ ID NO: 186244 - RNA, 19 nt, Artificial Sequence
  Description of Artificial Sequence: Synthetic oligonucleotide
  Sense strand starting at position 1072 of SEQ ID NO: 2401
auauaucucccguagauaa

SEQ ID NO: 186245 - RNA, 19 nt, Artificial Sequence
  Description of Artificial Sequence: Synthetic oligonucleotide
  Antisense strand to SEQ ID NO: 186244
uuaucuacgggagauauau

SEQ ID NO: 186246 - RNA, 19 nt, Artificial Sequence
  Description of Artificial Sequence: Synthetic oligonucleotide
  Sense strand starting at position 1074 of SEQ ID NO: 2401
auaucucccguagauaaag

SEQ ID NO: 186247 - RNA, 19 nt, Artificial Sequence
  Description of Artificial Sequence: Synthetic oligonucleotide
  Antisense strand to SEQ ID NO: 186246
cuuuaucuacgggagauau

SEQ ID NO: 186248 - RNA, 19 nt, Artificial Sequence
  Description of Artificial Sequence: Synthetic oligonucleotide
  Sense strand starting at position 1083 of SEQ ID NO: 2401
guagauaaaguaugucaaa

SEQ ID NO: 186249 - RNA, 19 nt, Artificial Sequence
  Description of Artificial Sequence: Synthetic oligonucleotide
  Antisense strand to SEQ ID NO: 186248
uuugacauacuuuaucuac

SEQ ID NO: 186250 - RNA, 19 nt, Artificial Sequence
  Description of Artificial Sequence: Synthetic oligonucleotide
  Sense strand starting at position 1124 of SEQ ID NO: 2401
uuggaagacguuugguaaa

SEQ ID NO: 186251 - RNA, 19 nt, Artificial Sequence
  Description of Artificial Sequence: Synthetic oligonucleotide
  Antisense strand to SEQ ID NO: 186250
uuuaccaaacgucuuccaa

SEQ ID NO: 186252 - RNA, 19 nt, Artificial Sequence
  Description of Artificial Sequence: Synthetic oligonucleotide
  Sense strand starting at position 1250 of SEQ ID NO: 2401
uccguacgacgagauuaau

SEQ ID NO: 186253 - RNA, 19 nt, Artificial Sequence
  Description of Artificial Sequence: Synthetic oligonucleotide
  Antisense strand to SEQ ID NO: 186252
auuaaucucgucguacgga

SEQ ID NO: 186254 - RNA, 19 nt, Artificial Sequence
  Description of Artificial Sequence: Synthetic oligonucleotide
  Sense strand starting at position 1394 of SEQ ID NO: 2401
acugacacuugcucaagua

SEQ ID NO: 186255 - RNA, 19 nt, Artificial Sequence
  Description of Artificial Sequence: Synthetic oligonucleotide
  Antisense strand to SEQ ID NO: 186254
uacuugagcaagugucagu

SEQ ID NO: 186256 - RNA, 19 nt, Artificial Sequence
  Description of Artificial Sequence: Synthetic oligonucleotide
  Sense strand starting at position 1680 of SEQ ID NO: 2401
ccaagaaaccuuuacguca

SEQ ID NO: 186257 - RNA, 19 nt, Artificial Sequence
  Description of Artificial Sequence: Synthetic oligonucleotide
  Antisense strand to SEQ ID NO: 186256
ugacguaaagguuucuugg

SEQ ID NO: 186258 - RNA, 19 nt, Artificial Sequence
  Description of Artificial Sequence: Synthetic oligonucleotide
  Sense strand starting at position 1699 of SEQ ID NO: 2401
ucacguauccuugcaacgu

SEQ ID NO: 186259 - RNA, 19 nt, Artificial Sequence
  Description of Artificial Sequence: Synthetic oligonucleotide
  Antisense strand to SEQ ID NO: 186258
acguugcaaggauacguga

SEQ ID NO: 186260 - RNA, 19 nt, Artificial Sequence
  Description of Artificial Sequence: Synthetic oligonucleotide
  Sense strand starting at position 1871 of SEQ ID NO: 2401
gucuuugguuaccuggaga

SEQ ID NO: 186261 - RNA, 19 nt, Artificial Sequence
  Description of Artificial Sequence: Synthetic oligonucleotide
  Antisense strand to SEQ ID NO: 186260
ucuccagguaaccaaagac

SEQ ID NO: 186262 - RNA, 19 nt, Artificial Sequence
  Description of Artificial Sequence: Synthetic oligonucleotide
  Sense strand starting at position 1912 of SEQ ID NO: 2401
uaugaagugcccggaugaa

SEQ ID NO: 186263 - RNA, 19 nt, Artificial Sequence
  Description of Artificial Sequence: Synthetic oligonucleotide
  Antisense strand to SEQ ID NO: 186262
uucauccgggcacuucaua

SEQ ID NO: 186264 - RNA, 19 nt, Artificial Sequence
  Description of Artificial Sequence: Synthetic oligonucleotide
  Sense strand starting at position 1981 of SEQ ID NO: 2401
gggcggagccgucuuguuu

SEQ ID NO: 186265 - RNA, 19 nt, Artificial Sequence
  Description of Artificial Sequence: Synthetic oligonucleotide
  Antisense strand to SEQ ID NO: 186264
aaacaagacggcuccgccc

SEQ ID NO: 186266 - RNA, 19 nt, Artificial Sequence
  Description of Artificial Sequence: Synthetic oligonucleotide
  Sense strand starting at position 2221 of SEQ ID NO: 2401
aacgcuuuagacuggaaga

SEQ ID NO: 186267 - RNA, 19 nt, Artificial Sequence
  Description of Artificial Sequence: Synthetic oligonucleotide
  Antisense strand to SEQ ID NO: 186266
ucuuccagucuaaagcguu

SEQ ID NO: 186268 - RNA, 19 nt, Artificial Sequence
  Description of Artificial Sequence: Synthetic oligonucleotide
  Sense strand starting at position 2222 of SEQ ID NO: 2401
acgcuuuagacuggaagaa

SEQ ID NO: 186269 - RNA, 19 nt, Artificial Sequence
  Description of Artificial Sequence: Synthetic oligonucleotide
  Antisense strand to SEQ ID NO: 186268
uucuuccagucuaaagcgu

SEQ ID NO: 186270 - RNA, 19 nt, Artificial Sequence
  Description of Artificial Sequence: Synthetic oligonucleotide
  Sense strand starting at position 2261 of SEQ ID NO: 2401
ugaucuuagcuaugugaag

SEQ ID NO: 186271 - RNA, 19 nt, Artificial Sequence
  Description of Artificial Sequence: Synthetic oligonucleotide
  Antisense strand to SEQ ID NO: 186270
cuucacauagcuaagauca

SEQ ID NO: 186272 - RNA, 19 nt, Artificial Sequence
  Description of Artificial Sequence: Synthetic oligonucleotide
  Sense strand starting at position 2312 of SEQ ID NO: 2401
aguucucuuagaggguaau

SEQ ID NO: 186273 - RNA, 19 nt, Artificial Sequence
  Description of Artificial Sequence: Synthetic oligonucleotide
  Antisense strand to SEQ ID NO: 186272
auuacccucuaagagaacu

SEQ ID NO: 186274 - RNA, 19 nt, Artificial Sequence
  Description of Artificial Sequence: Synthetic oligonucleotide
  Sense strand starting at position 2313 of SEQ ID NO: 2401
guucucuuagaggguaaua

SEQ ID NO: 186275 - RNA, 19 nt, Artificial Sequence
  Description of Artificial Sequence: Synthetic oligonucleotide
  Antisense strand to SEQ ID NO: 186274
uauuacccucuaagagaac

SEQ ID NO: 186276 - RNA, 19 nt, Artificial Sequence
  Description of Artificial Sequence: Synthetic oligonucleotide
  Sense strand starting at position 2682 of SEQ ID NO: 2401
ccuguaaacuuuguugaac

SEQ ID NO: 186277 - RNA, 19 nt, Artificial Sequence
  Description of Artificial Sequence: Synthetic oligonucleotide
  Antisense strand to SEQ ID NO: 186276
guucaacaaaguuuacagg

SEQ ID NO: 186278 - RNA, 19 nt, Artificial Sequence
  Description of Artificial Sequence: Synthetic oligonucleotide
  Sense strand starting at position 2758 of SEQ ID NO: 2401
uuguguacagucuaauaga

SEQ ID NO: 186279 - RNA, 19 nt, Artificial Sequence
  Description of Artificial Sequence: Synthetic oligonucleotide
  Antisense strand to SEQ ID NO: 186278
ucuauuagacuguacacaa

SEQ ID NO: 186280 - RNA, 19 nt, Artificial Sequence
  Description of Artificial Sequence: Synthetic oligonucleotide
  Sense strand starting at position 2781 of SEQ ID NO: 2401
cggauaaauaaaugaugua

SEQ ID NO: 186281 - RNA, 19 nt, Artificial Sequence
  Description of Artificial Sequence: Synthetic oligonucleotide
  Antisense strand to SEQ ID NO: 186280
uacaucauuuauuuauccg

SEQ ID NO: 186282 - RNA, 19 nt, Artificial Sequence
  Description of Artificial Sequence: Synthetic oligonucleotide
  Sense strand starting at position 3036 of SEQ ID NO: 2401
ugacaauuccuuuaugugu

SEQ ID NO: 186283 - RNA, 19 nt, Artificial Sequence
  Description of Artificial Sequence: Synthetic oligonucleotide
  Antisense strand to SEQ ID NO: 186282
acacauaaaggaauuguca

SEQ ID NO: 186284 - RNA, 19 nt, Artificial Sequence
  Description of Artificial Sequence: Synthetic oligonucleotide
  Sense strand starting at position 3174 of SEQ ID NO: 2401
gauaaucuuguagguauac

SEQ ID NO: 186285 - RNA, 19 nt, Artificial Sequence
  Description of Artificial Sequence: Synthetic oligonucleotide
  Antisense strand to SEQ ID NO: 186284
guauaccuacaagauuauc

SEQ ID NO: 186286 - RNA, 19 nt, Artificial Sequence
  Description of Artificial Sequence: Synthetic oligonucleotide
  Sense strand starting at position 3175 of SEQ ID NO: 2401
auaaucuuguagguauaca

SEQ ID NO: 186287 - RNA, 19 nt, Artificial Sequence
  Description of Artificial Sequence: Synthetic oligonucleotide
  Antisense strand to SEQ ID NO: 186286
uguauaccuacaagauuau

SEQ ID NO: 186288 - RNA, 19 nt, Artificial Sequence
  Description of Artificial Sequence: Synthetic oligonucleotide
  Sense strand starting at position 3180 of SEQ ID NO: 2401
cuuguagguauacaaagua

SEQ ID NO: 186289 - RNA, 19 nt, Artificial Sequence
  Description of Artificial Sequence: Synthetic oligonucleotide
  Antisense strand to SEQ ID NO: 186288
uacuuuguauaccuacaag

SEQ ID NO: 186290 - RNA, 19 nt, Artificial Sequence
  Description of Artificial Sequence: Synthetic oligonucleotide
  Sense strand starting at position 3210 of SEQ ID NO: 2401
caaguauaauugguguaau

SEQ ID NO: 186291 - RNA, 19 nt, Artificial Sequence
  Description of Artificial Sequence: Synthetic oligonucleotide
  Antisense strand to SEQ ID NO: 186290
auuacaccaauuauacuug

SEQ ID NO: 186292 - RNA, 19 nt, Artificial Sequence
  Description of Artificial Sequence: Synthetic oligonucleotide
  Sense strand starting at position 3321 of SEQ ID NO: 2401
uuaaauuugaggugcuugu

SEQ ID NO: 186293 - RNA, 19 nt, Artificial Sequence
  Description of Artificial Sequence: Synthetic oligonucleotide
  Antisense strand to SEQ ID NO: 186292
acaagcaccucaaauuuaa

SEQ ID NO: 186294 - RNA, 19 nt, Artificial Sequence
  Description of Artificial Sequence: Synthetic oligonucleotide
  Sense strand starting at position 3325 of SEQ ID NO: 2401
auuugaggugcuuguagua

SEQ ID NO: 186295 - RNA, 19 nt, Artificial Sequence
  Description of Artificial Sequence: Synthetic oligonucleotide
  Antisense strand to SEQ ID NO: 186294
uacuacaagcaccucaaau

SEQ ID NO: 186296 - RNA, 19 nt, Artificial Sequence
  Description of Artificial Sequence: Synthetic oligonucleotide
  Sense strand starting at position 3353 of SEQ ID NO: 2401
ugugaugcccauuaaauag

SEQ ID NO: 186297 - RNA, 19 nt, Artificial Sequence
  Description of Artificial Sequence: Synthetic oligonucleotide
  Antisense strand to SEQ ID NO: 186296
cuauuuaaugggcaucaca

SEQ ID NO: 186298 - RNA, 19 nt, Artificial Sequence
  Description of Artificial Sequence: Synthetic oligonucleotide
  Sense strand starting at position 3451 of SEQ ID NO: 2401
cagauagaguuuguggagu

SEQ ID NO: 186299 - RNA, 19 nt, Artificial Sequence
  Description of Artificial Sequence: Synthetic oligonucleotide
  Antisense strand to SEQ ID NO: 186298
acuccacaaacucuaucug

SEQ ID NO: 186300 - RNA, 19 nt, Artificial Sequence
  Description of Artificial Sequence: Synthetic oligonucleotide
  Sense strand starting at position 3717 of SEQ ID NO: 2401
uucugacaucuuuagucau

SEQ ID NO: 186301 - RNA, 19 nt, Artificial Sequence
  Description of Artificial Sequence: Synthetic oligonucleotide
  Antisense strand to SEQ ID NO: 186300
augacuaaagaugucagaa

SEQ ID NO: 186302 - RNA, 19 nt, Artificial Sequence
  Description of Artificial Sequence: Synthetic oligonucleotide
  Sense strand starting at position 3719 of SEQ ID NO: 2401
cugacaucuuuagucaucu

SEQ ID NO: 186303 - RNA, 19 nt, Artificial Sequence
  Description of Artificial Sequence: Synthetic oligonucleotide
  Antisense strand to SEQ ID NO: 186302
agaugacuaaagaugucag

SEQ ID NO: 186304 - RNA, 19 nt, Artificial Sequence
  Description of Artificial Sequence: Synthetic oligonucleotide
  Sense strand starting at position 3720 of SEQ ID NO: 2401
ugacaucuuuagucaucua

SEQ ID NO: 186305 - RNA, 19 nt, Artificial Sequence
  Description of Artificial Sequence: Synthetic oligonucleotide
  Antisense strand to SEQ ID NO: 186304
uagaugacuaaagauguca

SEQ ID NO: 186306 - RNA, 19 nt, Artificial Sequence
  Description of Artificial Sequence: Synthetic oligonucleotide
  Sense strand starting at position 3727 of SEQ ID NO: 2401
uuuagucaucuagauagca

SEQ ID NO: 186307 - RNA, 19 nt, Artificial Sequence
  Description of Artificial Sequence: Synthetic oligonucleotide
  Antisense strand to SEQ ID NO: 186306
ugcuaucuagaugacuaaa

SEQ ID NO: 186308 - RNA, 19 nt, Artificial Sequence
  Description of Artificial Sequence: Synthetic oligonucleotide
  Sense strand starting at position 3838 of SEQ ID NO: 2401
ugcagacuccuaugaccaa

SEQ ID NO: 186309 - RNA, 19 nt, Artificial Sequence
  Description of Artificial Sequence: Synthetic oligonucleotide
  Antisense strand to SEQ ID NO: 186308
uuggucauaggagucugca

SEQ ID NO: 186310 - RNA, 19 nt, Artificial Sequence
  Description of Artificial Sequence: Synthetic oligonucleotide
  Sense strand starting at position 19 of SEQ ID NO: 2402
acugacauaugagaacaau

SEQ ID NO: 186311 - RNA, 19 nt, Artificial Sequence
  Description of Artificial Sequence: Synthetic oligonucleotide
  Antisense strand to SEQ ID NO: 186310
auuguucucauaugucagu

SEQ ID NO: 186312 - RNA, 19 nt, Artificial Sequence
  Description of Artificial Sequence: Synthetic oligonucleotide
  Sense strand starting at position 47 of SEQ ID NO: 2402
cgucccuacuauucugauu

SEQ ID NO: 186313 - RNA, 19 nt, Artificial Sequence
  Description of Artificial Sequence: Synthetic oligonucleotide
  Antisense strand to SEQ ID NO: 186312
aaucagaauaguagggacg

SEQ ID NO: 186314 - RNA, 19 nt, Artificial Sequence
  Description of Artificial Sequence: Synthetic oligonucleotide
  Sense strand starting at position 199 of SEQ ID NO: 2402
uaaucagaggugggcuauu

SEQ ID NO: 186315 - RNA, 19 nt, Artificial Sequence
  Description of Artificial Sequence: Synthetic oligonucleotide
  Antisense strand to SEQ ID NO: 186314
aauagcccaccucugauua

SEQ ID NO: 186316 - RNA, 19 nt, Artificial Sequence
  Description of Artificial Sequence: Synthetic oligonucleotide
  Sense strand starting at position 334 of SEQ ID NO: 2402
accaaagucuagucuauau

SEQ ID NO: 186317 - RNA, 19 nt, Artificial Sequence
  Description of Artificial Sequence: Synthetic oligonucleotide
  Antisense strand to SEQ ID NO: 186316
auauagacuagacuuuggu

SEQ ID NO: 186318 - RNA, 19 nt, Artificial Sequence
  Description of Artificial Sequence: Synthetic oligonucleotide
  Sense strand starting at position 356 of SEQ ID NO: 2402
ccaauagcugcugaacuuu

SEQ ID NO: 186319 - RNA, 19 nt, Artificial Sequence
  Description of Artificial Sequence: Synthetic oligonucleotide
  Antisense strand to SEQ ID NO: 186318
aaaguucagcagcuauugg

SEQ ID NO: 186320 - RNA, 19 nt, Artificial Sequence
  Description of Artificial Sequence: Synthetic oligonucleotide
  Sense strand starting at position 642 of SEQ ID NO: 2402
cagugauucucagaggaaa

SEQ ID NO: 186321 - RNA, 19 nt, Artificial Sequence
  Description of Artificial Sequence: Synthetic oligonucleotide
  Antisense strand to SEQ ID NO: 186320
uuuccucugagaaucacug

SEQ ID NO: 186322 - RNA, 19 nt, Artificial Sequence
  Description of Artificial Sequence: Synthetic oligonucleotide
  Sense strand starting at position 733 of SEQ ID NO: 2402
uuuccuuauguguaaauuc

SEQ ID NO: 186323 - RNA, 19 nt, Artificial Sequence
  Description of Artificial Sequence: Synthetic oligonucleotide
  Antisense strand to SEQ ID NO: 186322
gaauuuacacauaaggaaa

SEQ ID NO: 186324 - RNA, 19 nt, Artificial Sequence
  Description of Artificial Sequence: Synthetic oligonucleotide
  Sense strand starting at position 740 of SEQ ID NO: 2402
auguguaaauucucaagag

SEQ ID NO: 186325 - RNA, 19 nt, Artificial Sequence
  Description of Artificial Sequence: Synthetic oligonucleotide
  Antisense strand to SEQ ID NO: 186324
cucuugagaauuuacacau

SEQ ID NO: 186326 - RNA, 19 nt, Artificial Sequence
  Description of Artificial Sequence: Synthetic oligonucleotide
  Sense strand starting at position 744 of SEQ ID NO: 2402
guaaauucucaagagucac

SEQ ID NO: 186327 - RNA, 19 nt, Artificial Sequence
  Description of Artificial Sequence: Synthetic oligonucleotide
  Antisense strand to SEQ ID NO: 186326
gugacucuugagaauuuac

SEQ ID NO: 186328 - RNA, 19 nt, Artificial Sequence
  Description of Artificial Sequence: Synthetic oligonucleotide
  Sense strand starting at position 750 of SEQ ID NO: 2402
ucucaagagucacuguaaa

SEQ ID NO: 186329 - RNA, 19 nt, Artificial Sequence
  Description of Artificial Sequence: Synthetic oligonucleotide
  Antisense strand to SEQ ID NO: 186328
uuuacagugacucuugaga

SEQ ID NO: 186330 - RNA, 19 nt, Artificial Sequence
  Description of Artificial Sequence: Synthetic oligonucleotide
  Sense strand starting at position 954 of SEQ ID NO: 2402
gcucuaggauuccuggaga

SEQ ID NO: 186331 - RNA, 19 nt, Artificial Sequence
  Description of Artificial Sequence: Synthetic oligonucleotide
  Antisense strand to SEQ ID NO: 186330
ucuccaggaauccuagagc

SEQ ID NO: 186332 - RNA, 19 nt, Artificial Sequence
  Description of Artificial Sequence: Synthetic oligonucleotide
  Sense strand starting at position 1016 of SEQ ID NO: 2402
ccacguccuccuuggaaca

SEQ ID NO: 186333 - RNA, 19 nt, Artificial Sequence
  Description of Artificial Sequence: Synthetic oligonucleotide
  Antisense strand to SEQ ID NO: 186332
uguuccaaggaggacgugg

SEQ ID NO: 186334 - RNA, 19 nt, Artificial Sequence
  Description of Artificial Sequence: Synthetic oligonucleotide
  Sense strand starting at position 1412 of SEQ ID NO: 2402
uguccaagaucucagacaa

SEQ ID NO: 186335 - RNA, 19 nt, Artificial Sequence
  Description of Artificial Sequence: Synthetic oligonucleotide
  Antisense strand to SEQ ID NO: 186334
uugucugagaucuuggaca

SEQ ID NO: 186336 - RNA, 19 nt, Artificial Sequence
  Description of Artificial Sequence: Synthetic oligonucleotide
  Sense strand starting at position 1453 of SEQ ID NO: 2402
cauacaucugccgacgaaa

SEQ ID NO: 186337 - RNA, 19 nt, Artificial Sequence
  Description of Artificial Sequence: Synthetic oligonucleotide
  Antisense strand to SEQ ID NO: 186336
uuucgucggcagauguaug

SEQ ID NO: 186338 - RNA, 19 nt, Artificial Sequence
  Description of Artificial Sequence: Synthetic oligonucleotide
  Sense strand starting at position 1572 of SEQ ID NO: 2402
cucauagucccucagacuu

SEQ ID NO: 186339 - RNA, 19 nt, Artificial Sequence
  Description of Artificial Sequence: Synthetic oligonucleotide
  Antisense strand to SEQ ID NO: 186338
aagucugagggacuaugag

SEQ ID NO: 186340 - RNA, 19 nt, Artificial Sequence
  Description of Artificial Sequence: Synthetic oligonucleotide
  Sense strand starting at position 2065 of SEQ ID NO: 2402
auuccauuggccugaguaa

SEQ ID NO: 186341 - RNA, 19 nt, Artificial Sequence
  Description of Artificial Sequence: Synthetic oligonucleotide
  Antisense strand to SEQ ID NO: 186340
uuacucaggccaauggaau

SEQ ID NO: 186342 - RNA, 19 nt, Artificial Sequence
  Description of Artificial Sequence: Synthetic oligonucleotide
  Sense strand starting at position 2066 of SEQ ID NO: 2402
uuccauuggccugaguaaa

SEQ ID NO: 186343 - RNA, 19 nt, Artificial Sequence
  Description of Artificial Sequence: Synthetic oligonucleotide
  Antisense strand to SEQ ID NO: 186342
uuuacucaggccaauggaa

SEQ ID NO: 186344 - RNA, 19 nt, Artificial Sequence
  Description of Artificial Sequence: Synthetic oligonucleotide
  Sense strand starting at position 2147 of SEQ ID NO: 2402
ggcgacuuccgcaaucgga

SEQ ID NO: 186345 - RNA, 19 nt, Artificial Sequence
  Description of Artificial Sequence: Synthetic oligonucleotide
  Antisense strand to SEQ ID NO: 186344
uccgauugcggaagucgcc

SEQ ID NO: 186346 - RNA, 19 nt, Artificial Sequence
  Description of Artificial Sequence: Synthetic oligonucleotide
  Sense strand starting at position 2269 of SEQ ID NO: 2402
ucguacaaaguguguugaa

SEQ ID NO: 186347 - RNA, 19 nt, Artificial Sequence
  Description of Artificial Sequence: Synthetic oligonucleotide
  Antisense strand to SEQ ID NO: 186346
uucaacacacuuuguacga

SEQ ID NO: 186348 - RNA, 19 nt, Artificial Sequence
  Description of Artificial Sequence: Synthetic oligonucleotide
  Sense strand starting at position 2270 of SEQ ID NO: 2402
cguacaaaguguguugaaa

SEQ ID NO: 186349 - RNA, 19 nt, Artificial Sequence
  Description of Artificial Sequence: Synthetic oligonucleotide
  Antisense strand to SEQ ID NO: 186348
uuucaacacacuuuguacg

SEQ ID NO: 186350 - RNA, 19 nt, Artificial Sequence
  Description of Artificial Sequence: Synthetic oligonucleotide
  Sense strand starting at position 2289 of SEQ ID NO: 2402
gaagaauucuucuuguuag

SEQ ID NO: 186351 - RNA, 19 nt, Artificial Sequence
  Description of Artificial Sequence: Synthetic oligonucleotide
  Antisense strand to SEQ ID NO: 186350
cuaacaagaagaauucuuc

SEQ ID NO: 186352 - RNA, 19 nt, Artificial Sequence
  Description of Artificial Sequence: Synthetic oligonucleotide
  Sense strand starting at position 2296 of SEQ ID NO: 2402
ucuucuuguuagccuugaa

SEQ ID NO: 186353 - RNA, 19 nt, Artificial Sequence
  Description of Artificial Sequence: Synthetic oligonucleotide
  Antisense strand to SEQ ID NO: 186352
uucaaggcuaacaagaaga

SEQ ID NO: 186354 - RNA, 19 nt, Artificial Sequence
  Description of Artificial Sequence: Synthetic oligonucleotide
  Sense strand starting at position 2299 of SEQ ID NO: 2402
ucuuguuagccuugaaaga

SEQ ID NO: 186355 - RNA, 19 nt, Artificial Sequence
  Description of Artificial Sequence: Synthetic oligonucleotide
  Antisense strand to SEQ ID NO: 186354
ucuuucaaggcuaacaaga

SEQ ID NO: 186356 - RNA, 19 nt, Artificial Sequence
  Description of Artificial Sequence: Synthetic oligonucleotide
  Sense strand starting at position 2300 of SEQ ID NO: 2402
cuuguuagccuugaaagaa

SEQ ID NO: 186357 - RNA, 19 nt, Artificial Sequence
  Description of Artificial Sequence: Synthetic oligonucleotide
  Antisense strand to SEQ ID NO: 186356
uucuuucaaggcuaacaag

SEQ ID NO: 186358 - RNA, 19 nt, Artificial Sequence
  Description of Artificial Sequence: Synthetic oligonucleotide
  Sense strand starting at position 2342 of SEQ ID NO: 2402
gggccaagcccguaaacuu

SEQ ID NO: 186359 - RNA, 19 nt, Artificial Sequence
  Description of Artificial Sequence: Synthetic oligonucleotide
  Antisense strand to SEQ ID NO: 186358
aaguuuacgggcuuggccc

SEQ ID NO: 186360 - RNA, 19 nt, Artificial Sequence
  Description of Artificial Sequence: Synthetic oligonucleotide
  Sense strand starting at position 2350 of SEQ ID NO: 2402
cccguaaacuuucugugga

SEQ ID NO: 186361 - RNA, 19 nt, Artificial Sequence
  Description of Artificial Sequence: Synthetic oligonucleotide
  Antisense strand to SEQ ID NO: 186360
uccacagaaaguuuacggg

SEQ ID NO: 186362 - RNA, 19 nt, Artificial Sequence
  Description of Artificial Sequence: Synthetic oligonucleotide
  Sense strand starting at position 2352 of SEQ ID NO: 2402
cguaaacuuucuguggaca

SEQ ID NO: 186363 - RNA, 19 nt, Artificial Sequence
  Description of Artificial Sequence: Synthetic oligonucleotide
  Antisense strand to SEQ ID NO: 186362
uguccacagaaaguuuacg

SEQ ID NO: 186364 - RNA, 19 nt, Artificial Sequence
  Description of Artificial Sequence: Synthetic oligonucleotide
  Sense strand starting at position 2655 of SEQ ID NO: 2402
gugguuguugaggacucau

SEQ ID NO: 186365 - RNA, 19 nt, Artificial Sequence
  Description of Artificial Sequence: Synthetic oligonucleotide
  Antisense strand to SEQ ID NO: 186364
augaguccucaacaaccac

SEQ ID NO: 186366 - RNA, 19 nt, Artificial Sequence
  Description of Artificial Sequence: Synthetic oligonucleotide
  Sense strand starting at position 2663 of SEQ ID NO: 2402
ugaggacucaugcaugagu

SEQ ID NO: 186367 - RNA, 19 nt, Artificial Sequence
  Description of Artificial Sequence: Synthetic oligonucleotide
  Antisense strand to SEQ ID NO: 186366
acucaugcaugaguccuca

SEQ ID NO: 186368 - RNA, 19 nt, Artificial Sequence
  Description of Artificial Sequence: Synthetic oligonucleotide
  Sense strand starting at position 2688 of SEQ ID NO: 2402
uaugcucgucuuguugauu

SEQ ID NO: 186369 - RNA, 19 nt, Artificial Sequence
  Description of Artificial Sequence: Synthetic oligonucleotide
  Antisense strand to SEQ ID NO: 186368
aaucaacaagacgagcaua

SEQ ID NO: 186370 - RNA, 19 nt, Artificial Sequence
  Description of Artificial Sequence: Synthetic oligonucleotide
  Sense strand starting at position 2691 of SEQ ID NO: 2402
gcucgucuuguugauuaua

SEQ ID NO: 186371 - RNA, 19 nt, Artificial Sequence
  Description of Artificial Sequence: Synthetic oligonucleotide
  Antisense strand to SEQ ID NO: 186370
uauaaucaacaagacgagc

SEQ ID NO: 186372 - RNA, 19 nt, Artificial Sequence
  Description of Artificial Sequence: Synthetic oligonucleotide
  Sense strand starting at position 2693 of SEQ ID NO: 2402
ucgucuuguugauuauaaa

SEQ ID NO: 186373 - RNA, 19 nt, Artificial Sequence
  Description of Artificial Sequence: Synthetic oligonucleotide
  Antisense strand to SEQ ID NO: 186372
uuuauaaucaacaagacga

SEQ ID NO: 186374 - RNA, 19 nt, Artificial Sequence
  Description of Artificial Sequence: Synthetic oligonucleotide
  Sense strand starting at position 3585 of SEQ ID NO: 2402
gcuagauagaaaugugaca

SEQ ID NO: 186375 - RNA, 19 nt, Artificial Sequence
  Description of Artificial Sequence: Synthetic oligonucleotide
  Antisense strand to SEQ ID NO: 186374
ugucacauuucuaucuagc

SEQ ID NO: 186376 - RNA, 19 nt, Artificial Sequence
  Description of Artificial Sequence: Synthetic oligonucleotide
  Sense strand starting at position 3605 of SEQ ID NO: 2402
auuaacauguuagcaaaga

SEQ ID NO: 186377 - RNA, 19 nt, Artificial Sequence
  Description of Artificial Sequence: Synthetic oligonucleotide
  Antisense strand to SEQ ID NO: 186376
ucuuugcuaacauguuaau

SEQ ID NO: 186378 - RNA, 19 nt, Artificial Sequence
  Description of Artificial Sequence: Synthetic oligonucleotide
  Sense strand starting at position 3649 of SEQ ID NO: 2402
cccuguauggcagguauua

SEQ ID NO: 186379 - RNA, 19 nt, Artificial Sequence
  Description of Artificial Sequence: Synthetic oligonucleotide
  Antisense strand to SEQ ID NO: 186378
uaauaccugccauacaggg

SEQ ID NO: 186380 - RNA, 19 nt, Artificial Sequence
  Description of Artificial Sequence: Synthetic oligonucleotide
  Sense strand starting at position 3690 of SEQ ID NO: 2402
aacugagucuuucugaagu

SEQ ID NO: 186381 - RNA, 19 nt, Artificial Sequence
  Description of Artificial Sequence: Synthetic oligonucleotide
  Antisense strand to SEQ ID NO: 186380
acuucagaaagacucaguu

SEQ ID NO: 186382 - RNA, 19 nt, Artificial Sequence
  Description of Artificial Sequence: Synthetic oligonucleotide
  Sense strand starting at position 3807 of SEQ ID NO: 2402
cugguaucauaugagaaug

SEQ ID NO: 186383 - RNA, 19 nt, Artificial Sequence
  Description of Artificial Sequence: Synthetic oligonucleotide
  Antisense strand to SEQ ID NO: 186382
cauucucauaugauaccag

SEQ ID NO: 186384 - RNA, 19 nt, Artificial Sequence
  Description of Artificial Sequence: Synthetic oligonucleotide
  Sense strand starting at position 3809 of SEQ ID NO: 2402
gguaucauaugagaaugac

SEQ ID NO: 186385 - RNA, 19 nt, Artificial Sequence
  Description of Artificial Sequence: Synthetic oligonucleotide
  Antisense strand to SEQ ID NO: 186384
gucauucucauaugauacc

SEQ ID NO: 186386 - RNA, 19 nt, Artificial Sequence
  Description of Artificial Sequence: Synthetic oligonucleotide
  Sense strand starting at position 3867 of SEQ ID NO: 2402
uuagcauuccaggaaaggu

SEQ ID NO: 186387 - RNA, 19 nt, Artificial Sequence
  Description of Artificial Sequence: Synthetic oligonucleotide
  Antisense strand to SEQ ID NO: 186386
accuuuccuggaaugcuaa

SEQ ID NO: 186388 - RNA, 19 nt, Artificial Sequence
  Description of Artificial Sequence: Synthetic oligonucleotide
  Sense strand starting at position 3913 of SEQ ID NO: 2402
cucucugaucaauguagac

SEQ ID NO: 186389 - RNA, 19 nt, Artificial Sequence
  Description of Artificial Sequence: Synthetic oligonucleotide
  Antisense strand to SEQ ID NO: 186388
gucuacauugaucagagag

SEQ ID NO: 186390 - RNA, 19 nt, Artificial Sequence
  Description of Artificial Sequence: Synthetic oligonucleotide
  Sense strand starting at position 22 of SEQ ID NO: 2403
ccaaacagucacgaguuau

SEQ ID NO: 186391 - RNA, 19 nt, Artificial Sequence
  Description of Artificial Sequence: Synthetic oligonucleotide
  Antisense strand to SEQ ID NO: 186390
auaacucgugacuguuugg

SEQ ID NO: 186392 - RNA, 19 nt, Artificial Sequence
  Description of Artificial Sequence: Synthetic oligonucleotide
  Sense strand starting at position 33 of SEQ ID NO: 2403
cgaguuauuuccuccugcu

SEQ ID NO: 186393 - RNA, 19 nt, Artificial Sequence
  Description of Artificial Sequence: Synthetic oligonucleotide
  Antisense strand to SEQ ID NO: 186392
agcaggaggaaauaacucg

SEQ ID NO: 186394 - RNA, 19 nt, Artificial Sequence
  Description of Artificial Sequence: Synthetic oligonucleotide
  Sense strand starting at position 64 of SEQ ID NO: 2403
cuucuugucucaguaauau

SEQ ID NO: 186395 - RNA, 19 nt, Artificial Sequence
  Description of Artificial Sequence: Synthetic oligonucleotide
  Antisense strand to SEQ ID NO: 186394
auauuacugagacaagaag

SEQ ID NO: 186396 - RNA, 19 nt, Artificial Sequence
  Description of Artificial Sequence: Synthetic oligonucleotide
  Sense strand starting at position 161 of SEQ ID NO: 2403
auuugucuuugagcacuua

SEQ ID NO: 186397 - RNA, 19 nt, Artificial Sequence
  Description of Artificial Sequence: Synthetic oligonucleotide
  Antisense strand to SEQ ID NO: 186396
uaagugcucaaagacaaau

SEQ ID NO: 186398 - RNA, 19 nt, Artificial Sequence
  Description of Artificial Sequence: Synthetic oligonucleotide
  Sense strand starting at position 162 of SEQ ID NO: 2403
uuugucuuugagcacuuaa

SEQ ID NO: 186399 - RNA, 19 nt, Artificial Sequence
  Description of Artificial Sequence: Synthetic oligonucleotide
  Antisense strand to SEQ ID NO: 186398
uuaagugcucaaagacaaa

SEQ ID NO: 186400 - RNA, 19 nt, Artificial Sequence
  Description of Artificial Sequence: Synthetic oligonucleotide
  Sense strand starting at position 212 of SEQ ID NO: 2403
guauucugguaucuaagaa

SEQ ID NO: 186401 - RNA, 19 nt, Artificial Sequence
  Description of Artificial Sequence: Synthetic oligonucleotide
  Antisense strand to SEQ ID NO: 186400
uucuuagauaccagaauac

SEQ ID NO: 186402 - RNA, 19 nt, Artificial Sequence
  Description of Artificial Sequence: Synthetic oligonucleotide
  Sense strand starting at position 303 of SEQ ID NO: 2403
agcuaaacagugcaaugau

SEQ ID NO: 186403 - RNA, 19 nt, Artificial Sequence
  Description of Artificial Sequence: Synthetic oligonucleotide
  Antisense strand to SEQ ID NO: 186402
aucauugcacuguuuagcu

SEQ ID NO: 186404 - RNA, 19 nt, Artificial Sequence
  Description of Artificial Sequence: Synthetic oligonucleotide
  Sense strand starting at position 421 of SEQ ID NO: 2403
cugagagcuuaaucuacac

SEQ ID NO: 186405 - RNA, 19 nt, Artificial Sequence
  Description of Artificial Sequence: Synthetic oligonucleotide
  Antisense strand to SEQ ID NO: 186404
guguagauuaagcucucag

SEQ ID NO: 186406 - RNA, 19 nt, Artificial Sequence
  Description of Artificial Sequence: Synthetic oligonucleotide
  Sense strand starting at position 560 of SEQ ID NO: 2403
uuucuuuguguguauacaa

SEQ ID NO: 186407 - RNA, 19 nt, Artificial Sequence
  Description of Artificial Sequence: Synthetic oligonucleotide
  Antisense strand to SEQ ID NO: 186406
uuguauacacacaaagaaa

SEQ ID NO: 186408 - RNA, 19 nt, Artificial Sequence
  Description of Artificial Sequence: Synthetic oligonucleotide
  Sense strand starting at position 615 of SEQ ID NO: 2403
acccuauguuagguauaca

SEQ ID NO: 186409 - RNA, 19 nt, Artificial Sequence
  Description of Artificial Sequence: Synthetic oligonucleotide
  Antisense strand to SEQ ID NO: 186408
uguauaccuaacauagggu

SEQ ID NO: 186410 - RNA, 19 nt, Artificial Sequence
  Description of Artificial Sequence: Synthetic oligonucleotide
  Sense strand starting at position 769 of SEQ ID NO: 2403
gccuuuaaacgacaucaac

SEQ ID NO: 186411 - RNA, 19 nt, Artificial Sequence
  Description of Artificial Sequence: Synthetic oligonucleotide
  Antisense strand to SEQ ID NO: 186410
guugaugucguuuaaaggc

SEQ ID NO: 186412 - RNA, 19 nt, Artificial Sequence
  Description of Artificial Sequence: Synthetic oligonucleotide
  Sense strand starting at position 861 of SEQ ID NO: 2403
uaaacacuuguaggugauu

SEQ ID NO: 186413 - RNA, 19 nt, Artificial Sequence
  Description of Artificial Sequence: Synthetic oligonucleotide
  Antisense strand to SEQ ID NO: 186412
aaucaccuacaaguguuua

SEQ ID NO: 186414 - RNA, 19 nt, Artificial Sequence
  Description of Artificial Sequence: Synthetic oligonucleotide
  Sense strand starting at position 872 of SEQ ID NO: 2403
aggugauugucuuuccuga

SEQ ID NO: 186415 - RNA, 19 nt, Artificial Sequence
  Description of Artificial Sequence: Synthetic oligonucleotide
  Antisense strand to SEQ ID NO: 186414
ucaggaaagacaaucaccu

SEQ ID NO: 186416 - RNA, 19 nt, Artificial Sequence
  Description of Artificial Sequence: Synthetic oligonucleotide
  Sense strand starting at position 877 of SEQ ID NO: 2403
auugucuuuccugauuggu

SEQ ID NO: 186417 - RNA, 19 nt, Artificial Sequence
  Description of Artificial Sequence: Synthetic oligonucleotide
  Antisense strand to SEQ ID NO: 186416
accaaucaggaaagacaau

SEQ ID NO: 186418 - RNA, 19 nt, Artificial Sequence
  Description of Artificial Sequence: Synthetic oligonucleotide
  Sense strand starting at position 879 of SEQ ID NO: 2403
ugucuuuccugauugguag

SEQ ID NO: 186419 - RNA, 19 nt, Artificial Sequence
  Description of Artificial Sequence: Synthetic oligonucleotide
  Antisense strand to SEQ ID NO: 186418
cuaccaaucaggaaagaca

SEQ ID NO: 186420 - RNA, 19 nt, Artificial Sequence
  Description of Artificial Sequence: Synthetic oligonucleotide
  Sense strand starting at position 1070 of SEQ ID NO: 2403
acaauuaagcucugaaggu

SEQ ID NO: 186421 - RNA, 19 nt, Artificial Sequence
  Description of Artificial Sequence: Synthetic oligonucleotide
  Antisense strand to SEQ ID NO: 186420
accuucagagcuuaauugu

SEQ ID NO: 186422 - RNA, 19 nt, Artificial Sequence
  Description of Artificial Sequence: Synthetic oligonucleotide
  Sense strand starting at position 1097 of SEQ ID NO: 2403
agaagucauucuuuggguu

SEQ ID NO: 186423 - RNA, 19 nt, Artificial Sequence
  Description of Artificial Sequence: Synthetic oligonucleotide
  Antisense strand to SEQ ID NO: 186422
aacccaaagaaugacuucu

SEQ ID NO: 186424 - RNA, 19 nt, Artificial Sequence
  Description of Artificial Sequence: Synthetic oligonucleotide
  Sense strand starting at position 1098 of SEQ ID NO: 2403
gaagucauucuuuggguuu

SEQ ID NO: 186425 - RNA, 19 nt, Artificial Sequence
  Description of Artificial Sequence: Synthetic oligonucleotide
  Antisense strand to SEQ ID NO: 186424
aaacccaaagaaugacuuc

SEQ ID NO: 186426 - RNA, 19 nt, Artificial Sequence
  Description of Artificial Sequence: Synthetic oligonucleotide
  Sense strand starting at position 1265 of SEQ ID NO: 2403
acucauucucuuugaccga

SEQ ID NO: 186427 - RNA, 19 nt, Artificial Sequence
  Description of Artificial Sequence: Synthetic oligonucleotide
  Antisense strand to SEQ ID NO: 186426
ucggucaaagagaaugagu

SEQ ID NO: 186428 - RNA, 19 nt, Artificial Sequence
  Description of Artificial Sequence: Synthetic oligonucleotide
  Sense strand starting at position 1410 of SEQ ID NO: 2403
guccuauuagccuaaugac

SEQ ID NO: 186429 - RNA, 19 nt, Artificial Sequence
  Description of Artificial Sequence: Synthetic oligonucleotide
  Antisense strand to SEQ ID NO: 186428
gucauuaggcuaauaggac

SEQ ID NO: 186430 - RNA, 19 nt, Artificial Sequence
  Description of Artificial Sequence: Synthetic oligonucleotide
  Sense strand starting at position 1430 of SEQ ID NO: 2403
uccucaucugacugggaga

SEQ ID NO: 186431 - RNA, 19 nt, Artificial Sequence
  Description of Artificial Sequence: Synthetic oligonucleotide
  Antisense strand to SEQ ID NO: 186430
ucucccagucagaugagga

SEQ ID NO: 186432 - RNA, 19 nt, Artificial Sequence
  Description of Artificial Sequence: Synthetic oligonucleotide
  Sense strand starting at position 3083 of SEQ ID NO: 2403
agauaaugagccggugaga

SEQ ID NO: 186433 - RNA, 19 nt, Artificial Sequence
  Description of Artificial Sequence: Synthetic oligonucleotide
  Antisense strand to SEQ ID NO: 186432
ucucaccggcucauuaucu

SEQ ID NO: 186434 - RNA, 19 nt, Artificial Sequence
  Description of Artificial Sequence: Synthetic oligonucleotide
  Sense strand starting at position 3122 of SEQ ID NO: 2403
gggaguuagucuagaggag

SEQ ID NO: 186435 - RNA, 19 nt, Artificial Sequence
  Description of Artificial Sequence: Synthetic oligonucleotide
  Antisense strand to SEQ ID NO: 186434
cuccucuagacuaacuccc

SEQ ID NO: 186436 - RNA, 19 nt, Artificial Sequence
  Description of Artificial Sequence: Synthetic oligonucleotide
  Sense strand starting at position 3126 of SEQ ID NO: 2403
guuagucuagaggagcaua

SEQ ID NO: 186437 - RNA, 19 nt, Artificial Sequence
  Description of Artificial Sequence: Synthetic oligonucleotide
  Antisense strand to SEQ ID NO: 186436
uaugcuccucuagacuaac

SEQ ID NO: 186438 - RNA, 19 nt, Artificial Sequence
  Description of Artificial Sequence: Synthetic oligonucleotide
  Sense strand starting at position 3174 of SEQ ID NO: 2403
cugugugguguguagagaa

SEQ ID NO: 186439 - RNA, 19 nt, Artificial Sequence
  Description of Artificial Sequence: Synthetic oligonucleotide
  Antisense strand to SEQ ID NO: 186438
uucucuacacaccacacag

SEQ ID NO: 186440 - RNA, 19 nt, Artificial Sequence
  Description of Artificial Sequence: Synthetic oligonucleotide
  Sense strand starting at position 3271 of SEQ ID NO: 2403
ugagucacugcccaguuua

SEQ ID NO: 186441 - RNA, 19 nt, Artificial Sequence
  Description of Artificial Sequence: Synthetic oligonucleotide
  Antisense strand to SEQ ID NO: 186440
uaaacugggcagugacuca

SEQ ID NO: 186442 - RNA, 19 nt, Artificial Sequence
  Description of Artificial Sequence: Synthetic oligonucleotide
  Sense strand starting at position 3386 of SEQ ID NO: 2403
gcaugugagccuucugugu

SEQ ID NO: 186443 - RNA, 19 nt, Artificial Sequence
  Description of Artificial Sequence: Synthetic oligonucleotide
  Antisense strand to SEQ ID NO: 186442
acacagaaggcucacaugc

SEQ ID NO: 186444 - RNA, 19 nt, Artificial Sequence
  Description of Artificial Sequence: Synthetic oligonucleotide
  Sense strand starting at position 3401 of SEQ ID NO: 2403
gugucaucaugacuuacca

SEQ ID NO: 186445 - RNA, 19 nt, Artificial Sequence
  Description of Artificial Sequence: Synthetic oligonucleotide
  Antisense strand to SEQ ID NO: 186444
ugguaagucaugaugacac

SEQ ID NO: 186446 - RNA, 19 nt, Artificial Sequence
  Description of Artificial Sequence: Synthetic oligonucleotide
  Sense strand starting at position 3416 of SEQ ID NO: 2403
accaauuuaugugaaugua

SEQ ID NO: 186447 - RNA, 19 nt, Artificial Sequence
  Description of Artificial Sequence: Synthetic oligonucleotide
  Antisense strand to SEQ ID NO: 186446
uacauucacauaaauuggu

SEQ ID NO: 186448 - RNA, 19 nt, Artificial Sequence
  Description of Artificial Sequence: Synthetic oligonucleotide
  Sense strand starting at position 3432 of SEQ ID NO: 2403
guagaaaugcagcaacaaa

SEQ ID NO: 186449 - RNA, 19 nt, Artificial Sequence
  Description of Artificial Sequence: Synthetic oligonucleotide
  Antisense strand to SEQ ID NO: 186448
uuuguugcugcauuucuac

SEQ ID NO: 186450 - RNA, 19 nt, Artificial Sequence
  Description of Artificial Sequence: Synthetic oligonucleotide
  Sense strand starting at position 3463 of SEQ ID NO: 2403
ucuuaaucauuggcaaaug

SEQ ID NO: 186451 - RNA, 19 nt, Artificial Sequence
  Description of Artificial Sequence: Synthetic oligonucleotide
  Antisense strand to SEQ ID NO: 186450
cauuugccaaugauuaaga

SEQ ID NO: 186452 - RNA, 19 nt, Artificial Sequence
  Description of Artificial Sequence: Synthetic oligonucleotide
  Sense strand starting at position 3509 of SEQ ID NO: 2403
ucauguaugugguugauag

SEQ ID NO: 186453 - RNA, 19 nt, Artificial Sequence
  Description of Artificial Sequence: Synthetic oligonucleotide
  Antisense strand to SEQ ID NO: 186452
cuaucaaccacauacauga

SEQ ID NO: 186454 - RNA, 19 nt, Artificial Sequence
  Description of Artificial Sequence: Synthetic oligonucleotide
  Sense strand starting at position 3511 of SEQ ID NO: 2403
auguaugugguugauagca

SEQ ID NO: 186455 - RNA, 19 nt, Artificial Sequence
  Description of Artificial Sequence: Synthetic oligonucleotide
  Antisense strand to SEQ ID NO: 186454
ugcuaucaaccacauacau

SEQ ID NO: 186456 - RNA, 19 nt, Artificial Sequence
  Description of Artificial Sequence: Synthetic oligonucleotide
  Sense strand starting at position 3636 of SEQ ID NO: 2403
aucauacaucgcugauauu

SEQ ID NO: 186457 - RNA, 19 nt, Artificial Sequence
  Description of Artificial Sequence: Synthetic oligonucleotide
  Antisense strand to SEQ ID NO: 186456
aauaucagcgauguaugau

SEQ ID NO: 186458 - RNA, 19 nt, Artificial Sequence
  Description of Artificial Sequence: Synthetic oligonucleotide
  Sense strand starting at position 3645 of SEQ ID NO: 2403
cgcugauauuuauuauagu

SEQ ID NO: 186459 - RNA, 19 nt, Artificial Sequence
  Description of Artificial Sequence: Synthetic oligonucleotide
  Antisense strand to SEQ ID NO: 186458
acuauaauaaauaucagcg

SEQ ID NO: 186460 - RNA, 19 nt, Artificial Sequence
  Description of Artificial Sequence: Synthetic oligonucleotide
  Sense strand starting at position 3765 of SEQ ID NO: 2403
guuuauggauccucagaca

SEQ ID NO: 186461 - RNA, 19 nt, Artificial Sequence
  Description of Artificial Sequence: Synthetic oligonucleotide
  Antisense strand to SEQ ID NO: 186460
ugucugaggauccauaaac

SEQ ID NO: 186462 - RNA, 19 nt, Artificial Sequence
  Description of Artificial Sequence: Synthetic oligonucleotide
  Sense strand starting at position 3800 of SEQ ID NO: 2403
aggucaaugcaggaucuua

SEQ ID NO: 186463 - RNA, 19 nt, Artificial Sequence
  Description of Artificial Sequence: Synthetic oligonucleotide
  Antisense strand to SEQ ID NO: 186462
uaagauccugcauugaccu

SEQ ID NO: 186464 - RNA, 19 nt, Artificial Sequence
  Description of Artificial Sequence: Synthetic oligonucleotide
  Sense strand starting at position 3871 of SEQ ID NO: 2403
cuguaauugcaaggugacu

SEQ ID NO: 186465 - RNA, 19 nt, Artificial Sequence
  Description of Artificial Sequence: Synthetic oligonucleotide
  Antisense strand to SEQ ID NO: 186464
agucaccuugcaauuacag

SEQ ID NO: 186466 - RNA, 19 nt, Artificial Sequence
  Description of Artificial Sequence: Synthetic oligonucleotide
  Sense strand starting at position 3887 of SEQ ID NO: 2403
acucacauacaguguuuau

SEQ ID NO: 186467 - RNA, 19 nt, Artificial Sequence
  Description of Artificial Sequence: Synthetic oligonucleotide
  Antisense strand to SEQ ID NO: 186466
auaaacacuguaugugagu

SEQ ID NO: 186468 - RNA, 19 nt, Artificial Sequence
  Description of Artificial Sequence: Synthetic oligonucleotide
  Sense strand starting at position 3962 of SEQ ID NO: 2403
uccagcagagccugaauua

SEQ ID NO: 186469 - RNA, 19 nt, Artificial Sequence
  Description of Artificial Sequence: Synthetic oligonucleotide
  Antisense strand to SEQ ID NO: 186468
uaauucaggcucugcugga

SEQ ID NO: 186470 - RNA, 19 nt, Artificial Sequence
  Description of Artificial Sequence: Synthetic oligonucleotide
  Sense strand starting at position 3919 of SEQ ID NO: 2404
aggauauguucuuugggug

SEQ ID NO: 186471 - RNA, 19 nt, Artificial Sequence
  Description of Artificial Sequence: Synthetic oligonucleotide
  Antisense strand to SEQ ID NO: 186470
cacccaaagaacauauccu

SEQ ID NO: 186472 - RNA, 19 nt, Artificial Sequence
  Description of Artificial Sequence: Synthetic oligonucleotide
  Sense strand starting at position 3918 of SEQ ID NO: 2404
uaggauauguucuuugggu

SEQ ID NO: 186473 - RNA, 19 nt, Artificial Sequence
  Description of Artificial Sequence: Synthetic oligonucleotide
  Antisense strand to SEQ ID NO: 186472
acccaaagaacauauccua

SEQ ID NO: 186474 - RNA, 19 nt, Artificial Sequence
  Description of Artificial Sequence: Synthetic oligonucleotide
  Sense strand starting at position 3906 of SEQ ID NO: 2404
cuaauuuacuguuaggaua

SEQ ID NO: 186475 - RNA, 19 nt, Artificial Sequence
  Description of Artificial Sequence: Synthetic oligonucleotide
  Antisense strand to SEQ ID NO: 186474
uauccuaacaguaaauuag

SEQ ID NO: 186476 - RNA, 19 nt, Artificial Sequence
  Description of Artificial Sequence: Synthetic oligonucleotide
  Sense strand starting at position 3731 of SEQ ID NO: 2404
uaauaagaguugguaucag

SEQ ID NO: 186477 - RNA, 19 nt, Artificial Sequence
  Description of Artificial Sequence: Synthetic oligonucleotide
  Antisense strand to SEQ ID NO: 186476
cugauaccaacucuuauua

SEQ ID NO: 186478 - RNA, 19 nt, Artificial Sequence
  Description of Artificial Sequence: Synthetic oligonucleotide
  Sense strand starting at position 3730 of SEQ ID NO: 2404
uuaauaagaguugguauca

SEQ ID NO: 186479 - RNA, 19 nt, Artificial Sequence
  Description of Artificial Sequence: Synthetic oligonucleotide
  Antisense strand to SEQ ID NO: 186478
ugauaccaacucuuauuaa

SEQ ID NO: 186480 - RNA, 19 nt, Artificial Sequence
  Description of Artificial Sequence: Synthetic oligonucleotide
  Sense strand starting at position 3542 of SEQ ID NO: 2404
cucuaaggugucuaauucu

SEQ ID NO: 186481 - RNA, 19 nt, Artificial Sequence
  Description of Artificial Sequence: Synthetic oligonucleotide
  Antisense strand to SEQ ID NO: 186480
agaauuagacaccuuagag

SEQ ID NO: 186482 - RNA, 19 nt, Artificial Sequence
  Description of Artificial Sequence: Synthetic oligonucleotide
  Sense strand starting at position 3473 of SEQ ID NO: 2404
acaugcgaauucucucaga

SEQ ID NO: 186483 - RNA, 19 nt, Artificial Sequence
  Description of Artificial Sequence: Synthetic oligonucleotide
  Antisense strand to SEQ ID NO: 186482
ucugagagaauucgcaugu

SEQ ID NO: 186484 - RNA, 19 nt, Artificial Sequence
  Description of Artificial Sequence: Synthetic oligonucleotide
  Sense strand starting at position 3292 of SEQ ID NO: 2404
guuaauaucccugacaggu

SEQ ID NO: 186485 - RNA, 19 nt, Artificial Sequence
  Description of Artificial Sequence: Synthetic oligonucleotide
  Antisense strand to SEQ ID NO: 186484
accugucagggauauuaac

SEQ ID NO: 186486 - RNA, 19 nt, Artificial Sequence
  Description of Artificial Sequence: Synthetic oligonucleotide
  Sense strand starting at position 3291 of SEQ ID NO: 2404
gguuaauaucccugacagg

SEQ ID NO: 186487 - RNA, 19 nt, Artificial Sequence
  Description of Artificial Sequence: Synthetic oligonucleotide
  Antisense strand to SEQ ID NO: 186486
ccugucagggauauuaacc

SEQ ID NO: 186488 - RNA, 19 nt, Artificial Sequence
  Description of Artificial Sequence: Synthetic oligonucleotide
  Sense strand starting at position 3290 of SEQ ID NO: 2404
ugguuaauaucccugacag

SEQ ID NO: 186489 - RNA, 19 nt, Artificial Sequence
  Description of Artificial Sequence: Synthetic oligonucleotide
  Antisense strand to SEQ ID NO: 186488
cugucagggauauuaacca

SEQ ID NO: 186490 - RNA, 19 nt, Artificial Sequence
  Description of Artificial Sequence: Synthetic oligonucleotide
  Sense strand starting at position 3281 of SEQ ID NO: 2404
ggguauguaugguuaauau

SEQ ID NO: 186491 - RNA, 19 nt, Artificial Sequence
  Description of Artificial Sequence: Synthetic oligonucleotide
  Antisense strand to SEQ ID NO: 186490
auauuaaccauacauaccc

SEQ ID NO: 186492 - RNA, 19 nt, Artificial Sequence
  Description of Artificial Sequence: Synthetic oligonucleotide
  Sense strand starting at position 3271 of SEQ ID NO: 2404
gcauuugaguggguaugua

SEQ ID NO: 186493 - RNA, 19 nt, Artificial Sequence
  Description of Artificial Sequence: Synthetic oligonucleotide
  Antisense strand to SEQ ID NO: 186492
uacauacccacucaaaugc

SEQ ID NO: 186494 - RNA, 19 nt, Artificial Sequence
  Description of Artificial Sequence: Synthetic oligonucleotide
  Sense strand starting at position 3247 of SEQ ID NO: 2404
uuaauaagcuuggugggaa

SEQ ID NO: 186495 - RNA, 19 nt, Artificial Sequence
  Description of Artificial Sequence: Synthetic oligonucleotide
  Antisense strand to SEQ ID NO: 186494
uucccaccaagcuuauuaa

SEQ ID NO: 186496 - RNA, 19 nt, Artificial Sequence
  Description of Artificial Sequence: Synthetic oligonucleotide
  Sense strand starting at position 3246 of SEQ ID NO: 2404
uuuaauaagcuugguggga

SEQ ID NO: 186497 - RNA, 19 nt, Artificial Sequence
  Description of Artificial Sequence: Synthetic oligonucleotide
  Antisense strand to SEQ ID NO: 186496
ucccaccaagcuuauuaaa

SEQ ID NO: 186498 - RNA, 19 nt, Artificial Sequence
  Description of Artificial Sequence: Synthetic oligonucleotide
  Sense strand starting at position 3188 of SEQ ID NO: 2404
aagauugcuguguauugga

SEQ ID NO: 186499 - RNA, 19 nt, Artificial Sequence
  Description of Artificial Sequence: Synthetic oligonucleotide
  Antisense strand to SEQ ID NO: 186498
uccaauacacagcaaucuu

SEQ ID NO: 186500 - RNA, 19 nt, Artificial Sequence
  Description of Artificial Sequence: Synthetic oligonucleotide
  Sense strand starting at position 3183 of SEQ ID NO: 2404
gaaacaagauugcugugua

SEQ ID NO: 186501 - RNA, 19 nt, Artificial Sequence
  Description of Artificial Sequence: Synthetic oligonucleotide
  Antisense strand to SEQ ID NO: 186500
uacacagcaaucuuguuuc

SEQ ID NO: 186502 - RNA, 19 nt, Artificial Sequence
  Description of Artificial Sequence: Synthetic oligonucleotide
  Sense strand starting at position 3132 of SEQ ID NO: 2404
aaagaaugcguaugaugag

SEQ ID NO: 186503 - RNA, 19 nt, Artificial Sequence
  Description of Artificial Sequence: Synthetic oligonucleotide
  Antisense strand to SEQ ID NO: 186502
cucaucauacgcauucuuu

SEQ ID NO: 186504 - RNA, 19 nt, Artificial Sequence
  Description of Artificial Sequence: Synthetic oligonucleotide
  Sense strand starting at position 3070 of SEQ ID NO: 2404
agaguuuccugagcuuaau

SEQ ID NO: 186505 - RNA, 19 nt, Artificial Sequence
  Description of Artificial Sequence: Synthetic oligonucleotide
  Antisense strand to SEQ ID NO: 186504
auuaagcucaggaaacucu

SEQ ID NO: 186506 - RNA, 19 nt, Artificial Sequence
  Description of Artificial Sequence: Synthetic oligonucleotide
  Sense strand starting at position 3045 of SEQ ID NO: 2404
uugucuacauuaucugauu

SEQ ID NO: 186507 - RNA, 19 nt, Artificial Sequence
  Description of Artificial Sequence: Synthetic oligonucleotide
  Antisense strand to SEQ ID NO: 186506
aaucagauaauguagacaa

SEQ ID NO: 186508 - RNA, 19 nt, Artificial Sequence
  Description of Artificial Sequence: Synthetic oligonucleotide
  Sense strand starting at position 3021 of SEQ ID NO: 2404
gcagccagccuagaaauua

SEQ ID NO: 186509 - RNA, 19 nt, Artificial Sequence
  Description of Artificial Sequence: Synthetic oligonucleotide
  Antisense strand to SEQ ID NO: 186508
uaauuucuaggcuggcugc

SEQ ID NO: 186510 - RNA, 19 nt, Artificial Sequence
  Description of Artificial Sequence: Synthetic oligonucleotide
  Sense strand starting at position 2934 of SEQ ID NO: 2404
aguucugaugucuagagcu

SEQ ID NO: 186511 - RNA, 19 nt, Artificial Sequence
  Description of Artificial Sequence: Synthetic oligonucleotide
  Antisense strand to SEQ ID NO: 186510
agcucuagacaucagaacu

SEQ ID NO: 186512 - RNA, 19 nt, Artificial Sequence
  Description of Artificial Sequence: Synthetic oligonucleotide
  Sense strand starting at position 2921 of SEQ ID NO: 2404
guguuuagaaaugaguucu

SEQ ID NO: 186513 - RNA, 19 nt, Artificial Sequence
  Description of Artificial Sequence: Synthetic oligonucleotide
  Antisense strand to SEQ ID NO: 186512
agaacucauuucuaaacac

SEQ ID NO: 186514 - RNA, 19 nt, Artificial Sequence
  Description of Artificial Sequence: Synthetic oligonucleotide
  Sense strand starting at position 2920 of SEQ ID NO: 2404
aguguuuagaaaugaguuc

SEQ ID NO: 186515 - RNA, 19 nt, Artificial Sequence
  Description of Artificial Sequence: Synthetic oligonucleotide
  Antisense strand to SEQ ID NO: 186514
gaacucauuucuaaacacu

SEQ ID NO: 186516 - RNA, 19 nt, Artificial Sequence
  Description of Artificial Sequence: Synthetic oligonucleotide
  Sense strand starting at position 2904 of SEQ ID NO: 2404
ucuugagcugcauagaagu

SEQ ID NO: 186517 - RNA, 19 nt, Artificial Sequence
  Description of Artificial Sequence: Synthetic oligonucleotide
  Antisense strand to SEQ ID NO: 186516
acuucuaugcagcucaaga

SEQ ID NO: 186518 - RNA, 19 nt, Artificial Sequence
  Description of Artificial Sequence: Synthetic oligonucleotide
  Sense strand starting at position 2902 of SEQ ID NO: 2404
auucuugagcugcauagaa

SEQ ID NO: 186519 - RNA, 19 nt, Artificial Sequence
  Description of Artificial Sequence: Synthetic oligonucleotide
  Antisense strand to SEQ ID NO: 186518
uucuaugcagcucaagaau

SEQ ID NO: 186520 - RNA, 19 nt, Artificial Sequence
  Description of Artificial Sequence: Synthetic oligonucleotide
  Sense strand starting at position 2600 of SEQ ID NO: 2404
gcgggagcucuugcugguu

SEQ ID NO: 186521 - RNA, 19 nt, Artificial Sequence
  Description of Artificial Sequence: Synthetic oligonucleotide
  Antisense strand to SEQ ID NO: 186520
aaccagcaagagcucccgc

SEQ ID NO: 186522 - RNA, 19 nt, Artificial Sequence
  Description of Artificial Sequence: Synthetic oligonucleotide
  Sense strand starting at position 2496 of SEQ ID NO: 2404
ccgucucuacgagaaguga

SEQ ID NO: 186523 - RNA, 19 nt, Artificial Sequence
  Description of Artificial Sequence: Synthetic oligonucleotide
  Antisense strand to SEQ ID NO: 186522
ucacuucucguagagacgg

SEQ ID NO: 186524 - RNA, 19 nt, Artificial Sequence
  Description of Artificial Sequence: Synthetic oligonucleotide
  Sense strand starting at position 2416 of SEQ ID NO: 2404
gucacuucucuugaagaac

SEQ ID NO: 186525 - RNA, 19 nt, Artificial Sequence
  Description of Artificial Sequence: Synthetic oligonucleotide
  Antisense strand to SEQ ID NO: 186524
guucuucaagagaagugac

SEQ ID NO: 186526 - RNA, 19 nt, Artificial Sequence
  Description of Artificial Sequence: Synthetic oligonucleotide
  Sense strand starting at position 2132 of SEQ ID NO: 2404
cgguguuucgcagcccaga

SEQ ID NO: 186527 - RNA, 19 nt, Artificial Sequence
  Description of Artificial Sequence: Synthetic oligonucleotide
  Antisense strand to SEQ ID NO: 186526
ucugggcugcgaaacaccg

SEQ ID NO: 186528 - RNA, 19 nt, Artificial Sequence
  Description of Artificial Sequence: Synthetic oligonucleotide
  Sense strand starting at position 1590 of SEQ ID NO: 2404
cgauguuuccaagaugcac

SEQ ID NO: 186529 - RNA, 19 nt, Artificial Sequence
  Description of Artificial Sequence: Synthetic oligonucleotide
  Antisense strand to SEQ ID NO: 186528
gugcaucuuggaaacaucg

SEQ ID NO: 186530 - RNA, 19 nt, Artificial Sequence
  Description of Artificial Sequence: Synthetic oligonucleotide
  Sense strand starting at position 1533 of SEQ ID NO: 2404
accaaaccuucuuccgaga

SEQ ID NO: 186531 - RNA, 19 nt, Artificial Sequence
  Description of Artificial Sequence: Synthetic oligonucleotide
  Antisense strand to SEQ ID NO: 186530
ucucggaagaagguuuggu

SEQ ID NO: 186532 - RNA, 19 nt, Artificial Sequence
  Description of Artificial Sequence: Synthetic oligonucleotide
  Sense strand starting at position 1442 of SEQ ID NO: 2404
ucgccucgauauuuaaacu

SEQ ID NO: 186533 - RNA, 19 nt, Artificial Sequence
  Description of Artificial Sequence: Synthetic oligonucleotide
  Antisense strand to SEQ ID NO: 186532
aguuuaaauaucgaggcga

SEQ ID NO: 186534 - RNA, 19 nt, Artificial Sequence
  Description of Artificial Sequence: Synthetic oligonucleotide
  Sense strand starting at position 1080 of SEQ ID NO: 2404
acuggauuacugcacugau

SEQ ID NO: 186535 - RNA, 19 nt, Artificial Sequence
  Description of Artificial Sequence: Synthetic oligonucleotide
  Antisense strand to SEQ ID NO: 186534
aucagugcaguaauccagu

SEQ ID NO: 186536 - RNA, 19 nt, Artificial Sequence
  Description of Artificial Sequence: Synthetic oligonucleotide
  Sense strand starting at position 1070 of SEQ ID NO: 2404
gcucuuuaucacuggauua

SEQ ID NO: 186537 - RNA, 19 nt, Artificial Sequence
  Description of Artificial Sequence: Synthetic oligonucleotide
  Antisense strand to SEQ ID NO: 186536
uaauccagugauaaagagc

SEQ ID NO: 186538 - RNA, 19 nt, Artificial Sequence
  Description of Artificial Sequence: Synthetic oligonucleotide
  Sense strand starting at position 1069 of SEQ ID NO: 2404
agcucuuuaucacuggauu

SEQ ID NO: 186539 - RNA, 19 nt, Artificial Sequence
  Description of Artificial Sequence: Synthetic oligonucleotide
  Antisense strand to SEQ ID NO: 186538
aauccagugauaaagagcu

SEQ ID NO: 186540 - RNA, 19 nt, Artificial Sequence
  Description of Artificial Sequence: Synthetic oligonucleotide
  Sense strand starting at position 1017 of SEQ ID NO: 2404
ccugacuguuacucugaaa

SEQ ID NO: 186541 - RNA, 19 nt, Artificial Sequence
  Description of Artificial Sequence: Synthetic oligonucleotide
  Antisense strand to SEQ ID NO: 186540
uuucagaguaacagucagg

SEQ ID NO: 186542 - RNA, 19 nt, Artificial Sequence
  Description of Artificial Sequence: Synthetic oligonucleotide
  Sense strand starting at position 1016 of SEQ ID NO: 2404
accugacuguuacucugaa

SEQ ID NO: 186543 - RNA, 19 nt, Artificial Sequence
  Description of Artificial Sequence: Synthetic oligonucleotide
  Antisense strand to SEQ ID NO: 186542
uucagaguaacagucaggu

SEQ ID NO: 186544 - RNA, 19 nt, Artificial Sequence
  Description of Artificial Sequence: Synthetic oligonucleotide
  Sense strand starting at position 878 of SEQ ID NO: 2404
gcaaauugcuaacucaaag

SEQ ID NO: 186545 - RNA, 19 nt, Artificial Sequence
  Description of Artificial Sequence: Synthetic oligonucleotide
  Antisense strand to SEQ ID NO: 186544
cuuugaguuagcaauuugc

SEQ ID NO: 186546 - RNA, 19 nt, Artificial Sequence
  Description of Artificial Sequence: Synthetic oligonucleotide
  Sense strand starting at position 823 of SEQ ID NO: 2404
ggaagucacucuuccuauc

SEQ ID NO: 186547 - RNA, 19 nt, Artificial Sequence
  Description of Artificial Sequence: Synthetic oligonucleotide
  Antisense strand to SEQ ID NO: 186546
gauaggaagagugacuucc

SEQ ID NO: 186548 - RNA, 19 nt, Artificial Sequence
  Description of Artificial Sequence: Synthetic oligonucleotide
  Sense strand starting at position 390 of SEQ ID NO: 2404
acgcuauaguaacugauaa

SEQ ID NO: 186549 - RNA, 19 nt, Artificial Sequence
  Description of Artificial Sequence: Synthetic oligonucleotide
  Antisense strand to SEQ ID NO: 186548
uuaucaguuacuauagcgu

SEQ ID NO: 186550 - RNA, 19 nt, Artificial Sequence
  Description of Artificial Sequence: Synthetic oligonucleotide
  Sense strand starting at position 48 of SEQ ID NO: 2405
acuaaagcguuucugaaac

SEQ ID NO: 186551 - RNA, 19 nt, Artificial Sequence
  Description of Artificial Sequence: Synthetic oligonucleotide
  Antisense strand to SEQ ID NO: 186550
guuucagaaacgcuuuagu

SEQ ID NO: 186552 - RNA, 19 nt, Artificial Sequence
  Description of Artificial Sequence: Synthetic oligonucleotide
  Sense strand starting at position 87 of SEQ ID NO: 2405
ucauaugccgcccauuaaa

SEQ ID NO: 186553 - RNA, 19 nt, Artificial Sequence
  Description of Artificial Sequence: Synthetic oligonucleotide
  Antisense strand to SEQ ID NO: 186552
uuuaaugggcggcauauga

SEQ ID NO: 186554 - RNA, 19 nt, Artificial Sequence
  Description of Artificial Sequence: Synthetic oligonucleotide
  Sense strand starting at position 142 of SEQ ID NO: 2405
guugaacaccauuauguaa

SEQ ID NO: 186555 - RNA, 19 nt, Artificial Sequence
  Description of Artificial Sequence: Synthetic oligonucleotide
  Antisense strand to SEQ ID NO: 186554
uuacauaaugguguucaac

SEQ ID NO: 186556 - RNA, 19 nt, Artificial Sequence
  Description of Artificial Sequence: Synthetic oligonucleotide
  Sense strand starting at position 149 of SEQ ID NO: 2405
accauuauguaaguaguaa

SEQ ID NO: 186557 - RNA, 19 nt, Artificial Sequence
  Description of Artificial Sequence: Synthetic oligonucleotide
  Antisense strand to SEQ ID NO: 186556
uuacuacuuacauaauggu

SEQ ID NO: 186558 - RNA, 19 nt, Artificial Sequence
  Description of Artificial Sequence: Synthetic oligonucleotide
  Sense strand starting at position 160 of SEQ ID NO: 2405
aguaguaacauaggauagu

SEQ ID NO: 186559 - RNA, 19 nt, Artificial Sequence
  Description of Artificial Sequence: Synthetic oligonucleotide
  Antisense strand to SEQ ID NO: 186558
acuauccuauguuacuacu

SEQ ID NO: 186560 - RNA, 19 nt, Artificial Sequence
  Description of Artificial Sequence: Synthetic oligonucleotide
  Sense strand starting at position 161 of SEQ ID NO: 2405
guaguaacauaggauagua

SEQ ID NO: 186561 - RNA, 19 nt, Artificial Sequence
  Description of Artificial Sequence: Synthetic oligonucleotide
  Antisense strand to SEQ ID NO: 186560
uacuauccuauguuacuac

SEQ ID NO: 186562 - RNA, 19 nt, Artificial Sequence
  Description of Artificial Sequence: Synthetic oligonucleotide
  Sense strand starting at position 385 of SEQ ID NO: 2405
uuuccauuaccguguaaua

SEQ ID NO: 186563 - RNA, 19 nt, Artificial Sequence
  Description of Artificial Sequence: Synthetic oligonucleotide
  Antisense strand to SEQ ID NO: 186562
uauuacacgguaauggaaa

SEQ ID NO: 186564 - RNA, 19 nt, Artificial Sequence
  Description of Artificial Sequence: Synthetic oligonucleotide
  Sense strand starting at position 387 of SEQ ID NO: 2405
uccauuaccguguaauaau

SEQ ID NO: 186565 - RNA, 19 nt, Artificial Sequence
  Description of Artificial Sequence: Synthetic oligonucleotide
  Antisense strand to SEQ ID NO: 186564
auuauuacacgguaaugga

SEQ ID NO: 186566 - RNA, 19 nt, Artificial Sequence
  Description of Artificial Sequence: Synthetic oligonucleotide
  Sense strand starting at position 396 of SEQ ID NO: 2405
guguaauaauguuucuuuc

SEQ ID NO: 186567 - RNA, 19 nt, Artificial Sequence
  Description of Artificial Sequence: Synthetic oligonucleotide
  Antisense strand to SEQ ID NO: 186566
gaaagaaacauuauuacac

SEQ ID NO: 186568 - RNA, 19 nt, Artificial Sequence
  Description of Artificial Sequence: Synthetic oligonucleotide
  Sense strand starting at position 398 of SEQ ID NO: 2405
guaauaauguuucuuuccu

SEQ ID NO: 186569 - RNA, 19 nt, Artificial Sequence
  Description of Artificial Sequence: Synthetic oligonucleotide
  Antisense strand to SEQ ID NO: 186568
aggaaagaaacauuauuac

SEQ ID NO: 186570 - RNA, 19 nt, Artificial Sequence
  Description of Artificial Sequence: Synthetic oligonucleotide
  Sense strand starting at position 527 of SEQ ID NO: 2405
ggcguuucuccuucuuagu

SEQ ID NO: 186571 - RNA, 19 nt, Artificial Sequence
  Description of Artificial Sequence: Synthetic oligonucleotide
  Antisense strand to SEQ ID NO: 186570
acuaagaaggagaaacgcc

SEQ ID NO: 186572 - RNA, 19 nt, Artificial Sequence
  Description of Artificial Sequence: Synthetic oligonucleotide
  Sense strand starting at position 528 of SEQ ID NO: 2405
gcguuucuccuucuuagua

SEQ ID NO: 186573 - RNA, 19 nt, Artificial Sequence
  Description of Artificial Sequence: Synthetic oligonucleotide
  Antisense strand to SEQ ID NO: 186572
uacuaagaaggagaaacgc

SEQ ID NO: 186574 - RNA, 19 nt, Artificial Sequence
  Description of Artificial Sequence: Synthetic oligonucleotide
  Sense strand starting at position 529 of SEQ ID NO: 2405
cguuucuccuucuuaguaa

SEQ ID NO: 186575 - RNA, 19 nt, Artificial Sequence
  Description of Artificial Sequence: Synthetic oligonucleotide
  Antisense strand to SEQ ID NO: 186574
uuacuaagaaggagaaacg

SEQ ID NO: 186576 - RNA, 19 nt, Artificial Sequence
  Description of Artificial Sequence: Synthetic oligonucleotide
  Sense strand starting at position 592 of SEQ ID NO: 2405
acuugaauuuacugugaaa

SEQ ID NO: 186577 - RNA, 19 nt, Artificial Sequence
  Description of Artificial Sequence: Synthetic oligonucleotide
  Antisense strand to SEQ ID NO: 186576
uuucacaguaaauucaagu

SEQ ID NO: 186578 - RNA, 19 nt, Artificial Sequence
  Description of Artificial Sequence: Synthetic oligonucleotide
  Sense strand starting at position 698 of SEQ ID NO: 2405
agaaauaaguauuaggauc

SEQ ID NO: 186579 - RNA, 19 nt, Artificial Sequence
  Description of Artificial Sequence: Synthetic oligonucleotide
  Antisense strand to SEQ ID NO: 186578
gauccuaauacuuauuucu

SEQ ID NO: 186580 - RNA, 19 nt, Artificial Sequence
  Description of Artificial Sequence: Synthetic oligonucleotide
  Sense strand starting at position 706 of SEQ ID NO: 2405
guauuaggaucacaaccua

SEQ ID NO: 186581 - RNA, 19 nt, Artificial Sequence
  Description of Artificial Sequence: Synthetic oligonucleotide
  Antisense strand to SEQ ID NO: 186580
uagguugugauccuaauac

SEQ ID NO: 186582 - RNA, 19 nt, Artificial Sequence
  Description of Artificial Sequence: Synthetic oligonucleotide
  Sense strand starting at position 723 of SEQ ID NO: 2405
uacgaaucuggguggaaca

SEQ ID NO: 186583 - RNA, 19 nt, Artificial Sequence
  Description of Artificial Sequence: Synthetic oligonucleotide
  Antisense strand to SEQ ID NO: 186582
uguuccacccagauucgua

SEQ ID NO: 186584 - RNA, 19 nt, Artificial Sequence
  Description of Artificial Sequence: Synthetic oligonucleotide
  Sense strand starting at position 977 of SEQ ID NO: 2405
gguuuaacccuuugaguuc

SEQ ID NO: 186585 - RNA, 19 nt, Artificial Sequence
  Description of Artificial Sequence: Synthetic oligonucleotide
  Antisense strand to SEQ ID NO: 186584
gaacucaaaggguuaaacc

SEQ ID NO: 186586 - RNA, 19 nt, Artificial Sequence
  Description of Artificial Sequence: Synthetic oligonucleotide
  Sense strand starting at position 1109 of SEQ ID NO: 2405
cgaccauugaugugagaaa

SEQ ID NO: 186587 - RNA, 19 nt, Artificial Sequence
  Description of Artificial Sequence: Synthetic oligonucleotide
  Antisense strand to SEQ ID NO: 186586
uuucucacaucaauggucg

SEQ ID NO: 186588 - RNA, 19 nt, Artificial Sequence
  Description of Artificial Sequence: Synthetic oligonucleotide
  Sense strand starting at position 1110 of SEQ ID NO: 2405
gaccauugaugugagaaag

SEQ ID NO: 186589 - RNA, 19 nt, Artificial Sequence
  Description of Artificial Sequence: Synthetic oligonucleotide
  Antisense strand to SEQ ID NO: 186588
cuuucucacaucaaugguc

SEQ ID NO: 186590 - RNA, 19 nt, Artificial Sequence
  Description of Artificial Sequence: Synthetic oligonucleotide
  Sense strand starting at position 2248 of SEQ ID NO: 2405
acaggauugucgccugcaa

SEQ ID NO: 186591 - RNA, 19 nt, Artificial Sequence
  Description of Artificial Sequence: Synthetic oligonucleotide
  Antisense strand to SEQ ID NO: 186590
uugcaggcgacaauccugu

SEQ ID NO: 186592 - RNA, 19 nt, Artificial Sequence
  Description of Artificial Sequence: Synthetic oligonucleotide
  Sense strand starting at position 2250 of SEQ ID NO: 2405
aggauugucgccugcaaau

SEQ ID NO: 186593 - RNA, 19 nt, Artificial Sequence
  Description of Artificial Sequence: Synthetic oligonucleotide
  Antisense strand to SEQ ID NO: 186592
auuugcaggcgacaauccu

SEQ ID NO: 186594 - RNA, 19 nt, Artificial Sequence
  Description of Artificial Sequence: Synthetic oligonucleotide
  Sense strand starting at position 2268 of SEQ ID NO: 2405
uggagaagacugcgcauua

SEQ ID NO: 186595 - RNA, 19 nt, Artificial Sequence
  Description of Artificial Sequence: Synthetic oligonucleotide
  Antisense strand to SEQ ID NO: 186594
uaaugcgcagucuucucca

SEQ ID NO: 186596 - RNA, 19 nt, Artificial Sequence
  Description of Artificial Sequence: Synthetic oligonucleotide
  Sense strand starting at position 2273 of SEQ ID NO: 2405
aagacugcgcauuaggauu

SEQ ID NO: 186597 - RNA, 19 nt, Artificial Sequence
  Description of Artificial Sequence: Synthetic oligonucleotide
  Antisense strand to SEQ ID NO: 186596
aauccuaaugcgcagucuu

SEQ ID NO: 186598 - RNA, 19 nt, Artificial Sequence
  Description of Artificial Sequence: Synthetic oligonucleotide
  Sense strand starting at position 2279 of SEQ ID NO: 2405
gcgcauuaggauugacucu

SEQ ID NO: 186599 - RNA, 19 nt, Artificial Sequence
  Description of Artificial Sequence: Synthetic oligonucleotide
  Antisense strand to SEQ ID NO: 186598
agagucaauccuaaugcgc

SEQ ID NO: 186600 - RNA, 19 nt, Artificial Sequence
  Description of Artificial Sequence: Synthetic oligonucleotide
  Sense strand starting at position 2309 of SEQ ID NO: 2405
cccgauaauuaauaaaggu

SEQ ID NO: 186601 - RNA, 19 nt, Artificial Sequence
  Description of Artificial Sequence: Synthetic oligonucleotide
  Antisense strand to SEQ ID NO: 186600
accuuuauuaauuaucggg

SEQ ID NO: 186602 - RNA, 19 nt, Artificial Sequence
  Description of Artificial Sequence: Synthetic oligonucleotide
  Sense strand starting at position 2441 of SEQ ID NO: 2405
gcugaucugccuugaaagc

SEQ ID NO: 186603 - RNA, 19 nt, Artificial Sequence
  Description of Artificial Sequence: Synthetic oligonucleotide
  Antisense strand to SEQ ID NO: 186602
gcuuucaaggcagaucagc

SEQ ID NO: 186604 - RNA, 19 nt, Artificial Sequence
  Description of Artificial Sequence: Synthetic oligonucleotide
  Sense strand starting at position 2442 of SEQ ID NO: 2405
cugaucugccuugaaagca

SEQ ID NO: 186605 - RNA, 19 nt, Artificial Sequence
  Description of Artificial Sequence: Synthetic oligonucleotide
  Antisense strand to SEQ ID NO: 186604
ugcuuucaaggcagaucag

SEQ ID NO: 186606 - RNA, 19 nt, Artificial Sequence
  Description of Artificial Sequence: Synthetic oligonucleotide
  Sense strand starting at position 2529 of SEQ ID NO: 2405
ccacaaauauacgugaugu

SEQ ID NO: 186607 - RNA, 19 nt, Artificial Sequence
  Description of Artificial Sequence: Synthetic oligonucleotide
  Antisense strand to SEQ ID NO: 186606
acaucacguauauuugugg

SEQ ID NO: 186608 - RNA, 19 nt, Artificial Sequence
  Description of Artificial Sequence: Synthetic oligonucleotide
  Sense strand starting at position 2537 of SEQ ID NO: 2405
auacgugauguucaaccga

SEQ ID NO: 186609 - RNA, 19 nt, Artificial Sequence
  Description of Artificial Sequence: Synthetic oligonucleotide
  Antisense strand to SEQ ID NO: 186608
ucgguugaacaucacguau

SEQ ID NO: 186610 - RNA, 19 nt, Artificial Sequence
  Description of Artificial Sequence: Synthetic oligonucleotide
  Sense strand starting at position 2562 of SEQ ID NO: 2405
uuaagcauccaggaaguau

SEQ ID NO: 186611 - RNA, 19 nt, Artificial Sequence
  Description of Artificial Sequence: Synthetic oligonucleotide
  Antisense strand to SEQ ID NO: 186610
auacuuccuggaugcuuaa

SEQ ID NO: 186612 - RNA, 19 nt, Artificial Sequence
  Description of Artificial Sequence: Synthetic oligonucleotide
  Sense strand starting at position 2942 of SEQ ID NO: 2405
aggcgaaaguccagaguga

SEQ ID NO: 186613 - RNA, 19 nt, Artificial Sequence
  Description of Artificial Sequence: Synthetic oligonucleotide
  Antisense strand to SEQ ID NO: 186612
ucacucuggacuuucgccu

SEQ ID NO: 186614 - RNA, 19 nt, Artificial Sequence
  Description of Artificial Sequence: Synthetic oligonucleotide
  Sense strand starting at position 2989 of SEQ ID NO: 2405
guaacagucugguaaagag

SEQ ID NO: 186615 - RNA, 19 nt, Artificial Sequence
  Description of Artificial Sequence: Synthetic oligonucleotide
  Antisense strand to SEQ ID NO: 186614
cucuuuaccagacuguuac

SEQ ID NO: 186616 - RNA, 19 nt, Artificial Sequence
  Description of Artificial Sequence: Synthetic oligonucleotide
  Sense strand starting at position 3588 of SEQ ID NO: 2405
cacacauaugugggaacua

SEQ ID NO: 186617 - RNA, 19 nt, Artificial Sequence
  Description of Artificial Sequence: Synthetic oligonucleotide
  Antisense strand to SEQ ID NO: 186616
uaguucccacauaugugug

SEQ ID NO: 186618 - RNA, 19 nt, Artificial Sequence
  Description of Artificial Sequence: Synthetic oligonucleotide
  Sense strand starting at position 3589 of SEQ ID NO: 2405
acacauaugugggaacuaa

SEQ ID NO: 186619 - RNA, 19 nt, Artificial Sequence
  Description of Artificial Sequence: Synthetic oligonucleotide
  Antisense strand to SEQ ID NO: 186618
uuaguucccacauaugugu

SEQ ID NO: 186620 - RNA, 19 nt, Artificial Sequence
  Description of Artificial Sequence: Synthetic oligonucleotide
  Sense strand starting at position 3735 of SEQ ID NO: 2405
ucuagugcucaauagcaua

SEQ ID NO: 186621 - RNA, 19 nt, Artificial Sequence
  Description of Artificial Sequence: Synthetic oligonucleotide
  Antisense strand to SEQ ID NO: 186620
uaugcuauugagcacuaga

SEQ ID NO: 186622 - RNA, 19 nt, Artificial Sequence
  Description of Artificial Sequence: Synthetic oligonucleotide
  Sense strand starting at position 3747 of SEQ ID NO: 2405
uagcauaauugggugacua

SEQ ID NO: 186623 - RNA, 19 nt, Artificial Sequence
  Description of Artificial Sequence: Synthetic oligonucleotide
  Antisense strand to SEQ ID NO: 186622
uagucacccaauuaugcua

SEQ ID NO: 186624 - RNA, 19 nt, Artificial Sequence
  Description of Artificial Sequence: Synthetic oligonucleotide
  Sense strand starting at position 3748 of SEQ ID NO: 2405
agcauaauugggugacuau

SEQ ID NO: 186625 - RNA, 19 nt, Artificial Sequence
  Description of Artificial Sequence: Synthetic oligonucleotide
  Antisense strand to SEQ ID NO: 186624
auagucacccaauuaugcu

SEQ ID NO: 186626 - RNA, 19 nt, Artificial Sequence
  Description of Artificial Sequence: Synthetic oligonucleotide
  Sense strand starting at position 3749 of SEQ ID NO: 2405
gcauaauugggugacuaua

SEQ ID NO: 186627 - RNA, 19 nt, Artificial Sequence
  Description of Artificial Sequence: Synthetic oligonucleotide
  Antisense strand to SEQ ID NO: 186626
uauagucacccaauuaugc

SEQ ID NO: 186628 - RNA, 19 nt, Artificial Sequence
  Description of Artificial Sequence: Synthetic oligonucleotide
  Sense strand starting at position 3751 of SEQ ID NO: 2405
auaauugggugacuauagu

SEQ ID NO: 186629 - RNA, 19 nt, Artificial Sequence
  Description of Artificial Sequence: Synthetic oligonucleotide
  Antisense strand to SEQ ID NO: 186628
acuauagucacccaauuau

SEQ ID NO: 186630 - RNA, 19 nt, Artificial Sequence
  Description of Artificial Sequence: Synthetic oligonucleotide
  Sense strand starting at position 3744 of SEQ ID NO: 2406
aguaucauuguccaucagu

SEQ ID NO: 186631 - RNA, 19 nt, Artificial Sequence
  Description of Artificial Sequence: Synthetic oligonucleotide
  Antisense strand to SEQ ID NO: 186630
acugauggacaaugauacu

SEQ ID NO: 186632 - RNA, 19 nt, Artificial Sequence
  Description of Artificial Sequence: Synthetic oligonucleotide
  Sense strand starting at position 3742 of SEQ ID NO: 2406
auaguaucauuguccauca

SEQ ID NO: 186633 - RNA, 19 nt, Artificial Sequence
  Description of Artificial Sequence: Synthetic oligonucleotide
  Antisense strand to SEQ ID NO: 186632
ugauggacaaugauacuau

SEQ ID NO: 186634 - RNA, 19 nt, Artificial Sequence
  Description of Artificial Sequence: Synthetic oligonucleotide
  Sense strand starting at position 3215 of SEQ ID NO: 2406
acguuaugugcagaaagau

SEQ ID NO: 186635 - RNA, 19 nt, Artificial Sequence
  Description of Artificial Sequence: Synthetic oligonucleotide
  Antisense strand to SEQ ID NO: 186634
aucuuucugcacauaacgu

SEQ ID NO: 186636 - RNA, 19 nt, Artificial Sequence
  Description of Artificial Sequence: Synthetic oligonucleotide
  Sense strand starting at position 3213 of SEQ ID NO: 2406
uuacguuaugugcagaaag

SEQ ID NO: 186637 - RNA, 19 nt, Artificial Sequence
  Description of Artificial Sequence: Synthetic oligonucleotide
  Antisense strand to SEQ ID NO: 186636
cuuucugcacauaacguaa

SEQ ID NO: 186638 - RNA, 19 nt, Artificial Sequence
  Description of Artificial Sequence: Synthetic oligonucleotide
  Sense strand starting at position 3103 of SEQ ID NO: 2406
cuguaauuggucuaaauua

SEQ ID NO: 186639 - RNA, 19 nt, Artificial Sequence
  Description of Artificial Sequence: Synthetic oligonucleotide
  Antisense strand to SEQ ID NO: 186638
uaauuuagaccaauuacag

SEQ ID NO: 186640 - RNA, 19 nt, Artificial Sequence
  Description of Artificial Sequence: Synthetic oligonucleotide
  Sense strand starting at position 3101 of SEQ ID NO: 2406
uucuguaauuggucuaaau

SEQ ID NO: 186641 - RNA, 19 nt, Artificial Sequence
  Description of Artificial Sequence: Synthetic oligonucleotide
  Antisense strand to SEQ ID NO: 186640
auuuagaccaauuacagaa

SEQ ID NO: 186642 - RNA, 19 nt, Artificial Sequence
  Description of Artificial Sequence: Synthetic oligonucleotide
  Sense strand starting at position 3071 of SEQ ID NO: 2406
ggcagaauuuaauaaagca

SEQ ID NO: 186643 - RNA, 19 nt, Artificial Sequence
  Description of Artificial Sequence: Synthetic oligonucleotide
  Antisense strand to SEQ ID NO: 186642
ugcuuuauuaaauucugcc

SEQ ID NO: 186644 - RNA, 19 nt, Artificial Sequence
  Description of Artificial Sequence: Synthetic oligonucleotide
  Sense strand starting at position 2674 of SEQ ID NO: 2406
cuguaauugguguaaauaa

SEQ ID NO: 186645 - RNA, 19 nt, Artificial Sequence
  Description of Artificial Sequence: Synthetic oligonucleotide
  Antisense strand to SEQ ID NO: 186644
uuauuuacaccaauuacag

SEQ ID NO: 186646 - RNA, 19 nt, Artificial Sequence
  Description of Artificial Sequence: Synthetic oligonucleotide
  Sense strand starting at position 2642 of SEQ ID NO: 2406
ggcagaauuuaauaaagua

SEQ ID NO: 186647 - RNA, 19 nt, Artificial Sequence
  Description of Artificial Sequence: Synthetic oligonucleotide
  Antisense strand to SEQ ID NO: 186646
uacuuuauuaaauucugcc

SEQ ID NO: 186648 - RNA, 19 nt, Artificial Sequence
  Description of Artificial Sequence: Synthetic oligonucleotide
  Sense strand starting at position 2542 of SEQ ID NO: 2406
uuaggaguccggugggauu

SEQ ID NO: 186649 - RNA, 19 nt, Artificial Sequence
  Description of Artificial Sequence: Synthetic oligonucleotide
  Antisense strand to SEQ ID NO: 186648
aaucccaccggacuccuaa

SEQ ID NO: 186650 - RNA, 19 nt, Artificial Sequence
  Description of Artificial Sequence: Synthetic oligonucleotide
  Sense strand starting at position 2531 of SEQ ID NO: 2406
uuuaucugugauuaggagu

SEQ ID NO: 186651 - RNA, 19 nt, Artificial Sequence
  Description of Artificial Sequence: Synthetic oligonucleotide
  Antisense strand to SEQ ID NO: 186650
acuccuaaucacagauaaa

SEQ ID NO: 186652 - RNA, 19 nt, Artificial Sequence
  Description of Artificial Sequence: Synthetic oligonucleotide
  Sense strand starting at position 2509 of SEQ ID NO: 2406
ccgugaguaacccaagguu

SEQ ID NO: 186653 - RNA, 19 nt, Artificial Sequence
  Description of Artificial Sequence: Synthetic oligonucleotide
  Antisense strand to SEQ ID NO: 186652
aaccuuggguuacucacgg

SEQ ID NO: 186654 - RNA, 19 nt, Artificial Sequence
  Description of Artificial Sequence: Synthetic oligonucleotide
  Sense strand starting at position 2501 of SEQ ID NO: 2406
acuugaauccgugaguaac

SEQ ID NO: 186655 - RNA, 19 nt, Artificial Sequence
  Description of Artificial Sequence: Synthetic oligonucleotide
  Antisense strand to SEQ ID NO: 186654
guuacucacggauucaagu

SEQ ID NO: 186656 - RNA, 19 nt, Artificial Sequence
  Description of Artificial Sequence: Synthetic oligonucleotide
  Sense strand starting at position 2499 of SEQ ID NO: 2406
aaacuugaauccgugagua

SEQ ID NO: 186657 - RNA, 19 nt, Artificial Sequence
  Description of Artificial Sequence: Synthetic oligonucleotide
  Antisense strand to SEQ ID NO: 186656
uacucacggauucaaguuu

SEQ ID NO: 186658 - RNA, 19 nt, Artificial Sequence
  Description of Artificial Sequence: Synthetic oligonucleotide
  Sense strand starting at position 2465 of SEQ ID NO: 2406
ugacucaagcuguaaauau

SEQ ID NO: 186659 - RNA, 19 nt, Artificial Sequence
  Description of Artificial Sequence: Synthetic oligonucleotide
  Antisense strand to SEQ ID NO: 186658
auauuuacagcuugaguca

SEQ ID NO: 186660 - RNA, 19 nt, Artificial Sequence
  Description of Artificial Sequence: Synthetic oligonucleotide
  Sense strand starting at position 2454 of SEQ ID NO: 2406
uguuuagaauuugacucaa

SEQ ID NO: 186661 - RNA, 19 nt, Artificial Sequence
  Description of Artificial Sequence: Synthetic oligonucleotide
  Antisense strand to SEQ ID NO: 186660
uugagucaaauucuaaaca

SEQ ID NO: 186662 - RNA, 19 nt, Artificial Sequence
  Description of Artificial Sequence: Synthetic oligonucleotide
  Sense strand starting at position 2121 of SEQ ID NO: 2406
gcagcuuuccacuaccaag

SEQ ID NO: 186663 - RNA, 19 nt, Artificial Sequence
  Description of Artificial Sequence: Synthetic oligonucleotide
  Antisense strand to SEQ ID NO: 186662
cuugguaguggaaagcugc

SEQ ID NO: 186664 - RNA, 19 nt, Artificial Sequence
  Description of Artificial Sequence: Synthetic oligonucleotide
  Sense strand starting at position 2073 of SEQ ID NO: 2406
auugguugccacuauguga

SEQ ID NO: 186665 - RNA, 19 nt, Artificial Sequence
  Description of Artificial Sequence: Synthetic oligonucleotide
  Antisense strand to SEQ ID NO: 186664
ucacauaguggcaaccaau

SEQ ID NO: 186666 - RNA, 19 nt, Artificial Sequence
  Description of Artificial Sequence: Synthetic oligonucleotide
  Sense strand starting at position 1671 of SEQ ID NO: 2406
cagggaaagacuuguguuu

SEQ ID NO: 186667 - RNA, 19 nt, Artificial Sequence
  Description of Artificial Sequence: Synthetic oligonucleotide
  Antisense strand to SEQ ID NO: 186666
aaacacaagucuuucccug

SEQ ID NO: 186668 - RNA, 19 nt, Artificial Sequence
  Description of Artificial Sequence: Synthetic oligonucleotide
  Sense strand starting at position 1652 of SEQ ID NO: 2406
gcuggaagcucuuugaaag

SEQ ID NO: 186669 - RNA, 19 nt, Artificial Sequence
  Description of Artificial Sequence: Synthetic oligonucleotide
  Antisense strand to SEQ ID NO: 186668
cuuucaaagagcuuccagc

SEQ ID NO: 186670 - RNA, 19 nt, Artificial Sequence
  Description of Artificial Sequence: Synthetic oligonucleotide
  Sense strand starting at position 1610 of SEQ ID NO: 2406
cguuaacugcucucucguu

SEQ ID NO: 186671 - RNA, 19 nt, Artificial Sequence
  Description of Artificial Sequence: Synthetic oligonucleotide
  Antisense strand to SEQ ID NO: 186670
aacgagagagcaguuaacg

SEQ ID NO: 186672 - RNA, 19 nt, Artificial Sequence
  Description of Artificial Sequence: Synthetic oligonucleotide
  Sense strand starting at position 1581 of SEQ ID NO: 2406
aguacaugcccuuaaaguu

SEQ ID NO: 186673 - RNA, 19 nt, Artificial Sequence
  Description of Artificial Sequence: Synthetic oligonucleotide
  Antisense strand to SEQ ID NO: 186672
aacuuuaagggcauguacu

SEQ ID NO: 186674 - RNA, 19 nt, Artificial Sequence
  Description of Artificial Sequence: Synthetic oligonucleotide
  Sense strand starting at position 1546 of SEQ ID NO: 2406
auagucacuggguauauau

SEQ ID NO: 186675 - RNA, 19 nt, Artificial Sequence
  Description of Artificial Sequence: Synthetic oligonucleotide
  Antisense strand to SEQ ID NO: 186674
auauauacccagugacuau

SEQ ID NO: 186676 - RNA, 19 nt, Artificial Sequence
  Description of Artificial Sequence: Synthetic oligonucleotide
  Sense strand starting at position 1545 of SEQ ID NO: 2406
gauagucacuggguauaua

SEQ ID NO: 186677 - RNA, 19 nt, Artificial Sequence
  Description of Artificial Sequence: Synthetic oligonucleotide
  Antisense strand to SEQ ID NO: 186676
uauauacccagugacuauc

SEQ ID NO: 186678 - RNA, 19 nt, Artificial Sequence
  Description of Artificial Sequence: Synthetic oligonucleotide
  Sense strand starting at position 1543 of SEQ ID NO: 2406
augauagucacuggguaua

SEQ ID NO: 186679 - RNA, 19 nt, Artificial Sequence
  Description of Artificial Sequence: Synthetic oligonucleotide
  Antisense strand to SEQ ID NO: 186678
uauacccagugacuaucau

SEQ ID NO: 186680 - RNA, 19 nt, Artificial Sequence
  Description of Artificial Sequence: Synthetic oligonucleotide
  Sense strand starting at position 1542 of SEQ ID NO: 2406
uaugauagucacuggguau

SEQ ID NO: 186681 - RNA, 19 nt, Artificial Sequence
  Description of Artificial Sequence: Synthetic oligonucleotide
  Antisense strand to SEQ ID NO: 186680
auacccagugacuaucaua

SEQ ID NO: 186682 - RNA, 19 nt, Artificial Sequence
  Description of Artificial Sequence: Synthetic oligonucleotide
  Sense strand starting at position 1541 of SEQ ID NO: 2406
auaugauagucacugggua

SEQ ID NO: 186683 - RNA, 19 nt, Artificial Sequence
  Description of Artificial Sequence: Synthetic oligonucleotide
  Antisense strand to SEQ ID NO: 186682
uacccagugacuaucauau

SEQ ID NO: 186684 - RNA, 19 nt, Artificial Sequence
  Description of Artificial Sequence: Synthetic oligonucleotide
  Sense strand starting at position 1530 of SEQ ID NO: 2406
uguacuaggcaauaugaua

SEQ ID NO: 186685 - RNA, 19 nt, Artificial Sequence
  Description of Artificial Sequence: Synthetic oligonucleotide
  Antisense strand to SEQ ID NO: 186684
uaucauauugccuaguaca

SEQ ID NO: 186686 - RNA, 19 nt, Artificial Sequence
  Description of Artificial Sequence: Synthetic oligonucleotide
  Sense strand starting at position 1508 of SEQ ID NO: 2406
augguuuauugaguuccua

SEQ ID NO: 186687 - RNA, 19 nt, Artificial Sequence
  Description of Artificial Sequence: Synthetic oligonucleotide
  Antisense strand to SEQ ID NO: 186686
uaggaacucaauaaaccau

SEQ ID NO: 186688 - RNA, 19 nt, Artificial Sequence
  Description of Artificial Sequence: Synthetic oligonucleotide
  Sense strand starting at position 1284 of SEQ ID NO: 2406
ggaauaagacaauguccuu

SEQ ID NO: 186689 - RNA, 19 nt, Artificial Sequence
  Description of Artificial Sequence: Synthetic oligonucleotide
  Antisense strand to SEQ ID NO: 186688
aaggacauugucuuauucc

SEQ ID NO: 186690 - RNA, 19 nt, Artificial Sequence
  Description of Artificial Sequence: Synthetic oligonucleotide
  Sense strand starting at position 1264 of SEQ ID NO: 2406
uggguaaacuagucacuag

SEQ ID NO: 186691 - RNA, 19 nt, Artificial Sequence
  Description of Artificial Sequence: Synthetic oligonucleotide
  Antisense strand to SEQ ID NO: 186690
cuagugacuaguuuaccca

SEQ ID NO: 186692 - RNA, 19 nt, Artificial Sequence
  Description of Artificial Sequence: Synthetic oligonucleotide
  Sense strand starting at position 1096 of SEQ ID NO: 2406
cuuguucucccugacacuu

SEQ ID NO: 186693 - RNA, 19 nt, Artificial Sequence
  Description of Artificial Sequence: Synthetic oligonucleotide
  Antisense strand to SEQ ID NO: 186692
aagugucagggagaacaag

SEQ ID NO: 186694 - RNA, 19 nt, Artificial Sequence
  Description of Artificial Sequence: Synthetic oligonucleotide
  Sense strand starting at position 742 of SEQ ID NO: 2406
agcauugugagacagucuu

SEQ ID NO: 186695 - RNA, 19 nt, Artificial Sequence
  Description of Artificial Sequence: Synthetic oligonucleotide
  Antisense strand to SEQ ID NO: 186694
aagacugucucacaaugcu

SEQ ID NO: 186696 - RNA, 19 nt, Artificial Sequence
  Description of Artificial Sequence: Synthetic oligonucleotide
  Sense strand starting at position 639 of SEQ ID NO: 2406
ucucuuccagauuguagaa

SEQ ID NO: 186697 - RNA, 19 nt, Artificial Sequence
  Description of Artificial Sequence: Synthetic oligonucleotide
  Antisense strand to SEQ ID NO: 186696
uucuacaaucuggaagaga

SEQ ID NO: 186698 - RNA, 19 nt, Artificial Sequence
  Description of Artificial Sequence: Synthetic oligonucleotide
  Sense strand starting at position 586 of SEQ ID NO: 2406
gucucuucccuguauaaug

SEQ ID NO: 186699 - RNA, 19 nt, Artificial Sequence
  Description of Artificial Sequence: Synthetic oligonucleotide
  Antisense strand to SEQ ID NO: 186698
cauuauacagggaagagac

SEQ ID NO: 186700 - RNA, 19 nt, Artificial Sequence
  Description of Artificial Sequence: Synthetic oligonucleotide
  Sense strand starting at position 481 of SEQ ID NO: 2406
gcccuagaucauggacacu

SEQ ID NO: 186701 - RNA, 19 nt, Artificial Sequence
  Description of Artificial Sequence: Synthetic oligonucleotide
  Antisense strand to SEQ ID NO: 186700
aguguccaugaucuagggc

SEQ ID NO: 186702 - RNA, 19 nt, Artificial Sequence
  Description of Artificial Sequence: Synthetic oligonucleotide
  Sense strand starting at position 471 of SEQ ID NO: 2406
ugaauccucugcccuagau

SEQ ID NO: 186703 - RNA, 19 nt, Artificial Sequence
  Description of Artificial Sequence: Synthetic oligonucleotide
  Antisense strand to SEQ ID NO: 186702
aucuagggcagaggauuca

SEQ ID NO: 186704 - RNA, 19 nt, Artificial Sequence
  Description of Artificial Sequence: Synthetic oligonucleotide
  Sense strand starting at position 412 of SEQ ID NO: 2406
ucaauuggugguuagugaa

SEQ ID NO: 186705 - RNA, 19 nt, Artificial Sequence
  Description of Artificial Sequence: Synthetic oligonucleotide
  Antisense strand to SEQ ID NO: 186704
uucacuaaccaccaauuga

SEQ ID NO: 186706 - RNA, 19 nt, Artificial Sequence
  Description of Artificial Sequence: Synthetic oligonucleotide
  Sense strand starting at position 289 of SEQ ID NO: 2406
uugugagguaaugaugagu

SEQ ID NO: 186707 - RNA, 19 nt, Artificial Sequence
  Description of Artificial Sequence: Synthetic oligonucleotide
  Antisense strand to SEQ ID NO: 186706
acucaucauuaccucacaa

SEQ ID NO: 186708 - RNA, 19 nt, Artificial Sequence
  Description of Artificial Sequence: Synthetic oligonucleotide
  Sense strand starting at position 169 of SEQ ID NO: 2406
gaagacagauuauauggaa

SEQ ID NO: 186709 - RNA, 19 nt, Artificial Sequence
  Description of Artificial Sequence: Synthetic oligonucleotide
  Antisense strand to SEQ ID NO: 186708
uuccauauaaucugucuuc

SEQ ID NO: 186710 - RNA, 19 nt, Artificial Sequence
  Description of Artificial Sequence: Synthetic oligonucleotide
  Sense strand starting at position 3969 of SEQ ID NO: 2407
uugagauuagggcacuagu

SEQ ID NO: 186711 - RNA, 19 nt, Artificial Sequence
  Description of Artificial Sequence: Synthetic oligonucleotide
  Antisense strand to SEQ ID NO: 186710
acuagugcccuaaucucaa

SEQ ID NO: 186712 - RNA, 19 nt, Artificial Sequence
  Description of Artificial Sequence: Synthetic oligonucleotide
  Sense strand starting at position 3958 of SEQ ID NO: 2407
gaugacagugguugagauu

SEQ ID NO: 186713 - RNA, 19 nt, Artificial Sequence
  Description of Artificial Sequence: Synthetic oligonucleotide
  Antisense strand to SEQ ID NO: 186712
aaucucaaccacugucauc

SEQ ID NO: 186714 - RNA, 19 nt, Artificial Sequence
  Description of Artificial Sequence: Synthetic oligonucleotide
  Sense strand starting at position 3957 of SEQ ID NO: 2407
agaugacagugguugagau

SEQ ID NO: 186715 - RNA, 19 nt, Artificial Sequence
  Description of Artificial Sequence: Synthetic oligonucleotide
  Antisense strand to SEQ ID NO: 186714
aucucaaccacugucaucu

SEQ ID NO: 186716 - RNA, 19 nt, Artificial Sequence
  Description of Artificial Sequence: Synthetic oligonucleotide
  Sense strand starting at position 3954 of SEQ ID NO: 2407
aagagaugacagugguuga

SEQ ID NO: 186717 - RNA, 19 nt, Artificial Sequence
  Description of Artificial Sequence: Synthetic oligonucleotide
  Antisense strand to SEQ ID NO: 186716
ucaaccacugucaucucuu

SEQ ID NO: 186718 - RNA, 19 nt, Artificial Sequence
  Description of Artificial Sequence: Synthetic oligonucleotide
  Sense strand starting at position 3948 of SEQ ID NO: 2407
gcaaguaagagaugacagu

SEQ ID NO: 186719 - RNA, 19 nt, Artificial Sequence
  Description of Artificial Sequence: Synthetic oligonucleotide
  Antisense strand to SEQ ID NO: 186718
acugucaucucuuacuugc

SEQ ID NO: 186720 - RNA, 19 nt, Artificial Sequence
  Description of Artificial Sequence: Synthetic oligonucleotide
  Sense strand starting at position 3873 of SEQ ID NO: 2407
cugcuuugcggagaauaaa

SEQ ID NO: 186721 - RNA, 19 nt, Artificial Sequence
  Description of Artificial Sequence: Synthetic oligonucleotide
  Antisense strand to SEQ ID NO: 186720
uuuauucuccgcaaagcag

SEQ ID NO: 186722 - RNA, 19 nt, Artificial Sequence
  Description of Artificial Sequence: Synthetic oligonucleotide
  Sense strand starting at position 3696 of SEQ ID NO: 2407
gguggugugggaugagaga

SEQ ID NO: 186723 - RNA, 19 nt, Artificial Sequence
  Description of Artificial Sequence: Synthetic oligonucleotide
  Antisense strand to SEQ ID NO: 186722
ucucucaucccacaccacc

SEQ ID NO: 186724 - RNA, 19 nt, Artificial Sequence
  Description of Artificial Sequence: Synthetic oligonucleotide
  Sense strand starting at position 3630 of SEQ ID NO: 2407
gcguaaaguccugagauug

SEQ ID NO: 186725 - RNA, 19 nt, Artificial Sequence
  Description of Artificial Sequence: Synthetic oligonucleotide
  Antisense strand to SEQ ID NO: 186724
caaucucaggacuuuacgc

SEQ ID NO: 186726 - RNA, 19 nt, Artificial Sequence
  Description of Artificial Sequence: Synthetic oligonucleotide
  Sense strand starting at position 3610 of SEQ ID NO: 2407
ggauguucuagggacagca

SEQ ID NO: 186727 - RNA, 19 nt, Artificial Sequence
  Description of Artificial Sequence: Synthetic oligonucleotide
  Antisense strand to SEQ ID NO: 186726
ugcugucccuagaacaucc

SEQ ID NO: 186728 - RNA, 19 nt, Artificial Sequence
  Description of Artificial Sequence: Synthetic oligonucleotide
  Sense strand starting at position 3601 of SEQ ID NO: 2407
augguagaaggauguucua

SEQ ID NO: 186729 - RNA, 19 nt, Artificial Sequence
  Description of Artificial Sequence: Synthetic oligonucleotide
  Antisense strand to SEQ ID NO: 186728
uagaacauccuucuaccau

SEQ ID NO: 186730 - RNA, 19 nt, Artificial Sequence
  Description of Artificial Sequence: Synthetic oligonucleotide
  Sense strand starting at position 3584 of SEQ ID NO: 2407
gcaagucauguggauaaau

SEQ ID NO: 186731 - RNA, 19 nt, Artificial Sequence
  Description of Artificial Sequence: Synthetic oligonucleotide
  Antisense strand to SEQ ID NO: 186730
auuuauccacaugacuugc

SEQ ID NO: 186732 - RNA, 19 nt, Artificial Sequence
  Description of Artificial Sequence: Synthetic oligonucleotide
  Sense strand starting at position 3436 of SEQ ID NO: 2407
uguaucagugagcaauugu

SEQ ID NO: 186733 - RNA, 19 nt, Artificial Sequence
  Description of Artificial Sequence: Synthetic oligonucleotide
  Antisense strand to SEQ ID NO: 186732
acaauugcucacugauaca

SEQ ID NO: 186734 - RNA, 19 nt, Artificial Sequence
  Description of Artificial Sequence: Synthetic oligonucleotide
  Sense strand starting at position 3435 of SEQ ID NO: 2407
auguaucagugagcaauug

SEQ ID NO: 186735 - RNA, 19 nt, Artificial Sequence
  Description of Artificial Sequence: Synthetic oligonucleotide
  Antisense strand to SEQ ID NO: 186734
caauugcucacugauacau

SEQ ID NO: 186736 - RNA, 19 nt, Artificial Sequence
  Description of Artificial Sequence: Synthetic oligonucleotide
  Sense strand starting at position 3431 of SEQ ID NO: 2407
aauaauguaucagugagca

SEQ ID NO: 186737 - RNA, 19 nt, Artificial Sequence
  Description of Artificial Sequence: Synthetic oligonucleotide
  Antisense strand to SEQ ID NO: 186736
ugcucacugauacauuauu

SEQ ID NO: 186738 - RNA, 19 nt, Artificial Sequence
  Description of Artificial Sequence: Synthetic oligonucleotide
  Sense strand starting at position 3249 of SEQ ID NO: 2407
uacagugaugucuggagaa

SEQ ID NO: 186739 - RNA, 19 nt, Artificial Sequence
  Description of Artificial Sequence: Synthetic oligonucleotide
  Antisense strand to SEQ ID NO: 186738
uucuccagacaucacugua

SEQ ID NO: 186740 - RNA, 19 nt, Artificial Sequence
  Description of Artificial Sequence: Synthetic oligonucleotide
  Sense strand starting at position 3160 of SEQ ID NO: 2407
aggagagcgcaguaagauu

SEQ ID NO: 186741 - RNA, 19 nt, Artificial Sequence
  Description of Artificial Sequence: Synthetic oligonucleotide
  Antisense strand to SEQ ID NO: 186740
aaucuuacugcgcucuccu

SEQ ID NO: 186742 - RNA, 19 nt, Artificial Sequence
  Description of Artificial Sequence: Synthetic oligonucleotide
  Sense strand starting at position 3145 of SEQ ID NO: 2407
cucuaacuaucuguuagga

SEQ ID NO: 186743 - RNA, 19 nt, Artificial Sequence
  Description of Artificial Sequence: Synthetic oligonucleotide
  Antisense strand to SEQ ID NO: 186742
uccuaacagauaguuagag

SEQ ID NO: 186744 - RNA, 19 nt, Artificial Sequence
  Description of Artificial Sequence: Synthetic oligonucleotide
  Sense strand starting at position 3136 of SEQ ID NO: 2407
gguguccaccucuaacuau

SEQ ID NO: 186745 - RNA, 19 nt, Artificial Sequence
  Description of Artificial Sequence: Synthetic oligonucleotide
  Antisense strand to SEQ ID NO: 186744
auaguuagagguggacacc

SEQ ID NO: 186746 - RNA, 19 nt, Artificial Sequence
  Description of Artificial Sequence: Synthetic oligonucleotide
  Sense strand starting at position 2963 of SEQ ID NO: 2407
ggagaaguuguuuaauguu

SEQ ID NO: 186747 - RNA, 19 nt, Artificial Sequence
  Description of Artificial Sequence: Synthetic oligonucleotide
  Antisense strand to SEQ ID NO: 186746
aacauuaaacaacuucucc

SEQ ID NO: 186748 - RNA, 19 nt, Artificial Sequence
  Description of Artificial Sequence: Synthetic oligonucleotide
  Sense strand starting at position 2962 of SEQ ID NO: 2407
aggagaaguuguuuaaugu

SEQ ID NO: 186749 - RNA, 19 nt, Artificial Sequence
  Description of Artificial Sequence: Synthetic oligonucleotide
  Antisense strand to SEQ ID NO: 186748
acauuaaacaacuucuccu

SEQ ID NO: 186750 - RNA, 19 nt, Artificial Sequence
  Description of Artificial Sequence: Synthetic oligonucleotide
  Sense strand starting at position 2759 of SEQ ID NO: 2407
uuguccuucgauugaaaua

SEQ ID NO: 186751 - RNA, 19 nt, Artificial Sequence
  Description of Artificial Sequence: Synthetic oligonucleotide
  Antisense strand to SEQ ID NO: 186750
uauuucaaucgaaggacaa

SEQ ID NO: 186752 - RNA, 19 nt, Artificial Sequence
  Description of Artificial Sequence: Synthetic oligonucleotide
  Sense strand starting at position 2640 of SEQ ID NO: 2407
cuguacuggauauggaaau

SEQ ID NO: 186753 - RNA, 19 nt, Artificial Sequence
  Description of Artificial Sequence: Synthetic oligonucleotide
  Antisense strand to SEQ ID NO: 186752
auuuccauauccaguacag

SEQ ID NO: 186754 - RNA, 19 nt, Artificial Sequence
  Description of Artificial Sequence: Synthetic oligonucleotide
  Sense strand starting at position 2293 of SEQ ID NO: 2407
cacaauaccgcggaaagua

SEQ ID NO: 186755 - RNA, 19 nt, Artificial Sequence
  Description of Artificial Sequence: Synthetic oligonucleotide
  Antisense strand to SEQ ID NO: 186754
uacuuuccgcgguauugug

SEQ ID NO: 186756 - RNA, 19 nt, Artificial Sequence
  Description of Artificial Sequence: Synthetic oligonucleotide
  Sense strand starting at position 1625 of SEQ ID NO: 2407
acuaucguguaaucacuga

SEQ ID NO: 186757 - RNA, 19 nt, Artificial Sequence
  Description of Artificial Sequence: Synthetic oligonucleotide
  Antisense strand to SEQ ID NO: 186756
ucagugauuacacgauagu

SEQ ID NO: 186758 - RNA, 19 nt, Artificial Sequence
  Description of Artificial Sequence: Synthetic oligonucleotide
  Sense strand starting at position 1622 of SEQ ID NO: 2407
uggacuaucguguaaucac

SEQ ID NO: 186759 - RNA, 19 nt, Artificial Sequence
  Description of Artificial Sequence: Synthetic oligonucleotide
  Antisense strand to SEQ ID NO: 186758
gugauuacacgauagucca

SEQ ID NO: 186760 - RNA, 19 nt, Artificial Sequence
  Description of Artificial Sequence: Synthetic oligonucleotide
  Sense strand starting at position 1483 of SEQ ID NO: 2407
ccgcuuuguuauuuaggga

SEQ ID NO: 186761 - RNA, 19 nt, Artificial Sequence
  Description of Artificial Sequence: Synthetic oligonucleotide
  Antisense strand to SEQ ID NO: 186760
ucccuaaauaacaaagcgg

SEQ ID NO: 186762 - RNA, 19 nt, Artificial Sequence
  Description of Artificial Sequence: Synthetic oligonucleotide
  Sense strand starting at position 1479 of SEQ ID NO: 2407
auguccgcuuuguuauuua

SEQ ID NO: 186763 - RNA, 19 nt, Artificial Sequence
  Description of Artificial Sequence: Synthetic oligonucleotide
  Antisense strand to SEQ ID NO: 186762
uaaauaacaaagcggacau

SEQ ID NO: 186764 - RNA, 19 nt, Artificial Sequence
  Description of Artificial Sequence: Synthetic oligonucleotide
  Sense strand starting at position 1475 of SEQ ID NO: 2407
ccucauguccgcuuuguua

SEQ ID NO: 186765 - RNA, 19 nt, Artificial Sequence
  Description of Artificial Sequence: Synthetic oligonucleotide
  Antisense strand to SEQ ID NO: 186764
uaacaaagcggacaugagg

SEQ ID NO: 186766 - RNA, 19 nt, Artificial Sequence
  Description of Artificial Sequence: Synthetic oligonucleotide
  Sense strand starting at position 1275 of SEQ ID NO: 2407
ugauaucuuuaggcuaaga

SEQ ID NO: 186767 - RNA, 19 nt, Artificial Sequence
  Description of Artificial Sequence: Synthetic oligonucleotide
  Antisense strand to SEQ ID NO: 186766
ucuuagccuaaagauauca

SEQ ID NO: 186768 - RNA, 19 nt, Artificial Sequence
  Description of Artificial Sequence: Synthetic oligonucleotide
  Sense strand starting at position 1272 of SEQ ID NO: 2407
ucaugauaucuuuaggcua

SEQ ID NO: 186769 - RNA, 19 nt, Artificial Sequence
  Description of Artificial Sequence: Synthetic oligonucleotide
  Antisense strand to SEQ ID NO: 186768
uagccuaaagauaucauga

SEQ ID NO: 186770 - RNA, 19 nt, Artificial Sequence
  Description of Artificial Sequence: Synthetic oligonucleotide
  Sense strand starting at position 1253 of SEQ ID NO: 2407
uaugaaagucuuuaugguc

SEQ ID NO: 186771 - RNA, 19 nt, Artificial Sequence
  Description of Artificial Sequence: Synthetic oligonucleotide
  Antisense strand to SEQ ID NO: 186770
gaccauaaagacuuucaua

SEQ ID NO: 186772 - RNA, 19 nt, Artificial Sequence
  Description of Artificial Sequence: Synthetic oligonucleotide
  Sense strand starting at position 1252 of SEQ ID NO: 2407
uuaugaaagucuuuauggu

SEQ ID NO: 186773 - RNA, 19 nt, Artificial Sequence
  Description of Artificial Sequence: Synthetic oligonucleotide
  Antisense strand to SEQ ID NO: 186772
accauaaagacuuucauaa

SEQ ID NO: 186774 - RNA, 19 nt, Artificial Sequence
  Description of Artificial Sequence: Synthetic oligonucleotide
  Sense strand starting at position 1181 of SEQ ID NO: 2407
aucauuccugccuagagau

SEQ ID NO: 186775 - RNA, 19 nt, Artificial Sequence
  Description of Artificial Sequence: Synthetic oligonucleotide
  Antisense strand to SEQ ID NO: 186774
aucucuaggcaggaaugau

SEQ ID NO: 186776 - RNA, 19 nt, Artificial Sequence
  Description of Artificial Sequence: Synthetic oligonucleotide
  Sense strand starting at position 416 of SEQ ID NO: 2407
uuagaaguugggugacuuu

SEQ ID NO: 186777 - RNA, 19 nt, Artificial Sequence
  Description of Artificial Sequence: Synthetic oligonucleotide
  Antisense strand to SEQ ID NO: 186776
aaagucacccaacuucuaa

SEQ ID NO: 186778 - RNA, 19 nt, Artificial Sequence
  Description of Artificial Sequence: Synthetic oligonucleotide
  Sense strand starting at position 415 of SEQ ID NO: 2407
cuuagaaguugggugacuu

SEQ ID NO: 186779 - RNA, 19 nt, Artificial Sequence
  Description of Artificial Sequence: Synthetic oligonucleotide
  Antisense strand to SEQ ID NO: 186778
aagucacccaacuucuaag

SEQ ID NO: 186780 - RNA, 19 nt, Artificial Sequence
  Description of Artificial Sequence: Synthetic oligonucleotide
  Sense strand starting at position 332 of SEQ ID NO: 2407
uuuguugaguaguuuagaa

SEQ ID NO: 186781 - RNA, 19 nt, Artificial Sequence
  Description of Artificial Sequence: Synthetic oligonucleotide
  Antisense strand to SEQ ID NO: 186780
uucuaaacuacucaacaaa

SEQ ID NO: 186782 - RNA, 19 nt, Artificial Sequence
  Description of Artificial Sequence: Synthetic oligonucleotide
  Sense strand starting at position 174 of SEQ ID NO: 2407
uugagagaauucuugucuu

SEQ ID NO: 186783 - RNA, 19 nt, Artificial Sequence
  Description of Artificial Sequence: Synthetic oligonucleotide
  Antisense strand to SEQ ID NO: 186782
aagacaagaauucucucaa

SEQ ID NO: 186784 - RNA, 19 nt, Artificial Sequence
  Description of Artificial Sequence: Synthetic oligonucleotide
  Sense strand starting at position 93 of SEQ ID NO: 2407
gcaaacugauagcuuugaa

SEQ ID NO: 186785 - RNA, 19 nt, Artificial Sequence
  Description of Artificial Sequence: Synthetic oligonucleotide
  Antisense strand to SEQ ID NO: 186784
uucaaagcuaucaguuugc

SEQ ID NO: 186786 - RNA, 19 nt, Artificial Sequence
  Description of Artificial Sequence: Synthetic oligonucleotide
  Sense strand starting at position 22 of SEQ ID NO: 2407
caugaugcuugaguauauu

SEQ ID NO: 186787 - RNA, 19 nt, Artificial Sequence
  Description of Artificial Sequence: Synthetic oligonucleotide
  Antisense strand to SEQ ID NO: 186786
aauauacucaagcaucaug

SEQ ID NO: 186788 - RNA, 19 nt, Artificial Sequence
  Description of Artificial Sequence: Synthetic oligonucleotide
  Sense strand starting at position 18 of SEQ ID NO: 2407
aggucaugaugcuugagua

SEQ ID NO: 186789 - RNA, 19 nt, Artificial Sequence
  Description of Artificial Sequence: Synthetic oligonucleotide
  Antisense strand to SEQ ID NO: 186788
uacucaagcaucaugaccu

SEQ ID NO: 186790 - RNA, 19 nt, Artificial Sequence
  Description of Artificial Sequence: Synthetic oligonucleotide
  Sense strand starting at position 118 of SEQ ID NO: 2408
gucacuggauucuuagaau

SEQ ID NO: 186791 - RNA, 19 nt, Artificial Sequence
  Description of Artificial Sequence: Synthetic oligonucleotide
  Antisense strand to SEQ ID NO: 186790
auucuaagaauccagugac

SEQ ID NO: 186792 - RNA, 19 nt, Artificial Sequence
  Description of Artificial Sequence: Synthetic oligonucleotide
  Sense strand starting at position 291 of SEQ ID NO: 2408
ugucaucaugcucauacuu

SEQ ID NO: 186793 - RNA, 19 nt, Artificial Sequence
  Description of Artificial Sequence: Synthetic oligonucleotide
  Antisense strand to SEQ ID NO: 186792
aaguaugagcaugaugaca

SEQ ID NO: 186794 - RNA, 19 nt, Artificial Sequence
  Description of Artificial Sequence: Synthetic oligonucleotide
  Sense strand starting at position 310 of SEQ ID NO: 2408
gcagaacuugcugacaaua

SEQ ID NO: 186795 - RNA, 19 nt, Artificial Sequence
  Description of Artificial Sequence: Synthetic oligonucleotide
  Antisense strand to SEQ ID NO: 186794
uauugucagcaaguucugc

SEQ ID NO: 186796 - RNA, 19 nt, Artificial Sequence
  Description of Artificial Sequence: Synthetic oligonucleotide
  Sense strand starting at position 326 of SEQ ID NO: 2408
auaagugucucauucucau

SEQ ID NO: 186797 - RNA, 19 nt, Artificial Sequence
  Description of Artificial Sequence: Synthetic oligonucleotide
  Antisense strand to SEQ ID NO: 186796
augagaaugagacacuuau

SEQ ID NO: 186798 - RNA, 19 nt, Artificial Sequence
  Description of Artificial Sequence: Synthetic oligonucleotide
  Sense strand starting at position 402 of SEQ ID NO: 2408
ggauuauaccaaggcagua

SEQ ID NO: 186799 - RNA, 19 nt, Artificial Sequence
  Description of Artificial Sequence: Synthetic oligonucleotide
  Antisense strand to SEQ ID NO: 186798
uacugccuugguauaaucc

SEQ ID NO: 186800 - RNA, 19 nt, Artificial Sequence
  Description of Artificial Sequence: Synthetic oligonucleotide
  Sense strand starting at position 494 of SEQ ID NO: 2408
guccacaucauuggagagu

SEQ ID NO: 186801 - RNA, 19 nt, Artificial Sequence
  Description of Artificial Sequence: Synthetic oligonucleotide
  Antisense strand to SEQ ID NO: 186800
acucuccaaugauguggac

SEQ ID NO: 186802 - RNA, 19 nt, Artificial Sequence
  Description of Artificial Sequence: Synthetic oligonucleotide
  Sense strand starting at position 516 of SEQ ID NO: 2408
gcuaauuucugagucuuug

SEQ ID NO: 186803 - RNA, 19 nt, Artificial Sequence
  Description of Artificial Sequence: Synthetic oligonucleotide
  Antisense strand to SEQ ID NO: 186802
caaagacucagaaauuagc

SEQ ID NO: 186804 - RNA, 19 nt, Artificial Sequence
  Description of Artificial Sequence: Synthetic oligonucleotide
  Sense strand starting at position 524 of SEQ ID NO: 2408
cugagucuuugacuuuauu

SEQ ID NO: 186805 - RNA, 19 nt, Artificial Sequence
  Description of Artificial Sequence: Synthetic oligonucleotide
  Antisense strand to SEQ ID NO: 186804
aauaaagucaaagacucag

SEQ ID NO: 186806 - RNA, 19 nt, Artificial Sequence
  Description of Artificial Sequence: Synthetic oligonucleotide
  Sense strand starting at position 536 of SEQ ID NO: 2408
cuuuauucugcguuacugu

SEQ ID NO: 186807 - RNA, 19 nt, Artificial Sequence
  Description of Artificial Sequence: Synthetic oligonucleotide
  Antisense strand to SEQ ID NO: 186806
acaguaacgcagaauaaag

SEQ ID NO: 186808 - RNA, 19 nt, Artificial Sequence
  Description of Artificial Sequence: Synthetic oligonucleotide
  Sense strand starting at position 782 of SEQ ID NO: 2408
aaaugucuugcagagucuu

SEQ ID NO: 186809 - RNA, 19 nt, Artificial Sequence
  Description of Artificial Sequence: Synthetic oligonucleotide
  Antisense strand to SEQ ID NO: 186808
aagacucugcaagacauuu

SEQ ID NO: 186810 - RNA, 19 nt, Artificial Sequence
  Description of Artificial Sequence: Synthetic oligonucleotide
  Sense strand starting at position 831 of SEQ ID NO: 2408
cacagugacugguuaagua

SEQ ID NO: 186811 - RNA, 19 nt, Artificial Sequence
  Description of Artificial Sequence: Synthetic oligonucleotide
  Antisense strand to SEQ ID NO: 186810
uacuuaaccagucacugug

SEQ ID NO: 186812 - RNA, 19 nt, Artificial Sequence
  Description of Artificial Sequence: Synthetic oligonucleotide
  Sense strand starting at position 835 of SEQ ID NO: 2408
gugacugguuaaguauaga

SEQ ID NO: 186813 - RNA, 19 nt, Artificial Sequence
  Description of Artificial Sequence: Synthetic oligonucleotide
  Antisense strand to SEQ ID NO: 186812
ucuauacuuaaccagucac

SEQ ID NO: 186814 - RNA, 19 nt, Artificial Sequence
  Description of Artificial Sequence: Synthetic oligonucleotide
  Sense strand starting at position 866 of SEQ ID NO: 2408
aguugucuugauuauguag

SEQ ID NO: 186815 - RNA, 19 nt, Artificial Sequence
  Description of Artificial Sequence: Synthetic oligonucleotide
  Antisense strand to SEQ ID NO: 186814
cuacauaaucaagacaacu

SEQ ID NO: 186816 - RNA, 19 nt, Artificial Sequence
  Description of Artificial Sequence: Synthetic oligonucleotide
  Sense strand starting at position 1110 of SEQ ID NO: 2408
ucaagauuaugcuuggucu

SEQ ID NO: 186817 - RNA, 19 nt, Artificial Sequence
  Description of Artificial Sequence: Synthetic oligonucleotide
  Antisense strand to SEQ ID NO: 186816
agaccaagcauaaucuuga

SEQ ID NO: 186818 - RNA, 19 nt, Artificial Sequence
  Description of Artificial Sequence: Synthetic oligonucleotide
  Sense strand starting at position 1174 of SEQ ID NO: 2408
ccaauccguugcuuaauuu

SEQ ID NO: 186819 - RNA, 19 nt, Artificial Sequence
  Description of Artificial Sequence: Synthetic oligonucleotide
  Antisense strand to SEQ ID NO: 186818
aaauuaagcaacggauugg

SEQ ID NO: 186820 - RNA, 19 nt, Artificial Sequence
  Description of Artificial Sequence: Synthetic oligonucleotide
  Sense strand starting at position 1307 of SEQ ID NO: 2408
cugaguauaggacguuaga

SEQ ID NO: 186821 - RNA, 19 nt, Artificial Sequence
  Description of Artificial Sequence: Synthetic oligonucleotide
  Antisense strand to SEQ ID NO: 186820
ucuaacguccuauacucag

SEQ ID NO: 186822 - RNA, 19 nt, Artificial Sequence
  Description of Artificial Sequence: Synthetic oligonucleotide
  Sense strand starting at position 1310 of SEQ ID NO: 2408
aguauaggacguuagauau

SEQ ID NO: 186823 - RNA, 19 nt, Artificial Sequence
  Description of Artificial Sequence: Synthetic oligonucleotide
  Antisense strand to SEQ ID NO: 186822
auaucuaacguccuauacu

SEQ ID NO: 186824 - RNA, 19 nt, Artificial Sequence
  Description of Artificial Sequence: Synthetic oligonucleotide
  Sense strand starting at position 1318 of SEQ ID NO: 2408
acguuagauauugagcuca

SEQ ID NO: 186825 - RNA, 19 nt, Artificial Sequence
  Description of Artificial Sequence: Synthetic oligonucleotide
  Antisense strand to SEQ ID NO: 186824
ugagcucaauaucuaacgu

SEQ ID NO: 186826 - RNA, 19 nt, Artificial Sequence
  Description of Artificial Sequence: Synthetic oligonucleotide
  Sense strand starting at position 1320 of SEQ ID NO: 2408
guuagauauugagcucaac

SEQ ID NO: 186827 - RNA, 19 nt, Artificial Sequence
  Description of Artificial Sequence: Synthetic oligonucleotide
  Antisense strand to SEQ ID NO: 186826
guugagcucaauaucuaac

SEQ ID NO: 186828 - RNA, 19 nt, Artificial Sequence
  Description of Artificial Sequence: Synthetic oligonucleotide
  Sense strand starting at position 1398 of SEQ ID NO: 2408
gauagugacucaccugaau

SEQ ID NO: 186829 - RNA, 19 nt, Artificial Sequence
  Description of Artificial Sequence: Synthetic oligonucleotide
  Antisense strand to SEQ ID NO: 186828
auucaggugagucacuauc

SEQ ID NO: 186830 - RNA, 19 nt, Artificial Sequence
  Description of Artificial Sequence: Synthetic oligonucleotide
  Sense strand starting at position 1609 of SEQ ID NO: 2408
caagcugucagcgcgugaa

SEQ ID NO: 186831 - RNA, 19 nt, Artificial Sequence
  Description of Artificial Sequence: Synthetic oligonucleotide
  Antisense strand to SEQ ID NO: 186830
uucacgcgcugacagcuug

SEQ ID NO: 186832 - RNA, 19 nt, Artificial Sequence
  Description of Artificial Sequence: Synthetic oligonucleotide
  Sense strand starting at position 2397 of SEQ ID NO: 2408
ggacuaucagagugauugg

SEQ ID NO: 186833 - RNA, 19 nt, Artificial Sequence
  Description of Artificial Sequence: Synthetic oligonucleotide
  Antisense strand to SEQ ID NO: 186832
ccaaucacucugauagucc

SEQ ID NO: 186834 - RNA, 19 nt, Artificial Sequence
  Description of Artificial Sequence: Synthetic oligonucleotide
  Sense strand starting at position 2534 of SEQ ID NO: 2408
gguacauaggcuuagugau

SEQ ID NO: 186835 - RNA, 19 nt, Artificial Sequence
  Description of Artificial Sequence: Synthetic oligonucleotide
  Antisense strand to SEQ ID NO: 186834
aucacuaagccuauguacc

SEQ ID NO: 186836 - RNA, 19 nt, Artificial Sequence
  Description of Artificial Sequence: Synthetic oligonucleotide
  Sense strand starting at position 2673 of SEQ ID NO: 2408
ugaggauaaugcucccuuu

SEQ ID NO: 186837 - RNA, 19 nt, Artificial Sequence
  Description of Artificial Sequence: Synthetic oligonucleotide
  Antisense strand to SEQ ID NO: 186836
aaagggagcauuauccuca

SEQ ID NO: 186838 - RNA, 19 nt, Artificial Sequence
  Description of Artificial Sequence: Synthetic oligonucleotide
  Sense strand starting at position 2741 of SEQ ID NO: 2408
uuagcuuuaggucagaaau

SEQ ID NO: 186839 - RNA, 19 nt, Artificial Sequence
  Description of Artificial Sequence: Synthetic oligonucleotide
  Antisense strand to SEQ ID NO: 186838
auuucugaccuaaagcuaa

SEQ ID NO: 186840 - RNA, 19 nt, Artificial Sequence
  Description of Artificial Sequence: Synthetic oligonucleotide
  Sense strand starting at position 2866 of SEQ ID NO: 2408
ggauaaguaacguauucua

SEQ ID NO: 186841 - RNA, 19 nt, Artificial Sequence
  Description of Artificial Sequence: Synthetic oligonucleotide
  Antisense strand to SEQ ID NO: 186840
uagaauacguuacuuaucc

SEQ ID NO: 186842 - RNA, 19 nt, Artificial Sequence
  Description of Artificial Sequence: Synthetic oligonucleotide
  Sense strand starting at position 3047 of SEQ ID NO: 2408
gucgguuucccagauaccu

SEQ ID NO: 186843 - RNA, 19 nt, Artificial Sequence
  Description of Artificial Sequence: Synthetic oligonucleotide
  Antisense strand to SEQ ID NO: 186842
agguaucugggaaaccgac

SEQ ID NO: 186844 - RNA, 19 nt, Artificial Sequence
  Description of Artificial Sequence: Synthetic oligonucleotide
  Sense strand starting at position 3082 of SEQ ID NO: 2408
ugauaacaaucagagaaau

SEQ ID NO: 186845 - RNA, 19 nt, Artificial Sequence
  Description of Artificial Sequence: Synthetic oligonucleotide
  Antisense strand to SEQ ID NO: 186844
auuucucugauuguuauca

SEQ ID NO: 186846 - RNA, 19 nt, Artificial Sequence
  Description of Artificial Sequence: Synthetic oligonucleotide
  Sense strand starting at position 3153 of SEQ ID NO: 2408
caagaaugaguauggcuaa

SEQ ID NO: 186847 - RNA, 19 nt, Artificial Sequence
  Description of Artificial Sequence: Synthetic oligonucleotide
  Antisense strand to SEQ ID NO: 186846
uuagccauacucauucuug

SEQ ID NO: 186848 - RNA, 19 nt, Artificial Sequence
  Description of Artificial Sequence: Synthetic oligonucleotide
  Sense strand starting at position 3156 of SEQ ID NO: 2408
gaaugaguauggcuaauua

SEQ ID NO: 186849 - RNA, 19 nt, Artificial Sequence
  Description of Artificial Sequence: Synthetic oligonucleotide
  Antisense strand to SEQ ID NO: 186848
uaauuagccauacucauuc

SEQ ID NO: 186850 - RNA, 19 nt, Artificial Sequence
  Description of Artificial Sequence: Synthetic oligonucleotide
  Sense strand starting at position 3187 of SEQ ID NO: 2408
gagcucacagucuaggaau

SEQ ID NO: 186851 - RNA, 19 nt, Artificial Sequence
  Description of Artificial Sequence: Synthetic oligonucleotide
  Antisense strand to SEQ ID NO: 186850
auuccuagacugugagcuc

SEQ ID NO: 186852 - RNA, 19 nt, Artificial Sequence
  Description of Artificial Sequence: Synthetic oligonucleotide
  Sense strand starting at position 3211 of SEQ ID NO: 2408
gcaccuuaagaguauuggu

SEQ ID NO: 186853 - RNA, 19 nt, Artificial Sequence
  Description of Artificial Sequence: Synthetic oligonucleotide
  Antisense strand to SEQ ID NO: 186852
accaauacucuuaaggugc

SEQ ID NO: 186854 - RNA, 19 nt, Artificial Sequence
  Description of Artificial Sequence: Synthetic oligonucleotide
  Sense strand starting at position 3349 of SEQ ID NO: 2408
aagagacaauugcugugaa

SEQ ID NO: 186855 - RNA, 19 nt, Artificial Sequence
  Description of Artificial Sequence: Synthetic oligonucleotide
  Antisense strand to SEQ ID NO: 186854
uucacagcaauugucucuu

SEQ ID NO: 186856 - RNA, 19 nt, Artificial Sequence
  Description of Artificial Sequence: Synthetic oligonucleotide
  Sense strand starting at position 3352 of SEQ ID NO: 2408
agacaauugcugugaaacu

SEQ ID NO: 186857 - RNA, 19 nt, Artificial Sequence
  Description of Artificial Sequence: Synthetic oligonucleotide
  Antisense strand to SEQ ID NO: 186856
aguuucacagcaauugucu

SEQ ID NO: 186858 - RNA, 19 nt, Artificial Sequence
  Description of Artificial Sequence: Synthetic oligonucleotide
  Sense strand starting at position 3385 of SEQ ID NO: 2408
gguacauagcgugugcuua

SEQ ID NO: 186859 - RNA, 19 nt, Artificial Sequence
  Description of Artificial Sequence: Synthetic oligonucleotide
  Antisense strand to SEQ ID NO: 186858
uaagcacacgcuauguacc

SEQ ID NO: 186860 - RNA, 19 nt, Artificial Sequence
  Description of Artificial Sequence: Synthetic oligonucleotide
  Sense strand starting at position 3650 of SEQ ID NO: 2408
auuguaauaccagguagua

SEQ ID NO: 186861 - RNA, 19 nt, Artificial Sequence
  Description of Artificial Sequence: Synthetic oligonucleotide
  Antisense strand to SEQ ID NO: 186860
uacuaccugguauuacaau

SEQ ID NO: 186862 - RNA, 19 nt, Artificial Sequence
  Description of Artificial Sequence: Synthetic oligonucleotide
  Sense strand starting at position 3691 of SEQ ID NO: 2408
caaggaauauccuugguuu

SEQ ID NO: 186863 - RNA, 19 nt, Artificial Sequence
  Description of Artificial Sequence: Synthetic oligonucleotide
  Antisense strand to SEQ ID NO: 186862
aaaccaaggauauuccuug

SEQ ID NO: 186864 - RNA, 19 nt, Artificial Sequence
  Description of Artificial Sequence: Synthetic oligonucleotide
  Sense strand starting at position 3741 of SEQ ID NO: 2408
aggcucuuccucuagaaau

SEQ ID NO: 186865 - RNA, 19 nt, Artificial Sequence
  Description of Artificial Sequence: Synthetic oligonucleotide
  Antisense strand to SEQ ID NO: 186864
auuucuagaggaagagccu

SEQ ID NO: 186866 - RNA, 19 nt, Artificial Sequence
  Description of Artificial Sequence: Synthetic oligonucleotide
  Sense strand starting at position 3778 of SEQ ID NO: 2408
uuccacuaccgcuaaagua

SEQ ID NO: 186867 - RNA, 19 nt, Artificial Sequence
  Description of Artificial Sequence: Synthetic oligonucleotide
  Antisense strand to SEQ ID NO: 186866
uacuuuagcgguaguggaa

SEQ ID NO: 186868 - RNA, 19 nt, Artificial Sequence
  Description of Artificial Sequence: Synthetic oligonucleotide
  Sense strand starting at position 3883 of SEQ ID NO: 2408
ucauaauagccaggaggau

SEQ ID NO: 186869 - RNA, 19 nt, Artificial Sequence
  Description of Artificial Sequence: Synthetic oligonucleotide
  Antisense strand to SEQ ID NO: 186868
auccuccuggcuauuauga

SEQ ID NO: 186870 - RNA, 19 nt, Artificial Sequence
  Description of Artificial Sequence: Synthetic oligonucleotide
  Sense strand starting at position 22 of SEQ ID NO: 2409
ugugaaucaucauuauagg

SEQ ID NO: 186871 - RNA, 19 nt, Artificial Sequence
  Description of Artificial Sequence: Synthetic oligonucleotide
  Antisense strand to SEQ ID NO: 186870
ccuauaaugaugauucaca

SEQ ID NO: 186872 - RNA, 19 nt, Artificial Sequence
  Description of Artificial Sequence: Synthetic oligonucleotide
  Sense strand starting at position 23 of SEQ ID NO: 2409
gugaaucaucauuauaggu

SEQ ID NO: 186873 - RNA, 19 nt, Artificial Sequence
  Description of Artificial Sequence: Synthetic oligonucleotide
  Antisense strand to SEQ ID NO: 186872
accuauaaugaugauucac

SEQ ID NO: 186874 - RNA, 19 nt, Artificial Sequence
  Description of Artificial Sequence: Synthetic oligonucleotide
  Sense strand starting at position 98 of SEQ ID NO: 2409
aguccuggaucaucaacaa

SEQ ID NO: 186875 - RNA, 19 nt, Artificial Sequence
  Description of Artificial Sequence: Synthetic oligonucleotide
  Antisense strand to SEQ ID NO: 186874
uuguugaugauccaggacu

SEQ ID NO: 186876 - RNA, 19 nt, Artificial Sequence
  Description of Artificial Sequence: Synthetic oligonucleotide
  Sense strand starting at position 121 of SEQ ID NO: 2409
ucacauauacaauggugau

SEQ ID NO: 186877 - RNA, 19 nt, Artificial Sequence
  Description of Artificial Sequence: Synthetic oligonucleotide
  Antisense strand to SEQ ID NO: 186876
aucaccauuguauauguga

SEQ ID NO: 186878 - RNA, 19 nt, Artificial Sequence
  Description of Artificial Sequence: Synthetic oligonucleotide
  Sense strand starting at position 127 of SEQ ID NO: 2409
auacaauggugaucuggua

SEQ ID NO: 186879 - RNA, 19 nt, Artificial Sequence
  Description of Artificial Sequence: Synthetic oligonucleotide
  Antisense strand to SEQ ID NO: 186878
uaccagaucaccauuguau

SEQ ID NO: 186880 - RNA, 19 nt, Artificial Sequence
  Description of Artificial Sequence: Synthetic oligonucleotide
  Sense strand starting at position 368 of SEQ ID NO: 2409
agauguauagccuacuaua

SEQ ID NO: 186881 - RNA, 19 nt, Artificial Sequence
  Description of Artificial Sequence: Synthetic oligonucleotide
  Antisense strand to SEQ ID NO: 186880
uauaguaggcuauacaucu

SEQ ID NO: 186882 - RNA, 19 nt, Artificial Sequence
  Description of Artificial Sequence: Synthetic oligonucleotide
  Sense strand starting at position 391 of SEQ ID NO: 2409
agguguacagucuacuaua

SEQ ID NO: 186883 - RNA, 19 nt, Artificial Sequence
  Description of Artificial Sequence: Synthetic oligonucleotide
  Antisense strand to SEQ ID NO: 186882
uauaguagacuguacaccu

SEQ ID NO: 186884 - RNA, 19 nt, Artificial Sequence
  Description of Artificial Sequence: Synthetic oligonucleotide
  Sense strand starting at position 425 of SEQ ID NO: 2409
uguauaguagcccauacau

SEQ ID NO: 186885 - RNA, 19 nt, Artificial Sequence
  Description of Artificial Sequence: Synthetic oligonucleotide
  Antisense strand to SEQ ID NO: 186884
auguaugggcuacuauaca

SEQ ID NO: 186886 - RNA, 19 nt, Artificial Sequence
  Description of Artificial Sequence: Synthetic oligonucleotide
  Sense strand starting at position 482 of SEQ ID NO: 2409
ugcugaaauuggcuaacaa

SEQ ID NO: 186887 - RNA, 19 nt, Artificial Sequence
  Description of Artificial Sequence: Synthetic oligonucleotide
  Antisense strand to SEQ ID NO: 186886
uuguuagccaauuucagca

SEQ ID NO: 186888 - RNA, 19 nt, Artificial Sequence
  Description of Artificial Sequence: Synthetic oligonucleotide
  Sense strand starting at position 483 of SEQ ID NO: 2409
gcugaaauuggcuaacaag

SEQ ID NO: 186889 - RNA, 19 nt, Artificial Sequence
  Description of Artificial Sequence: Synthetic oligonucleotide
  Antisense strand to SEQ ID NO: 186888
cuuguuagccaauuucagc

SEQ ID NO: 186890 - RNA, 19 nt, Artificial Sequence
  Description of Artificial Sequence: Synthetic oligonucleotide
  Sense strand starting at position 500 of SEQ ID NO: 2409
agguauuucucagaaggua

SEQ ID NO: 186891 - RNA, 19 nt, Artificial Sequence
  Description of Artificial Sequence: Synthetic oligonucleotide
  Antisense strand to SEQ ID NO: 186890
uaccuucugagaaauaccu

SEQ ID NO: 186892 - RNA, 19 nt, Artificial Sequence
  Description of Artificial Sequence: Synthetic oligonucleotide
  Sense strand starting at position 515 of SEQ ID NO: 2409
gguaucaccaucgaugcau

SEQ ID NO: 186893 - RNA, 19 nt, Artificial Sequence
  Description of Artificial Sequence: Synthetic oligonucleotide
  Antisense strand to SEQ ID NO: 186892
augcaucgauggugauacc

SEQ ID NO: 186894 - RNA, 19 nt, Artificial Sequence
  Description of Artificial Sequence: Synthetic oligonucleotide
  Sense strand starting at position 530 of SEQ ID NO: 2409
gcaugacuguauuuaguua

SEQ ID NO: 186895 - RNA, 19 nt, Artificial Sequence
  Description of Artificial Sequence: Synthetic oligonucleotide
  Antisense strand to SEQ ID NO: 186894
uaacuaaauacagucaugc

SEQ ID NO: 186896 - RNA, 19 nt, Artificial Sequence
  Description of Artificial Sequence: Synthetic oligonucleotide
  Sense strand starting at position 615 of SEQ ID NO: 2409
uaggaagagugguuucuca

SEQ ID NO: 186897 - RNA, 19 nt, Artificial Sequence
  Description of Artificial Sequence: Synthetic oligonucleotide
  Antisense strand to SEQ ID NO: 186896
ugagaaaccacucuuccua

SEQ ID NO: 186898 - RNA, 19 nt, Artificial Sequence
  Description of Artificial Sequence: Synthetic oligonucleotide
  Sense strand starting at position 619 of SEQ ID NO: 2409
aagagugguuucucagaac

SEQ ID NO: 186899 - RNA, 19 nt, Artificial Sequence
  Description of Artificial Sequence: Synthetic oligonucleotide
  Antisense strand to SEQ ID NO: 186898
guucugagaaaccacucuu

SEQ ID NO: 186900 - RNA, 19 nt, Artificial Sequence
  Description of Artificial Sequence: Synthetic oligonucleotide
  Sense strand starting at position 655 of SEQ ID NO: 2409
aagaucgagaagcgauaaa

SEQ ID NO: 186901 - RNA, 19 nt, Artificial Sequence
  Description of Artificial Sequence: Synthetic oligonucleotide
  Antisense strand to SEQ ID NO: 186900
uuuaucgcuucucgaucuu

SEQ ID NO: 186902 - RNA, 19 nt, Artificial Sequence
  Description of Artificial Sequence: Synthetic oligonucleotide
  Sense strand starting at position 847 of SEQ ID NO: 2409
acaaguuccgcugaagaaa

SEQ ID NO: 186903 - RNA, 19 nt, Artificial Sequence
  Description of Artificial Sequence: Synthetic oligonucleotide
  Antisense strand to SEQ ID NO: 186902
uuucuucagcggaacuugu

SEQ ID NO: 186904 - RNA, 19 nt, Artificial Sequence
  Description of Artificial Sequence: Synthetic oligonucleotide
  Sense strand starting at position 1073 of SEQ ID NO: 2409
gaugguauugacgagacga

SEQ ID NO: 186905 - RNA, 19 nt, Artificial Sequence
  Description of Artificial Sequence: Synthetic oligonucleotide
  Antisense strand to SEQ ID NO: 186904
ucgucucgucaauaccauc

SEQ ID NO: 186906 - RNA, 19 nt, Artificial Sequence
  Description of Artificial Sequence: Synthetic oligonucleotide
  Sense strand starting at position 1075 of SEQ ID NO: 2409
ugguauugacgagacgaca

SEQ ID NO: 186907 - RNA, 19 nt, Artificial Sequence
  Description of Artificial Sequence: Synthetic oligonucleotide
  Antisense strand to SEQ ID NO: 186906
ugucgucucgucaauacca

SEQ ID NO: 186908 - RNA, 19 nt, Artificial Sequence
  Description of Artificial Sequence: Synthetic oligonucleotide
  Sense strand starting at position 1175 of SEQ ID NO: 2409
gcaugaaagcaucaagcuu

SEQ ID NO: 186909 - RNA, 19 nt, Artificial Sequence
  Description of Artificial Sequence: Synthetic oligonucleotide
  Antisense strand to SEQ ID NO: 186908
aagcuugaugcuuucaugc

SEQ ID NO: 186910 - RNA, 19 nt, Artificial Sequence
  Description of Artificial Sequence: Synthetic oligonucleotide
  Sense strand starting at position 1181 of SEQ ID NO: 2409
aagcaucaagcuugagaga

SEQ ID NO: 186911 - RNA, 19 nt, Artificial Sequence
  Description of Artificial Sequence: Synthetic oligonucleotide
  Antisense strand to SEQ ID NO: 186910
ucucucaagcuugaugcuu

SEQ ID NO: 186912 - RNA, 19 nt, Artificial Sequence
  Description of Artificial Sequence: Synthetic oligonucleotide
  Sense strand starting at position 1217 of SEQ ID NO: 2409
cuagaagugcuagaacgau

SEQ ID NO: 186913 - RNA, 19 nt, Artificial Sequence
  Description of Artificial Sequence: Synthetic oligonucleotide
  Antisense strand to SEQ ID NO: 186912
aucguucuagcacuucuag

SEQ ID NO: 186914 - RNA, 19 nt, Artificial Sequence
  Description of Artificial Sequence: Synthetic oligonucleotide
  Sense strand starting at position 1226 of SEQ ID NO: 2409
cuagaacgaugguucuaaa

SEQ ID NO: 186915 - RNA, 19 nt, Artificial Sequence
  Description of Artificial Sequence: Synthetic oligonucleotide
  Antisense strand to SEQ ID NO: 186914
uuuagaaccaucguucuag

SEQ ID NO: 186916 - RNA, 19 nt, Artificial Sequence
  Description of Artificial Sequence: Synthetic oligonucleotide
  Sense strand starting at position 1236 of SEQ ID NO: 2409
gguucuaaaccaggucuuu

SEQ ID NO: 186917 - RNA, 19 nt, Artificial Sequence
  Description of Artificial Sequence: Synthetic oligonucleotide
  Antisense strand to SEQ ID NO: 186916
aaagaccugguuuagaacc

SEQ ID NO: 186918 - RNA, 19 nt, Artificial Sequence
  Description of Artificial Sequence: Synthetic oligonucleotide
  Sense strand starting at position 1608 of SEQ ID NO: 2409
gcgguaggucgauaaagga

SEQ ID NO: 186919 - RNA, 19 nt, Artificial Sequence
  Description of Artificial Sequence: Synthetic oligonucleotide
  Antisense strand to SEQ ID NO: 186918
uccuuuaucgaccuaccgc

SEQ ID NO: 186920 - RNA, 19 nt, Artificial Sequence
  Description of Artificial Sequence: Synthetic oligonucleotide
  Sense strand starting at position 1625 of SEQ ID NO: 2409
gagacauuguggccuagga

SEQ ID NO: 186921 - RNA, 19 nt, Artificial Sequence
  Description of Artificial Sequence: Synthetic oligonucleotide
  Antisense strand to SEQ ID NO: 186920
uccuaggccacaaugucuc

SEQ ID NO: 186922 - RNA, 19 nt, Artificial Sequence
  Description of Artificial Sequence: Synthetic oligonucleotide
  Sense strand starting at position 2706 of SEQ ID NO: 2409
acucgaauaggguauuacu

SEQ ID NO: 186923 - RNA, 19 nt, Artificial Sequence
  Description of Artificial Sequence: Synthetic oligonucleotide
  Antisense strand to SEQ ID NO: 186922
aguaauacccuauucgagu

SEQ ID NO: 186924 - RNA, 19 nt, Artificial Sequence
  Description of Artificial Sequence: Synthetic oligonucleotide
  Sense strand starting at position 2915 of SEQ ID NO: 2409
uuccuccaacgcuagaauu

SEQ ID NO: 186925 - RNA, 19 nt, Artificial Sequence
  Description of Artificial Sequence: Synthetic oligonucleotide
  Antisense strand to SEQ ID NO: 186924
aauucuagcguuggaggaa

SEQ ID NO: 186926 - RNA, 19 nt, Artificial Sequence
  Description of Artificial Sequence: Synthetic oligonucleotide
  Sense strand starting at position 2968 of SEQ ID NO: 2409
gauugacuuggcuauugag

SEQ ID NO: 186927 - RNA, 19 nt, Artificial Sequence
  Description of Artificial Sequence: Synthetic oligonucleotide
  Antisense strand to SEQ ID NO: 186926
cucaauagccaagucaauc

SEQ ID NO: 186928 - RNA, 19 nt, Artificial Sequence
  Description of Artificial Sequence: Synthetic oligonucleotide
  Sense strand starting at position 3026 of SEQ ID NO: 2409
uucacuuauggguggaaug

SEQ ID NO: 186929 - RNA, 19 nt, Artificial Sequence
  Description of Artificial Sequence: Synthetic oligonucleotide
  Antisense strand to SEQ ID NO: 186928
cauuccacccauaagugaa

SEQ ID NO: 186930 - RNA, 19 nt, Artificial Sequence
  Description of Artificial Sequence: Synthetic oligonucleotide
  Sense strand starting at position 3027 of SEQ ID NO: 2409
ucacuuauggguggaauga

SEQ ID NO: 186931 - RNA, 19 nt, Artificial Sequence
  Description of Artificial Sequence: Synthetic oligonucleotide
  Antisense strand to SEQ ID NO: 186930
ucauuccacccauaaguga

SEQ ID NO: 186932 - RNA, 19 nt, Artificial Sequence
  Description of Artificial Sequence: Synthetic oligonucleotide
  Sense strand starting at position 3102 of SEQ ID NO: 2409
acuuaaggcucauuaaaug

SEQ ID NO: 186933 - RNA, 19 nt, Artificial Sequence
  Description of Artificial Sequence: Synthetic oligonucleotide
  Antisense strand to SEQ ID NO: 186932
cauuuaaugagccuuaagu

SEQ ID NO: 186934 - RNA, 19 nt, Artificial Sequence
  Description of Artificial Sequence: Synthetic oligonucleotide
  Sense strand starting at position 3137 of SEQ ID NO: 2409
augggauccuuguccugau

SEQ ID NO: 186935 - RNA, 19 nt, Artificial Sequence
  Description of Artificial Sequence: Synthetic oligonucleotide
  Antisense strand to SEQ ID NO: 186934
aucaggacaaggaucccau

SEQ ID NO: 186936 - RNA, 19 nt, Artificial Sequence
  Description of Artificial Sequence: Synthetic oligonucleotide
  Sense strand starting at position 3138 of SEQ ID NO: 2409
ugggauccuuguccugauu

SEQ ID NO: 186937 - RNA, 19 nt, Artificial Sequence
  Description of Artificial Sequence: Synthetic oligonucleotide
  Antisense strand to SEQ ID NO: 186936
aaucaggacaaggauccca

SEQ ID NO: 186938 - RNA, 19 nt, Artificial Sequence
  Description of Artificial Sequence: Synthetic oligonucleotide
  Sense strand starting at position 3438 of SEQ ID NO: 2409
auguuccaguguuugagaa

SEQ ID NO: 186939 - RNA, 19 nt, Artificial Sequence
  Description of Artificial Sequence: Synthetic oligonucleotide
  Antisense strand to SEQ ID NO: 186938
uucucaaacacuggaacau

SEQ ID NO: 186940 - RNA, 19 nt, Artificial Sequence
  Description of Artificial Sequence: Synthetic oligonucleotide
  Sense strand starting at position 3520 of SEQ ID NO: 2409
ccauaaucauaguuuguaa

SEQ ID NO: 186941 - RNA, 19 nt, Artificial Sequence
  Description of Artificial Sequence: Synthetic oligonucleotide
  Antisense strand to SEQ ID NO: 186940
uuacaaacuaugauuaugg

SEQ ID NO: 186942 - RNA, 19 nt, Artificial Sequence
  Description of Artificial Sequence: Synthetic oligonucleotide
  Sense strand starting at position 3680 of SEQ ID NO: 2409
ugcugauugucacuauaga

SEQ ID NO: 186943 - RNA, 19 nt, Artificial Sequence
  Description of Artificial Sequence: Synthetic oligonucleotide
  Antisense strand to SEQ ID NO: 186942
ucuauagugacaaucagca

SEQ ID NO: 186944 - RNA, 19 nt, Artificial Sequence
  Description of Artificial Sequence: Synthetic oligonucleotide
  Sense strand starting at position 3681 of SEQ ID NO: 2409
gcugauugucacuauagau

SEQ ID NO: 186945 - RNA, 19 nt, Artificial Sequence
  Description of Artificial Sequence: Synthetic oligonucleotide
  Antisense strand to SEQ ID NO: 186944
aucuauagugacaaucagc

SEQ ID NO: 186946 - RNA, 19 nt, Artificial Sequence
  Description of Artificial Sequence: Synthetic oligonucleotide
  Sense strand starting at position 3712 of SEQ ID NO: 2409
aauguaauaggcuaaguuu

SEQ ID NO: 186947 - RNA, 19 nt, Artificial Sequence
  Description of Artificial Sequence: Synthetic oligonucleotide
  Antisense strand to SEQ ID NO: 186946
aaacuuagccuauuacauu

SEQ ID NO: 186948 - RNA, 19 nt, Artificial Sequence
  Description of Artificial Sequence: Synthetic oligonucleotide
  Sense strand starting at position 3949 of SEQ ID NO: 2409
gagucuaaauuguuauaag

SEQ ID NO: 186949 - RNA, 19 nt, Artificial Sequence
  Description of Artificial Sequence: Synthetic oligonucleotide
  Antisense strand to SEQ ID NO: 186948
cuuauaacaauuuagacuc

SEQ ID NO: 186950 - RNA, 19 nt, Artificial Sequence
  Description of Artificial Sequence: Synthetic oligonucleotide
  Sense strand starting at position 3477 of SEQ ID NO: 2410
gggucauuggguuaauuaa

SEQ ID NO: 186951 - RNA, 19 nt, Artificial Sequence
  Description of Artificial Sequence: Synthetic oligonucleotide
  Antisense strand to SEQ ID NO: 186950
uuaauuaacccaaugaccc

SEQ ID NO: 186952 - RNA, 19 nt, Artificial Sequence
  Description of Artificial Sequence: Synthetic oligonucleotide
  Sense strand starting at position 3475 of SEQ ID NO: 2410
uagggucauuggguuaauu

SEQ ID NO: 186953 - RNA, 19 nt, Artificial Sequence
  Description of Artificial Sequence: Synthetic oligonucleotide
  Antisense strand to SEQ ID NO: 186952
aauuaacccaaugacccua

SEQ ID NO: 186954 - RNA, 19 nt, Artificial Sequence
  Description of Artificial Sequence: Synthetic oligonucleotide
  Sense strand starting at position 3400 of SEQ ID NO: 2410
cauagacuuugggacuaga

SEQ ID NO: 186955 - RNA, 19 nt, Artificial Sequence
  Description of Artificial Sequence: Synthetic oligonucleotide
  Antisense strand to SEQ ID NO: 186954
ucuagucccaaagucuaug

SEQ ID NO: 186956 - RNA, 19 nt, Artificial Sequence
  Description of Artificial Sequence: Synthetic oligonucleotide
  Sense strand starting at position 3286 of SEQ ID NO: 2410
agaaccuauccuugugaaa

SEQ ID NO: 186957 - RNA, 19 nt, Artificial Sequence
  Description of Artificial Sequence: Synthetic oligonucleotide
  Antisense strand to SEQ ID NO: 186956
uuucacaaggauagguucu

SEQ ID NO: 186958 - RNA, 19 nt, Artificial Sequence
  Description of Artificial Sequence: Synthetic oligonucleotide
  Sense strand starting at position 3241 of SEQ ID NO: 2410
uggugauuucuccgcaagg

SEQ ID NO: 186959 - RNA, 19 nt, Artificial Sequence
  Description of Artificial Sequence: Synthetic oligonucleotide
  Antisense strand to SEQ ID NO: 186958
ccuugcggagaaaucacca

SEQ ID NO: 186960 - RNA, 19 nt, Artificial Sequence
  Description of Artificial Sequence: Synthetic oligonucleotide
  Sense strand starting at position 3239 of SEQ ID NO: 2410
gcuggugauuucuccgcaa

SEQ ID NO: 186961 - RNA, 19 nt, Artificial Sequence
  Description of Artificial Sequence: Synthetic oligonucleotide
  Antisense strand to SEQ ID NO: 186960
uugcggagaaaucaccagc

SEQ ID NO: 186962 - RNA, 19 nt, Artificial Sequence
  Description of Artificial Sequence: Synthetic oligonucleotide
  Sense strand starting at position 3230 of SEQ ID NO: 2410
auucuaauugcuggugauu

SEQ ID NO: 186963 - RNA, 19 nt, Artificial Sequence
  Description of Artificial Sequence: Synthetic oligonucleotide
  Antisense strand to SEQ ID NO: 186962
aaucaccagcaauuagaau

SEQ ID NO: 186964 - RNA, 19 nt, Artificial Sequence
  Description of Artificial Sequence: Synthetic oligonucleotide
  Sense strand starting at position 3228 of SEQ ID NO: 2410
guauucuaauugcugguga

SEQ ID NO: 186965 - RNA, 19 nt, Artificial Sequence
  Description of Artificial Sequence: Synthetic oligonucleotide
  Antisense strand to SEQ ID NO: 186964
ucaccagcaauuagaauac

SEQ ID NO: 186966 - RNA, 19 nt, Artificial Sequence
  Description of Artificial Sequence: Synthetic oligonucleotide
  Sense strand starting at position 3191 of SEQ ID NO: 2410
gucugugaauaccugaaua

SEQ ID NO: 186967 - RNA, 19 nt, Artificial Sequence
  Description of Artificial Sequence: Synthetic oligonucleotide
  Antisense strand to SEQ ID NO: 186966
uauucagguauucacagac

SEQ ID NO: 186968 - RNA, 19 nt, Artificial Sequence
  Description of Artificial Sequence: Synthetic oligonucleotide
  Sense strand starting at position 3185 of SEQ ID NO: 2410
gaauuugucugugaauacc

SEQ ID NO: 186969 - RNA, 19 nt, Artificial Sequence
  Description of Artificial Sequence: Synthetic oligonucleotide
  Antisense strand to SEQ ID NO: 186968
gguauucacagacaaauuc

SEQ ID NO: 186970 - RNA, 19 nt, Artificial Sequence
  Description of Artificial Sequence: Synthetic oligonucleotide
  Sense strand starting at position 3181 of SEQ ID NO: 2410
guacgaauuugucugugaa

SEQ ID NO: 186971 - RNA, 19 nt, Artificial Sequence
  Description of Artificial Sequence: Synthetic oligonucleotide
  Antisense strand to SEQ ID NO: 186970
uucacagacaaauucguac

SEQ ID NO: 186972 - RNA, 19 nt, Artificial Sequence
  Description of Artificial Sequence: Synthetic oligonucleotide
  Sense strand starting at position 3170 of SEQ ID NO: 2410
ucacaucaugaguacgaau

SEQ ID NO: 186973 - RNA, 19 nt, Artificial Sequence
  Description of Artificial Sequence: Synthetic oligonucleotide
  Antisense strand to SEQ ID NO: 186972
auucguacucaugauguga

SEQ ID NO: 186974 - RNA, 19 nt, Artificial Sequence
  Description of Artificial Sequence: Synthetic oligonucleotide
  Sense strand starting at position 3169 of SEQ ID NO: 2410
cucacaucaugaguacgaa

SEQ ID NO: 186975 - RNA, 19 nt, Artificial Sequence
  Description of Artificial Sequence: Synthetic oligonucleotide
  Antisense strand to SEQ ID NO: 186974
uucguacucaugaugugag

SEQ ID NO: 186976 - RNA, 19 nt, Artificial Sequence
  Description of Artificial Sequence: Synthetic oligonucleotide
  Sense strand starting at position 3107 of SEQ ID NO: 2410
uguuuaucacuccaugugu

SEQ ID NO: 186977 - RNA, 19 nt, Artificial Sequence
  Description of Artificial Sequence: Synthetic oligonucleotide
  Antisense strand to SEQ ID NO: 186976
acacauggagugauaaaca

SEQ ID NO: 186978 - RNA, 19 nt, Artificial Sequence
  Description of Artificial Sequence: Synthetic oligonucleotide
  Sense strand starting at position 3069 of SEQ ID NO: 2410
cucaguaaggacugaauau

SEQ ID NO: 186979 - RNA, 19 nt, Artificial Sequence
  Description of Artificial Sequence: Synthetic oligonucleotide
  Antisense strand to SEQ ID NO: 186978
auauucaguccuuacugag

SEQ ID NO: 186980 - RNA, 19 nt, Artificial Sequence
  Description of Artificial Sequence: Synthetic oligonucleotide
  Sense strand starting at position 2963 of SEQ ID NO: 2410
ccugauaaguuggcaaauu

SEQ ID NO: 186981 - RNA, 19 nt, Artificial Sequence
  Description of Artificial Sequence: Synthetic oligonucleotide
  Antisense strand to SEQ ID NO: 186980
aauuugccaacuuaucagg

SEQ ID NO: 186982 - RNA, 19 nt, Artificial Sequence
  Description of Artificial Sequence: Synthetic oligonucleotide
  Sense strand starting at position 2962 of SEQ ID NO: 2410
uccugauaaguuggcaaau

SEQ ID NO: 186983 - RNA, 19 nt, Artificial Sequence
  Description of Artificial Sequence: Synthetic oligonucleotide
  Antisense strand to SEQ ID NO: 186982
auuugccaacuuaucagga

SEQ ID NO: 186984 - RNA, 19 nt, Artificial Sequence
  Description of Artificial Sequence: Synthetic oligonucleotide
  Sense strand starting at position 2889 of SEQ ID NO: 2410
guacuauugcugucugugu

SEQ ID NO: 186985 - RNA, 19 nt, Artificial Sequence
  Description of Artificial Sequence: Synthetic oligonucleotide
  Antisense strand to SEQ ID NO: 186984
acacagacagcaauaguac

SEQ ID NO: 186986 - RNA, 19 nt, Artificial Sequence
  Description of Artificial Sequence: Synthetic oligonucleotide
  Sense strand starting at position 2877 of SEQ ID NO: 2410
ucucuuagcuagguacuau

SEQ ID NO: 186987 - RNA, 19 nt, Artificial Sequence
  Description of Artificial Sequence: Synthetic oligonucleotide
  Antisense strand to SEQ ID NO: 186986
auaguaccuagcuaagaga

SEQ ID NO: 186988 - RNA, 19 nt, Artificial Sequence
  Description of Artificial Sequence: Synthetic oligonucleotide
  Sense strand starting at position 2873 of SEQ ID NO: 2410
acagucucuuagcuaggua

SEQ ID NO: 186989 - RNA, 19 nt, Artificial Sequence
  Description of Artificial Sequence: Synthetic oligonucleotide
  Antisense strand to SEQ ID NO: 186988
uaccuagcuaagagacugu

SEQ ID NO: 186990 - RNA, 19 nt, Artificial Sequence
  Description of Artificial Sequence: Synthetic oligonucleotide
  Sense strand starting at position 2815 of SEQ ID NO: 2410
uagggugccauuugucaga

SEQ ID NO: 186991 - RNA, 19 nt, Artificial Sequence
  Description of Artificial Sequence: Synthetic oligonucleotide
  Antisense strand to SEQ ID NO: 186990
ucugacaaauggcacccua

SEQ ID NO: 186992 - RNA, 19 nt, Artificial Sequence
  Description of Artificial Sequence: Synthetic oligonucleotide
  Sense strand starting at position 2799 of SEQ ID NO: 2410
ggaaacuugucacccauag

SEQ ID NO: 186993 - RNA, 19 nt, Artificial Sequence
  Description of Artificial Sequence: Synthetic oligonucleotide
  Antisense strand to SEQ ID NO: 186992
cuaugggugacaaguuucc

SEQ ID NO: 186994 - RNA, 19 nt, Artificial Sequence
  Description of Artificial Sequence: Synthetic oligonucleotide
  Sense strand starting at position 2686 of SEQ ID NO: 2410
ggaaguucccaaggugaca

SEQ ID NO: 186995 - RNA, 19 nt, Artificial Sequence
  Description of Artificial Sequence: Synthetic oligonucleotide
  Antisense strand to SEQ ID NO: 186994
ugucaccuugggaacuucc

SEQ ID NO: 186996 - RNA, 19 nt, Artificial Sequence
  Description of Artificial Sequence: Synthetic oligonucleotide
  Sense strand starting at position 907 of SEQ ID NO: 2410
guucgcagucucucuucua

SEQ ID NO: 186997 - RNA, 19 nt, Artificial Sequence
  Description of Artificial Sequence: Synthetic oligonucleotide
  Antisense strand to SEQ ID NO: 186996
uagaagagagacugcgaac

SEQ ID NO: 186998 - RNA, 19 nt, Artificial Sequence
  Description of Artificial Sequence: Synthetic oligonucleotide
  Sense strand starting at position 787 of SEQ ID NO: 2410
ucuagaaacccugggagua

SEQ ID NO: 186999 - RNA, 19 nt, Artificial Sequence
  Description of Artificial Sequence: Synthetic oligonucleotide
  Antisense strand to SEQ ID NO: 186998
uacucccaggguuucuaga

SEQ ID NO: 187000 - RNA, 19 nt, Artificial Sequence
  Description of Artificial Sequence: Synthetic oligonucleotide
  Sense strand starting at position 747 of SEQ ID NO: 2410
cggcuauuaagacauuagu

SEQ ID NO: 187001 - RNA, 19 nt, Artificial Sequence
  Description of Artificial Sequence: Synthetic oligonucleotide
  Antisense strand to SEQ ID NO: 187000
acuaaugucuuaauagccg

SEQ ID NO: 187002 - RNA, 19 nt, Artificial Sequence
  Description of Artificial Sequence: Synthetic oligonucleotide
  Sense strand starting at position 739 of SEQ ID NO: 2410
gucaaauucggcuauuaag

SEQ ID NO: 187003 - RNA, 19 nt, Artificial Sequence
  Description of Artificial Sequence: Synthetic oligonucleotide
  Antisense strand to SEQ ID NO: 187002
cuuaauagccgaauuugac

SEQ ID NO: 187004 - RNA, 19 nt, Artificial Sequence
  Description of Artificial Sequence: Synthetic oligonucleotide
  Sense strand starting at position 737 of SEQ ID NO: 2410
cagucaaauucggcuauua

SEQ ID NO: 187005 - RNA, 19 nt, Artificial Sequence
  Description of Artificial Sequence: Synthetic oligonucleotide
  Antisense strand to SEQ ID NO: 187004
uaauagccgaauuugacug

SEQ ID NO: 187006 - RNA, 19 nt, Artificial Sequence
  Description of Artificial Sequence: Synthetic oligonucleotide
  Sense strand starting at position 536 of SEQ ID NO: 2410
gguuucaggcuuuguuaga

SEQ ID NO: 187007 - RNA, 19 nt, Artificial Sequence
  Description of Artificial Sequence: Synthetic oligonucleotide
  Antisense strand to SEQ ID NO: 187006
ucuaacaaagccugaaacc

SEQ ID NO: 187008 - RNA, 19 nt, Artificial Sequence
  Description of Artificial Sequence: Synthetic oligonucleotide
  Sense strand starting at position 499 of SEQ ID NO: 2410
gucagaagcugcccucaaa

SEQ ID NO: 187009 - RNA, 19 nt, Artificial Sequence
  Description of Artificial Sequence: Synthetic oligonucleotide
  Antisense strand to SEQ ID NO: 187008
uuugagggcagcuucugac

SEQ ID NO: 187010 - RNA, 19 nt, Artificial Sequence
  Description of Artificial Sequence: Synthetic oligonucleotide
  Sense strand starting at position 487 of SEQ ID NO: 2410
uaacgucuuugagucagaa

SEQ ID NO: 187011 - RNA, 19 nt, Artificial Sequence
  Description of Artificial Sequence: Synthetic oligonucleotide
  Antisense strand to SEQ ID NO: 187010
uucugacucaaagacguua

SEQ ID NO: 187012 - RNA, 19 nt, Artificial Sequence
  Description of Artificial Sequence: Synthetic oligonucleotide
  Sense strand starting at position 482 of SEQ ID NO: 2410
uuucguaacgucuuugagu

SEQ ID NO: 187013 - RNA, 19 nt, Artificial Sequence
  Description of Artificial Sequence: Synthetic oligonucleotide
  Antisense strand to SEQ ID NO: 187012
acucaaagacguuacgaaa

SEQ ID NO: 187014 - RNA, 19 nt, Artificial Sequence
  Description of Artificial Sequence: Synthetic oligonucleotide
  Sense strand starting at position 218 of SEQ ID NO: 2410
gucucagacuuggcccaaa

SEQ ID NO: 187015 - RNA, 19 nt, Artificial Sequence
  Description of Artificial Sequence: Synthetic oligonucleotide
  Antisense strand to SEQ ID NO: 187014
uuugggccaagucugagac

SEQ ID NO: 187016 - RNA, 19 nt, Artificial Sequence
  Description of Artificial Sequence: Synthetic oligonucleotide
  Sense strand starting at position 202 of SEQ ID NO: 2410
gaagaaaccucaguaaguc

SEQ ID NO: 187017 - RNA, 19 nt, Artificial Sequence
  Description of Artificial Sequence: Synthetic oligonucleotide
  Antisense strand to SEQ ID NO: 187016
gacuuacugagguuucuuc

SEQ ID NO: 187018 - RNA, 19 nt, Artificial Sequence
  Description of Artificial Sequence: Synthetic oligonucleotide
  Sense strand starting at position 16 of SEQ ID NO: 2410
aauuauucggcagaguuga

SEQ ID NO: 187019 - RNA, 19 nt, Artificial Sequence
  Description of Artificial Sequence: Synthetic oligonucleotide
  Antisense strand to SEQ ID NO: 187018
ucaacucugccgaauaauu

SEQ ID NO: 187020 - RNA, 19 nt, Artificial Sequence
  Description of Artificial Sequence: Synthetic oligonucleotide
  Sense strand starting at position 14 of SEQ ID NO: 2410
ucaauuauucggcagaguu

SEQ ID NO: 187021 - RNA, 19 nt, Artificial Sequence
  Description of Artificial Sequence: Synthetic oligonucleotide
  Antisense strand to SEQ ID NO: 187020
aacucugccgaauaauuga

SEQ ID NO: 187022 - RNA, 19 nt, Artificial Sequence
  Description of Artificial Sequence: Synthetic oligonucleotide
  Sense strand starting at position 13 of SEQ ID NO: 2410
cucaauuauucggcagagu

SEQ ID NO: 187023 - RNA, 19 nt, Artificial Sequence
  Description of Artificial Sequence: Synthetic oligonucleotide
  Antisense strand to SEQ ID NO: 187022
acucugccgaauaauugag

SEQ ID NO: 187024 - RNA, 19 nt, Artificial Sequence
  Description of Artificial Sequence: Synthetic oligonucleotide
  Sense strand starting at position 11 of SEQ ID NO: 2410
ugcucaauuauucggcaga

SEQ ID NO: 187025 - RNA, 19 nt, Artificial Sequence
  Description of Artificial Sequence: Synthetic oligonucleotide
  Antisense strand to SEQ ID NO: 187024
ucugccgaauaauugagca

SEQ ID NO: 187026 - RNA, 19 nt, Artificial Sequence
  Description of Artificial Sequence: Synthetic oligonucleotide
  Sense strand starting at position 3 of SEQ ID NO: 2410
ugggcuacugcucaauuau

SEQ ID NO: 187027 - RNA, 19 nt, Artificial Sequence
  Description of Artificial Sequence: Synthetic oligonucleotide
  Antisense strand to SEQ ID NO: 187026
auaauugagcaguagccca

SEQ ID NO: 187028 - RNA, 19 nt, Artificial Sequence
  Description of Artificial Sequence: Synthetic oligonucleotide
  Sense strand starting at position 2 of SEQ ID NO: 2410
augggcuacugcucaauua

SEQ ID NO: 187029 - RNA, 19 nt, Artificial Sequence
  Description of Artificial Sequence: Synthetic oligonucleotide
  Antisense strand to SEQ ID NO: 187028
uaauugagcaguagcccau

SEQ ID NO: 187030 - RNA, 19 nt, Artificial Sequence
  Description of Artificial Sequence: Synthetic oligonucleotide
  Sense strand starting at position 246 of SEQ ID NO: 2411
uaagacaauuggcuuggau

SEQ ID NO: 187031 - RNA, 19 nt, Artificial Sequence
  Description of Artificial Sequence: Synthetic oligonucleotide
  Antisense strand to SEQ ID NO: 187030
auccaagccaauugucuua

SEQ ID NO: 187032 - RNA, 19 nt, Artificial Sequence
  Description of Artificial Sequence: Synthetic oligonucleotide
  Sense strand starting at position 249 of SEQ ID NO: 2411
gacaauuggcuuggauguu

SEQ ID NO: 187033 - RNA, 19 nt, Artificial Sequence
  Description of Artificial Sequence: Synthetic oligonucleotide
  Antisense strand to SEQ ID NO: 187032
aacauccaagccaauuguc

SEQ ID NO: 187034 - RNA, 19 nt, Artificial Sequence
  Description of Artificial Sequence: Synthetic oligonucleotide
  Sense strand starting at position 477 of SEQ ID NO: 2411
cuccgcaaaguuuaacaaa

SEQ ID NO: 187035 - RNA, 19 nt, Artificial Sequence
  Description of Artificial Sequence: Synthetic oligonucleotide
  Antisense strand to SEQ ID NO: 187034
uuuguuaaacuuugcggag

SEQ ID NO: 187036 - RNA, 19 nt, Artificial Sequence
  Description of Artificial Sequence: Synthetic oligonucleotide
  Sense strand starting at position 488 of SEQ ID NO: 2411
uuaacaaagccgugaagua

SEQ ID NO: 187037 - RNA, 19 nt, Artificial Sequence
  Description of Artificial Sequence: Synthetic oligonucleotide
  Antisense strand to SEQ ID NO: 187036
uacuucacggcuuuguuaa

SEQ ID NO: 187038 - RNA, 19 nt, Artificial Sequence
  Description of Artificial Sequence: Synthetic oligonucleotide
  Sense strand starting at position 489 of SEQ ID NO: 2411
uaacaaagccgugaaguaa

SEQ ID NO: 187039 - RNA, 19 nt, Artificial Sequence
  Description of Artificial Sequence: Synthetic oligonucleotide
  Antisense strand to SEQ ID NO: 187038
uuacuucacggcuuuguua

SEQ ID NO: 187040 - RNA, 19 nt, Artificial Sequence
  Description of Artificial Sequence: Synthetic oligonucleotide
  Sense strand starting at position 538 of SEQ ID NO: 2411
caaaguuggcauugaaguu

SEQ ID NO: 187041 - RNA, 19 nt, Artificial Sequence
  Description of Artificial Sequence: Synthetic oligonucleotide
  Antisense strand to SEQ ID NO: 187040
aacuucaaugccaacuuug

SEQ ID NO: 187042 - RNA, 19 nt, Artificial Sequence
  Description of Artificial Sequence: Synthetic oligonucleotide
  Sense strand starting at position 700 of SEQ ID NO: 2411
gccuguuugacucagagag

SEQ ID NO: 187043 - RNA, 19 nt, Artificial Sequence
  Description of Artificial Sequence: Synthetic oligonucleotide
  Antisense strand to SEQ ID NO: 187042
cucucugagucaaacaggc

SEQ ID NO: 187044 - RNA, 19 nt, Artificial Sequence
  Description of Artificial Sequence: Synthetic oligonucleotide
  Sense strand starting at position 1147 of SEQ ID NO: 2411
cauuuacaaccgugcaagu

SEQ ID NO: 187045 - RNA, 19 nt, Artificial Sequence
  Description of Artificial Sequence: Synthetic oligonucleotide
  Antisense strand to SEQ ID NO: 187044
acuugcacgguuguaaaug

SEQ ID NO: 187046 - RNA, 19 nt, Artificial Sequence
  Description of Artificial Sequence: Synthetic oligonucleotide
  Sense strand starting at position 1149 of SEQ ID NO: 2411
uuuacaaccgugcaaguau

SEQ ID NO: 187047 - RNA, 19 nt, Artificial Sequence
  Description of Artificial Sequence: Synthetic oligonucleotide
  Antisense strand to SEQ ID NO: 187046
auacuugcacgguuguaaa

SEQ ID NO: 187048 - RNA, 19 nt, Artificial Sequence
  Description of Artificial Sequence: Synthetic oligonucleotide
  Sense strand starting at position 1164 of SEQ ID NO: 2411
guaucucagccuuguaaca

SEQ ID NO: 187049 - RNA, 19 nt, Artificial Sequence
  Description of Artificial Sequence: Synthetic oligonucleotide
  Antisense strand to SEQ ID NO: 187048
uguuacaaggcugagauac

SEQ ID NO: 187050 - RNA, 19 nt, Artificial Sequence
  Description of Artificial Sequence: Synthetic oligonucleotide
  Sense strand starting at position 1519 of SEQ ID NO: 2411
gcacaauagccggacuaau

SEQ ID NO: 187051 - RNA, 19 nt, Artificial Sequence
  Description of Artificial Sequence: Synthetic oligonucleotide
  Antisense strand to SEQ ID NO: 187050
auuaguccggcuauugugc

SEQ ID NO: 187052 - RNA, 19 nt, Artificial Sequence
  Description of Artificial Sequence: Synthetic oligonucleotide
  Sense strand starting at position 1547 of SEQ ID NO: 2411
gaagcaaggcagugauacu

SEQ ID NO: 187053 - RNA, 19 nt, Artificial Sequence
  Description of Artificial Sequence: Synthetic oligonucleotide
  Antisense strand to SEQ ID NO: 187052
aguaucacugccuugcuuc

SEQ ID NO: 187054 - RNA, 19 nt, Artificial Sequence
  Description of Artificial Sequence: Synthetic oligonucleotide
  Sense strand starting at position 2261 of SEQ ID NO: 2411
ucugguuuccgaagugcga

SEQ ID NO: 187055 - RNA, 19 nt, Artificial Sequence
  Description of Artificial Sequence: Synthetic oligonucleotide
  Antisense strand to SEQ ID NO: 187054
ucgcacuucggaaaccaga

SEQ ID NO: 187056 - RNA, 19 nt, Artificial Sequence
  Description of Artificial Sequence: Synthetic oligonucleotide
  Sense strand starting at position 2321 of SEQ ID NO: 2411
acgcguugacuuuaggaaa

SEQ ID NO: 187057 - RNA, 19 nt, Artificial Sequence
  Description of Artificial Sequence: Synthetic oligonucleotide
  Antisense strand to SEQ ID NO: 187056
uuuccuaaagucaacgcgu

SEQ ID NO: 187058 - RNA, 19 nt, Artificial Sequence
  Description of Artificial Sequence: Synthetic oligonucleotide
  Sense strand starting at position 2411 of SEQ ID NO: 2411
ccaauagaugccuaaguca

SEQ ID NO: 187059 - RNA, 19 nt, Artificial Sequence
  Description of Artificial Sequence: Synthetic oligonucleotide
  Antisense strand to SEQ ID NO: 187058
ugacuuaggcaucuauugg

SEQ ID NO: 187060 - RNA, 19 nt, Artificial Sequence
  Description of Artificial Sequence: Synthetic oligonucleotide
  Sense strand starting at position 2487 of SEQ ID NO: 2411
cucgguuauugggcacaua

SEQ ID NO: 187061 - RNA, 19 nt, Artificial Sequence
  Description of Artificial Sequence: Synthetic oligonucleotide
  Antisense strand to SEQ ID NO: 187060
uaugugcccaauaaccgag

SEQ ID NO: 187062 - RNA, 19 nt, Artificial Sequence
  Description of Artificial Sequence: Synthetic oligonucleotide
  Sense strand starting at position 2533 of SEQ ID NO: 2411
ugaggaaacuugcucucca

SEQ ID NO: 187063 - RNA, 19 nt, Artificial Sequence
  Description of Artificial Sequence: Synthetic oligonucleotide
  Antisense strand to SEQ ID NO: 187062
uggagagcaaguuuccuca

SEQ ID NO: 187064 - RNA, 19 nt, Artificial Sequence
  Description of Artificial Sequence: Synthetic oligonucleotide
  Sense strand starting at position 2552 of SEQ ID NO: 2411
gccaaaucagaccacuguu

SEQ ID NO: 187065 - RNA, 19 nt, Artificial Sequence
  Description of Artificial Sequence: Synthetic oligonucleotide
  Antisense strand to SEQ ID NO: 187064
aacaguggucugauuuggc

SEQ ID NO: 187066 - RNA, 19 nt, Artificial Sequence
  Description of Artificial Sequence: Synthetic oligonucleotide
  Sense strand starting at position 2597 of SEQ ID NO: 2411
agccuuaacccugguuauu

SEQ ID NO: 187067 - RNA, 19 nt, Artificial Sequence
  Description of Artificial Sequence: Synthetic oligonucleotide
  Antisense strand to SEQ ID NO: 187066
aauaaccaggguuaaggcu

SEQ ID NO: 187068 - RNA, 19 nt, Artificial Sequence
  Description of Artificial Sequence: Synthetic oligonucleotide
  Sense strand starting at position 2606 of SEQ ID NO: 2411
ccugguuauugccuuaaag

SEQ ID NO: 187069 - RNA, 19 nt, Artificial Sequence
  Description of Artificial Sequence: Synthetic oligonucleotide
  Antisense strand to SEQ ID NO: 187068
cuuuaaggcaauaaccagg

SEQ ID NO: 187070 - RNA, 19 nt, Artificial Sequence
  Description of Artificial Sequence: Synthetic oligonucleotide
  Sense strand starting at position 2608 of SEQ ID NO: 2411
ugguuauugccuuaaagag

SEQ ID NO: 187071 - RNA, 19 nt, Artificial Sequence
  Description of Artificial Sequence: Synthetic oligonucleotide
  Antisense strand to SEQ ID NO: 187070
cucuuuaaggcaauaacca

SEQ ID NO: 187072 - RNA, 19 nt, Artificial Sequence
  Description of Artificial Sequence: Synthetic oligonucleotide
  Sense strand starting at position 2632 of SEQ ID NO: 2411
guucuacuccaucaauguu

SEQ ID NO: 187073 - RNA, 19 nt, Artificial Sequence
  Description of Artificial Sequence: Synthetic oligonucleotide
  Antisense strand to SEQ ID NO: 187072
aacauugauggaguagaac

SEQ ID NO: 187074 - RNA, 19 nt, Artificial Sequence
  Description of Artificial Sequence: Synthetic oligonucleotide
  Sense strand starting at position 2709 of SEQ ID NO: 2411
caugcaguaucucugggaa

SEQ ID NO: 187075 - RNA, 19 nt, Artificial Sequence
  Description of Artificial Sequence: Synthetic oligonucleotide
  Antisense strand to SEQ ID NO: 187074
uucccagagauacugcaug

SEQ ID NO: 187076 - RNA, 19 nt, Artificial Sequence
  Description of Artificial Sequence: Synthetic oligonucleotide
  Sense strand starting at position 2712 of SEQ ID NO: 2411
gcaguaucucugggaacug

SEQ ID NO: 187077 - RNA, 19 nt, Artificial Sequence
  Description of Artificial Sequence: Synthetic oligonucleotide
  Antisense strand to SEQ ID NO: 187076
caguucccagagauacugc

SEQ ID NO: 187078 - RNA, 19 nt, Artificial Sequence
  Description of Artificial Sequence: Synthetic oligonucleotide
  Sense strand starting at position 2964 of SEQ ID NO: 2411
aagagaucuuaguugguuu

SEQ ID NO: 187079 - RNA, 19 nt, Artificial Sequence
  Description of Artificial Sequence: Synthetic oligonucleotide
  Antisense strand to SEQ ID NO: 187078
aaaccaacuaagaucucuu

SEQ ID NO: 187080 - RNA, 19 nt, Artificial Sequence
  Description of Artificial Sequence: Synthetic oligonucleotide
  Sense strand starting at position 2965 of SEQ ID NO: 2411
agagaucuuaguugguuua

SEQ ID NO: 187081 - RNA, 19 nt, Artificial Sequence
  Description of Artificial Sequence: Synthetic oligonucleotide
  Antisense strand to SEQ ID NO: 187080
uaaaccaacuaagaucucu

SEQ ID NO: 187082 - RNA, 19 nt, Artificial Sequence
  Description of Artificial Sequence: Synthetic oligonucleotide
  Sense strand starting at position 2967 of SEQ ID NO: 2411
agaucuuaguugguuuaga

SEQ ID NO: 187083 - RNA, 19 nt, Artificial Sequence
  Description of Artificial Sequence: Synthetic oligonucleotide
  Antisense strand to SEQ ID NO: 187082
ucuaaaccaacuaagaucu

SEQ ID NO: 187084 - RNA, 19 nt, Artificial Sequence
  Description of Artificial Sequence: Synthetic oligonucleotide
  Sense strand starting at position 2968 of SEQ ID NO: 2411
gaucuuaguugguuuagag

SEQ ID NO: 187085 - RNA, 19 nt, Artificial Sequence
  Description of Artificial Sequence: Synthetic oligonucleotide
  Antisense strand to SEQ ID NO: 187084
cucuaaaccaacuaagauc

SEQ ID NO: 187086 - RNA, 19 nt, Artificial Sequence
  Description of Artificial Sequence: Synthetic oligonucleotide
  Sense strand starting at position 2980 of SEQ ID NO: 2411
uuuagaggguaccuauauu

SEQ ID NO: 187087 - RNA, 19 nt, Artificial Sequence
  Description of Artificial Sequence: Synthetic oligonucleotide
  Antisense strand to SEQ ID NO: 187086
aauauagguacccucuaaa

SEQ ID NO: 187088 - RNA, 19 nt, Artificial Sequence
  Description of Artificial Sequence: Synthetic oligonucleotide
  Sense strand starting at position 3012 of SEQ ID NO: 2411
uguugucucuuugugagaa

SEQ ID NO: 187089 - RNA, 19 nt, Artificial Sequence
  Description of Artificial Sequence: Synthetic oligonucleotide
  Antisense strand to SEQ ID NO: 187088
uucucacaaagagacaaca

SEQ ID NO: 187090 - RNA, 19 nt, Artificial Sequence
  Description of Artificial Sequence: Synthetic oligonucleotide
  Sense strand starting at position 3183 of SEQ ID NO: 2411
agacccuugguuugguaaa

SEQ ID NO: 187091 - RNA, 19 nt, Artificial Sequence
  Description of Artificial Sequence: Synthetic oligonucleotide
  Antisense strand to SEQ ID NO: 187090
uuuaccaaaccaagggucu

SEQ ID NO: 187092 - RNA, 19 nt, Artificial Sequence
  Description of Artificial Sequence: Synthetic oligonucleotide
  Sense strand starting at position 3185 of SEQ ID NO: 2411
acccuugguuugguaaaua

SEQ ID NO: 187093 - RNA, 19 nt, Artificial Sequence
  Description of Artificial Sequence: Synthetic oligonucleotide
  Antisense strand to SEQ ID NO: 187092
uauuuaccaaaccaagggu

SEQ ID NO: 187094 - RNA, 19 nt, Artificial Sequence
  Description of Artificial Sequence: Synthetic oligonucleotide
  Sense strand starting at position 3365 of SEQ ID NO: 2411
agaugucaugcagguuaca

SEQ ID NO: 187095 - RNA, 19 nt, Artificial Sequence
  Description of Artificial Sequence: Synthetic oligonucleotide
  Antisense strand to SEQ ID NO: 187094
uguaaccugcaugacaucu

SEQ ID NO: 187096 - RNA, 19 nt, Artificial Sequence
  Description of Artificial Sequence: Synthetic oligonucleotide
  Sense strand starting at position 3562 of SEQ ID NO: 2411
gugugacaguaguccuaua

SEQ ID NO: 187097 - RNA, 19 nt, Artificial Sequence
  Description of Artificial Sequence: Synthetic oligonucleotide
  Antisense strand to SEQ ID NO: 187096
uauaggacuacugucacac

SEQ ID NO: 187098 - RNA, 19 nt, Artificial Sequence
  Description of Artificial Sequence: Synthetic oligonucleotide
  Sense strand starting at position 3567 of SEQ ID NO: 2411
acaguaguccuauaagguu

SEQ ID NO: 187099 - RNA, 19 nt, Artificial Sequence
  Description of Artificial Sequence: Synthetic oligonucleotide
  Antisense strand to SEQ ID NO: 187098
aaccuuauaggacuacugu

SEQ ID NO: 187100 - RNA, 19 nt, Artificial Sequence
  Description of Artificial Sequence: Synthetic oligonucleotide
  Sense strand starting at position 3748 of SEQ ID NO: 2411
ggcuaugcuaccuagguuu

SEQ ID NO: 187101 - RNA, 19 nt, Artificial Sequence
  Description of Artificial Sequence: Synthetic oligonucleotide
  Antisense strand to SEQ ID NO: 187100
aaaccuagguagcauagcc

SEQ ID NO: 187102 - RNA, 19 nt, Artificial Sequence
  Description of Artificial Sequence: Synthetic oligonucleotide
  Sense strand starting at position 3750 of SEQ ID NO: 2411
cuaugcuaccuagguuuau

SEQ ID NO: 187103 - RNA, 19 nt, Artificial Sequence
  Description of Artificial Sequence: Synthetic oligonucleotide
  Antisense strand to SEQ ID NO: 187102
auaaaccuagguagcauag

SEQ ID NO: 187104 - RNA, 19 nt, Artificial Sequence
  Description of Artificial Sequence: Synthetic oligonucleotide
  Sense strand starting at position 3754 of SEQ ID NO: 2411
gcuaccuagguuuauguaa

SEQ ID NO: 187105 - RNA, 19 nt, Artificial Sequence
  Description of Artificial Sequence: Synthetic oligonucleotide
  Antisense strand to SEQ ID NO: 187104
uuacauaaaccuagguagc

SEQ ID NO: 187106 - RNA, 19 nt, Artificial Sequence
  Description of Artificial Sequence: Synthetic oligonucleotide
  Sense strand starting at position 3769 of SEQ ID NO: 2411
guaagugcccucuaugaca

SEQ ID NO: 187107 - RNA, 19 nt, Artificial Sequence
  Description of Artificial Sequence: Synthetic oligonucleotide
  Antisense strand to SEQ ID NO: 187106
ugucauagagggcacuuac

SEQ ID NO: 187108 - RNA, 19 nt, Artificial Sequence
  Description of Artificial Sequence: Synthetic oligonucleotide
  Sense strand starting at position 3901 of SEQ ID NO: 2411
gucacuuauugagccuuua

SEQ ID NO: 187109 - RNA, 19 nt, Artificial Sequence
  Description of Artificial Sequence: Synthetic oligonucleotide
  Antisense strand to SEQ ID NO: 187108
uaaaggcucaauaagugac

SEQ ID NO: 187110 - RNA, 19 nt, Artificial Sequence
  Description of Artificial Sequence: Synthetic oligonucleotide
  Sense strand starting at position 191 of SEQ ID NO: 2412
uaagacaauuggcuuggau

SEQ ID NO: 187111 - RNA, 19 nt, Artificial Sequence
  Description of Artificial Sequence: Synthetic oligonucleotide
  Antisense strand to SEQ ID NO: 187110
auccaagccaauugucuua

SEQ ID NO: 187112 - RNA, 19 nt, Artificial Sequence
  Description of Artificial Sequence: Synthetic oligonucleotide
  Sense strand starting at position 194 of SEQ ID NO: 2412
gacaauuggcuuggauguu

SEQ ID NO: 187113 - RNA, 19 nt, Artificial Sequence
  Description of Artificial Sequence: Synthetic oligonucleotide
  Antisense strand to SEQ ID NO: 187112
aacauccaagccaauuguc

SEQ ID NO: 187114 - RNA, 19 nt, Artificial Sequence
  Description of Artificial Sequence: Synthetic oligonucleotide
  Sense strand starting at position 422 of SEQ ID NO: 2412
cuccgcaaaguuuaacaaa

SEQ ID NO: 187115 - RNA, 19 nt, Artificial Sequence
  Description of Artificial Sequence: Synthetic oligonucleotide
  Antisense strand to SEQ ID NO: 187114
uuuguuaaacuuugcggag

SEQ ID NO: 187116 - RNA, 19 nt, Artificial Sequence
  Description of Artificial Sequence: Synthetic oligonucleotide
  Sense strand starting at position 433 of SEQ ID NO: 2412
uuaacaaagccgugaagua

SEQ ID NO: 187117 - RNA, 19 nt, Artificial Sequence
  Description of Artificial Sequence: Synthetic oligonucleotide
  Antisense strand to SEQ ID NO: 187116
uacuucacggcuuuguuaa

SEQ ID NO: 187118 - RNA, 19 nt, Artificial Sequence
  Description of Artificial Sequence: Synthetic oligonucleotide
  Sense strand starting at position 434 of SEQ ID NO: 2412
uaacaaagccgugaaguaa

SEQ ID NO: 187119 - RNA, 19 nt, Artificial Sequence
  Description of Artificial Sequence: Synthetic oligonucleotide
  Antisense strand to SEQ ID NO: 187118
uuacuucacggcuuuguua

SEQ ID NO: 187120 - RNA, 19 nt, Artificial Sequence
  Description of Artificial Sequence: Synthetic oligonucleotide
  Sense strand starting at position 483 of SEQ ID NO: 2412
caaaguuggcauugaaguu

SEQ ID NO: 187121 - RNA, 19 nt, Artificial Sequence
  Description of Artificial Sequence: Synthetic oligonucleotide
  Antisense strand to SEQ ID NO: 187120
aacuucaaugccaacuuug

SEQ ID NO: 187122 - RNA, 19 nt, Artificial Sequence
  Description of Artificial Sequence: Synthetic oligonucleotide
  Sense strand starting at position 645 of SEQ ID NO: 2412
gccuguuugacucagagag

SEQ ID NO: 187123 - RNA, 19 nt, Artificial Sequence
  Description of Artificial Sequence: Synthetic oligonucleotide
  Antisense strand to SEQ ID NO: 187122
cucucugagucaaacaggc

SEQ ID NO: 187124 - RNA, 19 nt, Artificial Sequence
  Description of Artificial Sequence: Synthetic oligonucleotide
  Sense strand starting at position 1092 of SEQ ID NO: 2412
cauuuacaaccgugcaagu

SEQ ID NO: 187125 - RNA, 19 nt, Artificial Sequence
  Description of Artificial Sequence: Synthetic oligonucleotide
  Antisense strand to SEQ ID NO: 187124
acuugcacgguuguaaaug

SEQ ID NO: 187126 - RNA, 19 nt, Artificial Sequence
  Description of Artificial Sequence: Synthetic oligonucleotide
  Sense strand starting at position 1094 of SEQ ID NO: 2412
uuuacaaccgugcaaguau

SEQ ID NO: 187127 - RNA, 19 nt, Artificial Sequence
  Description of Artificial Sequence: Synthetic oligonucleotide
  Antisense strand to SEQ ID NO: 187126
auacuugcacgguuguaaa

SEQ ID NO: 187128 - RNA, 19 nt, Artificial Sequence
  Description of Artificial Sequence: Synthetic oligonucleotide
  Sense strand starting at position 1109 of SEQ ID NO: 2412
guaucucagccuuguaaca

SEQ ID NO: 187129 - RNA, 19 nt, Artificial Sequence
  Description of Artificial Sequence: Synthetic oligonucleotide
  Antisense strand to SEQ ID NO: 187128
uguuacaaggcugagauac

SEQ ID NO: 187130 - RNA, 19 nt, Artificial Sequence
  Description of Artificial Sequence: Synthetic oligonucleotide
  Sense strand starting at position 1464 of SEQ ID NO: 2412
gcacaauagccggacuaau

SEQ ID NO: 187131 - RNA, 19 nt, Artificial Sequence
  Description of Artificial Sequence: Synthetic oligonucleotide
  Antisense strand to SEQ ID NO: 187130
auuaguccggcuauugugc

SEQ ID NO: 187132 - RNA, 19 nt, Artificial Sequence
  Description of Artificial Sequence: Synthetic oligonucleotide
  Sense strand starting at position 1492 of SEQ ID NO: 2412
gaagcaaggcagugauacu

SEQ ID NO: 187133 - RNA, 19 nt, Artificial Sequence
  Description of Artificial Sequence: Synthetic oligonucleotide
  Antisense strand to SEQ ID NO: 187132
aguaucacugccuugcuuc

SEQ ID NO: 187134 - RNA, 19 nt, Artificial Sequence
  Description of Artificial Sequence: Synthetic oligonucleotide
  Sense strand starting at position 2206 of SEQ ID NO: 2412
ucugguuuccgaagugcga

SEQ ID NO: 187135 - RNA, 19 nt, Artificial Sequence
  Description of Artificial Sequence: Synthetic oligonucleotide
  Antisense strand to SEQ ID NO: 187134
ucgcacuucggaaaccaga

SEQ ID NO: 187136 - RNA, 19 nt, Artificial Sequence
  Description of Artificial Sequence: Synthetic oligonucleotide
  Sense strand starting at position 2266 of SEQ ID NO: 2412
acgcguugacuuuaggaaa

SEQ ID NO: 187137 - RNA, 19 nt, Artificial Sequence
  Description of Artificial Sequence: Synthetic oligonucleotide
  Antisense strand to SEQ ID NO: 187136
uuuccuaaagucaacgcgu

SEQ ID NO: 187138 - RNA, 19 nt, Artificial Sequence
  Description of Artificial Sequence: Synthetic oligonucleotide
  Sense strand starting at position 2356 of SEQ ID NO: 2412
ccaauagaugccuaaguca

SEQ ID NO: 187139 - RNA, 19 nt, Artificial Sequence
  Description of Artificial Sequence: Synthetic oligonucleotide
  Antisense strand to SEQ ID NO: 187138
ugacuuaggcaucuauugg

SEQ ID NO: 187140 - RNA, 19 nt, Artificial Sequence
  Description of Artificial Sequence: Synthetic oligonucleotide
  Sense strand starting at position 2432 of SEQ ID NO: 2412
cucgguuauugggcacaua

SEQ ID NO: 187141 - RNA, 19 nt, Artificial Sequence
  Description of Artificial Sequence: Synthetic oligonucleotide
  Antisense strand to SEQ ID NO: 187140
uaugugcccaauaaccgag

SEQ ID NO: 187142 - RNA, 19 nt, Artificial Sequence
  Description of Artificial Sequence: Synthetic oligonucleotide
  Sense strand starting at position 2478 of SEQ ID NO: 2412
ugaggaaacuugcucucca

SEQ ID NO: 187143 - RNA, 19 nt, Artificial Sequence
  Description of Artificial Sequence: Synthetic oligonucleotide
  Antisense strand to SEQ ID NO: 187142
uggagagcaaguuuccuca

SEQ ID NO: 187144 - RNA, 19 nt, Artificial Sequence
  Description of Artificial Sequence: Synthetic oligonucleotide
  Sense strand starting at position 2497 of SEQ ID NO: 2412
gccaaaucagaccacuguu

SEQ ID NO: 187145 - RNA, 19 nt, Artificial Sequence
  Description of Artificial Sequence: Synthetic oligonucleotide
  Antisense strand to SEQ ID NO: 187144
aacaguggucugauuuggc

SEQ ID NO: 187146 - RNA, 19 nt, Artificial Sequence
  Description of Artificial Sequence: Synthetic oligonucleotide
  Sense strand starting at position 2542 of SEQ ID NO: 2412
agccuuaacccugguuauu

SEQ ID NO: 187147 - RNA, 19 nt, Artificial Sequence
  Description of Artificial Sequence: Synthetic oligonucleotide
  Antisense strand to SEQ ID NO: 187146
aauaaccaggguuaaggcu

SEQ ID NO: 187148 - RNA, 19 nt, Artificial Sequence
  Description of Artificial Sequence: Synthetic oligonucleotide
  Sense strand starting at position 2551 of SEQ ID NO: 2412
ccugguuauugccuuaaag

SEQ ID NO: 187149 - RNA, 19 nt, Artificial Sequence
  Description of Artificial Sequence: Synthetic oligonucleotide
  Antisense strand to SEQ ID NO: 187148
cuuuaaggcaauaaccagg

SEQ ID NO: 187150 - RNA, 19 nt, Artificial Sequence
  Description of Artificial Sequence: Synthetic oligonucleotide
  Sense strand starting at position 2553 of SEQ ID NO: 2412
ugguuauugccuuaaagag

SEQ ID NO: 187151 - RNA, 19 nt, Artificial Sequence
  Description of Artificial Sequence: Synthetic oligonucleotide
  Antisense strand to SEQ ID NO: 187150
cucuuuaaggcaauaacca

SEQ ID NO: 187152 - RNA, 19 nt, Artificial Sequence
  Description of Artificial Sequence: Synthetic oligonucleotide
  Sense strand starting at position 2577 of SEQ ID NO: 2412
guucuacuccaucaauguu

SEQ ID NO: 187153 - RNA, 19 nt, Artificial Sequence
  Description of Artificial Sequence: Synthetic oligonucleotide
  Antisense strand to SEQ ID NO: 187152
aacauugauggaguagaac

SEQ ID NO: 187154 - RNA, 19 nt, Artificial Sequence
  Description of Artificial Sequence: Synthetic oligonucleotide
  Sense strand starting at position 2654 of SEQ ID NO: 2412
caugcaguaucucugggaa

SEQ ID NO: 187155 - RNA, 19 nt, Artificial Sequence
  Description of Artificial Sequence: Synthetic oligonucleotide
  Antisense strand to SEQ ID NO: 187154
uucccagagauacugcaug

SEQ ID NO: 187156 - RNA, 19 nt, Artificial Sequence
  Description of Artificial Sequence: Synthetic oligonucleotide
  Sense strand starting at position 2657 of SEQ ID NO: 2412
gcaguaucucugggaacug

SEQ ID NO: 187157 - RNA, 19 nt, Artificial Sequence
  Description of Artificial Sequence: Synthetic oligonucleotide
  Antisense strand to SEQ ID NO: 187156
caguucccagagauacugc

SEQ ID NO: 187158 - RNA, 19 nt, Artificial Sequence
  Description of Artificial Sequence: Synthetic oligonucleotide
  Sense strand starting at position 2909 of SEQ ID NO: 2412
aagagaucuuaguugguuu

SEQ ID NO: 187159 - RNA, 19 nt, Artificial Sequence
  Description of Artificial Sequence: Synthetic oligonucleotide
  Antisense strand to SEQ ID NO: 187158
aaaccaacuaagaucucuu

SEQ ID NO: 187160 - RNA, 19 nt, Artificial Sequence
  Description of Artificial Sequence: Synthetic oligonucleotide
  Sense strand starting at position 2910 of SEQ ID NO: 2412
agagaucuuaguugguuua

SEQ ID NO: 187161 - RNA, 19 nt, Artificial Sequence
  Description of Artificial Sequence: Synthetic oligonucleotide
  Antisense strand to SEQ ID NO: 187160
uaaaccaacuaagaucucu

SEQ ID NO: 187162 - RNA, 19 nt, Artificial Sequence
  Description of Artificial Sequence: Synthetic oligonucleotide
  Sense strand starting at position 2912 of SEQ ID NO: 2412
agaucuuaguugguuuaga

SEQ ID NO: 187163 - RNA, 19 nt, Artificial Sequence
  Description of Artificial Sequence: Synthetic oligonucleotide
  Antisense strand to SEQ ID NO: 187162
ucuaaaccaacuaagaucu

SEQ ID NO: 187164 - RNA, 19 nt, Artificial Sequence
  Description of Artificial Sequence: Synthetic oligonucleotide
  Sense strand starting at position 2913 of SEQ ID NO: 2412
gaucuuaguugguuuagag

SEQ ID NO: 187165 - RNA, 19 nt, Artificial Sequence
  Description of Artificial Sequence: Synthetic oligonucleotide
  Antisense strand to SEQ ID NO: 187164
cucuaaaccaacuaagauc

SEQ ID NO: 187166 - RNA, 19 nt, Artificial Sequence
  Description of Artificial Sequence: Synthetic oligonucleotide
  Sense strand starting at position 2925 of SEQ ID NO: 2412
uuuagaggguaccuauauu

SEQ ID NO: 187167 - RNA, 19 nt, Artificial Sequence
  Description of Artificial Sequence: Synthetic oligonucleotide
  Antisense strand to SEQ ID NO: 187166
aauauagguacccucuaaa

SEQ ID NO: 187168 - RNA, 19 nt, Artificial Sequence
  Description of Artificial Sequence: Synthetic oligonucleotide
  Sense strand starting at position 2957 of SEQ ID NO: 2412
uguugucucuuugugagaa

SEQ ID NO: 187169 - RNA, 19 nt, Artificial Sequence
  Description of Artificial Sequence: Synthetic oligonucleotide
  Antisense strand to SEQ ID NO: 187168
uucucacaaagagacaaca

SEQ ID NO: 187170 - RNA, 19 nt, Artificial Sequence
  Description of Artificial Sequence: Synthetic oligonucleotide
  Sense strand starting at position 3128 of SEQ ID NO: 2412
agacccuugguuugguaaa

SEQ ID NO: 187171 - RNA, 19 nt, Artificial Sequence
  Description of Artificial Sequence: Synthetic oligonucleotide
  Antisense strand to SEQ ID NO: 187170
uuuaccaaaccaagggucu

SEQ ID NO: 187172 - RNA, 19 nt, Artificial Sequence
  Description of Artificial Sequence: Synthetic oligonucleotide
  Sense strand starting at position 3130 of SEQ ID NO: 2412
acccuugguuugguaaaua

SEQ ID NO: 187173 - RNA, 19 nt, Artificial Sequence
  Description of Artificial Sequence: Synthetic oligonucleotide
  Antisense strand to SEQ ID NO: 187172
uauuuaccaaaccaagggu

SEQ ID NO: 187174 - RNA, 19 nt, Artificial Sequence
  Description of Artificial Sequence: Synthetic oligonucleotide
  Sense strand starting at position 3310 of SEQ ID NO: 2412
agaugucaugcagguuaca

SEQ ID NO: 187175 - RNA, 19 nt, Artificial Sequence
  Description of Artificial Sequence: Synthetic oligonucleotide
  Antisense strand to SEQ ID NO: 187174
uguaaccugcaugacaucu

SEQ ID NO: 187176 - RNA, 19 nt, Artificial Sequence
  Description of Artificial Sequence: Synthetic oligonucleotide
  Sense strand starting at position 3507 of SEQ ID NO: 2412
gugugacaguaguccuaua

SEQ ID NO: 187177 - RNA, 19 nt, Artificial Sequence
  Description of Artificial Sequence: Synthetic oligonucleotide
  Antisense strand to SEQ ID NO: 187176
uauaggacuacugucacac

SEQ ID NO: 187178 - RNA, 19 nt, Artificial Sequence
  Description of Artificial Sequence: Synthetic oligonucleotide
  Sense strand starting at position 3512 of SEQ ID NO: 2412
acaguaguccuauaagguu

SEQ ID NO: 187179 - RNA, 19 nt, Artificial Sequence
  Description of Artificial Sequence: Synthetic oligonucleotide
  Antisense strand to SEQ ID NO: 187178
aaccuuauaggacuacugu

SEQ ID NO: 187180 - RNA, 19 nt, Artificial Sequence
  Description of Artificial Sequence: Synthetic oligonucleotide
  Sense strand starting at position 3693 of SEQ ID NO: 2412
ggcuaugcuaccuagguuu

SEQ ID NO: 187181 - RNA, 19 nt, Artificial Sequence
  Description of Artificial Sequence: Synthetic oligonucleotide
  Antisense strand to SEQ ID NO: 187180
aaaccuagguagcauagcc

SEQ ID NO: 187182 - RNA, 19 nt, Artificial Sequence
  Description of Artificial Sequence: Synthetic oligonucleotide
  Sense strand starting at position 3695 of SEQ ID NO: 2412
cuaugcuaccuagguuuau

SEQ ID NO: 187183 - RNA, 19 nt, Artificial Sequence
  Description of Artificial Sequence: Synthetic oligonucleotide
  Antisense strand to SEQ ID NO: 187182
auaaaccuagguagcauag

SEQ ID NO: 187184 - RNA, 19 nt, Artificial Sequence
  Description of Artificial Sequence: Synthetic oligonucleotide
  Sense strand starting at position 3699 of SEQ ID NO: 2412
gcuaccuagguuuauguaa

SEQ ID NO: 187185 - RNA, 19 nt, Artificial Sequence
  Description of Artificial Sequence: Synthetic oligonucleotide
  Antisense strand to SEQ ID NO: 187184
uuacauaaaccuagguagc

SEQ ID NO: 187186 - RNA, 19 nt, Artificial Sequence
  Description of Artificial Sequence: Synthetic oligonucleotide
  Sense strand starting at position 3714 of SEQ ID NO: 2412
guaagugcccucuaugaca

SEQ ID NO: 187187 - RNA, 19 nt, Artificial Sequence
  Description of Artificial Sequence: Synthetic oligonucleotide
  Antisense strand to SEQ ID NO: 187186
ugucauagagggcacuuac

SEQ ID NO: 187188 - RNA, 19 nt, Artificial Sequence
  Description of Artificial Sequence: Synthetic oligonucleotide
  Sense strand starting at position 3846 of SEQ ID NO: 2412
gucacuuauugagccuuua

SEQ ID NO: 187189 - RNA, 19 nt, Artificial Sequence
  Description of Artificial Sequence: Synthetic oligonucleotide
  Antisense strand to SEQ ID NO: 187188
uaaaggcucaauaagugac

SEQ ID NO: 187190 - RNA, 19 nt, Artificial Sequence
  Description of Artificial Sequence: Synthetic oligonucleotide
  Sense strand starting at position 3713 of SEQ ID NO: 2413
caagacaugccugaugagu

SEQ ID NO: 187191 - RNA, 19 nt, Artificial Sequence
  Description of Artificial Sequence: Synthetic oligonucleotide
  Antisense strand to SEQ ID NO: 187190
acucaucaggcaugucuug

SEQ ID NO: 187192 - RNA, 19 nt, Artificial Sequence
  Description of Artificial Sequence: Synthetic oligonucleotide
  Sense strand starting at position 3712 of SEQ ID NO: 2413
gcaagacaugccugaugag

SEQ ID NO: 187193 - RNA, 19 nt, Artificial Sequence
  Description of Artificial Sequence: Synthetic oligonucleotide
  Antisense strand to SEQ ID NO: 187192
cucaucaggcaugucuugc

SEQ ID NO: 187194 - RNA, 19 nt, Artificial Sequence
  Description of Artificial Sequence: Synthetic oligonucleotide
  Sense strand starting at position 3660 of SEQ ID NO: 2413
gggcuagaugcucaggacu

SEQ ID NO: 187195 - RNA, 19 nt, Artificial Sequence
  Description of Artificial Sequence: Synthetic oligonucleotide
  Antisense strand to SEQ ID NO: 187194
aguccugagcaucuagccc

SEQ ID NO: 187196 - RNA, 19 nt, Artificial Sequence
  Description of Artificial Sequence: Synthetic oligonucleotide
  Sense strand starting at position 3626 of SEQ ID NO: 2413
gcagguguggcaagucaga

SEQ ID NO: 187197 - RNA, 19 nt, Artificial Sequence
  Description of Artificial Sequence: Synthetic oligonucleotide
  Antisense strand to SEQ ID NO: 187196
ucugacuugccacaccugc

SEQ ID NO: 187198 - RNA, 19 nt, Artificial Sequence
  Description of Artificial Sequence: Synthetic oligonucleotide
  Sense strand starting at position 3607 of SEQ ID NO: 2413
guuguucccuccuccacaa

SEQ ID NO: 187199 - RNA, 19 nt, Artificial Sequence
  Description of Artificial Sequence: Synthetic oligonucleotide
  Antisense strand to SEQ ID NO: 187198
uuguggaggagggaacaac

SEQ ID NO: 187200 - RNA, 19 nt, Artificial Sequence
  Description of Artificial Sequence: Synthetic oligonucleotide
  Sense strand starting at position 3357 of SEQ ID NO: 2413
cccgaaucccuuuggauca

SEQ ID NO: 187201 - RNA, 19 nt, Artificial Sequence
  Description of Artificial Sequence: Synthetic oligonucleotide
  Antisense strand to SEQ ID NO: 187200
ugauccaaagggauucggg

SEQ ID NO: 187202 - RNA, 19 nt, Artificial Sequence
  Description of Artificial Sequence: Synthetic oligonucleotide
  Sense strand starting at position 3143 of SEQ ID NO: 2413
gagcuuucccauggugaga

SEQ ID NO: 187203 - RNA, 19 nt, Artificial Sequence
  Description of Artificial Sequence: Synthetic oligonucleotide
  Antisense strand to SEQ ID NO: 187202
ucucaccaugggaaagcuc

SEQ ID NO: 187204 - RNA, 19 nt, Artificial Sequence
  Description of Artificial Sequence: Synthetic oligonucleotide
  Sense strand starting at position 3142 of SEQ ID NO: 2413
agagcuuucccauggugag

SEQ ID NO: 187205 - RNA, 19 nt, Artificial Sequence
  Description of Artificial Sequence: Synthetic oligonucleotide
  Antisense strand to SEQ ID NO: 187204
cucaccaugggaaagcucu

SEQ ID NO: 187206 - RNA, 19 nt, Artificial Sequence
  Description of Artificial Sequence: Synthetic oligonucleotide
  Sense strand starting at position 2995 of SEQ ID NO: 2413
guaacauuucuauguuguu

SEQ ID NO: 187207 - RNA, 19 nt, Artificial Sequence
  Description of Artificial Sequence: Synthetic oligonucleotide
  Antisense strand to SEQ ID NO: 187206
aacaacauagaaauguuac

SEQ ID NO: 187208 - RNA, 19 nt, Artificial Sequence
  Description of Artificial Sequence: Synthetic oligonucleotide
  Sense strand starting at position 2992 of SEQ ID NO: 2413
gguguaacauuucuauguu

SEQ ID NO: 187209 - RNA, 19 nt, Artificial Sequence
  Description of Artificial Sequence: Synthetic oligonucleotide
  Antisense strand to SEQ ID NO: 187208
aacauagaaauguuacacc

SEQ ID NO: 187210 - RNA, 19 nt, Artificial Sequence
  Description of Artificial Sequence: Synthetic oligonucleotide
  Sense strand starting at position 2963 of SEQ ID NO: 2413
ccgguugaguaugugaaua

SEQ ID NO: 187211 - RNA, 19 nt, Artificial Sequence
  Description of Artificial Sequence: Synthetic oligonucleotide
  Antisense strand to SEQ ID NO: 187210
uauucacauacucaaccgg

SEQ ID NO: 187212 - RNA, 19 nt, Artificial Sequence
  Description of Artificial Sequence: Synthetic oligonucleotide
  Sense strand starting at position 2962 of SEQ ID NO: 2413
accgguugaguaugugaau

SEQ ID NO: 187213 - RNA, 19 nt, Artificial Sequence
  Description of Artificial Sequence: Synthetic oligonucleotide
  Antisense strand to SEQ ID NO: 187212
auucacauacucaaccggu

SEQ ID NO: 187214 - RNA, 19 nt, Artificial Sequence
  Description of Artificial Sequence: Synthetic oligonucleotide
  Sense strand starting at position 2842 of SEQ ID NO: 2413
gacacagagucaguacuua

SEQ ID NO: 187215 - RNA, 19 nt, Artificial Sequence
  Description of Artificial Sequence: Synthetic oligonucleotide
  Antisense strand to SEQ ID NO: 187214
uaaguacugacucuguguc

SEQ ID NO: 187216 - RNA, 19 nt, Artificial Sequence
  Description of Artificial Sequence: Synthetic oligonucleotide
  Sense strand starting at position 2797 of SEQ ID NO: 2413
ucuccaccagaguguaaau

SEQ ID NO: 187217 - RNA, 19 nt, Artificial Sequence
  Description of Artificial Sequence: Synthetic oligonucleotide
  Antisense strand to SEQ ID NO: 187216
auuuacacucugguggaga

SEQ ID NO: 187218 - RNA, 19 nt, Artificial Sequence
  Description of Artificial Sequence: Synthetic oligonucleotide
  Sense strand starting at position 2794 of SEQ ID NO: 2413
guuucuccaccagagugua

SEQ ID NO: 187219 - RNA, 19 nt, Artificial Sequence
  Description of Artificial Sequence: Synthetic oligonucleotide
  Antisense strand to SEQ ID NO: 187218
uacacucugguggagaaac

SEQ ID NO: 187220 - RNA, 19 nt, Artificial Sequence
  Description of Artificial Sequence: Synthetic oligonucleotide
  Sense strand starting at position 2774 of SEQ ID NO: 2413
gagucaccucuuugagaca

SEQ ID NO: 187221 - RNA, 19 nt, Artificial Sequence
  Description of Artificial Sequence: Synthetic oligonucleotide
  Antisense strand to SEQ ID NO: 187220
ugucucaaagaggugacuc

SEQ ID NO: 187222 - RNA, 19 nt, Artificial Sequence
  Description of Artificial Sequence: Synthetic oligonucleotide
  Sense strand starting at position 2773 of SEQ ID NO: 2413
agagucaccucuuugagac

SEQ ID NO: 187223 - RNA, 19 nt, Artificial Sequence
  Description of Artificial Sequence: Synthetic oligonucleotide
  Antisense strand to SEQ ID NO: 187222
gucucaaagaggugacucu

SEQ ID NO: 187224 - RNA, 19 nt, Artificial Sequence
  Description of Artificial Sequence: Synthetic oligonucleotide
  Sense strand starting at position 2768 of SEQ ID NO: 2413
cccugagagucaccucuuu

SEQ ID NO: 187225 - RNA, 19 nt, Artificial Sequence
  Description of Artificial Sequence: Synthetic oligonucleotide
  Antisense strand to SEQ ID NO: 187224
aaagaggugacucucaggg

SEQ ID NO: 187226 - RNA, 19 nt, Artificial Sequence
  Description of Artificial Sequence: Synthetic oligonucleotide
  Sense strand starting at position 2696 of SEQ ID NO: 2413
guuuccagcucuccugaau

SEQ ID NO: 187227 - RNA, 19 nt, Artificial Sequence
  Description of Artificial Sequence: Synthetic oligonucleotide
  Antisense strand to SEQ ID NO: 187226
auucaggagagcuggaaac

SEQ ID NO: 187228 - RNA, 19 nt, Artificial Sequence
  Description of Artificial Sequence: Synthetic oligonucleotide
  Sense strand starting at position 2597 of SEQ ID NO: 2413
gacuccuugcuguagugua

SEQ ID NO: 187229 - RNA, 19 nt, Artificial Sequence
  Description of Artificial Sequence: Synthetic oligonucleotide
  Antisense strand to SEQ ID NO: 187228
uacacuacagcaaggaguc

SEQ ID NO: 187230 - RNA, 19 nt, Artificial Sequence
  Description of Artificial Sequence: Synthetic oligonucleotide
  Sense strand starting at position 2531 of SEQ ID NO: 2413
cacucacucguccaagguu

SEQ ID NO: 187231 - RNA, 19 nt, Artificial Sequence
  Description of Artificial Sequence: Synthetic oligonucleotide
  Antisense strand to SEQ ID NO: 187230
aaccuuggacgagugagug

SEQ ID NO: 187232 - RNA, 19 nt, Artificial Sequence
  Description of Artificial Sequence: Synthetic oligonucleotide
  Sense strand starting at position 2443 of SEQ ID NO: 2413
gcuuuaucucacgggauuc

SEQ ID NO: 187233 - RNA, 19 nt, Artificial Sequence
  Description of Artificial Sequence: Synthetic oligonucleotide
  Antisense strand to SEQ ID NO: 187232
gaaucccgugagauaaagc

SEQ ID NO: 187234 - RNA, 19 nt, Artificial Sequence
  Description of Artificial Sequence: Synthetic oligonucleotide
  Sense strand starting at position 2399 of SEQ ID NO: 2413
gcagcaaacccauggaguu

SEQ ID NO: 187235 - RNA, 19 nt, Artificial Sequence
  Description of Artificial Sequence: Synthetic oligonucleotide
  Antisense strand to SEQ ID NO: 187234
aacuccauggguuugcugc

SEQ ID NO: 187236 - RNA, 19 nt, Artificial Sequence
  Description of Artificial Sequence: Synthetic oligonucleotide
  Sense strand starting at position 2243 of SEQ ID NO: 2413
uaagucagcuuuccgaaga

SEQ ID NO: 187237 - RNA, 19 nt, Artificial Sequence
  Description of Artificial Sequence: Synthetic oligonucleotide
  Antisense strand to SEQ ID NO: 187236
ucuucggaaagcugacuua

SEQ ID NO: 187238 - RNA, 19 nt, Artificial Sequence
  Description of Artificial Sequence: Synthetic oligonucleotide
  Sense strand starting at position 2193 of SEQ ID NO: 2413
gaccucggucgugagagau

SEQ ID NO: 187239 - RNA, 19 nt, Artificial Sequence
  Description of Artificial Sequence: Synthetic oligonucleotide
  Antisense strand to SEQ ID NO: 187238
aucucucacgaccgagguc

SEQ ID NO: 187240 - RNA, 19 nt, Artificial Sequence
  Description of Artificial Sequence: Synthetic oligonucleotide
  Sense strand starting at position 878 of SEQ ID NO: 2413
guauuauguaucgagaaga

SEQ ID NO: 187241 - RNA, 19 nt, Artificial Sequence
  Description of Artificial Sequence: Synthetic oligonucleotide
  Antisense strand to SEQ ID NO: 187240
ucuucucgauacauaauac

SEQ ID NO: 187242 - RNA, 19 nt, Artificial Sequence
  Description of Artificial Sequence: Synthetic oligonucleotide
  Sense strand starting at position 840 of SEQ ID NO: 2413
cuacguauaugaucauaua

SEQ ID NO: 187243 - RNA, 19 nt, Artificial Sequence
  Description of Artificial Sequence: Synthetic oligonucleotide
  Antisense strand to SEQ ID NO: 187242
uauaugaucauauacguag

SEQ ID NO: 187244 - RNA, 19 nt, Artificial Sequence
  Description of Artificial Sequence: Synthetic oligonucleotide
  Sense strand starting at position 813 of SEQ ID NO: 2413
guauaacaagcuugaccau

SEQ ID NO: 187245 - RNA, 19 nt, Artificial Sequence
  Description of Artificial Sequence: Synthetic oligonucleotide
  Antisense strand to SEQ ID NO: 187244
auggucaagcuuguuauac

SEQ ID NO: 187246 - RNA, 19 nt, Artificial Sequence
  Description of Artificial Sequence: Synthetic oligonucleotide
  Sense strand starting at position 802 of SEQ ID NO: 2413
acauacuacguguauaaca

SEQ ID NO: 187247 - RNA, 19 nt, Artificial Sequence
  Description of Artificial Sequence: Synthetic oligonucleotide
  Antisense strand to SEQ ID NO: 187246
uguuauacacguaguaugu

SEQ ID NO: 187248 - RNA, 19 nt, Artificial Sequence
  Description of Artificial Sequence: Synthetic oligonucleotide
  Sense strand starting at position 682 of SEQ ID NO: 2413
gcaacaauacuuuguaugu

SEQ ID NO: 187249 - RNA, 19 nt, Artificial Sequence
  Description of Artificial Sequence: Synthetic oligonucleotide
  Antisense strand to SEQ ID NO: 187248
acauacaaaguauuguugc

SEQ ID NO: 187250 - RNA, 19 nt, Artificial Sequence
  Description of Artificial Sequence: Synthetic oligonucleotide
  Sense strand starting at position 670 of SEQ ID NO: 2413
ugacuauacuuggcaacaa

SEQ ID NO: 187251 - RNA, 19 nt, Artificial Sequence
  Description of Artificial Sequence: Synthetic oligonucleotide
  Antisense strand to SEQ ID NO: 187250
uuguugccaaguauaguca

SEQ ID NO: 187252 - RNA, 19 nt, Artificial Sequence
  Description of Artificial Sequence: Synthetic oligonucleotide
  Sense strand starting at position 669 of SEQ ID NO: 2413
gugacuauacuuggcaaca

SEQ ID NO: 187253 - RNA, 19 nt, Artificial Sequence
  Description of Artificial Sequence: Synthetic oligonucleotide
  Antisense strand to SEQ ID NO: 187252
uguugccaaguauagucac

SEQ ID NO: 187254 - RNA, 19 nt, Artificial Sequence
  Description of Artificial Sequence: Synthetic oligonucleotide
  Sense strand starting at position 667 of SEQ ID NO: 2413
gggugacuauacuuggcaa

SEQ ID NO: 187255 - RNA, 19 nt, Artificial Sequence
  Description of Artificial Sequence: Synthetic oligonucleotide
  Antisense strand to SEQ ID NO: 187254
uugccaaguauagucaccc

SEQ ID NO: 187256 - RNA, 19 nt, Artificial Sequence
  Description of Artificial Sequence: Synthetic oligonucleotide
  Sense strand starting at position 433 of SEQ ID NO: 2413
gcuggaagucacuauguua

SEQ ID NO: 187257 - RNA, 19 nt, Artificial Sequence
  Description of Artificial Sequence: Synthetic oligonucleotide
  Antisense strand to SEQ ID NO: 187256
uaacauagugacuuccagc

SEQ ID NO: 187258 - RNA, 19 nt, Artificial Sequence
  Description of Artificial Sequence: Synthetic oligonucleotide
  Sense strand starting at position 374 of SEQ ID NO: 2413
ggaauauuauuggucauaa

SEQ ID NO: 187259 - RNA, 19 nt, Artificial Sequence
  Description of Artificial Sequence: Synthetic oligonucleotide
  Antisense strand to SEQ ID NO: 187258
uuaugaccaauaauauucc

SEQ ID NO: 187260 - RNA, 19 nt, Artificial Sequence
  Description of Artificial Sequence: Synthetic oligonucleotide
  Sense strand starting at position 371 of SEQ ID NO: 2413
aauggaauauuauugguca

SEQ ID NO: 187261 - RNA, 19 nt, Artificial Sequence
  Description of Artificial Sequence: Synthetic oligonucleotide
  Antisense strand to SEQ ID NO: 187260
ugaccaauaauauuccauu

SEQ ID NO: 187262 - RNA, 19 nt, Artificial Sequence
  Description of Artificial Sequence: Synthetic oligonucleotide
  Sense strand starting at position 282 of SEQ ID NO: 2413
guauuacagcacgacucau

SEQ ID NO: 187263 - RNA, 19 nt, Artificial Sequence
  Description of Artificial Sequence: Synthetic oligonucleotide
  Antisense strand to SEQ ID NO: 187262
augagucgugcuguaauac

SEQ ID NO: 187264 - RNA, 19 nt, Artificial Sequence
  Description of Artificial Sequence: Synthetic oligonucleotide
  Sense strand starting at position 279 of SEQ ID NO: 2413
uguguauuacagcacgacu

SEQ ID NO: 187265 - RNA, 19 nt, Artificial Sequence
  Description of Artificial Sequence: Synthetic oligonucleotide
  Antisense strand to SEQ ID NO: 187264
agucgugcuguaauacaca

SEQ ID NO: 187266 - RNA, 19 nt, Artificial Sequence
  Description of Artificial Sequence: Synthetic oligonucleotide
  Sense strand starting at position 271 of SEQ ID NO: 2413
cguucagauguguauuaca

SEQ ID NO: 187267 - RNA, 19 nt, Artificial Sequence
  Description of Artificial Sequence: Synthetic oligonucleotide
  Antisense strand to SEQ ID NO: 187266
uguaauacacaucugaacg

SEQ ID NO: 187268 - RNA, 19 nt, Artificial Sequence
  Description of Artificial Sequence: Synthetic oligonucleotide
  Sense strand starting at position 268 of SEQ ID NO: 2413
cugcguucagauguguauu

SEQ ID NO: 187269 - RNA, 19 nt, Artificial Sequence
  Description of Artificial Sequence: Synthetic oligonucleotide
  Antisense strand to SEQ ID NO: 187268
aauacacaucugaacgcag

SEQ ID NO: 187270 - RNA, 19 nt, Artificial Sequence
  Description of Artificial Sequence: Synthetic oligonucleotide
  Sense strand starting at position 3901 of SEQ ID NO: 2414
ccgacuuccuggcacagaa

SEQ ID NO: 187271 - RNA, 19 nt, Artificial Sequence
  Description of Artificial Sequence: Synthetic oligonucleotide
  Antisense strand to SEQ ID NO: 187270
uucugugccaggaagucgg

SEQ ID NO: 187272 - RNA, 19 nt, Artificial Sequence
  Description of Artificial Sequence: Synthetic oligonucleotide
  Sense strand starting at position 3790 of SEQ ID NO: 2414
ggugcuccaagucaugaau

SEQ ID NO: 187273 - RNA, 19 nt, Artificial Sequence
  Description of Artificial Sequence: Synthetic oligonucleotide
  Antisense strand to SEQ ID NO: 187272
auucaugacuuggagcacc

SEQ ID NO: 187274 - RNA, 19 nt, Artificial Sequence
  Description of Artificial Sequence: Synthetic oligonucleotide
  Sense strand starting at position 3774 of SEQ ID NO: 2414
ucagaugagucccugaggu

SEQ ID NO: 187275 - RNA, 19 nt, Artificial Sequence
  Description of Artificial Sequence: Synthetic oligonucleotide
  Antisense strand to SEQ ID NO: 187274
accucagggacucaucuga

SEQ ID NO: 187276 - RNA, 19 nt, Artificial Sequence
  Description of Artificial Sequence: Synthetic oligonucleotide
  Sense strand starting at position 3716 of SEQ ID NO: 2414
guacgaggguuaucgagaa

SEQ ID NO: 187277 - RNA, 19 nt, Artificial Sequence
  Description of Artificial Sequence: Synthetic oligonucleotide
  Antisense strand to SEQ ID NO: 187276
uucucgauaacccucguac

SEQ ID NO: 187278 - RNA, 19 nt, Artificial Sequence
  Description of Artificial Sequence: Synthetic oligonucleotide
  Sense strand starting at position 3710 of SEQ ID NO: 2414
gcugguguacgaggguuau

SEQ ID NO: 187279 - RNA, 19 nt, Artificial Sequence
  Description of Artificial Sequence: Synthetic oligonucleotide
  Antisense strand to SEQ ID NO: 187278
auaacccucguacaccagc

SEQ ID NO: 187280 - RNA, 19 nt, Artificial Sequence
  Description of Artificial Sequence: Synthetic oligonucleotide
  Sense strand starting at position 3641 of SEQ ID NO: 2414
gcagcuuccuggugaagag

SEQ ID NO: 187281 - RNA, 19 nt, Artificial Sequence
  Description of Artificial Sequence: Synthetic oligonucleotide
  Antisense strand to SEQ ID NO: 187280
cucuucaccaggaagcugc

SEQ ID NO: 187282 - RNA, 19 nt, Artificial Sequence
  Description of Artificial Sequence: Synthetic oligonucleotide
  Sense strand starting at position 3638 of SEQ ID NO: 2414
caggcagcuuccuggugaa

SEQ ID NO: 187283 - RNA, 19 nt, Artificial Sequence
  Description of Artificial Sequence: Synthetic oligonucleotide
  Antisense strand to SEQ ID NO: 187282
uucaccaggaagcugccug

SEQ ID NO: 187284 - RNA, 19 nt, Artificial Sequence
  Description of Artificial Sequence: Synthetic oligonucleotide
  Sense strand starting at position 3596 of SEQ ID NO: 2414
gugacaugcaagcagagau

SEQ ID NO: 187285 - RNA, 19 nt, Artificial Sequence
  Description of Artificial Sequence: Synthetic oligonucleotide
  Antisense strand to SEQ ID NO: 187284
aucucugcuugcaugucac

SEQ ID NO: 187286 - RNA, 19 nt, Artificial Sequence
  Description of Artificial Sequence: Synthetic oligonucleotide
  Sense strand starting at position 3588 of SEQ ID NO: 2414
ucauuaaggugacaugcaa

SEQ ID NO: 187287 - RNA, 19 nt, Artificial Sequence
  Description of Artificial Sequence: Synthetic oligonucleotide
  Antisense strand to SEQ ID NO: 187286
uugcaugucaccuuaauga

SEQ ID NO: 187288 - RNA, 19 nt, Artificial Sequence
  Description of Artificial Sequence: Synthetic oligonucleotide
  Sense strand starting at position 3585 of SEQ ID NO: 2414
gccucauuaaggugacaug

SEQ ID NO: 187289 - RNA, 19 nt, Artificial Sequence
  Description of Artificial Sequence: Synthetic oligonucleotide
  Antisense strand to SEQ ID NO: 187288
caugucaccuuaaugaggc

SEQ ID NO: 187290 - RNA, 19 nt, Artificial Sequence
  Description of Artificial Sequence: Synthetic oligonucleotide
  Sense strand starting at position 3514 of SEQ ID NO: 2414
uaguaagugcagugguaaa

SEQ ID NO: 187291 - RNA, 19 nt, Artificial Sequence
  Description of Artificial Sequence: Synthetic oligonucleotide
  Antisense strand to SEQ ID NO: 187290
uuuaccacugcacuuacua

SEQ ID NO: 187292 - RNA, 19 nt, Artificial Sequence
  Description of Artificial Sequence: Synthetic oligonucleotide
  Sense strand starting at position 3512 of SEQ ID NO: 2414
aguaguaagugcaguggua

SEQ ID NO: 187293 - RNA, 19 nt, Artificial Sequence
  Description of Artificial Sequence: Synthetic oligonucleotide
  Antisense strand to SEQ ID NO: 187292
uaccacugcacuuacuacu

SEQ ID NO: 187294 - RNA, 19 nt, Artificial Sequence
  Description of Artificial Sequence: Synthetic oligonucleotide
  Sense strand starting at position 3447 of SEQ ID NO: 2414
ccuucuauugcaggaggau

SEQ ID NO: 187295 - RNA, 19 nt, Artificial Sequence
  Description of Artificial Sequence: Synthetic oligonucleotide
  Antisense strand to SEQ ID NO: 187294
auccuccugcaauagaagg

SEQ ID NO: 187296 - RNA, 19 nt, Artificial Sequence
  Description of Artificial Sequence: Synthetic oligonucleotide
  Sense strand starting at position 3440 of SEQ ID NO: 2414
gaguuugccuucuauugca

SEQ ID NO: 187297 - RNA, 19 nt, Artificial Sequence
  Description of Artificial Sequence: Synthetic oligonucleotide
  Antisense strand to SEQ ID NO: 187296
ugcaauagaaggcaaacuc

SEQ ID NO: 187298 - RNA, 19 nt, Artificial Sequence
  Description of Artificial Sequence: Synthetic oligonucleotide
  Sense strand starting at position 3436 of SEQ ID NO: 2414
cauggaguuugccuucuau

SEQ ID NO: 187299 - RNA, 19 nt, Artificial Sequence
  Description of Artificial Sequence: Synthetic oligonucleotide
  Antisense strand to SEQ ID NO: 187298
auagaaggcaaacuccaug

SEQ ID NO: 187300 - RNA, 19 nt, Artificial Sequence
  Description of Artificial Sequence: Synthetic oligonucleotide
  Sense strand starting at position 3408 of SEQ ID NO: 2414
ggacccauuggugaacagu

SEQ ID NO: 187301 - RNA, 19 nt, Artificial Sequence
  Description of Artificial Sequence: Synthetic oligonucleotide
  Antisense strand to SEQ ID NO: 187300
acuguucaccaaugggucc

SEQ ID NO: 187302 - RNA, 19 nt, Artificial Sequence
  Description of Artificial Sequence: Synthetic oligonucleotide
  Sense strand starting at position 3335 of SEQ ID NO: 2414
aggugaugagugcauucau

SEQ ID NO: 187303 - RNA, 19 nt, Artificial Sequence
  Description of Artificial Sequence: Synthetic oligonucleotide
  Antisense strand to SEQ ID NO: 187302
augaaugcacucaucaccu

SEQ ID NO: 187304 - RNA, 19 nt, Artificial Sequence
  Description of Artificial Sequence: Synthetic oligonucleotide
  Sense strand starting at position 3162 of SEQ ID NO: 2414
uggagaagguuucagagga

SEQ ID NO: 187305 - RNA, 19 nt, Artificial Sequence
  Description of Artificial Sequence: Synthetic oligonucleotide
  Antisense strand to SEQ ID NO: 187304
uccucugaaaccuucucca

SEQ ID NO: 187306 - RNA, 19 nt, Artificial Sequence
  Description of Artificial Sequence: Synthetic oligonucleotide
  Sense strand starting at position 2887 of SEQ ID NO: 2414
gggcuuaacuucgagaguu

SEQ ID NO: 187307 - RNA, 19 nt, Artificial Sequence
  Description of Artificial Sequence: Synthetic oligonucleotide
  Antisense strand to SEQ ID NO: 187306
aacucucgaaguuaagccc

SEQ ID NO: 187308 - RNA, 19 nt, Artificial Sequence
  Description of Artificial Sequence: Synthetic oligonucleotide
  Sense strand starting at position 2886 of SEQ ID NO: 2414
ugggcuuaacuucgagagu

SEQ ID NO: 187309 - RNA, 19 nt, Artificial Sequence
  Description of Artificial Sequence: Synthetic oligonucleotide
  Antisense strand to SEQ ID NO: 187308
acucucgaaguuaagccca

SEQ ID NO: 187310 - RNA, 19 nt, Artificial Sequence
  Description of Artificial Sequence: Synthetic oligonucleotide
  Sense strand starting at position 2850 of SEQ ID NO: 2414
ggcccuccgucagaaguaa

SEQ ID NO: 187311 - RNA, 19 nt, Artificial Sequence
  Description of Artificial Sequence: Synthetic oligonucleotide
  Antisense strand to SEQ ID NO: 187310
uuacuucugacggagggcc

SEQ ID NO: 187312 - RNA, 19 nt, Artificial Sequence
  Description of Artificial Sequence: Synthetic oligonucleotide
  Sense strand starting at position 2559 of SEQ ID NO: 2414
ggcugagaguaugaaagaa

SEQ ID NO: 187313 - RNA, 19 nt, Artificial Sequence
  Description of Artificial Sequence: Synthetic oligonucleotide
  Antisense strand to SEQ ID NO: 187312
uucuuucauacucucagcc

SEQ ID NO: 187314 - RNA, 19 nt, Artificial Sequence
  Description of Artificial Sequence: Synthetic oligonucleotide
  Sense strand starting at position 2230 of SEQ ID NO: 2414
ccgggaguuggaggucuua

SEQ ID NO: 187315 - RNA, 19 nt, Artificial Sequence
  Description of Artificial Sequence: Synthetic oligonucleotide
  Antisense strand to SEQ ID NO: 187314
uaagaccuccaacucccgg

SEQ ID NO: 187316 - RNA, 19 nt, Artificial Sequence
  Description of Artificial Sequence: Synthetic oligonucleotide
  Sense strand starting at position 2198 of SEQ ID NO: 2414
gcgcuucugugaaaugggu

SEQ ID NO: 187317 - RNA, 19 nt, Artificial Sequence
  Description of Artificial Sequence: Synthetic oligonucleotide
  Antisense strand to SEQ ID NO: 187316
acccauuucacagaagcgc

SEQ ID NO: 187318 - RNA, 19 nt, Artificial Sequence
  Description of Artificial Sequence: Synthetic oligonucleotide
  Sense strand starting at position 2194 of SEQ ID NO: 2414
ccuugcgcuucugugaaau

SEQ ID NO: 187319 - RNA, 19 nt, Artificial Sequence
  Description of Artificial Sequence: Synthetic oligonucleotide
  Antisense strand to SEQ ID NO: 187318
auuucacagaagcgcaagg

SEQ ID NO: 187320 - RNA, 19 nt, Artificial Sequence
  Description of Artificial Sequence: Synthetic oligonucleotide
  Sense strand starting at position 2192 of SEQ ID NO: 2414
auccuugcgcuucugugaa

SEQ ID NO: 187321 - RNA, 19 nt, Artificial Sequence
  Description of Artificial Sequence: Synthetic oligonucleotide
  Antisense strand to SEQ ID NO: 187320
uucacagaagcgcaaggau

SEQ ID NO: 187322 - RNA, 19 nt, Artificial Sequence
  Description of Artificial Sequence: Synthetic oligonucleotide
  Sense strand starting at position 1109 of SEQ ID NO: 2414
uuucucaccagucguguaa

SEQ ID NO: 187323 - RNA, 19 nt, Artificial Sequence
  Description of Artificial Sequence: Synthetic oligonucleotide
  Antisense strand to SEQ ID NO: 187322
uuacacgacuggugagaaa

SEQ ID NO: 187324 - RNA, 19 nt, Artificial Sequence
  Description of Artificial Sequence: Synthetic oligonucleotide
  Sense strand starting at position 1080 of SEQ ID NO: 2414
gggcauccuugcuccgaau

SEQ ID NO: 187325 - RNA, 19 nt, Artificial Sequence
  Description of Artificial Sequence: Synthetic oligonucleotide
  Antisense strand to SEQ ID NO: 187324
auucggagcaaggaugccc

SEQ ID NO: 187326 - RNA, 19 nt, Artificial Sequence
  Description of Artificial Sequence: Synthetic oligonucleotide
  Sense strand starting at position 988 of SEQ ID NO: 2414
gagggaaacucggaaggua

SEQ ID NO: 187327 - RNA, 19 nt, Artificial Sequence
  Description of Artificial Sequence: Synthetic oligonucleotide
  Antisense strand to SEQ ID NO: 187326
uaccuuccgaguuucccuc

SEQ ID NO: 187328 - RNA, 19 nt, Artificial Sequence
  Description of Artificial Sequence: Synthetic oligonucleotide
  Sense strand starting at position 963 of SEQ ID NO: 2414
guuauucguuccuugaacu

SEQ ID NO: 187329 - RNA, 19 nt, Artificial Sequence
  Description of Artificial Sequence: Synthetic oligonucleotide
  Antisense strand to SEQ ID NO: 187328
aguucaaggaacgaauaac

SEQ ID NO: 187330 - RNA, 19 nt, Artificial Sequence
  Description of Artificial Sequence: Synthetic oligonucleotide
  Sense strand starting at position 962 of SEQ ID NO: 2414
gguuauucguuccuugaac

SEQ ID NO: 187331 - RNA, 19 nt, Artificial Sequence
  Description of Artificial Sequence: Synthetic oligonucleotide
  Antisense strand to SEQ ID NO: 187330
guucaaggaacgaauaacc

SEQ ID NO: 187332 - RNA, 19 nt, Artificial Sequence
  Description of Artificial Sequence: Synthetic oligonucleotide
  Sense strand starting at position 959 of SEQ ID NO: 2414
gaagguuauucguuccuug

SEQ ID NO: 187333 - RNA, 19 nt, Artificial Sequence
  Description of Artificial Sequence: Synthetic oligonucleotide
  Antisense strand to SEQ ID NO: 187332
caaggaacgaauaaccuuc

SEQ ID NO: 187334 - RNA, 19 nt, Artificial Sequence
  Description of Artificial Sequence: Synthetic oligonucleotide
  Sense strand starting at position 690 of SEQ ID NO: 2414
ggcaaaguuuccuaaguga

SEQ ID NO: 187335 - RNA, 19 nt, Artificial Sequence
  Description of Artificial Sequence: Synthetic oligonucleotide
  Antisense strand to SEQ ID NO: 187334
ucacuuaggaaacuuugcc

SEQ ID NO: 187336 - RNA, 19 nt, Artificial Sequence
  Description of Artificial Sequence: Synthetic oligonucleotide
  Sense strand starting at position 688 of SEQ ID NO: 2414
gaggcaaaguuuccuaagu

SEQ ID NO: 187337 - RNA, 19 nt, Artificial Sequence
  Description of Artificial Sequence: Synthetic oligonucleotide
  Antisense strand to SEQ ID NO: 187336
acuuaggaaacuuugccuc

SEQ ID NO: 187338 - RNA, 19 nt, Artificial Sequence
  Description of Artificial Sequence: Synthetic oligonucleotide
  Sense strand starting at position 606 of SEQ ID NO: 2414
cucuuaguaucuugggacu

SEQ ID NO: 187339 - RNA, 19 nt, Artificial Sequence
  Description of Artificial Sequence: Synthetic oligonucleotide
  Antisense strand to SEQ ID NO: 187338
agucccaagauacuaagag

SEQ ID NO: 187340 - RNA, 19 nt, Artificial Sequence
  Description of Artificial Sequence: Synthetic oligonucleotide
  Sense strand starting at position 604 of SEQ ID NO: 2414
gucucuuaguaucuuggga

SEQ ID NO: 187341 - RNA, 19 nt, Artificial Sequence
  Description of Artificial Sequence: Synthetic oligonucleotide
  Antisense strand to SEQ ID NO: 187340
ucccaagauacuaagagac

SEQ ID NO: 187342 - RNA, 19 nt, Artificial Sequence
  Description of Artificial Sequence: Synthetic oligonucleotide
  Sense strand starting at position 558 of SEQ ID NO: 2414
ugugaagugucuggagucu

SEQ ID NO: 187343 - RNA, 19 nt, Artificial Sequence
  Description of Artificial Sequence: Synthetic oligonucleotide
  Antisense strand to SEQ ID NO: 187342
agacuccagacacuucaca

SEQ ID NO: 187344 - RNA, 19 nt, Artificial Sequence
  Description of Artificial Sequence: Synthetic oligonucleotide
  Sense strand starting at position 510 of SEQ ID NO: 2414
cgagacauccaguggaucu

SEQ ID NO: 187345 - RNA, 19 nt, Artificial Sequence
  Description of Artificial Sequence: Synthetic oligonucleotide
  Antisense strand to SEQ ID NO: 187344
agauccacuggaugucucg

SEQ ID NO: 187346 - RNA, 19 nt, Artificial Sequence
  Description of Artificial Sequence: Synthetic oligonucleotide
  Sense strand starting at position 453 of SEQ ID NO: 2414
ggugaugagugccauccaa

SEQ ID NO: 187347 - RNA, 19 nt, Artificial Sequence
  Description of Artificial Sequence: Synthetic oligonucleotide
  Antisense strand to SEQ ID NO: 187346
uuggauggcacucaucacc

SEQ ID NO: 187348 - RNA, 19 nt, Artificial Sequence
  Description of Artificial Sequence: Synthetic oligonucleotide
  Sense strand starting at position 315 of SEQ ID NO: 2414
gcaauagccuaguccaaga

SEQ ID NO: 187349 - RNA, 19 nt, Artificial Sequence
  Description of Artificial Sequence: Synthetic oligonucleotide
  Antisense strand to SEQ ID NO: 187348
ucuuggacuaggcuauugc

SEQ ID NO: 187350 - RNA, 19 nt, Artificial Sequence
  Description of Artificial Sequence: Synthetic oligonucleotide
  Sense strand starting at position 3623 of SEQ ID NO: 2415
uccaguuuccgcuacgcau

SEQ ID NO: 187351 - RNA, 19 nt, Artificial Sequence
  Description of Artificial Sequence: Synthetic oligonucleotide
  Antisense strand to SEQ ID NO: 187350
augcguagcggaaacugga

SEQ ID NO: 187352 - RNA, 19 nt, Artificial Sequence
  Description of Artificial Sequence: Synthetic oligonucleotide
  Sense strand starting at position 3605 of SEQ ID NO: 2415
uccucacuaccuugggaau

SEQ ID NO: 187353 - RNA, 19 nt, Artificial Sequence
  Description of Artificial Sequence: Synthetic oligonucleotide
  Antisense strand to SEQ ID NO: 187352
auucccaagguagugagga

SEQ ID NO: 187354 - RNA, 19 nt, Artificial Sequence
  Description of Artificial Sequence: Synthetic oligonucleotide
  Sense strand starting at position 3540 of SEQ ID NO: 2415
ugacuaugucaggaguccu

SEQ ID NO: 187355 - RNA, 19 nt, Artificial Sequence
  Description of Artificial Sequence: Synthetic oligonucleotide
  Antisense strand to SEQ ID NO: 187354
aggacuccugacauaguca

SEQ ID NO: 187356 - RNA, 19 nt, Artificial Sequence
  Description of Artificial Sequence: Synthetic oligonucleotide
  Sense strand starting at position 3537 of SEQ ID NO: 2415
uggugacuaugucaggagu

SEQ ID NO: 187357 - RNA, 19 nt, Artificial Sequence
  Description of Artificial Sequence: Synthetic oligonucleotide
  Antisense strand to SEQ ID NO: 187356
acuccugacauagucacca

SEQ ID NO: 187358 - RNA, 19 nt, Artificial Sequence
  Description of Artificial Sequence: Synthetic oligonucleotide
  Sense strand starting at position 3477 of SEQ ID NO: 2415
uugguucugcguuugcaga

SEQ ID NO: 187359 - RNA, 19 nt, Artificial Sequence
  Description of Artificial Sequence: Synthetic oligonucleotide
  Antisense strand to SEQ ID NO: 187358
ucugcaaacgcagaaccaa

SEQ ID NO: 187360 - RNA, 19 nt, Artificial Sequence
  Description of Artificial Sequence: Synthetic oligonucleotide
  Sense strand starting at position 3251 of SEQ ID NO: 2415
gacucauccgugguguguu

SEQ ID NO: 187361 - RNA, 19 nt, Artificial Sequence
  Description of Artificial Sequence: Synthetic oligonucleotide
  Antisense strand to SEQ ID NO: 187360
aacacaccacggaugaguc

SEQ ID NO: 187362 - RNA, 19 nt, Artificial Sequence
  Description of Artificial Sequence: Synthetic oligonucleotide
  Sense strand starting at position 3227 of SEQ ID NO: 2415
uucugagagcuccaagcaa

SEQ ID NO: 187363 - RNA, 19 nt, Artificial Sequence
  Description of Artificial Sequence: Synthetic oligonucleotide
  Antisense strand to SEQ ID NO: 187362
uugcuuggagcucucagaa

SEQ ID NO: 187364 - RNA, 19 nt, Artificial Sequence
  Description of Artificial Sequence: Synthetic oligonucleotide
  Sense strand starting at position 3193 of SEQ ID NO: 2415
ccgcguuggaauugaggaa

SEQ ID NO: 187365 - RNA, 19 nt, Artificial Sequence
  Description of Artificial Sequence: Synthetic oligonucleotide
  Antisense strand to SEQ ID NO: 187364
uuccucaauuccaacgcgg

SEQ ID NO: 187366 - RNA, 19 nt, Artificial Sequence
  Description of Artificial Sequence: Synthetic oligonucleotide
  Sense strand starting at position 3187 of SEQ ID NO: 2415
ugguuaccgcguuggaauu

SEQ ID NO: 187367 - RNA, 19 nt, Artificial Sequence
  Description of Artificial Sequence: Synthetic oligonucleotide
  Antisense strand to SEQ ID NO: 187366
aauuccaacgcgguaacca

SEQ ID NO: 187368 - RNA, 19 nt, Artificial Sequence
  Description of Artificial Sequence: Synthetic oligonucleotide
  Sense strand starting at position 3100 of SEQ ID NO: 2415
ccugauaacugggaugguu

SEQ ID NO: 187369 - RNA, 19 nt, Artificial Sequence
  Description of Artificial Sequence: Synthetic oligonucleotide
  Antisense strand to SEQ ID NO: 187368
aaccaucccaguuaucagg

SEQ ID NO: 187370 - RNA, 19 nt, Artificial Sequence
  Description of Artificial Sequence: Synthetic oligonucleotide
  Sense strand starting at position 3099 of SEQ ID NO: 2415
accugauaacugggauggu

SEQ ID NO: 187371 - RNA, 19 nt, Artificial Sequence
  Description of Artificial Sequence: Synthetic oligonucleotide
  Antisense strand to SEQ ID NO: 187370
accaucccaguuaucaggu

SEQ ID NO: 187372 - RNA, 19 nt, Artificial Sequence
  Description of Artificial Sequence: Synthetic oligonucleotide
  Sense strand starting at position 3015 of SEQ ID NO: 2415
uuugcauauccauguguug

SEQ ID NO: 187373 - RNA, 19 nt, Artificial Sequence
  Description of Artificial Sequence: Synthetic oligonucleotide
  Antisense strand to SEQ ID NO: 187372
caacacauggauaugcaaa

SEQ ID NO: 187374 - RNA, 19 nt, Artificial Sequence
  Description of Artificial Sequence: Synthetic oligonucleotide
  Sense strand starting at position 2924 of SEQ ID NO: 2415
ggaguuugcugauggagag

SEQ ID NO: 187375 - RNA, 19 nt, Artificial Sequence
  Description of Artificial Sequence: Synthetic oligonucleotide
  Antisense strand to SEQ ID NO: 187374
cucuccaucagcaaacucc

SEQ ID NO: 187376 - RNA, 19 nt, Artificial Sequence
  Description of Artificial Sequence: Synthetic oligonucleotide
  Sense strand starting at position 2921 of SEQ ID NO: 2415
uuaggaguuugcugaugga

SEQ ID NO: 187377 - RNA, 19 nt, Artificial Sequence
  Description of Artificial Sequence: Synthetic oligonucleotide
  Antisense strand to SEQ ID NO: 187376
uccaucagcaaacuccuaa

SEQ ID NO: 187378 - RNA, 19 nt, Artificial Sequence
  Description of Artificial Sequence: Synthetic oligonucleotide
  Sense strand starting at position 2918 of SEQ ID NO: 2415
gcuuuaggaguuugcugau

SEQ ID NO: 187379 - RNA, 19 nt, Artificial Sequence
  Description of Artificial Sequence: Synthetic oligonucleotide
  Antisense strand to SEQ ID NO: 187378
aucagcaaacuccuaaagc

SEQ ID NO: 187380 - RNA, 19 nt, Artificial Sequence
  Description of Artificial Sequence: Synthetic oligonucleotide
  Sense strand starting at position 2912 of SEQ ID NO: 2415
aguuaagcuuuaggaguuu

SEQ ID NO: 187381 - RNA, 19 nt, Artificial Sequence
  Description of Artificial Sequence: Synthetic oligonucleotide
  Antisense strand to SEQ ID NO: 187380
aaacuccuaaagcuuaacu

SEQ ID NO: 187382 - RNA, 19 nt, Artificial Sequence
  Description of Artificial Sequence: Synthetic oligonucleotide
  Sense strand starting at position 2910 of SEQ ID NO: 2415
uuaguuaagcuuuaggagu

SEQ ID NO: 187383 - RNA, 19 nt, Artificial Sequence
  Description of Artificial Sequence: Synthetic oligonucleotide
  Antisense strand to SEQ ID NO: 187382
acuccuaaagcuuaacuaa

SEQ ID NO: 187384 - RNA, 19 nt, Artificial Sequence
  Description of Artificial Sequence: Synthetic oligonucleotide
  Sense strand starting at position 2902 of SEQ ID NO: 2415
cugacuguuuaguuaagcu

SEQ ID NO: 187385 - RNA, 19 nt, Artificial Sequence
  Description of Artificial Sequence: Synthetic oligonucleotide
  Antisense strand to SEQ ID NO: 187384
agcuuaacuaaacagucag

SEQ ID NO: 187386 - RNA, 19 nt, Artificial Sequence
  Description of Artificial Sequence: Synthetic oligonucleotide
  Sense strand starting at position 2601 of SEQ ID NO: 2415
gcgccuucggcggauagaa

SEQ ID NO: 187387 - RNA, 19 nt, Artificial Sequence
  Description of Artificial Sequence: Synthetic oligonucleotide
  Antisense strand to SEQ ID NO: 187386
uucuauccgccgaaggcgc

SEQ ID NO: 187388 - RNA, 19 nt, Artificial Sequence
  Description of Artificial Sequence: Synthetic oligonucleotide
  Sense strand starting at position 2570 of SEQ ID NO: 2415
cggacuccuuccgcugaga

SEQ ID NO: 187389 - RNA, 19 nt, Artificial Sequence
  Description of Artificial Sequence: Synthetic oligonucleotide
  Antisense strand to SEQ ID NO: 187388
ucucagcggaaggaguccg

SEQ ID NO: 187390 - RNA, 19 nt, Artificial Sequence
  Description of Artificial Sequence: Synthetic oligonucleotide
  Sense strand starting at position 1611 of SEQ ID NO: 2415
aucaaugucuccggaaacu

SEQ ID NO: 187391 - RNA, 19 nt, Artificial Sequence
  Description of Artificial Sequence: Synthetic oligonucleotide
  Antisense strand to SEQ ID NO: 187390
aguuuccggagacauugau

SEQ ID NO: 187392 - RNA, 19 nt, Artificial Sequence
  Description of Artificial Sequence: Synthetic oligonucleotide
  Sense strand starting at position 1609 of SEQ ID NO: 2415
gaaucaaugucuccggaaa

SEQ ID NO: 187393 - RNA, 19 nt, Artificial Sequence
  Description of Artificial Sequence: Synthetic oligonucleotide
  Antisense strand to SEQ ID NO: 187392
uuuccggagacauugauuc

SEQ ID NO: 187394 - RNA, 19 nt, Artificial Sequence
  Description of Artificial Sequence: Synthetic oligonucleotide
  Sense strand starting at position 1423 of SEQ ID NO: 2415
gaaagucuccggcgaauuc

SEQ ID NO: 187395 - RNA, 19 nt, Artificial Sequence
  Description of Artificial Sequence: Synthetic oligonucleotide
  Antisense strand to SEQ ID NO: 187394
gaauucgccggagacuuuc

SEQ ID NO: 187396 - RNA, 19 nt, Artificial Sequence
  Description of Artificial Sequence: Synthetic oligonucleotide
  Sense strand starting at position 1421 of SEQ ID NO: 2415
aggaaagucuccggcgaau

SEQ ID NO: 187397 - RNA, 19 nt, Artificial Sequence
  Description of Artificial Sequence: Synthetic oligonucleotide
  Antisense strand to SEQ ID NO: 187396
auucgccggagacuuuccu

SEQ ID NO: 187398 - RNA, 19 nt, Artificial Sequence
  Description of Artificial Sequence: Synthetic oligonucleotide
  Sense strand starting at position 1420 of SEQ ID NO: 2415
gaggaaagucuccggcgaa

SEQ ID NO: 187399 - RNA, 19 nt, Artificial Sequence
  Description of Artificial Sequence: Synthetic oligonucleotide
  Antisense strand to SEQ ID NO: 187398
uucgccggagacuuuccuc

SEQ ID NO: 187400 - RNA, 19 nt, Artificial Sequence
  Description of Artificial Sequence: Synthetic oligonucleotide
  Sense strand starting at position 1393 of SEQ ID NO: 2415
uguguuuguguguaagaua

SEQ ID NO: 187401 - RNA, 19 nt, Artificial Sequence
  Description of Artificial Sequence: Synthetic oligonucleotide
  Antisense strand to SEQ ID NO: 187400
uaucuuacacacaaacaca

SEQ ID NO: 187402 - RNA, 19 nt, Artificial Sequence
  Description of Artificial Sequence: Synthetic oligonucleotide
  Sense strand starting at position 1356 of SEQ ID NO: 2415
agucuugucucaucgacuu

SEQ ID NO: 187403 - RNA, 19 nt, Artificial Sequence
  Description of Artificial Sequence: Synthetic oligonucleotide
  Antisense strand to SEQ ID NO: 187402
aagucgaugagacaagacu

SEQ ID NO: 187404 - RNA, 19 nt, Artificial Sequence
  Description of Artificial Sequence: Synthetic oligonucleotide
  Sense strand starting at position 1319 of SEQ ID NO: 2415
agcuuucuuuacguaacca

SEQ ID NO: 187405 - RNA, 19 nt, Artificial Sequence
  Description of Artificial Sequence: Synthetic oligonucleotide
  Antisense strand to SEQ ID NO: 187404
ugguuacguaaagaaagcu

SEQ ID NO: 187406 - RNA, 19 nt, Artificial Sequence
  Description of Artificial Sequence: Synthetic oligonucleotide
  Sense strand starting at position 1316 of SEQ ID NO: 2415
cccagcuuucuuuacguaa

SEQ ID NO: 187407 - RNA, 19 nt, Artificial Sequence
  Description of Artificial Sequence: Synthetic oligonucleotide
  Antisense strand to SEQ ID NO: 187406
uuacguaaagaaagcuggg

SEQ ID NO: 187408 - RNA, 19 nt, Artificial Sequence
  Description of Artificial Sequence: Synthetic oligonucleotide
  Sense strand starting at position 1094 of SEQ ID NO: 2415
gcgcuuucugauugagggu

SEQ ID NO: 187409 - RNA, 19 nt, Artificial Sequence
  Description of Artificial Sequence: Synthetic oligonucleotide
  Antisense strand to SEQ ID NO: 187408
acccucaaucagaaagcgc

SEQ ID NO: 187410 - RNA, 19 nt, Artificial Sequence
  Description of Artificial Sequence: Synthetic oligonucleotide
  Sense strand starting at position 1003 of SEQ ID NO: 2415
ggacccuuccuuugguuua

SEQ ID NO: 187411 - RNA, 19 nt, Artificial Sequence
  Description of Artificial Sequence: Synthetic oligonucleotide
  Antisense strand to SEQ ID NO: 187410
uaaaccaaaggaagggucc

SEQ ID NO: 187412 - RNA, 19 nt, Artificial Sequence
  Description of Artificial Sequence: Synthetic oligonucleotide
  Sense strand starting at position 884 of SEQ ID NO: 2415
ggugauccuugcuugguga

SEQ ID NO: 187413 - RNA, 19 nt, Artificial Sequence
  Description of Artificial Sequence: Synthetic oligonucleotide
  Antisense strand to SEQ ID NO: 187412
ucaccaagcaaggaucacc

SEQ ID NO: 187414 - RNA, 19 nt, Artificial Sequence
  Description of Artificial Sequence: Synthetic oligonucleotide
  Sense strand starting at position 832 of SEQ ID NO: 2415
acuuguguuccucaaucuu

SEQ ID NO: 187415 - RNA, 19 nt, Artificial Sequence
  Description of Artificial Sequence: Synthetic oligonucleotide
  Antisense strand to SEQ ID NO: 187414
aagauugaggaacacaagu

SEQ ID NO: 187416 - RNA, 19 nt, Artificial Sequence
  Description of Artificial Sequence: Synthetic oligonucleotide
  Sense strand starting at position 830 of SEQ ID NO: 2415
ccacuuguguuccucaauc

SEQ ID NO: 187417 - RNA, 19 nt, Artificial Sequence
  Description of Artificial Sequence: Synthetic oligonucleotide
  Antisense strand to SEQ ID NO: 187416
gauugaggaacacaagugg

SEQ ID NO: 187418 - RNA, 19 nt, Artificial Sequence
  Description of Artificial Sequence: Synthetic oligonucleotide
  Sense strand starting at position 828 of SEQ ID NO: 2415
ucccacuuguguuccucaa

SEQ ID NO: 187419 - RNA, 19 nt, Artificial Sequence
  Description of Artificial Sequence: Synthetic oligonucleotide
  Antisense strand to SEQ ID NO: 187418
uugaggaacacaaguggga

SEQ ID NO: 187420 - RNA, 19 nt, Artificial Sequence
  Description of Artificial Sequence: Synthetic oligonucleotide
  Sense strand starting at position 766 of SEQ ID NO: 2415
gaggcuucucuccaacugu

SEQ ID NO: 187421 - RNA, 19 nt, Artificial Sequence
  Description of Artificial Sequence: Synthetic oligonucleotide
  Antisense strand to SEQ ID NO: 187420
acaguuggagagaagccuc

SEQ ID NO: 187422 - RNA, 19 nt, Artificial Sequence
  Description of Artificial Sequence: Synthetic oligonucleotide
  Sense strand starting at position 699 of SEQ ID NO: 2415
cggcguaauuauuauaauu

SEQ ID NO: 187423 - RNA, 19 nt, Artificial Sequence
  Description of Artificial Sequence: Synthetic oligonucleotide
  Antisense strand to SEQ ID NO: 187422
aauuauaauaauuacgccg

SEQ ID NO: 187424 - RNA, 19 nt, Artificial Sequence
  Description of Artificial Sequence: Synthetic oligonucleotide
  Sense strand starting at position 648 of SEQ ID NO: 2415
uuauuaucggauuagaugu

SEQ ID NO: 187425 - RNA, 19 nt, Artificial Sequence
  Description of Artificial Sequence: Synthetic oligonucleotide
  Antisense strand to SEQ ID NO: 187424
acaucuaauccgauaauaa

SEQ ID NO: 187426 - RNA, 19 nt, Artificial Sequence
  Description of Artificial Sequence: Synthetic oligonucleotide
  Sense strand starting at position 305 of SEQ ID NO: 2415
uuagaagccuggugcguaa

SEQ ID NO: 187427 - RNA, 19 nt, Artificial Sequence
  Description of Artificial Sequence: Synthetic oligonucleotide
  Antisense strand to SEQ ID NO: 187426
uuacgcaccaggcuucuaa

SEQ ID NO: 187428 - RNA, 19 nt, Artificial Sequence
  Description of Artificial Sequence: Synthetic oligonucleotide
  Sense strand starting at position 95 of SEQ ID NO: 2415
ggguccauucaggguagaa

SEQ ID NO: 187429 - RNA, 19 nt, Artificial Sequence
  Description of Artificial Sequence: Synthetic oligonucleotide
  Antisense strand to SEQ ID NO: 187428
uucuacccugaauggaccc

SEQ ID NO: 187430 - RNA, 19 nt, Artificial Sequence
  Description of Artificial Sequence: Synthetic oligonucleotide
  Sense strand starting at position 79 of SEQ ID NO: 2416
aguucucagcucugaguuu

SEQ ID NO: 187431 - RNA, 19 nt, Artificial Sequence
  Description of Artificial Sequence: Synthetic oligonucleotide
  Antisense strand to SEQ ID NO: 187430
aaacucagagcugagaacu

SEQ ID NO: 187432 - RNA, 19 nt, Artificial Sequence
  Description of Artificial Sequence: Synthetic oligonucleotide
  Sense strand starting at position 88 of SEQ ID NO: 2416
cucugaguuugggcaagua

SEQ ID NO: 187433 - RNA, 19 nt, Artificial Sequence
  Description of Artificial Sequence: Synthetic oligonucleotide
  Antisense strand to SEQ ID NO: 187432
uacuugcccaaacucagag

SEQ ID NO: 187434 - RNA, 19 nt, Artificial Sequence
  Description of Artificial Sequence: Synthetic oligonucleotide
  Sense strand starting at position 128 of SEQ ID NO: 2416
guuuccucaucugagucaa

SEQ ID NO: 187435 - RNA, 19 nt, Artificial Sequence
  Description of Artificial Sequence: Synthetic oligonucleotide
  Antisense strand to SEQ ID NO: 187434
uugacucagaugaggaaac

SEQ ID NO: 187436 - RNA, 19 nt, Artificial Sequence
  Description of Artificial Sequence: Synthetic oligonucleotide
  Sense strand starting at position 149 of SEQ ID NO: 2416
augagauguuccugaagga

SEQ ID NO: 187437 - RNA, 19 nt, Artificial Sequence
  Description of Artificial Sequence: Synthetic oligonucleotide
  Antisense strand to SEQ ID NO: 187436
uccuucaggaacaucucau

SEQ ID NO: 187438 - RNA, 19 nt, Artificial Sequence
  Description of Artificial Sequence: Synthetic oligonucleotide
  Sense strand starting at position 164 of SEQ ID NO: 2416
aggacuuuccacugcagau

SEQ ID NO: 187439 - RNA, 19 nt, Artificial Sequence
  Description of Artificial Sequence: Synthetic oligonucleotide
  Antisense strand to SEQ ID NO: 187438
aucugcaguggaaaguccu

SEQ ID NO: 187440 - RNA, 19 nt, Artificial Sequence
  Description of Artificial Sequence: Synthetic oligonucleotide
  Sense strand starting at position 182 of SEQ ID NO: 2416
ugucgcugucuuccaugua

SEQ ID NO: 187441 - RNA, 19 nt, Artificial Sequence
  Description of Artificial Sequence: Synthetic oligonucleotide
  Antisense strand to SEQ ID NO: 187440
uacauggaagacagcgaca

SEQ ID NO: 187442 - RNA, 19 nt, Artificial Sequence
  Description of Artificial Sequence: Synthetic oligonucleotide
  Sense strand starting at position 299 of SEQ ID NO: 2416
aguucuugcuccuucugau

SEQ ID NO: 187443 - RNA, 19 nt, Artificial Sequence
  Description of Artificial Sequence: Synthetic oligonucleotide
  Antisense strand to SEQ ID NO: 187442
aucagaaggagcaagaacu

SEQ ID NO: 187444 - RNA, 19 nt, Artificial Sequence
  Description of Artificial Sequence: Synthetic oligonucleotide
  Sense strand starting at position 580 of SEQ ID NO: 2416
ggagucguuugcucucgga

SEQ ID NO: 187445 - RNA, 19 nt, Artificial Sequence
  Description of Artificial Sequence: Synthetic oligonucleotide
  Antisense strand to SEQ ID NO: 187444
uccgagagcaaacgacucc

SEQ ID NO: 187446 - RNA, 19 nt, Artificial Sequence
  Description of Artificial Sequence: Synthetic oligonucleotide
  Sense strand starting at position 582 of SEQ ID NO: 2416
agucguuugcucucggaac

SEQ ID NO: 187447 - RNA, 19 nt, Artificial Sequence
  Description of Artificial Sequence: Synthetic oligonucleotide
  Antisense strand to SEQ ID NO: 187446
guuccgagagcaaacgacu

SEQ ID NO: 187448 - RNA, 19 nt, Artificial Sequence
  Description of Artificial Sequence: Synthetic oligonucleotide
  Sense strand starting at position 595 of SEQ ID NO: 2416
cggaacagcugggagaauu

SEQ ID NO: 187449 - RNA, 19 nt, Artificial Sequence
  Description of Artificial Sequence: Synthetic oligonucleotide
  Antisense strand to SEQ ID NO: 187448
aauucucccagcuguuccg

SEQ ID NO: 187450 - RNA, 19 nt, Artificial Sequence
  Description of Artificial Sequence: Synthetic oligonucleotide
  Sense strand starting at position 603 of SEQ ID NO: 2416
cugggagaauuccacauca

SEQ ID NO: 187451 - RNA, 19 nt, Artificial Sequence
  Description of Artificial Sequence: Synthetic oligonucleotide
  Antisense strand to SEQ ID NO: 187450
ugauguggaauucucccag

SEQ ID NO: 187452 - RNA, 19 nt, Artificial Sequence
  Description of Artificial Sequence: Synthetic oligonucleotide
  Sense strand starting at position 750 of SEQ ID NO: 2416
auauuuguucuuuggucuu

SEQ ID NO: 187453 - RNA, 19 nt, Artificial Sequence
  Description of Artificial Sequence: Synthetic oligonucleotide
  Antisense strand to SEQ ID NO: 187452
aagaccaaagaacaaauau

SEQ ID NO: 187454 - RNA, 19 nt, Artificial Sequence
  Description of Artificial Sequence: Synthetic oligonucleotide
  Sense strand starting at position 1184 of SEQ ID NO: 2416
ucuuuaaggucuggacgga

SEQ ID NO: 187455 - RNA, 19 nt, Artificial Sequence
  Description of Artificial Sequence: Synthetic oligonucleotide
  Antisense strand to SEQ ID NO: 187454
uccguccagaccuuaaaga

SEQ ID NO: 187456 - RNA, 19 nt, Artificial Sequence
  Description of Artificial Sequence: Synthetic oligonucleotide
  Sense strand starting at position 1397 of SEQ ID NO: 2416
uccggacuucucgggauua

SEQ ID NO: 187457 - RNA, 19 nt, Artificial Sequence
  Description of Artificial Sequence: Synthetic oligonucleotide
  Antisense strand to SEQ ID NO: 187456
uaaucccgagaaguccgga

SEQ ID NO: 187458 - RNA, 19 nt, Artificial Sequence
  Description of Artificial Sequence: Synthetic oligonucleotide
  Sense strand starting at position 1399 of SEQ ID NO: 2416
cggacuucucgggauuaac

SEQ ID NO: 187459 - RNA, 19 nt, Artificial Sequence
  Description of Artificial Sequence: Synthetic oligonucleotide
  Antisense strand to SEQ ID NO: 187458
guuaaucccgagaaguccg

SEQ ID NO: 187460 - RNA, 19 nt, Artificial Sequence
  Description of Artificial Sequence: Synthetic oligonucleotide
  Sense strand starting at position 1407 of SEQ ID NO: 2416
ucgggauuaaccugcuauu

SEQ ID NO: 187461 - RNA, 19 nt, Artificial Sequence
  Description of Artificial Sequence: Synthetic oligonucleotide
  Antisense strand to SEQ ID NO: 187460
aauagcagguuaaucccga

SEQ ID NO: 187462 - RNA, 19 nt, Artificial Sequence
  Description of Artificial Sequence: Synthetic oligonucleotide
  Sense strand starting at position 1410 of SEQ ID NO: 2416
ggauuaaccugcuauuaug

SEQ ID NO: 187463 - RNA, 19 nt, Artificial Sequence
  Description of Artificial Sequence: Synthetic oligonucleotide
  Antisense strand to SEQ ID NO: 187462
cauaauagcagguuaaucc

SEQ ID NO: 187464 - RNA, 19 nt, Artificial Sequence
  Description of Artificial Sequence: Synthetic oligonucleotide
  Sense strand starting at position 2879 of SEQ ID NO: 2416
ggcuuaagacgcugugauu

SEQ ID NO: 187465 - RNA, 19 nt, Artificial Sequence
  Description of Artificial Sequence: Synthetic oligonucleotide
  Antisense strand to SEQ ID NO: 187464
aaucacagcgucuuaagcc

SEQ ID NO: 187466 - RNA, 19 nt, Artificial Sequence
  Description of Artificial Sequence: Synthetic oligonucleotide
  Sense strand starting at position 2888 of SEQ ID NO: 2416
cgcugugauugggaggaca

SEQ ID NO: 187467 - RNA, 19 nt, Artificial Sequence
  Description of Artificial Sequence: Synthetic oligonucleotide
  Antisense strand to SEQ ID NO: 187466
uguccucccaaucacagcg

SEQ ID NO: 187468 - RNA, 19 nt, Artificial Sequence
  Description of Artificial Sequence: Synthetic oligonucleotide
  Sense strand starting at position 2964 of SEQ ID NO: 2416
uuucuaugugcuuguucga

SEQ ID NO: 187469 - RNA, 19 nt, Artificial Sequence
  Description of Artificial Sequence: Synthetic oligonucleotide
  Antisense strand to SEQ ID NO: 187468
ucgaacaagcacauagaaa

SEQ ID NO: 187470 - RNA, 19 nt, Artificial Sequence
  Description of Artificial Sequence: Synthetic oligonucleotide
  Sense strand starting at position 2965 of SEQ ID NO: 2416
uucuaugugcuuguucgau

SEQ ID NO: 187471 - RNA, 19 nt, Artificial Sequence
  Description of Artificial Sequence: Synthetic oligonucleotide
  Antisense strand to SEQ ID NO: 187470
aucgaacaagcacauagaa

SEQ ID NO: 187472 - RNA, 19 nt, Artificial Sequence
  Description of Artificial Sequence: Synthetic oligonucleotide
  Sense strand starting at position 2967 of SEQ ID NO: 2416
cuaugugcuuguucgauuu

SEQ ID NO: 187473 - RNA, 19 nt, Artificial Sequence
  Description of Artificial Sequence: Synthetic oligonucleotide
  Antisense strand to SEQ ID NO: 187472
aaaucgaacaagcacauag

SEQ ID NO: 187474 - RNA, 19 nt, Artificial Sequence
  Description of Artificial Sequence: Synthetic oligonucleotide
  Sense strand starting at position 2969 of SEQ ID NO: 2416
augugcuuguucgauuuau

SEQ ID NO: 187475 - RNA, 19 nt, Artificial Sequence
  Description of Artificial Sequence: Synthetic oligonucleotide
  Antisense strand to SEQ ID NO: 187474
auaaaucgaacaagcacau

SEQ ID NO: 187476 - RNA, 19 nt, Artificial Sequence
  Description of Artificial Sequence: Synthetic oligonucleotide
  Sense strand starting at position 2989 of SEQ ID NO: 2416
cucccauacuaggcagauu

SEQ ID NO: 187477 - RNA, 19 nt, Artificial Sequence
  Description of Artificial Sequence: Synthetic oligonucleotide
  Antisense strand to SEQ ID NO: 187476
aaucugccuaguaugggag

SEQ ID NO: 187478 - RNA, 19 nt, Artificial Sequence
  Description of Artificial Sequence: Synthetic oligonucleotide
  Sense strand starting at position 3142 of SEQ ID NO: 2416
cuaagaauugucugcccaa

SEQ ID NO: 187479 - RNA, 19 nt, Artificial Sequence
  Description of Artificial Sequence: Synthetic oligonucleotide
  Antisense strand to SEQ ID NO: 187478
uugggcagacaauucuuag

SEQ ID NO: 187480 - RNA, 19 nt, Artificial Sequence
  Description of Artificial Sequence: Synthetic oligonucleotide
  Sense strand starting at position 3145 of SEQ ID NO: 2416
agaauugucugcccaaguc

SEQ ID NO: 187481 - RNA, 19 nt, Artificial Sequence
  Description of Artificial Sequence: Synthetic oligonucleotide
  Antisense strand to SEQ ID NO: 187480
gacuugggcagacaauucu

SEQ ID NO: 187482 - RNA, 19 nt, Artificial Sequence
  Description of Artificial Sequence: Synthetic oligonucleotide
  Sense strand starting at position 3178 of SEQ ID NO: 2416
ucaggucacugaucugauu

SEQ ID NO: 187483 - RNA, 19 nt, Artificial Sequence
  Description of Artificial Sequence: Synthetic oligonucleotide
  Antisense strand to SEQ ID NO: 187482
aaucagaucagugaccuga

SEQ ID NO: 187484 - RNA, 19 nt, Artificial Sequence
  Description of Artificial Sequence: Synthetic oligonucleotide
  Sense strand starting at position 3190 of SEQ ID NO: 2416
ucugauucugugugcuacu

SEQ ID NO: 187485 - RNA, 19 nt, Artificial Sequence
  Description of Artificial Sequence: Synthetic oligonucleotide
  Antisense strand to SEQ ID NO: 187484
aguagcacacagaaucaga

SEQ ID NO: 187486 - RNA, 19 nt, Artificial Sequence
  Description of Artificial Sequence: Synthetic oligonucleotide
  Sense strand starting at position 3388 of SEQ ID NO: 2416
gaaguuugcucccacagag

SEQ ID NO: 187487 - RNA, 19 nt, Artificial Sequence
  Description of Artificial Sequence: Synthetic oligonucleotide
  Antisense strand to SEQ ID NO: 187486
cucugugggagcaaacuuc

SEQ ID NO: 187488 - RNA, 19 nt, Artificial Sequence
  Description of Artificial Sequence: Synthetic oligonucleotide
  Sense strand starting at position 3400 of SEQ ID NO: 2416
cacagaggccaucauguuu

SEQ ID NO: 187489 - RNA, 19 nt, Artificial Sequence
  Description of Artificial Sequence: Synthetic oligonucleotide
  Antisense strand to SEQ ID NO: 187488
aaacaugauggccucugug

SEQ ID NO: 187490 - RNA, 19 nt, Artificial Sequence
  Description of Artificial Sequence: Synthetic oligonucleotide
  Sense strand starting at position 3530 of SEQ ID NO: 2416
aagaguauagauggagguu

SEQ ID NO: 187491 - RNA, 19 nt, Artificial Sequence
  Description of Artificial Sequence: Synthetic oligonucleotide
  Antisense strand to SEQ ID NO: 187490
aaccuccaucuauacucuu

SEQ ID NO: 187492 - RNA, 19 nt, Artificial Sequence
  Description of Artificial Sequence: Synthetic oligonucleotide
  Sense strand starting at position 3562 of SEQ ID NO: 2416
uccaaauauuugcaggcua

SEQ ID NO: 187493 - RNA, 19 nt, Artificial Sequence
  Description of Artificial Sequence: Synthetic oligonucleotide
  Antisense strand to SEQ ID NO: 187492
uagccugcaaauauuugga

SEQ ID NO: 187494 - RNA, 19 nt, Artificial Sequence
  Description of Artificial Sequence: Synthetic oligonucleotide
  Sense strand starting at position 3614 of SEQ ID NO: 2416
guucuauucuucuaucuug

SEQ ID NO: 187495 - RNA, 19 nt, Artificial Sequence
  Description of Artificial Sequence: Synthetic oligonucleotide
  Antisense strand to SEQ ID NO: 187494
caagauagaagaauagaac

SEQ ID NO: 187496 - RNA, 19 nt, Artificial Sequence
  Description of Artificial Sequence: Synthetic oligonucleotide
  Sense strand starting at position 3655 of SEQ ID NO: 2416
gcagaaagcuggcuuugag

SEQ ID NO: 187497 - RNA, 19 nt, Artificial Sequence
  Description of Artificial Sequence: Synthetic oligonucleotide
  Antisense strand to SEQ ID NO: 187496
cucaaagccagcuuucugc

SEQ ID NO: 187498 - RNA, 19 nt, Artificial Sequence
  Description of Artificial Sequence: Synthetic oligonucleotide
  Sense strand starting at position 3658 of SEQ ID NO: 2416
gaaagcuggcuuugagugu

SEQ ID NO: 187499 - RNA, 19 nt, Artificial Sequence
  Description of Artificial Sequence: Synthetic oligonucleotide
  Antisense strand to SEQ ID NO: 187498
acacucaaagccagcuuuc

SEQ ID NO: 187500 - RNA, 19 nt, Artificial Sequence
  Description of Artificial Sequence: Synthetic oligonucleotide
  Sense strand starting at position 3664 of SEQ ID NO: 2416
uggcuuugaguguggcauu

SEQ ID NO: 187501 - RNA, 19 nt, Artificial Sequence
  Description of Artificial Sequence: Synthetic oligonucleotide
  Antisense strand to SEQ ID NO: 187500
aaugccacacucaaagcca

SEQ ID NO: 187502 - RNA, 19 nt, Artificial Sequence
  Description of Artificial Sequence: Synthetic oligonucleotide
  Sense strand starting at position 3786 of SEQ ID NO: 2416
uguccuguccuucgagagu

SEQ ID NO: 187503 - RNA, 19 nt, Artificial Sequence
  Description of Artificial Sequence: Synthetic oligonucleotide
  Antisense strand to SEQ ID NO: 187502
acucucgaaggacaggaca

SEQ ID NO: 187504 - RNA, 19 nt, Artificial Sequence
  Description of Artificial Sequence: Synthetic oligonucleotide
  Sense strand starting at position 3799 of SEQ ID NO: 2416
gagagucuugugcacauuc

SEQ ID NO: 187505 - RNA, 19 nt, Artificial Sequence
  Description of Artificial Sequence: Synthetic oligonucleotide
  Antisense strand to SEQ ID NO: 187504
gaaugugcacaagacucuc

SEQ ID NO: 187506 - RNA, 19 nt, Artificial Sequence
  Description of Artificial Sequence: Synthetic oligonucleotide
  Sense strand starting at position 3909 of SEQ ID NO: 2416
gcuggaucugcggaagaga

SEQ ID NO: 187507 - RNA, 19 nt, Artificial Sequence
  Description of Artificial Sequence: Synthetic oligonucleotide
  Antisense strand to SEQ ID NO: 187506
ucucuuccgcagauccagc

SEQ ID NO: 187508 - RNA, 19 nt, Artificial Sequence
  Description of Artificial Sequence: Synthetic oligonucleotide
  Sense strand starting at position 3955 of SEQ ID NO: 2416
gggccaucucugcagggaa

SEQ ID NO: 187509 - RNA, 19 nt, Artificial Sequence
  Description of Artificial Sequence: Synthetic oligonucleotide
  Antisense strand to SEQ ID NO: 187508
uucccugcagagauggccc

SEQ ID NO: 187510 - RNA, 19 nt, Artificial Sequence
  Description of Artificial Sequence: Synthetic oligonucleotide
  Sense strand starting at position 86 of SEQ ID NO: 2417
gaauucucccuugaugggu

SEQ ID NO: 187511 - RNA, 19 nt, Artificial Sequence
  Description of Artificial Sequence: Synthetic oligonucleotide
  Antisense strand to SEQ ID NO: 187510
acccaucaagggagaauuc

SEQ ID NO: 187512 - RNA, 19 nt, Artificial Sequence
  Description of Artificial Sequence: Synthetic oligonucleotide
  Sense strand starting at position 158 of SEQ ID NO: 2417
gcacuuaaguccuugcuau

SEQ ID NO: 187513 - RNA, 19 nt, Artificial Sequence
  Description of Artificial Sequence: Synthetic oligonucleotide
  Antisense strand to SEQ ID NO: 187512
auagcaaggacuuaagugc

SEQ ID NO: 187514 - RNA, 19 nt, Artificial Sequence
  Description of Artificial Sequence: Synthetic oligonucleotide
  Sense strand starting at position 194 of SEQ ID NO: 2417
ggacuuacugucugcaaga

SEQ ID NO: 187515 - RNA, 19 nt, Artificial Sequence
  Description of Artificial Sequence: Synthetic oligonucleotide
  Antisense strand to SEQ ID NO: 187514
ucuugcagacaguaagucc

SEQ ID NO: 187516 - RNA, 19 nt, Artificial Sequence
  Description of Artificial Sequence: Synthetic oligonucleotide
  Sense strand starting at position 195 of SEQ ID NO: 2417
gacuuacugucugcaagag

SEQ ID NO: 187517 - RNA, 19 nt, Artificial Sequence
  Description of Artificial Sequence: Synthetic oligonucleotide
  Antisense strand to SEQ ID NO: 187516
cucuugcagacaguaaguc

SEQ ID NO: 187518 - RNA, 19 nt, Artificial Sequence
  Description of Artificial Sequence: Synthetic oligonucleotide
  Sense strand starting at position 196 of SEQ ID NO: 2417
acuuacugucugcaagaga

SEQ ID NO: 187519 - RNA, 19 nt, Artificial Sequence
  Description of Artificial Sequence: Synthetic oligonucleotide
  Antisense strand to SEQ ID NO: 187518
ucucuugcagacaguaagu

SEQ ID NO: 187520 - RNA, 19 nt, Artificial Sequence
  Description of Artificial Sequence: Synthetic oligonucleotide
  Sense strand starting at position 684 of SEQ ID NO: 2417
gggaaaguuucccaugaaa

SEQ ID NO: 187521 - RNA, 19 nt, Artificial Sequence
  Description of Artificial Sequence: Synthetic oligonucleotide
  Antisense strand to SEQ ID NO: 187520
uuucaugggaaacuuuccc

SEQ ID NO: 187522 - RNA, 19 nt, Artificial Sequence
  Description of Artificial Sequence: Synthetic oligonucleotide
  Sense strand starting at position 778 of SEQ ID NO: 2417
gugccagauuccuggacca

SEQ ID NO: 187523 - RNA, 19 nt, Artificial Sequence
  Description of Artificial Sequence: Synthetic oligonucleotide
  Antisense strand to SEQ ID NO: 187522
ugguccaggaaucuggcac

SEQ ID NO: 187524 - RNA, 19 nt, Artificial Sequence
  Description of Artificial Sequence: Synthetic oligonucleotide
  Sense strand starting at position 780 of SEQ ID NO: 2417
gccagauuccuggaccaac

SEQ ID NO: 187525 - RNA, 19 nt, Artificial Sequence
  Description of Artificial Sequence: Synthetic oligonucleotide
  Antisense strand to SEQ ID NO: 187524
guugguccaggaaucuggc

SEQ ID NO: 187526 - RNA, 19 nt, Artificial Sequence
  Description of Artificial Sequence: Synthetic oligonucleotide
  Sense strand starting at position 1044 of SEQ ID NO: 2417
cagcgagggucccuguaaa

SEQ ID NO: 187527 - RNA, 19 nt, Artificial Sequence
  Description of Artificial Sequence: Synthetic oligonucleotide
  Antisense strand to SEQ ID NO: 187526
uuuacagggacccucgcug

SEQ ID NO: 187528 - RNA, 19 nt, Artificial Sequence
  Description of Artificial Sequence: Synthetic oligonucleotide
  Sense strand starting at position 2544 of SEQ ID NO: 2417
gccagagaaucgcuccuuu

SEQ ID NO: 187529 - RNA, 19 nt, Artificial Sequence
  Description of Artificial Sequence: Synthetic oligonucleotide
  Antisense strand to SEQ ID NO: 187528
aaaggagcgauucucuggc

SEQ ID NO: 187530 - RNA, 19 nt, Artificial Sequence
  Description of Artificial Sequence: Synthetic oligonucleotide
  Sense strand starting at position 2578 of SEQ ID NO: 2417
gccgcuuucggccugggaa

SEQ ID NO: 187531 - RNA, 19 nt, Artificial Sequence
  Description of Artificial Sequence: Synthetic oligonucleotide
  Antisense strand to SEQ ID NO: 187530
uucccaggccgaaagcggc

SEQ ID NO: 187532 - RNA, 19 nt, Artificial Sequence
  Description of Artificial Sequence: Synthetic oligonucleotide
  Sense strand starting at position 2579 of SEQ ID NO: 2417
ccgcuuucggccugggaau

SEQ ID NO: 187533 - RNA, 19 nt, Artificial Sequence
  Description of Artificial Sequence: Synthetic oligonucleotide
  Antisense strand to SEQ ID NO: 187532
auucccaggccgaaagcgg

SEQ ID NO: 187534 - RNA, 19 nt, Artificial Sequence
  Description of Artificial Sequence: Synthetic oligonucleotide
  Sense strand starting at position 2669 of SEQ ID NO: 2417
cuuaaauugugggagugga

SEQ ID NO: 187535 - RNA, 19 nt, Artificial Sequence
  Description of Artificial Sequence: Synthetic oligonucleotide
  Antisense strand to SEQ ID NO: 187534
uccacucccacaauuuaag

SEQ ID NO: 187536 - RNA, 19 nt, Artificial Sequence
  Description of Artificial Sequence: Synthetic oligonucleotide
  Sense strand starting at position 2693 of SEQ ID NO: 2417
cggcuaagucaaugaaaca

SEQ ID NO: 187537 - RNA, 19 nt, Artificial Sequence
  Description of Artificial Sequence: Synthetic oligonucleotide
  Antisense strand to SEQ ID NO: 187536
uguuucauugacuuagccg

SEQ ID NO: 187538 - RNA, 19 nt, Artificial Sequence
  Description of Artificial Sequence: Synthetic oligonucleotide
  Sense strand starting at position 2769 of SEQ ID NO: 2417
gaggacuccugggauggaa

SEQ ID NO: 187539 - RNA, 19 nt, Artificial Sequence
  Description of Artificial Sequence: Synthetic oligonucleotide
  Antisense strand to SEQ ID NO: 187538
uuccaucccaggaguccuc

SEQ ID NO: 187540 - RNA, 19 nt, Artificial Sequence
  Description of Artificial Sequence: Synthetic oligonucleotide
  Sense strand starting at position 2873 of SEQ ID NO: 2417
gcagaauggugucagagga

SEQ ID NO: 187541 - RNA, 19 nt, Artificial Sequence
  Description of Artificial Sequence: Synthetic oligonucleotide
  Antisense strand to SEQ ID NO: 187540
uccucugacaccauucugc

SEQ ID NO: 187542 - RNA, 19 nt, Artificial Sequence
  Description of Artificial Sequence: Synthetic oligonucleotide
  Sense strand starting at position 2894 of SEQ ID NO: 2417
cagagcuggcauuaggaua

SEQ ID NO: 187543 - RNA, 19 nt, Artificial Sequence
  Description of Artificial Sequence: Synthetic oligonucleotide
  Antisense strand to SEQ ID NO: 187542
uauccuaaugccagcucug

SEQ ID NO: 187544 - RNA, 19 nt, Artificial Sequence
  Description of Artificial Sequence: Synthetic oligonucleotide
  Sense strand starting at position 2953 of SEQ ID NO: 2417
ggagaaggcuuauaaguuc

SEQ ID NO: 187545 - RNA, 19 nt, Artificial Sequence
  Description of Artificial Sequence: Synthetic oligonucleotide
  Antisense strand to SEQ ID NO: 187544
gaacuuauaagccuucucc

SEQ ID NO: 187546 - RNA, 19 nt, Artificial Sequence
  Description of Artificial Sequence: Synthetic oligonucleotide
  Sense strand starting at position 2960 of SEQ ID NO: 2417
gcuuauaaguucccuggau

SEQ ID NO: 187547 - RNA, 19 nt, Artificial Sequence
  Description of Artificial Sequence: Synthetic oligonucleotide
  Antisense strand to SEQ ID NO: 187546
auccagggaacuuauaagc

SEQ ID NO: 187548 - RNA, 19 nt, Artificial Sequence
  Description of Artificial Sequence: Synthetic oligonucleotide
  Sense strand starting at position 2961 of SEQ ID NO: 2417
cuuauaaguucccuggaug

SEQ ID NO: 187549 - RNA, 19 nt, Artificial Sequence
  Description of Artificial Sequence: Synthetic oligonucleotide
  Antisense strand to SEQ ID NO: 187548
cauccagggaacuuauaag

SEQ ID NO: 187550 - RNA, 19 nt, Artificial Sequence
  Description of Artificial Sequence: Synthetic oligonucleotide
  Sense strand starting at position 3215 of SEQ ID NO: 2417
gacugauucuggcacagug

SEQ ID NO: 187551 - RNA, 19 nt, Artificial Sequence
  Description of Artificial Sequence: Synthetic oligonucleotide
  Antisense strand to SEQ ID NO: 187550
cacugugccagaaucaguc

SEQ ID NO: 187552 - RNA, 19 nt, Artificial Sequence
  Description of Artificial Sequence: Synthetic oligonucleotide
  Sense strand starting at position 3265 of SEQ ID NO: 2417
cccggaaggcugugaaauc

SEQ ID NO: 187553 - RNA, 19 nt, Artificial Sequence
  Description of Artificial Sequence: Synthetic oligonucleotide
  Antisense strand to SEQ ID NO: 187552
gauuucacagccuuccggg

SEQ ID NO: 187554 - RNA, 19 nt, Artificial Sequence
  Description of Artificial Sequence: Synthetic oligonucleotide
  Sense strand starting at position 3456 of SEQ ID NO: 2417
acccuuucugagugucuga

SEQ ID NO: 187555 - RNA, 19 nt, Artificial Sequence
  Description of Artificial Sequence: Synthetic oligonucleotide
  Antisense strand to SEQ ID NO: 187554
ucagacacucagaaagggu

SEQ ID NO: 187556 - RNA, 19 nt, Artificial Sequence
  Description of Artificial Sequence: Synthetic oligonucleotide
  Sense strand starting at position 3629 of SEQ ID NO: 2417
caugauguccuguguggga

SEQ ID NO: 187557 - RNA, 19 nt, Artificial Sequence
  Description of Artificial Sequence: Synthetic oligonucleotide
  Antisense strand to SEQ ID NO: 187556
ucccacacaggacaucaug

SEQ ID NO: 187558 - RNA, 19 nt, Artificial Sequence
  Description of Artificial Sequence: Synthetic oligonucleotide
  Sense strand starting at position 3677 of SEQ ID NO: 2417
aggugugacuggucucaca

SEQ ID NO: 187559 - RNA, 19 nt, Artificial Sequence
  Description of Artificial Sequence: Synthetic oligonucleotide
  Antisense strand to SEQ ID NO: 187558
ugugagaccagucacaccu

SEQ ID NO: 187560 - RNA, 19 nt, Artificial Sequence
  Description of Artificial Sequence: Synthetic oligonucleotide
  Sense strand starting at position 3769 of SEQ ID NO: 2417
ggccaccucccuugaaaug

SEQ ID NO: 187561 - RNA, 19 nt, Artificial Sequence
  Description of Artificial Sequence: Synthetic oligonucleotide
  Antisense strand to SEQ ID NO: 187560
cauuucaagggagguggcc

SEQ ID NO: 187562 - RNA, 19 nt, Artificial Sequence
  Description of Artificial Sequence: Synthetic oligonucleotide
  Sense strand starting at position 2 of SEQ ID NO: 2418
cuucgcaaaugcucauuua

SEQ ID NO: 187563 - RNA, 19 nt, Artificial Sequence
  Description of Artificial Sequence: Synthetic oligonucleotide
  Antisense strand to SEQ ID NO: 187562
uaaaugagcauuugcgaag

SEQ ID NO: 187564 - RNA, 19 nt, Artificial Sequence
  Description of Artificial Sequence: Synthetic oligonucleotide
  Sense strand starting at position 3 of SEQ ID NO: 2418
uucgcaaaugcucauuuau

SEQ ID NO: 187565 - RNA, 19 nt, Artificial Sequence
  Description of Artificial Sequence: Synthetic oligonucleotide
  Antisense strand to SEQ ID NO: 187564
auaaaugagcauuugcgaa

SEQ ID NO: 187566 - RNA, 19 nt, Artificial Sequence
  Description of Artificial Sequence: Synthetic oligonucleotide
  Sense strand starting at position 5 of SEQ ID NO: 2418
cgcaaaugcucauuuaucu

SEQ ID NO: 187567 - RNA, 19 nt, Artificial Sequence
  Description of Artificial Sequence: Synthetic oligonucleotide
  Antisense strand to SEQ ID NO: 187566
agauaaaugagcauuugcg

SEQ ID NO: 187568 - RNA, 19 nt, Artificial Sequence
  Description of Artificial Sequence: Synthetic oligonucleotide
  Sense strand starting at position 44 of SEQ ID NO: 2418
cgaaacgggaaauguuuaa

SEQ ID NO: 187569 - RNA, 19 nt, Artificial Sequence
  Description of Artificial Sequence: Synthetic oligonucleotide
  Antisense strand to SEQ ID NO: 187568
uuaaacauuucccguuucg

SEQ ID NO: 187570 - RNA, 19 nt, Artificial Sequence
  Description of Artificial Sequence: Synthetic oligonucleotide
  Sense strand starting at position 48 of SEQ ID NO: 2418
acgggaaauguuuaagugu

SEQ ID NO: 187571 - RNA, 19 nt, Artificial Sequence
  Description of Artificial Sequence: Synthetic oligonucleotide
  Antisense strand to SEQ ID NO: 187570
acacuuaaacauuucccgu

SEQ ID NO: 187572 - RNA, 19 nt, Artificial Sequence
  Description of Artificial Sequence: Synthetic oligonucleotide
  Sense strand starting at position 51 of SEQ ID NO: 2418
ggaaauguuuaaguguuag

SEQ ID NO: 187573 - RNA, 19 nt, Artificial Sequence
  Description of Artificial Sequence: Synthetic oligonucleotide
  Antisense strand to SEQ ID NO: 187572
cuaacacuuaaacauuucc

SEQ ID NO: 187574 - RNA, 19 nt, Artificial Sequence
  Description of Artificial Sequence: Synthetic oligonucleotide
  Sense strand starting at position 57 of SEQ ID NO: 2418
guuuaaguguuaguacuau

SEQ ID NO: 187575 - RNA, 19 nt, Artificial Sequence
  Description of Artificial Sequence: Synthetic oligonucleotide
  Antisense strand to SEQ ID NO: 187574
auaguacuaacacuuaaac

SEQ ID NO: 187576 - RNA, 19 nt, Artificial Sequence
  Description of Artificial Sequence: Synthetic oligonucleotide
  Sense strand starting at position 88 of SEQ ID NO: 2418
aguuucuucuuguccauau

SEQ ID NO: 187577 - RNA, 19 nt, Artificial Sequence
  Description of Artificial Sequence: Synthetic oligonucleotide
  Antisense strand to SEQ ID NO: 187576
auauggacaagaagaaacu

SEQ ID NO: 187578 - RNA, 19 nt, Artificial Sequence
  Description of Artificial Sequence: Synthetic oligonucleotide
  Sense strand starting at position 89 of SEQ ID NO: 2418
guuucuucuuguccauauu

SEQ ID NO: 187579 - RNA, 19 nt, Artificial Sequence
  Description of Artificial Sequence: Synthetic oligonucleotide
  Antisense strand to SEQ ID NO: 187578
aauauggacaagaagaaac

SEQ ID NO: 187580 - RNA, 19 nt, Artificial Sequence
  Description of Artificial Sequence: Synthetic oligonucleotide
  Sense strand starting at position 221 of SEQ ID NO: 2418
uauuaacugcuucguuagu

SEQ ID NO: 187581 - RNA, 19 nt, Artificial Sequence
  Description of Artificial Sequence: Synthetic oligonucleotide
  Antisense strand to SEQ ID NO: 187580
acuaacgaagcaguuaaua

SEQ ID NO: 187582 - RNA, 19 nt, Artificial Sequence
  Description of Artificial Sequence: Synthetic oligonucleotide
  Sense strand starting at position 253 of SEQ ID NO: 2418
gucaaaguaguuuguguuu

SEQ ID NO: 187583 - RNA, 19 nt, Artificial Sequence
  Description of Artificial Sequence: Synthetic oligonucleotide
  Antisense strand to SEQ ID NO: 187582
aaacacaaacuacuuugac

SEQ ID NO: 187584 - RNA, 19 nt, Artificial Sequence
  Description of Artificial Sequence: Synthetic oligonucleotide
  Sense strand starting at position 530 of SEQ ID NO: 2418
ucaagaagaugauuccagu

SEQ ID NO: 187585 - RNA, 19 nt, Artificial Sequence
  Description of Artificial Sequence: Synthetic oligonucleotide
  Antisense strand to SEQ ID NO: 187584
acuggaaucaucuucuuga

SEQ ID NO: 187586 - RNA, 19 nt, Artificial Sequence
  Description of Artificial Sequence: Synthetic oligonucleotide
  Sense strand starting at position 533 of SEQ ID NO: 2418
agaagaugauuccaguaac

SEQ ID NO: 187587 - RNA, 19 nt, Artificial Sequence
  Description of Artificial Sequence: Synthetic oligonucleotide
  Antisense strand to SEQ ID NO: 187586
guuacuggaaucaucuucu

SEQ ID NO: 187588 - RNA, 19 nt, Artificial Sequence
  Description of Artificial Sequence: Synthetic oligonucleotide
  Sense strand starting at position 827 of SEQ ID NO: 2418
aacguaauuugagaguuaa

SEQ ID NO: 187589 - RNA, 19 nt, Artificial Sequence
  Description of Artificial Sequence: Synthetic oligonucleotide
  Antisense strand to SEQ ID NO: 187588
uuaacucucaaauuacguu

SEQ ID NO: 187590 - RNA, 19 nt, Artificial Sequence
  Description of Artificial Sequence: Synthetic oligonucleotide
  Sense strand starting at position 909 of SEQ ID NO: 2418
auacaucagucaguuagua

SEQ ID NO: 187591 - RNA, 19 nt, Artificial Sequence
  Description of Artificial Sequence: Synthetic oligonucleotide
  Antisense strand to SEQ ID NO: 187590
uacuaacugacugauguau

SEQ ID NO: 187592 - RNA, 19 nt, Artificial Sequence
  Description of Artificial Sequence: Synthetic oligonucleotide
  Sense strand starting at position 964 of SEQ ID NO: 2418
cgaggcauguuucuucuua

SEQ ID NO: 187593 - RNA, 19 nt, Artificial Sequence
  Description of Artificial Sequence: Synthetic oligonucleotide
  Antisense strand to SEQ ID NO: 187592
uaagaagaaacaugccucg

SEQ ID NO: 187594 - RNA, 19 nt, Artificial Sequence
  Description of Artificial Sequence: Synthetic oligonucleotide
  Sense strand starting at position 965 of SEQ ID NO: 2418
gaggcauguuucuucuuag

SEQ ID NO: 187595 - RNA, 19 nt, Artificial Sequence
  Description of Artificial Sequence: Synthetic oligonucleotide
  Antisense strand to SEQ ID NO: 187594
cuaagaagaaacaugccuc

SEQ ID NO: 187596 - RNA, 19 nt, Artificial Sequence
  Description of Artificial Sequence: Synthetic oligonucleotide
  Sense strand starting at position 983 of SEQ ID NO: 2418
guggcuuuccaaugccaau

SEQ ID NO: 187597 - RNA, 19 nt, Artificial Sequence
  Description of Artificial Sequence: Synthetic oligonucleotide
  Antisense strand to SEQ ID NO: 187596
auuggcauuggaaagccac

SEQ ID NO: 187598 - RNA, 19 nt, Artificial Sequence
  Description of Artificial Sequence: Synthetic oligonucleotide
  Sense strand starting at position 1040 of SEQ ID NO: 2418
gguuaucccucucuucuga

SEQ ID NO: 187599 - RNA, 19 nt, Artificial Sequence
  Description of Artificial Sequence: Synthetic oligonucleotide
  Antisense strand to SEQ ID NO: 187598
ucagaagagagggauaacc

SEQ ID NO: 187600 - RNA, 19 nt, Artificial Sequence
  Description of Artificial Sequence: Synthetic oligonucleotide
  Sense strand starting at position 1083 of SEQ ID NO: 2418
guacauacacuauauguuu

SEQ ID NO: 187601 - RNA, 19 nt, Artificial Sequence
  Description of Artificial Sequence: Synthetic oligonucleotide
  Antisense strand to SEQ ID NO: 187600
aaacauauaguguauguac

SEQ ID NO: 187602 - RNA, 19 nt, Artificial Sequence
  Description of Artificial Sequence: Synthetic oligonucleotide
  Sense strand starting at position 1111 of SEQ ID NO: 2418
aaguuauagcucugugauu

SEQ ID NO: 187603 - RNA, 19 nt, Artificial Sequence
  Description of Artificial Sequence: Synthetic oligonucleotide
  Antisense strand to SEQ ID NO: 187602
aaucacagagcuauaacuu

SEQ ID NO: 187604 - RNA, 19 nt, Artificial Sequence
  Description of Artificial Sequence: Synthetic oligonucleotide
  Sense strand starting at position 1112 of SEQ ID NO: 2418
aguuauagcucugugauuu

SEQ ID NO: 187605 - RNA, 19 nt, Artificial Sequence
  Description of Artificial Sequence: Synthetic oligonucleotide
  Antisense strand to SEQ ID NO: 187604
aaaucacagagcuauaacu

SEQ ID NO: 187606 - RNA, 19 nt, Artificial Sequence
  Description of Artificial Sequence: Synthetic oligonucleotide
  Sense strand starting at position 1113 of SEQ ID NO: 2418
guuauagcucugugauuua

SEQ ID NO: 187607 - RNA, 19 nt, Artificial Sequence
  Description of Artificial Sequence: Synthetic oligonucleotide
  Antisense strand to SEQ ID NO: 187606
uaaaucacagagcuauaac

SEQ ID NO: 187608 - RNA, 19 nt, Artificial Sequence
  Description of Artificial Sequence: Synthetic oligonucleotide
  Sense strand starting at position 1202 of SEQ ID NO: 2418
gggauagaauacuaguauu

SEQ ID NO: 187609 - RNA, 19 nt, Artificial Sequence
  Description of Artificial Sequence: Synthetic oligonucleotide
  Antisense strand to SEQ ID NO: 187608
aauacuaguauucuauccc

SEQ ID NO: 187610 - RNA, 19 nt, Artificial Sequence
  Description of Artificial Sequence: Synthetic oligonucleotide
  Sense strand starting at position 1227 of SEQ ID NO: 2418
auuuauucggcauguggua

SEQ ID NO: 187611 - RNA, 19 nt, Artificial Sequence
  Description of Artificial Sequence: Synthetic oligonucleotide
  Antisense strand to SEQ ID NO: 187610
uaccacaugccgaauaaau

SEQ ID NO: 187612 - RNA, 19 nt, Artificial Sequence
  Description of Artificial Sequence: Synthetic oligonucleotide
  Sense strand starting at position 1868 of SEQ ID NO: 2418
gcuugaauaccucggagaa

SEQ ID NO: 187613 - RNA, 19 nt, Artificial Sequence
  Description of Artificial Sequence: Synthetic oligonucleotide
  Antisense strand to SEQ ID NO: 187612
uucuccgagguauucaagc

SEQ ID NO: 187614 - RNA, 19 nt, Artificial Sequence
  Description of Artificial Sequence: Synthetic oligonucleotide
  Sense strand starting at position 1869 of SEQ ID NO: 2418
cuugaauaccucggagaag

SEQ ID NO: 187615 - RNA, 19 nt, Artificial Sequence
  Description of Artificial Sequence: Synthetic oligonucleotide
  Antisense strand to SEQ ID NO: 187614
cuucuccgagguauucaag

SEQ ID NO: 187616 - RNA, 19 nt, Artificial Sequence
  Description of Artificial Sequence: Synthetic oligonucleotide
  Sense strand starting at position 1870 of SEQ ID NO: 2418
uugaauaccucggagaagu

SEQ ID NO: 187617 - RNA, 19 nt, Artificial Sequence
  Description of Artificial Sequence: Synthetic oligonucleotide
  Antisense strand to SEQ ID NO: 187616
acuucuccgagguauucaa

SEQ ID NO: 187618 - RNA, 19 nt, Artificial Sequence
  Description of Artificial Sequence: Synthetic oligonucleotide
  Sense strand starting at position 2099 of SEQ ID NO: 2418
guuucuuccgaccagggau

SEQ ID NO: 187619 - RNA, 19 nt, Artificial Sequence
  Description of Artificial Sequence: Synthetic oligonucleotide
  Antisense strand to SEQ ID NO: 187618
aucccuggucggaagaaac

SEQ ID NO: 187620 - RNA, 19 nt, Artificial Sequence
  Description of Artificial Sequence: Synthetic oligonucleotide
  Sense strand starting at position 2125 of SEQ ID NO: 2418
ccgagaaccuuaccucaaa

SEQ ID NO: 187621 - RNA, 19 nt, Artificial Sequence
  Description of Artificial Sequence: Synthetic oligonucleotide
  Antisense strand to SEQ ID NO: 187620
uuugagguaagguucucgg

SEQ ID NO: 187622 - RNA, 19 nt, Artificial Sequence
  Description of Artificial Sequence: Synthetic oligonucleotide
  Sense strand starting at position 2238 of SEQ ID NO: 2418
uuauaaguauguucccaaa

SEQ ID NO: 187623 - RNA, 19 nt, Artificial Sequence
  Description of Artificial Sequence: Synthetic oligonucleotide
  Antisense strand to SEQ ID NO: 187622
uuugggaacauacuuauaa

SEQ ID NO: 187624 - RNA, 19 nt, Artificial Sequence
  Description of Artificial Sequence: Synthetic oligonucleotide
  Sense strand starting at position 2240 of SEQ ID NO: 2418
auaaguauguucccaaaua

SEQ ID NO: 187625 - RNA, 19 nt, Artificial Sequence
  Description of Artificial Sequence: Synthetic oligonucleotide
  Antisense strand to SEQ ID NO: 187624
uauuugggaacauacuuau

SEQ ID NO: 187626 - RNA, 19 nt, Artificial Sequence
  Description of Artificial Sequence: Synthetic oligonucleotide
  Sense strand starting at position 2265 of SEQ ID NO: 2418
gggacaugcuaauacggaa

SEQ ID NO: 187627 - RNA, 19 nt, Artificial Sequence
  Description of Artificial Sequence: Synthetic oligonucleotide
  Antisense strand to SEQ ID NO: 187626
uuccguauuagcauguccc

SEQ ID NO: 187628 - RNA, 19 nt, Artificial Sequence
  Description of Artificial Sequence: Synthetic oligonucleotide
  Sense strand starting at position 2286 of SEQ ID NO: 2418
auuacucgcuagucugaaa

SEQ ID NO: 187629 - RNA, 19 nt, Artificial Sequence
  Description of Artificial Sequence: Synthetic oligonucleotide
  Antisense strand to SEQ ID NO: 187628
uuucagacuagcgaguaau

SEQ ID NO: 187630 - RNA, 19 nt, Artificial Sequence
  Description of Artificial Sequence: Synthetic oligonucleotide
  Sense strand starting at position 2429 of SEQ ID NO: 2418
uaaguaauacggugucugu

SEQ ID NO: 187631 - RNA, 19 nt, Artificial Sequence
  Description of Artificial Sequence: Synthetic oligonucleotide
  Antisense strand to SEQ ID NO: 187630
acagacaccguauuacuua

SEQ ID NO: 187632 - RNA, 19 nt, Artificial Sequence
  Description of Artificial Sequence: Synthetic oligonucleotide
  Sense strand starting at position 2440 of SEQ ID NO: 2418
gugucugucgcacauauau

SEQ ID NO: 187633 - RNA, 19 nt, Artificial Sequence
  Description of Artificial Sequence: Synthetic oligonucleotide
  Antisense strand to SEQ ID NO: 187632
auauaugugcgacagacac

SEQ ID NO: 187634 - RNA, 19 nt, Artificial Sequence
  Description of Artificial Sequence: Synthetic oligonucleotide
  Sense strand starting at position 2465 of SEQ ID NO: 2418
guguauguaauguauaagu

SEQ ID NO: 187635 - RNA, 19 nt, Artificial Sequence
  Description of Artificial Sequence: Synthetic oligonucleotide
  Antisense strand to SEQ ID NO: 187634
acuuauacauuacauacac

SEQ ID NO: 187636 - RNA, 19 nt, Artificial Sequence
  Description of Artificial Sequence: Synthetic oligonucleotide
  Sense strand starting at position 2800 of SEQ ID NO: 2418
cgguccucuucccuagaca

SEQ ID NO: 187637 - RNA, 19 nt, Artificial Sequence
  Description of Artificial Sequence: Synthetic oligonucleotide
  Antisense strand to SEQ ID NO: 187636
ugucuagggaagaggaccg

SEQ ID NO: 187638 - RNA, 19 nt, Artificial Sequence
  Description of Artificial Sequence: Synthetic oligonucleotide
  Sense strand starting at position 3150 of SEQ ID NO: 2418
gugggugagccaugaagau

SEQ ID NO: 187639 - RNA, 19 nt, Artificial Sequence
  Description of Artificial Sequence: Synthetic oligonucleotide
  Antisense strand to SEQ ID NO: 187638
aucuucauggcucacccac

SEQ ID NO: 187640 - RNA, 19 nt, Artificial Sequence
  Description of Artificial Sequence: Synthetic oligonucleotide
  Sense strand starting at position 3506 of SEQ ID NO: 2418
agagcuucggccugaccua

SEQ ID NO: 187641 - RNA, 19 nt, Artificial Sequence
  Description of Artificial Sequence: Synthetic oligonucleotide
  Antisense strand to SEQ ID NO: 187640
uaggucaggccgaagcucu

SEQ ID NO: 187642 - RNA, 19 nt, Artificial Sequence
  Description of Artificial Sequence: Synthetic oligonucleotide
  Sense strand starting at position 3849 of SEQ ID NO: 2419
uccuccucucuguauaagu

SEQ ID NO: 187643 - RNA, 19 nt, Artificial Sequence
  Description of Artificial Sequence: Synthetic oligonucleotide
  Antisense strand to SEQ ID NO: 187642
acuuauacagagaggagga

SEQ ID NO: 187644 - RNA, 19 nt, Artificial Sequence
  Description of Artificial Sequence: Synthetic oligonucleotide
  Sense strand starting at position 3829 of SEQ ID NO: 2419
cuacauaguuacuuguaaa

SEQ ID NO: 187645 - RNA, 19 nt, Artificial Sequence
  Description of Artificial Sequence: Synthetic oligonucleotide
  Antisense strand to SEQ ID NO: 187644
uuuacaaguaacuauguag

SEQ ID NO: 187646 - RNA, 19 nt, Artificial Sequence
  Description of Artificial Sequence: Synthetic oligonucleotide
  Sense strand starting at position 3828 of SEQ ID NO: 2419
ccuacauaguuacuuguaa

SEQ ID NO: 187647 - RNA, 19 nt, Artificial Sequence
  Description of Artificial Sequence: Synthetic oligonucleotide
  Antisense strand to SEQ ID NO: 187646
uuacaaguaacuauguagg

SEQ ID NO: 187648 - RNA, 19 nt, Artificial Sequence
  Description of Artificial Sequence: Synthetic oligonucleotide
  Sense strand starting at position 3551 of SEQ ID NO: 2419
caggguaaucacuguaaag

SEQ ID NO: 187649 - RNA, 19 nt, Artificial Sequence
  Description of Artificial Sequence: Synthetic oligonucleotide
  Antisense strand to SEQ ID NO: 187648
cuuuacagugauuacccug

SEQ ID NO: 187650 - RNA, 19 nt, Artificial Sequence
  Description of Artificial Sequence: Synthetic oligonucleotide
  Sense strand starting at position 3493 of SEQ ID NO: 2419
uggacuaacugguuuccca

SEQ ID NO: 187651 - RNA, 19 nt, Artificial Sequence
  Description of Artificial Sequence: Synthetic oligonucleotide
  Antisense strand to SEQ ID NO: 187650
ugggaaaccaguuagucca

SEQ ID NO: 187652 - RNA, 19 nt, Artificial Sequence
  Description of Artificial Sequence: Synthetic oligonucleotide
  Sense strand starting at position 3428 of SEQ ID NO: 2419
uaaguaguucuuugagaug

SEQ ID NO: 187653 - RNA, 19 nt, Artificial Sequence
  Description of Artificial Sequence: Synthetic oligonucleotide
  Antisense strand to SEQ ID NO: 187652
caucucaaagaacuacuua

SEQ ID NO: 187654 - RNA, 19 nt, Artificial Sequence
  Description of Artificial Sequence: Synthetic oligonucleotide
  Sense strand starting at position 3427 of SEQ ID NO: 2419
cuaaguaguucuuugagau

SEQ ID NO: 187655 - RNA, 19 nt, Artificial Sequence
  Description of Artificial Sequence: Synthetic oligonucleotide
  Antisense strand to SEQ ID NO: 187654
aucucaaagaacuacuuag

SEQ ID NO: 187656 - RNA, 19 nt, Artificial Sequence
  Description of Artificial Sequence: Synthetic oligonucleotide
  Sense strand starting at position 3364 of SEQ ID NO: 2419
auguuagacucauugcuau

SEQ ID NO: 187657 - RNA, 19 nt, Artificial Sequence
  Description of Artificial Sequence: Synthetic oligonucleotide
  Antisense strand to SEQ ID NO: 187656
auagcaaugagucuaacau

SEQ ID NO: 187658 - RNA, 19 nt, Artificial Sequence
  Description of Artificial Sequence: Synthetic oligonucleotide
  Sense strand starting at position 3301 of SEQ ID NO: 2419
guccuuagcauggagcaau

SEQ ID NO: 187659 - RNA, 19 nt, Artificial Sequence
  Description of Artificial Sequence: Synthetic oligonucleotide
  Antisense strand to SEQ ID NO: 187658
auugcuccaugcuaaggac

SEQ ID NO: 187660 - RNA, 19 nt, Artificial Sequence
  Description of Artificial Sequence: Synthetic oligonucleotide
  Sense strand starting at position 3137 of SEQ ID NO: 2419
aguauagguuaaccucuaa

SEQ ID NO: 187661 - RNA, 19 nt, Artificial Sequence
  Description of Artificial Sequence: Synthetic oligonucleotide
  Antisense strand to SEQ ID NO: 187660
uuagagguuaaccuauacu

SEQ ID NO: 187662 - RNA, 19 nt, Artificial Sequence
  Description of Artificial Sequence: Synthetic oligonucleotide
  Sense strand starting at position 3087 of SEQ ID NO: 2419
gguccauugcuaugaggaa

SEQ ID NO: 187663 - RNA, 19 nt, Artificial Sequence
  Description of Artificial Sequence: Synthetic oligonucleotide
  Antisense strand to SEQ ID NO: 187662
uuccucauagcaauggacc

SEQ ID NO: 187664 - RNA, 19 nt, Artificial Sequence
  Description of Artificial Sequence: Synthetic oligonucleotide
  Sense strand starting at position 2861 of SEQ ID NO: 2419
ggaguaggauuacugggua

SEQ ID NO: 187665 - RNA, 19 nt, Artificial Sequence
  Description of Artificial Sequence: Synthetic oligonucleotide
  Antisense strand to SEQ ID NO: 187664
uacccaguaauccuacucc

SEQ ID NO: 187666 - RNA, 19 nt, Artificial Sequence
  Description of Artificial Sequence: Synthetic oligonucleotide
  Sense strand starting at position 2849 of SEQ ID NO: 2419
cuuuaauaaccaggaguag

SEQ ID NO: 187667 - RNA, 19 nt, Artificial Sequence
  Description of Artificial Sequence: Synthetic oligonucleotide
  Antisense strand to SEQ ID NO: 187666
cuacuccugguuauuaaag

SEQ ID NO: 187668 - RNA, 19 nt, Artificial Sequence
  Description of Artificial Sequence: Synthetic oligonucleotide
  Sense strand starting at position 2655 of SEQ ID NO: 2419
auacauguguucucauaau

SEQ ID NO: 187669 - RNA, 19 nt, Artificial Sequence
  Description of Artificial Sequence: Synthetic oligonucleotide
  Antisense strand to SEQ ID NO: 187668
auuaugagaacacauguau

SEQ ID NO: 187670 - RNA, 19 nt, Artificial Sequence
  Description of Artificial Sequence: Synthetic oligonucleotide
  Sense strand starting at position 2498 of SEQ ID NO: 2419
auguguuugcuuuauuaca

SEQ ID NO: 187671 - RNA, 19 nt, Artificial Sequence
  Description of Artificial Sequence: Synthetic oligonucleotide
  Antisense strand to SEQ ID NO: 187670
uguaauaaagcaaacacau

SEQ ID NO: 187672 - RNA, 19 nt, Artificial Sequence
  Description of Artificial Sequence: Synthetic oligonucleotide
  Sense strand starting at position 2301 of SEQ ID NO: 2419
ucaugagucccugaugcca

SEQ ID NO: 187673 - RNA, 19 nt, Artificial Sequence
  Description of Artificial Sequence: Synthetic oligonucleotide
  Antisense strand to SEQ ID NO: 187672
uggcaucagggacucauga

SEQ ID NO: 187674 - RNA, 19 nt, Artificial Sequence
  Description of Artificial Sequence: Synthetic oligonucleotide
  Sense strand starting at position 2261 of SEQ ID NO: 2419
ugugacauccagugugaca

SEQ ID NO: 187675 - RNA, 19 nt, Artificial Sequence
  Description of Artificial Sequence: Synthetic oligonucleotide
  Antisense strand to SEQ ID NO: 187674
ugucacacuggaugucaca

SEQ ID NO: 187676 - RNA, 19 nt, Artificial Sequence
  Description of Artificial Sequence: Synthetic oligonucleotide
  Sense strand starting at position 2156 of SEQ ID NO: 2419
gaucuuccaccguagacau

SEQ ID NO: 187677 - RNA, 19 nt, Artificial Sequence
  Description of Artificial Sequence: Synthetic oligonucleotide
  Antisense strand to SEQ ID NO: 187676
augucuacgguggaagauc

SEQ ID NO: 187678 - RNA, 19 nt, Artificial Sequence
  Description of Artificial Sequence: Synthetic oligonucleotide
  Sense strand starting at position 1692 of SEQ ID NO: 2419
gucauaaccugagucaaac

SEQ ID NO: 187679 - RNA, 19 nt, Artificial Sequence
  Description of Artificial Sequence: Synthetic oligonucleotide
  Antisense strand to SEQ ID NO: 187678
guuugacucagguuaugac

SEQ ID NO: 187680 - RNA, 19 nt, Artificial Sequence
  Description of Artificial Sequence: Synthetic oligonucleotide
  Sense strand starting at position 1163 of SEQ ID NO: 2419
cguacuugaagguaauauu

SEQ ID NO: 187681 - RNA, 19 nt, Artificial Sequence
  Description of Artificial Sequence: Synthetic oligonucleotide
  Antisense strand to SEQ ID NO: 187680
aauauuaccuucaaguacg

SEQ ID NO: 187682 - RNA, 19 nt, Artificial Sequence
  Description of Artificial Sequence: Synthetic oligonucleotide
  Sense strand starting at position 1161 of SEQ ID NO: 2419
cacguacuugaagguaaua

SEQ ID NO: 187683 - RNA, 19 nt, Artificial Sequence
  Description of Artificial Sequence: Synthetic oligonucleotide
  Antisense strand to SEQ ID NO: 187682
uauuaccuucaaguacgug

SEQ ID NO: 187684 - RNA, 19 nt, Artificial Sequence
  Description of Artificial Sequence: Synthetic oligonucleotide
  Sense strand starting at position 1128 of SEQ ID NO: 2419
aguaauagucauggcauua

SEQ ID NO: 187685 - RNA, 19 nt, Artificial Sequence
  Description of Artificial Sequence: Synthetic oligonucleotide
  Antisense strand to SEQ ID NO: 187684
uaaugccaugacuauuacu

SEQ ID NO: 187686 - RNA, 19 nt, Artificial Sequence
  Description of Artificial Sequence: Synthetic oligonucleotide
  Sense strand starting at position 1087 of SEQ ID NO: 2419
auuguauguucucuuacaa

SEQ ID NO: 187687 - RNA, 19 nt, Artificial Sequence
  Description of Artificial Sequence: Synthetic oligonucleotide
  Antisense strand to SEQ ID NO: 187686
uuguaagagaacauacaau

SEQ ID NO: 187688 - RNA, 19 nt, Artificial Sequence
  Description of Artificial Sequence: Synthetic oligonucleotide
  Sense strand starting at position 1061 of SEQ ID NO: 2419
ugcugaucuauuugguagu

SEQ ID NO: 187689 - RNA, 19 nt, Artificial Sequence
  Description of Artificial Sequence: Synthetic oligonucleotide
  Antisense strand to SEQ ID NO: 187688
acuaccaaauagaucagca

SEQ ID NO: 187690 - RNA, 19 nt, Artificial Sequence
  Description of Artificial Sequence: Synthetic oligonucleotide
  Sense strand starting at position 1053 of SEQ ID NO: 2419
guauaaggugcugaucuau

SEQ ID NO: 187691 - RNA, 19 nt, Artificial Sequence
  Description of Artificial Sequence: Synthetic oligonucleotide
  Antisense strand to SEQ ID NO: 187690
auagaucagcaccuuauac

SEQ ID NO: 187692 - RNA, 19 nt, Artificial Sequence
  Description of Artificial Sequence: Synthetic oligonucleotide
  Sense strand starting at position 1013 of SEQ ID NO: 2419
gaaucuuaccuggaugugu

SEQ ID NO: 187693 - RNA, 19 nt, Artificial Sequence
  Description of Artificial Sequence: Synthetic oligonucleotide
  Antisense strand to SEQ ID NO: 187692
acacauccagguaagauuc

SEQ ID NO: 187694 - RNA, 19 nt, Artificial Sequence
  Description of Artificial Sequence: Synthetic oligonucleotide
  Sense strand starting at position 1010 of SEQ ID NO: 2419
ucugaaucuuaccuggaug

SEQ ID NO: 187695 - RNA, 19 nt, Artificial Sequence
  Description of Artificial Sequence: Synthetic oligonucleotide
  Antisense strand to SEQ ID NO: 187694
cauccagguaagauucaga

SEQ ID NO: 187696 - RNA, 19 nt, Artificial Sequence
  Description of Artificial Sequence: Synthetic oligonucleotide
  Sense strand starting at position 1009 of SEQ ID NO: 2419
aucugaaucuuaccuggau

SEQ ID NO: 187697 - RNA, 19 nt, Artificial Sequence
  Description of Artificial Sequence: Synthetic oligonucleotide
  Antisense strand to SEQ ID NO: 187696
auccagguaagauucagau

SEQ ID NO: 187698 - RNA, 19 nt, Artificial Sequence
  Description of Artificial Sequence: Synthetic oligonucleotide
  Sense strand starting at position 978 of SEQ ID NO: 2419
ccuacugaaugcucaggua

SEQ ID NO: 187699 - RNA, 19 nt, Artificial Sequence
  Description of Artificial Sequence: Synthetic oligonucleotide
  Antisense strand to SEQ ID NO: 187698
uaccugagcauucaguagg

SEQ ID NO: 187700 - RNA, 19 nt, Artificial Sequence
  Description of Artificial Sequence: Synthetic oligonucleotide
  Sense strand starting at position 750 of SEQ ID NO: 2419
caacauguggccuaaugua

SEQ ID NO: 187701 - RNA, 19 nt, Artificial Sequence
  Description of Artificial Sequence: Synthetic oligonucleotide
  Antisense strand to SEQ ID NO: 187700
uacauuaggccacauguug

SEQ ID NO: 187702 - RNA, 19 nt, Artificial Sequence
  Description of Artificial Sequence: Synthetic oligonucleotide
  Sense strand starting at position 691 of SEQ ID NO: 2419
agaucugagucucccucaa

SEQ ID NO: 187703 - RNA, 19 nt, Artificial Sequence
  Description of Artificial Sequence: Synthetic oligonucleotide
  Antisense strand to SEQ ID NO: 187702
uugagggagacucagaucu

SEQ ID NO: 187704 - RNA, 19 nt, Artificial Sequence
  Description of Artificial Sequence: Synthetic oligonucleotide
  Sense strand starting at position 467 of SEQ ID NO: 2419
ccuuauugucagcaauguu

SEQ ID NO: 187705 - RNA, 19 nt, Artificial Sequence
  Description of Artificial Sequence: Synthetic oligonucleotide
  Antisense strand to SEQ ID NO: 187704
aacauugcugacaauaagg

SEQ ID NO: 187706 - RNA, 19 nt, Artificial Sequence
  Description of Artificial Sequence: Synthetic oligonucleotide
  Sense strand starting at position 437 of SEQ ID NO: 2419
ccuguuaugcuugaaacca

SEQ ID NO: 187707 - RNA, 19 nt, Artificial Sequence
  Description of Artificial Sequence: Synthetic oligonucleotide
  Antisense strand to SEQ ID NO: 187706
ugguuucaagcauaacagg

SEQ ID NO: 187708 - RNA, 19 nt, Artificial Sequence
  Description of Artificial Sequence: Synthetic oligonucleotide
  Sense strand starting at position 433 of SEQ ID NO: 2419
gaauccuguuaugcuugaa

SEQ ID NO: 187709 - RNA, 19 nt, Artificial Sequence
  Description of Artificial Sequence: Synthetic oligonucleotide
  Antisense strand to SEQ ID NO: 187708
uucaagcauaacaggauuc

SEQ ID NO: 187710 - RNA, 19 nt, Artificial Sequence
  Description of Artificial Sequence: Synthetic oligonucleotide
  Sense strand starting at position 397 of SEQ ID NO: 2419
cugugaaguaucugaagug

SEQ ID NO: 187711 - RNA, 19 nt, Artificial Sequence
  Description of Artificial Sequence: Synthetic oligonucleotide
  Antisense strand to SEQ ID NO: 187710
cacuucagauacuucacag

SEQ ID NO: 187712 - RNA, 19 nt, Artificial Sequence
  Description of Artificial Sequence: Synthetic oligonucleotide
  Sense strand starting at position 322 of SEQ ID NO: 2419
uucuguagccaaugaaaga

SEQ ID NO: 187713 - RNA, 19 nt, Artificial Sequence
  Description of Artificial Sequence: Synthetic oligonucleotide
  Antisense strand to SEQ ID NO: 187712
ucuuucauuggcuacagaa

SEQ ID NO: 187714 - RNA, 19 nt, Artificial Sequence
  Description of Artificial Sequence: Synthetic oligonucleotide
  Sense strand starting at position 157 of SEQ ID NO: 2419
aacauuggucuguaguguu

SEQ ID NO: 187715 - RNA, 19 nt, Artificial Sequence
  Description of Artificial Sequence: Synthetic oligonucleotide
  Antisense strand to SEQ ID NO: 187714
aacacuacagaccaauguu

SEQ ID NO: 187716 - RNA, 19 nt, Artificial Sequence
  Description of Artificial Sequence: Synthetic oligonucleotide
  Sense strand starting at position 98 of SEQ ID NO: 2419
uuugcuucccagggaaaua

SEQ ID NO: 187717 - RNA, 19 nt, Artificial Sequence
  Description of Artificial Sequence: Synthetic oligonucleotide
  Antisense strand to SEQ ID NO: 187716
uauuucccugggaagcaaa

SEQ ID NO: 187718 - RNA, 19 nt, Artificial Sequence
  Description of Artificial Sequence: Synthetic oligonucleotide
  Sense strand starting at position 39 of SEQ ID NO: 2419
ggugaaaucuaauccaagu

SEQ ID NO: 187719 - RNA, 19 nt, Artificial Sequence
  Description of Artificial Sequence: Synthetic oligonucleotide
  Antisense strand to SEQ ID NO: 187718
acuuggauuagauuucacc

SEQ ID NO: 187720 - RNA, 19 nt, Artificial Sequence
  Description of Artificial Sequence: Synthetic oligonucleotide
  Sense strand starting at position 26 of SEQ ID NO: 2419
cuguuaaggguugggugaa

SEQ ID NO: 187721 - RNA, 19 nt, Artificial Sequence
  Description of Artificial Sequence: Synthetic oligonucleotide
  Antisense strand to SEQ ID NO: 187720
uucacccaacccuuaacag

SEQ ID NO: 187722 - RNA, 19 nt, Artificial Sequence
  Description of Artificial Sequence: Synthetic oligonucleotide
  Sense strand starting at position 77 of SEQ ID NO: 2420
cagguccuccuaugugaga

SEQ ID NO: 187723 - RNA, 19 nt, Artificial Sequence
  Description of Artificial Sequence: Synthetic oligonucleotide
  Antisense strand to SEQ ID NO: 187722
ucucacauaggaggaccug

SEQ ID NO: 187724 - RNA, 19 nt, Artificial Sequence
  Description of Artificial Sequence: Synthetic oligonucleotide
  Sense strand starting at position 166 of SEQ ID NO: 2420
caggaacaaucgucuguua

SEQ ID NO: 187725 - RNA, 19 nt, Artificial Sequence
  Description of Artificial Sequence: Synthetic oligonucleotide
  Antisense strand to SEQ ID NO: 187724
uaacagacgauuguuccug

SEQ ID NO: 187726 - RNA, 19 nt, Artificial Sequence
  Description of Artificial Sequence: Synthetic oligonucleotide
  Sense strand starting at position 168 of SEQ ID NO: 2420
ggaacaaucgucuguuaaa

SEQ ID NO: 187727 - RNA, 19 nt, Artificial Sequence
  Description of Artificial Sequence: Synthetic oligonucleotide
  Antisense strand to SEQ ID NO: 187726
uuuaacagacgauuguucc

SEQ ID NO: 187728 - RNA, 19 nt, Artificial Sequence
  Description of Artificial Sequence: Synthetic oligonucleotide
  Sense strand starting at position 169 of SEQ ID NO: 2420
gaacaaucgucuguuaaau

SEQ ID NO: 187729 - RNA, 19 nt, Artificial Sequence
  Description of Artificial Sequence: Synthetic oligonucleotide
  Antisense strand to SEQ ID NO: 187728
auuuaacagacgauuguuc

SEQ ID NO: 187730 - RNA, 19 nt, Artificial Sequence
  Description of Artificial Sequence: Synthetic oligonucleotide
  Sense strand starting at position 179 of SEQ ID NO: 2420
cuguuaaauuacucugaga

SEQ ID NO: 187731 - RNA, 19 nt, Artificial Sequence
  Description of Artificial Sequence: Synthetic oligonucleotide
  Antisense strand to SEQ ID NO: 187730
ucucagaguaauuuaacag

SEQ ID NO: 187732 - RNA, 19 nt, Artificial Sequence
  Description of Artificial Sequence: Synthetic oligonucleotide
  Sense strand starting at position 181 of SEQ ID NO: 2420
guuaaauuacucugagaau

SEQ ID NO: 187733 - RNA, 19 nt, Artificial Sequence
  Description of Artificial Sequence: Synthetic oligonucleotide
  Antisense strand to SEQ ID NO: 187732
auucucagaguaauuuaac

SEQ ID NO: 187734 - RNA, 19 nt, Artificial Sequence
  Description of Artificial Sequence: Synthetic oligonucleotide
  Sense strand starting at position 367 of SEQ ID NO: 2420
cccgucucuguguauauuu

SEQ ID NO: 187735 - RNA, 19 nt, Artificial Sequence
  Description of Artificial Sequence: Synthetic oligonucleotide
  Antisense strand to SEQ ID NO: 187734
aaauauacacagagacggg

SEQ ID NO: 187736 - RNA, 19 nt, Artificial Sequence
  Description of Artificial Sequence: Synthetic oligonucleotide
  Sense strand starting at position 506 of SEQ ID NO: 2420
gagcauaucuucucaugag

SEQ ID NO: 187737 - RNA, 19 nt, Artificial Sequence
  Description of Artificial Sequence: Synthetic oligonucleotide
  Antisense strand to SEQ ID NO: 187736
cucaugagaagauaugcuc

SEQ ID NO: 187738 - RNA, 19 nt, Artificial Sequence
  Description of Artificial Sequence: Synthetic oligonucleotide
  Sense strand starting at position 579 of SEQ ID NO: 2420
guuacaguaccauaaguga

SEQ ID NO: 187739 - RNA, 19 nt, Artificial Sequence
  Description of Artificial Sequence: Synthetic oligonucleotide
  Antisense strand to SEQ ID NO: 187738
ucacuuaugguacuguaac

SEQ ID NO: 187740 - RNA, 19 nt, Artificial Sequence
  Description of Artificial Sequence: Synthetic oligonucleotide
  Sense strand starting at position 582 of SEQ ID NO: 2420
acaguaccauaagugagau

SEQ ID NO: 187741 - RNA, 19 nt, Artificial Sequence
  Description of Artificial Sequence: Synthetic oligonucleotide
  Antisense strand to SEQ ID NO: 187740
aucucacuuaugguacugu

SEQ ID NO: 187742 - RNA, 19 nt, Artificial Sequence
  Description of Artificial Sequence: Synthetic oligonucleotide
  Sense strand starting at position 601 of SEQ ID NO: 2420
gacagaguaaugcgugaag

SEQ ID NO: 187743 - RNA, 19 nt, Artificial Sequence
  Description of Artificial Sequence: Synthetic oligonucleotide
  Antisense strand to SEQ ID NO: 187742
cuucacgcauuacucuguc

SEQ ID NO: 187744 - RNA, 19 nt, Artificial Sequence
  Description of Artificial Sequence: Synthetic oligonucleotide
  Sense strand starting at position 603 of SEQ ID NO: 2420
cagaguaaugcgugaagag

SEQ ID NO: 187745 - RNA, 19 nt, Artificial Sequence
  Description of Artificial Sequence: Synthetic oligonucleotide
  Antisense strand to SEQ ID NO: 187744
cucuucacgcauuacucug

SEQ ID NO: 187746 - RNA, 19 nt, Artificial Sequence
  Description of Artificial Sequence: Synthetic oligonucleotide
  Sense strand starting at position 604 of SEQ ID NO: 2420
agaguaaugcgugaagagu

SEQ ID NO: 187747 - RNA, 19 nt, Artificial Sequence
  Description of Artificial Sequence: Synthetic oligonucleotide
  Antisense strand to SEQ ID NO: 187746
acucuucacgcauuacucu

SEQ ID NO: 187748 - RNA, 19 nt, Artificial Sequence
  Description of Artificial Sequence: Synthetic oligonucleotide
  Sense strand starting at position 610 of SEQ ID NO: 2420
augcgugaagaguacucua

SEQ ID NO: 187749 - RNA, 19 nt, Artificial Sequence
  Description of Artificial Sequence: Synthetic oligonucleotide
  Antisense strand to SEQ ID NO: 187748
uagaguacucuucacgcau

SEQ ID NO: 187750 - RNA, 19 nt, Artificial Sequence
  Description of Artificial Sequence: Synthetic oligonucleotide
  Sense strand starting at position 634 of SEQ ID NO: 2420
ggcaacauucagugaggga

SEQ ID NO: 187751 - RNA, 19 nt, Artificial Sequence
  Description of Artificial Sequence: Synthetic oligonucleotide
  Antisense strand to SEQ ID NO: 187750
ucccucacugaauguugcc

SEQ ID NO: 187752 - RNA, 19 nt, Artificial Sequence
  Description of Artificial Sequence: Synthetic oligonucleotide
  Sense strand starting at position 1187 of SEQ ID NO: 2420
caagaagucucagcuggua

SEQ ID NO: 187753 - RNA, 19 nt, Artificial Sequence
  Description of Artificial Sequence: Synthetic oligonucleotide
  Antisense strand to SEQ ID NO: 187752
uaccagcugagacuucuug

SEQ ID NO: 187754 - RNA, 19 nt, Artificial Sequence
  Description of Artificial Sequence: Synthetic oligonucleotide
  Sense strand starting at position 1250 of SEQ ID NO: 2420
gccuguccugcguccuaaa

SEQ ID NO: 187755 - RNA, 19 nt, Artificial Sequence
  Description of Artificial Sequence: Synthetic oligonucleotide
  Antisense strand to SEQ ID NO: 187754
uuuaggacgcaggacaggc

SEQ ID NO: 187756 - RNA, 19 nt, Artificial Sequence
  Description of Artificial Sequence: Synthetic oligonucleotide
  Sense strand starting at position 1598 of SEQ ID NO: 2420
aggugaucaugucucuuau

SEQ ID NO: 187757 - RNA, 19 nt, Artificial Sequence
  Description of Artificial Sequence: Synthetic oligonucleotide
  Antisense strand to SEQ ID NO: 187756
auaagagacaugaucaccu

SEQ ID NO: 187758 - RNA, 19 nt, Artificial Sequence
  Description of Artificial Sequence: Synthetic oligonucleotide
  Sense strand starting at position 1646 of SEQ ID NO: 2420
ggcccugagugguuaagga

SEQ ID NO: 187759 - RNA, 19 nt, Artificial Sequence
  Description of Artificial Sequence: Synthetic oligonucleotide
  Antisense strand to SEQ ID NO: 187758
uccuuaaccacucagggcc

SEQ ID NO: 187760 - RNA, 19 nt, Artificial Sequence
  Description of Artificial Sequence: Synthetic oligonucleotide
  Sense strand starting at position 1913 of SEQ ID NO: 2420
caauguaugcagugagaga

SEQ ID NO: 187761 - RNA, 19 nt, Artificial Sequence
  Description of Artificial Sequence: Synthetic oligonucleotide
  Antisense strand to SEQ ID NO: 187760
ucucucacugcauacauug

SEQ ID NO: 187762 - RNA, 19 nt, Artificial Sequence
  Description of Artificial Sequence: Synthetic oligonucleotide
  Sense strand starting at position 2092 of SEQ ID NO: 2420
cauggaaagucuuugcaau

SEQ ID NO: 187763 - RNA, 19 nt, Artificial Sequence
  Description of Artificial Sequence: Synthetic oligonucleotide
  Antisense strand to SEQ ID NO: 187762
auugcaaagacuuuccaug

SEQ ID NO: 187764 - RNA, 19 nt, Artificial Sequence
  Description of Artificial Sequence: Synthetic oligonucleotide
  Sense strand starting at position 2093 of SEQ ID NO: 2420
auggaaagucuuugcaaua

SEQ ID NO: 187765 - RNA, 19 nt, Artificial Sequence
  Description of Artificial Sequence: Synthetic oligonucleotide
  Antisense strand to SEQ ID NO: 187764
uauugcaaagacuuuccau

SEQ ID NO: 187766 - RNA, 19 nt, Artificial Sequence
  Description of Artificial Sequence: Synthetic oligonucleotide
  Sense strand starting at position 2094 of SEQ ID NO: 2420
uggaaagucuuugcaauac

SEQ ID NO: 187767 - RNA, 19 nt, Artificial Sequence
  Description of Artificial Sequence: Synthetic oligonucleotide
  Antisense strand to SEQ ID NO: 187766
guauugcaaagacuuucca

SEQ ID NO: 187768 - RNA, 19 nt, Artificial Sequence
  Description of Artificial Sequence: Synthetic oligonucleotide
  Sense strand starting at position 2281 of SEQ ID NO: 2420
gaucuuccaccguagacau

SEQ ID NO: 187769 - RNA, 19 nt, Artificial Sequence
  Description of Artificial Sequence: Synthetic oligonucleotide
  Antisense strand to SEQ ID NO: 187768
augucuacgguggaagauc

SEQ ID NO: 187770 - RNA, 19 nt, Artificial Sequence
  Description of Artificial Sequence: Synthetic oligonucleotide
  Sense strand starting at position 2426 of SEQ ID NO: 2420
ucaugagucccugaugcca

SEQ ID NO: 187771 - RNA, 19 nt, Artificial Sequence
  Description of Artificial Sequence: Synthetic oligonucleotide
  Antisense strand to SEQ ID NO: 187770
uggcaucagggacucauga

SEQ ID NO: 187772 - RNA, 19 nt, Artificial Sequence
  Description of Artificial Sequence: Synthetic oligonucleotide
  Sense strand starting at position 2780 of SEQ ID NO: 2420
auacauguguucucauaau

SEQ ID NO: 187773 - RNA, 19 nt, Artificial Sequence
  Description of Artificial Sequence: Synthetic oligonucleotide
  Antisense strand to SEQ ID NO: 187772
auuaugagaacacauguau

SEQ ID NO: 187774 - RNA, 19 nt, Artificial Sequence
  Description of Artificial Sequence: Synthetic oligonucleotide
  Sense strand starting at position 2865 of SEQ ID NO: 2420
uucuacuucgaguaaauau

SEQ ID NO: 187775 - RNA, 19 nt, Artificial Sequence
  Description of Artificial Sequence: Synthetic oligonucleotide
  Antisense strand to SEQ ID NO: 187774
auauuuacucgaaguagaa

SEQ ID NO: 187776 - RNA, 19 nt, Artificial Sequence
  Description of Artificial Sequence: Synthetic oligonucleotide
  Sense strand starting at position 2975 of SEQ ID NO: 2420
cuuuaauaaccaggaguag

SEQ ID NO: 187777 - RNA, 19 nt, Artificial Sequence
  Description of Artificial Sequence: Synthetic oligonucleotide
  Antisense strand to SEQ ID NO: 187776
cuacuccugguuauuaaag

SEQ ID NO: 187778 - RNA, 19 nt, Artificial Sequence
  Description of Artificial Sequence: Synthetic oligonucleotide
  Sense strand starting at position 3262 of SEQ ID NO: 2420
aguauagguuaaccucuaa

SEQ ID NO: 187779 - RNA, 19 nt, Artificial Sequence
  Description of Artificial Sequence: Synthetic oligonucleotide
  Antisense strand to SEQ ID NO: 187778
uuagagguuaaccuauacu

SEQ ID NO: 187780 - RNA, 19 nt, Artificial Sequence
  Description of Artificial Sequence: Synthetic oligonucleotide
  Sense strand starting at position 3426 of SEQ ID NO: 2420
guccuuagcauggagcaau

SEQ ID NO: 187781 - RNA, 19 nt, Artificial Sequence
  Description of Artificial Sequence: Synthetic oligonucleotide
  Antisense strand to SEQ ID NO: 187780
auugcuccaugcuaaggac

SEQ ID NO: 187782 - RNA, 19 nt, Artificial Sequence
  Description of Artificial Sequence: Synthetic oligonucleotide
  Sense strand starting at position 3552 of SEQ ID NO: 2420
cuagguaguucuuugagau

SEQ ID NO: 187783 - RNA, 19 nt, Artificial Sequence
  Description of Artificial Sequence: Synthetic oligonucleotide
  Antisense strand to SEQ ID NO: 187782
aucucaaagaacuaccuag

SEQ ID NO: 187784 - RNA, 19 nt, Artificial Sequence
  Description of Artificial Sequence: Synthetic oligonucleotide
  Sense strand starting at position 3553 of SEQ ID NO: 2420
uagguaguucuuugagaug

SEQ ID NO: 187785 - RNA, 19 nt, Artificial Sequence
  Description of Artificial Sequence: Synthetic oligonucleotide
  Antisense strand to SEQ ID NO: 187784
caucucaaagaacuaccua

SEQ ID NO: 187786 - RNA, 19 nt, Artificial Sequence
  Description of Artificial Sequence: Synthetic oligonucleotide
  Sense strand starting at position 3595 of SEQ ID NO: 2420
cucaaauguuaggccaauu

SEQ ID NO: 187787 - RNA, 19 nt, Artificial Sequence
  Description of Artificial Sequence: Synthetic oligonucleotide
  Antisense strand to SEQ ID NO: 187786
aauuggccuaacauuugag

SEQ ID NO: 187788 - RNA, 19 nt, Artificial Sequence
  Description of Artificial Sequence: Synthetic oligonucleotide
  Sense strand starting at position 3606 of SEQ ID NO: 2420
ggccaauuacaguggacua

SEQ ID NO: 187789 - RNA, 19 nt, Artificial Sequence
  Description of Artificial Sequence: Synthetic oligonucleotide
  Antisense strand to SEQ ID NO: 187788
uaguccacuguaauuggcc

SEQ ID NO: 187790 - RNA, 19 nt, Artificial Sequence
  Description of Artificial Sequence: Synthetic oligonucleotide
  Sense strand starting at position 3676 of SEQ ID NO: 2420
caggguaaucacuguaaag

SEQ ID NO: 187791 - RNA, 19 nt, Artificial Sequence
  Description of Artificial Sequence: Synthetic oligonucleotide
  Antisense strand to SEQ ID NO: 187790
cuuuacagugauuacccug

SEQ ID NO: 187792 - RNA, 19 nt, Artificial Sequence
  Description of Artificial Sequence: Synthetic oligonucleotide
  Sense strand starting at position 3722 of SEQ ID NO: 2420
cugagaaccucuuugcuaa

SEQ ID NO: 187793 - RNA, 19 nt, Artificial Sequence
  Description of Artificial Sequence: Synthetic oligonucleotide
  Antisense strand to SEQ ID NO: 187792
uuagcaaagagguucucag

SEQ ID NO: 187794 - RNA, 19 nt, Artificial Sequence
  Description of Artificial Sequence: Synthetic oligonucleotide
  Sense strand starting at position 3723 of SEQ ID NO: 2420
ugagaaccucuuugcuaac

SEQ ID NO: 187795 - RNA, 19 nt, Artificial Sequence
  Description of Artificial Sequence: Synthetic oligonucleotide
  Antisense strand to SEQ ID NO: 187794
guuagcaaagagguucuca

SEQ ID NO: 187796 - RNA, 19 nt, Artificial Sequence
  Description of Artificial Sequence: Synthetic oligonucleotide
  Sense strand starting at position 3954 of SEQ ID NO: 2420
ccuacauaguuacuuguaa

SEQ ID NO: 187797 - RNA, 19 nt, Artificial Sequence
  Description of Artificial Sequence: Synthetic oligonucleotide
  Antisense strand to SEQ ID NO: 187796
uuacaaguaacuauguagg

SEQ ID NO: 187798 - RNA, 19 nt, Artificial Sequence
  Description of Artificial Sequence: Synthetic oligonucleotide
  Sense strand starting at position 3955 of SEQ ID NO: 2420
cuacauaguuacuuguaaa

SEQ ID NO: 187799 - RNA, 19 nt, Artificial Sequence
  Description of Artificial Sequence: Synthetic oligonucleotide
  Antisense strand to SEQ ID NO: 187798
uuuacaaguaacuauguag

SEQ ID NO: 187800 - RNA, 19 nt, Artificial Sequence
  Description of Artificial Sequence: Synthetic oligonucleotide
  Sense strand starting at position 3975 of SEQ ID NO: 2420
uccuccucucuguauaagu

SEQ ID NO: 187801 - RNA, 19 nt, Artificial Sequence
  Description of Artificial Sequence: Synthetic oligonucleotide
  Antisense strand to SEQ ID NO: 187800
acuuauacagagaggagga

SEQ ID NO: 187802 - RNA, 19 nt, Artificial Sequence
  Description of Artificial Sequence: Synthetic oligonucleotide
  Sense strand starting at position 3957 of SEQ ID NO: 2421
gugcauguucacggcuaga

SEQ ID NO: 187803 - RNA, 19 nt, Artificial Sequence
  Description of Artificial Sequence: Synthetic oligonucleotide
  Antisense strand to SEQ ID NO: 187802
ucuagccgugaacaugcac

SEQ ID NO: 187804 - RNA, 19 nt, Artificial Sequence
  Description of Artificial Sequence: Synthetic oligonucleotide
  Sense strand starting at position 3853 of SEQ ID NO: 2421
gaagacgcucaguaaauau

SEQ ID NO: 187805 - RNA, 19 nt, Artificial Sequence
  Description of Artificial Sequence: Synthetic oligonucleotide
  Antisense strand to SEQ ID NO: 187804
auauuuacugagcgucuuc

SEQ ID NO: 187806 - RNA, 19 nt, Artificial Sequence
  Description of Artificial Sequence: Synthetic oligonucleotide
  Sense strand starting at position 3753 of SEQ ID NO: 2421
ucacuuggccagggucaua

SEQ ID NO: 187807 - RNA, 19 nt, Artificial Sequence
  Description of Artificial Sequence: Synthetic oligonucleotide
  Antisense strand to SEQ ID NO: 187806
uaugacccuggccaaguga

SEQ ID NO: 187808 - RNA, 19 nt, Artificial Sequence
  Description of Artificial Sequence: Synthetic oligonucleotide
  Sense strand starting at position 3699 of SEQ ID NO: 2421
gcgcuuauuaccuagguuu

SEQ ID NO: 187809 - RNA, 19 nt, Artificial Sequence
  Description of Artificial Sequence: Synthetic oligonucleotide
  Antisense strand to SEQ ID NO: 187808
aaaccuagguaauaagcgc

SEQ ID NO: 187810 - RNA, 19 nt, Artificial Sequence
  Description of Artificial Sequence: Synthetic oligonucleotide
  Sense strand starting at position 3689 of SEQ ID NO: 2421
ugagguaacugcgcuuauu

SEQ ID NO: 187811 - RNA, 19 nt, Artificial Sequence
  Description of Artificial Sequence: Synthetic oligonucleotide
  Antisense strand to SEQ ID NO: 187810
aauaagcgcaguuaccuca

SEQ ID NO: 187812 - RNA, 19 nt, Artificial Sequence
  Description of Artificial Sequence: Synthetic oligonucleotide
  Sense strand starting at position 3677 of SEQ ID NO: 2421
cucugaaucgaaugaggua

SEQ ID NO: 187813 - RNA, 19 nt, Artificial Sequence
  Description of Artificial Sequence: Synthetic oligonucleotide
  Antisense strand to SEQ ID NO: 187812
uaccucauucgauucagag

SEQ ID NO: 187814 - RNA, 19 nt, Artificial Sequence
  Description of Artificial Sequence: Synthetic oligonucleotide
  Sense strand starting at position 3657 of SEQ ID NO: 2421
cauugugcuuggcagacau

SEQ ID NO: 187815 - RNA, 19 nt, Artificial Sequence
  Description of Artificial Sequence: Synthetic oligonucleotide
  Antisense strand to SEQ ID NO: 187814
augucugccaagcacaaug

SEQ ID NO: 187816 - RNA, 19 nt, Artificial Sequence
  Description of Artificial Sequence: Synthetic oligonucleotide
  Sense strand starting at position 3654 of SEQ ID NO: 2421
acccauugugcuuggcaga

SEQ ID NO: 187817 - RNA, 19 nt, Artificial Sequence
  Description of Artificial Sequence: Synthetic oligonucleotide
  Antisense strand to SEQ ID NO: 187816
ucugccaagcacaaugggu

SEQ ID NO: 187818 - RNA, 19 nt, Artificial Sequence
  Description of Artificial Sequence: Synthetic oligonucleotide
  Sense strand starting at position 3629 of SEQ ID NO: 2421
guaguuauugagcacuuag

SEQ ID NO: 187819 - RNA, 19 nt, Artificial Sequence
  Description of Artificial Sequence: Synthetic oligonucleotide
  Antisense strand to SEQ ID NO: 187818
cuaagugcucaauaacuac

SEQ ID NO: 187820 - RNA, 19 nt, Artificial Sequence
  Description of Artificial Sequence: Synthetic oligonucleotide
  Sense strand starting at position 3628 of SEQ ID NO: 2421
aguaguuauugagcacuua

SEQ ID NO: 187821 - RNA, 19 nt, Artificial Sequence
  Description of Artificial Sequence: Synthetic oligonucleotide
  Antisense strand to SEQ ID NO: 187820
uaagugcucaauaacuacu

SEQ ID NO: 187822 - RNA, 19 nt, Artificial Sequence
  Description of Artificial Sequence: Synthetic oligonucleotide
  Sense strand starting at position 3621 of SEQ ID NO: 2421
gaccacuaguaguuauuga

SEQ ID NO: 187823 - RNA, 19 nt, Artificial Sequence
  Description of Artificial Sequence: Synthetic oligonucleotide
  Antisense strand to SEQ ID NO: 187822
ucaauaacuacuagugguc

SEQ ID NO: 187824 - RNA, 19 nt, Artificial Sequence
  Description of Artificial Sequence: Synthetic oligonucleotide
  Sense strand starting at position 3615 of SEQ ID NO: 2421
gaccaugaccacuaguagu

SEQ ID NO: 187825 - RNA, 19 nt, Artificial Sequence
  Description of Artificial Sequence: Synthetic oligonucleotide
  Antisense strand to SEQ ID NO: 187824
acuacuaguggucaugguc

SEQ ID NO: 187826 - RNA, 19 nt, Artificial Sequence
  Description of Artificial Sequence: Synthetic oligonucleotide
  Sense strand starting at position 3602 of SEQ ID NO: 2421
ucuuuagagcagugaccau

SEQ ID NO: 187827 - RNA, 19 nt, Artificial Sequence
  Description of Artificial Sequence: Synthetic oligonucleotide
  Antisense strand to SEQ ID NO: 187826
auggucacugcucuaaaga

SEQ ID NO: 187828 - RNA, 19 nt, Artificial Sequence
  Description of Artificial Sequence: Synthetic oligonucleotide
  Sense strand starting at position 3596 of SEQ ID NO: 2421
ccaaguucuuuagagcagu

SEQ ID NO: 187829 - RNA, 19 nt, Artificial Sequence
  Description of Artificial Sequence: Synthetic oligonucleotide
  Antisense strand to SEQ ID NO: 187828
acugcucuaaagaacuugg

SEQ ID NO: 187830 - RNA, 19 nt, Artificial Sequence
  Description of Artificial Sequence: Synthetic oligonucleotide
  Sense strand starting at position 3552 of SEQ ID NO: 2421
gcaguugucugcuuccauc

SEQ ID NO: 187831 - RNA, 19 nt, Artificial Sequence
  Description of Artificial Sequence: Synthetic oligonucleotide
  Antisense strand to SEQ ID NO: 187830
gauggaagcagacaacugc

SEQ ID NO: 187832 - RNA, 19 nt, Artificial Sequence
  Description of Artificial Sequence: Synthetic oligonucleotide
  Sense strand starting at position 3551 of SEQ ID NO: 2421
agcaguugucugcuuccau

SEQ ID NO: 187833 - RNA, 19 nt, Artificial Sequence
  Description of Artificial Sequence: Synthetic oligonucleotide
  Antisense strand to SEQ ID NO: 187832
auggaagcagacaacugcu

SEQ ID NO: 187834 - RNA, 19 nt, Artificial Sequence
  Description of Artificial Sequence: Synthetic oligonucleotide
  Sense strand starting at position 2839 of SEQ ID NO: 2421
gaaucaaacgcaugaugag

SEQ ID NO: 187835 - RNA, 19 nt, Artificial Sequence
  Description of Artificial Sequence: Synthetic oligonucleotide
  Antisense strand to SEQ ID NO: 187834
cucaucaugcguuugauuc

SEQ ID NO: 187836 - RNA, 19 nt, Artificial Sequence
  Description of Artificial Sequence: Synthetic oligonucleotide
  Sense strand starting at position 2663 of SEQ ID NO: 2421
caaauuagucgggcguguu

SEQ ID NO: 187837 - RNA, 19 nt, Artificial Sequence
  Description of Artificial Sequence: Synthetic oligonucleotide
  Antisense strand to SEQ ID NO: 187836
aacacgcccgacuaauuug

SEQ ID NO: 187838 - RNA, 19 nt, Artificial Sequence
  Description of Artificial Sequence: Synthetic oligonucleotide
  Sense strand starting at position 2489 of SEQ ID NO: 2421
gguuccugcaaaugaguua

SEQ ID NO: 187839 - RNA, 19 nt, Artificial Sequence
  Description of Artificial Sequence: Synthetic oligonucleotide
  Antisense strand to SEQ ID NO: 187838
uaacucauuugcaggaacc

SEQ ID NO: 187840 - RNA, 19 nt, Artificial Sequence
  Description of Artificial Sequence: Synthetic oligonucleotide
  Sense strand starting at position 2483 of SEQ ID NO: 2421
gcguuagguuccugcaaau

SEQ ID NO: 187841 - RNA, 19 nt, Artificial Sequence
  Description of Artificial Sequence: Synthetic oligonucleotide
  Antisense strand to SEQ ID NO: 187840
auuugcaggaaccuaacgc

SEQ ID NO: 187842 - RNA, 19 nt, Artificial Sequence
  Description of Artificial Sequence: Synthetic oligonucleotide
  Sense strand starting at position 2482 of SEQ ID NO: 2421
ggcguuagguuccugcaaa

SEQ ID NO: 187843 - RNA, 19 nt, Artificial Sequence
  Description of Artificial Sequence: Synthetic oligonucleotide
  Antisense strand to SEQ ID NO: 187842
uuugcaggaaccuaacgcc

SEQ ID NO: 187844 - RNA, 19 nt, Artificial Sequence
  Description of Artificial Sequence: Synthetic oligonucleotide
  Sense strand starting at position 2383 of SEQ ID NO: 2421
gugcgagacuuugcaacaa

SEQ ID NO: 187845 - RNA, 19 nt, Artificial Sequence
  Description of Artificial Sequence: Synthetic oligonucleotide
  Antisense strand to SEQ ID NO: 187844
uuguugcaaagucucgcac

SEQ ID NO: 187846 - RNA, 19 nt, Artificial Sequence
  Description of Artificial Sequence: Synthetic oligonucleotide
  Sense strand starting at position 2328 of SEQ ID NO: 2421
acaccuguauuguugcaaa

SEQ ID NO: 187847 - RNA, 19 nt, Artificial Sequence
  Description of Artificial Sequence: Synthetic oligonucleotide
  Antisense strand to SEQ ID NO: 187846
uuugcaacaauacaggugu

SEQ ID NO: 187848 - RNA, 19 nt, Artificial Sequence
  Description of Artificial Sequence: Synthetic oligonucleotide
  Sense strand starting at position 1459 of SEQ ID NO: 2421
gggauucccuuuccguaaa

SEQ ID NO: 187849 - RNA, 19 nt, Artificial Sequence
  Description of Artificial Sequence: Synthetic oligonucleotide
  Antisense strand to SEQ ID NO: 187848
uuuacggaaagggaauccc

SEQ ID NO: 187850 - RNA, 19 nt, Artificial Sequence
  Description of Artificial Sequence: Synthetic oligonucleotide
  Sense strand starting at position 1106 of SEQ ID NO: 2421
cugagaggucagugacuuc

SEQ ID NO: 187851 - RNA, 19 nt, Artificial Sequence
  Description of Artificial Sequence: Synthetic oligonucleotide
  Antisense strand to SEQ ID NO: 187850
gaagucacugaccucucag

SEQ ID NO: 187852 - RNA, 19 nt, Artificial Sequence
  Description of Artificial Sequence: Synthetic oligonucleotide
  Sense strand starting at position 588 of SEQ ID NO: 2421
gccagaucucaagaguuug

SEQ ID NO: 187853 - RNA, 19 nt, Artificial Sequence
  Description of Artificial Sequence: Synthetic oligonucleotide
  Antisense strand to SEQ ID NO: 187852
caaacucuugagaucuggc

SEQ ID NO: 187854 - RNA, 19 nt, Artificial Sequence
  Description of Artificial Sequence: Synthetic oligonucleotide
  Sense strand starting at position 575 of SEQ ID NO: 2421
uggcuuugucaaggccaga

SEQ ID NO: 187855 - RNA, 19 nt, Artificial Sequence
  Description of Artificial Sequence: Synthetic oligonucleotide
  Antisense strand to SEQ ID NO: 187854
ucuggccuugacaaagcca

SEQ ID NO: 187856 - RNA, 19 nt, Artificial Sequence
  Description of Artificial Sequence: Synthetic oligonucleotide
  Sense strand starting at position 568 of SEQ ID NO: 2421
cuccguguggcuuugucaa

SEQ ID NO: 187857 - RNA, 19 nt, Artificial Sequence
  Description of Artificial Sequence: Synthetic oligonucleotide
  Antisense strand to SEQ ID NO: 187856
uugacaaagccacacggag

SEQ ID NO: 187858 - RNA, 19 nt, Artificial Sequence
  Description of Artificial Sequence: Synthetic oligonucleotide
  Sense strand starting at position 417 of SEQ ID NO: 2421
gcauaagguaguuacagau

SEQ ID NO: 187859 - RNA, 19 nt, Artificial Sequence
  Description of Artificial Sequence: Synthetic oligonucleotide
  Antisense strand to SEQ ID NO: 187858
aucuguaacuaccuuaugc

SEQ ID NO: 187860 - RNA, 19 nt, Artificial Sequence
  Description of Artificial Sequence: Synthetic oligonucleotide
  Sense strand starting at position 416 of SEQ ID NO: 2421
ugcauaagguaguuacaga

SEQ ID NO: 187861 - RNA, 19 nt, Artificial Sequence
  Description of Artificial Sequence: Synthetic oligonucleotide
  Antisense strand to SEQ ID NO: 187860
ucuguaacuaccuuaugca

SEQ ID NO: 187862 - RNA, 19 nt, Artificial Sequence
  Description of Artificial Sequence: Synthetic oligonucleotide
  Sense strand starting at position 394 of SEQ ID NO: 2421
gcagaaauauuggccacaa

SEQ ID NO: 187863 - RNA, 19 nt, Artificial Sequence
  Description of Artificial Sequence: Synthetic oligonucleotide
  Antisense strand to SEQ ID NO: 187862
uuguggccaauauuucugc

SEQ ID NO: 187864 - RNA, 19 nt, Artificial Sequence
  Description of Artificial Sequence: Synthetic oligonucleotide
  Sense strand starting at position 385 of SEQ ID NO: 2421
ucaagcucagcagaaauau

SEQ ID NO: 187865 - RNA, 19 nt, Artificial Sequence
  Description of Artificial Sequence: Synthetic oligonucleotide
  Antisense strand to SEQ ID NO: 187864
auauuucugcugagcuuga

SEQ ID NO: 187866 - RNA, 19 nt, Artificial Sequence
  Description of Artificial Sequence: Synthetic oligonucleotide
  Sense strand starting at position 383 of SEQ ID NO: 2421
acucaagcucagcagaaau

SEQ ID NO: 187867 - RNA, 19 nt, Artificial Sequence
  Description of Artificial Sequence: Synthetic oligonucleotide
  Antisense strand to SEQ ID NO: 187866
auuucugcugagcuugagu

SEQ ID NO: 187868 - RNA, 19 nt, Artificial Sequence
  Description of Artificial Sequence: Synthetic oligonucleotide
  Sense strand starting at position 365 of SEQ ID NO: 2421
gcuaguacagucugucuga

SEQ ID NO: 187869 - RNA, 19 nt, Artificial Sequence
  Description of Artificial Sequence: Synthetic oligonucleotide
  Antisense strand to SEQ ID NO: 187868
ucagacagacuguacuagc

SEQ ID NO: 187870 - RNA, 19 nt, Artificial Sequence
  Description of Artificial Sequence: Synthetic oligonucleotide
  Sense strand starting at position 138 of SEQ ID NO: 2421
guugccuauugggagagaa

SEQ ID NO: 187871 - RNA, 19 nt, Artificial Sequence
  Description of Artificial Sequence: Synthetic oligonucleotide
  Antisense strand to SEQ ID NO: 187870
uucucucccaauaggcaac

SEQ ID NO: 187872 - RNA, 19 nt, Artificial Sequence
  Description of Artificial Sequence: Synthetic oligonucleotide
  Sense strand starting at position 135 of SEQ ID NO: 2421
ucaguugccuauugggaga

SEQ ID NO: 187873 - RNA, 19 nt, Artificial Sequence
  Description of Artificial Sequence: Synthetic oligonucleotide
  Antisense strand to SEQ ID NO: 187872
ucucccaauaggcaacuga

SEQ ID NO: 187874 - RNA, 19 nt, Artificial Sequence
  Description of Artificial Sequence: Synthetic oligonucleotide
  Sense strand starting at position 7 of SEQ ID NO: 2421
gugguuaaggauggagauu

SEQ ID NO: 187875 - RNA, 19 nt, Artificial Sequence
  Description of Artificial Sequence: Synthetic oligonucleotide
  Antisense strand to SEQ ID NO: 187874
aaucuccauccuuaaccac

SEQ ID NO: 187876 - RNA, 19 nt, Artificial Sequence
  Description of Artificial Sequence: Synthetic oligonucleotide
  Sense strand starting at position 6 of SEQ ID NO: 2421
agugguuaaggauggagau

SEQ ID NO: 187877 - RNA, 19 nt, Artificial Sequence
  Description of Artificial Sequence: Synthetic oligonucleotide
  Antisense strand to SEQ ID NO: 187876
aucuccauccuuaaccacu

SEQ ID NO: 187878 - RNA, 19 nt, Artificial Sequence
  Description of Artificial Sequence: Synthetic oligonucleotide
  Sense strand starting at position 3711 of SEQ ID NO: 2422
gggaaauucuuaguagcaa

SEQ ID NO: 187879 - RNA, 19 nt, Artificial Sequence
  Description of Artificial Sequence: Synthetic oligonucleotide
  Antisense strand to SEQ ID NO: 187878
uugcuacuaagaauuuccc

SEQ ID NO: 187880 - RNA, 19 nt, Artificial Sequence
  Description of Artificial Sequence: Synthetic oligonucleotide
  Sense strand starting at position 3701 of SEQ ID NO: 2422
ggacuagaaugggaaauuc

SEQ ID NO: 187881 - RNA, 19 nt, Artificial Sequence
  Description of Artificial Sequence: Synthetic oligonucleotide
  Antisense strand to SEQ ID NO: 187880
gaauuucccauucuagucc

SEQ ID NO: 187882 - RNA, 19 nt, Artificial Sequence
  Description of Artificial Sequence: Synthetic oligonucleotide
  Sense strand starting at position 3622 of SEQ ID NO: 2422
aggaaauggcuguauguug

SEQ ID NO: 187883 - RNA, 19 nt, Artificial Sequence
  Description of Artificial Sequence: Synthetic oligonucleotide
  Antisense strand to SEQ ID NO: 187882
caacauacagccauuuccu

SEQ ID NO: 187884 - RNA, 19 nt, Artificial Sequence
  Description of Artificial Sequence: Synthetic oligonucleotide
  Sense strand starting at position 3581 of SEQ ID NO: 2422
aggaauaugugugcuacca

SEQ ID NO: 187885 - RNA, 19 nt, Artificial Sequence
  Description of Artificial Sequence: Synthetic oligonucleotide
  Antisense strand to SEQ ID NO: 187884
ugguagcacacauauuccu

SEQ ID NO: 187886 - RNA, 19 nt, Artificial Sequence
  Description of Artificial Sequence: Synthetic oligonucleotide
  Sense strand starting at position 3514 of SEQ ID NO: 2422
gucugcucaccauaaagau

SEQ ID NO: 187887 - RNA, 19 nt, Artificial Sequence
  Description of Artificial Sequence: Synthetic oligonucleotide
  Antisense strand to SEQ ID NO: 187886
aucuuuauggugagcagac

SEQ ID NO: 187888 - RNA, 19 nt, Artificial Sequence
  Description of Artificial Sequence: Synthetic oligonucleotide
  Sense strand starting at position 3446 of SEQ ID NO: 2422
gugaaaggguaaucaaggu

SEQ ID NO: 187889 - RNA, 19 nt, Artificial Sequence
  Description of Artificial Sequence: Synthetic oligonucleotide
  Antisense strand to SEQ ID NO: 187888
accuugauuacccuuucac

SEQ ID NO: 187890 - RNA, 19 nt, Artificial Sequence
  Description of Artificial Sequence: Synthetic oligonucleotide
  Sense strand starting at position 3432 of SEQ ID NO: 2422
agccuuaaccucuggugaa

SEQ ID NO: 187891 - RNA, 19 nt, Artificial Sequence
  Description of Artificial Sequence: Synthetic oligonucleotide
  Antisense strand to SEQ ID NO: 187890
uucaccagagguuaaggcu

SEQ ID NO: 187892 - RNA, 19 nt, Artificial Sequence
  Description of Artificial Sequence: Synthetic oligonucleotide
  Sense strand starting at position 3263 of SEQ ID NO: 2422
gagauaucauucucugcug

SEQ ID NO: 187893 - RNA, 19 nt, Artificial Sequence
  Description of Artificial Sequence: Synthetic oligonucleotide
  Antisense strand to SEQ ID NO: 187892
cagcagagaaugauaucuc

SEQ ID NO: 187894 - RNA, 19 nt, Artificial Sequence
  Description of Artificial Sequence: Synthetic oligonucleotide
  Sense strand starting at position 3223 of SEQ ID NO: 2422
aagauuuacuagggaacug

SEQ ID NO: 187895 - RNA, 19 nt, Artificial Sequence
  Description of Artificial Sequence: Synthetic oligonucleotide
  Antisense strand to SEQ ID NO: 187894
caguucccuaguaaaucuu

SEQ ID NO: 187896 - RNA, 19 nt, Artificial Sequence
  Description of Artificial Sequence: Synthetic oligonucleotide
  Sense strand starting at position 2748 of SEQ ID NO: 2422
gggagugauugucuuggaa

SEQ ID NO: 187897 - RNA, 19 nt, Artificial Sequence
  Description of Artificial Sequence: Synthetic oligonucleotide
  Antisense strand to SEQ ID NO: 187896
uuccaagacaaucacuccc

SEQ ID NO: 187898 - RNA, 19 nt, Artificial Sequence
  Description of Artificial Sequence: Synthetic oligonucleotide
  Sense strand starting at position 2719 of SEQ ID NO: 2422
cucacagagcucuguacua

SEQ ID NO: 187899 - RNA, 19 nt, Artificial Sequence
  Description of Artificial Sequence: Synthetic oligonucleotide
  Antisense strand to SEQ ID NO: 187898
uaguacagagcucugugag

SEQ ID NO: 187900 - RNA, 19 nt, Artificial Sequence
  Description of Artificial Sequence: Synthetic oligonucleotide
  Sense strand starting at position 2462 of SEQ ID NO: 2422
gugcaugcugcuucugaau

SEQ ID NO: 187901 - RNA, 19 nt, Artificial Sequence
  Description of Artificial Sequence: Synthetic oligonucleotide
  Antisense strand to SEQ ID NO: 187900
auucagaagcagcaugcac

SEQ ID NO: 187902 - RNA, 19 nt, Artificial Sequence
  Description of Artificial Sequence: Synthetic oligonucleotide
  Sense strand starting at position 2405 of SEQ ID NO: 2422
acucuaggugcucaauaag

SEQ ID NO: 187903 - RNA, 19 nt, Artificial Sequence
  Description of Artificial Sequence: Synthetic oligonucleotide
  Antisense strand to SEQ ID NO: 187902
cuuauugagcaccuagagu

SEQ ID NO: 187904 - RNA, 19 nt, Artificial Sequence
  Description of Artificial Sequence: Synthetic oligonucleotide
  Sense strand starting at position 1283 of SEQ ID NO: 2422
ggauuccuuggugagaggu

SEQ ID NO: 187905 - RNA, 19 nt, Artificial Sequence
  Description of Artificial Sequence: Synthetic oligonucleotide
  Antisense strand to SEQ ID NO: 187904
accucucaccaaggaaucc

SEQ ID NO: 187906 - RNA, 19 nt, Artificial Sequence
  Description of Artificial Sequence: Synthetic oligonucleotide
  Sense strand starting at position 1280 of SEQ ID NO: 2422
caaggauuccuuggugaga

SEQ ID NO: 187907 - RNA, 19 nt, Artificial Sequence
  Description of Artificial Sequence: Synthetic oligonucleotide
  Antisense strand to SEQ ID NO: 187906
ucucaccaaggaauccuug

SEQ ID NO: 187908 - RNA, 19 nt, Artificial Sequence
  Description of Artificial Sequence: Synthetic oligonucleotide
  Sense strand starting at position 1233 of SEQ ID NO: 2422
ggcucuuuggaaugaagga

SEQ ID NO: 187909 - RNA, 19 nt, Artificial Sequence
  Description of Artificial Sequence: Synthetic oligonucleotide
  Antisense strand to SEQ ID NO: 187908
uccuucauuccaaagagcc

SEQ ID NO: 187910 - RNA, 19 nt, Artificial Sequence
  Description of Artificial Sequence: Synthetic oligonucleotide
  Sense strand starting at position 1118 of SEQ ID NO: 2422
auuacaacguguuuacaaa

SEQ ID NO: 187911 - RNA, 19 nt, Artificial Sequence
  Description of Artificial Sequence: Synthetic oligonucleotide
  Antisense strand to SEQ ID NO: 187910
uuuguaaacacguuguaau

SEQ ID NO: 187912 - RNA, 19 nt, Artificial Sequence
  Description of Artificial Sequence: Synthetic oligonucleotide
  Sense strand starting at position 1103 of SEQ ID NO: 2422
aaagcagaauaguugauua

SEQ ID NO: 187913 - RNA, 19 nt, Artificial Sequence
  Description of Artificial Sequence: Synthetic oligonucleotide
  Antisense strand to SEQ ID NO: 187912
uaaucaacuauucugcuuu

SEQ ID NO: 187914 - RNA, 19 nt, Artificial Sequence
  Description of Artificial Sequence: Synthetic oligonucleotide
  Sense strand starting at position 1054 of SEQ ID NO: 2422
guuauuacucuguagacuu

SEQ ID NO: 187915 - RNA, 19 nt, Artificial Sequence
  Description of Artificial Sequence: Synthetic oligonucleotide
  Antisense strand to SEQ ID NO: 187914
aagucuacagaguaauaac

SEQ ID NO: 187916 - RNA, 19 nt, Artificial Sequence
  Description of Artificial Sequence: Synthetic oligonucleotide
  Sense strand starting at position 1053 of SEQ ID NO: 2422
uguuauuacucuguagacu

SEQ ID NO: 187917 - RNA, 19 nt, Artificial Sequence
  Description of Artificial Sequence: Synthetic oligonucleotide
  Antisense strand to SEQ ID NO: 187916
agucuacagaguaauaaca

SEQ ID NO: 187918 - RNA, 19 nt, Artificial Sequence
  Description of Artificial Sequence: Synthetic oligonucleotide
  Sense strand starting at position 1052 of SEQ ID NO: 2422
auguuauuacucuguagac

SEQ ID NO: 187919 - RNA, 19 nt, Artificial Sequence
  Description of Artificial Sequence: Synthetic oligonucleotide
  Antisense strand to SEQ ID NO: 187918
gucuacagaguaauaacau

SEQ ID NO: 187920 - RNA, 19 nt, Artificial Sequence
  Description of Artificial Sequence: Synthetic oligonucleotide
  Sense strand starting at position 1050 of SEQ ID NO: 2422
agauguuauuacucuguag

SEQ ID NO: 187921 - RNA, 19 nt, Artificial Sequence
  Description of Artificial Sequence: Synthetic oligonucleotide
  Antisense strand to SEQ ID NO: 187920
cuacagaguaauaacaucu

SEQ ID NO: 187922 - RNA, 19 nt, Artificial Sequence
  Description of Artificial Sequence: Synthetic oligonucleotide
  Sense strand starting at position 900 of SEQ ID NO: 2422
ugauuucuguaauacacag

SEQ ID NO: 187923 - RNA, 19 nt, Artificial Sequence
  Description of Artificial Sequence: Synthetic oligonucleotide
  Antisense strand to SEQ ID NO: 187922
cuguguauuacagaaauca

SEQ ID NO: 187924 - RNA, 19 nt, Artificial Sequence
  Description of Artificial Sequence: Synthetic oligonucleotide
  Sense strand starting at position 864 of SEQ ID NO: 2422
aguguuagcacagaaauug

SEQ ID NO: 187925 - RNA, 19 nt, Artificial Sequence
  Description of Artificial Sequence: Synthetic oligonucleotide
  Antisense strand to SEQ ID NO: 187924
caauuucugugcuaacacu

SEQ ID NO: 187926 - RNA, 19 nt, Artificial Sequence
  Description of Artificial Sequence: Synthetic oligonucleotide
  Sense strand starting at position 832 of SEQ ID NO: 2422
gguuccuuauuaucuauua

SEQ ID NO: 187927 - RNA, 19 nt, Artificial Sequence
  Description of Artificial Sequence: Synthetic oligonucleotide
  Antisense strand to SEQ ID NO: 187926
uaauagauaauaaggaacc

SEQ ID NO: 187928 - RNA, 19 nt, Artificial Sequence
  Description of Artificial Sequence: Synthetic oligonucleotide
  Sense strand starting at position 826 of SEQ ID NO: 2422
auguaagguuccuuauuau

SEQ ID NO: 187929 - RNA, 19 nt, Artificial Sequence
  Description of Artificial Sequence: Synthetic oligonucleotide
  Antisense strand to SEQ ID NO: 187928
auaauaaggaaccuuacau

SEQ ID NO: 187930 - RNA, 19 nt, Artificial Sequence
  Description of Artificial Sequence: Synthetic oligonucleotide
  Sense strand starting at position 688 of SEQ ID NO: 2422
agauaagucugucuuucuc

SEQ ID NO: 187931 - RNA, 19 nt, Artificial Sequence
  Description of Artificial Sequence: Synthetic oligonucleotide
  Antisense strand to SEQ ID NO: 187930
gagaaagacagacuuaucu

SEQ ID NO: 187932 - RNA, 19 nt, Artificial Sequence
  Description of Artificial Sequence: Synthetic oligonucleotide
  Sense strand starting at position 686 of SEQ ID NO: 2422
acagauaagucugucuuuc

SEQ ID NO: 187933 - RNA, 19 nt, Artificial Sequence
  Description of Artificial Sequence: Synthetic oligonucleotide
  Antisense strand to SEQ ID NO: 187932
gaaagacagacuuaucugu

SEQ ID NO: 187934 - RNA, 19 nt, Artificial Sequence
  Description of Artificial Sequence: Synthetic oligonucleotide
  Sense strand starting at position 670 of SEQ ID NO: 2422
ugaauuccuggagguuaca

SEQ ID NO: 187935 - RNA, 19 nt, Artificial Sequence
  Description of Artificial Sequence: Synthetic oligonucleotide
  Antisense strand to SEQ ID NO: 187934
uguaaccuccaggaauuca

SEQ ID NO: 187936 - RNA, 19 nt, Artificial Sequence
  Description of Artificial Sequence: Synthetic oligonucleotide
  Sense strand starting at position 668 of SEQ ID NO: 2422
ugugaauuccuggagguua

SEQ ID NO: 187937 - RNA, 19 nt, Artificial Sequence
  Description of Artificial Sequence: Synthetic oligonucleotide
  Antisense strand to SEQ ID NO: 187936
uaaccuccaggaauucaca

SEQ ID NO: 187938 - RNA, 19 nt, Artificial Sequence
  Description of Artificial Sequence: Synthetic oligonucleotide
  Sense strand starting at position 667 of SEQ ID NO: 2422
augugaauuccuggagguu

SEQ ID NO: 187939 - RNA, 19 nt, Artificial Sequence
  Description of Artificial Sequence: Synthetic oligonucleotide
  Antisense strand to SEQ ID NO: 187938
aaccuccaggaauucacau

SEQ ID NO: 187940 - RNA, 19 nt, Artificial Sequence
  Description of Artificial Sequence: Synthetic oligonucleotide
  Sense strand starting at position 409 of SEQ ID NO: 2422
gaaauacucuagguugcaa

SEQ ID NO: 187941 - RNA, 19 nt, Artificial Sequence
  Description of Artificial Sequence: Synthetic oligonucleotide
  Antisense strand to SEQ ID NO: 187940
uugcaaccuagaguauuuc

SEQ ID NO: 187942 - RNA, 19 nt, Artificial Sequence
  Description of Artificial Sequence: Synthetic oligonucleotide
  Sense strand starting at position 408 of SEQ ID NO: 2422
ugaaauacucuagguugca

SEQ ID NO: 187943 - RNA, 19 nt, Artificial Sequence
  Description of Artificial Sequence: Synthetic oligonucleotide
  Antisense strand to SEQ ID NO: 187942
ugcaaccuagaguauuuca

SEQ ID NO: 187944 - RNA, 19 nt, Artificial Sequence
  Description of Artificial Sequence: Synthetic oligonucleotide
  Sense strand starting at position 345 of SEQ ID NO: 2422
acuguaagaaauugaguga

SEQ ID NO: 187945 - RNA, 19 nt, Artificial Sequence
  Description of Artificial Sequence: Synthetic oligonucleotide
  Antisense strand to SEQ ID NO: 187944
ucacucaauuucuuacagu

SEQ ID NO: 187946 - RNA, 19 nt, Artificial Sequence
  Description of Artificial Sequence: Synthetic oligonucleotide
  Sense strand starting at position 292 of SEQ ID NO: 2422
cugaaauguuagucccuua

SEQ ID NO: 187947 - RNA, 19 nt, Artificial Sequence
  Description of Artificial Sequence: Synthetic oligonucleotide
  Antisense strand to SEQ ID NO: 187946
uaagggacuaacauuucag

SEQ ID NO: 187948 - RNA, 19 nt, Artificial Sequence
  Description of Artificial Sequence: Synthetic oligonucleotide
  Sense strand starting at position 230 of SEQ ID NO: 2422
uuggauucuagccaagguu

SEQ ID NO: 187949 - RNA, 19 nt, Artificial Sequence
  Description of Artificial Sequence: Synthetic oligonucleotide
  Antisense strand to SEQ ID NO: 187948
aaccuuggcuagaauccaa

SEQ ID NO: 187950 - RNA, 19 nt, Artificial Sequence
  Description of Artificial Sequence: Synthetic oligonucleotide
  Sense strand starting at position 229 of SEQ ID NO: 2422
cuuggauucuagccaaggu

SEQ ID NO: 187951 - RNA, 19 nt, Artificial Sequence
  Description of Artificial Sequence: Synthetic oligonucleotide
  Antisense strand to SEQ ID NO: 187950
accuuggcuagaauccaag

SEQ ID NO: 187952 - RNA, 19 nt, Artificial Sequence
  Description of Artificial Sequence: Synthetic oligonucleotide
  Sense strand starting at position 22 of SEQ ID NO: 2422
uaguuaagugucgaaauac

SEQ ID NO: 187953 - RNA, 19 nt, Artificial Sequence
  Description of Artificial Sequence: Synthetic oligonucleotide
  Antisense strand to SEQ ID NO: 187952
guauuucgacacuuaacua

SEQ ID NO: 187954 - RNA, 19 nt, Artificial Sequence
  Description of Artificial Sequence: Synthetic oligonucleotide
  Sense strand starting at position 18 of SEQ ID NO: 2422
gaaauaguuaagugucgaa

SEQ ID NO: 187955 - RNA, 19 nt, Artificial Sequence
  Description of Artificial Sequence: Synthetic oligonucleotide
  Antisense strand to SEQ ID NO: 187954
uucgacacuuaacuauuuc

SEQ ID NO: 187956 - RNA, 19 nt, Artificial Sequence
  Description of Artificial Sequence: Synthetic oligonucleotide
  Sense strand starting at position 17 of SEQ ID NO: 2422
ugaaauaguuaagugucga

SEQ ID NO: 187957 - RNA, 19 nt, Artificial Sequence
  Description of Artificial Sequence: Synthetic oligonucleotide
  Antisense strand to SEQ ID NO: 187956
ucgacacuuaacuauuuca

SEQ ID NO: 187958 - RNA, 19 nt, Artificial Sequence
  Description of Artificial Sequence: Synthetic oligonucleotide
  Sense strand starting at position 237 of SEQ ID NO: 2423
ucacuacucuuagaaggaa

SEQ ID NO: 187959 - RNA, 19 nt, Artificial Sequence
  Description of Artificial Sequence: Synthetic oligonucleotide
  Antisense strand to SEQ ID NO: 187958
uuccuucuaagaguaguga

SEQ ID NO: 187960 - RNA, 19 nt, Artificial Sequence
  Description of Artificial Sequence: Synthetic oligonucleotide
  Sense strand starting at position 402 of SEQ ID NO: 2423
gccagaggguuuguuauuu

SEQ ID NO: 187961 - RNA, 19 nt, Artificial Sequence
  Description of Artificial Sequence: Synthetic oligonucleotide
  Antisense strand to SEQ ID NO: 187960
aaauaacaaacccucuggc

SEQ ID NO: 187962 - RNA, 19 nt, Artificial Sequence
  Description of Artificial Sequence: Synthetic oligonucleotide
  Sense strand starting at position 420 of SEQ ID NO: 2423
uaaauaaaguggucggaaa

SEQ ID NO: 187963 - RNA, 19 nt, Artificial Sequence
  Description of Artificial Sequence: Synthetic oligonucleotide
  Antisense strand to SEQ ID NO: 187962
uuuccgaccacuuuauuua

SEQ ID NO: 187964 - RNA, 19 nt, Artificial Sequence
  Description of Artificial Sequence: Synthetic oligonucleotide
  Sense strand starting at position 421 of SEQ ID NO: 2423
aaauaaaguggucggaaau

SEQ ID NO: 187965 - RNA, 19 nt, Artificial Sequence
  Description of Artificial Sequence: Synthetic oligonucleotide
  Antisense strand to SEQ ID NO: 187964
auuuccgaccacuuuauuu

SEQ ID NO: 187966 - RNA, 19 nt, Artificial Sequence
  Description of Artificial Sequence: Synthetic oligonucleotide
  Sense strand starting at position 422 of SEQ ID NO: 2423
aauaaaguggucggaaauc

SEQ ID NO: 187967 - RNA, 19 nt, Artificial Sequence
  Description of Artificial Sequence: Synthetic oligonucleotide
  Antisense strand to SEQ ID NO: 187966
gauuuccgaccacuuuauu

SEQ ID NO: 187968 - RNA, 19 nt, Artificial Sequence
  Description of Artificial Sequence: Synthetic oligonucleotide
  Sense strand starting at position 562 of SEQ ID NO: 2423
uucuguuuccuccaucuga

SEQ ID NO: 187969 - RNA, 19 nt, Artificial Sequence
  Description of Artificial Sequence: Synthetic oligonucleotide
  Antisense strand to SEQ ID NO: 187968
ucagauggaggaaacagaa

SEQ ID NO: 187970 - RNA, 19 nt, Artificial Sequence
  Description of Artificial Sequence: Synthetic oligonucleotide
  Sense strand starting at position 630 of SEQ ID NO: 2423
ccuguaguucuugguaaca

SEQ ID NO: 187971 - RNA, 19 nt, Artificial Sequence
  Description of Artificial Sequence: Synthetic oligonucleotide
  Antisense strand to SEQ ID NO: 187970
uguuaccaagaacuacagg

SEQ ID NO: 187972 - RNA, 19 nt, Artificial Sequence
  Description of Artificial Sequence: Synthetic oligonucleotide
  Sense strand starting at position 705 of SEQ ID NO: 2423
gaggucacuuccucaggga

SEQ ID NO: 187973 - RNA, 19 nt, Artificial Sequence
  Description of Artificial Sequence: Synthetic oligonucleotide
  Antisense strand to SEQ ID NO: 187972
ucccugaggaagugaccuc

SEQ ID NO: 187974 - RNA, 19 nt, Artificial Sequence
  Description of Artificial Sequence: Synthetic oligonucleotide
  Sense strand starting at position 758 of SEQ ID NO: 2423
aguauagcaucuuccagua

SEQ ID NO: 187975 - RNA, 19 nt, Artificial Sequence
  Description of Artificial Sequence: Synthetic oligonucleotide
  Antisense strand to SEQ ID NO: 187974
uacuggaagaugcuauacu

SEQ ID NO: 187976 - RNA, 19 nt, Artificial Sequence
  Description of Artificial Sequence: Synthetic oligonucleotide
  Sense strand starting at position 949 of SEQ ID NO: 2423
aggugagcccacugugauu

SEQ ID NO: 187977 - RNA, 19 nt, Artificial Sequence
  Description of Artificial Sequence: Synthetic oligonucleotide
  Antisense strand to SEQ ID NO: 187976
aaucacagugggcucaccu

SEQ ID NO: 187978 - RNA, 19 nt, Artificial Sequence
  Description of Artificial Sequence: Synthetic oligonucleotide
  Sense strand starting at position 1158 of SEQ ID NO: 2423
gcagguuccgggugauaag

SEQ ID NO: 187979 - RNA, 19 nt, Artificial Sequence
  Description of Artificial Sequence: Synthetic oligonucleotide
  Antisense strand to SEQ ID NO: 187978
cuuaucacccggaaccugc

SEQ ID NO: 187980 - RNA, 19 nt, Artificial Sequence
  Description of Artificial Sequence: Synthetic oligonucleotide
  Sense strand starting at position 1995 of SEQ ID NO: 2423
uguugcuggcgggaagaua

SEQ ID NO: 187981 - RNA, 19 nt, Artificial Sequence
  Description of Artificial Sequence: Synthetic oligonucleotide
  Antisense strand to SEQ ID NO: 187980
uaucuucccgccagcaaca

SEQ ID NO: 187982 - RNA, 19 nt, Artificial Sequence
  Description of Artificial Sequence: Synthetic oligonucleotide
  Sense strand starting at position 2269 of SEQ ID NO: 2423
ggccguugcauuugugaga

SEQ ID NO: 187983 - RNA, 19 nt, Artificial Sequence
  Description of Artificial Sequence: Synthetic oligonucleotide
  Antisense strand to SEQ ID NO: 187982
ucucacaaaugcaacggcc

SEQ ID NO: 187984 - RNA, 19 nt, Artificial Sequence
  Description of Artificial Sequence: Synthetic oligonucleotide
  Sense strand starting at position 2297 of SEQ ID NO: 2423
ggcaguauccuccaaaggu

SEQ ID NO: 187985 - RNA, 19 nt, Artificial Sequence
  Description of Artificial Sequence: Synthetic oligonucleotide
  Antisense strand to SEQ ID NO: 187984
accuuuggaggauacugcc

SEQ ID NO: 187986 - RNA, 19 nt, Artificial Sequence
  Description of Artificial Sequence: Synthetic oligonucleotide
  Sense strand starting at position 2369 of SEQ ID NO: 2423
aguuacuuccagggcaaga

SEQ ID NO: 187987 - RNA, 19 nt, Artificial Sequence
  Description of Artificial Sequence: Synthetic oligonucleotide
  Antisense strand to SEQ ID NO: 187986
ucuugcccuggaaguaacu

SEQ ID NO: 187988 - RNA, 19 nt, Artificial Sequence
  Description of Artificial Sequence: Synthetic oligonucleotide
  Sense strand starting at position 2423 of SEQ ID NO: 2423
gguccuagaagugguugaa

SEQ ID NO: 187989 - RNA, 19 nt, Artificial Sequence
  Description of Artificial Sequence: Synthetic oligonucleotide
  Antisense strand to SEQ ID NO: 187988
uucaaccacuucuaggacc

SEQ ID NO: 187990 - RNA, 19 nt, Artificial Sequence
  Description of Artificial Sequence: Synthetic oligonucleotide
  Sense strand starting at position 2426 of SEQ ID NO: 2423
ccuagaagugguugaauug

SEQ ID NO: 187991 - RNA, 19 nt, Artificial Sequence
  Description of Artificial Sequence: Synthetic oligonucleotide
  Antisense strand to SEQ ID NO: 187990
caauucaaccacuucuagg

SEQ ID NO: 187992 - RNA, 19 nt, Artificial Sequence
  Description of Artificial Sequence: Synthetic oligonucleotide
  Sense strand starting at position 2591 of SEQ ID NO: 2423
guccaugugggaggagaau

SEQ ID NO: 187993 - RNA, 19 nt, Artificial Sequence
  Description of Artificial Sequence: Synthetic oligonucleotide
  Antisense strand to SEQ ID NO: 187992
auucuccucccacauggac

SEQ ID NO: 187994 - RNA, 19 nt, Artificial Sequence
  Description of Artificial Sequence: Synthetic oligonucleotide
  Sense strand starting at position 2626 of SEQ ID NO: 2423
agugaaauguuaccuaaag

SEQ ID NO: 187995 - RNA, 19 nt, Artificial Sequence
  Description of Artificial Sequence: Synthetic oligonucleotide
  Antisense strand to SEQ ID NO: 187994
cuuuagguaacauuucacu

SEQ ID NO: 187996 - RNA, 19 nt, Artificial Sequence
  Description of Artificial Sequence: Synthetic oligonucleotide
  Sense strand starting at position 2627 of SEQ ID NO: 2423
gugaaauguuaccuaaagc

SEQ ID NO: 187997 - RNA, 19 nt, Artificial Sequence
  Description of Artificial Sequence: Synthetic oligonucleotide
  Antisense strand to SEQ ID NO: 187996
gcuuuagguaacauuucac

SEQ ID NO: 187998 - RNA, 19 nt, Artificial Sequence
  Description of Artificial Sequence: Synthetic oligonucleotide
  Sense strand starting at position 2824 of SEQ ID NO: 2423
uauugcauuugggaaaggu

SEQ ID NO: 187999 - RNA, 19 nt, Artificial Sequence
  Description of Artificial Sequence: Synthetic oligonucleotide
  Antisense strand to SEQ ID NO: 187998
accuuucccaaaugcaaua

SEQ ID NO: 188000 - RNA, 19 nt, Artificial Sequence
  Description of Artificial Sequence: Synthetic oligonucleotide
  Sense strand starting at position 2833 of SEQ ID NO: 2423
ugggaaagguuggaaauca

SEQ ID NO: 188001 - RNA, 19 nt, Artificial Sequence
  Description of Artificial Sequence: Synthetic oligonucleotide
  Antisense strand to SEQ ID NO: 188000
ugauuuccaaccuuuccca

SEQ ID NO: 188002 - RNA, 19 nt, Artificial Sequence
  Description of Artificial Sequence: Synthetic oligonucleotide
  Sense strand starting at position 2862 of SEQ ID NO: 2423
ggaagucuuguccacugga

SEQ ID NO: 188003 - RNA, 19 nt, Artificial Sequence
  Description of Artificial Sequence: Synthetic oligonucleotide
  Antisense strand to SEQ ID NO: 188002
uccaguggacaagacuucc

SEQ ID NO: 188004 - RNA, 19 nt, Artificial Sequence
  Description of Artificial Sequence: Synthetic oligonucleotide
  Sense strand starting at position 2865 of SEQ ID NO: 2423
agucuuguccacuggaaau

SEQ ID NO: 188005 - RNA, 19 nt, Artificial Sequence
  Description of Artificial Sequence: Synthetic oligonucleotide
  Antisense strand to SEQ ID NO: 188004
auuuccaguggacaagacu

SEQ ID NO: 188006 - RNA, 19 nt, Artificial Sequence
  Description of Artificial Sequence: Synthetic oligonucleotide
  Sense strand starting at position 2877 of SEQ ID NO: 2423
uggaaauaaucucugcucu

SEQ ID NO: 188007 - RNA, 19 nt, Artificial Sequence
  Description of Artificial Sequence: Synthetic oligonucleotide
  Antisense strand to SEQ ID NO: 188006
agagcagagauuauuucca

SEQ ID NO: 188008 - RNA, 19 nt, Artificial Sequence
  Description of Artificial Sequence: Synthetic oligonucleotide
  Sense strand starting at position 2878 of SEQ ID NO: 2423
ggaaauaaucucugcucuu

SEQ ID NO: 188009 - RNA, 19 nt, Artificial Sequence
  Description of Artificial Sequence: Synthetic oligonucleotide
  Antisense strand to SEQ ID NO: 188008
aagagcagagauuauuucc

SEQ ID NO: 188010 - RNA, 19 nt, Artificial Sequence
  Description of Artificial Sequence: Synthetic oligonucleotide
  Sense strand starting at position 2894 of SEQ ID NO: 2423
cuuggcuguaccugucaga

SEQ ID NO: 188011 - RNA, 19 nt, Artificial Sequence
  Description of Artificial Sequence: Synthetic oligonucleotide
  Antisense strand to SEQ ID NO: 188010
ucugacagguacagccaag

SEQ ID NO: 188012 - RNA, 19 nt, Artificial Sequence
  Description of Artificial Sequence: Synthetic oligonucleotide
  Sense strand starting at position 2907 of SEQ ID NO: 2423
gucagacccugcuugguaa

SEQ ID NO: 188013 - RNA, 19 nt, Artificial Sequence
  Description of Artificial Sequence: Synthetic oligonucleotide
  Antisense strand to SEQ ID NO: 188012
uuaccaagcagggucugac

SEQ ID NO: 188014 - RNA, 19 nt, Artificial Sequence
  Description of Artificial Sequence: Synthetic oligonucleotide
  Sense strand starting at position 2921 of SEQ ID NO: 2423
gguaauggucuugacuuua

SEQ ID NO: 188015 - RNA, 19 nt, Artificial Sequence
  Description of Artificial Sequence: Synthetic oligonucleotide
  Antisense strand to SEQ ID NO: 188014
uaaagucaagaccauuacc

SEQ ID NO: 188016 - RNA, 19 nt, Artificial Sequence
  Description of Artificial Sequence: Synthetic oligonucleotide
  Sense strand starting at position 2933 of SEQ ID NO: 2423
gacuuuagagcuugaaaga

SEQ ID NO: 188017 - RNA, 19 nt, Artificial Sequence
  Description of Artificial Sequence: Synthetic oligonucleotide
  Antisense strand to SEQ ID NO: 188016
ucuuucaagcucuaaaguc

SEQ ID NO: 188018 - RNA, 19 nt, Artificial Sequence
  Description of Artificial Sequence: Synthetic oligonucleotide
  Sense strand starting at position 3106 of SEQ ID NO: 2423
gguaaacugaagugugaag

SEQ ID NO: 188019 - RNA, 19 nt, Artificial Sequence
  Description of Artificial Sequence: Synthetic oligonucleotide
  Antisense strand to SEQ ID NO: 188018
cuucacacuucaguuuacc

SEQ ID NO: 188020 - RNA, 19 nt, Artificial Sequence
  Description of Artificial Sequence: Synthetic oligonucleotide
  Sense strand starting at position 3665 of SEQ ID NO: 2423
uaaggcugucuuuggaauu

SEQ ID NO: 188021 - RNA, 19 nt, Artificial Sequence
  Description of Artificial Sequence: Synthetic oligonucleotide
  Antisense strand to SEQ ID NO: 188020
aauuccaaagacagccuua

SEQ ID NO: 188022 - RNA, 19 nt, Artificial Sequence
  Description of Artificial Sequence: Synthetic oligonucleotide
  Sense strand starting at position 3803 of SEQ ID NO: 2423
ucaugauaaucuguguuug

SEQ ID NO: 188023 - RNA, 19 nt, Artificial Sequence
  Description of Artificial Sequence: Synthetic oligonucleotide
  Antisense strand to SEQ ID NO: 188022
caaacacagauuaucauga

SEQ ID NO: 188024 - RNA, 19 nt, Artificial Sequence
  Description of Artificial Sequence: Synthetic oligonucleotide
  Sense strand starting at position 3804 of SEQ ID NO: 2423
caugauaaucuguguuuga

SEQ ID NO: 188025 - RNA, 19 nt, Artificial Sequence
  Description of Artificial Sequence: Synthetic oligonucleotide
  Antisense strand to SEQ ID NO: 188024
ucaaacacagauuaucaug

SEQ ID NO: 188026 - RNA, 19 nt, Artificial Sequence
  Description of Artificial Sequence: Synthetic oligonucleotide
  Sense strand starting at position 3805 of SEQ ID NO: 2423
augauaaucuguguuugaa

SEQ ID NO: 188027 - RNA, 19 nt, Artificial Sequence
  Description of Artificial Sequence: Synthetic oligonucleotide
  Antisense strand to SEQ ID NO: 188026
uucaaacacagauuaucau

SEQ ID NO: 188028 - RNA, 19 nt, Artificial Sequence
  Description of Artificial Sequence: Synthetic oligonucleotide
  Sense strand starting at position 3807 of SEQ ID NO: 2423
gauaaucuguguuugaagu

SEQ ID NO: 188029 - RNA, 19 nt, Artificial Sequence
  Description of Artificial Sequence: Synthetic oligonucleotide
  Antisense strand to SEQ ID NO: 188028
acuucaaacacagauuauc

SEQ ID NO: 188030 - RNA, 19 nt, Artificial Sequence
  Description of Artificial Sequence: Synthetic oligonucleotide
  Sense strand starting at position 3808 of SEQ ID NO: 2423
auaaucuguguuugaaguu

SEQ ID NO: 188031 - RNA, 19 nt, Artificial Sequence
  Description of Artificial Sequence: Synthetic oligonucleotide
  Antisense strand to SEQ ID NO: 188030
aacuucaaacacagauuau

SEQ ID NO: 188032 - RNA, 19 nt, Artificial Sequence
  Description of Artificial Sequence: Synthetic oligonucleotide
  Sense strand starting at position 3814 of SEQ ID NO: 2423
uguguuugaaguuaacagu

SEQ ID NO: 188033 - RNA, 19 nt, Artificial Sequence
  Description of Artificial Sequence: Synthetic oligonucleotide
  Antisense strand to SEQ ID NO: 188032
acuguuaacuucaaacaca

SEQ ID NO: 188034 - RNA, 19 nt, Artificial Sequence
  Description of Artificial Sequence: Synthetic oligonucleotide
  Sense strand starting at position 3942 of SEQ ID NO: 2423
uugcauaauuugccggaua

SEQ ID NO: 188035 - RNA, 19 nt, Artificial Sequence
  Description of Artificial Sequence: Synthetic oligonucleotide
  Antisense strand to SEQ ID NO: 188034
uauccggcaaauuaugcaa

SEQ ID NO: 188036 - RNA, 19 nt, Artificial Sequence
  Description of Artificial Sequence: Synthetic oligonucleotide
  Sense strand starting at position 3944 of SEQ ID NO: 2423
gcauaauuugccggauauu

SEQ ID NO: 188037 - RNA, 19 nt, Artificial Sequence
  Description of Artificial Sequence: Synthetic oligonucleotide
  Antisense strand to SEQ ID NO: 188036
aauauccggcaaauuaugc

SEQ ID NO: 188038 - RNA, 19 nt, Artificial Sequence
  Description of Artificial Sequence: Synthetic oligonucleotide
  Sense strand starting at position 3900 of SEQ ID NO: 2424
uggacucuaugacuucuaa

SEQ ID NO: 188039 - RNA, 19 nt, Artificial Sequence
  Description of Artificial Sequence: Synthetic oligonucleotide
  Antisense strand to SEQ ID NO: 188038
uuagaagucauagagucca

SEQ ID NO: 188040 - RNA, 19 nt, Artificial Sequence
  Description of Artificial Sequence: Synthetic oligonucleotide
  Sense strand starting at position 3890 of SEQ ID NO: 2424
ugugguuuacuggacucua

SEQ ID NO: 188041 - RNA, 19 nt, Artificial Sequence
  Description of Artificial Sequence: Synthetic oligonucleotide
  Antisense strand to SEQ ID NO: 188040
uagaguccaguaaaccaca

SEQ ID NO: 188042 - RNA, 19 nt, Artificial Sequence
  Description of Artificial Sequence: Synthetic oligonucleotide
  Sense strand starting at position 3868 of SEQ ID NO: 2424
uaggguaguccagauucca

SEQ ID NO: 188043 - RNA, 19 nt, Artificial Sequence
  Description of Artificial Sequence: Synthetic oligonucleotide
  Antisense strand to SEQ ID NO: 188042
uggaaucuggacuacccua

SEQ ID NO: 188044 - RNA, 19 nt, Artificial Sequence
  Description of Artificial Sequence: Synthetic oligonucleotide
  Sense strand starting at position 3864 of SEQ ID NO: 2424
cccuuaggguaguccagau

SEQ ID NO: 188045 - RNA, 19 nt, Artificial Sequence
  Description of Artificial Sequence: Synthetic oligonucleotide
  Antisense strand to SEQ ID NO: 188044
aucuggacuacccuaaggg

SEQ ID NO: 188046 - RNA, 19 nt, Artificial Sequence
  Description of Artificial Sequence: Synthetic oligonucleotide
  Sense strand starting at position 3821 of SEQ ID NO: 2424
ucaugacacugucuuacuu

SEQ ID NO: 188047 - RNA, 19 nt, Artificial Sequence
  Description of Artificial Sequence: Synthetic oligonucleotide
  Antisense strand to SEQ ID NO: 188046
aaguaagacagugucauga

SEQ ID NO: 188048 - RNA, 19 nt, Artificial Sequence
  Description of Artificial Sequence: Synthetic oligonucleotide
  Sense strand starting at position 3818 of SEQ ID NO: 2424
ugaucaugacacugucuua

SEQ ID NO: 188049 - RNA, 19 nt, Artificial Sequence
  Description of Artificial Sequence: Synthetic oligonucleotide
  Antisense strand to SEQ ID NO: 188048
uaagacagugucaugauca

SEQ ID NO: 188050 - RNA, 19 nt, Artificial Sequence
  Description of Artificial Sequence: Synthetic oligonucleotide
  Sense strand starting at position 3610 of SEQ ID NO: 2424
ugacacgaaucuuuacaua

SEQ ID NO: 188051 - RNA, 19 nt, Artificial Sequence
  Description of Artificial Sequence: Synthetic oligonucleotide
  Antisense strand to SEQ ID NO: 188050
uauguaaagauucguguca

SEQ ID NO: 188052 - RNA, 19 nt, Artificial Sequence
  Description of Artificial Sequence: Synthetic oligonucleotide
  Sense strand starting at position 3561 of SEQ ID NO: 2424
cugacuuacuacucagguu

SEQ ID NO: 188053 - RNA, 19 nt, Artificial Sequence
  Description of Artificial Sequence: Synthetic oligonucleotide
  Antisense strand to SEQ ID NO: 188052
aaccugaguaguaagucag

SEQ ID NO: 188054 - RNA, 19 nt, Artificial Sequence
  Description of Artificial Sequence: Synthetic oligonucleotide
  Sense strand starting at position 3557 of SEQ ID NO: 2424
gguucugacuuacuacuca

SEQ ID NO: 188055 - RNA, 19 nt, Artificial Sequence
  Description of Artificial Sequence: Synthetic oligonucleotide
  Antisense strand to SEQ ID NO: 188054
ugaguaguaagucagaacc

SEQ ID NO: 188056 - RNA, 19 nt, Artificial Sequence
  Description of Artificial Sequence: Synthetic oligonucleotide
  Sense strand starting at position 3537 of SEQ ID NO: 2424
auaagcuuggccgaccaua

SEQ ID NO: 188057 - RNA, 19 nt, Artificial Sequence
  Description of Artificial Sequence: Synthetic oligonucleotide
  Antisense strand to SEQ ID NO: 188056
uauggucggccaagcuuau

SEQ ID NO: 188058 - RNA, 19 nt, Artificial Sequence
  Description of Artificial Sequence: Synthetic oligonucleotide
  Sense strand starting at position 3514 of SEQ ID NO: 2424
gugagagccaaauaguuaa

SEQ ID NO: 188059 - RNA, 19 nt, Artificial Sequence
  Description of Artificial Sequence: Synthetic oligonucleotide
  Antisense strand to SEQ ID NO: 188058
uuaacuauuuggcucucac

SEQ ID NO: 188060 - RNA, 19 nt, Artificial Sequence
  Description of Artificial Sequence: Synthetic oligonucleotide
  Sense strand starting at position 3475 of SEQ ID NO: 2424
ucaccaauugcuuagagca

SEQ ID NO: 188061 - RNA, 19 nt, Artificial Sequence
  Description of Artificial Sequence: Synthetic oligonucleotide
  Antisense strand to SEQ ID NO: 188060
ugcucuaagcaauugguga

SEQ ID NO: 188062 - RNA, 19 nt, Artificial Sequence
  Description of Artificial Sequence: Synthetic oligonucleotide
  Sense strand starting at position 3363 of SEQ ID NO: 2424
ccgucuaggccugugaguu

SEQ ID NO: 188063 - RNA, 19 nt, Artificial Sequence
  Description of Artificial Sequence: Synthetic oligonucleotide
  Antisense strand to SEQ ID NO: 188062
aacucacaggccuagacgg

SEQ ID NO: 188064 - RNA, 19 nt, Artificial Sequence
  Description of Artificial Sequence: Synthetic oligonucleotide
  Sense strand starting at position 3165 of SEQ ID NO: 2424
ugggcagucacuuagguau

SEQ ID NO: 188065 - RNA, 19 nt, Artificial Sequence
  Description of Artificial Sequence: Synthetic oligonucleotide
  Antisense strand to SEQ ID NO: 188064
auaccuaagugacugccca

SEQ ID NO: 188066 - RNA, 19 nt, Artificial Sequence
  Description of Artificial Sequence: Synthetic oligonucleotide
  Sense strand starting at position 3132 of SEQ ID NO: 2424
guaagacucgaaugugaca

SEQ ID NO: 188067 - RNA, 19 nt, Artificial Sequence
  Description of Artificial Sequence: Synthetic oligonucleotide
  Antisense strand to SEQ ID NO: 188066
ugucacauucgagucuuac

SEQ ID NO: 188068 - RNA, 19 nt, Artificial Sequence
  Description of Artificial Sequence: Synthetic oligonucleotide
  Sense strand starting at position 3109 of SEQ ID NO: 2424
gggaaaugcagucaaguag

SEQ ID NO: 188069 - RNA, 19 nt, Artificial Sequence
  Description of Artificial Sequence: Synthetic oligonucleotide
  Antisense strand to SEQ ID NO: 188068
cuacuugacugcauuuccc

SEQ ID NO: 188070 - RNA, 19 nt, Artificial Sequence
  Description of Artificial Sequence: Synthetic oligonucleotide
  Sense strand starting at position 3099 of SEQ ID NO: 2424
gugagaucucgggaaaugc

SEQ ID NO: 188071 - RNA, 19 nt, Artificial Sequence
  Description of Artificial Sequence: Synthetic oligonucleotide
  Antisense strand to SEQ ID NO: 188070
gcauuucccgagaucucac

SEQ ID NO: 188072 - RNA, 19 nt, Artificial Sequence
  Description of Artificial Sequence: Synthetic oligonucleotide
  Sense strand starting at position 3097 of SEQ ID NO: 2424
aggugagaucucgggaaau

SEQ ID NO: 188073 - RNA, 19 nt, Artificial Sequence
  Description of Artificial Sequence: Synthetic oligonucleotide
  Antisense strand to SEQ ID NO: 188072
auuucccgagaucucaccu

SEQ ID NO: 188074 - RNA, 19 nt, Artificial Sequence
  Description of Artificial Sequence: Synthetic oligonucleotide
  Sense strand starting at position 2996 of SEQ ID NO: 2424
cgguaaauacuccagagcu

SEQ ID NO: 188075 - RNA, 19 nt, Artificial Sequence
  Description of Artificial Sequence: Synthetic oligonucleotide
  Antisense strand to SEQ ID NO: 188074
agcucuggaguauuuaccg

SEQ ID NO: 188076 - RNA, 19 nt, Artificial Sequence
  Description of Artificial Sequence: Synthetic oligonucleotide
  Sense strand starting at position 2939 of SEQ ID NO: 2424
auaguucgcgagucaguuu

SEQ ID NO: 188077 - RNA, 19 nt, Artificial Sequence
  Description of Artificial Sequence: Synthetic oligonucleotide
  Antisense strand to SEQ ID NO: 188076
aaacugacucgcgaacuau

SEQ ID NO: 188078 - RNA, 19 nt, Artificial Sequence
  Description of Artificial Sequence: Synthetic oligonucleotide
  Sense strand starting at position 2938 of SEQ ID NO: 2424
aauaguucgcgagucaguu

SEQ ID NO: 188079 - RNA, 19 nt, Artificial Sequence
  Description of Artificial Sequence: Synthetic oligonucleotide
  Antisense strand to SEQ ID NO: 188078
aacugacucgcgaacuauu

SEQ ID NO: 188080 - RNA, 19 nt, Artificial Sequence
  Description of Artificial Sequence: Synthetic oligonucleotide
  Sense strand starting at position 2936 of SEQ ID NO: 2424
ggaauaguucgcgagucag

SEQ ID NO: 188081 - RNA, 19 nt, Artificial Sequence
  Description of Artificial Sequence: Synthetic oligonucleotide
  Antisense strand to SEQ ID NO: 188080
cugacucgcgaacuauucc

SEQ ID NO: 188082 - RNA, 19 nt, Artificial Sequence
  Description of Artificial Sequence: Synthetic oligonucleotide
  Sense strand starting at position 2821 of SEQ ID NO: 2424
gggauuacuauccacguuu

SEQ ID NO: 188083 - RNA, 19 nt, Artificial Sequence
  Description of Artificial Sequence: Synthetic oligonucleotide
  Antisense strand to SEQ ID NO: 188082
aaacguggauaguaauccc

SEQ ID NO: 188084 - RNA, 19 nt, Artificial Sequence
  Description of Artificial Sequence: Synthetic oligonucleotide
  Sense strand starting at position 2820 of SEQ ID NO: 2424
agggauuacuauccacguu

SEQ ID NO: 188085 - RNA, 19 nt, Artificial Sequence
  Description of Artificial Sequence: Synthetic oligonucleotide
  Antisense strand to SEQ ID NO: 188084
aacguggauaguaaucccu

SEQ ID NO: 188086 - RNA, 19 nt, Artificial Sequence
  Description of Artificial Sequence: Synthetic oligonucleotide
  Sense strand starting at position 2809 of SEQ ID NO: 2424
ccacgugauagagggauua

SEQ ID NO: 188087 - RNA, 19 nt, Artificial Sequence
  Description of Artificial Sequence: Synthetic oligonucleotide
  Antisense strand to SEQ ID NO: 188086
uaaucccucuaucacgugg

SEQ ID NO: 188088 - RNA, 19 nt, Artificial Sequence
  Description of Artificial Sequence: Synthetic oligonucleotide
  Sense strand starting at position 2519 of SEQ ID NO: 2424
cuggaauugccuuaaacgu

SEQ ID NO: 188089 - RNA, 19 nt, Artificial Sequence
  Description of Artificial Sequence: Synthetic oligonucleotide
  Antisense strand to SEQ ID NO: 188088
acguuuaaggcaauuccag

SEQ ID NO: 188090 - RNA, 19 nt, Artificial Sequence
  Description of Artificial Sequence: Synthetic oligonucleotide
  Sense strand starting at position 2507 of SEQ ID NO: 2424
agccgaggguuucuggaau

SEQ ID NO: 188091 - RNA, 19 nt, Artificial Sequence
  Description of Artificial Sequence: Synthetic oligonucleotide
  Antisense strand to SEQ ID NO: 188090
auuccagaaacccucggcu

SEQ ID NO: 188092 - RNA, 19 nt, Artificial Sequence
  Description of Artificial Sequence: Synthetic oligonucleotide
  Sense strand starting at position 2480 of SEQ ID NO: 2424
ucuuuaauggccguguagu

SEQ ID NO: 188093 - RNA, 19 nt, Artificial Sequence
  Description of Artificial Sequence: Synthetic oligonucleotide
  Antisense strand to SEQ ID NO: 188092
acuacacggccauuaaaga

SEQ ID NO: 188094 - RNA, 19 nt, Artificial Sequence
  Description of Artificial Sequence: Synthetic oligonucleotide
  Sense strand starting at position 2435 of SEQ ID NO: 2424
gucccugugaucugagaac

SEQ ID NO: 188095 - RNA, 19 nt, Artificial Sequence
  Description of Artificial Sequence: Synthetic oligonucleotide
  Antisense strand to SEQ ID NO: 188094
guucucagaucacagggac

SEQ ID NO: 188096 - RNA, 19 nt, Artificial Sequence
  Description of Artificial Sequence: Synthetic oligonucleotide
  Sense strand starting at position 2427 of SEQ ID NO: 2424
caaauacggucccugugau

SEQ ID NO: 188097 - RNA, 19 nt, Artificial Sequence
  Description of Artificial Sequence: Synthetic oligonucleotide
  Antisense strand to SEQ ID NO: 188096
aucacagggaccguauuug

SEQ ID NO: 188098 - RNA, 19 nt, Artificial Sequence
  Description of Artificial Sequence: Synthetic oligonucleotide
  Sense strand starting at position 2195 of SEQ ID NO: 2424
agaguagucggccacgaaa

SEQ ID NO: 188099 - RNA, 19 nt, Artificial Sequence
  Description of Artificial Sequence: Synthetic oligonucleotide
  Antisense strand to SEQ ID NO: 188098
uuucguggccgacuacucu

SEQ ID NO: 188100 - RNA, 19 nt, Artificial Sequence
  Description of Artificial Sequence: Synthetic oligonucleotide
  Sense strand starting at position 2076 of SEQ ID NO: 2424
gcuucuauuggcuaauauu

SEQ ID NO: 188101 - RNA, 19 nt, Artificial Sequence
  Description of Artificial Sequence: Synthetic oligonucleotide
  Antisense strand to SEQ ID NO: 188100
aauauuagccaauagaagc

SEQ ID NO: 188102 - RNA, 19 nt, Artificial Sequence
  Description of Artificial Sequence: Synthetic oligonucleotide
  Sense strand starting at position 2075 of SEQ ID NO: 2424
agcuucuauuggcuaauau

SEQ ID NO: 188103 - RNA, 19 nt, Artificial Sequence
  Description of Artificial Sequence: Synthetic oligonucleotide
  Antisense strand to SEQ ID NO: 188102
auauuagccaauagaagcu

SEQ ID NO: 188104 - RNA, 19 nt, Artificial Sequence
  Description of Artificial Sequence: Synthetic oligonucleotide
  Sense strand starting at position 982 of SEQ ID NO: 2424
aaaccuucguugcuggaaa

SEQ ID NO: 188105 - RNA, 19 nt, Artificial Sequence
  Description of Artificial Sequence: Synthetic oligonucleotide
  Antisense strand to SEQ ID NO: 188104
uuuccagcaacgaagguuu

SEQ ID NO: 188106 - RNA, 19 nt, Artificial Sequence
  Description of Artificial Sequence: Synthetic oligonucleotide
  Sense strand starting at position 923 of SEQ ID NO: 2424
agcucaccuguugaugaaa

SEQ ID NO: 188107 - RNA, 19 nt, Artificial Sequence
  Description of Artificial Sequence: Synthetic oligonucleotide
  Antisense strand to SEQ ID NO: 188106
uuucaucaacaggugagcu

SEQ ID NO: 188108 - RNA, 19 nt, Artificial Sequence
  Description of Artificial Sequence: Synthetic oligonucleotide
  Sense strand starting at position 537 of SEQ ID NO: 2424
auccgaugucaguggauca

SEQ ID NO: 188109 - RNA, 19 nt, Artificial Sequence
  Description of Artificial Sequence: Synthetic oligonucleotide
  Antisense strand to SEQ ID NO: 188108
ugauccacugacaucggau

SEQ ID NO: 188110 - RNA, 19 nt, Artificial Sequence
  Description of Artificial Sequence: Synthetic oligonucleotide
  Sense strand starting at position 531 of SEQ ID NO: 2424
auaaauauccgaugucagu

SEQ ID NO: 188111 - RNA, 19 nt, Artificial Sequence
  Description of Artificial Sequence: Synthetic oligonucleotide
  Antisense strand to SEQ ID NO: 188110
acugacaucggauauuuau

SEQ ID NO: 188112 - RNA, 19 nt, Artificial Sequence
  Description of Artificial Sequence: Synthetic oligonucleotide
  Sense strand starting at position 462 of SEQ ID NO: 2424
acaaccucucgguaaagau

SEQ ID NO: 188113 - RNA, 19 nt, Artificial Sequence
  Description of Artificial Sequence: Synthetic oligonucleotide
  Antisense strand to SEQ ID NO: 188112
aucuuuaccgagagguugu

SEQ ID NO: 188114 - RNA, 19 nt, Artificial Sequence
  Description of Artificial Sequence: Synthetic oligonucleotide
  Sense strand starting at position 461 of SEQ ID NO: 2424
uacaaccucucgguaaaga

SEQ ID NO: 188115 - RNA, 19 nt, Artificial Sequence
  Description of Artificial Sequence: Synthetic oligonucleotide
  Antisense strand to SEQ ID NO: 188114
ucuuuaccgagagguugua

SEQ ID NO: 188116 - RNA, 19 nt, Artificial Sequence
  Description of Artificial Sequence: Synthetic oligonucleotide
  Sense strand starting at position 215 of SEQ ID NO: 2424
ucaaguuaccagugacuau

SEQ ID NO: 188117 - RNA, 19 nt, Artificial Sequence
  Description of Artificial Sequence: Synthetic oligonucleotide
  Antisense strand to SEQ ID NO: 188116
auagucacugguaacuuga

SEQ ID NO: 188118 - RNA, 19 nt, Artificial Sequence
  Description of Artificial Sequence: Synthetic oligonucleotide
  Sense strand starting at position 93 of SEQ ID NO: 2425
aguaaauguuagguaaggu

SEQ ID NO: 188119 - RNA, 19 nt, Artificial Sequence
  Description of Artificial Sequence: Synthetic oligonucleotide
  Antisense strand to SEQ ID NO: 188118
accuuaccuaacauuuacu

SEQ ID NO: 188120 - RNA, 19 nt, Artificial Sequence
  Description of Artificial Sequence: Synthetic oligonucleotide
  Sense strand starting at position 516 of SEQ ID NO: 2425
cauaguuuguagguauaua

SEQ ID NO: 188121 - RNA, 19 nt, Artificial Sequence
  Description of Artificial Sequence: Synthetic oligonucleotide
  Antisense strand to SEQ ID NO: 188120
uauauaccuacaaacuaug

SEQ ID NO: 188122 - RNA, 19 nt, Artificial Sequence
  Description of Artificial Sequence: Synthetic oligonucleotide
  Sense strand starting at position 831 of SEQ ID NO: 2425
gcaggaacuguguaagcau

SEQ ID NO: 188123 - RNA, 19 nt, Artificial Sequence
  Description of Artificial Sequence: Synthetic oligonucleotide
  Antisense strand to SEQ ID NO: 188122
augcuuacacaguuccugc

SEQ ID NO: 188124 - RNA, 19 nt, Artificial Sequence
  Description of Artificial Sequence: Synthetic oligonucleotide
  Sense strand starting at position 851 of SEQ ID NO: 2425
uucuguaaucacuguacua

SEQ ID NO: 188125 - RNA, 19 nt, Artificial Sequence
  Description of Artificial Sequence: Synthetic oligonucleotide
  Antisense strand to SEQ ID NO: 188124
uaguacagugauuacagaa

SEQ ID NO: 188126 - RNA, 19 nt, Artificial Sequence
  Description of Artificial Sequence: Synthetic oligonucleotide
  Sense strand starting at position 853 of SEQ ID NO: 2425
cuguaaucacuguacuaaa

SEQ ID NO: 188127 - RNA, 19 nt, Artificial Sequence
  Description of Artificial Sequence: Synthetic oligonucleotide
  Antisense strand to SEQ ID NO: 188126
uuuaguacagugauuacag

SEQ ID NO: 188128 - RNA, 19 nt, Artificial Sequence
  Description of Artificial Sequence: Synthetic oligonucleotide
  Sense strand starting at position 873 of SEQ ID NO: 2425
uuaugauacucguuaccaa

SEQ ID NO: 188129 - RNA, 19 nt, Artificial Sequence
  Description of Artificial Sequence: Synthetic oligonucleotide
  Antisense strand to SEQ ID NO: 188128
uugguaacgaguaucauaa

SEQ ID NO: 188130 - RNA, 19 nt, Artificial Sequence
  Description of Artificial Sequence: Synthetic oligonucleotide
  Sense strand starting at position 886 of SEQ ID NO: 2425
uaccaaucugaaggguuau

SEQ ID NO: 188131 - RNA, 19 nt, Artificial Sequence
  Description of Artificial Sequence: Synthetic oligonucleotide
  Antisense strand to SEQ ID NO: 188130
auaacccuucagauuggua

SEQ ID NO: 188132 - RNA, 19 nt, Artificial Sequence
  Description of Artificial Sequence: Synthetic oligonucleotide
  Sense strand starting at position 974 of SEQ ID NO: 2425
ccaccaagauguuugaaau

SEQ ID NO: 188133 - RNA, 19 nt, Artificial Sequence
  Description of Artificial Sequence: Synthetic oligonucleotide
  Antisense strand to SEQ ID NO: 188132
auuucaaacaucuuggugg

SEQ ID NO: 188134 - RNA, 19 nt, Artificial Sequence
  Description of Artificial Sequence: Synthetic oligonucleotide
  Sense strand starting at position 1002 of SEQ ID NO: 2425
caaugugugaggcaguaua

SEQ ID NO: 188135 - RNA, 19 nt, Artificial Sequence
  Description of Artificial Sequence: Synthetic oligonucleotide
  Antisense strand to SEQ ID NO: 188134
uauacugccucacacauug

SEQ ID NO: 188136 - RNA, 19 nt, Artificial Sequence
  Description of Artificial Sequence: Synthetic oligonucleotide
  Sense strand starting at position 1209 of SEQ ID NO: 2425
aguauaaaguaucugcaaa

SEQ ID NO: 188137 - RNA, 19 nt, Artificial Sequence
  Description of Artificial Sequence: Synthetic oligonucleotide
  Antisense strand to SEQ ID NO: 188136
uuugcagauacuuuauacu

SEQ ID NO: 188138 - RNA, 19 nt, Artificial Sequence
  Description of Artificial Sequence: Synthetic oligonucleotide
  Sense strand starting at position 1385 of SEQ ID NO: 2425
aaccuuauuugguugugua

SEQ ID NO: 188139 - RNA, 19 nt, Artificial Sequence
  Description of Artificial Sequence: Synthetic oligonucleotide
  Antisense strand to SEQ ID NO: 188138
uacacaaccaaauaagguu

SEQ ID NO: 188140 - RNA, 19 nt, Artificial Sequence
  Description of Artificial Sequence: Synthetic oligonucleotide
  Sense strand starting at position 1386 of SEQ ID NO: 2425
accuuauuugguuguguau

SEQ ID NO: 188141 - RNA, 19 nt, Artificial Sequence
  Description of Artificial Sequence: Synthetic oligonucleotide
  Antisense strand to SEQ ID NO: 188140
auacacaaccaaauaaggu

SEQ ID NO: 188142 - RNA, 19 nt, Artificial Sequence
  Description of Artificial Sequence: Synthetic oligonucleotide
  Sense strand starting at position 1389 of SEQ ID NO: 2425
uuauuugguuguguaugua

SEQ ID NO: 188143 - RNA, 19 nt, Artificial Sequence
  Description of Artificial Sequence: Synthetic oligonucleotide
  Antisense strand to SEQ ID NO: 188142
uacauacacaaccaaauaa

SEQ ID NO: 188144 - RNA, 19 nt, Artificial Sequence
  Description of Artificial Sequence: Synthetic oligonucleotide
  Sense strand starting at position 1399 of SEQ ID NO: 2425
guguauguaccaggaauga

SEQ ID NO: 188145 - RNA, 19 nt, Artificial Sequence
  Description of Artificial Sequence: Synthetic oligonucleotide
  Antisense strand to SEQ ID NO: 188144
ucauuccugguacauacac

SEQ ID NO: 188146 - RNA, 19 nt, Artificial Sequence
  Description of Artificial Sequence: Synthetic oligonucleotide
  Sense strand starting at position 1418 of SEQ ID NO: 2425
aucucaacucacuguguga

SEQ ID NO: 188147 - RNA, 19 nt, Artificial Sequence
  Description of Artificial Sequence: Synthetic oligonucleotide
  Antisense strand to SEQ ID NO: 188146
ucacacagugaguugagau

SEQ ID NO: 188148 - RNA, 19 nt, Artificial Sequence
  Description of Artificial Sequence: Synthetic oligonucleotide
  Sense strand starting at position 1420 of SEQ ID NO: 2425
cucaacucacugugugaau

SEQ ID NO: 188149 - RNA, 19 nt, Artificial Sequence
  Description of Artificial Sequence: Synthetic oligonucleotide
  Antisense strand to SEQ ID NO: 188148
auucacacagugaguugag

SEQ ID NO: 188150 - RNA, 19 nt, Artificial Sequence
  Description of Artificial Sequence: Synthetic oligonucleotide
  Sense strand starting at position 1429 of SEQ ID NO: 2425
cugugugaauguuuagaga

SEQ ID NO: 188151 - RNA, 19 nt, Artificial Sequence
  Description of Artificial Sequence: Synthetic oligonucleotide
  Antisense strand to SEQ ID NO: 188150
ucucuaaacauucacacag

SEQ ID NO: 188152 - RNA, 19 nt, Artificial Sequence
  Description of Artificial Sequence: Synthetic oligonucleotide
  Sense strand starting at position 1456 of SEQ ID NO: 2425
agccuagagauguaacgau

SEQ ID NO: 188153 - RNA, 19 nt, Artificial Sequence
  Description of Artificial Sequence: Synthetic oligonucleotide
  Antisense strand to SEQ ID NO: 188152
aucguuacaucucuaggcu

SEQ ID NO: 188154 - RNA, 19 nt, Artificial Sequence
  Description of Artificial Sequence: Synthetic oligonucleotide
  Sense strand starting at position 1484 of SEQ ID NO: 2425
gaggcugagguuugaaaga

SEQ ID NO: 188155 - RNA, 19 nt, Artificial Sequence
  Description of Artificial Sequence: Synthetic oligonucleotide
  Antisense strand to SEQ ID NO: 188154
ucuuucaaaccucagccuc

SEQ ID NO: 188156 - RNA, 19 nt, Artificial Sequence
  Description of Artificial Sequence: Synthetic oligonucleotide
  Sense strand starting at position 2374 of SEQ ID NO: 2425
aguacaugaugagucaauu

SEQ ID NO: 188157 - RNA, 19 nt, Artificial Sequence
  Description of Artificial Sequence: Synthetic oligonucleotide
  Antisense strand to SEQ ID NO: 188156
aauugacucaucauguacu

SEQ ID NO: 188158 - RNA, 19 nt, Artificial Sequence
  Description of Artificial Sequence: Synthetic oligonucleotide
  Sense strand starting at position 2391 of SEQ ID NO: 2425
uuacauucugaaugaguga

SEQ ID NO: 188159 - RNA, 19 nt, Artificial Sequence
  Description of Artificial Sequence: Synthetic oligonucleotide
  Antisense strand to SEQ ID NO: 188158
ucacucauucagaauguaa

SEQ ID NO: 188160 - RNA, 19 nt, Artificial Sequence
  Description of Artificial Sequence: Synthetic oligonucleotide
  Sense strand starting at position 2398 of SEQ ID NO: 2425
cugaaugagugaucgaaag

SEQ ID NO: 188161 - RNA, 19 nt, Artificial Sequence
  Description of Artificial Sequence: Synthetic oligonucleotide
  Antisense strand to SEQ ID NO: 188160
cuuucgaucacucauucag

SEQ ID NO: 188162 - RNA, 19 nt, Artificial Sequence
  Description of Artificial Sequence: Synthetic oligonucleotide
  Sense strand starting at position 2448 of SEQ ID NO: 2425
aagugagcgcuuggaaaga

SEQ ID NO: 188163 - RNA, 19 nt, Artificial Sequence
  Description of Artificial Sequence: Synthetic oligonucleotide
  Antisense strand to SEQ ID NO: 188162
ucuuuccaagcgcucacuu

SEQ ID NO: 188164 - RNA, 19 nt, Artificial Sequence
  Description of Artificial Sequence: Synthetic oligonucleotide
  Sense strand starting at position 2519 of SEQ ID NO: 2425
augaucaggcuuuguacau

SEQ ID NO: 188165 - RNA, 19 nt, Artificial Sequence
  Description of Artificial Sequence: Synthetic oligonucleotide
  Antisense strand to SEQ ID NO: 188164
auguacaaagccugaucau

SEQ ID NO: 188166 - RNA, 19 nt, Artificial Sequence
  Description of Artificial Sequence: Synthetic oligonucleotide
  Sense strand starting at position 2642 of SEQ ID NO: 2425
gaguauguaccaggaauga

SEQ ID NO: 188167 - RNA, 19 nt, Artificial Sequence
  Description of Artificial Sequence: Synthetic oligonucleotide
  Antisense strand to SEQ ID NO: 188166
ucauuccugguacauacuc

SEQ ID NO: 188168 - RNA, 19 nt, Artificial Sequence
  Description of Artificial Sequence: Synthetic oligonucleotide
  Sense strand starting at position 2778 of SEQ ID NO: 2425
gcagauauaaccugaguga

SEQ ID NO: 188169 - RNA, 19 nt, Artificial Sequence
  Description of Artificial Sequence: Synthetic oligonucleotide
  Antisense strand to SEQ ID NO: 188168
ucacucagguuauaucugc

SEQ ID NO: 188170 - RNA, 19 nt, Artificial Sequence
  Description of Artificial Sequence: Synthetic oligonucleotide
  Sense strand starting at position 2781 of SEQ ID NO: 2425
gauauaaccugagugagcu

SEQ ID NO: 188171 - RNA, 19 nt, Artificial Sequence
  Description of Artificial Sequence: Synthetic oligonucleotide
  Antisense strand to SEQ ID NO: 188170
agcucacucagguuauauc

SEQ ID NO: 188172 - RNA, 19 nt, Artificial Sequence
  Description of Artificial Sequence: Synthetic oligonucleotide
  Sense strand starting at position 2782 of SEQ ID NO: 2425
auauaaccugagugagcuu

SEQ ID NO: 188173 - RNA, 19 nt, Artificial Sequence
  Description of Artificial Sequence: Synthetic oligonucleotide
  Antisense strand to SEQ ID NO: 188172
aagcucacucagguuauau

SEQ ID NO: 188174 - RNA, 19 nt, Artificial Sequence
  Description of Artificial Sequence: Synthetic oligonucleotide
  Sense strand starting at position 2902 of SEQ ID NO: 2425
aggugcaucccagaagugu

SEQ ID NO: 188175 - RNA, 19 nt, Artificial Sequence
  Description of Artificial Sequence: Synthetic oligonucleotide
  Antisense strand to SEQ ID NO: 188174
acacuucugggaugcaccu

SEQ ID NO: 188176 - RNA, 19 nt, Artificial Sequence
  Description of Artificial Sequence: Synthetic oligonucleotide
  Sense strand starting at position 3081 of SEQ ID NO: 2425
cgcauuugacaaugcaucu

SEQ ID NO: 188177 - RNA, 19 nt, Artificial Sequence
  Description of Artificial Sequence: Synthetic oligonucleotide
  Antisense strand to SEQ ID NO: 188176
agaugcauugucaaaugcg

SEQ ID NO: 188178 - RNA, 19 nt, Artificial Sequence
  Description of Artificial Sequence: Synthetic oligonucleotide
  Sense strand starting at position 3347 of SEQ ID NO: 2425
ugauaacacuuagaauaga

SEQ ID NO: 188179 - RNA, 19 nt, Artificial Sequence
  Description of Artificial Sequence: Synthetic oligonucleotide
  Antisense strand to SEQ ID NO: 188178
ucuauucuaaguguuauca

SEQ ID NO: 188180 - RNA, 19 nt, Artificial Sequence
  Description of Artificial Sequence: Synthetic oligonucleotide
  Sense strand starting at position 3393 of SEQ ID NO: 2425
ucugcaguugauugggaua

SEQ ID NO: 188181 - RNA, 19 nt, Artificial Sequence
  Description of Artificial Sequence: Synthetic oligonucleotide
  Antisense strand to SEQ ID NO: 188180
uaucccaaucaacugcaga

SEQ ID NO: 188182 - RNA, 19 nt, Artificial Sequence
  Description of Artificial Sequence: Synthetic oligonucleotide
  Sense strand starting at position 3398 of SEQ ID NO: 2425
aguugauugggauaacgug

SEQ ID NO: 188183 - RNA, 19 nt, Artificial Sequence
  Description of Artificial Sequence: Synthetic oligonucleotide
  Antisense strand to SEQ ID NO: 188182
cacguuaucccaaucaacu

SEQ ID NO: 188184 - RNA, 19 nt, Artificial Sequence
  Description of Artificial Sequence: Synthetic oligonucleotide
  Sense strand starting at position 3425 of SEQ ID NO: 2425
agauaaggugcugaguuau

SEQ ID NO: 188185 - RNA, 19 nt, Artificial Sequence
  Description of Artificial Sequence: Synthetic oligonucleotide
  Antisense strand to SEQ ID NO: 188184
auaacucagcaccuuaucu

SEQ ID NO: 188186 - RNA, 19 nt, Artificial Sequence
  Description of Artificial Sequence: Synthetic oligonucleotide
  Sense strand starting at position 3511 of SEQ ID NO: 2425
uguucuuaacuccauugga

SEQ ID NO: 188187 - RNA, 19 nt, Artificial Sequence
  Description of Artificial Sequence: Synthetic oligonucleotide
  Antisense strand to SEQ ID NO: 188186
uccaauggaguuaagaaca

SEQ ID NO: 188188 - RNA, 19 nt, Artificial Sequence
  Description of Artificial Sequence: Synthetic oligonucleotide
  Sense strand starting at position 3631 of SEQ ID NO: 2425
cuucuauagccuugagaaa

SEQ ID NO: 188189 - RNA, 19 nt, Artificial Sequence
  Description of Artificial Sequence: Synthetic oligonucleotide
  Antisense strand to SEQ ID NO: 188188
uuucucaaggcuauagaag

SEQ ID NO: 188190 - RNA, 19 nt, Artificial Sequence
  Description of Artificial Sequence: Synthetic oligonucleotide
  Sense strand starting at position 3727 of SEQ ID NO: 2425
guaggucuccuccaucaaa

SEQ ID NO: 188191 - RNA, 19 nt, Artificial Sequence
  Description of Artificial Sequence: Synthetic oligonucleotide
  Antisense strand to SEQ ID NO: 188190
uuugauggaggagaccuac

SEQ ID NO: 188192 - RNA, 19 nt, Artificial Sequence
  Description of Artificial Sequence: Synthetic oligonucleotide
  Sense strand starting at position 3790 of SEQ ID NO: 2425
ugaggauauuuggguagga

SEQ ID NO: 188193 - RNA, 19 nt, Artificial Sequence
  Description of Artificial Sequence: Synthetic oligonucleotide
  Antisense strand to SEQ ID NO: 188192
uccuacccaaauauccuca

SEQ ID NO: 188194 - RNA, 19 nt, Artificial Sequence
  Description of Artificial Sequence: Synthetic oligonucleotide
  Sense strand starting at position 3866 of SEQ ID NO: 2425
gguggcuguggcagaagua

SEQ ID NO: 188195 - RNA, 19 nt, Artificial Sequence
  Description of Artificial Sequence: Synthetic oligonucleotide
  Antisense strand to SEQ ID NO: 188194
uacuucugccacagccacc

SEQ ID NO: 188196 - RNA, 19 nt, Artificial Sequence
  Description of Artificial Sequence: Synthetic oligonucleotide
  Sense strand starting at position 3951 of SEQ ID NO: 2425
acaacauugcuuuggacua

SEQ ID NO: 188197 - RNA, 19 nt, Artificial Sequence
  Description of Artificial Sequence: Synthetic oligonucleotide
  Antisense strand to SEQ ID NO: 188196
uaguccaaagcaauguugu

SEQ ID NO: 188198 - RNA, 19 nt, Artificial Sequence
  Description of Artificial Sequence: Synthetic oligonucleotide
  Sense strand starting at position 44 of SEQ ID NO: 2426
caaacaucgcgagaaguug

SEQ ID NO: 188199 - RNA, 19 nt, Artificial Sequence
  Description of Artificial Sequence: Synthetic oligonucleotide
  Antisense strand to SEQ ID NO: 188198
caacuucucgcgauguuug

SEQ ID NO: 188200 - RNA, 19 nt, Artificial Sequence
  Description of Artificial Sequence: Synthetic oligonucleotide
  Sense strand starting at position 205 of SEQ ID NO: 2426
ggucuugcuaccuauagag

SEQ ID NO: 188201 - RNA, 19 nt, Artificial Sequence
  Description of Artificial Sequence: Synthetic oligonucleotide
  Antisense strand to SEQ ID NO: 188200
cucuauagguagcaagacc

SEQ ID NO: 188202 - RNA, 19 nt, Artificial Sequence
  Description of Artificial Sequence: Synthetic oligonucleotide
  Sense strand starting at position 282 of SEQ ID NO: 2426
ggaguuccugaaugaaggu

SEQ ID NO: 188203 - RNA, 19 nt, Artificial Sequence
  Description of Artificial Sequence: Synthetic oligonucleotide
  Antisense strand to SEQ ID NO: 188202
accuucauucaggaacucc

SEQ ID NO: 188204 - RNA, 19 nt, Artificial Sequence
  Description of Artificial Sequence: Synthetic oligonucleotide
  Sense strand starting at position 423 of SEQ ID NO: 2426
aggaauggucagugaguca

SEQ ID NO: 188205 - RNA, 19 nt, Artificial Sequence
  Description of Artificial Sequence: Synthetic oligonucleotide
  Antisense strand to SEQ ID NO: 188204
ugacucacugaccauuccu

SEQ ID NO: 188206 - RNA, 19 nt, Artificial Sequence
  Description of Artificial Sequence: Synthetic oligonucleotide
  Sense strand starting at position 461 of SEQ ID NO: 2426
ucacacuugugacuagacu

SEQ ID NO: 188207 - RNA, 19 nt, Artificial Sequence
  Description of Artificial Sequence: Synthetic oligonucleotide
  Antisense strand to SEQ ID NO: 188206
agucuagucacaaguguga

SEQ ID NO: 188208 - RNA, 19 nt, Artificial Sequence
  Description of Artificial Sequence: Synthetic oligonucleotide
  Sense strand starting at position 687 of SEQ ID NO: 2426
aguuccugggcauacaaau

SEQ ID NO: 188209 - RNA, 19 nt, Artificial Sequence
  Description of Artificial Sequence: Synthetic oligonucleotide
  Antisense strand to SEQ ID NO: 188208
auuuguaugcccaggaacu

SEQ ID NO: 188210 - RNA, 19 nt, Artificial Sequence
  Description of Artificial Sequence: Synthetic oligonucleotide
  Sense strand starting at position 804 of SEQ ID NO: 2426
gugauaaugcuagauuauc

SEQ ID NO: 188211 - RNA, 19 nt, Artificial Sequence
  Description of Artificial Sequence: Synthetic oligonucleotide
  Antisense strand to SEQ ID NO: 188210
gauaaucuagcauuaucac

SEQ ID NO: 188212 - RNA, 19 nt, Artificial Sequence
  Description of Artificial Sequence: Synthetic oligonucleotide
  Sense strand starting at position 813 of SEQ ID NO: 2426
cuagauuaucuguaccuuu

SEQ ID NO: 188213 - RNA, 19 nt, Artificial Sequence
  Description of Artificial Sequence: Synthetic oligonucleotide
  Antisense strand to SEQ ID NO: 188212
aaagguacagauaaucuag

SEQ ID NO: 188214 - RNA, 19 nt, Artificial Sequence
  Description of Artificial Sequence: Synthetic oligonucleotide
  Sense strand starting at position 886 of SEQ ID NO: 2426
acaaauacuggcugaauga

SEQ ID NO: 188215 - RNA, 19 nt, Artificial Sequence
  Description of Artificial Sequence: Synthetic oligonucleotide
  Antisense strand to SEQ ID NO: 188214
ucauucagccaguauuugu

SEQ ID NO: 188216 - RNA, 19 nt, Artificial Sequence
  Description of Artificial Sequence: Synthetic oligonucleotide
  Sense strand starting at position 976 of SEQ ID NO: 2426
ggagauaacuguuugaacu

SEQ ID NO: 188217 - RNA, 19 nt, Artificial Sequence
  Description of Artificial Sequence: Synthetic oligonucleotide
  Antisense strand to SEQ ID NO: 188216
aguucaaacaguuaucucc

SEQ ID NO: 188218 - RNA, 19 nt, Artificial Sequence
  Description of Artificial Sequence: Synthetic oligonucleotide
  Sense strand starting at position 977 of SEQ ID NO: 2426
gagauaacuguuugaacuu

SEQ ID NO: 188219 - RNA, 19 nt, Artificial Sequence
  Description of Artificial Sequence: Synthetic oligonucleotide
  Antisense strand to SEQ ID NO: 188218
aaguucaaacaguuaucuc

SEQ ID NO: 188220 - RNA, 19 nt, Artificial Sequence
  Description of Artificial Sequence: Synthetic oligonucleotide
  Sense strand starting at position 1321 of SEQ ID NO: 2426
acgacugcaacggaugaua

SEQ ID NO: 188221 - RNA, 19 nt, Artificial Sequence
  Description of Artificial Sequence: Synthetic oligonucleotide
  Antisense strand to SEQ ID NO: 188220
uaucauccguugcagucgu

SEQ ID NO: 188222 - RNA, 19 nt, Artificial Sequence
  Description of Artificial Sequence: Synthetic oligonucleotide
  Sense strand starting at position 1333 of SEQ ID NO: 2426
gaugauacagccuggguua

SEQ ID NO: 188223 - RNA, 19 nt, Artificial Sequence
  Description of Artificial Sequence: Synthetic oligonucleotide
  Antisense strand to SEQ ID NO: 188222
uaacccaggcuguaucauc

SEQ ID NO: 188224 - RNA, 19 nt, Artificial Sequence
  Description of Artificial Sequence: Synthetic oligonucleotide
  Sense strand starting at position 1368 of SEQ ID NO: 2426
gaagguaggagugguuaga

SEQ ID NO: 188225 - RNA, 19 nt, Artificial Sequence
  Description of Artificial Sequence: Synthetic oligonucleotide
  Antisense strand to SEQ ID NO: 188224
ucuaaccacuccuaccuuc

SEQ ID NO: 188226 - RNA, 19 nt, Artificial Sequence
  Description of Artificial Sequence: Synthetic oligonucleotide
  Sense strand starting at position 1371 of SEQ ID NO: 2426
gguaggagugguuagaagu

SEQ ID NO: 188227 - RNA, 19 nt, Artificial Sequence
  Description of Artificial Sequence: Synthetic oligonucleotide
  Antisense strand to SEQ ID NO: 188226
acuucuaaccacuccuacc

SEQ ID NO: 188228 - RNA, 19 nt, Artificial Sequence
  Description of Artificial Sequence: Synthetic oligonucleotide
  Sense strand starting at position 1752 of SEQ ID NO: 2426
caacgaugagagugguuga

SEQ ID NO: 188229 - RNA, 19 nt, Artificial Sequence
  Description of Artificial Sequence: Synthetic oligonucleotide
  Antisense strand to SEQ ID NO: 188228
ucaaccacucucaucguug

SEQ ID NO: 188230 - RNA, 19 nt, Artificial Sequence
  Description of Artificial Sequence: Synthetic oligonucleotide
  Sense strand starting at position 1753 of SEQ ID NO: 2426
aacgaugagagugguugau

SEQ ID NO: 188231 - RNA, 19 nt, Artificial Sequence
  Description of Artificial Sequence: Synthetic oligonucleotide
  Antisense strand to SEQ ID NO: 188230
aucaaccacucucaucguu

SEQ ID NO: 188232 - RNA, 19 nt, Artificial Sequence
  Description of Artificial Sequence: Synthetic oligonucleotide
  Sense strand starting at position 1922 of SEQ ID NO: 2426
caggaaugagagcguuaau

SEQ ID NO: 188233 - RNA, 19 nt, Artificial Sequence
  Description of Artificial Sequence: Synthetic oligonucleotide
  Antisense strand to SEQ ID NO: 188232
auuaacgcucucauuccug

SEQ ID NO: 188234 - RNA, 19 nt, Artificial Sequence
  Description of Artificial Sequence: Synthetic oligonucleotide
  Sense strand starting at position 1925 of SEQ ID NO: 2426
gaaugagagcguuaaucuu

SEQ ID NO: 188235 - RNA, 19 nt, Artificial Sequence
  Description of Artificial Sequence: Synthetic oligonucleotide
  Antisense strand to SEQ ID NO: 188234
aagauuaacgcucucauuc

SEQ ID NO: 188236 - RNA, 19 nt, Artificial Sequence
  Description of Artificial Sequence: Synthetic oligonucleotide
  Sense strand starting at position 2201 of SEQ ID NO: 2426
gcccgauugguggaugauu

SEQ ID NO: 188237 - RNA, 19 nt, Artificial Sequence
  Description of Artificial Sequence: Synthetic oligonucleotide
  Antisense strand to SEQ ID NO: 188236
aaucauccaccaaucgggc

SEQ ID NO: 188238 - RNA, 19 nt, Artificial Sequence
  Description of Artificial Sequence: Synthetic oligonucleotide
  Sense strand starting at position 2212 of SEQ ID NO: 2426
ggaugauucucuccaggug

SEQ ID NO: 188239 - RNA, 19 nt, Artificial Sequence
  Description of Artificial Sequence: Synthetic oligonucleotide
  Antisense strand to SEQ ID NO: 188238
caccuggagagaaucaucc

SEQ ID NO: 188240 - RNA, 19 nt, Artificial Sequence
  Description of Artificial Sequence: Synthetic oligonucleotide
  Sense strand starting at position 2268 of SEQ ID NO: 2426
acaugauuugccggcgacu

SEQ ID NO: 188241 - RNA, 19 nt, Artificial Sequence
  Description of Artificial Sequence: Synthetic oligonucleotide
  Antisense strand to SEQ ID NO: 188240
agucgccggcaaaucaugu

SEQ ID NO: 188242 - RNA, 19 nt, Artificial Sequence
  Description of Artificial Sequence: Synthetic oligonucleotide
  Sense strand starting at position 2545 of SEQ ID NO: 2426
ggauuuguguggucaguaa

SEQ ID NO: 188243 - RNA, 19 nt, Artificial Sequence
  Description of Artificial Sequence: Synthetic oligonucleotide
  Antisense strand to SEQ ID NO: 188242
uuacugaccacacaaaucc

SEQ ID NO: 188244 - RNA, 19 nt, Artificial Sequence
  Description of Artificial Sequence: Synthetic oligonucleotide
  Sense strand starting at position 2549 of SEQ ID NO: 2426
uuguguggucaguaaagga

SEQ ID NO: 188245 - RNA, 19 nt, Artificial Sequence
  Description of Artificial Sequence: Synthetic oligonucleotide
  Antisense strand to SEQ ID NO: 188244
uccuuuacugaccacacaa

SEQ ID NO: 188246 - RNA, 19 nt, Artificial Sequence
  Description of Artificial Sequence: Synthetic oligonucleotide
  Sense strand starting at position 2558 of SEQ ID NO: 2426
caguaaaggaaucguguaa

SEQ ID NO: 188247 - RNA, 19 nt, Artificial Sequence
  Description of Artificial Sequence: Synthetic oligonucleotide
  Antisense strand to SEQ ID NO: 188246
uuacacgauuccuuuacug

SEQ ID NO: 188248 - RNA, 19 nt, Artificial Sequence
  Description of Artificial Sequence: Synthetic oligonucleotide
  Sense strand starting at position 2562 of SEQ ID NO: 2426
aaaggaaucguguaaggcu

SEQ ID NO: 188249 - RNA, 19 nt, Artificial Sequence
  Description of Artificial Sequence: Synthetic oligonucleotide
  Antisense strand to SEQ ID NO: 188248
agccuuacacgauuccuuu

SEQ ID NO: 188250 - RNA, 19 nt, Artificial Sequence
  Description of Artificial Sequence: Synthetic oligonucleotide
  Sense strand starting at position 2780 of SEQ ID NO: 2426
agggcuugagaaugcacua

SEQ ID NO: 188251 - RNA, 19 nt, Artificial Sequence
  Description of Artificial Sequence: Synthetic oligonucleotide
  Antisense strand to SEQ ID NO: 188250
uagugcauucucaagcccu

SEQ ID NO: 188252 - RNA, 19 nt, Artificial Sequence
  Description of Artificial Sequence: Synthetic oligonucleotide
  Sense strand starting at position 2855 of SEQ ID NO: 2426
cagggaauauguucgagau

SEQ ID NO: 188253 - RNA, 19 nt, Artificial Sequence
  Description of Artificial Sequence: Synthetic oligonucleotide
  Antisense strand to SEQ ID NO: 188252
aucucgaacauauucccug

SEQ ID NO: 188254 - RNA, 19 nt, Artificial Sequence
  Description of Artificial Sequence: Synthetic oligonucleotide
  Sense strand starting at position 2856 of SEQ ID NO: 2426
agggaauauguucgagauu

SEQ ID NO: 188255 - RNA, 19 nt, Artificial Sequence
  Description of Artificial Sequence: Synthetic oligonucleotide
  Antisense strand to SEQ ID NO: 188254
aaucucgaacauauucccu

SEQ ID NO: 188256 - RNA, 19 nt, Artificial Sequence
  Description of Artificial Sequence: Synthetic oligonucleotide
  Sense strand starting at position 3239 of SEQ ID NO: 2426
gaguccuaccguuagauug

SEQ ID NO: 188257 - RNA, 19 nt, Artificial Sequence
  Description of Artificial Sequence: Synthetic oligonucleotide
  Antisense strand to SEQ ID NO: 188256
caaucuaacgguaggacuc

SEQ ID NO: 188258 - RNA, 19 nt, Artificial Sequence
  Description of Artificial Sequence: Synthetic oligonucleotide
  Sense strand starting at position 3277 of SEQ ID NO: 2426
guacuucgucuauacauaa

SEQ ID NO: 188259 - RNA, 19 nt, Artificial Sequence
  Description of Artificial Sequence: Synthetic oligonucleotide
  Antisense strand to SEQ ID NO: 188258
uuauguauagacgaaguac

SEQ ID NO: 188260 - RNA, 19 nt, Artificial Sequence
  Description of Artificial Sequence: Synthetic oligonucleotide
  Sense strand starting at position 3450 of SEQ ID NO: 2426
acaagauuauuguuaggac

SEQ ID NO: 188261 - RNA, 19 nt, Artificial Sequence
  Description of Artificial Sequence: Synthetic oligonucleotide
  Antisense strand to SEQ ID NO: 188260
guccuaacaauaaucuugu

SEQ ID NO: 188262 - RNA, 19 nt, Artificial Sequence
  Description of Artificial Sequence: Synthetic oligonucleotide
  Sense strand starting at position 3473 of SEQ ID NO: 2426
gaagauaacgucuguaaau

SEQ ID NO: 188263 - RNA, 19 nt, Artificial Sequence
  Description of Artificial Sequence: Synthetic oligonucleotide
  Antisense strand to SEQ ID NO: 188262
auuuacagacguuaucuuc

SEQ ID NO: 188264 - RNA, 19 nt, Artificial Sequence
  Description of Artificial Sequence: Synthetic oligonucleotide
  Sense strand starting at position 3474 of SEQ ID NO: 2426
aagauaacgucuguaaaug

SEQ ID NO: 188265 - RNA, 19 nt, Artificial Sequence
  Description of Artificial Sequence: Synthetic oligonucleotide
  Antisense strand to SEQ ID NO: 188264
cauuuacagacguuaucuu

SEQ ID NO: 188266 - RNA, 19 nt, Artificial Sequence
  Description of Artificial Sequence: Synthetic oligonucleotide
  Sense strand starting at position 3475 of SEQ ID NO: 2426
agauaacgucuguaaaugu

SEQ ID NO: 188267 - RNA, 19 nt, Artificial Sequence
  Description of Artificial Sequence: Synthetic oligonucleotide
  Antisense strand to SEQ ID NO: 188266
acauuuacagacguuaucu

SEQ ID NO: 188268 - RNA, 19 nt, Artificial Sequence
  Description of Artificial Sequence: Synthetic oligonucleotide
  Sense strand starting at position 3573 of SEQ ID NO: 2426
agcugcuaacugggagaaa

SEQ ID NO: 188269 - RNA, 19 nt, Artificial Sequence
  Description of Artificial Sequence: Synthetic oligonucleotide
  Antisense strand to SEQ ID NO: 188268
uuucucccaguuagcagcu

SEQ ID NO: 188270 - RNA, 19 nt, Artificial Sequence
  Description of Artificial Sequence: Synthetic oligonucleotide
  Sense strand starting at position 3944 of SEQ ID NO: 2426
augcaaagucuccagggua

SEQ ID NO: 188271 - RNA, 19 nt, Artificial Sequence
  Description of Artificial Sequence: Synthetic oligonucleotide
  Antisense strand to SEQ ID NO: 188270
uacccuggagacuuugcau

SEQ ID NO: 188272 - RNA, 19 nt, Artificial Sequence
  Description of Artificial Sequence: Synthetic oligonucleotide
  Sense strand starting at position 3947 of SEQ ID NO: 2426
caaagucuccaggguagaa

SEQ ID NO: 188273 - RNA, 19 nt, Artificial Sequence
  Description of Artificial Sequence: Synthetic oligonucleotide
  Antisense strand to SEQ ID NO: 188272
uucuacccuggagacuuug

SEQ ID NO: 188274 - RNA, 19 nt, Artificial Sequence
  Description of Artificial Sequence: Synthetic oligonucleotide
  Sense strand starting at position 3980 of SEQ ID NO: 2426
caaguagacuuagugaaau

SEQ ID NO: 188275 - RNA, 19 nt, Artificial Sequence
  Description of Artificial Sequence: Synthetic oligonucleotide
  Antisense strand to SEQ ID NO: 188274
auuucacuaagucuacuug

SEQ ID NO: 188276 - RNA, 19 nt, Artificial Sequence
  Description of Artificial Sequence: Synthetic oligonucleotide
  Sense strand starting at position 3982 of SEQ ID NO: 2426
aguagacuuagugaaaugu

SEQ ID NO: 188277 - RNA, 19 nt, Artificial Sequence
  Description of Artificial Sequence: Synthetic oligonucleotide
  Antisense strand to SEQ ID NO: 188276
acauuucacuaagucuacu

SEQ ID NO: 188278 - RNA, 19 nt, Artificial Sequence
  Description of Artificial Sequence: Synthetic oligonucleotide
  Sense strand starting at position 44 of SEQ ID NO: 2427
agcgguugacaucaguaaa

SEQ ID NO: 188279 - RNA, 19 nt, Artificial Sequence
  Description of Artificial Sequence: Synthetic oligonucleotide
  Antisense strand to SEQ ID NO: 188278
uuuacugaugucaaccgcu

SEQ ID NO: 188280 - RNA, 19 nt, Artificial Sequence
  Description of Artificial Sequence: Synthetic oligonucleotide
  Sense strand starting at position 98 of SEQ ID NO: 2427
gugcuuguacaagaacaau

SEQ ID NO: 188281 - RNA, 19 nt, Artificial Sequence
  Description of Artificial Sequence: Synthetic oligonucleotide
  Antisense strand to SEQ ID NO: 188280
auuguucuuguacaagcac

SEQ ID NO: 188282 - RNA, 19 nt, Artificial Sequence
  Description of Artificial Sequence: Synthetic oligonucleotide
  Sense strand starting at position 188 of SEQ ID NO: 2427
aguggaugccaucauaaau

SEQ ID NO: 188283 - RNA, 19 nt, Artificial Sequence
  Description of Artificial Sequence: Synthetic oligonucleotide
  Antisense strand to SEQ ID NO: 188282
auuuaugauggcauccacu

SEQ ID NO: 188284 - RNA, 19 nt, Artificial Sequence
  Description of Artificial Sequence: Synthetic oligonucleotide
  Sense strand starting at position 264 of SEQ ID NO: 2427
cuguguauccacuacacau

SEQ ID NO: 188285 - RNA, 19 nt, Artificial Sequence
  Description of Artificial Sequence: Synthetic oligonucleotide
  Antisense strand to SEQ ID NO: 188284
auguguaguggauacacag

SEQ ID NO: 188286 - RNA, 19 nt, Artificial Sequence
  Description of Artificial Sequence: Synthetic oligonucleotide
  Sense strand starting at position 266 of SEQ ID NO: 2427
guguauccacuacacauau

SEQ ID NO: 188287 - RNA, 19 nt, Artificial Sequence
  Description of Artificial Sequence: Synthetic oligonucleotide
  Antisense strand to SEQ ID NO: 188286
auauguguaguggauacac

SEQ ID NO: 188288 - RNA, 19 nt, Artificial Sequence
  Description of Artificial Sequence: Synthetic oligonucleotide
  Sense strand starting at position 418 of SEQ ID NO: 2427
gcuacaauuugugcuauga

SEQ ID NO: 188289 - RNA, 19 nt, Artificial Sequence
  Description of Artificial Sequence: Synthetic oligonucleotide
  Antisense strand to SEQ ID NO: 188288
ucauagcacaaauuguagc

SEQ ID NO: 188290 - RNA, 19 nt, Artificial Sequence
  Description of Artificial Sequence: Synthetic oligonucleotide
  Sense strand starting at position 428 of SEQ ID NO: 2427
gugcuaugaggcgucucau

SEQ ID NO: 188291 - RNA, 19 nt, Artificial Sequence
  Description of Artificial Sequence: Synthetic oligonucleotide
  Antisense strand to SEQ ID NO: 188290
augagacgccucauagcac

SEQ ID NO: 188292 - RNA, 19 nt, Artificial Sequence
  Description of Artificial Sequence: Synthetic oligonucleotide
  Sense strand starting at position 552 of SEQ ID NO: 2427
caaaguuucccugacguaa

SEQ ID NO: 188293 - RNA, 19 nt, Artificial Sequence
  Description of Artificial Sequence: Synthetic oligonucleotide
  Antisense strand to SEQ ID NO: 188292
uuacgucagggaaacuuug

SEQ ID NO: 188294 - RNA, 19 nt, Artificial Sequence
  Description of Artificial Sequence: Synthetic oligonucleotide
  Sense strand starting at position 784 of SEQ ID NO: 2427
guaaguuaccaguaagaau

SEQ ID NO: 188295 - RNA, 19 nt, Artificial Sequence
  Description of Artificial Sequence: Synthetic oligonucleotide
  Antisense strand to SEQ ID NO: 188294
auucuuacugguaacuuac

SEQ ID NO: 188296 - RNA, 19 nt, Artificial Sequence
  Description of Artificial Sequence: Synthetic oligonucleotide
  Sense strand starting at position 995 of SEQ ID NO: 2427
ucuccuucuccggaaacuu

SEQ ID NO: 188297 - RNA, 19 nt, Artificial Sequence
  Description of Artificial Sequence: Synthetic oligonucleotide
  Antisense strand to SEQ ID NO: 188296
aaguuuccggagaaggaga

SEQ ID NO: 188298 - RNA, 19 nt, Artificial Sequence
  Description of Artificial Sequence: Synthetic oligonucleotide
  Sense strand starting at position 1004 of SEQ ID NO: 2427
ccggaaacuuaucuacucu

SEQ ID NO: 188299 - RNA, 19 nt, Artificial Sequence
  Description of Artificial Sequence: Synthetic oligonucleotide
  Antisense strand to SEQ ID NO: 188298
agaguagauaaguuuccgg

SEQ ID NO: 188300 - RNA, 19 nt, Artificial Sequence
  Description of Artificial Sequence: Synthetic oligonucleotide
  Sense strand starting at position 1012 of SEQ ID NO: 2427
uuaucuacucuagaguguu

SEQ ID NO: 188301 - RNA, 19 nt, Artificial Sequence
  Description of Artificial Sequence: Synthetic oligonucleotide
  Antisense strand to SEQ ID NO: 188300
aacacucuagaguagauaa

SEQ ID NO: 188302 - RNA, 19 nt, Artificial Sequence
  Description of Artificial Sequence: Synthetic oligonucleotide
  Sense strand starting at position 1018 of SEQ ID NO: 2427
acucuagaguguuuacaac

SEQ ID NO: 188303 - RNA, 19 nt, Artificial Sequence
  Description of Artificial Sequence: Synthetic oligonucleotide
  Antisense strand to SEQ ID NO: 188302
guuguaaacacucuagagu

SEQ ID NO: 188304 - RNA, 19 nt, Artificial Sequence
  Description of Artificial Sequence: Synthetic oligonucleotide
  Sense strand starting at position 1246 of SEQ ID NO: 2427
ugagaucucaucggugaua

SEQ ID NO: 188305 - RNA, 19 nt, Artificial Sequence
  Description of Artificial Sequence: Synthetic oligonucleotide
  Antisense strand to SEQ ID NO: 188304
uaucaccgaugagaucuca

SEQ ID NO: 188306 - RNA, 19 nt, Artificial Sequence
  Description of Artificial Sequence: Synthetic oligonucleotide
  Sense strand starting at position 1247 of SEQ ID NO: 2427
gagaucucaucggugauau

SEQ ID NO: 188307 - RNA, 19 nt, Artificial Sequence
  Description of Artificial Sequence: Synthetic oligonucleotide
  Antisense strand to SEQ ID NO: 188306
auaucaccgaugagaucuc

SEQ ID NO: 188308 - RNA, 19 nt, Artificial Sequence
  Description of Artificial Sequence: Synthetic oligonucleotide
  Sense strand starting at position 1248 of SEQ ID NO: 2427
agaucucaucggugauaua

SEQ ID NO: 188309 - RNA, 19 nt, Artificial Sequence
  Description of Artificial Sequence: Synthetic oligonucleotide
  Antisense strand to SEQ ID NO: 188308
uauaucaccgaugagaucu

SEQ ID NO: 188310 - RNA, 19 nt, Artificial Sequence
  Description of Artificial Sequence: Synthetic oligonucleotide
  Sense strand starting at position 1249 of SEQ ID NO: 2427
gaucucaucggugauauag

SEQ ID NO: 188311 - RNA, 19 nt, Artificial Sequence
  Description of Artificial Sequence: Synthetic oligonucleotide
  Antisense strand to SEQ ID NO: 188310
cuauaucaccgaugagauc

SEQ ID NO: 188312 - RNA, 19 nt, Artificial Sequence
  Description of Artificial Sequence: Synthetic oligonucleotide
  Sense strand starting at position 1619 of SEQ ID NO: 2427
augggcaagucuuccagaa

SEQ ID NO: 188313 - RNA, 19 nt, Artificial Sequence
  Description of Artificial Sequence: Synthetic oligonucleotide
  Antisense strand to SEQ ID NO: 188312
uucuggaagacuugcccau

SEQ ID NO: 188314 - RNA, 19 nt, Artificial Sequence
  Description of Artificial Sequence: Synthetic oligonucleotide
  Sense strand starting at position 1623 of SEQ ID NO: 2427
gcaagucuuccagaauggu

SEQ ID NO: 188315 - RNA, 19 nt, Artificial Sequence
  Description of Artificial Sequence: Synthetic oligonucleotide
  Antisense strand to SEQ ID NO: 188314
accauucuggaagacuugc

SEQ ID NO: 188316 - RNA, 19 nt, Artificial Sequence
  Description of Artificial Sequence: Synthetic oligonucleotide
  Sense strand starting at position 1671 of SEQ ID NO: 2427
gaggguauccgacgaggau

SEQ ID NO: 188317 - RNA, 19 nt, Artificial Sequence
  Description of Artificial Sequence: Synthetic oligonucleotide
  Antisense strand to SEQ ID NO: 188316
auccucgucggauacccuc

SEQ ID NO: 188318 - RNA, 19 nt, Artificial Sequence
  Description of Artificial Sequence: Synthetic oligonucleotide
  Sense strand starting at position 1672 of SEQ ID NO: 2427
aggguauccgacgaggauu

SEQ ID NO: 188319 - RNA, 19 nt, Artificial Sequence
  Description of Artificial Sequence: Synthetic oligonucleotide
  Antisense strand to SEQ ID NO: 188318
aauccucgucggauacccu

SEQ ID NO: 188320 - RNA, 19 nt, Artificial Sequence
  Description of Artificial Sequence: Synthetic oligonucleotide
  Sense strand starting at position 1724 of SEQ ID NO: 2427
gcaauuuggcccuggaguu

SEQ ID NO: 188321 - RNA, 19 nt, Artificial Sequence
  Description of Artificial Sequence: Synthetic oligonucleotide
  Antisense strand to SEQ ID NO: 188320
aacuccagggccaaauugc

SEQ ID NO: 188322 - RNA, 19 nt, Artificial Sequence
  Description of Artificial Sequence: Synthetic oligonucleotide
  Sense strand starting at position 1947 of SEQ ID NO: 2427
caaacaucgcgagaaguug

SEQ ID NO: 188323 - RNA, 19 nt, Artificial Sequence
  Description of Artificial Sequence: Synthetic oligonucleotide
  Antisense strand to SEQ ID NO: 188322
caacuucucgcgauguuug

SEQ ID NO: 188324 - RNA, 19 nt, Artificial Sequence
  Description of Artificial Sequence: Synthetic oligonucleotide
  Sense strand starting at position 2108 of SEQ ID NO: 2427
ggucuugcuaccuauagag

SEQ ID NO: 188325 - RNA, 19 nt, Artificial Sequence
  Description of Artificial Sequence: Synthetic oligonucleotide
  Antisense strand to SEQ ID NO: 188324
cucuauagguagcaagacc

SEQ ID NO: 188326 - RNA, 19 nt, Artificial Sequence
  Description of Artificial Sequence: Synthetic oligonucleotide
  Sense strand starting at position 2185 of SEQ ID NO: 2427
ggaguuccugaaugaaggu

SEQ ID NO: 188327 - RNA, 19 nt, Artificial Sequence
  Description of Artificial Sequence: Synthetic oligonucleotide
  Antisense strand to SEQ ID NO: 188326
accuucauucaggaacucc

SEQ ID NO: 188328 - RNA, 19 nt, Artificial Sequence
  Description of Artificial Sequence: Synthetic oligonucleotide
  Sense strand starting at position 2326 of SEQ ID NO: 2427
aggaauggucagugaguca

SEQ ID NO: 188329 - RNA, 19 nt, Artificial Sequence
  Description of Artificial Sequence: Synthetic oligonucleotide
  Antisense strand to SEQ ID NO: 188328
ugacucacugaccauuccu

SEQ ID NO: 188330 - RNA, 19 nt, Artificial Sequence
  Description of Artificial Sequence: Synthetic oligonucleotide
  Sense strand starting at position 2364 of SEQ ID NO: 2427
ucacacuugugacuagacu

SEQ ID NO: 188331 - RNA, 19 nt, Artificial Sequence
  Description of Artificial Sequence: Synthetic oligonucleotide
  Antisense strand to SEQ ID NO: 188330
agucuagucacaaguguga

SEQ ID NO: 188332 - RNA, 19 nt, Artificial Sequence
  Description of Artificial Sequence: Synthetic oligonucleotide
  Sense strand starting at position 2590 of SEQ ID NO: 2427
aguuccugggcauacaaau

SEQ ID NO: 188333 - RNA, 19 nt, Artificial Sequence
  Description of Artificial Sequence: Synthetic oligonucleotide
  Antisense strand to SEQ ID NO: 188332
auuuguaugcccaggaacu

SEQ ID NO: 188334 - RNA, 19 nt, Artificial Sequence
  Description of Artificial Sequence: Synthetic oligonucleotide
  Sense strand starting at position 2707 of SEQ ID NO: 2427
gugauaaugcuagauuauc

SEQ ID NO: 188335 - RNA, 19 nt, Artificial Sequence
  Description of Artificial Sequence: Synthetic oligonucleotide
  Antisense strand to SEQ ID NO: 188334
gauaaucuagcauuaucac

SEQ ID NO: 188336 - RNA, 19 nt, Artificial Sequence
  Description of Artificial Sequence: Synthetic oligonucleotide
  Sense strand starting at position 2716 of SEQ ID NO: 2427
cuagauuaucuguaccuuu

SEQ ID NO: 188337 - RNA, 19 nt, Artificial Sequence
  Description of Artificial Sequence: Synthetic oligonucleotide
  Antisense strand to SEQ ID NO: 188336
aaagguacagauaaucuag

SEQ ID NO: 188338 - RNA, 19 nt, Artificial Sequence
  Description of Artificial Sequence: Synthetic oligonucleotide
  Sense strand starting at position 2789 of SEQ ID NO: 2427
acaaauacuggcugaauga

SEQ ID NO: 188339 - RNA, 19 nt, Artificial Sequence
  Description of Artificial Sequence: Synthetic oligonucleotide
  Antisense strand to SEQ ID NO: 188338
ucauucagccaguauuugu

SEQ ID NO: 188340 - RNA, 19 nt, Artificial Sequence
  Description of Artificial Sequence: Synthetic oligonucleotide
  Sense strand starting at position 2879 of SEQ ID NO: 2427
ggagauaacuguuugaacu

SEQ ID NO: 188341 - RNA, 19 nt, Artificial Sequence
  Description of Artificial Sequence: Synthetic oligonucleotide
  Antisense strand to SEQ ID NO: 188340
aguucaaacaguuaucucc

SEQ ID NO: 188342 - RNA, 19 nt, Artificial Sequence
  Description of Artificial Sequence: Synthetic oligonucleotide
  Sense strand starting at position 2880 of SEQ ID NO: 2427
gagauaacuguuugaacuu

SEQ ID NO: 188343 - RNA, 19 nt, Artificial Sequence
  Description of Artificial Sequence: Synthetic oligonucleotide
  Antisense strand to SEQ ID NO: 188342
aaguucaaacaguuaucuc

SEQ ID NO: 188344 - RNA, 19 nt, Artificial Sequence
  Description of Artificial Sequence: Synthetic oligonucleotide
  Sense strand starting at position 3224 of SEQ ID NO: 2427
acgacugcaacggaugaua

SEQ ID NO: 188345 - RNA, 19 nt, Artificial Sequence
  Description of Artificial Sequence: Synthetic oligonucleotide
  Antisense strand to SEQ ID NO: 188344
uaucauccguugcagucgu

SEQ ID NO: 188346 - RNA, 19 nt, Artificial Sequence
  Description of Artificial Sequence: Synthetic oligonucleotide
  Sense strand starting at position 3271 of SEQ ID NO: 2427
gaagguaggagugguuaga

SEQ ID NO: 188347 - RNA, 19 nt, Artificial Sequence
  Description of Artificial Sequence: Synthetic oligonucleotide
  Antisense strand to SEQ ID NO: 188346
ucuaaccacuccuaccuuc

SEQ ID NO: 188348 - RNA, 19 nt, Artificial Sequence
  Description of Artificial Sequence: Synthetic oligonucleotide
  Sense strand starting at position 3274 of SEQ ID NO: 2427
gguaggagugguuagaagu

SEQ ID NO: 188349 - RNA, 19 nt, Artificial Sequence
  Description of Artificial Sequence: Synthetic oligonucleotide
  Antisense strand to SEQ ID NO: 188348
acuucuaaccacuccuacc

SEQ ID NO: 188350 - RNA, 19 nt, Artificial Sequence
  Description of Artificial Sequence: Synthetic oligonucleotide
  Sense strand starting at position 3655 of SEQ ID NO: 2427
caacgaugagagugguuga

SEQ ID NO: 188351 - RNA, 19 nt, Artificial Sequence
  Description of Artificial Sequence: Synthetic oligonucleotide
  Antisense strand to SEQ ID NO: 188350
ucaaccacucucaucguug

SEQ ID NO: 188352 - RNA, 19 nt, Artificial Sequence
  Description of Artificial Sequence: Synthetic oligonucleotide
  Sense strand starting at position 3656 of SEQ ID NO: 2427
aacgaugagagugguugau

SEQ ID NO: 188353 - RNA, 19 nt, Artificial Sequence
  Description of Artificial Sequence: Synthetic oligonucleotide
  Antisense strand to SEQ ID NO: 188352
aucaaccacucucaucguu

SEQ ID NO: 188354 - RNA, 19 nt, Artificial Sequence
  Description of Artificial Sequence: Synthetic oligonucleotide
  Sense strand starting at position 3825 of SEQ ID NO: 2427
caggaaugagagcguuaau

SEQ ID NO: 188355 - RNA, 19 nt, Artificial Sequence
  Description of Artificial Sequence: Synthetic oligonucleotide
  Antisense strand to SEQ ID NO: 188354
auuaacgcucucauuccug

SEQ ID NO: 188356 - RNA, 19 nt, Artificial Sequence
  Description of Artificial Sequence: Synthetic oligonucleotide
  Sense strand starting at position 3828 of SEQ ID NO: 2427
gaaugagagcguuaaucuu

SEQ ID NO: 188357 - RNA, 19 nt, Artificial Sequence
  Description of Artificial Sequence: Synthetic oligonucleotide
  Antisense strand to SEQ ID NO: 188356
aagauuaacgcucucauuc

SEQ ID NO: 188358 - RNA, 19 nt, Artificial Sequence
  Description of Artificial Sequence: Synthetic oligonucleotide
  Sense strand starting at position 326 of SEQ ID NO: 2428
cagcacugucgugaagauu

SEQ ID NO: 188359 - RNA, 19 nt, Artificial Sequence
  Description of Artificial Sequence: Synthetic oligonucleotide
  Antisense strand to SEQ ID NO: 188358
aaucuucacgacagugcug

SEQ ID NO: 188360 - RNA, 19 nt, Artificial Sequence
  Description of Artificial Sequence: Synthetic oligonucleotide
  Sense strand starting at position 335 of SEQ ID NO: 2428
cgugaagauuuauagccua

SEQ ID NO: 188361 - RNA, 19 nt, Artificial Sequence
  Description of Artificial Sequence: Synthetic oligonucleotide
  Antisense strand to SEQ ID NO: 188360
uaggcuauaaaucuucacg

SEQ ID NO: 188362 - RNA, 19 nt, Artificial Sequence
  Description of Artificial Sequence: Synthetic oligonucleotide
  Sense strand starting at position 351 of SEQ ID NO: 2428
cuaacuguguucuccagaa

SEQ ID NO: 188363 - RNA, 19 nt, Artificial Sequence
  Description of Artificial Sequence: Synthetic oligonucleotide
  Antisense strand to SEQ ID NO: 188362
uucuggagaacacaguuag

SEQ ID NO: 188364 - RNA, 19 nt, Artificial Sequence
  Description of Artificial Sequence: Synthetic oligonucleotide
  Sense strand starting at position 355 of SEQ ID NO: 2428
cuguguucuccagaaacug

SEQ ID NO: 188365 - RNA, 19 nt, Artificial Sequence
  Description of Artificial Sequence: Synthetic oligonucleotide
  Antisense strand to SEQ ID NO: 188364
caguuucuggagaacacag

SEQ ID NO: 188366 - RNA, 19 nt, Artificial Sequence
  Description of Artificial Sequence: Synthetic oligonucleotide
  Sense strand starting at position 366 of SEQ ID NO: 2428
agaaacuguuaucuccaga

SEQ ID NO: 188367 - RNA, 19 nt, Artificial Sequence
  Description of Artificial Sequence: Synthetic oligonucleotide
  Antisense strand to SEQ ID NO: 188366
ucuggagauaacaguuucu

SEQ ID NO: 188368 - RNA, 19 nt, Artificial Sequence
  Description of Artificial Sequence: Synthetic oligonucleotide
  Sense strand starting at position 388 of SEQ ID NO: 2428
acaggaagacauuguucuu

SEQ ID NO: 188369 - RNA, 19 nt, Artificial Sequence
  Description of Artificial Sequence: Synthetic oligonucleotide
  Antisense strand to SEQ ID NO: 188368
aagaacaaugucuuccugu

SEQ ID NO: 188370 - RNA, 19 nt, Artificial Sequence
  Description of Artificial Sequence: Synthetic oligonucleotide
  Sense strand starting at position 391 of SEQ ID NO: 2428
ggaagacauuguucuuaua

SEQ ID NO: 188371 - RNA, 19 nt, Artificial Sequence
  Description of Artificial Sequence: Synthetic oligonucleotide
  Antisense strand to SEQ ID NO: 188370
uauaagaacaaugucuucc

SEQ ID NO: 188372 - RNA, 19 nt, Artificial Sequence
  Description of Artificial Sequence: Synthetic oligonucleotide
  Sense strand starting at position 572 of SEQ ID NO: 2428
uggccaucccaguguacua

SEQ ID NO: 188373 - RNA, 19 nt, Artificial Sequence
  Description of Artificial Sequence: Synthetic oligonucleotide
  Antisense strand to SEQ ID NO: 188372
uaguacacugggauggcca

SEQ ID NO: 188374 - RNA, 19 nt, Artificial Sequence
  Description of Artificial Sequence: Synthetic oligonucleotide
  Sense strand starting at position 617 of SEQ ID NO: 2428
guaugugcgcuggugacau

SEQ ID NO: 188375 - RNA, 19 nt, Artificial Sequence
  Description of Artificial Sequence: Synthetic oligonucleotide
  Antisense strand to SEQ ID NO: 188374
augucaccagcgcacauac

SEQ ID NO: 188376 - RNA, 19 nt, Artificial Sequence
  Description of Artificial Sequence: Synthetic oligonucleotide
  Sense strand starting at position 654 of SEQ ID NO: 2428
guaaacucaccucgacauu

SEQ ID NO: 188377 - RNA, 19 nt, Artificial Sequence
  Description of Artificial Sequence: Synthetic oligonucleotide
  Antisense strand to SEQ ID NO: 188376
aaugucgaggugaguuuac

SEQ ID NO: 188378 - RNA, 19 nt, Artificial Sequence
  Description of Artificial Sequence: Synthetic oligonucleotide
  Sense strand starting at position 800 of SEQ ID NO: 2428
aagggaucaugagaaaggu

SEQ ID NO: 188379 - RNA, 19 nt, Artificial Sequence
  Description of Artificial Sequence: Synthetic oligonucleotide
  Antisense strand to SEQ ID NO: 188378
accuuucucaugaucccuu

SEQ ID NO: 188380 - RNA, 19 nt, Artificial Sequence
  Description of Artificial Sequence: Synthetic oligonucleotide
  Sense strand starting at position 827 of SEQ ID NO: 2428
auaagaggguaagucuuau

SEQ ID NO: 188381 - RNA, 19 nt, Artificial Sequence
  Description of Artificial Sequence: Synthetic oligonucleotide
  Antisense strand to SEQ ID NO: 188380
auaagacuuacccucuuau

SEQ ID NO: 188382 - RNA, 19 nt, Artificial Sequence
  Description of Artificial Sequence: Synthetic oligonucleotide
  Sense strand starting at position 833 of SEQ ID NO: 2428
ggguaagucuuaucuggau

SEQ ID NO: 188383 - RNA, 19 nt, Artificial Sequence
  Description of Artificial Sequence: Synthetic oligonucleotide
  Antisense strand to SEQ ID NO: 188382
auccagauaagacuuaccc

SEQ ID NO: 188384 - RNA, 19 nt, Artificial Sequence
  Description of Artificial Sequence: Synthetic oligonucleotide
  Sense strand starting at position 897 of SEQ ID NO: 2428
acuugacucacaggcguaa

SEQ ID NO: 188385 - RNA, 19 nt, Artificial Sequence
  Description of Artificial Sequence: Synthetic oligonucleotide
  Antisense strand to SEQ ID NO: 188384
uuacgccugugagucaagu

SEQ ID NO: 188386 - RNA, 19 nt, Artificial Sequence
  Description of Artificial Sequence: Synthetic oligonucleotide
  Sense strand starting at position 918 of SEQ ID NO: 2428
ggguuuagguccuuguuga

SEQ ID NO: 188387 - RNA, 19 nt, Artificial Sequence
  Description of Artificial Sequence: Synthetic oligonucleotide
  Antisense strand to SEQ ID NO: 188386
ucaacaaggaccuaaaccc

SEQ ID NO: 188388 - RNA, 19 nt, Artificial Sequence
  Description of Artificial Sequence: Synthetic oligonucleotide
  Sense strand starting at position 919 of SEQ ID NO: 2428
gguuuagguccuuguugag

SEQ ID NO: 188389 - RNA, 19 nt, Artificial Sequence
  Description of Artificial Sequence: Synthetic oligonucleotide
  Antisense strand to SEQ ID NO: 188388
cucaacaaggaccuaaacc

SEQ ID NO: 188390 - RNA, 19 nt, Artificial Sequence
  Description of Artificial Sequence: Synthetic oligonucleotide
  Sense strand starting at position 963 of SEQ ID NO: 2428
gucacugguccuggcagua

SEQ ID NO: 188391 - RNA, 19 nt, Artificial Sequence
  Description of Artificial Sequence: Synthetic oligonucleotide
  Antisense strand to SEQ ID NO: 188390
uacugccaggaccagugac

SEQ ID NO: 188392 - RNA, 19 nt, Artificial Sequence
  Description of Artificial Sequence: Synthetic oligonucleotide
  Sense strand starting at position 975 of SEQ ID NO: 2428
ggcaguaggucuuucagga

SEQ ID NO: 188393 - RNA, 19 nt, Artificial Sequence
  Description of Artificial Sequence: Synthetic oligonucleotide
  Antisense strand to SEQ ID NO: 188392
uccugaaagaccuacugcc

SEQ ID NO: 188394 - RNA, 19 nt, Artificial Sequence
  Description of Artificial Sequence: Synthetic oligonucleotide
  Sense strand starting at position 1012 of SEQ ID NO: 2428
cacggcaguaucugggaaa

SEQ ID NO: 188395 - RNA, 19 nt, Artificial Sequence
  Description of Artificial Sequence: Synthetic oligonucleotide
  Antisense strand to SEQ ID NO: 188394
uuucccagauacugccgug

SEQ ID NO: 188396 - RNA, 19 nt, Artificial Sequence
  Description of Artificial Sequence: Synthetic oligonucleotide
  Sense strand starting at position 1069 of SEQ ID NO: 2428
ggugguccuuuccuagacu

SEQ ID NO: 188397 - RNA, 19 nt, Artificial Sequence
  Description of Artificial Sequence: Synthetic oligonucleotide
  Antisense strand to SEQ ID NO: 188396
agucuaggaaaggaccacc

SEQ ID NO: 188398 - RNA, 19 nt, Artificial Sequence
  Description of Artificial Sequence: Synthetic oligonucleotide
  Sense strand starting at position 1072 of SEQ ID NO: 2428
gguccuuuccuagacucua

SEQ ID NO: 188399 - RNA, 19 nt, Artificial Sequence
  Description of Artificial Sequence: Synthetic oligonucleotide
  Antisense strand to SEQ ID NO: 188398
uagagucuaggaaaggacc

SEQ ID NO: 188400 - RNA, 19 nt, Artificial Sequence
  Description of Artificial Sequence: Synthetic oligonucleotide
  Sense strand starting at position 1103 of SEQ ID NO: 2428
aaaggaauccuucgaguuu

SEQ ID NO: 188401 - RNA, 19 nt, Artificial Sequence
  Description of Artificial Sequence: Synthetic oligonucleotide
  Antisense strand to SEQ ID NO: 188400
aaacucgaaggauuccuuu

SEQ ID NO: 188402 - RNA, 19 nt, Artificial Sequence
  Description of Artificial Sequence: Synthetic oligonucleotide
  Sense strand starting at position 1155 of SEQ ID NO: 2428
cccuaagagcuugagcaga

SEQ ID NO: 188403 - RNA, 19 nt, Artificial Sequence
  Description of Artificial Sequence: Synthetic oligonucleotide
  Antisense strand to SEQ ID NO: 188402
ucugcucaagcucuuaggg

SEQ ID NO: 188404 - RNA, 19 nt, Artificial Sequence
  Description of Artificial Sequence: Synthetic oligonucleotide
  Sense strand starting at position 1157 of SEQ ID NO: 2428
cuaagagcuugagcagaaa

SEQ ID NO: 188405 - RNA, 19 nt, Artificial Sequence
  Description of Artificial Sequence: Synthetic oligonucleotide
  Antisense strand to SEQ ID NO: 188404
uuucugcucaagcucuuag

SEQ ID NO: 188406 - RNA, 19 nt, Artificial Sequence
  Description of Artificial Sequence: Synthetic oligonucleotide
  Sense strand starting at position 1240 of SEQ ID NO: 2428
agcugcaccgcugugauau

SEQ ID NO: 188407 - RNA, 19 nt, Artificial Sequence
  Description of Artificial Sequence: Synthetic oligonucleotide
  Antisense strand to SEQ ID NO: 188406
auaucacagcggugcagcu

SEQ ID NO: 188408 - RNA, 19 nt, Artificial Sequence
  Description of Artificial Sequence: Synthetic oligonucleotide
  Sense strand starting at position 1250 of SEQ ID NO: 2428
cugugauaucaugauagug

SEQ ID NO: 188409 - RNA, 19 nt, Artificial Sequence
  Description of Artificial Sequence: Synthetic oligonucleotide
  Antisense strand to SEQ ID NO: 188408
cacuaucaugauaucacag

SEQ ID NO: 188410 - RNA, 19 nt, Artificial Sequence
  Description of Artificial Sequence: Synthetic oligonucleotide
  Sense strand starting at position 1258 of SEQ ID NO: 2428
ucaugauagugggaucaag

SEQ ID NO: 188411 - RNA, 19 nt, Artificial Sequence
  Description of Artificial Sequence: Synthetic oligonucleotide
  Antisense strand to SEQ ID NO: 188410
cuugaucccacuaucauga

SEQ ID NO: 188412 - RNA, 19 nt, Artificial Sequence
  Description of Artificial Sequence: Synthetic oligonucleotide
  Sense strand starting at position 1444 of SEQ ID NO: 2428
gcacguuaaguccucggua

SEQ ID NO: 188413 - RNA, 19 nt, Artificial Sequence
  Description of Artificial Sequence: Synthetic oligonucleotide
  Antisense strand to SEQ ID NO: 188412
uaccgaggacuuaacgugc

SEQ ID NO: 188414 - RNA, 19 nt, Artificial Sequence
  Description of Artificial Sequence: Synthetic oligonucleotide
  Sense strand starting at position 1449 of SEQ ID NO: 2428
uuaaguccucgguacauau

SEQ ID NO: 188415 - RNA, 19 nt, Artificial Sequence
  Description of Artificial Sequence: Synthetic oligonucleotide
  Antisense strand to SEQ ID NO: 188414
auauguaccgaggacuuaa

SEQ ID NO: 188416 - RNA, 19 nt, Artificial Sequence
  Description of Artificial Sequence: Synthetic oligonucleotide
  Sense strand starting at position 2660 of SEQ ID NO: 2428
cuuugaucuggugagaggu

SEQ ID NO: 188417 - RNA, 19 nt, Artificial Sequence
  Description of Artificial Sequence: Synthetic oligonucleotide
  Antisense strand to SEQ ID NO: 188416
accucucaccagaucaaag

SEQ ID NO: 188418 - RNA, 19 nt, Artificial Sequence
  Description of Artificial Sequence: Synthetic oligonucleotide
  Sense strand starting at position 3350 of SEQ ID NO: 2428
guugguaagaaaugccaca

SEQ ID NO: 188419 - RNA, 19 nt, Artificial Sequence
  Description of Artificial Sequence: Synthetic oligonucleotide
  Antisense strand to SEQ ID NO: 188418
uguggcauuucuuaccaac

SEQ ID NO: 188420 - RNA, 19 nt, Artificial Sequence
  Description of Artificial Sequence: Synthetic oligonucleotide
  Sense strand starting at position 3573 of SEQ ID NO: 2428
ggagguuucuuccuuugga

SEQ ID NO: 188421 - RNA, 19 nt, Artificial Sequence
  Description of Artificial Sequence: Synthetic oligonucleotide
  Antisense strand to SEQ ID NO: 188420
uccaaaggaagaaaccucc

SEQ ID NO: 188422 - RNA, 19 nt, Artificial Sequence
  Description of Artificial Sequence: Synthetic oligonucleotide
  Sense strand starting at position 3574 of SEQ ID NO: 2428
gagguuucuuccuuuggaa

SEQ ID NO: 188423 - RNA, 19 nt, Artificial Sequence
  Description of Artificial Sequence: Synthetic oligonucleotide
  Antisense strand to SEQ ID NO: 188422
uuccaaaggaagaaaccuc

SEQ ID NO: 188424 - RNA, 19 nt, Artificial Sequence
  Description of Artificial Sequence: Synthetic oligonucleotide
  Sense strand starting at position 3576 of SEQ ID NO: 2428
gguuucuuccuuuggaagu

SEQ ID NO: 188425 - RNA, 19 nt, Artificial Sequence
  Description of Artificial Sequence: Synthetic oligonucleotide
  Antisense strand to SEQ ID NO: 188424
acuuccaaaggaagaaacc

SEQ ID NO: 188426 - RNA, 19 nt, Artificial Sequence
  Description of Artificial Sequence: Synthetic oligonucleotide
  Sense strand starting at position 3718 of SEQ ID NO: 2428
caaugauuaguguauguca

SEQ ID NO: 188427 - RNA, 19 nt, Artificial Sequence
  Description of Artificial Sequence: Synthetic oligonucleotide
  Antisense strand to SEQ ID NO: 188426
ugacauacacuaaucauug

SEQ ID NO: 188428 - RNA, 19 nt, Artificial Sequence
  Description of Artificial Sequence: Synthetic oligonucleotide
  Sense strand starting at position 3720 of SEQ ID NO: 2428
augauuaguguaugucaaa

SEQ ID NO: 188429 - RNA, 19 nt, Artificial Sequence
  Description of Artificial Sequence: Synthetic oligonucleotide
  Antisense strand to SEQ ID NO: 188428
uuugacauacacuaaucau

SEQ ID NO: 188430 - RNA, 19 nt, Artificial Sequence
  Description of Artificial Sequence: Synthetic oligonucleotide
  Sense strand starting at position 3761 of SEQ ID NO: 2428
ugccuuuccuggcuagaag

SEQ ID NO: 188431 - RNA, 19 nt, Artificial Sequence
  Description of Artificial Sequence: Synthetic oligonucleotide
  Antisense strand to SEQ ID NO: 188430
cuucuagccaggaaaggca

SEQ ID NO: 188432 - RNA, 19 nt, Artificial Sequence
  Description of Artificial Sequence: Synthetic oligonucleotide
  Sense strand starting at position 3762 of SEQ ID NO: 2428
gccuuuccuggcuagaaga

SEQ ID NO: 188433 - RNA, 19 nt, Artificial Sequence
  Description of Artificial Sequence: Synthetic oligonucleotide
  Antisense strand to SEQ ID NO: 188432
ucuucuagccaggaaaggc

SEQ ID NO: 188434 - RNA, 19 nt, Artificial Sequence
  Description of Artificial Sequence: Synthetic oligonucleotide
  Sense strand starting at position 3919 of SEQ ID NO: 2428
guagacuguugagucaaau

SEQ ID NO: 188435 - RNA, 19 nt, Artificial Sequence
  Description of Artificial Sequence: Synthetic oligonucleotide
  Antisense strand to SEQ ID NO: 188434
auuugacucaacagucuac

SEQ ID NO: 188436 - RNA, 19 nt, Artificial Sequence
  Description of Artificial Sequence: Synthetic oligonucleotide
  Sense strand starting at position 3977 of SEQ ID NO: 2428
agagaaagccucugacuug

SEQ ID NO: 188437 - RNA, 19 nt, Artificial Sequence
  Description of Artificial Sequence: Synthetic oligonucleotide
  Antisense strand to SEQ ID NO: 188436
caagucagaggcuuucucu

SEQ ID NO: 188438 - RNA, 19 nt, Artificial Sequence
  Description of Artificial Sequence: Synthetic oligonucleotide
  Sense strand starting at position 3946 of SEQ ID NO: 2431
gugcaauacuggguaaaca

SEQ ID NO: 188439 - RNA, 19 nt, Artificial Sequence
  Description of Artificial Sequence: Synthetic oligonucleotide
  Antisense strand to SEQ ID NO: 188438
uguuuacccaguauugcac

SEQ ID NO: 188440 - RNA, 19 nt, Artificial Sequence
  Description of Artificial Sequence: Synthetic oligonucleotide
  Sense strand starting at position 3944 of SEQ ID NO: 2431
augugcaauacuggguaaa

SEQ ID NO: 188441 - RNA, 19 nt, Artificial Sequence
  Description of Artificial Sequence: Synthetic oligonucleotide
  Antisense strand to SEQ ID NO: 188440
uuuacccaguauugcacau

SEQ ID NO: 188442 - RNA, 19 nt, Artificial Sequence
  Description of Artificial Sequence: Synthetic oligonucleotide
  Sense strand starting at position 3895 of SEQ ID NO: 2431
agucauaugcugggagaca

SEQ ID NO: 188443 - RNA, 19 nt, Artificial Sequence
  Description of Artificial Sequence: Synthetic oligonucleotide
  Antisense strand to SEQ ID NO: 188442
ugucucccagcauaugacu

SEQ ID NO: 188444 - RNA, 19 nt, Artificial Sequence
  Description of Artificial Sequence: Synthetic oligonucleotide
  Sense strand starting at position 3881 of SEQ ID NO: 2431
agcauuagacgagaaguca

SEQ ID NO: 188445 - RNA, 19 nt, Artificial Sequence
  Description of Artificial Sequence: Synthetic oligonucleotide
  Antisense strand to SEQ ID NO: 188444
ugacuucucgucuaaugcu

SEQ ID NO: 188446 - RNA, 19 nt, Artificial Sequence
  Description of Artificial Sequence: Synthetic oligonucleotide
  Sense strand starting at position 3879 of SEQ ID NO: 2431
acagcauuagacgagaagu

SEQ ID NO: 188447 - RNA, 19 nt, Artificial Sequence
  Description of Artificial Sequence: Synthetic oligonucleotide
  Antisense strand to SEQ ID NO: 188446
acuucucgucuaaugcugu

SEQ ID NO: 188448 - RNA, 19 nt, Artificial Sequence
  Description of Artificial Sequence: Synthetic oligonucleotide
  Sense strand starting at position 3828 of SEQ ID NO: 2431
cuguaagcgguugccuaua

SEQ ID NO: 188449 - RNA, 19 nt, Artificial Sequence
  Description of Artificial Sequence: Synthetic oligonucleotide
  Antisense strand to SEQ ID NO: 188448
uauaggcaaccgcuuacag

SEQ ID NO: 188450 - RNA, 19 nt, Artificial Sequence
  Description of Artificial Sequence: Synthetic oligonucleotide
  Sense strand starting at position 3396 of SEQ ID NO: 2431
augucaagucugggagcau

SEQ ID NO: 188451 - RNA, 19 nt, Artificial Sequence
  Description of Artificial Sequence: Synthetic oligonucleotide
  Antisense strand to SEQ ID NO: 188450
augcucccagacuugacau

SEQ ID NO: 188452 - RNA, 19 nt, Artificial Sequence
  Description of Artificial Sequence: Synthetic oligonucleotide
  Sense strand starting at position 3328 of SEQ ID NO: 2431
ucacauuuaugguaggaau

SEQ ID NO: 188453 - RNA, 19 nt, Artificial Sequence
  Description of Artificial Sequence: Synthetic oligonucleotide
  Antisense strand to SEQ ID NO: 188452
auuccuaccauaaauguga

SEQ ID NO: 188454 - RNA, 19 nt, Artificial Sequence
  Description of Artificial Sequence: Synthetic oligonucleotide
  Sense strand starting at position 3289 of SEQ ID NO: 2431
ggucaaagugcucaaagca

SEQ ID NO: 188455 - RNA, 19 nt, Artificial Sequence
  Description of Artificial Sequence: Synthetic oligonucleotide
  Antisense strand to SEQ ID NO: 188454
ugcuuugagcacuuugacc

SEQ ID NO: 188456 - RNA, 19 nt, Artificial Sequence
  Description of Artificial Sequence: Synthetic oligonucleotide
  Sense strand starting at position 3208 of SEQ ID NO: 2431
uauccacacgcuggauaua

SEQ ID NO: 188457 - RNA, 19 nt, Artificial Sequence
  Description of Artificial Sequence: Synthetic oligonucleotide
  Antisense strand to SEQ ID NO: 188456
uauauccagcguguggaua

SEQ ID NO: 188458 - RNA, 19 nt, Artificial Sequence
  Description of Artificial Sequence: Synthetic oligonucleotide
  Sense strand starting at position 3107 of SEQ ID NO: 2431
gcaggaauauuugauacua

SEQ ID NO: 188459 - RNA, 19 nt, Artificial Sequence
  Description of Artificial Sequence: Synthetic oligonucleotide
  Antisense strand to SEQ ID NO: 188458
uaguaucaaauauuccugc

SEQ ID NO: 188460 - RNA, 19 nt, Artificial Sequence
  Description of Artificial Sequence: Synthetic oligonucleotide
  Sense strand starting at position 3098 of SEQ ID NO: 2431
ccaacucaugcaggaauau

SEQ ID NO: 188461 - RNA, 19 nt, Artificial Sequence
  Description of Artificial Sequence: Synthetic oligonucleotide
  Antisense strand to SEQ ID NO: 188460
auauuccugcaugaguugg

SEQ ID NO: 188462 - RNA, 19 nt, Artificial Sequence
  Description of Artificial Sequence: Synthetic oligonucleotide
  Sense strand starting at position 3018 of SEQ ID NO: 2431
cuacgagacucuguauuag

SEQ ID NO: 188463 - RNA, 19 nt, Artificial Sequence
  Description of Artificial Sequence: Synthetic oligonucleotide
  Antisense strand to SEQ ID NO: 188462
cuaauacagagucucguag

SEQ ID NO: 188464 - RNA, 19 nt, Artificial Sequence
  Description of Artificial Sequence: Synthetic oligonucleotide
  Sense strand starting at position 2968 of SEQ ID NO: 2431
auuaaauagccagguguau

SEQ ID NO: 188465 - RNA, 19 nt, Artificial Sequence
  Description of Artificial Sequence: Synthetic oligonucleotide
  Antisense strand to SEQ ID NO: 188464
auacaccuggcuauuuaau

SEQ ID NO: 188466 - RNA, 19 nt, Artificial Sequence
  Description of Artificial Sequence: Synthetic oligonucleotide
  Sense strand starting at position 2941 of SEQ ID NO: 2431
aaguaaugugcccaaguuu

SEQ ID NO: 188467 - RNA, 19 nt, Artificial Sequence
  Description of Artificial Sequence: Synthetic oligonucleotide
  Antisense strand to SEQ ID NO: 188466
aaacuugggcacauuacuu

SEQ ID NO: 188468 - RNA, 19 nt, Artificial Sequence
  Description of Artificial Sequence: Synthetic oligonucleotide
  Sense strand starting at position 2931 of SEQ ID NO: 2431
cagaaagcuuaaguaaugu

SEQ ID NO: 188469 - RNA, 19 nt, Artificial Sequence
  Description of Artificial Sequence: Synthetic oligonucleotide
  Antisense strand to SEQ ID NO: 188468
acauuacuuaagcuuucug

SEQ ID NO: 188470 - RNA, 19 nt, Artificial Sequence
  Description of Artificial Sequence: Synthetic oligonucleotide
  Sense strand starting at position 2896 of SEQ ID NO: 2431
gcuaucagucuuucgguuu

SEQ ID NO: 188471 - RNA, 19 nt, Artificial Sequence
  Description of Artificial Sequence: Synthetic oligonucleotide
  Antisense strand to SEQ ID NO: 188470
aaaccgaaagacugauagc

SEQ ID NO: 188472 - RNA, 19 nt, Artificial Sequence
  Description of Artificial Sequence: Synthetic oligonucleotide
  Sense strand starting at position 2866 of SEQ ID NO: 2431
acauuaaagucuuucgaca

SEQ ID NO: 188473 - RNA, 19 nt, Artificial Sequence
  Description of Artificial Sequence: Synthetic oligonucleotide
  Antisense strand to SEQ ID NO: 188472
ugucgaaagacuuuaaugu

SEQ ID NO: 188474 - RNA, 19 nt, Artificial Sequence
  Description of Artificial Sequence: Synthetic oligonucleotide
  Sense strand starting at position 2705 of SEQ ID NO: 2431
ggacuuuauuuccaagaaa

SEQ ID NO: 188475 - RNA, 19 nt, Artificial Sequence
  Description of Artificial Sequence: Synthetic oligonucleotide
  Antisense strand to SEQ ID NO: 188474
uuucuuggaaauaaagucc

SEQ ID NO: 188476 - RNA, 19 nt, Artificial Sequence
  Description of Artificial Sequence: Synthetic oligonucleotide
  Sense strand starting at position 2547 of SEQ ID NO: 2431
cuguuagccgacuacagaa

SEQ ID NO: 188477 - RNA, 19 nt, Artificial Sequence
  Description of Artificial Sequence: Synthetic oligonucleotide
  Antisense strand to SEQ ID NO: 188476
uucuguagucggcuaacag

SEQ ID NO: 188478 - RNA, 19 nt, Artificial Sequence
  Description of Artificial Sequence: Synthetic oligonucleotide
  Sense strand starting at position 2349 of SEQ ID NO: 2431
ccgguuucucagugaggga

SEQ ID NO: 188479 - RNA, 19 nt, Artificial Sequence
  Description of Artificial Sequence: Synthetic oligonucleotide
  Antisense strand to SEQ ID NO: 188478
ucccucacugagaaaccgg

SEQ ID NO: 188480 - RNA, 19 nt, Artificial Sequence
  Description of Artificial Sequence: Synthetic oligonucleotide
  Sense strand starting at position 1310 of SEQ ID NO: 2431
cagcaaguuguccaaagga

SEQ ID NO: 188481 - RNA, 19 nt, Artificial Sequence
  Description of Artificial Sequence: Synthetic oligonucleotide
  Antisense strand to SEQ ID NO: 188480
uccuuuggacaacuugcug

SEQ ID NO: 188482 - RNA, 19 nt, Artificial Sequence
  Description of Artificial Sequence: Synthetic oligonucleotide
  Sense strand starting at position 1063 of SEQ ID NO: 2431
aauuacuccuuguuagcga

SEQ ID NO: 188483 - RNA, 19 nt, Artificial Sequence
  Description of Artificial Sequence: Synthetic oligonucleotide
  Antisense strand to SEQ ID NO: 188482
ucgcuaacaaggaguaauu

SEQ ID NO: 188484 - RNA, 19 nt, Artificial Sequence
  Description of Artificial Sequence: Synthetic oligonucleotide
  Sense strand starting at position 1061 of SEQ ID NO: 2431
ugaauuacuccuuguuagc

SEQ ID NO: 188485 - RNA, 19 nt, Artificial Sequence
  Description of Artificial Sequence: Synthetic oligonucleotide
  Antisense strand to SEQ ID NO: 188484
gcuaacaaggaguaauuca

SEQ ID NO: 188486 - RNA, 19 nt, Artificial Sequence
  Description of Artificial Sequence: Synthetic oligonucleotide
  Sense strand starting at position 1060 of SEQ ID NO: 2431
augaauuacuccuuguuag

SEQ ID NO: 188487 - RNA, 19 nt, Artificial Sequence
  Description of Artificial Sequence: Synthetic oligonucleotide
  Antisense strand to SEQ ID NO: 188486
cuaacaaggaguaauucau

SEQ ID NO: 188488 - RNA, 19 nt, Artificial Sequence
  Description of Artificial Sequence: Synthetic oligonucleotide
  Sense strand starting at position 966 of SEQ ID NO: 2431
agugauccacgaggaugaa

SEQ ID NO: 188489 - RNA, 19 nt, Artificial Sequence
  Description of Artificial Sequence: Synthetic oligonucleotide
  Antisense strand to SEQ ID NO: 188488
uucauccucguggaucacu

SEQ ID NO: 188490 - RNA, 19 nt, Artificial Sequence
  Description of Artificial Sequence: Synthetic oligonucleotide
  Sense strand starting at position 963 of SEQ ID NO: 2431
gagagugauccacgaggau

SEQ ID NO: 188491 - RNA, 19 nt, Artificial Sequence
  Description of Artificial Sequence: Synthetic oligonucleotide
  Antisense strand to SEQ ID NO: 188490
auccucguggaucacucuc

SEQ ID NO: 188492 - RNA, 19 nt, Artificial Sequence
  Description of Artificial Sequence: Synthetic oligonucleotide
  Sense strand starting at position 946 of SEQ ID NO: 2431
acaugagaguacuuccaga

SEQ ID NO: 188493 - RNA, 19 nt, Artificial Sequence
  Description of Artificial Sequence: Synthetic oligonucleotide
  Antisense strand to SEQ ID NO: 188492
ucuggaaguacucucaugu

SEQ ID NO: 188494 - RNA, 19 nt, Artificial Sequence
  Description of Artificial Sequence: Synthetic oligonucleotide
  Sense strand starting at position 896 of SEQ ID NO: 2431
uuuauuggcuccucuggau

SEQ ID NO: 188495 - RNA, 19 nt, Artificial Sequence
  Description of Artificial Sequence: Synthetic oligonucleotide
  Antisense strand to SEQ ID NO: 188494
auccagaggagccaauaaa

SEQ ID NO: 188496 - RNA, 19 nt, Artificial Sequence
  Description of Artificial Sequence: Synthetic oligonucleotide
  Sense strand starting at position 835 of SEQ ID NO: 2431
gcgacagucgccagugaaa

SEQ ID NO: 188497 - RNA, 19 nt, Artificial Sequence
  Description of Artificial Sequence: Synthetic oligonucleotide
  Antisense strand to SEQ ID NO: 188496
uuucacuggcgacugucgc

SEQ ID NO: 188498 - RNA, 19 nt, Artificial Sequence
  Description of Artificial Sequence: Synthetic oligonucleotide
  Sense strand starting at position 583 of SEQ ID NO: 2431
guaaauaguuaacuacuca

SEQ ID NO: 188499 - RNA, 19 nt, Artificial Sequence
  Description of Artificial Sequence: Synthetic oligonucleotide
  Antisense strand to SEQ ID NO: 188498
ugaguaguuaacuauuuac

SEQ ID NO: 188500 - RNA, 19 nt, Artificial Sequence
  Description of Artificial Sequence: Synthetic oligonucleotide
  Sense strand starting at position 528 of SEQ ID NO: 2431
gggauuuauugguagaagg

SEQ ID NO: 188501 - RNA, 19 nt, Artificial Sequence
  Description of Artificial Sequence: Synthetic oligonucleotide
  Antisense strand to SEQ ID NO: 188500
ccuucuaccaauaaauccc

SEQ ID NO: 188502 - RNA, 19 nt, Artificial Sequence
  Description of Artificial Sequence: Synthetic oligonucleotide
  Sense strand starting at position 189 of SEQ ID NO: 2431
gaaagugaauccucggcua

SEQ ID NO: 188503 - RNA, 19 nt, Artificial Sequence
  Description of Artificial Sequence: Synthetic oligonucleotide
  Antisense strand to SEQ ID NO: 188502
uagccgaggauucacuuuc

SEQ ID NO: 188504 - RNA, 19 nt, Artificial Sequence
  Description of Artificial Sequence: Synthetic oligonucleotide
  Sense strand starting at position 147 of SEQ ID NO: 2431
gggauuuccugauagaggg

SEQ ID NO: 188505 - RNA, 19 nt, Artificial Sequence
  Description of Artificial Sequence: Synthetic oligonucleotide
  Antisense strand to SEQ ID NO: 188504
cccucuaucaggaaauccc

SEQ ID NO: 188506 - RNA, 19 nt, Artificial Sequence
  Description of Artificial Sequence: Synthetic oligonucleotide
  Sense strand starting at position 78 of SEQ ID NO: 2431
cuaggacauuugcaguuaa

SEQ ID NO: 188507 - RNA, 19 nt, Artificial Sequence
  Description of Artificial Sequence: Synthetic oligonucleotide
  Antisense strand to SEQ ID NO: 188506
uuaacugcaaauguccuag

SEQ ID NO: 188508 - RNA, 19 nt, Artificial Sequence
  Description of Artificial Sequence: Synthetic oligonucleotide
  Sense strand starting at position 35 of SEQ ID NO: 2431
acaguaugguugcugauau

SEQ ID NO: 188509 - RNA, 19 nt, Artificial Sequence
  Description of Artificial Sequence: Synthetic oligonucleotide
  Antisense strand to SEQ ID NO: 188508
auaucagcaaccauacugu

SEQ ID NO: 188510 - RNA, 19 nt, Artificial Sequence
  Description of Artificial Sequence: Synthetic oligonucleotide
  Sense strand starting at position 22 of SEQ ID NO: 2431
uuacguucucaauacagua

SEQ ID NO: 188511 - RNA, 19 nt, Artificial Sequence
  Description of Artificial Sequence: Synthetic oligonucleotide
  Antisense strand to SEQ ID NO: 188510
uacuguauugagaacguaa

SEQ ID NO: 188512 - RNA, 19 nt, Artificial Sequence
  Description of Artificial Sequence: Synthetic oligonucleotide
  Sense strand starting at position 18 of SEQ ID NO: 2431
aguauuacguucucaauac

SEQ ID NO: 188513 - RNA, 19 nt, Artificial Sequence
  Description of Artificial Sequence: Synthetic oligonucleotide
  Antisense strand to SEQ ID NO: 188512
guauugagaacguaauacu

SEQ ID NO: 188514 - RNA, 19 nt, Artificial Sequence
  Description of Artificial Sequence: Synthetic oligonucleotide
  Sense strand starting at position 8 of SEQ ID NO: 2431
gaguguuaucaguauuacg

SEQ ID NO: 188515 - RNA, 19 nt, Artificial Sequence
  Description of Artificial Sequence: Synthetic oligonucleotide
  Antisense strand to SEQ ID NO: 188514
cguaauacugauaacacuc

SEQ ID NO: 188516 - RNA, 19 nt, Artificial Sequence
  Description of Artificial Sequence: Synthetic oligonucleotide
  Sense strand starting at position 4 of SEQ ID NO: 2431
aguagaguguuaucaguau

SEQ ID NO: 188517 - RNA, 19 nt, Artificial Sequence
  Description of Artificial Sequence: Synthetic oligonucleotide
  Antisense strand to SEQ ID NO: 188516
auacugauaacacucuacu

SEQ ID NO: 188518 - RNA, 19 nt, Artificial Sequence
  Description of Artificial Sequence: Synthetic oligonucleotide
  Sense strand starting at position 3854 of SEQ ID NO: 2430
aaaccacgucgguacuaaa

SEQ ID NO: 188519 - RNA, 19 nt, Artificial Sequence
  Description of Artificial Sequence: Synthetic oligonucleotide
  Antisense strand to SEQ ID NO: 188518
uuuaguaccgacgugguuu

SEQ ID NO: 188520 - RNA, 19 nt, Artificial Sequence
  Description of Artificial Sequence: Synthetic oligonucleotide
  Sense strand starting at position 3713 of SEQ ID NO: 2430
guuugucgugaagauaaac

SEQ ID NO: 188521 - RNA, 19 nt, Artificial Sequence
  Description of Artificial Sequence: Synthetic oligonucleotide
  Antisense strand to SEQ ID NO: 188520
guuuaucuucacgacaaac

SEQ ID NO: 188522 - RNA, 19 nt, Artificial Sequence
  Description of Artificial Sequence: Synthetic oligonucleotide
  Sense strand starting at position 3710 of SEQ ID NO: 2430
cagguuugucgugaagaua

SEQ ID NO: 188523 - RNA, 19 nt, Artificial Sequence
  Description of Artificial Sequence: Synthetic oligonucleotide
  Antisense strand to SEQ ID NO: 188522
uaucuucacgacaaaccug

SEQ ID NO: 188524 - RNA, 19 nt, Artificial Sequence
  Description of Artificial Sequence: Synthetic oligonucleotide
  Sense strand starting at position 3706 of SEQ ID NO: 2430
ccaacagguuugucgugaa

SEQ ID NO: 188525 - RNA, 19 nt, Artificial Sequence
  Description of Artificial Sequence: Synthetic oligonucleotide
  Antisense strand to SEQ ID NO: 188524
uucacgacaaaccuguugg

SEQ ID NO: 188526 - RNA, 19 nt, Artificial Sequence
  Description of Artificial Sequence: Synthetic oligonucleotide
  Sense strand starting at position 3627 of SEQ ID NO: 2430
gugcaauacuggguaaaca

SEQ ID NO: 188527 - RNA, 19 nt, Artificial Sequence
  Description of Artificial Sequence: Synthetic oligonucleotide
  Antisense strand to SEQ ID NO: 188526
uguuuacccaguauugcac

SEQ ID NO: 188528 - RNA, 19 nt, Artificial Sequence
  Description of Artificial Sequence: Synthetic oligonucleotide
  Sense strand starting at position 3625 of SEQ ID NO: 2430
augugcaauacuggguaaa

SEQ ID NO: 188529 - RNA, 19 nt, Artificial Sequence
  Description of Artificial Sequence: Synthetic oligonucleotide
  Antisense strand to SEQ ID NO: 188528
uuuacccaguauugcacau

SEQ ID NO: 188530 - RNA, 19 nt, Artificial Sequence
  Description of Artificial Sequence: Synthetic oligonucleotide
  Sense strand starting at position 3576 of SEQ ID NO: 2430
agucauaugcugggagaca

SEQ ID NO: 188531 - RNA, 19 nt, Artificial Sequence
  Description of Artificial Sequence: Synthetic oligonucleotide
  Antisense strand to SEQ ID NO: 188530
ugucucccagcauaugacu

SEQ ID NO: 188532 - RNA, 19 nt, Artificial Sequence
  Description of Artificial Sequence: Synthetic oligonucleotide
  Sense strand starting at position 3562 of SEQ ID NO: 2430
agcauuagacgagaaguca

SEQ ID NO: 188533 - RNA, 19 nt, Artificial Sequence
  Description of Artificial Sequence: Synthetic oligonucleotide
  Antisense strand to SEQ ID NO: 188532
ugacuucucgucuaaugcu

SEQ ID NO: 188534 - RNA, 19 nt, Artificial Sequence
  Description of Artificial Sequence: Synthetic oligonucleotide
  Sense strand starting at position 3560 of SEQ ID NO: 2430
acagcauuagacgagaagu

SEQ ID NO: 188535 - RNA, 19 nt, Artificial Sequence
  Description of Artificial Sequence: Synthetic oligonucleotide
  Antisense strand to SEQ ID NO: 188534
acuucucgucuaaugcugu

SEQ ID NO: 188536 - RNA, 19 nt, Artificial Sequence
  Description of Artificial Sequence: Synthetic oligonucleotide
  Sense strand starting at position 3509 of SEQ ID NO: 2430
cuguaagcgguugccuaua

SEQ ID NO: 188537 - RNA, 19 nt, Artificial Sequence
  Description of Artificial Sequence: Synthetic oligonucleotide
  Antisense strand to SEQ ID NO: 188536
uauaggcaaccgcuuacag

SEQ ID NO: 188538 - RNA, 19 nt, Artificial Sequence
  Description of Artificial Sequence: Synthetic oligonucleotide
  Sense strand starting at position 3489 of SEQ ID NO: 2430
ggcccagauuuauguauaa

SEQ ID NO: 188539 - RNA, 19 nt, Artificial Sequence
  Description of Artificial Sequence: Synthetic oligonucleotide
  Antisense strand to SEQ ID NO: 188538
uuauacauaaaucugggcc

SEQ ID NO: 188540 - RNA, 19 nt, Artificial Sequence
  Description of Artificial Sequence: Synthetic oligonucleotide
  Sense strand starting at position 3077 of SEQ ID NO: 2430
augucaagucugggagcau

SEQ ID NO: 188541 - RNA, 19 nt, Artificial Sequence
  Description of Artificial Sequence: Synthetic oligonucleotide
  Antisense strand to SEQ ID NO: 188540
augcucccagacuugacau

SEQ ID NO: 188542 - RNA, 19 nt, Artificial Sequence
  Description of Artificial Sequence: Synthetic oligonucleotide
  Sense strand starting at position 3009 of SEQ ID NO: 2430
ucacauuuaugguaggaau

SEQ ID NO: 188543 - RNA, 19 nt, Artificial Sequence
  Description of Artificial Sequence: Synthetic oligonucleotide
  Antisense strand to SEQ ID NO: 188542
auuccuaccauaaauguga

SEQ ID NO: 188544 - RNA, 19 nt, Artificial Sequence
  Description of Artificial Sequence: Synthetic oligonucleotide
  Sense strand starting at position 2970 of SEQ ID NO: 2430
ggucaaagugcucaaagca

SEQ ID NO: 188545 - RNA, 19 nt, Artificial Sequence
  Description of Artificial Sequence: Synthetic oligonucleotide
  Antisense strand to SEQ ID NO: 188544
ugcuuugagcacuuugacc

SEQ ID NO: 188546 - RNA, 19 nt, Artificial Sequence
  Description of Artificial Sequence: Synthetic oligonucleotide
  Sense strand starting at position 2889 of SEQ ID NO: 2430
uauccacacgcuggauaua

SEQ ID NO: 188547 - RNA, 19 nt, Artificial Sequence
  Description of Artificial Sequence: Synthetic oligonucleotide
  Antisense strand to SEQ ID NO: 188546
uauauccagcguguggaua

SEQ ID NO: 188548 - RNA, 19 nt, Artificial Sequence
  Description of Artificial Sequence: Synthetic oligonucleotide
  Sense strand starting at position 2788 of SEQ ID NO: 2430
gcaggaauauuugauacua

SEQ ID NO: 188549 - RNA, 19 nt, Artificial Sequence
  Description of Artificial Sequence: Synthetic oligonucleotide
  Antisense strand to SEQ ID NO: 188548
uaguaucaaauauuccugc

SEQ ID NO: 188550 - RNA, 19 nt, Artificial Sequence
  Description of Artificial Sequence: Synthetic oligonucleotide
  Sense strand starting at position 2779 of SEQ ID NO: 2430
ccaacucaugcaggaauau

SEQ ID NO: 188551 - RNA, 19 nt, Artificial Sequence
  Description of Artificial Sequence: Synthetic oligonucleotide
  Antisense strand to SEQ ID NO: 188550
auauuccugcaugaguugg

SEQ ID NO: 188552 - RNA, 19 nt, Artificial Sequence
  Description of Artificial Sequence: Synthetic oligonucleotide
  Sense strand starting at position 2703 of SEQ ID NO: 2430
gagacucuguauuagggaa

SEQ ID NO: 188553 - RNA, 19 nt, Artificial Sequence
  Description of Artificial Sequence: Synthetic oligonucleotide
  Antisense strand to SEQ ID NO: 188552
uucccuaauacagagucuc

SEQ ID NO: 188554 - RNA, 19 nt, Artificial Sequence
  Description of Artificial Sequence: Synthetic oligonucleotide
  Sense strand starting at position 2699 of SEQ ID NO: 2430
cuacgagacucuguauuag

SEQ ID NO: 188555 - RNA, 19 nt, Artificial Sequence
  Description of Artificial Sequence: Synthetic oligonucleotide
  Antisense strand to SEQ ID NO: 188554
cuaauacagagucucguag

SEQ ID NO: 188556 - RNA, 19 nt, Artificial Sequence
  Description of Artificial Sequence: Synthetic oligonucleotide
  Sense strand starting at position 2649 of SEQ ID NO: 2430
auuaaauagccagguguau

SEQ ID NO: 188557 - RNA, 19 nt, Artificial Sequence
  Description of Artificial Sequence: Synthetic oligonucleotide
  Antisense strand to SEQ ID NO: 188556
auacaccuggcuauuuaau

SEQ ID NO: 188558 - RNA, 19 nt, Artificial Sequence
  Description of Artificial Sequence: Synthetic oligonucleotide
  Sense strand starting at position 2622 of SEQ ID NO: 2430
aaguaaugugcccaaguuu

SEQ ID NO: 188559 - RNA, 19 nt, Artificial Sequence
  Description of Artificial Sequence: Synthetic oligonucleotide
  Antisense strand to SEQ ID NO: 188558
aaacuugggcacauuacuu

SEQ ID NO: 188560 - RNA, 19 nt, Artificial Sequence
  Description of Artificial Sequence: Synthetic oligonucleotide
  Sense strand starting at position 2621 of SEQ ID NO: 2430
uaaguaaugugcccaaguu

SEQ ID NO: 188561 - RNA, 19 nt, Artificial Sequence
  Description of Artificial Sequence: Synthetic oligonucleotide
  Antisense strand to SEQ ID NO: 188560
aacuugggcacauuacuua

SEQ ID NO: 188562 - RNA, 19 nt, Artificial Sequence
  Description of Artificial Sequence: Synthetic oligonucleotide
  Sense strand starting at position 2612 of SEQ ID NO: 2430
cagaaagcuuaaguaaugu

SEQ ID NO: 188563 - RNA, 19 nt, Artificial Sequence
  Description of Artificial Sequence: Synthetic oligonucleotide
  Antisense strand to SEQ ID NO: 188562
acauuacuuaagcuuucug

SEQ ID NO: 188564 - RNA, 19 nt, Artificial Sequence
  Description of Artificial Sequence: Synthetic oligonucleotide
  Sense strand starting at position 2577 of SEQ ID NO: 2430
gcuaucagucuuucgguuu

SEQ ID NO: 188565 - RNA, 19 nt, Artificial Sequence
  Description of Artificial Sequence: Synthetic oligonucleotide
  Antisense strand to SEQ ID NO: 188564
aaaccgaaagacugauagc

SEQ ID NO: 188566 - RNA, 19 nt, Artificial Sequence
  Description of Artificial Sequence: Synthetic oligonucleotide
  Sense strand starting at position 2547 of SEQ ID NO: 2430
acauuaaagucuuucgaca

SEQ ID NO: 188567 - RNA, 19 nt, Artificial Sequence
  Description of Artificial Sequence: Synthetic oligonucleotide
  Antisense strand to SEQ ID NO: 188566
ugucgaaagacuuuaaugu

SEQ ID NO: 188568 - RNA, 19 nt, Artificial Sequence
  Description of Artificial Sequence: Synthetic oligonucleotide
  Sense strand starting at position 2386 of SEQ ID NO: 2430
ggacuuuauuuccaagaaa

SEQ ID NO: 188569 - RNA, 19 nt, Artificial Sequence
  Description of Artificial Sequence: Synthetic oligonucleotide
  Antisense strand to SEQ ID NO: 188568
uuucuuggaaauaaagucc

SEQ ID NO: 188570 - RNA, 19 nt, Artificial Sequence
  Description of Artificial Sequence: Synthetic oligonucleotide
  Sense strand starting at position 2228 of SEQ ID NO: 2430
cuguuagccgacuacagaa

SEQ ID NO: 188571 - RNA, 19 nt, Artificial Sequence
  Description of Artificial Sequence: Synthetic oligonucleotide
  Antisense strand to SEQ ID NO: 188570
uucuguagucggcuaacag

SEQ ID NO: 188572 - RNA, 19 nt, Artificial Sequence
  Description of Artificial Sequence: Synthetic oligonucleotide
  Sense strand starting at position 2030 of SEQ ID NO: 2430
ccgguuucucagugaggga

SEQ ID NO: 188573 - RNA, 19 nt, Artificial Sequence
  Description of Artificial Sequence: Synthetic oligonucleotide
  Antisense strand to SEQ ID NO: 188572
ucccucacugagaaaccgg

SEQ ID NO: 188574 - RNA, 19 nt, Artificial Sequence
  Description of Artificial Sequence: Synthetic oligonucleotide
  Sense strand starting at position 1467 of SEQ ID NO: 2430
gccuguaccugcuccaaga

SEQ ID NO: 188575 - RNA, 19 nt, Artificial Sequence
  Description of Artificial Sequence: Synthetic oligonucleotide
  Antisense strand to SEQ ID NO: 188574
ucuuggagcagguacaggc

SEQ ID NO: 188576 - RNA, 19 nt, Artificial Sequence
  Description of Artificial Sequence: Synthetic oligonucleotide
  Sense strand starting at position 991 of SEQ ID NO: 2430
cagcaaguuguccaaagga

SEQ ID NO: 188577 - RNA, 19 nt, Artificial Sequence
  Description of Artificial Sequence: Synthetic oligonucleotide
  Antisense strand to SEQ ID NO: 188576
uccuuuggacaacuugcug

SEQ ID NO: 188578 - RNA, 19 nt, Artificial Sequence
  Description of Artificial Sequence: Synthetic oligonucleotide
  Sense strand starting at position 744 of SEQ ID NO: 2430
aauuacuccuuguuagcga

SEQ ID NO: 188579 - RNA, 19 nt, Artificial Sequence
  Description of Artificial Sequence: Synthetic oligonucleotide
  Antisense strand to SEQ ID NO: 188578
ucgcuaacaaggaguaauu

SEQ ID NO: 188580 - RNA, 19 nt, Artificial Sequence
  Description of Artificial Sequence: Synthetic oligonucleotide
  Sense strand starting at position 742 of SEQ ID NO: 2430
ugaauuacuccuuguuagc

SEQ ID NO: 188581 - RNA, 19 nt, Artificial Sequence
  Description of Artificial Sequence: Synthetic oligonucleotide
  Antisense strand to SEQ ID NO: 188580
gcuaacaaggaguaauuca

SEQ ID NO: 188582 - RNA, 19 nt, Artificial Sequence
  Description of Artificial Sequence: Synthetic oligonucleotide
  Sense strand starting at position 741 of SEQ ID NO: 2430
augaauuacuccuuguuag

SEQ ID NO: 188583 - RNA, 19 nt, Artificial Sequence
  Description of Artificial Sequence: Synthetic oligonucleotide
  Antisense strand to SEQ ID NO: 188582
cuaacaaggaguaauucau

SEQ ID NO: 188584 - RNA, 19 nt, Artificial Sequence
  Description of Artificial Sequence: Synthetic oligonucleotide
  Sense strand starting at position 647 of SEQ ID NO: 2430
agugauccacgaggaugaa

SEQ ID NO: 188585 - RNA, 19 nt, Artificial Sequence
  Description of Artificial Sequence: Synthetic oligonucleotide
  Antisense strand to SEQ ID NO: 188584
uucauccucguggaucacu

SEQ ID NO: 188586 - RNA, 19 nt, Artificial Sequence
  Description of Artificial Sequence: Synthetic oligonucleotide
  Sense strand starting at position 644 of SEQ ID NO: 2430
gagagugauccacgaggau

SEQ ID NO: 188587 - RNA, 19 nt, Artificial Sequence
  Description of Artificial Sequence: Synthetic oligonucleotide
  Antisense strand to SEQ ID NO: 188586
auccucguggaucacucuc

SEQ ID NO: 188588 - RNA, 19 nt, Artificial Sequence
  Description of Artificial Sequence: Synthetic oligonucleotide
  Sense strand starting at position 627 of SEQ ID NO: 2430
acaugagaguacuuccaga

SEQ ID NO: 188589 - RNA, 19 nt, Artificial Sequence
  Description of Artificial Sequence: Synthetic oligonucleotide
  Antisense strand to SEQ ID NO: 188588
ucuggaaguacucucaugu

SEQ ID NO: 188590 - RNA, 19 nt, Artificial Sequence
  Description of Artificial Sequence: Synthetic oligonucleotide
  Sense strand starting at position 577 of SEQ ID NO: 2430
uuuauuggcuccucuggau

SEQ ID NO: 188591 - RNA, 19 nt, Artificial Sequence
  Description of Artificial Sequence: Synthetic oligonucleotide
  Antisense strand to SEQ ID NO: 188590
auccagaggagccaauaaa

SEQ ID NO: 188592 - RNA, 19 nt, Artificial Sequence
  Description of Artificial Sequence: Synthetic oligonucleotide
  Sense strand starting at position 516 of SEQ ID NO: 2430
gcgacagucgccagugaaa

SEQ ID NO: 188593 - RNA, 19 nt, Artificial Sequence
  Description of Artificial Sequence: Synthetic oligonucleotide
  Antisense strand to SEQ ID NO: 188592
uuucacuggcgacugucgc

SEQ ID NO: 188594 - RNA, 19 nt, Artificial Sequence
  Description of Artificial Sequence: Synthetic oligonucleotide
  Sense strand starting at position 264 of SEQ ID NO: 2430
guaaauaguuaacuacuca

SEQ ID NO: 188595 - RNA, 19 nt, Artificial Sequence
  Description of Artificial Sequence: Synthetic oligonucleotide
  Antisense strand to SEQ ID NO: 188594
ugaguaguuaacuauuuac

SEQ ID NO: 188596 - RNA, 19 nt, Artificial Sequence
  Description of Artificial Sequence: Synthetic oligonucleotide
  Sense strand starting at position 209 of SEQ ID NO: 2430
gggauuuauugguagaagg

SEQ ID NO: 188597 - RNA, 19 nt, Artificial Sequence
  Description of Artificial Sequence: Synthetic oligonucleotide
  Antisense strand to SEQ ID NO: 188596
ccuucuaccaauaaauccc

SEQ ID NO: 188598 - RNA, 19 nt, Artificial Sequence
  Description of Artificial Sequence: Synthetic oligonucleotide
  Sense strand starting at position 3857 of SEQ ID NO: 2429
aaaccacgucgguacuaaa

SEQ ID NO: 188599 - RNA, 19 nt, Artificial Sequence
  Description of Artificial Sequence: Synthetic oligonucleotide
  Antisense strand to SEQ ID NO: 188598
uuuaguaccgacgugguuu

SEQ ID NO: 188600 - RNA, 19 nt, Artificial Sequence
  Description of Artificial Sequence: Synthetic oligonucleotide
  Sense strand starting at position 3716 of SEQ ID NO: 2429
guuugucgugaagauaaac

SEQ ID NO: 188601 - RNA, 19 nt, Artificial Sequence
  Description of Artificial Sequence: Synthetic oligonucleotide
  Antisense strand to SEQ ID NO: 188600
guuuaucuucacgacaaac

SEQ ID NO: 188602 - RNA, 19 nt, Artificial Sequence
  Description of Artificial Sequence: Synthetic oligonucleotide
  Sense strand starting at position 3713 of SEQ ID NO: 2429
cagguuugucgugaagaua

SEQ ID NO: 188603 - RNA, 19 nt, Artificial Sequence
  Description of Artificial Sequence: Synthetic oligonucleotide
  Antisense strand to SEQ ID NO: 188602
uaucuucacgacaaaccug

SEQ ID NO: 188604 - RNA, 19 nt, Artificial Sequence
  Description of Artificial Sequence: Synthetic oligonucleotide
  Sense strand starting at position 3709 of SEQ ID NO: 2429
ccaacagguuugucgugaa

SEQ ID NO: 188605 - RNA, 19 nt, Artificial Sequence
  Description of Artificial Sequence: Synthetic oligonucleotide
  Antisense strand to SEQ ID NO: 188604
uucacgacaaaccuguugg

SEQ ID NO: 188606 - RNA, 19 nt, Artificial Sequence
  Description of Artificial Sequence: Synthetic oligonucleotide
  Sense strand starting at position 3630 of SEQ ID NO: 2429
gugcaauacuggguaaaca

SEQ ID NO: 188607 - RNA, 19 nt, Artificial Sequence
  Description of Artificial Sequence: Synthetic oligonucleotide
  Antisense strand to SEQ ID NO: 188606
uguuuacccaguauugcac

SEQ ID NO: 188608 - RNA, 19 nt, Artificial Sequence
  Description of Artificial Sequence: Synthetic oligonucleotide
  Sense strand starting at position 3628 of SEQ ID NO: 2429
augugcaauacuggguaaa

SEQ ID NO: 188609 - RNA, 19 nt, Artificial Sequence
  Description of Artificial Sequence: Synthetic oligonucleotide
  Antisense strand to SEQ ID NO: 188608
uuuacccaguauugcacau

SEQ ID NO: 188610 - RNA, 19 nt, Artificial Sequence
  Description of Artificial Sequence: Synthetic oligonucleotide
  Sense strand starting at position 3579 of SEQ ID NO: 2429
agucauaugcugggagaca

SEQ ID NO: 188611 - RNA, 19 nt, Artificial Sequence
  Description of Artificial Sequence: Synthetic oligonucleotide
  Antisense strand to SEQ ID NO: 188610
ugucucccagcauaugacu

SEQ ID NO: 188612 - RNA, 19 nt, Artificial Sequence
  Description of Artificial Sequence: Synthetic oligonucleotide
  Sense strand starting at position 3565 of SEQ ID NO: 2429
agcauuagacgagaaguca

SEQ ID NO: 188613 - RNA, 19 nt, Artificial Sequence
  Description of Artificial Sequence: Synthetic oligonucleotide
  Antisense strand to SEQ ID NO: 188612
ugacuucucgucuaaugcu

SEQ ID NO: 188614 - RNA, 19 nt, Artificial Sequence
  Description of Artificial Sequence: Synthetic oligonucleotide
  Sense strand starting at position 3563 of SEQ ID NO: 2429
acagcauuagacgagaagu

SEQ ID NO: 188615 - RNA, 19 nt, Artificial Sequence
  Description of Artificial Sequence: Synthetic oligonucleotide
  Antisense strand to SEQ ID NO: 188614
acuucucgucuaaugcugu

SEQ ID NO: 188616 - RNA, 19 nt, Artificial Sequence
  Description of Artificial Sequence: Synthetic oligonucleotide
  Sense strand starting at position 3512 of SEQ ID NO: 2429
cuguaagcgguugccuaua

SEQ ID NO: 188617 - RNA, 19 nt, Artificial Sequence
  Description of Artificial Sequence: Synthetic oligonucleotide
  Antisense strand to SEQ ID NO: 188616
uauaggcaaccgcuuacag

SEQ ID NO: 188618 - RNA, 19 nt, Artificial Sequence
  Description of Artificial Sequence: Synthetic oligonucleotide
  Sense strand starting at position 3492 of SEQ ID NO: 2429
ggcccagauuuauguauaa

SEQ ID NO: 188619 - RNA, 19 nt, Artificial Sequence
  Description of Artificial Sequence: Synthetic oligonucleotide
  Antisense strand to SEQ ID NO: 188618
uuauacauaaaucugggcc

SEQ ID NO: 188620 - RNA, 19 nt, Artificial Sequence
  Description of Artificial Sequence: Synthetic oligonucleotide
  Sense strand starting at position 3080 of SEQ ID NO: 2429
augucaagucugggagcau

SEQ ID NO: 188621 - RNA, 19 nt, Artificial Sequence
  Description of Artificial Sequence: Synthetic oligonucleotide
  Antisense strand to SEQ ID NO: 188620
augcucccagacuugacau

SEQ ID NO: 188622 - RNA, 19 nt, Artificial Sequence
  Description of Artificial Sequence: Synthetic oligonucleotide
  Sense strand starting at position 3012 of SEQ ID NO: 2429
ucacauuuaugguaggaau

SEQ ID NO: 188623 - RNA, 19 nt, Artificial Sequence
  Description of Artificial Sequence: Synthetic oligonucleotide
  Antisense strand to SEQ ID NO: 188622
auuccuaccauaaauguga

SEQ ID NO: 188624 - RNA, 19 nt, Artificial Sequence
  Description of Artificial Sequence: Synthetic oligonucleotide
  Sense strand starting at position 2973 of SEQ ID NO: 2429
ggucaaagugcucaaagca

SEQ ID NO: 188625 - RNA, 19 nt, Artificial Sequence
  Description of Artificial Sequence: Synthetic oligonucleotide
  Antisense strand to SEQ ID NO: 188624
ugcuuugagcacuuugacc

SEQ ID NO: 188626 - RNA, 19 nt, Artificial Sequence
  Description of Artificial Sequence: Synthetic oligonucleotide
  Sense strand starting at position 2892 of SEQ ID NO: 2429
uauccacacgcuggauaua

SEQ ID NO: 188627 - RNA, 19 nt, Artificial Sequence
  Description of Artificial Sequence: Synthetic oligonucleotide
  Antisense strand to SEQ ID NO: 188626
uauauccagcguguggaua

SEQ ID NO: 188628 - RNA, 19 nt, Artificial Sequence
  Description of Artificial Sequence: Synthetic oligonucleotide
  Sense strand starting at position 2791 of SEQ ID NO: 2429
gcaggaauauuugauacua

SEQ ID NO: 188629 - RNA, 19 nt, Artificial Sequence
  Description of Artificial Sequence: Synthetic oligonucleotide
  Antisense strand to SEQ ID NO: 188628
uaguaucaaauauuccugc

SEQ ID NO: 188630 - RNA, 19 nt, Artificial Sequence
  Description of Artificial Sequence: Synthetic oligonucleotide
  Sense strand starting at position 2782 of SEQ ID NO: 2429
ccaacucaugcaggaauau

SEQ ID NO: 188631 - RNA, 19 nt, Artificial Sequence
  Description of Artificial Sequence: Synthetic oligonucleotide
  Antisense strand to SEQ ID NO: 188630
auauuccugcaugaguugg

SEQ ID NO: 188632 - RNA, 19 nt, Artificial Sequence
  Description of Artificial Sequence: Synthetic oligonucleotide
  Sense strand starting at position 2706 of SEQ ID NO: 2429
gagacucuguauuagggaa

SEQ ID NO: 188633 - RNA, 19 nt, Artificial Sequence
  Description of Artificial Sequence: Synthetic oligonucleotide
  Antisense strand to SEQ ID NO: 188632
uucccuaauacagagucuc

SEQ ID NO: 188634 - RNA, 19 nt, Artificial Sequence
  Description of Artificial Sequence: Synthetic oligonucleotide
  Sense strand starting at position 2702 of SEQ ID NO: 2429
cuacgagacucuguauuag

SEQ ID NO: 188635 - RNA, 19 nt, Artificial Sequence
  Description of Artificial Sequence: Synthetic oligonucleotide
  Antisense strand to SEQ ID NO: 188634
cuaauacagagucucguag

SEQ ID NO: 188636 - RNA, 19 nt, Artificial Sequence
  Description of Artificial Sequence: Synthetic oligonucleotide
  Sense strand starting at position 2652 of SEQ ID NO: 2429
auuaaauagccagguguau

SEQ ID NO: 188637 - RNA, 19 nt, Artificial Sequence
  Description of Artificial Sequence: Synthetic oligonucleotide
  Antisense strand to SEQ ID NO: 188636
auacaccuggcuauuuaau

SEQ ID NO: 188638 - RNA, 19 nt, Artificial Sequence
  Description of Artificial Sequence: Synthetic oligonucleotide
  Sense strand starting at position 2625 of SEQ ID NO: 2429
aaguaaugugcccaaguuu

SEQ ID NO: 188639 - RNA, 19 nt, Artificial Sequence
  Description of Artificial Sequence: Synthetic oligonucleotide
  Antisense strand to SEQ ID NO: 188638
aaacuugggcacauuacuu

SEQ ID NO: 188640 - RNA, 19 nt, Artificial Sequence
  Description of Artificial Sequence: Synthetic oligonucleotide
  Sense strand starting at position 2624 of SEQ ID NO: 2429
uaaguaaugugcccaaguu

SEQ ID NO: 188641 - RNA, 19 nt, Artificial Sequence
  Description of Artificial Sequence: Synthetic oligonucleotide
  Antisense strand to SEQ ID NO: 188640
aacuugggcacauuacuua

SEQ ID NO: 188642 - RNA, 19 nt, Artificial Sequence
  Description of Artificial Sequence: Synthetic oligonucleotide
  Sense strand starting at position 2615 of SEQ ID NO: 2429
cagaaagcuuaaguaaugu

SEQ ID NO: 188643 - RNA, 19 nt, Artificial Sequence
  Description of Artificial Sequence: Synthetic oligonucleotide
  Antisense strand to SEQ ID NO: 188642
acauuacuuaagcuuucug

SEQ ID NO: 188644 - RNA, 19 nt, Artificial Sequence
  Description of Artificial Sequence: Synthetic oligonucleotide
  Sense strand starting at position 2580 of SEQ ID NO: 2429
gcuaucagucuuucgguuu

SEQ ID NO: 188645 - RNA, 19 nt, Artificial Sequence
  Description of Artificial Sequence: Synthetic oligonucleotide
  Antisense strand to SEQ ID NO: 188644
aaaccgaaagacugauagc

SEQ ID NO: 188646 - RNA, 19 nt, Artificial Sequence
  Description of Artificial Sequence: Synthetic oligonucleotide
  Sense strand starting at position 2550 of SEQ ID NO: 2429
acauuaaagucuuucgaca

SEQ ID NO: 188647 - RNA, 19 nt, Artificial Sequence
  Description of Artificial Sequence: Synthetic oligonucleotide
  Antisense strand to SEQ ID NO: 188646
ugucgaaagacuuuaaugu

SEQ ID NO: 188648 - RNA, 19 nt, Artificial Sequence
  Description of Artificial Sequence: Synthetic oligonucleotide
  Sense strand starting at position 2389 of SEQ ID NO: 2429
ggacuuuauuuccaagaaa

SEQ ID NO: 188649 - RNA, 19 nt, Artificial Sequence
  Description of Artificial Sequence: Synthetic oligonucleotide
  Antisense strand to SEQ ID NO: 188648
uuucuuggaaauaaagucc

SEQ ID NO: 188650 - RNA, 19 nt, Artificial Sequence
  Description of Artificial Sequence: Synthetic oligonucleotide
  Sense strand starting at position 2231 of SEQ ID NO: 2429
cuguuagccgacuacagaa

SEQ ID NO: 188651 - RNA, 19 nt, Artificial Sequence
  Description of Artificial Sequence: Synthetic oligonucleotide
  Antisense strand to SEQ ID NO: 188650
uucuguagucggcuaacag

SEQ ID NO: 188652 - RNA, 19 nt, Artificial Sequence
  Description of Artificial Sequence: Synthetic oligonucleotide
  Sense strand starting at position 2033 of SEQ ID NO: 2429
ccgguuucucagugaggga

SEQ ID NO: 188653 - RNA, 19 nt, Artificial Sequence
  Description of Artificial Sequence: Synthetic oligonucleotide
  Antisense strand to SEQ ID NO: 188652
ucccucacugagaaaccgg

SEQ ID NO: 188654 - RNA, 19 nt, Artificial Sequence
  Description of Artificial Sequence: Synthetic oligonucleotide
  Sense strand starting at position 1470 of SEQ ID NO: 2429
gccuguaccugcuccaaga

SEQ ID NO: 188655 - RNA, 19 nt, Artificial Sequence
  Description of Artificial Sequence: Synthetic oligonucleotide
  Antisense strand to SEQ ID NO: 188654
ucuuggagcagguacaggc

SEQ ID NO: 188656 - RNA, 19 nt, Artificial Sequence
  Description of Artificial Sequence: Synthetic oligonucleotide
  Sense strand starting at position 994 of SEQ ID NO: 2429
cagcaaguuguccaaagga

SEQ ID NO: 188657 - RNA, 19 nt, Artificial Sequence
  Description of Artificial Sequence: Synthetic oligonucleotide
  Antisense strand to SEQ ID NO: 188656
uccuuuggacaacuugcug

SEQ ID NO: 188658 - RNA, 19 nt, Artificial Sequence
  Description of Artificial Sequence: Synthetic oligonucleotide
  Sense strand starting at position 747 of SEQ ID NO: 2429
aauuacuccuuguuagcga

SEQ ID NO: 188659 - RNA, 19 nt, Artificial Sequence
  Description of Artificial Sequence: Synthetic oligonucleotide
  Antisense strand to SEQ ID NO: 188658
ucgcuaacaaggaguaauu

SEQ ID NO: 188660 - RNA, 19 nt, Artificial Sequence
  Description of Artificial Sequence: Synthetic oligonucleotide
  Sense strand starting at position 745 of SEQ ID NO: 2429
ugaauuacuccuuguuagc

SEQ ID NO: 188661 - RNA, 19 nt, Artificial Sequence
  Description of Artificial Sequence: Synthetic oligonucleotide
  Antisense strand to SEQ ID NO: 188660
gcuaacaaggaguaauuca

SEQ ID NO: 188662 - RNA, 19 nt, Artificial Sequence
  Description of Artificial Sequence: Synthetic oligonucleotide
  Sense strand starting at position 744 of SEQ ID NO: 2429
augaauuacuccuuguuag

SEQ ID NO: 188663 - RNA, 19 nt, Artificial Sequence
  Description of Artificial Sequence: Synthetic oligonucleotide
  Antisense strand to SEQ ID NO: 188662
cuaacaaggaguaauucau

SEQ ID NO: 188664 - RNA, 19 nt, Artificial Sequence
  Description of Artificial Sequence: Synthetic oligonucleotide
  Sense strand starting at position 650 of SEQ ID NO: 2429
agugauccacgaggaugaa

SEQ ID NO: 188665 - RNA, 19 nt, Artificial Sequence
  Description of Artificial Sequence: Synthetic oligonucleotide
  Antisense strand to SEQ ID NO: 188664
uucauccucguggaucacu

SEQ ID NO: 188666 - RNA, 19 nt, Artificial Sequence
  Description of Artificial Sequence: Synthetic oligonucleotide
  Sense strand starting at position 647 of SEQ ID NO: 2429
gagagugauccacgaggau

SEQ ID NO: 188667 - RNA, 19 nt, Artificial Sequence
  Description of Artificial Sequence: Synthetic oligonucleotide
  Antisense strand to SEQ ID NO: 188666
auccucguggaucacucuc

SEQ ID NO: 188668 - RNA, 19 nt, Artificial Sequence
  Description of Artificial Sequence: Synthetic oligonucleotide
  Sense strand starting at position 630 of SEQ ID NO: 2429
acaugagaguacuuccaga

SEQ ID NO: 188669 - RNA, 19 nt, Artificial Sequence
  Description of Artificial Sequence: Synthetic oligonucleotide
  Antisense strand to SEQ ID NO: 188668
ucuggaaguacucucaugu

SEQ ID NO: 188670 - RNA, 19 nt, Artificial Sequence
  Description of Artificial Sequence: Synthetic oligonucleotide
  Sense strand starting at position 580 of SEQ ID NO: 2429
uuuauuggcuccucuggau

SEQ ID NO: 188671 - RNA, 19 nt, Artificial Sequence
  Description of Artificial Sequence: Synthetic oligonucleotide
  Antisense strand to SEQ ID NO: 188670
auccagaggagccaauaaa

SEQ ID NO: 188672 - RNA, 19 nt, Artificial Sequence
  Description of Artificial Sequence: Synthetic oligonucleotide
  Sense strand starting at position 519 of SEQ ID NO: 2429
gcgacagucgccagugaaa

SEQ ID NO: 188673 - RNA, 19 nt, Artificial Sequence
  Description of Artificial Sequence: Synthetic oligonucleotide
  Antisense strand to SEQ ID NO: 188672
uuucacuggcgacugucgc

SEQ ID NO: 188674 - RNA, 19 nt, Artificial Sequence
  Description of Artificial Sequence: Synthetic oligonucleotide
  Sense strand starting at position 267 of SEQ ID NO: 2429
guaaauaguuaacuacuca

SEQ ID NO: 188675 - RNA, 19 nt, Artificial Sequence
  Description of Artificial Sequence: Synthetic oligonucleotide
  Antisense strand to SEQ ID NO: 188674
ugaguaguuaacuauuuac

SEQ ID NO: 188676 - RNA, 19 nt, Artificial Sequence
  Description of Artificial Sequence: Synthetic oligonucleotide
  Sense strand starting at position 212 of SEQ ID NO: 2429
gggauuuauugguagaagg

SEQ ID NO: 188677 - RNA, 19 nt, Artificial Sequence
  Description of Artificial Sequence: Synthetic oligonucleotide
  Antisense strand to SEQ ID NO: 188676
ccuucuaccaauaaauccc

SEQ ID NO: 188678 - RNA, 19 nt, Artificial Sequence
  Description of Artificial Sequence: Synthetic oligonucleotide
  Sense strand starting at position 22 of SEQ ID NO: 2435
uuagguaauugauaaggga

SEQ ID NO: 188679 - RNA, 19 nt, Artificial Sequence
  Description of Artificial Sequence: Synthetic oligonucleotide
  Antisense strand to SEQ ID NO: 188678
ucccuuaucaauuaccuaa

SEQ ID NO: 188680 - RNA, 19 nt, Artificial Sequence
  Description of Artificial Sequence: Synthetic oligonucleotide
  Sense strand starting at position 100 of SEQ ID NO: 2435
agaugugcuuacucucuau

SEQ ID NO: 188681 - RNA, 19 nt, Artificial Sequence
  Description of Artificial Sequence: Synthetic oligonucleotide
  Antisense strand to SEQ ID NO: 188680
auagagaguaagcacaucu

SEQ ID NO: 188682 - RNA, 19 nt, Artificial Sequence
  Description of Artificial Sequence: Synthetic oligonucleotide
  Sense strand starting at position 103 of SEQ ID NO: 2435
ugugcuuacucucuaugga

SEQ ID NO: 188683 - RNA, 19 nt, Artificial Sequence
  Description of Artificial Sequence: Synthetic oligonucleotide
  Antisense strand to SEQ ID NO: 188682
uccauagagaguaagcaca

SEQ ID NO: 188684 - RNA, 19 nt, Artificial Sequence
  Description of Artificial Sequence: Synthetic oligonucleotide
  Sense strand starting at position 163 of SEQ ID NO: 2435
acagguuuguauuugcaau

SEQ ID NO: 188685 - RNA, 19 nt, Artificial Sequence
  Description of Artificial Sequence: Synthetic oligonucleotide
  Antisense strand to SEQ ID NO: 188684
auugcaaauacaaaccugu

SEQ ID NO: 188686 - RNA, 19 nt, Artificial Sequence
  Description of Artificial Sequence: Synthetic oligonucleotide
  Sense strand starting at position 209 of SEQ ID NO: 2435
acagucaugcgccacagaa

SEQ ID NO: 188687 - RNA, 19 nt, Artificial Sequence
  Description of Artificial Sequence: Synthetic oligonucleotide
  Antisense strand to SEQ ID NO: 188686
uucuguggcgcaugacugu

SEQ ID NO: 188688 - RNA, 19 nt, Artificial Sequence
  Description of Artificial Sequence: Synthetic oligonucleotide
  Sense strand starting at position 384 of SEQ ID NO: 2435
gagcaauagguaugcagua

SEQ ID NO: 188689 - RNA, 19 nt, Artificial Sequence
  Description of Artificial Sequence: Synthetic oligonucleotide
  Antisense strand to SEQ ID NO: 188688
uacugcauaccuauugcuc

SEQ ID NO: 188690 - RNA, 19 nt, Artificial Sequence
  Description of Artificial Sequence: Synthetic oligonucleotide
  Sense strand starting at position 416 of SEQ ID NO: 2435
agguuuauguaaguacauu

SEQ ID NO: 188691 - RNA, 19 nt, Artificial Sequence
  Description of Artificial Sequence: Synthetic oligonucleotide
  Antisense strand to SEQ ID NO: 188690
aauguacuuacauaaaccu

SEQ ID NO: 188692 - RNA, 19 nt, Artificial Sequence
  Description of Artificial Sequence: Synthetic oligonucleotide
  Sense strand starting at position 432 of SEQ ID NO: 2435
auucuacgauguuuacaca

SEQ ID NO: 188693 - RNA, 19 nt, Artificial Sequence
  Description of Artificial Sequence: Synthetic oligonucleotide
  Antisense strand to SEQ ID NO: 188692
uguguaaacaucguagaau

SEQ ID NO: 188694 - RNA, 19 nt, Artificial Sequence
  Description of Artificial Sequence: Synthetic oligonucleotide
  Sense strand starting at position 450 of SEQ ID NO: 2435
aaugaugaaucguuuaaug

SEQ ID NO: 188695 - RNA, 19 nt, Artificial Sequence
  Description of Artificial Sequence: Synthetic oligonucleotide
  Antisense strand to SEQ ID NO: 188694
cauuaaacgauucaucauu

SEQ ID NO: 188696 - RNA, 19 nt, Artificial Sequence
  Description of Artificial Sequence: Synthetic oligonucleotide
  Sense strand starting at position 452 of SEQ ID NO: 2435
ugaugaaucguuuaaugau

SEQ ID NO: 188697 - RNA, 19 nt, Artificial Sequence
  Description of Artificial Sequence: Synthetic oligonucleotide
  Antisense strand to SEQ ID NO: 188696
aucauuaaacgauucauca

SEQ ID NO: 188698 - RNA, 19 nt, Artificial Sequence
  Description of Artificial Sequence: Synthetic oligonucleotide
  Sense strand starting at position 485 of SEQ ID NO: 2435
guaugaccaugagaugaua

SEQ ID NO: 188699 - RNA, 19 nt, Artificial Sequence
  Description of Artificial Sequence: Synthetic oligonucleotide
  Antisense strand to SEQ ID NO: 188698
uaucaucucauggucauac

SEQ ID NO: 188700 - RNA, 19 nt, Artificial Sequence
  Description of Artificial Sequence: Synthetic oligonucleotide
  Sense strand starting at position 536 of SEQ ID NO: 2435
acuggauucuaacaggaau

SEQ ID NO: 188701 - RNA, 19 nt, Artificial Sequence
  Description of Artificial Sequence: Synthetic oligonucleotide
  Antisense strand to SEQ ID NO: 188700
auuccuguuagaauccagu

SEQ ID NO: 188702 - RNA, 19 nt, Artificial Sequence
  Description of Artificial Sequence: Synthetic oligonucleotide
  Sense strand starting at position 590 of SEQ ID NO: 2435
guuauaaagaguugaucag

SEQ ID NO: 188703 - RNA, 19 nt, Artificial Sequence
  Description of Artificial Sequence: Synthetic oligonucleotide
  Antisense strand to SEQ ID NO: 188702
cugaucaacucuuuauaac

SEQ ID NO: 188704 - RNA, 19 nt, Artificial Sequence
  Description of Artificial Sequence: Synthetic oligonucleotide
  Sense strand starting at position 638 of SEQ ID NO: 2435
uauuauacguucccaggau

SEQ ID NO: 188705 - RNA, 19 nt, Artificial Sequence
  Description of Artificial Sequence: Synthetic oligonucleotide
  Antisense strand to SEQ ID NO: 188704
auccugggaacguauaaua

SEQ ID NO: 188706 - RNA, 19 nt, Artificial Sequence
  Description of Artificial Sequence: Synthetic oligonucleotide
  Sense strand starting at position 642 of SEQ ID NO: 2435
auacguucccaggaugaau

SEQ ID NO: 188707 - RNA, 19 nt, Artificial Sequence
  Description of Artificial Sequence: Synthetic oligonucleotide
  Antisense strand to SEQ ID NO: 188706
auucauccugggaacguau

SEQ ID NO: 188708 - RNA, 19 nt, Artificial Sequence
  Description of Artificial Sequence: Synthetic oligonucleotide
  Sense strand starting at position 770 of SEQ ID NO: 2435
uuuguuguaauggagaaug

SEQ ID NO: 188709 - RNA, 19 nt, Artificial Sequence
  Description of Artificial Sequence: Synthetic oligonucleotide
  Antisense strand to SEQ ID NO: 188708
cauucuccauuacaacaaa

SEQ ID NO: 188710 - RNA, 19 nt, Artificial Sequence
  Description of Artificial Sequence: Synthetic oligonucleotide
  Sense strand starting at position 807 of SEQ ID NO: 2435
uaagacauugguuggccua

SEQ ID NO: 188711 - RNA, 19 nt, Artificial Sequence
  Description of Artificial Sequence: Synthetic oligonucleotide
  Antisense strand to SEQ ID NO: 188710
uaggccaaccaaugucuua

SEQ ID NO: 188712 - RNA, 19 nt, Artificial Sequence
  Description of Artificial Sequence: Synthetic oligonucleotide
  Sense strand starting at position 808 of SEQ ID NO: 2435
aagacauugguuggccuau

SEQ ID NO: 188713 - RNA, 19 nt, Artificial Sequence
  Description of Artificial Sequence: Synthetic oligonucleotide
  Antisense strand to SEQ ID NO: 188712
auaggccaaccaaugucuu

SEQ ID NO: 188714 - RNA, 19 nt, Artificial Sequence
  Description of Artificial Sequence: Synthetic oligonucleotide
  Sense strand starting at position 892 of SEQ ID NO: 2435
cugcuuaguagugcuguua

SEQ ID NO: 188715 - RNA, 19 nt, Artificial Sequence
  Description of Artificial Sequence: Synthetic oligonucleotide
  Antisense strand to SEQ ID NO: 188714
uaacagcacuacuaagcag

SEQ ID NO: 188716 - RNA, 19 nt, Artificial Sequence
  Description of Artificial Sequence: Synthetic oligonucleotide
  Sense strand starting at position 893 of SEQ ID NO: 2435
ugcuuaguagugcuguuaa

SEQ ID NO: 188717 - RNA, 19 nt, Artificial Sequence
  Description of Artificial Sequence: Synthetic oligonucleotide
  Antisense strand to SEQ ID NO: 188716
uuaacagcacuacuaagca

SEQ ID NO: 188718 - RNA, 19 nt, Artificial Sequence
  Description of Artificial Sequence: Synthetic oligonucleotide
  Sense strand starting at position 989 of SEQ ID NO: 2435
ucgccaucgaccuaaugau

SEQ ID NO: 188719 - RNA, 19 nt, Artificial Sequence
  Description of Artificial Sequence: Synthetic oligonucleotide
  Antisense strand to SEQ ID NO: 188718
aucauuaggucgauggcga

SEQ ID NO: 188720 - RNA, 19 nt, Artificial Sequence
  Description of Artificial Sequence: Synthetic oligonucleotide
  Sense strand starting at position 1025 of SEQ ID NO: 2435
gaauaaagugcagaugcaa

SEQ ID NO: 188721 - RNA, 19 nt, Artificial Sequence
  Description of Artificial Sequence: Synthetic oligonucleotide
  Antisense strand to SEQ ID NO: 188720
uugcaucugcacuuuauuc

SEQ ID NO: 188722 - RNA, 19 nt, Artificial Sequence
  Description of Artificial Sequence: Synthetic oligonucleotide
  Sense strand starting at position 1859 of SEQ ID NO: 2435
acuauuaugccaggaaaga

SEQ ID NO: 188723 - RNA, 19 nt, Artificial Sequence
  Description of Artificial Sequence: Synthetic oligonucleotide
  Antisense strand to SEQ ID NO: 188722
ucuuuccuggcauaauagu

SEQ ID NO: 188724 - RNA, 19 nt, Artificial Sequence
  Description of Artificial Sequence: Synthetic oligonucleotide
  Sense strand starting at position 1981 of SEQ ID NO: 2435
agguaauuauuugugugca

SEQ ID NO: 188725 - RNA, 19 nt, Artificial Sequence
  Description of Artificial Sequence: Synthetic oligonucleotide
  Antisense strand to SEQ ID NO: 188724
ugcacacaaauaauuaccu

SEQ ID NO: 188726 - RNA, 19 nt, Artificial Sequence
  Description of Artificial Sequence: Synthetic oligonucleotide
  Sense strand starting at position 1983 of SEQ ID NO: 2435
guaauuauuugugugcaaa

SEQ ID NO: 188727 - RNA, 19 nt, Artificial Sequence
  Description of Artificial Sequence: Synthetic oligonucleotide
  Antisense strand to SEQ ID NO: 188726
uuugcacacaaauaauuac

SEQ ID NO: 188728 - RNA, 19 nt, Artificial Sequence
  Description of Artificial Sequence: Synthetic oligonucleotide
  Sense strand starting at position 2244 of SEQ ID NO: 2435
aggcuuagaugagagaauu

SEQ ID NO: 188729 - RNA, 19 nt, Artificial Sequence
  Description of Artificial Sequence: Synthetic oligonucleotide
  Antisense strand to SEQ ID NO: 188728
aauucucucaucuaagccu

SEQ ID NO: 188730 - RNA, 19 nt, Artificial Sequence
  Description of Artificial Sequence: Synthetic oligonucleotide
  Sense strand starting at position 2410 of SEQ ID NO: 2435
uaaucaagagucuagcagu

SEQ ID NO: 188731 - RNA, 19 nt, Artificial Sequence
  Description of Artificial Sequence: Synthetic oligonucleotide
  Antisense strand to SEQ ID NO: 188730
acugcuagacucuugauua

SEQ ID NO: 188732 - RNA, 19 nt, Artificial Sequence
  Description of Artificial Sequence: Synthetic oligonucleotide
  Sense strand starting at position 2639 of SEQ ID NO: 2435
ccaaacguuguugguauaa

SEQ ID NO: 188733 - RNA, 19 nt, Artificial Sequence
  Description of Artificial Sequence: Synthetic oligonucleotide
  Antisense strand to SEQ ID NO: 188732
uuauaccaacaacguuugg

SEQ ID NO: 188734 - RNA, 19 nt, Artificial Sequence
  Description of Artificial Sequence: Synthetic oligonucleotide
  Sense strand starting at position 2688 of SEQ ID NO: 2435
ccauguagacaauguauga

SEQ ID NO: 188735 - RNA, 19 nt, Artificial Sequence
  Description of Artificial Sequence: Synthetic oligonucleotide
  Antisense strand to SEQ ID NO: 188734
ucauacauugucuacaugg

SEQ ID NO: 188736 - RNA, 19 nt, Artificial Sequence
  Description of Artificial Sequence: Synthetic oligonucleotide
  Sense strand starting at position 2692 of SEQ ID NO: 2435
guagacaauguaugauguu

SEQ ID NO: 188737 - RNA, 19 nt, Artificial Sequence
  Description of Artificial Sequence: Synthetic oligonucleotide
  Antisense strand to SEQ ID NO: 188736
aacaucauacauugucuac

SEQ ID NO: 188738 - RNA, 19 nt, Artificial Sequence
  Description of Artificial Sequence: Synthetic oligonucleotide
  Sense strand starting at position 2717 of SEQ ID NO: 2435
aaggcaucugacgaauucu

SEQ ID NO: 188739 - RNA, 19 nt, Artificial Sequence
  Description of Artificial Sequence: Synthetic oligonucleotide
  Antisense strand to SEQ ID NO: 188738
agaauucgucagaugccuu

SEQ ID NO: 188740 - RNA, 19 nt, Artificial Sequence
  Description of Artificial Sequence: Synthetic oligonucleotide
  Sense strand starting at position 2896 of SEQ ID NO: 2435
cccggcuaauucuuccaua

SEQ ID NO: 188741 - RNA, 19 nt, Artificial Sequence
  Description of Artificial Sequence: Synthetic oligonucleotide
  Antisense strand to SEQ ID NO: 188740
uauggaagaauuagccggg

SEQ ID NO: 188742 - RNA, 19 nt, Artificial Sequence
  Description of Artificial Sequence: Synthetic oligonucleotide
  Sense strand starting at position 2897 of SEQ ID NO: 2435
ccggcuaauucuuccauau

SEQ ID NO: 188743 - RNA, 19 nt, Artificial Sequence
  Description of Artificial Sequence: Synthetic oligonucleotide
  Antisense strand to SEQ ID NO: 188742
auauggaagaauuagccgg

SEQ ID NO: 188744 - RNA, 19 nt, Artificial Sequence
  Description of Artificial Sequence: Synthetic oligonucleotide
  Sense strand starting at position 3156 of SEQ ID NO: 2435
cuuaaauucuaauaggaag

SEQ ID NO: 188745 - RNA, 19 nt, Artificial Sequence
  Description of Artificial Sequence: Synthetic oligonucleotide
  Antisense strand to SEQ ID NO: 188744
cuuccuauuagaauuuaag

SEQ ID NO: 188746 - RNA, 19 nt, Artificial Sequence
  Description of Artificial Sequence: Synthetic oligonucleotide
  Sense strand starting at position 3509 of SEQ ID NO: 2435
uuauaauuagauggccuau

SEQ ID NO: 188747 - RNA, 19 nt, Artificial Sequence
  Description of Artificial Sequence: Synthetic oligonucleotide
  Antisense strand to SEQ ID NO: 188746
auaggccaucuaauuauaa

SEQ ID NO: 188748 - RNA, 19 nt, Artificial Sequence
  Description of Artificial Sequence: Synthetic oligonucleotide
  Sense strand starting at position 3663 of SEQ ID NO: 2435
gugagagaaucucuuugag

SEQ ID NO: 188749 - RNA, 19 nt, Artificial Sequence
  Description of Artificial Sequence: Synthetic oligonucleotide
  Antisense strand to SEQ ID NO: 188748
cucaaagagauucucucac

SEQ ID NO: 188750 - RNA, 19 nt, Artificial Sequence
  Description of Artificial Sequence: Synthetic oligonucleotide
  Sense strand starting at position 3665 of SEQ ID NO: 2435
gagagaaucucuuugaguc

SEQ ID NO: 188751 - RNA, 19 nt, Artificial Sequence
  Description of Artificial Sequence: Synthetic oligonucleotide
  Antisense strand to SEQ ID NO: 188750
gacucaaagagauucucuc

SEQ ID NO: 188752 - RNA, 19 nt, Artificial Sequence
  Description of Artificial Sequence: Synthetic oligonucleotide
  Sense strand starting at position 3784 of SEQ ID NO: 2435
acaaguuuccaacaguguu

SEQ ID NO: 188753 - RNA, 19 nt, Artificial Sequence
  Description of Artificial Sequence: Synthetic oligonucleotide
  Antisense strand to SEQ ID NO: 188752
aacacuguuggaaacuugu

SEQ ID NO: 188754 - RNA, 19 nt, Artificial Sequence
  Description of Artificial Sequence: Synthetic oligonucleotide
  Sense strand starting at position 3893 of SEQ ID NO: 2435
gauguaaagcuguaaagcu

SEQ ID NO: 188755 - RNA, 19 nt, Artificial Sequence
  Description of Artificial Sequence: Synthetic oligonucleotide
  Antisense strand to SEQ ID NO: 188754
agcuuuacagcuuuacauc

SEQ ID NO: 188756 - RNA, 19 nt, Artificial Sequence
  Description of Artificial Sequence: Synthetic oligonucleotide
  Sense strand starting at position 3971 of SEQ ID NO: 2435
ggauguaacacguaaggau

SEQ ID NO: 188757 - RNA, 19 nt, Artificial Sequence
  Description of Artificial Sequence: Synthetic oligonucleotide
  Antisense strand to SEQ ID NO: 188756
auccuuacguguuacaucc

SEQ ID NO: 188758 - RNA, 19 nt, Artificial Sequence
  Description of Artificial Sequence: Synthetic oligonucleotide
  Sense strand starting at position 400 of SEQ ID NO: 2439
uuuacagcuuuguagcaau

SEQ ID NO: 188759 - RNA, 19 nt, Artificial Sequence
  Description of Artificial Sequence: Synthetic oligonucleotide
  Antisense strand to SEQ ID NO: 188758
auugcuacaaagcuguaaa

SEQ ID NO: 188760 - RNA, 19 nt, Artificial Sequence
  Description of Artificial Sequence: Synthetic oligonucleotide
  Sense strand starting at position 403 of SEQ ID NO: 2439
acagcuuuguagcaaugau

SEQ ID NO: 188761 - RNA, 19 nt, Artificial Sequence
  Description of Artificial Sequence: Synthetic oligonucleotide
  Antisense strand to SEQ ID NO: 188760
aucauugcuacaaagcugu

SEQ ID NO: 188762 - RNA, 19 nt, Artificial Sequence
  Description of Artificial Sequence: Synthetic oligonucleotide
  Sense strand starting at position 413 of SEQ ID NO: 2439
agcaaugauucuguuaaag

SEQ ID NO: 188763 - RNA, 19 nt, Artificial Sequence
  Description of Artificial Sequence: Synthetic oligonucleotide
  Antisense strand to SEQ ID NO: 188762
cuuuaacagaaucauugcu

SEQ ID NO: 188764 - RNA, 19 nt, Artificial Sequence
  Description of Artificial Sequence: Synthetic oligonucleotide
  Sense strand starting at position 824 of SEQ ID NO: 2439
agugacauuuauuaaacgu

SEQ ID NO: 188765 - RNA, 19 nt, Artificial Sequence
  Description of Artificial Sequence: Synthetic oligonucleotide
  Antisense strand to SEQ ID NO: 188764
acguuuaauaaaugucacu

SEQ ID NO: 188766 - RNA, 19 nt, Artificial Sequence
  Description of Artificial Sequence: Synthetic oligonucleotide
  Sense strand starting at position 841 of SEQ ID NO: 2439
guacaacacugagaucauc

SEQ ID NO: 188767 - RNA, 19 nt, Artificial Sequence
  Description of Artificial Sequence: Synthetic oligonucleotide
  Antisense strand to SEQ ID NO: 188766
gaugaucucaguguuguac

SEQ ID NO: 188768 - RNA, 19 nt, Artificial Sequence
  Description of Artificial Sequence: Synthetic oligonucleotide
  Sense strand starting at position 2130 of SEQ ID NO: 2439
ggccgagucccaugacaac

SEQ ID NO: 188769 - RNA, 19 nt, Artificial Sequence
  Description of Artificial Sequence: Synthetic oligonucleotide
  Antisense strand to SEQ ID NO: 188768
guugucaugggacucggcc

SEQ ID NO: 188770 - RNA, 19 nt, Artificial Sequence
  Description of Artificial Sequence: Synthetic oligonucleotide
  Sense strand starting at position 2826 of SEQ ID NO: 2439
caggguuggugugugaaau

SEQ ID NO: 188771 - RNA, 19 nt, Artificial Sequence
  Description of Artificial Sequence: Synthetic oligonucleotide
  Antisense strand to SEQ ID NO: 188770
auuucacacaccaacccug

SEQ ID NO: 188772 - RNA, 19 nt, Artificial Sequence
  Description of Artificial Sequence: Synthetic oligonucleotide
  Sense strand starting at position 2827 of SEQ ID NO: 2439
aggguuggugugugaaaua

SEQ ID NO: 188773 - RNA, 19 nt, Artificial Sequence
  Description of Artificial Sequence: Synthetic oligonucleotide
  Antisense strand to SEQ ID NO: 188772
uauuucacacaccaacccu

SEQ ID NO: 188774 - RNA, 19 nt, Artificial Sequence
  Description of Artificial Sequence: Synthetic oligonucleotide
  Sense strand starting at position 2832 of SEQ ID NO: 2439
uggugugugaaauaauaag

SEQ ID NO: 188775 - RNA, 19 nt, Artificial Sequence
  Description of Artificial Sequence: Synthetic oligonucleotide
  Antisense strand to SEQ ID NO: 188774
cuuauuauuucacacacca

SEQ ID NO: 188776 - RNA, 19 nt, Artificial Sequence
  Description of Artificial Sequence: Synthetic oligonucleotide
  Sense strand starting at position 3193 of SEQ ID NO: 2439
agggaaggugcagaguauu

SEQ ID NO: 188777 - RNA, 19 nt, Artificial Sequence
  Description of Artificial Sequence: Synthetic oligonucleotide
  Antisense strand to SEQ ID NO: 188776
aauacucugcaccuucccu

SEQ ID NO: 188778 - RNA, 19 nt, Artificial Sequence
  Description of Artificial Sequence: Synthetic oligonucleotide
  Sense strand starting at position 3279 of SEQ ID NO: 2439
cccuccaagucguuaauaa

SEQ ID NO: 188779 - RNA, 19 nt, Artificial Sequence
  Description of Artificial Sequence: Synthetic oligonucleotide
  Antisense strand to SEQ ID NO: 188778
uuauuaacgacuuggaggg

SEQ ID NO: 188780 - RNA, 19 nt, Artificial Sequence
  Description of Artificial Sequence: Synthetic oligonucleotide
  Sense strand starting at position 3280 of SEQ ID NO: 2439
ccuccaagucguuaauaaa

SEQ ID NO: 188781 - RNA, 19 nt, Artificial Sequence
  Description of Artificial Sequence: Synthetic oligonucleotide
  Antisense strand to SEQ ID NO: 188780
uuuauuaacgacuuggagg

SEQ ID NO: 188782 - RNA, 19 nt, Artificial Sequence
  Description of Artificial Sequence: Synthetic oligonucleotide
  Sense strand starting at position 3307 of SEQ ID NO: 2439
ggccgggcgucuuguuaaa

SEQ ID NO: 188783 - RNA, 19 nt, Artificial Sequence
  Description of Artificial Sequence: Synthetic oligonucleotide
  Antisense strand to SEQ ID NO: 188782
uuuaacaagacgcccggcc

SEQ ID NO: 188784 - RNA, 19 nt, Artificial Sequence
  Description of Artificial Sequence: Synthetic oligonucleotide
  Sense strand starting at position 3309 of SEQ ID NO: 2439
ccgggcgucuuguuaaaua

SEQ ID NO: 188785 - RNA, 19 nt, Artificial Sequence
  Description of Artificial Sequence: Synthetic oligonucleotide
  Antisense strand to SEQ ID NO: 188784
uauuuaacaagacgcccgg

SEQ ID NO: 188786 - RNA, 19 nt, Artificial Sequence
  Description of Artificial Sequence: Synthetic oligonucleotide
  Sense strand starting at position 3329 of SEQ ID NO: 2439
uuguaucaaugacuugauu

SEQ ID NO: 188787 - RNA, 19 nt, Artificial Sequence
  Description of Artificial Sequence: Synthetic oligonucleotide
  Antisense strand to SEQ ID NO: 188786
aaucaagucauugauacaa

SEQ ID NO: 188788 - RNA, 19 nt, Artificial Sequence
  Description of Artificial Sequence: Synthetic oligonucleotide
  Sense strand starting at position 3344 of SEQ ID NO: 2439
gauuuagauuaaugaggau

SEQ ID NO: 188789 - RNA, 19 nt, Artificial Sequence
  Description of Artificial Sequence: Synthetic oligonucleotide
  Antisense strand to SEQ ID NO: 188788
auccucauuaaucuaaauc

SEQ ID NO: 188790 - RNA, 19 nt, Artificial Sequence
  Description of Artificial Sequence: Synthetic oligonucleotide
  Sense strand starting at position 3403 of SEQ ID NO: 2439
guagguaaugucggugaua

SEQ ID NO: 188791 - RNA, 19 nt, Artificial Sequence
  Description of Artificial Sequence: Synthetic oligonucleotide
  Antisense strand to SEQ ID NO: 188790
uaucaccgacauuaccuac

SEQ ID NO: 188792 - RNA, 19 nt, Artificial Sequence
  Description of Artificial Sequence: Synthetic oligonucleotide
  Sense strand starting at position 3404 of SEQ ID NO: 2439
uagguaaugucggugauag

SEQ ID NO: 188793 - RNA, 19 nt, Artificial Sequence
  Description of Artificial Sequence: Synthetic oligonucleotide
  Antisense strand to SEQ ID NO: 188792
cuaucaccgacauuaccua

SEQ ID NO: 188794 - RNA, 19 nt, Artificial Sequence
  Description of Artificial Sequence: Synthetic oligonucleotide
  Sense strand starting at position 3405 of SEQ ID NO: 2439
agguaaugucggugauaga

SEQ ID NO: 188795 - RNA, 19 nt, Artificial Sequence
  Description of Artificial Sequence: Synthetic oligonucleotide
  Antisense strand to SEQ ID NO: 188794
ucuaucaccgacauuaccu

SEQ ID NO: 188796 - RNA, 19 nt, Artificial Sequence
  Description of Artificial Sequence: Synthetic oligonucleotide
  Sense strand starting at position 3406 of SEQ ID NO: 2439
gguaaugucggugauagau

SEQ ID NO: 188797 - RNA, 19 nt, Artificial Sequence
  Description of Artificial Sequence: Synthetic oligonucleotide
  Antisense strand to SEQ ID NO: 188796
aucuaucaccgacauuacc

SEQ ID NO: 188798 - RNA, 19 nt, Artificial Sequence
  Description of Artificial Sequence: Synthetic oligonucleotide
  Sense strand starting at position 3408 of SEQ ID NO: 2439
uaaugucggugauagauau

SEQ ID NO: 188799 - RNA, 19 nt, Artificial Sequence
  Description of Artificial Sequence: Synthetic oligonucleotide
  Antisense strand to SEQ ID NO: 188798
auaucuaucaccgacauua

SEQ ID NO: 188800 - RNA, 19 nt, Artificial Sequence
  Description of Artificial Sequence: Synthetic oligonucleotide
  Sense strand starting at position 3412 of SEQ ID NO: 2439
gucggugauagauauaaag

SEQ ID NO: 188801 - RNA, 19 nt, Artificial Sequence
  Description of Artificial Sequence: Synthetic oligonucleotide
  Antisense strand to SEQ ID NO: 188800
cuuuauaucuaucaccgac

SEQ ID NO: 188802 - RNA, 19 nt, Artificial Sequence
  Description of Artificial Sequence: Synthetic oligonucleotide
  Sense strand starting at position 3442 of SEQ ID NO: 2439
ucuccagauguggaaucuu

SEQ ID NO: 188803 - RNA, 19 nt, Artificial Sequence
  Description of Artificial Sequence: Synthetic oligonucleotide
  Antisense strand to SEQ ID NO: 188802
aagauuccacaucuggaga

SEQ ID NO: 188804 - RNA, 19 nt, Artificial Sequence
  Description of Artificial Sequence: Synthetic oligonucleotide
  Sense strand starting at position 3460 of SEQ ID NO: 2439
ucuacuggauccuguaaca

SEQ ID NO: 188805 - RNA, 19 nt, Artificial Sequence
  Description of Artificial Sequence: Synthetic oligonucleotide
  Antisense strand to SEQ ID NO: 188804
uguuacaggauccaguaga

SEQ ID NO: 188806 - RNA, 19 nt, Artificial Sequence
  Description of Artificial Sequence: Synthetic oligonucleotide
  Sense strand starting at position 3547 of SEQ ID NO: 2439
ggcgcauugcuugagccua

SEQ ID NO: 188807 - RNA, 19 nt, Artificial Sequence
  Description of Artificial Sequence: Synthetic oligonucleotide
  Antisense strand to SEQ ID NO: 188806
uaggcucaagcaaugcgcc

SEQ ID NO: 188808 - RNA, 19 nt, Artificial Sequence
  Description of Artificial Sequence: Synthetic oligonucleotide
  Sense strand starting at position 3698 of SEQ ID NO: 2439
uugcaaaguuagccgagau

SEQ ID NO: 188809 - RNA, 19 nt, Artificial Sequence
  Description of Artificial Sequence: Synthetic oligonucleotide
  Antisense strand to SEQ ID NO: 188808
aucucggcuaacuuugcaa

SEQ ID NO: 188810 - RNA, 19 nt, Artificial Sequence
  Description of Artificial Sequence: Synthetic oligonucleotide
  Sense strand starting at position 3699 of SEQ ID NO: 2439
ugcaaaguuagccgagauc

SEQ ID NO: 188811 - RNA, 19 nt, Artificial Sequence
  Description of Artificial Sequence: Synthetic oligonucleotide
  Antisense strand to SEQ ID NO: 188810
gaucucggcuaacuuugca

SEQ ID NO: 188812 - RNA, 19 nt, Artificial Sequence
  Description of Artificial Sequence: Synthetic oligonucleotide
  Sense strand starting at position 3803 of SEQ ID NO: 2439
gcaaauaaagucugcaauu

SEQ ID NO: 188813 - RNA, 19 nt, Artificial Sequence
  Description of Artificial Sequence: Synthetic oligonucleotide
  Antisense strand to SEQ ID NO: 188812
aauugcagacuuuauuugc

SEQ ID NO: 188814 - RNA, 19 nt, Artificial Sequence
  Description of Artificial Sequence: Synthetic oligonucleotide
  Sense strand starting at position 3827 of SEQ ID NO: 2439
auaguauuguaccagcuuu

SEQ ID NO: 188815 - RNA, 19 nt, Artificial Sequence
  Description of Artificial Sequence: Synthetic oligonucleotide
  Antisense strand to SEQ ID NO: 188814
aaagcugguacaauacuau

SEQ ID NO: 188816 - RNA, 19 nt, Artificial Sequence
  Description of Artificial Sequence: Synthetic oligonucleotide
  Sense strand starting at position 3867 of SEQ ID NO: 2439
guaccauggucauauguau

SEQ ID NO: 188817 - RNA, 19 nt, Artificial Sequence
  Description of Artificial Sequence: Synthetic oligonucleotide
  Antisense strand to SEQ ID NO: 188816
auacauaugaccaugguac

SEQ ID NO: 188818 - RNA, 19 nt, Artificial Sequence
  Description of Artificial Sequence: Synthetic oligonucleotide
  Sense strand starting at position 3873 of SEQ ID NO: 2439
uggucauauguauguaaca

SEQ ID NO: 188819 - RNA, 19 nt, Artificial Sequence
  Description of Artificial Sequence: Synthetic oligonucleotide
  Antisense strand to SEQ ID NO: 188818
uguuacauacauaugacca

SEQ ID NO: 188820 - RNA, 19 nt, Artificial Sequence
  Description of Artificial Sequence: Synthetic oligonucleotide
  Sense strand starting at position 3874 of SEQ ID NO: 2439
ggucauauguauguaacau

SEQ ID NO: 188821 - RNA, 19 nt, Artificial Sequence
  Description of Artificial Sequence: Synthetic oligonucleotide
  Antisense strand to SEQ ID NO: 188820
auguuacauacauaugacc

SEQ ID NO: 188822 - RNA, 19 nt, Artificial Sequence
  Description of Artificial Sequence: Synthetic oligonucleotide
  Sense strand starting at position 3884 of SEQ ID NO: 2439
auguaacauuaaggaaacu

SEQ ID NO: 188823 - RNA, 19 nt, Artificial Sequence
  Description of Artificial Sequence: Synthetic oligonucleotide
  Antisense strand to SEQ ID NO: 188822
aguuuccuuaauguuacau

SEQ ID NO: 188824 - RNA, 19 nt, Artificial Sequence
  Description of Artificial Sequence: Synthetic oligonucleotide
  Sense strand starting at position 3979 of SEQ ID NO: 2439
ugcuuugagauaggaucua

SEQ ID NO: 188825 - RNA, 19 nt, Artificial Sequence
  Description of Artificial Sequence: Synthetic oligonucleotide
  Antisense strand to SEQ ID NO: 188824
uagauccuaucucaaagca

SEQ ID NO: 188826 - RNA, 19 nt, Artificial Sequence
  Description of Artificial Sequence: Synthetic oligonucleotide
  Sense strand starting at position 149 of SEQ ID NO: 2438
uuuacagcuuuguagcaau

SEQ ID NO: 188827 - RNA, 19 nt, Artificial Sequence
  Description of Artificial Sequence: Synthetic oligonucleotide
  Antisense strand to SEQ ID NO: 188826
auugcuacaaagcuguaaa

SEQ ID NO: 188828 - RNA, 19 nt, Artificial Sequence
  Description of Artificial Sequence: Synthetic oligonucleotide
  Sense strand starting at position 152 of SEQ ID NO: 2438
acagcuuuguagcaaugau

SEQ ID NO: 188829 - RNA, 19 nt, Artificial Sequence
  Description of Artificial Sequence: Synthetic oligonucleotide
  Antisense strand to SEQ ID NO: 188828
aucauugcuacaaagcugu

SEQ ID NO: 188830 - RNA, 19 nt, Artificial Sequence
  Description of Artificial Sequence: Synthetic oligonucleotide
  Sense strand starting at position 162 of SEQ ID NO: 2438
agcaaugauucuguuaaag

SEQ ID NO: 188831 - RNA, 19 nt, Artificial Sequence
  Description of Artificial Sequence: Synthetic oligonucleotide
  Antisense strand to SEQ ID NO: 188830
cuuuaacagaaucauugcu

SEQ ID NO: 188832 - RNA, 19 nt, Artificial Sequence
  Description of Artificial Sequence: Synthetic oligonucleotide
  Sense strand starting at position 573 of SEQ ID NO: 2438
agugacauuuauuaaacgu

SEQ ID NO: 188833 - RNA, 19 nt, Artificial Sequence
  Description of Artificial Sequence: Synthetic oligonucleotide
  Antisense strand to SEQ ID NO: 188832
acguuuaauaaaugucacu

SEQ ID NO: 188834 - RNA, 19 nt, Artificial Sequence
  Description of Artificial Sequence: Synthetic oligonucleotide
  Sense strand starting at position 590 of SEQ ID NO: 2438
guacaacacugagaucauc

SEQ ID NO: 188835 - RNA, 19 nt, Artificial Sequence
  Description of Artificial Sequence: Synthetic oligonucleotide
  Antisense strand to SEQ ID NO: 188834
gaugaucucaguguuguac

SEQ ID NO: 188836 - RNA, 19 nt, Artificial Sequence
  Description of Artificial Sequence: Synthetic oligonucleotide
  Sense strand starting at position 1879 of SEQ ID NO: 2438
ggccgagucccaugacaac

SEQ ID NO: 188837 - RNA, 19 nt, Artificial Sequence
  Description of Artificial Sequence: Synthetic oligonucleotide
  Antisense strand to SEQ ID NO: 188836
guugucaugggacucggcc

SEQ ID NO: 188838 - RNA, 19 nt, Artificial Sequence
  Description of Artificial Sequence: Synthetic oligonucleotide
  Sense strand starting at position 2575 of SEQ ID NO: 2438
caggguuggugugugaaau

SEQ ID NO: 188839 - RNA, 19 nt, Artificial Sequence
  Description of Artificial Sequence: Synthetic oligonucleotide
  Antisense strand to SEQ ID NO: 188838
auuucacacaccaacccug

SEQ ID NO: 188840 - RNA, 19 nt, Artificial Sequence
  Description of Artificial Sequence: Synthetic oligonucleotide
  Sense strand starting at position 2576 of SEQ ID NO: 2438
aggguuggugugugaaaua

SEQ ID NO: 188841 - RNA, 19 nt, Artificial Sequence
  Description of Artificial Sequence: Synthetic oligonucleotide
  Antisense strand to SEQ ID NO: 188840
uauuucacacaccaacccu

SEQ ID NO: 188842 - RNA, 19 nt, Artificial Sequence
  Description of Artificial Sequence: Synthetic oligonucleotide
  Sense strand starting at position 2581 of SEQ ID NO: 2438
uggugugugaaauaauaag

SEQ ID NO: 188843 - RNA, 19 nt, Artificial Sequence
  Description of Artificial Sequence: Synthetic oligonucleotide
  Antisense strand to SEQ ID NO: 188842
cuuauuauuucacacacca

SEQ ID NO: 188844 - RNA, 19 nt, Artificial Sequence
  Description of Artificial Sequence: Synthetic oligonucleotide
  Sense strand starting at position 2942 of SEQ ID NO: 2438
agggaaggugcagaguauu

SEQ ID NO: 188845 - RNA, 19 nt, Artificial Sequence
  Description of Artificial Sequence: Synthetic oligonucleotide
  Antisense strand to SEQ ID NO: 188844
aauacucugcaccuucccu

SEQ ID NO: 188846 - RNA, 19 nt, Artificial Sequence
  Description of Artificial Sequence: Synthetic oligonucleotide
  Sense strand starting at position 3028 of SEQ ID NO: 2438
cccuccaagucguuaauaa

SEQ ID NO: 188847 - RNA, 19 nt, Artificial Sequence
  Description of Artificial Sequence: Synthetic oligonucleotide
  Antisense strand to SEQ ID NO: 188846
uuauuaacgacuuggaggg

SEQ ID NO: 188848 - RNA, 19 nt, Artificial Sequence
  Description of Artificial Sequence: Synthetic oligonucleotide
  Sense strand starting at position 3029 of SEQ ID NO: 2438
ccuccaagucguuaauaaa

SEQ ID NO: 188849 - RNA, 19 nt, Artificial Sequence
  Description of Artificial Sequence: Synthetic oligonucleotide
  Antisense strand to SEQ ID NO: 188848
uuuauuaacgacuuggagg

SEQ ID NO: 188850 - RNA, 19 nt, Artificial Sequence
  Description of Artificial Sequence: Synthetic oligonucleotide
  Sense strand starting at position 3056 of SEQ ID NO: 2438
ggccgggcgucuuguuaaa

SEQ ID NO: 188851 - RNA, 19 nt, Artificial Sequence
  Description of Artificial Sequence: Synthetic oligonucleotide
  Antisense strand to SEQ ID NO: 188850
uuuaacaagacgcccggcc

SEQ ID NO: 188852 - RNA, 19 nt, Artificial Sequence
  Description of Artificial Sequence: Synthetic oligonucleotide
  Sense strand starting at position 3058 of SEQ ID NO: 2438
ccgggcgucuuguuaaaua

SEQ ID NO: 188853 - RNA, 19 nt, Artificial Sequence
  Description of Artificial Sequence: Synthetic oligonucleotide
  Antisense strand to SEQ ID NO: 188852
uauuuaacaagacgcccgg

SEQ ID NO: 188854 - RNA, 19 nt, Artificial Sequence
  Description of Artificial Sequence: Synthetic oligonucleotide
  Sense strand starting at position 3078 of SEQ ID NO: 2438
uuguaucaaugacuugauu

SEQ ID NO: 188855 - RNA, 19 nt, Artificial Sequence
  Description of Artificial Sequence: Synthetic oligonucleotide
  Antisense strand to SEQ ID NO: 188854
aaucaagucauugauacaa

SEQ ID NO: 188856 - RNA, 19 nt, Artificial Sequence
  Description of Artificial Sequence: Synthetic oligonucleotide
  Sense strand starting at position 3093 of SEQ ID NO: 2438
gauuuagauuaaugaggau

SEQ ID NO: 188857 - RNA, 19 nt, Artificial Sequence
  Description of Artificial Sequence: Synthetic oligonucleotide
  Antisense strand to SEQ ID NO: 188856
auccucauuaaucuaaauc

SEQ ID NO: 188858 - RNA, 19 nt, Artificial Sequence
  Description of Artificial Sequence: Synthetic oligonucleotide
  Sense strand starting at position 3152 of SEQ ID NO: 2438
guagguaaugucggugaua

SEQ ID NO: 188859 - RNA, 19 nt, Artificial Sequence
  Description of Artificial Sequence: Synthetic oligonucleotide
  Antisense strand to SEQ ID NO: 188858
uaucaccgacauuaccuac

SEQ ID NO: 188860 - RNA, 19 nt, Artificial Sequence
  Description of Artificial Sequence: Synthetic oligonucleotide
  Sense strand starting at position 3153 of SEQ ID NO: 2438
uagguaaugucggugauag

SEQ ID NO: 188861 - RNA, 19 nt, Artificial Sequence
  Description of Artificial Sequence: Synthetic oligonucleotide
  Antisense strand to SEQ ID NO: 188860
cuaucaccgacauuaccua

SEQ ID NO: 188862 - RNA, 19 nt, Artificial Sequence
  Description of Artificial Sequence: Synthetic oligonucleotide
  Sense strand starting at position 3154 of SEQ ID NO: 2438
agguaaugucggugauaga

SEQ ID NO: 188863 - RNA, 19 nt, Artificial Sequence
  Description of Artificial Sequence: Synthetic oligonucleotide
  Antisense strand to SEQ ID NO: 188862
ucuaucaccgacauuaccu

SEQ ID NO: 188864 - RNA, 19 nt, Artificial Sequence
  Description of Artificial Sequence: Synthetic oligonucleotide
  Sense strand starting at position 3155 of SEQ ID NO: 2438
gguaaugucggugauagau

SEQ ID NO: 188865 - RNA, 19 nt, Artificial Sequence
  Description of Artificial Sequence: Synthetic oligonucleotide
  Antisense strand to SEQ ID NO: 188864
aucuaucaccgacauuacc

SEQ ID NO: 188866 - RNA, 19 nt, Artificial Sequence
  Description of Artificial Sequence: Synthetic oligonucleotide
  Sense strand starting at position 3157 of SEQ ID NO: 2438
uaaugucggugauagauau

SEQ ID NO: 188867 - RNA, 19 nt, Artificial Sequence
  Description of Artificial Sequence: Synthetic oligonucleotide
  Antisense strand to SEQ ID NO: 188866
auaucuaucaccgacauua

SEQ ID NO: 188868 - RNA, 19 nt, Artificial Sequence
  Description of Artificial Sequence: Synthetic oligonucleotide
  Sense strand starting at position 3161 of SEQ ID NO: 2438
gucggugauagauauaaag

SEQ ID NO: 188869 - RNA, 19 nt, Artificial Sequence
  Description of Artificial Sequence: Synthetic oligonucleotide
  Antisense strand to SEQ ID NO: 188868
cuuuauaucuaucaccgac

SEQ ID NO: 188870 - RNA, 19 nt, Artificial Sequence
  Description of Artificial Sequence: Synthetic oligonucleotide
  Sense strand starting at position 3191 of SEQ ID NO: 2438
ucuccagauguggaaucuu

SEQ ID NO: 188871 - RNA, 19 nt, Artificial Sequence
  Description of Artificial Sequence: Synthetic oligonucleotide
  Antisense strand to SEQ ID NO: 188870
aagauuccacaucuggaga

SEQ ID NO: 188872 - RNA, 19 nt, Artificial Sequence
  Description of Artificial Sequence: Synthetic oligonucleotide
  Sense strand starting at position 3209 of SEQ ID NO: 2438
ucuacuggauccuguaaca

SEQ ID NO: 188873 - RNA, 19 nt, Artificial Sequence
  Description of Artificial Sequence: Synthetic oligonucleotide
  Antisense strand to SEQ ID NO: 188872
uguuacaggauccaguaga

SEQ ID NO: 188874 - RNA, 19 nt, Artificial Sequence
  Description of Artificial Sequence: Synthetic oligonucleotide
  Sense strand starting at position 3296 of SEQ ID NO: 2438
ggcgcauugcuugagccua

SEQ ID NO: 188875 - RNA, 19 nt, Artificial Sequence
  Description of Artificial Sequence: Synthetic oligonucleotide
  Antisense strand to SEQ ID NO: 188874
uaggcucaagcaaugcgcc

SEQ ID NO: 188876 - RNA, 19 nt, Artificial Sequence
  Description of Artificial Sequence: Synthetic oligonucleotide
  Sense strand starting at position 3447 of SEQ ID NO: 2438
uugcaaaguuagccgagau

SEQ ID NO: 188877 - RNA, 19 nt, Artificial Sequence
  Description of Artificial Sequence: Synthetic oligonucleotide
  Antisense strand to SEQ ID NO: 188876
aucucggcuaacuuugcaa

SEQ ID NO: 188878 - RNA, 19 nt, Artificial Sequence
  Description of Artificial Sequence: Synthetic oligonucleotide
  Sense strand starting at position 3448 of SEQ ID NO: 2438
ugcaaaguuagccgagauc

SEQ ID NO: 188879 - RNA, 19 nt, Artificial Sequence
  Description of Artificial Sequence: Synthetic oligonucleotide
  Antisense strand to SEQ ID NO: 188878
gaucucggcuaacuuugca

SEQ ID NO: 188880 - RNA, 19 nt, Artificial Sequence
  Description of Artificial Sequence: Synthetic oligonucleotide
  Sense strand starting at position 3552 of SEQ ID NO: 2438
gcaaauaaagucugcaauu

SEQ ID NO: 188881 - RNA, 19 nt, Artificial Sequence
  Description of Artificial Sequence: Synthetic oligonucleotide
  Antisense strand to SEQ ID NO: 188880
aauugcagacuuuauuugc

SEQ ID NO: 188882 - RNA, 19 nt, Artificial Sequence
  Description of Artificial Sequence: Synthetic oligonucleotide
  Sense strand starting at position 3576 of SEQ ID NO: 2438
auaguauuguaccagcuuu

SEQ ID NO: 188883 - RNA, 19 nt, Artificial Sequence
  Description of Artificial Sequence: Synthetic oligonucleotide
  Antisense strand to SEQ ID NO: 188882
aaagcugguacaauacuau

SEQ ID NO: 188884 - RNA, 19 nt, Artificial Sequence
  Description of Artificial Sequence: Synthetic oligonucleotide
  Sense strand starting at position 3616 of SEQ ID NO: 2438
guaccauggucauauguau

SEQ ID NO: 188885 - RNA, 19 nt, Artificial Sequence
  Description of Artificial Sequence: Synthetic oligonucleotide
  Antisense strand to SEQ ID NO: 188884
auacauaugaccaugguac

SEQ ID NO: 188886 - RNA, 19 nt, Artificial Sequence
  Description of Artificial Sequence: Synthetic oligonucleotide
  Sense strand starting at position 3622 of SEQ ID NO: 2438
uggucauauguauguaaca

SEQ ID NO: 188887 - RNA, 19 nt, Artificial Sequence
  Description of Artificial Sequence: Synthetic oligonucleotide
  Antisense strand to SEQ ID NO: 188886
uguuacauacauaugacca

SEQ ID NO: 188888 - RNA, 19 nt, Artificial Sequence
  Description of Artificial Sequence: Synthetic oligonucleotide
  Sense strand starting at position 3623 of SEQ ID NO: 2438
ggucauauguauguaacau

SEQ ID NO: 188889 - RNA, 19 nt, Artificial Sequence
  Description of Artificial Sequence: Synthetic oligonucleotide
  Antisense strand to SEQ ID NO: 188888
auguuacauacauaugacc

SEQ ID NO: 188890 - RNA, 19 nt, Artificial Sequence
  Description of Artificial Sequence: Synthetic oligonucleotide
  Sense strand starting at position 3633 of SEQ ID NO: 2438
auguaacauuaaggaaacu

SEQ ID NO: 188891 - RNA, 19 nt, Artificial Sequence
  Description of Artificial Sequence: Synthetic oligonucleotide
  Antisense strand to SEQ ID NO: 188890
aguuuccuuaauguuacau

SEQ ID NO: 188892 - RNA, 19 nt, Artificial Sequence
  Description of Artificial Sequence: Synthetic oligonucleotide
  Sense strand starting at position 3728 of SEQ ID NO: 2438
ugcuuugagauaggaucua

SEQ ID NO: 188893 - RNA, 19 nt, Artificial Sequence
  Description of Artificial Sequence: Synthetic oligonucleotide
  Antisense strand to SEQ ID NO: 188892
uagauccuaucucaaagca

SEQ ID NO: 188894 - RNA, 19 nt, Artificial Sequence
  Description of Artificial Sequence: Synthetic oligonucleotide
  Sense strand starting at position 3741 of SEQ ID NO: 2438
gaucuaugucgccaaggcu

SEQ ID NO: 188895 - RNA, 19 nt, Artificial Sequence
  Description of Artificial Sequence: Synthetic oligonucleotide
  Antisense strand to SEQ ID NO: 188894
agccuuggcgacauagauc

SEQ ID NO: 188896 - RNA, 19 nt, Artificial Sequence
  Description of Artificial Sequence: Synthetic oligonucleotide
  Sense strand starting at position 3827 of SEQ ID NO: 2438
ucagccaucugagcaacua

SEQ ID NO: 188897 - RNA, 19 nt, Artificial Sequence
  Description of Artificial Sequence: Synthetic oligonucleotide
  Antisense strand to SEQ ID NO: 188896
uaguugcucagauggcuga

SEQ ID NO: 188898 - RNA, 19 nt, Artificial Sequence
  Description of Artificial Sequence: Synthetic oligonucleotide
  Sense strand starting at position 32 of SEQ ID NO: 2432
auaauauagccauggauau

SEQ ID NO: 188899 - RNA, 19 nt, Artificial Sequence
  Description of Artificial Sequence: Synthetic oligonucleotide
  Antisense strand to SEQ ID NO: 188898
auauccauggcuauauuau

SEQ ID NO: 188900 - RNA, 19 nt, Artificial Sequence
  Description of Artificial Sequence: Synthetic oligonucleotide
  Sense strand starting at position 453 of SEQ ID NO: 2432
uuuacagcuuuguagcaau

SEQ ID NO: 188901 - RNA, 19 nt, Artificial Sequence
  Description of Artificial Sequence: Synthetic oligonucleotide
  Antisense strand to SEQ ID NO: 188900
auugcuacaaagcuguaaa

SEQ ID NO: 188902 - RNA, 19 nt, Artificial Sequence
  Description of Artificial Sequence: Synthetic oligonucleotide
  Sense strand starting at position 456 of SEQ ID NO: 2432
acagcuuuguagcaaugau

SEQ ID NO: 188903 - RNA, 19 nt, Artificial Sequence
  Description of Artificial Sequence: Synthetic oligonucleotide
  Antisense strand to SEQ ID NO: 188902
aucauugcuacaaagcugu

SEQ ID NO: 188904 - RNA, 19 nt, Artificial Sequence
  Description of Artificial Sequence: Synthetic oligonucleotide
  Sense strand starting at position 466 of SEQ ID NO: 2432
agcaaugauucuguuaaag

SEQ ID NO: 188905 - RNA, 19 nt, Artificial Sequence
  Description of Artificial Sequence: Synthetic oligonucleotide
  Antisense strand to SEQ ID NO: 188904
cuuuaacagaaucauugcu

SEQ ID NO: 188906 - RNA, 19 nt, Artificial Sequence
  Description of Artificial Sequence: Synthetic oligonucleotide
  Sense strand starting at position 877 of SEQ ID NO: 2432
agugacauuuauuaaacgu

SEQ ID NO: 188907 - RNA, 19 nt, Artificial Sequence
  Description of Artificial Sequence: Synthetic oligonucleotide
  Antisense strand to SEQ ID NO: 188906
acguuuaauaaaugucacu

SEQ ID NO: 188908 - RNA, 19 nt, Artificial Sequence
  Description of Artificial Sequence: Synthetic oligonucleotide
  Sense strand starting at position 894 of SEQ ID NO: 2432
guacaacacugagaucauc

SEQ ID NO: 188909 - RNA, 19 nt, Artificial Sequence
  Description of Artificial Sequence: Synthetic oligonucleotide
  Antisense strand to SEQ ID NO: 188908
gaugaucucaguguuguac

SEQ ID NO: 188910 - RNA, 19 nt, Artificial Sequence
  Description of Artificial Sequence: Synthetic oligonucleotide
  Sense strand starting at position 2183 of SEQ ID NO: 2432
ggccgagucccaugacaac

SEQ ID NO: 188911 - RNA, 19 nt, Artificial Sequence
  Description of Artificial Sequence: Synthetic oligonucleotide
  Antisense strand to SEQ ID NO: 188910
guugucaugggacucggcc

SEQ ID NO: 188912 - RNA, 19 nt, Artificial Sequence
  Description of Artificial Sequence: Synthetic oligonucleotide
  Sense strand starting at position 2879 of SEQ ID NO: 2432
caggguuggugugugaaau

SEQ ID NO: 188913 - RNA, 19 nt, Artificial Sequence
  Description of Artificial Sequence: Synthetic oligonucleotide
  Antisense strand to SEQ ID NO: 188912
auuucacacaccaacccug

SEQ ID NO: 188914 - RNA, 19 nt, Artificial Sequence
  Description of Artificial Sequence: Synthetic oligonucleotide
  Sense strand starting at position 2880 of SEQ ID NO: 2432
aggguuggugugugaaaua

SEQ ID NO: 188915 - RNA, 19 nt, Artificial Sequence
  Description of Artificial Sequence: Synthetic oligonucleotide
  Antisense strand to SEQ ID NO: 188914
uauuucacacaccaacccu

SEQ ID NO: 188916 - RNA, 19 nt, Artificial Sequence
  Description of Artificial Sequence: Synthetic oligonucleotide
  Sense strand starting at position 2885 of SEQ ID NO: 2432
uggugugugaaauaauaag

SEQ ID NO: 188917 - RNA, 19 nt, Artificial Sequence
  Description of Artificial Sequence: Synthetic oligonucleotide
  Antisense strand to SEQ ID NO: 188916
cuuauuauuucacacacca

SEQ ID NO: 188918 - RNA, 19 nt, Artificial Sequence
  Description of Artificial Sequence: Synthetic oligonucleotide
  Sense strand starting at position 3246 of SEQ ID NO: 2432
agggaaggugcagaguauu

SEQ ID NO: 188919 - RNA, 19 nt, Artificial Sequence
  Description of Artificial Sequence: Synthetic oligonucleotide
  Antisense strand to SEQ ID NO: 188918
aauacucugcaccuucccu

SEQ ID NO: 188920 - RNA, 19 nt, Artificial Sequence
  Description of Artificial Sequence: Synthetic oligonucleotide
  Sense strand starting at position 3332 of SEQ ID NO: 2432
cccuccaagucguuaauaa

SEQ ID NO: 188921 - RNA, 19 nt, Artificial Sequence
  Description of Artificial Sequence: Synthetic oligonucleotide
  Antisense strand to SEQ ID NO: 188920
uuauuaacgacuuggaggg

SEQ ID NO: 188922 - RNA, 19 nt, Artificial Sequence
  Description of Artificial Sequence: Synthetic oligonucleotide
  Sense strand starting at position 3333 of SEQ ID NO: 2432
ccuccaagucguuaauaaa

SEQ ID NO: 188923 - RNA, 19 nt, Artificial Sequence
  Description of Artificial Sequence: Synthetic oligonucleotide
  Antisense strand to SEQ ID NO: 188922
uuuauuaacgacuuggagg

SEQ ID NO: 188924 - RNA, 19 nt, Artificial Sequence
  Description of Artificial Sequence: Synthetic oligonucleotide
  Sense strand starting at position 3360 of SEQ ID NO: 2432
ggccgggcgucuuguuaaa

SEQ ID NO: 188925 - RNA, 19 nt, Artificial Sequence
  Description of Artificial Sequence: Synthetic oligonucleotide
  Antisense strand to SEQ ID NO: 188924
uuuaacaagacgcccggcc

SEQ ID NO: 188926 - RNA, 19 nt, Artificial Sequence
  Description of Artificial Sequence: Synthetic oligonucleotide
  Sense strand starting at position 3362 of SEQ ID NO: 2432
ccgggcgucuuguuaaaua

SEQ ID NO: 188927 - RNA, 19 nt, Artificial Sequence
  Description of Artificial Sequence: Synthetic oligonucleotide
  Antisense strand to SEQ ID NO: 188926
uauuuaacaagacgcccgg

SEQ ID NO: 188928 - RNA, 19 nt, Artificial Sequence
  Description of Artificial Sequence: Synthetic oligonucleotide
  Sense strand starting at position 3382 of SEQ ID NO: 2432
uuguaucaaugacuugauu

SEQ ID NO: 188929 - RNA, 19 nt, Artificial Sequence
  Description of Artificial Sequence: Synthetic oligonucleotide
  Antisense strand to SEQ ID NO: 188928
aaucaagucauugauacaa

SEQ ID NO: 188930 - RNA, 19 nt, Artificial Sequence
  Description of Artificial Sequence: Synthetic oligonucleotide
  Sense strand starting at position 3397 of SEQ ID NO: 2432
gauuuagauuaaugaggau

SEQ ID NO: 188931 - RNA, 19 nt, Artificial Sequence
  Description of Artificial Sequence: Synthetic oligonucleotide
  Antisense strand to SEQ ID NO: 188930
auccucauuaaucuaaauc

SEQ ID NO: 188932 - RNA, 19 nt, Artificial Sequence
  Description of Artificial Sequence: Synthetic oligonucleotide
  Sense strand starting at position 3456 of SEQ ID NO: 2432
guagguaaugucggugaua

SEQ ID NO: 188933 - RNA, 19 nt, Artificial Sequence
  Description of Artificial Sequence: Synthetic oligonucleotide
  Antisense strand to SEQ ID NO: 188932
uaucaccgacauuaccuac

SEQ ID NO: 188934 - RNA, 19 nt, Artificial Sequence
  Description of Artificial Sequence: Synthetic oligonucleotide
  Sense strand starting at position 3457 of SEQ ID NO: 2432
uagguaaugucggugauag

SEQ ID NO: 188935 - RNA, 19 nt, Artificial Sequence
  Description of Artificial Sequence: Synthetic oligonucleotide
  Antisense strand to SEQ ID NO: 188934
cuaucaccgacauuaccua

SEQ ID NO: 188936 - RNA, 19 nt, Artificial Sequence
  Description of Artificial Sequence: Synthetic oligonucleotide
  Sense strand starting at position 3458 of SEQ ID NO: 2432
agguaaugucggugauaga

SEQ ID NO: 188937 - RNA, 19 nt, Artificial Sequence
  Description of Artificial Sequence: Synthetic oligonucleotide
  Antisense strand to SEQ ID NO: 188936
ucuaucaccgacauuaccu

SEQ ID NO: 188938 - RNA, 19 nt, Artificial Sequence
  Description of Artificial Sequence: Synthetic oligonucleotide
  Sense strand starting at position 3459 of SEQ ID NO: 2432
gguaaugucggugauagau

SEQ ID NO: 188939 - RNA, 19 nt, Artificial Sequence
  Description of Artificial Sequence: Synthetic oligonucleotide
  Antisense strand to SEQ ID NO: 188938
aucuaucaccgacauuacc

SEQ ID NO: 188940 - RNA, 19 nt, Artificial Sequence
  Description of Artificial Sequence: Synthetic oligonucleotide
  Sense strand starting at position 3461 of SEQ ID NO: 2432
uaaugucggugauagauau

SEQ ID NO: 188941 - RNA, 19 nt, Artificial Sequence
  Description of Artificial Sequence: Synthetic oligonucleotide
  Antisense strand to SEQ ID NO: 188940
auaucuaucaccgacauua

SEQ ID NO: 188942 - RNA, 19 nt, Artificial Sequence
  Description of Artificial Sequence: Synthetic oligonucleotide
  Sense strand starting at position 3465 of SEQ ID NO: 2432
gucggugauagauauaaag

SEQ ID NO: 188943 - RNA, 19 nt, Artificial Sequence
  Description of Artificial Sequence: Synthetic oligonucleotide
  Antisense strand to SEQ ID NO: 188942
cuuuauaucuaucaccgac

SEQ ID NO: 188944 - RNA, 19 nt, Artificial Sequence
  Description of Artificial Sequence: Synthetic oligonucleotide
  Sense strand starting at position 3495 of SEQ ID NO: 2432
ucuccagauguggaaucuu

SEQ ID NO: 188945 - RNA, 19 nt, Artificial Sequence
  Description of Artificial Sequence: Synthetic oligonucleotide
  Antisense strand to SEQ ID NO: 188944
aagauuccacaucuggaga

SEQ ID NO: 188946 - RNA, 19 nt, Artificial Sequence
  Description of Artificial Sequence: Synthetic oligonucleotide
  Sense strand starting at position 3513 of SEQ ID NO: 2432
ucuacuggauccuguaaca

SEQ ID NO: 188947 - RNA, 19 nt, Artificial Sequence
  Description of Artificial Sequence: Synthetic oligonucleotide
  Antisense strand to SEQ ID NO: 188946
uguuacaggauccaguaga

SEQ ID NO: 188948 - RNA, 19 nt, Artificial Sequence
  Description of Artificial Sequence: Synthetic oligonucleotide
  Sense strand starting at position 3600 of SEQ ID NO: 2432
ggcgcauugcuugagccua

SEQ ID NO: 188949 - RNA, 19 nt, Artificial Sequence
  Description of Artificial Sequence: Synthetic oligonucleotide
  Antisense strand to SEQ ID NO: 188948
uaggcucaagcaaugcgcc

SEQ ID NO: 188950 - RNA, 19 nt, Artificial Sequence
  Description of Artificial Sequence: Synthetic oligonucleotide
  Sense strand starting at position 3751 of SEQ ID NO: 2432
uugcaaaguuagccgagau

SEQ ID NO: 188951 - RNA, 19 nt, Artificial Sequence
  Description of Artificial Sequence: Synthetic oligonucleotide
  Antisense strand to SEQ ID NO: 188950
aucucggcuaacuuugcaa

SEQ ID NO: 188952 - RNA, 19 nt, Artificial Sequence
  Description of Artificial Sequence: Synthetic oligonucleotide
  Sense strand starting at position 3752 of SEQ ID NO: 2432
ugcaaaguuagccgagauc

SEQ ID NO: 188953 - RNA, 19 nt, Artificial Sequence
  Description of Artificial Sequence: Synthetic oligonucleotide
  Antisense strand to SEQ ID NO: 188952
gaucucggcuaacuuugca

SEQ ID NO: 188954 - RNA, 19 nt, Artificial Sequence
  Description of Artificial Sequence: Synthetic oligonucleotide
  Sense strand starting at position 3856 of SEQ ID NO: 2432
gcaaauaaagucugcaauu

SEQ ID NO: 188955 - RNA, 19 nt, Artificial Sequence
  Description of Artificial Sequence: Synthetic oligonucleotide
  Antisense strand to SEQ ID NO: 188954
aauugcagacuuuauuugc

SEQ ID NO: 188956 - RNA, 19 nt, Artificial Sequence
  Description of Artificial Sequence: Synthetic oligonucleotide
  Sense strand starting at position 3880 of SEQ ID NO: 2432
auaguauuguaccagcuuu

SEQ ID NO: 188957 - RNA, 19 nt, Artificial Sequence
  Description of Artificial Sequence: Synthetic oligonucleotide
  Antisense strand to SEQ ID NO: 188956
aaagcugguacaauacuau

SEQ ID NO: 188958 - RNA, 19 nt, Artificial Sequence
  Description of Artificial Sequence: Synthetic oligonucleotide
  Sense strand starting at position 3920 of SEQ ID NO: 2432
guaccauggucauauguau

SEQ ID NO: 188959 - RNA, 19 nt, Artificial Sequence
  Description of Artificial Sequence: Synthetic oligonucleotide
  Antisense strand to SEQ ID NO: 188958
auacauaugaccaugguac

SEQ ID NO: 188960 - RNA, 19 nt, Artificial Sequence
  Description of Artificial Sequence: Synthetic oligonucleotide
  Sense strand starting at position 3926 of SEQ ID NO: 2432
uggucauauguauguaaca

SEQ ID NO: 188961 - RNA, 19 nt, Artificial Sequence
  Description of Artificial Sequence: Synthetic oligonucleotide
  Antisense strand to SEQ ID NO: 188960
uguuacauacauaugacca

SEQ ID NO: 188962 - RNA, 19 nt, Artificial Sequence
  Description of Artificial Sequence: Synthetic oligonucleotide
  Sense strand starting at position 3927 of SEQ ID NO: 2432
ggucauauguauguaacau

SEQ ID NO: 188963 - RNA, 19 nt, Artificial Sequence
  Description of Artificial Sequence: Synthetic oligonucleotide
  Antisense strand to SEQ ID NO: 188962
auguuacauacauaugacc

SEQ ID NO: 188964 - RNA, 19 nt, Artificial Sequence
  Description of Artificial Sequence: Synthetic oligonucleotide
  Sense strand starting at position 3937 of SEQ ID NO: 2432
auguaacauuaaggaaacu

SEQ ID NO: 188965 - RNA, 19 nt, Artificial Sequence
  Description of Artificial Sequence: Synthetic oligonucleotide
  Antisense strand to SEQ ID NO: 188964
aguuuccuuaauguuacau

SEQ ID NO: 188966 - RNA, 19 nt, Artificial Sequence
  Description of Artificial Sequence: Synthetic oligonucleotide
  Sense strand starting at position 30 of SEQ ID NO: 2433
gugaaagccuucucccuca

SEQ ID NO: 188967 - RNA, 19 nt, Artificial Sequence
  Description of Artificial Sequence: Synthetic oligonucleotide
  Antisense strand to SEQ ID NO: 188966
ugagggagaaggcuuucac

SEQ ID NO: 188968 - RNA, 19 nt, Artificial Sequence
  Description of Artificial Sequence: Synthetic oligonucleotide
  Sense strand starting at position 100 of SEQ ID NO: 2433
auaauauagccauggauau

SEQ ID NO: 188969 - RNA, 19 nt, Artificial Sequence
  Description of Artificial Sequence: Synthetic oligonucleotide
  Antisense strand to SEQ ID NO: 188968
auauccauggcuauauuau

SEQ ID NO: 188970 - RNA, 19 nt, Artificial Sequence
  Description of Artificial Sequence: Synthetic oligonucleotide
  Sense strand starting at position 521 of SEQ ID NO: 2433
uuuacagcuuuguagcaau

SEQ ID NO: 188971 - RNA, 19 nt, Artificial Sequence
  Description of Artificial Sequence: Synthetic oligonucleotide
  Antisense strand to SEQ ID NO: 188970
auugcuacaaagcuguaaa

SEQ ID NO: 188972 - RNA, 19 nt, Artificial Sequence
  Description of Artificial Sequence: Synthetic oligonucleotide
  Sense strand starting at position 524 of SEQ ID NO: 2433
acagcuuuguagcaaugau

SEQ ID NO: 188973 - RNA, 19 nt, Artificial Sequence
  Description of Artificial Sequence: Synthetic oligonucleotide
  Antisense strand to SEQ ID NO: 188972
aucauugcuacaaagcugu

SEQ ID NO: 188974 - RNA, 19 nt, Artificial Sequence
  Description of Artificial Sequence: Synthetic oligonucleotide
  Sense strand starting at position 534 of SEQ ID NO: 2433
agcaaugauucuguuaaag

SEQ ID NO: 188975 - RNA, 19 nt, Artificial Sequence
  Description of Artificial Sequence: Synthetic oligonucleotide
  Antisense strand to SEQ ID NO: 188974
cuuuaacagaaucauugcu

SEQ ID NO: 188976 - RNA, 19 nt, Artificial Sequence
  Description of Artificial Sequence: Synthetic oligonucleotide
  Sense strand starting at position 945 of SEQ ID NO: 2433
agugacauuuauuaaacgu

SEQ ID NO: 188977 - RNA, 19 nt, Artificial Sequence
  Description of Artificial Sequence: Synthetic oligonucleotide
  Antisense strand to SEQ ID NO: 188976
acguuuaauaaaugucacu

SEQ ID NO: 188978 - RNA, 19 nt, Artificial Sequence
  Description of Artificial Sequence: Synthetic oligonucleotide
  Sense strand starting at position 962 of SEQ ID NO: 2433
guacaacacugagaucauc

SEQ ID NO: 188979 - RNA, 19 nt, Artificial Sequence
  Description of Artificial Sequence: Synthetic oligonucleotide
  Antisense strand to SEQ ID NO: 188978
gaugaucucaguguuguac

SEQ ID NO: 188980 - RNA, 19 nt, Artificial Sequence
  Description of Artificial Sequence: Synthetic oligonucleotide
  Sense strand starting at position 2251 of SEQ ID NO: 2433
ggccgagucccaugacaac

SEQ ID NO: 188981 - RNA, 19 nt, Artificial Sequence
  Description of Artificial Sequence: Synthetic oligonucleotide
  Antisense strand to SEQ ID NO: 188980
guugucaugggacucggcc

SEQ ID NO: 188982 - RNA, 19 nt, Artificial Sequence
  Description of Artificial Sequence: Synthetic oligonucleotide
  Sense strand starting at position 2947 of SEQ ID NO: 2433
caggguuggugugugaaau

SEQ ID NO: 188983 - RNA, 19 nt, Artificial Sequence
  Description of Artificial Sequence: Synthetic oligonucleotide
  Antisense strand to SEQ ID NO: 188982
auuucacacaccaacccug

SEQ ID NO: 188984 - RNA, 19 nt, Artificial Sequence
  Description of Artificial Sequence: Synthetic oligonucleotide
  Sense strand starting at position 2948 of SEQ ID NO: 2433
aggguuggugugugaaaua

SEQ ID NO: 188985 - RNA, 19 nt, Artificial Sequence
  Description of Artificial Sequence: Synthetic oligonucleotide
  Antisense strand to SEQ ID NO: 188984
uauuucacacaccaacccu

SEQ ID NO: 188986 - RNA, 19 nt, Artificial Sequence
  Description of Artificial Sequence: Synthetic oligonucleotide
  Sense strand starting at position 2953 of SEQ ID NO: 2433
uggugugugaaauaauaag

SEQ ID NO: 188987 - RNA, 19 nt, Artificial Sequence
  Description of Artificial Sequence: Synthetic oligonucleotide
  Antisense strand to SEQ ID NO: 188986
cuuauuauuucacacacca

SEQ ID NO: 188988 - RNA, 19 nt, Artificial Sequence
  Description of Artificial Sequence: Synthetic oligonucleotide
  Sense strand starting at position 3314 of SEQ ID NO: 2433
agggaaggugcagaguauu

SEQ ID NO: 188989 - RNA, 19 nt, Artificial Sequence
  Description of Artificial Sequence: Synthetic oligonucleotide
  Antisense strand to SEQ ID NO: 188988
aauacucugcaccuucccu

SEQ ID NO: 188990 - RNA, 19 nt, Artificial Sequence
  Description of Artificial Sequence: Synthetic oligonucleotide
  Sense strand starting at position 3400 of SEQ ID NO: 2433
cccuccaagucguuaauaa

SEQ ID NO: 188991 - RNA, 19 nt, Artificial Sequence
  Description of Artificial Sequence: Synthetic oligonucleotide
  Antisense strand to SEQ ID NO: 188990
uuauuaacgacuuggaggg

SEQ ID NO: 188992 - RNA, 19 nt, Artificial Sequence
  Description of Artificial Sequence: Synthetic oligonucleotide
  Sense strand starting at position 3401 of SEQ ID NO: 2433
ccuccaagucguuaauaaa

SEQ ID NO: 188993 - RNA, 19 nt, Artificial Sequence
  Description of Artificial Sequence: Synthetic oligonucleotide
  Antisense strand to SEQ ID NO: 188992
uuuauuaacgacuuggagg

SEQ ID NO: 188994 - RNA, 19 nt, Artificial Sequence
  Description of Artificial Sequence: Synthetic oligonucleotide
  Sense strand starting at position 3428 of SEQ ID NO: 2433
ggccgggcgucuuguuaaa

SEQ ID NO: 188995 - RNA, 19 nt, Artificial Sequence
  Description of Artificial Sequence: Synthetic oligonucleotide
  Antisense strand to SEQ ID NO: 188994
uuuaacaagacgcccggcc

SEQ ID NO: 188996 - RNA, 19 nt, Artificial Sequence
  Description of Artificial Sequence: Synthetic oligonucleotide
  Sense strand starting at position 3430 of SEQ ID NO: 2433
ccgggcgucuuguuaaaua

SEQ ID NO: 188997 - RNA, 19 nt, Artificial Sequence
  Description of Artificial Sequence: Synthetic oligonucleotide
  Antisense strand to SEQ ID NO: 188996
uauuuaacaagacgcccgg

SEQ ID NO: 188998 - RNA, 19 nt, Artificial Sequence
  Description of Artificial Sequence: Synthetic oligonucleotide
  Sense strand starting at position 3450 of SEQ ID NO: 2433
uuguaucaaugacuugauu

SEQ ID NO: 188999 - RNA, 19 nt, Artificial Sequence
  Description of Artificial Sequence: Synthetic oligonucleotide
  Antisense strand to SEQ ID NO: 188998
aaucaagucauugauacaa

SEQ ID NO: 189000 - RNA, 19 nt, Artificial Sequence
  Description of Artificial Sequence: Synthetic oligonucleotide
  Sense strand starting at position 3465 of SEQ ID NO: 2433
gauuuagauuaaugaggau

SEQ ID NO: 189001 - RNA, 19 nt, Artificial Sequence
  Description of Artificial Sequence: Synthetic oligonucleotide
  Antisense strand to SEQ ID NO: 189000
auccucauuaaucuaaauc

SEQ ID NO: 189002 - RNA, 19 nt, Artificial Sequence
  Description of Artificial Sequence: Synthetic oligonucleotide
  Sense strand starting at position 3524 of SEQ ID NO: 2433
guagguaaugucggugaua

SEQ ID NO: 189003 - RNA, 19 nt, Artificial Sequence
  Description of Artificial Sequence: Synthetic oligonucleotide
  Antisense strand to SEQ ID NO: 189002
uaucaccgacauuaccuac

SEQ ID NO: 189004 - RNA, 19 nt, Artificial Sequence
  Description of Artificial Sequence: Synthetic oligonucleotide
  Sense strand starting at position 3525 of SEQ ID NO: 2433
uagguaaugucggugauag

SEQ ID NO: 189005 - RNA, 19 nt, Artificial Sequence
  Description of Artificial Sequence: Synthetic oligonucleotide
  Antisense strand to SEQ ID NO: 189004
cuaucaccgacauuaccua

SEQ ID NO: 189006 - RNA, 19 nt, Artificial Sequence
  Description of Artificial Sequence: Synthetic oligonucleotide
  Sense strand starting at position 3526 of SEQ ID NO: 2433
agguaaugucggugauaga

SEQ ID NO: 189007 - RNA, 19 nt, Artificial Sequence
  Description of Artificial Sequence: Synthetic oligonucleotide
  Antisense strand to SEQ ID NO: 189006
ucuaucaccgacauuaccu

SEQ ID NO: 189008 - RNA, 19 nt, Artificial Sequence
  Description of Artificial Sequence: Synthetic oligonucleotide
  Sense strand starting at position 3527 of SEQ ID NO: 2433
gguaaugucggugauagau

SEQ ID NO: 189009 - RNA, 19 nt, Artificial Sequence
  Description of Artificial Sequence: Synthetic oligonucleotide
  Antisense strand to SEQ ID NO: 189008
aucuaucaccgacauuacc

SEQ ID NO: 189010 - RNA, 19 nt, Artificial Sequence
  Description of Artificial Sequence: Synthetic oligonucleotide
  Sense strand starting at position 3529 of SEQ ID NO: 2433
uaaugucggugauagauau

SEQ ID NO: 189011 - RNA, 19 nt, Artificial Sequence
  Description of Artificial Sequence: Synthetic oligonucleotide
  Antisense strand to SEQ ID NO: 189010
auaucuaucaccgacauua

SEQ ID NO: 189012 - RNA, 19 nt, Artificial Sequence
  Description of Artificial Sequence: Synthetic oligonucleotide
  Sense strand starting at position 3533 of SEQ ID NO: 2433
gucggugauagauauaaag

SEQ ID NO: 189013 - RNA, 19 nt, Artificial Sequence
  Description of Artificial Sequence: Synthetic oligonucleotide
  Antisense strand to SEQ ID NO: 189012
cuuuauaucuaucaccgac

SEQ ID NO: 189014 - RNA, 19 nt, Artificial Sequence
  Description of Artificial Sequence: Synthetic oligonucleotide
  Sense strand starting at position 3563 of SEQ ID NO: 2433
ucuccagauguggaaucuu

SEQ ID NO: 189015 - RNA, 19 nt, Artificial Sequence
  Description of Artificial Sequence: Synthetic oligonucleotide
  Antisense strand to SEQ ID NO: 189014
aagauuccacaucuggaga

SEQ ID NO: 189016 - RNA, 19 nt, Artificial Sequence
  Description of Artificial Sequence: Synthetic oligonucleotide
  Sense strand starting at position 3581 of SEQ ID NO: 2433
ucuacuggauccuguaaca

SEQ ID NO: 189017 - RNA, 19 nt, Artificial Sequence
  Description of Artificial Sequence: Synthetic oligonucleotide
  Antisense strand to SEQ ID NO: 189016
uguuacaggauccaguaga

SEQ ID NO: 189018 - RNA, 19 nt, Artificial Sequence
  Description of Artificial Sequence: Synthetic oligonucleotide
  Sense strand starting at position 3668 of SEQ ID NO: 2433
ggcgcauugcuugagccua

SEQ ID NO: 189019 - RNA, 19 nt, Artificial Sequence
  Description of Artificial Sequence: Synthetic oligonucleotide
  Antisense strand to SEQ ID NO: 189018
uaggcucaagcaaugcgcc

SEQ ID NO: 189020 - RNA, 19 nt, Artificial Sequence
  Description of Artificial Sequence: Synthetic oligonucleotide
  Sense strand starting at position 3819 of SEQ ID NO: 2433
uugcaaaguuagccgagau

SEQ ID NO: 189021 - RNA, 19 nt, Artificial Sequence
  Description of Artificial Sequence: Synthetic oligonucleotide
  Antisense strand to SEQ ID NO: 189020
aucucggcuaacuuugcaa

SEQ ID NO: 189022 - RNA, 19 nt, Artificial Sequence
  Description of Artificial Sequence: Synthetic oligonucleotide
  Sense strand starting at position 3820 of SEQ ID NO: 2433
ugcaaaguuagccgagauc

SEQ ID NO: 189023 - RNA, 19 nt, Artificial Sequence
  Description of Artificial Sequence: Synthetic oligonucleotide
  Antisense strand to SEQ ID NO: 189022
gaucucggcuaacuuugca

SEQ ID NO: 189024 - RNA, 19 nt, Artificial Sequence
  Description of Artificial Sequence: Synthetic oligonucleotide
  Sense strand starting at position 3924 of SEQ ID NO: 2433
gcaaauaaagucugcaauu

SEQ ID NO: 189025 - RNA, 19 nt, Artificial Sequence
  Description of Artificial Sequence: Synthetic oligonucleotide
  Antisense strand to SEQ ID NO: 189024
aauugcagacuuuauuugc

SEQ ID NO: 189026 - RNA, 19 nt, Artificial Sequence
  Description of Artificial Sequence: Synthetic oligonucleotide
  Sense strand starting at position 3948 of SEQ ID NO: 2433
auaguauuguaccagcuuu

SEQ ID NO: 189027 - RNA, 19 nt, Artificial Sequence
  Description of Artificial Sequence: Synthetic oligonucleotide
  Antisense strand to SEQ ID NO: 189026
aaagcugguacaauacuau

SEQ ID NO: 189028 - RNA, 19 nt, Artificial Sequence
  Description of Artificial Sequence: Synthetic oligonucleotide
  Sense strand starting at position 145 of SEQ ID NO: 2434
uuuacagcuuuguagcaau

SEQ ID NO: 189029 - RNA, 19 nt, Artificial Sequence
  Description of Artificial Sequence: Synthetic oligonucleotide
  Antisense strand to SEQ ID NO: 189028
auugcuacaaagcuguaaa

SEQ ID NO: 189030 - RNA, 19 nt, Artificial Sequence
  Description of Artificial Sequence: Synthetic oligonucleotide
  Sense strand starting at position 148 of SEQ ID NO: 2434
acagcuuuguagcaaugau

SEQ ID NO: 189031 - RNA, 19 nt, Artificial Sequence
  Description of Artificial Sequence: Synthetic oligonucleotide
  Antisense strand to SEQ ID NO: 189030
aucauugcuacaaagcugu

SEQ ID NO: 189032 - RNA, 19 nt, Artificial Sequence
  Description of Artificial Sequence: Synthetic oligonucleotide
  Sense strand starting at position 158 of SEQ ID NO: 2434
agcaaugauucuguuaaag

SEQ ID NO: 189033 - RNA, 19 nt, Artificial Sequence
  Description of Artificial Sequence: Synthetic oligonucleotide
  Antisense strand to SEQ ID NO: 189032
cuuuaacagaaucauugcu

SEQ ID NO: 189034 - RNA, 19 nt, Artificial Sequence
  Description of Artificial Sequence: Synthetic oligonucleotide
  Sense strand starting at position 569 of SEQ ID NO: 2434
agugacauuuauuaaacgu

SEQ ID NO: 189035 - RNA, 19 nt, Artificial Sequence
  Description of Artificial Sequence: Synthetic oligonucleotide
  Antisense strand to SEQ ID NO: 189034
acguuuaauaaaugucacu

SEQ ID NO: 189036 - RNA, 19 nt, Artificial Sequence
  Description of Artificial Sequence: Synthetic oligonucleotide
  Sense strand starting at position 586 of SEQ ID NO: 2434
guacaacacugagaucauc

SEQ ID NO: 189037 - RNA, 19 nt, Artificial Sequence
  Description of Artificial Sequence: Synthetic oligonucleotide
  Antisense strand to SEQ ID NO: 189036
gaugaucucaguguuguac

SEQ ID NO: 189038 - RNA, 19 nt, Artificial Sequence
  Description of Artificial Sequence: Synthetic oligonucleotide
  Sense strand starting at position 1875 of SEQ ID NO: 2434
ggccgagucccaugacaac

SEQ ID NO: 189039 - RNA, 19 nt, Artificial Sequence
  Description of Artificial Sequence: Synthetic oligonucleotide
  Antisense strand to SEQ ID NO: 189038
guugucaugggacucggcc

SEQ ID NO: 189040 - RNA, 19 nt, Artificial Sequence
  Description of Artificial Sequence: Synthetic oligonucleotide
  Sense strand starting at position 2571 of SEQ ID NO: 2434
caggguuggugugugaaau

SEQ ID NO: 189041 - RNA, 19 nt, Artificial Sequence
  Description of Artificial Sequence: Synthetic oligonucleotide
  Antisense strand to SEQ ID NO: 189040
auuucacacaccaacccug

SEQ ID NO: 189042 - RNA, 19 nt, Artificial Sequence
  Description of Artificial Sequence: Synthetic oligonucleotide
  Sense strand starting at position 2572 of SEQ ID NO: 2434
aggguuggugugugaaaua

SEQ ID NO: 189043 - RNA, 19 nt, Artificial Sequence
  Description of Artificial Sequence: Synthetic oligonucleotide
  Antisense strand to SEQ ID NO: 189042
uauuucacacaccaacccu

SEQ ID NO: 189044 - RNA, 19 nt, Artificial Sequence
  Description of Artificial Sequence: Synthetic oligonucleotide
  Sense strand starting at position 2577 of SEQ ID NO: 2434
uggugugugaaauaauaag

SEQ ID NO: 189045 - RNA, 19 nt, Artificial Sequence
  Description of Artificial Sequence: Synthetic oligonucleotide
  Antisense strand to SEQ ID NO: 189044
cuuauuauuucacacacca

SEQ ID NO: 189046 - RNA, 19 nt, Artificial Sequence
  Description of Artificial Sequence: Synthetic oligonucleotide
  Sense strand starting at position 2938 of SEQ ID NO: 2434
agggaaggugcagaguauu

SEQ ID NO: 189047 - RNA, 19 nt, Artificial Sequence
  Description of Artificial Sequence: Synthetic oligonucleotide
  Antisense strand to SEQ ID NO: 189046
aauacucugcaccuucccu

SEQ ID NO: 189048 - RNA, 19 nt, Artificial Sequence
  Description of Artificial Sequence: Synthetic oligonucleotide
  Sense strand starting at position 3024 of SEQ ID NO: 2434
cccuccaagucguuaauaa

SEQ ID NO: 189049 - RNA, 19 nt, Artificial Sequence
  Description of Artificial Sequence: Synthetic oligonucleotide
  Antisense strand to SEQ ID NO: 189048
uuauuaacgacuuggaggg

SEQ ID NO: 189050 - RNA, 19 nt, Artificial Sequence
  Description of Artificial Sequence: Synthetic oligonucleotide
  Sense strand starting at position 3025 of SEQ ID NO: 2434
ccuccaagucguuaauaaa

SEQ ID NO: 189051 - RNA, 19 nt, Artificial Sequence
  Description of Artificial Sequence: Synthetic oligonucleotide
  Antisense strand to SEQ ID NO: 189050
uuuauuaacgacuuggagg

SEQ ID NO: 189052 - RNA, 19 nt, Artificial Sequence
  Description of Artificial Sequence: Synthetic oligonucleotide
  Sense strand starting at position 3052 of SEQ ID NO: 2434
ggccgggcgucuuguuaaa

SEQ ID NO: 189053 - RNA, 19 nt, Artificial Sequence
  Description of Artificial Sequence: Synthetic oligonucleotide
  Antisense strand to SEQ ID NO: 189052
uuuaacaagacgcccggcc

SEQ ID NO: 189054 - RNA, 19 nt, Artificial Sequence
  Description of Artificial Sequence: Synthetic oligonucleotide
  Sense strand starting at position 3054 of SEQ ID NO: 2434
ccgggcgucuuguuaaaua

SEQ ID NO: 189055 - RNA, 19 nt, Artificial Sequence
  Description of Artificial Sequence: Synthetic oligonucleotide
  Antisense strand to SEQ ID NO: 189054
uauuuaacaagacgcccgg

SEQ ID NO: 189056 - RNA, 19 nt, Artificial Sequence
  Description of Artificial Sequence: Synthetic oligonucleotide
  Sense strand starting at position 3074 of SEQ ID NO: 2434
uuguaucaaugacuugauu

SEQ ID NO: 189057 - RNA, 19 nt, Artificial Sequence
  Description of Artificial Sequence: Synthetic oligonucleotide
  Antisense strand to SEQ ID NO: 189056
aaucaagucauugauacaa

SEQ ID NO: 189058 - RNA, 19 nt, Artificial Sequence
  Description of Artificial Sequence: Synthetic oligonucleotide
  Sense strand starting at position 3089 of SEQ ID NO: 2434
gauuuagauuaaugaggau

SEQ ID NO: 189059 - RNA, 19 nt, Artificial Sequence
  Description of Artificial Sequence: Synthetic oligonucleotide
  Antisense strand to SEQ ID NO: 189058
auccucauuaaucuaaauc

SEQ ID NO: 189060 - RNA, 19 nt, Artificial Sequence
  Description of Artificial Sequence: Synthetic oligonucleotide
  Sense strand starting at position 3148 of SEQ ID NO: 2434
guagguaaugucggugaua

SEQ ID NO: 189061 - RNA, 19 nt, Artificial Sequence
  Description of Artificial Sequence: Synthetic oligonucleotide
  Antisense strand to SEQ ID NO: 189060
uaucaccgacauuaccuac

SEQ ID NO: 189062 - RNA, 19 nt, Artificial Sequence
  Description of Artificial Sequence: Synthetic oligonucleotide
  Sense strand starting at position 3149 of SEQ ID NO: 2434
uagguaaugucggugauag

SEQ ID NO: 189063 - RNA, 19 nt, Artificial Sequence
  Description of Artificial Sequence: Synthetic oligonucleotide
  Antisense strand to SEQ ID NO: 189062
cuaucaccgacauuaccua

SEQ ID NO: 189064 - RNA, 19 nt, Artificial Sequence
  Description of Artificial Sequence: Synthetic oligonucleotide
  Sense strand starting at position 3150 of SEQ ID NO: 2434
agguaaugucggugauaga

SEQ ID NO: 189065 - RNA, 19 nt, Artificial Sequence
  Description of Artificial Sequence: Synthetic oligonucleotide
  Antisense strand to SEQ ID NO: 189064
ucuaucaccgacauuaccu

SEQ ID NO: 189066 - RNA, 19 nt, Artificial Sequence
  Description of Artificial Sequence: Synthetic oligonucleotide
  Sense strand starting at position 3151 of SEQ ID NO: 2434
gguaaugucggugauagau

SEQ ID NO: 189067 - RNA, 19 nt, Artificial Sequence
  Description of Artificial Sequence: Synthetic oligonucleotide
  Antisense strand to SEQ ID NO: 189066
aucuaucaccgacauuacc

SEQ ID NO: 189068 - RNA, 19 nt, Artificial Sequence
  Description of Artificial Sequence: Synthetic oligonucleotide
  Sense strand starting at position 3153 of SEQ ID NO: 2434
uaaugucggugauagauau

SEQ ID NO: 189069 - RNA, 19 nt, Artificial Sequence
  Description of Artificial Sequence: Synthetic oligonucleotide
  Antisense strand to SEQ ID NO: 189068
auaucuaucaccgacauua

SEQ ID NO: 189070 - RNA, 19 nt, Artificial Sequence
  Description of Artificial Sequence: Synthetic oligonucleotide
  Sense strand starting at position 3157 of SEQ ID NO: 2434
gucggugauagauauaaag

SEQ ID NO: 189071 - RNA, 19 nt, Artificial Sequence
  Description of Artificial Sequence: Synthetic oligonucleotide
  Antisense strand to SEQ ID NO: 189070
cuuuauaucuaucaccgac

SEQ ID NO: 189072 - RNA, 19 nt, Artificial Sequence
  Description of Artificial Sequence: Synthetic oligonucleotide
  Sense strand starting at position 3187 of SEQ ID NO: 2434
ucuccagauguggaaucuu

SEQ ID NO: 189073 - RNA, 19 nt, Artificial Sequence
  Description of Artificial Sequence: Synthetic oligonucleotide
  Antisense strand to SEQ ID NO: 189072
aagauuccacaucuggaga

SEQ ID NO: 189074 - RNA, 19 nt, Artificial Sequence
  Description of Artificial Sequence: Synthetic oligonucleotide
  Sense strand starting at position 3205 of SEQ ID NO: 2434
ucuacuggauccuguaaca

SEQ ID NO: 189075 - RNA, 19 nt, Artificial Sequence
  Description of Artificial Sequence: Synthetic oligonucleotide
  Antisense strand to SEQ ID NO: 189074
uguuacaggauccaguaga

SEQ ID NO: 189076 - RNA, 19 nt, Artificial Sequence
  Description of Artificial Sequence: Synthetic oligonucleotide
  Sense strand starting at position 3292 of SEQ ID NO: 2434
ggcgcauugcuugagccua

SEQ ID NO: 189077 - RNA, 19 nt, Artificial Sequence
  Description of Artificial Sequence: Synthetic oligonucleotide
  Antisense strand to SEQ ID NO: 189076
uaggcucaagcaaugcgcc

SEQ ID NO: 189078 - RNA, 19 nt, Artificial Sequence
  Description of Artificial Sequence: Synthetic oligonucleotide
  Sense strand starting at position 3443 of SEQ ID NO: 2434
uugcaaaguuagccgagau

SEQ ID NO: 189079 - RNA, 19 nt, Artificial Sequence
  Description of Artificial Sequence: Synthetic oligonucleotide
  Antisense strand to SEQ ID NO: 189078
aucucggcuaacuuugcaa

SEQ ID NO: 189080 - RNA, 19 nt, Artificial Sequence
  Description of Artificial Sequence: Synthetic oligonucleotide
  Sense strand starting at position 3444 of SEQ ID NO: 2434
ugcaaaguuagccgagauc

SEQ ID NO: 189081 - RNA, 19 nt, Artificial Sequence
  Description of Artificial Sequence: Synthetic oligonucleotide
  Antisense strand to SEQ ID NO: 189080
gaucucggcuaacuuugca

SEQ ID NO: 189082 - RNA, 19 nt, Artificial Sequence
  Description of Artificial Sequence: Synthetic oligonucleotide
  Sense strand starting at position 3548 of SEQ ID NO: 2434
gcaaauaaagucugcaauu

SEQ ID NO: 189083 - RNA, 19 nt, Artificial Sequence
  Description of Artificial Sequence: Synthetic oligonucleotide
  Antisense strand to SEQ ID NO: 189082
aauugcagacuuuauuugc

SEQ ID NO: 189084 - RNA, 19 nt, Artificial Sequence
  Description of Artificial Sequence: Synthetic oligonucleotide
  Sense strand starting at position 3572 of SEQ ID NO: 2434
auaguauuguaccagcuuu

SEQ ID NO: 189085 - RNA, 19 nt, Artificial Sequence
  Description of Artificial Sequence: Synthetic oligonucleotide
  Antisense strand to SEQ ID NO: 189084
aaagcugguacaauacuau

SEQ ID NO: 189086 - RNA, 19 nt, Artificial Sequence
  Description of Artificial Sequence: Synthetic oligonucleotide
  Sense strand starting at position 3612 of SEQ ID NO: 2434
guaccauggucauauguau

SEQ ID NO: 189087 - RNA, 19 nt, Artificial Sequence
  Description of Artificial Sequence: Synthetic oligonucleotide
  Antisense strand to SEQ ID NO: 189086
auacauaugaccaugguac

SEQ ID NO: 189088 - RNA, 19 nt, Artificial Sequence
  Description of Artificial Sequence: Synthetic oligonucleotide
  Sense strand starting at position 3618 of SEQ ID NO: 2434
uggucauauguauguaaca

SEQ ID NO: 189089 - RNA, 19 nt, Artificial Sequence
  Description of Artificial Sequence: Synthetic oligonucleotide
  Antisense strand to SEQ ID NO: 189088
uguuacauacauaugacca

SEQ ID NO: 189090 - RNA, 19 nt, Artificial Sequence
  Description of Artificial Sequence: Synthetic oligonucleotide
  Sense strand starting at position 3619 of SEQ ID NO: 2434
ggucauauguauguaacau

SEQ ID NO: 189091 - RNA, 19 nt, Artificial Sequence
  Description of Artificial Sequence: Synthetic oligonucleotide
  Antisense strand to SEQ ID NO: 189090
auguuacauacauaugacc

SEQ ID NO: 189092 - RNA, 19 nt, Artificial Sequence
  Description of Artificial Sequence: Synthetic oligonucleotide
  Sense strand starting at position 3629 of SEQ ID NO: 2434
auguaacauuaaggaaacu

SEQ ID NO: 189093 - RNA, 19 nt, Artificial Sequence
  Description of Artificial Sequence: Synthetic oligonucleotide
  Antisense strand to SEQ ID NO: 189092
aguuuccuuaauguuacau

SEQ ID NO: 189094 - RNA, 19 nt, Artificial Sequence
  Description of Artificial Sequence: Synthetic oligonucleotide
  Sense strand starting at position 3724 of SEQ ID NO: 2434
ugcuuugagauaggaucua

SEQ ID NO: 189095 - RNA, 19 nt, Artificial Sequence
  Description of Artificial Sequence: Synthetic oligonucleotide
  Antisense strand to SEQ ID NO: 189094
uagauccuaucucaaagca

SEQ ID NO: 189096 - RNA, 19 nt, Artificial Sequence
  Description of Artificial Sequence: Synthetic oligonucleotide
  Sense strand starting at position 3737 of SEQ ID NO: 2434
gaucuaugucgccaaggcu

SEQ ID NO: 189097 - RNA, 19 nt, Artificial Sequence
  Description of Artificial Sequence: Synthetic oligonucleotide
  Antisense strand to SEQ ID NO: 189096
agccuuggcgacauagauc

SEQ ID NO: 189098 - RNA, 19 nt, Artificial Sequence
  Description of Artificial Sequence: Synthetic oligonucleotide
  Sense strand starting at position 3823 of SEQ ID NO: 2434
ucagccaucugagcaacua

SEQ ID NO: 189099 - RNA, 19 nt, Artificial Sequence
  Description of Artificial Sequence: Synthetic oligonucleotide
  Antisense strand to SEQ ID NO: 189098
uaguugcucagauggcuga

SEQ ID NO: 189100 - RNA, 19 nt, Artificial Sequence
  Description of Artificial Sequence: Synthetic oligonucleotide
  Sense strand starting at position 403 of SEQ ID NO: 2436
uuuacagcuuuguagcaau

SEQ ID NO: 189101 - RNA, 19 nt, Artificial Sequence
  Description of Artificial Sequence: Synthetic oligonucleotide
  Antisense strand to SEQ ID NO: 189100
auugcuacaaagcuguaaa

SEQ ID NO: 189102 - RNA, 19 nt, Artificial Sequence
  Description of Artificial Sequence: Synthetic oligonucleotide
  Sense strand starting at position 406 of SEQ ID NO: 2436
acagcuuuguagcaaugau

SEQ ID NO: 189103 - RNA, 19 nt, Artificial Sequence
  Description of Artificial Sequence: Synthetic oligonucleotide
  Antisense strand to SEQ ID NO: 189102
aucauugcuacaaagcugu

SEQ ID NO: 189104 - RNA, 19 nt, Artificial Sequence
  Description of Artificial Sequence: Synthetic oligonucleotide
  Sense strand starting at position 416 of SEQ ID NO: 2436
agcaaugauucuguuaaag

SEQ ID NO: 189105 - RNA, 19 nt, Artificial Sequence
  Description of Artificial Sequence: Synthetic oligonucleotide
  Antisense strand to SEQ ID NO: 189104
cuuuaacagaaucauugcu

SEQ ID NO: 189106 - RNA, 19 nt, Artificial Sequence
  Description of Artificial Sequence: Synthetic oligonucleotide
  Sense strand starting at position 827 of SEQ ID NO: 2436
agugacauuuauuaaacgu

SEQ ID NO: 189107 - RNA, 19 nt, Artificial Sequence
  Description of Artificial Sequence: Synthetic oligonucleotide
  Antisense strand to SEQ ID NO: 189106
acguuuaauaaaugucacu

SEQ ID NO: 189108 - RNA, 19 nt, Artificial Sequence
  Description of Artificial Sequence: Synthetic oligonucleotide
  Sense strand starting at position 844 of SEQ ID NO: 2436
guacaacacugagaucauc

SEQ ID NO: 189109 - RNA, 19 nt, Artificial Sequence
  Description of Artificial Sequence: Synthetic oligonucleotide
  Antisense strand to SEQ ID NO: 189108
gaugaucucaguguuguac

SEQ ID NO: 189110 - RNA, 19 nt, Artificial Sequence
  Description of Artificial Sequence: Synthetic oligonucleotide
  Sense strand starting at position 2133 of SEQ ID NO: 2436
ggccgagucccaugacaac

SEQ ID NO: 189111 - RNA, 19 nt, Artificial Sequence
  Description of Artificial Sequence: Synthetic oligonucleotide
  Antisense strand to SEQ ID NO: 189110
guugucaugggacucggcc

SEQ ID NO: 189112 - RNA, 19 nt, Artificial Sequence
  Description of Artificial Sequence: Synthetic oligonucleotide
  Sense strand starting at position 2829 of SEQ ID NO: 2436
caggguuggugugugaaau

SEQ ID NO: 189113 - RNA, 19 nt, Artificial Sequence
  Description of Artificial Sequence: Synthetic oligonucleotide
  Antisense strand to SEQ ID NO: 189112
auuucacacaccaacccug

SEQ ID NO: 189114 - RNA, 19 nt, Artificial Sequence
  Description of Artificial Sequence: Synthetic oligonucleotide
  Sense strand starting at position 2830 of SEQ ID NO: 2436
aggguuggugugugaaaua

SEQ ID NO: 189115 - RNA, 19 nt, Artificial Sequence
  Description of Artificial Sequence: Synthetic oligonucleotide
  Antisense strand to SEQ ID NO: 189114
uauuucacacaccaacccu

SEQ ID NO: 189116 - RNA, 19 nt, Artificial Sequence
  Description of Artificial Sequence: Synthetic oligonucleotide
  Sense strand starting at position 2835 of SEQ ID NO: 2436
uggugugugaaauaauaag

SEQ ID NO: 189117 - RNA, 19 nt, Artificial Sequence
  Description of Artificial Sequence: Synthetic oligonucleotide
  Antisense strand to SEQ ID NO: 189116
cuuauuauuucacacacca

SEQ ID NO: 189118 - RNA, 19 nt, Artificial Sequence
  Description of Artificial Sequence: Synthetic oligonucleotide
  Sense strand starting at position 3196 of SEQ ID NO: 2436
agggaaggugcagaguauu

SEQ ID NO: 189119 - RNA, 19 nt, Artificial Sequence
  Description of Artificial Sequence: Synthetic oligonucleotide
  Antisense strand to SEQ ID NO: 189118
aauacucugcaccuucccu

SEQ ID NO: 189120 - RNA, 19 nt, Artificial Sequence
  Description of Artificial Sequence: Synthetic oligonucleotide
  Sense strand starting at position 3282 of SEQ ID NO: 2436
cccuccaagucguuaauaa

SEQ ID NO: 189121 - RNA, 19 nt, Artificial Sequence
  Description of Artificial Sequence: Synthetic oligonucleotide
  Antisense strand to SEQ ID NO: 189120
uuauuaacgacuuggaggg

SEQ ID NO: 189122 - RNA, 19 nt, Artificial Sequence
  Description of Artificial Sequence: Synthetic oligonucleotide
  Sense strand starting at position 3283 of SEQ ID NO: 2436
ccuccaagucguuaauaaa

SEQ ID NO: 189123 - RNA, 19 nt, Artificial Sequence
  Description of Artificial Sequence: Synthetic oligonucleotide
  Antisense strand to SEQ ID NO: 189122
uuuauuaacgacuuggagg

SEQ ID NO: 189124 - RNA, 19 nt, Artificial Sequence
  Description of Artificial Sequence: Synthetic oligonucleotide
  Sense strand starting at position 3310 of SEQ ID NO: 2436
ggccgggcgucuuguuaaa

SEQ ID NO: 189125 - RNA, 19 nt, Artificial Sequence
  Description of Artificial Sequence: Synthetic oligonucleotide
  Antisense strand to SEQ ID NO: 189124
uuuaacaagacgcccggcc

SEQ ID NO: 189126 - RNA, 19 nt, Artificial Sequence
  Description of Artificial Sequence: Synthetic oligonucleotide
  Sense strand starting at position 3312 of SEQ ID NO: 2436
ccgggcgucuuguuaaaua

SEQ ID NO: 189127 - RNA, 19 nt, Artificial Sequence
  Description of Artificial Sequence: Synthetic oligonucleotide
  Antisense strand to SEQ ID NO: 189126
uauuuaacaagacgcccgg

SEQ ID NO: 189128 - RNA, 19 nt, Artificial Sequence
  Description of Artificial Sequence: Synthetic oligonucleotide
  Sense strand starting at position 3332 of SEQ ID NO: 2436
uuguaucaaugacuugauu

SEQ ID NO: 189129 - RNA, 19 nt, Artificial Sequence
  Description of Artificial Sequence: Synthetic oligonucleotide
  Antisense strand to SEQ ID NO: 189128
aaucaagucauugauacaa

SEQ ID NO: 189130 - RNA, 19 nt, Artificial Sequence
  Description of Artificial Sequence: Synthetic oligonucleotide
  Sense strand starting at position 3347 of SEQ ID NO: 2436
gauuuagauuaaugaggau

SEQ ID NO: 189131 - RNA, 19 nt, Artificial Sequence
  Description of Artificial Sequence: Synthetic oligonucleotide
  Antisense strand to SEQ ID NO: 189130
auccucauuaaucuaaauc

SEQ ID NO: 189132 - RNA, 19 nt, Artificial Sequence
  Description of Artificial Sequence: Synthetic oligonucleotide
  Sense strand starting at position 3406 of SEQ ID NO: 2436
guagguaaugucggugaua

SEQ ID NO: 189133 - RNA, 19 nt, Artificial Sequence
  Description of Artificial Sequence: Synthetic oligonucleotide
  Antisense strand to SEQ ID NO: 189132
uaucaccgacauuaccuac

SEQ ID NO: 189134 - RNA, 19 nt, Artificial Sequence
  Description of Artificial Sequence: Synthetic oligonucleotide
  Sense strand starting at position 3407 of SEQ ID NO: 2436
uagguaaugucggugauag

SEQ ID NO: 189135 - RNA, 19 nt, Artificial Sequence
  Description of Artificial Sequence: Synthetic oligonucleotide
  Antisense strand to SEQ ID NO: 189134
cuaucaccgacauuaccua

SEQ ID NO: 189136 - RNA, 19 nt, Artificial Sequence
  Description of Artificial Sequence: Synthetic oligonucleotide
  Sense strand starting at position 3408 of SEQ ID NO: 2436
agguaaugucggugauaga

SEQ ID NO: 189137 - RNA, 19 nt, Artificial Sequence
  Description of Artificial Sequence: Synthetic oligonucleotide
  Antisense strand to SEQ ID NO: 189136
ucuaucaccgacauuaccu

SEQ ID NO: 189138 - RNA, 19 nt, Artificial Sequence
  Description of Artificial Sequence: Synthetic oligonucleotide
  Sense strand starting at position 3409 of SEQ ID NO: 2436
gguaaugucggugauagau

SEQ ID NO: 189139 - RNA, 19 nt, Artificial Sequence
  Description of Artificial Sequence: Synthetic oligonucleotide
  Antisense strand to SEQ ID NO: 189138
aucuaucaccgacauuacc

SEQ ID NO: 189140 - RNA, 19 nt, Artificial Sequence
  Description of Artificial Sequence: Synthetic oligonucleotide
  Sense strand starting at position 3411 of SEQ ID NO: 2436
uaaugucggugauagauau

SEQ ID NO: 189141 - RNA, 19 nt, Artificial Sequence
  Description of Artificial Sequence: Synthetic oligonucleotide
  Antisense strand to SEQ ID NO: 189140
auaucuaucaccgacauua

SEQ ID NO: 189142 - RNA, 19 nt, Artificial Sequence
  Description of Artificial Sequence: Synthetic oligonucleotide
  Sense strand starting at position 3415 of SEQ ID NO: 2436
gucggugauagauauaaag

SEQ ID NO: 189143 - RNA, 19 nt, Artificial Sequence
  Description of Artificial Sequence: Synthetic oligonucleotide
  Antisense strand to SEQ ID NO: 189142
cuuuauaucuaucaccgac

SEQ ID NO: 189144 - RNA, 19 nt, Artificial Sequence
  Description of Artificial Sequence: Synthetic oligonucleotide
  Sense strand starting at position 3445 of SEQ ID NO: 2436
ucuccagauguggaaucuu

SEQ ID NO: 189145 - RNA, 19 nt, Artificial Sequence
  Description of Artificial Sequence: Synthetic oligonucleotide
  Antisense strand to SEQ ID NO: 189144
aagauuccacaucuggaga

SEQ ID NO: 189146 - RNA, 19 nt, Artificial Sequence
  Description of Artificial Sequence: Synthetic oligonucleotide
  Sense strand starting at position 3463 of SEQ ID NO: 2436
ucuacuggauccuguaaca

SEQ ID NO: 189147 - RNA, 19 nt, Artificial Sequence
  Description of Artificial Sequence: Synthetic oligonucleotide
  Antisense strand to SEQ ID NO: 189146
uguuacaggauccaguaga

SEQ ID NO: 189148 - RNA, 19 nt, Artificial Sequence
  Description of Artificial Sequence: Synthetic oligonucleotide
  Sense strand starting at position 3550 of SEQ ID NO: 2436
ggcgcauugcuugagccua

SEQ ID NO: 189149 - RNA, 19 nt, Artificial Sequence
  Description of Artificial Sequence: Synthetic oligonucleotide
  Antisense strand to SEQ ID NO: 189148
uaggcucaagcaaugcgcc

SEQ ID NO: 189150 - RNA, 19 nt, Artificial Sequence
  Description of Artificial Sequence: Synthetic oligonucleotide
  Sense strand starting at position 3701 of SEQ ID NO: 2436
uugcaaaguuagccgagau

SEQ ID NO: 189151 - RNA, 19 nt, Artificial Sequence
  Description of Artificial Sequence: Synthetic oligonucleotide
  Antisense strand to SEQ ID NO: 189150
aucucggcuaacuuugcaa

SEQ ID NO: 189152 - RNA, 19 nt, Artificial Sequence
  Description of Artificial Sequence: Synthetic oligonucleotide
  Sense strand starting at position 3702 of SEQ ID NO: 2436
ugcaaaguuagccgagauc

SEQ ID NO: 189153 - RNA, 19 nt, Artificial Sequence
  Description of Artificial Sequence: Synthetic oligonucleotide
  Antisense strand to SEQ ID NO: 189152
gaucucggcuaacuuugca

SEQ ID NO: 189154 - RNA, 19 nt, Artificial Sequence
  Description of Artificial Sequence: Synthetic oligonucleotide
  Sense strand starting at position 3806 of SEQ ID NO: 2436
gcaaauaaagucugcaauu

SEQ ID NO: 189155 - RNA, 19 nt, Artificial Sequence
  Description of Artificial Sequence: Synthetic oligonucleotide
  Antisense strand to SEQ ID NO: 189154
aauugcagacuuuauuugc

SEQ ID NO: 189156 - RNA, 19 nt, Artificial Sequence
  Description of Artificial Sequence: Synthetic oligonucleotide
  Sense strand starting at position 3830 of SEQ ID NO: 2436
auaguauuguaccagcuuu

SEQ ID NO: 189157 - RNA, 19 nt, Artificial Sequence
  Description of Artificial Sequence: Synthetic oligonucleotide
  Antisense strand to SEQ ID NO: 189156
aaagcugguacaauacuau

SEQ ID NO: 189158 - RNA, 19 nt, Artificial Sequence
  Description of Artificial Sequence: Synthetic oligonucleotide
  Sense strand starting at position 3870 of SEQ ID NO: 2436
guaccauggucauauguau

SEQ ID NO: 189159 - RNA, 19 nt, Artificial Sequence
  Description of Artificial Sequence: Synthetic oligonucleotide
  Antisense strand to SEQ ID NO: 189158
auacauaugaccaugguac

SEQ ID NO: 189160 - RNA, 19 nt, Artificial Sequence
  Description of Artificial Sequence: Synthetic oligonucleotide
  Sense strand starting at position 3876 of SEQ ID NO: 2436
uggucauauguauguaaca

SEQ ID NO: 189161 - RNA, 19 nt, Artificial Sequence
  Description of Artificial Sequence: Synthetic oligonucleotide
  Antisense strand to SEQ ID NO: 189160
uguuacauacauaugacca

SEQ ID NO: 189162 - RNA, 19 nt, Artificial Sequence
  Description of Artificial Sequence: Synthetic oligonucleotide
  Sense strand starting at position 3877 of SEQ ID NO: 2436
ggucauauguauguaacau

SEQ ID NO: 189163 - RNA, 19 nt, Artificial Sequence
  Description of Artificial Sequence: Synthetic oligonucleotide
  Antisense strand to SEQ ID NO: 189162
auguuacauacauaugacc

SEQ ID NO: 189164 - RNA, 19 nt, Artificial Sequence
  Description of Artificial Sequence: Synthetic oligonucleotide
  Sense strand starting at position 3887 of SEQ ID NO: 2436
auguaacauuaaggaaacu

SEQ ID NO: 189165 - RNA, 19 nt, Artificial Sequence
  Description of Artificial Sequence: Synthetic oligonucleotide
  Antisense strand to SEQ ID NO: 189164
aguuuccuuaauguuacau

SEQ ID NO: 189166 - RNA, 19 nt, Artificial Sequence
  Description of Artificial Sequence: Synthetic oligonucleotide
  Sense strand starting at position 3982 of SEQ ID NO: 2436
ugcuuugagauaggaucua

SEQ ID NO: 189167 - RNA, 19 nt, Artificial Sequence
  Description of Artificial Sequence: Synthetic oligonucleotide
  Antisense strand to SEQ ID NO: 189166
uagauccuaucucaaagca

SEQ ID NO: 189168 - RNA, 19 nt, Artificial Sequence
  Description of Artificial Sequence: Synthetic oligonucleotide
  Sense strand starting at position 204 of SEQ ID NO: 2437
uuuacagcuuuguagcaau

SEQ ID NO: 189169 - RNA, 19 nt, Artificial Sequence
  Description of Artificial Sequence: Synthetic oligonucleotide
  Antisense strand to SEQ ID NO: 189168
auugcuacaaagcuguaaa

SEQ ID NO: 189170 - RNA, 19 nt, Artificial Sequence
  Description of Artificial Sequence: Synthetic oligonucleotide
  Sense strand starting at position 207 of SEQ ID NO: 2437
acagcuuuguagcaaugau

SEQ ID NO: 189171 - RNA, 19 nt, Artificial Sequence
  Description of Artificial Sequence: Synthetic oligonucleotide
  Antisense strand to SEQ ID NO: 189170
aucauugcuacaaagcugu

SEQ ID NO: 189172 - RNA, 19 nt, Artificial Sequence
  Description of Artificial Sequence: Synthetic oligonucleotide
  Sense strand starting at position 217 of SEQ ID NO: 2437
agcaaugauucuguuaaag

SEQ ID NO: 189173 - RNA, 19 nt, Artificial Sequence
  Description of Artificial Sequence: Synthetic oligonucleotide
  Antisense strand to SEQ ID NO: 189172
cuuuaacagaaucauugcu

SEQ ID NO: 189174 - RNA, 19 nt, Artificial Sequence
  Description of Artificial Sequence: Synthetic oligonucleotide
  Sense strand starting at position 628 of SEQ ID NO: 2437
agugacauuuauuaaacgu

SEQ ID NO: 189175 - RNA, 19 nt, Artificial Sequence
  Description of Artificial Sequence: Synthetic oligonucleotide
  Antisense strand to SEQ ID NO: 189174
acguuuaauaaaugucacu

SEQ ID NO: 189176 - RNA, 19 nt, Artificial Sequence
  Description of Artificial Sequence: Synthetic oligonucleotide
  Sense strand starting at position 645 of SEQ ID NO: 2437
guacaacacugagaucauc

SEQ ID NO: 189177 - RNA, 19 nt, Artificial Sequence
  Description of Artificial Sequence: Synthetic oligonucleotide
  Antisense strand to SEQ ID NO: 189176
gaugaucucaguguuguac

SEQ ID NO: 189178 - RNA, 19 nt, Artificial Sequence
  Description of Artificial Sequence: Synthetic oligonucleotide
  Sense strand starting at position 1934 of SEQ ID NO: 2437
ggccgagucccaugacaac

SEQ ID NO: 189179 - RNA, 19 nt, Artificial Sequence
  Description of Artificial Sequence: Synthetic oligonucleotide
  Antisense strand to SEQ ID NO: 189178
guugucaugggacucggcc

SEQ ID NO: 189180 - RNA, 19 nt, Artificial Sequence
  Description of Artificial Sequence: Synthetic oligonucleotide
  Sense strand starting at position 2630 of SEQ ID NO: 2437
caggguuggugugugaaau

SEQ ID NO: 189181 - RNA, 19 nt, Artificial Sequence
  Description of Artificial Sequence: Synthetic oligonucleotide
  Antisense strand to SEQ ID NO: 189180
auuucacacaccaacccug

SEQ ID NO: 189182 - RNA, 19 nt, Artificial Sequence
  Description of Artificial Sequence: Synthetic oligonucleotide
  Sense strand starting at position 2631 of SEQ ID NO: 2437
aggguuggugugugaaaua

SEQ ID NO: 189183 - RNA, 19 nt, Artificial Sequence
  Description of Artificial Sequence: Synthetic oligonucleotide
  Antisense strand to SEQ ID NO: 189182
uauuucacacaccaacccu

SEQ ID NO: 189184 - RNA, 19 nt, Artificial Sequence
  Description of Artificial Sequence: Synthetic oligonucleotide
  Sense strand starting at position 2636 of SEQ ID NO: 2437
uggugugugaaauaauaag

SEQ ID NO: 189185 - RNA, 19 nt, Artificial Sequence
  Description of Artificial Sequence: Synthetic oligonucleotide
  Antisense strand to SEQ ID NO: 189184
cuuauuauuucacacacca

SEQ ID NO: 189186 - RNA, 19 nt, Artificial Sequence
  Description of Artificial Sequence: Synthetic oligonucleotide
  Sense strand starting at position 2997 of SEQ ID NO: 2437
agggaaggugcagaguauu

SEQ ID NO: 189187 - RNA, 19 nt, Artificial Sequence
  Description of Artificial Sequence: Synthetic oligonucleotide
  Antisense strand to SEQ ID NO: 189186
aauacucugcaccuucccu

SEQ ID NO: 189188 - RNA, 19 nt, Artificial Sequence
  Description of Artificial Sequence: Synthetic oligonucleotide
  Sense strand starting at position 3083 of SEQ ID NO: 2437
cccuccaagucguuaauaa

SEQ ID NO: 189189 - RNA, 19 nt, Artificial Sequence
  Description of Artificial Sequence: Synthetic oligonucleotide
  Antisense strand to SEQ ID NO: 189188
uuauuaacgacuuggaggg

SEQ ID NO: 189190 - RNA, 19 nt, Artificial Sequence
  Description of Artificial Sequence: Synthetic oligonucleotide
  Sense strand starting at position 3084 of SEQ ID NO: 2437
ccuccaagucguuaauaaa

SEQ ID NO: 189191 - RNA, 19 nt, Artificial Sequence
  Description of Artificial Sequence: Synthetic oligonucleotide
  Antisense strand to SEQ ID NO: 189190
uuuauuaacgacuuggagg

SEQ ID NO: 189192 - RNA, 19 nt, Artificial Sequence
  Description of Artificial Sequence: Synthetic oligonucleotide
  Sense strand starting at position 3111 of SEQ ID NO: 2437
ggccgggcgucuuguuaaa

SEQ ID NO: 189193 - RNA, 19 nt, Artificial Sequence
  Description of Artificial Sequence: Synthetic oligonucleotide
  Antisense strand to SEQ ID NO: 189192
uuuaacaagacgcccggcc

SEQ ID NO: 189194 - RNA, 19 nt, Artificial Sequence
  Description of Artificial Sequence: Synthetic oligonucleotide
  Sense strand starting at position 3113 of SEQ ID NO: 2437
ccgggcgucuuguuaaaua

SEQ ID NO: 189195 - RNA, 19 nt, Artificial Sequence
  Description of Artificial Sequence: Synthetic oligonucleotide
  Antisense strand to SEQ ID NO: 189194
uauuuaacaagacgcccgg

SEQ ID NO: 189196 - RNA, 19 nt, Artificial Sequence
  Description of Artificial Sequence: Synthetic oligonucleotide
  Sense strand starting at position 3133 of SEQ ID NO: 2437
uuguaucaaugacuugauu

SEQ ID NO: 189197 - RNA, 19 nt, Artificial Sequence
  Description of Artificial Sequence: Synthetic oligonucleotide
  Antisense strand to SEQ ID NO: 189196
aaucaagucauugauacaa

SEQ ID NO: 189198 - RNA, 19 nt, Artificial Sequence
  Description of Artificial Sequence: Synthetic oligonucleotide
  Sense strand starting at position 3148 of SEQ ID NO: 2437
gauuuagauuaaugaggau

SEQ ID NO: 189199 - RNA, 19 nt, Artificial Sequence
  Description of Artificial Sequence: Synthetic oligonucleotide
  Antisense strand to SEQ ID NO: 189198
auccucauuaaucuaaauc

SEQ ID NO: 189200 - RNA, 19 nt, Artificial Sequence
  Description of Artificial Sequence: Synthetic oligonucleotide
  Sense strand starting at position 3207 of SEQ ID NO: 2437
guagguaaugucggugaua

SEQ ID NO: 189201 - RNA, 19 nt, Artificial Sequence
  Description of Artificial Sequence: Synthetic oligonucleotide
  Antisense strand to SEQ ID NO: 189200
uaucaccgacauuaccuac

SEQ ID NO: 189202 - RNA, 19 nt, Artificial Sequence
  Description of Artificial Sequence: Synthetic oligonucleotide
  Sense strand starting at position 3208 of SEQ ID NO: 2437
uagguaaugucggugauag

SEQ ID NO: 189203 - RNA, 19 nt, Artificial Sequence
  Description of Artificial Sequence: Synthetic oligonucleotide
  Antisense strand to SEQ ID NO: 189202
cuaucaccgacauuaccua

SEQ ID NO: 189204 - RNA, 19 nt, Artificial Sequence
  Description of Artificial Sequence: Synthetic oligonucleotide
  Sense strand starting at position 3209 of SEQ ID NO: 2437
agguaaugucggugauaga

SEQ ID NO: 189205 - RNA, 19 nt, Artificial Sequence
  Description of Artificial Sequence: Synthetic oligonucleotide
  Antisense strand to SEQ ID NO: 189204
ucuaucaccgacauuaccu

SEQ ID NO: 189206 - RNA, 19 nt, Artificial Sequence
  Description of Artificial Sequence: Synthetic oligonucleotide
  Sense strand starting at position 3210 of SEQ ID NO: 2437
gguaaugucggugauagau

SEQ ID NO: 189207 - RNA, 19 nt, Artificial Sequence
  Description of Artificial Sequence: Synthetic oligonucleotide
  Antisense strand to SEQ ID NO: 189206
aucuaucaccgacauuacc

SEQ ID NO: 189208 - RNA, 19 nt, Artificial Sequence
  Description of Artificial Sequence: Synthetic oligonucleotide
  Sense strand starting at position 3212 of SEQ ID NO: 2437
uaaugucggugauagauau

SEQ ID NO: 189209 - RNA, 19 nt, Artificial Sequence
  Description of Artificial Sequence: Synthetic oligonucleotide
  Antisense strand to SEQ ID NO: 189208
auaucuaucaccgacauua

SEQ ID NO: 189210 - RNA, 19 nt, Artificial Sequence
  Description of Artificial Sequence: Synthetic oligonucleotide
  Sense strand starting at position 3216 of SEQ ID NO: 2437
gucggugauagauauaaag

SEQ ID NO: 189211 - RNA, 19 nt, Artificial Sequence
  Description of Artificial Sequence: Synthetic oligonucleotide
  Antisense strand to SEQ ID NO: 189210
cuuuauaucuaucaccgac

SEQ ID NO: 189212 - RNA, 19 nt, Artificial Sequence
  Description of Artificial Sequence: Synthetic oligonucleotide
  Sense strand starting at position 3246 of SEQ ID NO: 2437
ucuccagauguggaaucuu

SEQ ID NO: 189213 - RNA, 19 nt, Artificial Sequence
  Description of Artificial Sequence: Synthetic oligonucleotide
  Antisense strand to SEQ ID NO: 189212
aagauuccacaucuggaga

SEQ ID NO: 189214 - RNA, 19 nt, Artificial Sequence
  Description of Artificial Sequence: Synthetic oligonucleotide
  Sense strand starting at position 3264 of SEQ ID NO: 2437
ucuacuggauccuguaaca

SEQ ID NO: 189215 - RNA, 19 nt, Artificial Sequence
  Description of Artificial Sequence: Synthetic oligonucleotide
  Antisense strand to SEQ ID NO: 189214
uguuacaggauccaguaga

SEQ ID NO: 189216 - RNA, 19 nt, Artificial Sequence
  Description of Artificial Sequence: Synthetic oligonucleotide
  Sense strand starting at position 3351 of SEQ ID NO: 2437
ggcgcauugcuugagccua

SEQ ID NO: 189217 - RNA, 19 nt, Artificial Sequence
  Description of Artificial Sequence: Synthetic oligonucleotide
  Antisense strand to SEQ ID NO: 189216
uaggcucaagcaaugcgcc

SEQ ID NO: 189218 - RNA, 19 nt, Artificial Sequence
  Description of Artificial Sequence: Synthetic oligonucleotide
  Sense strand starting at position 3502 of SEQ ID NO: 2437
uugcaaaguuagccgagau

SEQ ID NO: 189219 - RNA, 19 nt, Artificial Sequence
  Description of Artificial Sequence: Synthetic oligonucleotide
  Antisense strand to SEQ ID NO: 189218
aucucggcuaacuuugcaa

SEQ ID NO: 189220 - RNA, 19 nt, Artificial Sequence
  Description of Artificial Sequence: Synthetic oligonucleotide
  Sense strand starting at position 3503 of SEQ ID NO: 2437
ugcaaaguuagccgagauc

SEQ ID NO: 189221 - RNA, 19 nt, Artificial Sequence
  Description of Artificial Sequence: Synthetic oligonucleotide
  Antisense strand to SEQ ID NO: 189220
gaucucggcuaacuuugca

SEQ ID NO: 189222 - RNA, 19 nt, Artificial Sequence
  Description of Artificial Sequence: Synthetic oligonucleotide
  Sense strand starting at position 3607 of SEQ ID NO: 2437
gcaaauaaagucugcaauu

SEQ ID NO: 189223 - RNA, 19 nt, Artificial Sequence
  Description of Artificial Sequence: Synthetic oligonucleotide
  Antisense strand to SEQ ID NO: 189222
aauugcagacuuuauuugc

SEQ ID NO: 189224 - RNA, 19 nt, Artificial Sequence
  Description of Artificial Sequence: Synthetic oligonucleotide
  Sense strand starting at position 3631 of SEQ ID NO: 2437
auaguauuguaccagcuuu

SEQ ID NO: 189225 - RNA, 19 nt, Artificial Sequence
  Description of Artificial Sequence: Synthetic oligonucleotide
  Antisense strand to SEQ ID NO: 189224
aaagcugguacaauacuau

SEQ ID NO: 189226 - RNA, 19 nt, Artificial Sequence
  Description of Artificial Sequence: Synthetic oligonucleotide
  Sense strand starting at position 3671 of SEQ ID NO: 2437
guaccauggucauauguau

SEQ ID NO: 189227 - RNA, 19 nt, Artificial Sequence
  Description of Artificial Sequence: Synthetic oligonucleotide
  Antisense strand to SEQ ID NO: 189226
auacauaugaccaugguac

SEQ ID NO: 189228 - RNA, 19 nt, Artificial Sequence
  Description of Artificial Sequence: Synthetic oligonucleotide
  Sense strand starting at position 3677 of SEQ ID NO: 2437
uggucauauguauguaaca

SEQ ID NO: 189229 - RNA, 19 nt, Artificial Sequence
  Description of Artificial Sequence: Synthetic oligonucleotide
  Antisense strand to SEQ ID NO: 189228
uguuacauacauaugacca

SEQ ID NO: 189230 - RNA, 19 nt, Artificial Sequence
  Description of Artificial Sequence: Synthetic oligonucleotide
  Sense strand starting at position 3678 of SEQ ID NO: 2437
ggucauauguauguaacau

SEQ ID NO: 189231 - RNA, 19 nt, Artificial Sequence
  Description of Artificial Sequence: Synthetic oligonucleotide
  Antisense strand to SEQ ID NO: 189230
auguuacauacauaugacc

SEQ ID NO: 189232 - RNA, 19 nt, Artificial Sequence
  Description of Artificial Sequence: Synthetic oligonucleotide
  Sense strand starting at position 3688 of SEQ ID NO: 2437
auguaacauuaaggaaacu

SEQ ID NO: 189233 - RNA, 19 nt, Artificial Sequence
  Description of Artificial Sequence: Synthetic oligonucleotide
  Antisense strand to SEQ ID NO: 189232
aguuuccuuaauguuacau

SEQ ID NO: 189234 - RNA, 19 nt, Artificial Sequence
  Description of Artificial Sequence: Synthetic oligonucleotide
  Sense strand starting at position 3783 of SEQ ID NO: 2437
ugcuuugagauaggaucua

SEQ ID NO: 189235 - RNA, 19 nt, Artificial Sequence
  Description of Artificial Sequence: Synthetic oligonucleotide
  Antisense strand to SEQ ID NO: 189234
uagauccuaucucaaagca

SEQ ID NO: 189236 - RNA, 19 nt, Artificial Sequence
  Description of Artificial Sequence: Synthetic oligonucleotide
  Sense strand starting at position 3796 of SEQ ID NO: 2437
gaucuaugucgccaaggcu

SEQ ID NO: 189237 - RNA, 19 nt, Artificial Sequence
  Description of Artificial Sequence: Synthetic oligonucleotide
  Antisense strand to SEQ ID NO: 189236
agccuuggcgacauagauc

SEQ ID NO: 189238 - RNA, 19 nt, Artificial Sequence
  Description of Artificial Sequence: Synthetic oligonucleotide
  Sense strand starting at position 3882 of SEQ ID NO: 2437
ucagccaucugagcaacua

SEQ ID NO: 189239 - RNA, 19 nt, Artificial Sequence
  Description of Artificial Sequence: Synthetic oligonucleotide
  Antisense strand to SEQ ID NO: 189238
uaguugcucagauggcuga

SEQ ID NO: 189240 - RNA, 19 nt, Artificial Sequence
  Description of Artificial Sequence: Synthetic oligonucleotide
  Sense strand starting at position 3954 of SEQ ID NO: 2440
agauguaguuccucuauga

SEQ ID NO: 189241 - RNA, 19 nt, Artificial Sequence
  Description of Artificial Sequence: Synthetic oligonucleotide
  Antisense strand to SEQ ID NO: 189240
ucauagaggaacuacaucu

SEQ ID NO: 189242 - RNA, 19 nt, Artificial Sequence
  Description of Artificial Sequence: Synthetic oligonucleotide
  Sense strand starting at position 3945 of SEQ ID NO: 2440
gauucuggaagauguaguu

SEQ ID NO: 189243 - RNA, 19 nt, Artificial Sequence
  Description of Artificial Sequence: Synthetic oligonucleotide
  Antisense strand to SEQ ID NO: 189242
aacuacaucuuccagaauc

SEQ ID NO: 189244 - RNA, 19 nt, Artificial Sequence
  Description of Artificial Sequence: Synthetic oligonucleotide
  Sense strand starting at position 3941 of SEQ ID NO: 2440
cgaggauucuggaagaugu

SEQ ID NO: 189245 - RNA, 19 nt, Artificial Sequence
  Description of Artificial Sequence: Synthetic oligonucleotide
  Antisense strand to SEQ ID NO: 189244
acaucuuccagaauccucg

SEQ ID NO: 189246 - RNA, 19 nt, Artificial Sequence
  Description of Artificial Sequence: Synthetic oligonucleotide
  Sense strand starting at position 3938 of SEQ ID NO: 2440
gcgcgaggauucuggaaga

SEQ ID NO: 189247 - RNA, 19 nt, Artificial Sequence
  Description of Artificial Sequence: Synthetic oligonucleotide
  Antisense strand to SEQ ID NO: 189246
ucuuccagaauccucgcgc

SEQ ID NO: 189248 - RNA, 19 nt, Artificial Sequence
  Description of Artificial Sequence: Synthetic oligonucleotide
  Sense strand starting at position 3718 of SEQ ID NO: 2440
gggucuaguuaccagagaa

SEQ ID NO: 189249 - RNA, 19 nt, Artificial Sequence
  Description of Artificial Sequence: Synthetic oligonucleotide
  Antisense strand to SEQ ID NO: 189248
uucucugguaacuagaccc

SEQ ID NO: 189250 - RNA, 19 nt, Artificial Sequence
  Description of Artificial Sequence: Synthetic oligonucleotide
  Sense strand starting at position 3717 of SEQ ID NO: 2440
cgggucuaguuaccagaga

SEQ ID NO: 189251 - RNA, 19 nt, Artificial Sequence
  Description of Artificial Sequence: Synthetic oligonucleotide
  Antisense strand to SEQ ID NO: 189250
ucucugguaacuagacccg

SEQ ID NO: 189252 - RNA, 19 nt, Artificial Sequence
  Description of Artificial Sequence: Synthetic oligonucleotide
  Sense strand starting at position 3347 of SEQ ID NO: 2440
caguucucucuucgggauu

SEQ ID NO: 189253 - RNA, 19 nt, Artificial Sequence
  Description of Artificial Sequence: Synthetic oligonucleotide
  Antisense strand to SEQ ID NO: 189252
aaucccgaagagagaacug

SEQ ID NO: 189254 - RNA, 19 nt, Artificial Sequence
  Description of Artificial Sequence: Synthetic oligonucleotide
  Sense strand starting at position 3346 of SEQ ID NO: 2440
ucaguucucucuucgggau

SEQ ID NO: 189255 - RNA, 19 nt, Artificial Sequence
  Description of Artificial Sequence: Synthetic oligonucleotide
  Antisense strand to SEQ ID NO: 189254
aucccgaagagagaacuga

SEQ ID NO: 189256 - RNA, 19 nt, Artificial Sequence
  Description of Artificial Sequence: Synthetic oligonucleotide
  Sense strand starting at position 3332 of SEQ ID NO: 2440
aaagcaaucuagugucagu

SEQ ID NO: 189257 - RNA, 19 nt, Artificial Sequence
  Description of Artificial Sequence: Synthetic oligonucleotide
  Antisense strand to SEQ ID NO: 189256
acugacacuagauugcuuu

SEQ ID NO: 189258 - RNA, 19 nt, Artificial Sequence
  Description of Artificial Sequence: Synthetic oligonucleotide
  Sense strand starting at position 3267 of SEQ ID NO: 2440
ggcacucagucugauugau

SEQ ID NO: 189259 - RNA, 19 nt, Artificial Sequence
  Description of Artificial Sequence: Synthetic oligonucleotide
  Antisense strand to SEQ ID NO: 189258
aucaaucagacugagugcc

SEQ ID NO: 189260 - RNA, 19 nt, Artificial Sequence
  Description of Artificial Sequence: Synthetic oligonucleotide
  Sense strand starting at position 3266 of SEQ ID NO: 2440
cggcacucagucugauuga

SEQ ID NO: 189261 - RNA, 19 nt, Artificial Sequence
  Description of Artificial Sequence: Synthetic oligonucleotide
  Antisense strand to SEQ ID NO: 189260
ucaaucagacugagugccg

SEQ ID NO: 189262 - RNA, 19 nt, Artificial Sequence
  Description of Artificial Sequence: Synthetic oligonucleotide
  Sense strand starting at position 3025 of SEQ ID NO: 2440
caccgauuaugggaguuua

SEQ ID NO: 189263 - RNA, 19 nt, Artificial Sequence
  Description of Artificial Sequence: Synthetic oligonucleotide
  Antisense strand to SEQ ID NO: 189262
uaaacucccauaaucggug

SEQ ID NO: 189264 - RNA, 19 nt, Artificial Sequence
  Description of Artificial Sequence: Synthetic oligonucleotide
  Sense strand starting at position 3016 of SEQ ID NO: 2440
aggaauccgcaccgauuau

SEQ ID NO: 189265 - RNA, 19 nt, Artificial Sequence
  Description of Artificial Sequence: Synthetic oligonucleotide
  Antisense strand to SEQ ID NO: 189264
auaaucggugcggauuccu

SEQ ID NO: 189266 - RNA, 19 nt, Artificial Sequence
  Description of Artificial Sequence: Synthetic oligonucleotide
  Sense strand starting at position 2982 of SEQ ID NO: 2440
ccuggaagaugucaacaau

SEQ ID NO: 189267 - RNA, 19 nt, Artificial Sequence
  Description of Artificial Sequence: Synthetic oligonucleotide
  Antisense strand to SEQ ID NO: 189266
auuguugacaucuuccagg

SEQ ID NO: 189268 - RNA, 19 nt, Artificial Sequence
  Description of Artificial Sequence: Synthetic oligonucleotide
  Sense strand starting at position 2935 of SEQ ID NO: 2440
cgcuaucucuaguuccaca

SEQ ID NO: 189269 - RNA, 19 nt, Artificial Sequence
  Description of Artificial Sequence: Synthetic oligonucleotide
  Antisense strand to SEQ ID NO: 189268
uguggaacuagagauagcg

SEQ ID NO: 189270 - RNA, 19 nt, Artificial Sequence
  Description of Artificial Sequence: Synthetic oligonucleotide
  Sense strand starting at position 2827 of SEQ ID NO: 2440
acgcuauagagauagcaaa

SEQ ID NO: 189271 - RNA, 19 nt, Artificial Sequence
  Description of Artificial Sequence: Synthetic oligonucleotide
  Antisense strand to SEQ ID NO: 189270
uuugcuaucucuauagcgu

SEQ ID NO: 189272 - RNA, 19 nt, Artificial Sequence
  Description of Artificial Sequence: Synthetic oligonucleotide
  Sense strand starting at position 2821 of SEQ ID NO: 2440
aguuguacgcuauagagau

SEQ ID NO: 189273 - RNA, 19 nt, Artificial Sequence
  Description of Artificial Sequence: Synthetic oligonucleotide
  Antisense strand to SEQ ID NO: 189272
aucucuauagcguacaacu

SEQ ID NO: 189274 - RNA, 19 nt, Artificial Sequence
  Description of Artificial Sequence: Synthetic oligonucleotide
  Sense strand starting at position 2819 of SEQ ID NO: 2440
caaguuguacgcuauagag

SEQ ID NO: 189275 - RNA, 19 nt, Artificial Sequence
  Description of Artificial Sequence: Synthetic oligonucleotide
  Antisense strand to SEQ ID NO: 189274
cucuauagcguacaacuug

SEQ ID NO: 189276 - RNA, 19 nt, Artificial Sequence
  Description of Artificial Sequence: Synthetic oligonucleotide
  Sense strand starting at position 2816 of SEQ ID NO: 2440
ucacaaguuguacgcuaua

SEQ ID NO: 189277 - RNA, 19 nt, Artificial Sequence
  Description of Artificial Sequence: Synthetic oligonucleotide
  Antisense strand to SEQ ID NO: 189276
uauagcguacaacuuguga

SEQ ID NO: 189278 - RNA, 19 nt, Artificial Sequence
  Description of Artificial Sequence: Synthetic oligonucleotide
  Sense strand starting at position 2807 of SEQ ID NO: 2440
guaaguaacucacaaguug

SEQ ID NO: 189279 - RNA, 19 nt, Artificial Sequence
  Description of Artificial Sequence: Synthetic oligonucleotide
  Antisense strand to SEQ ID NO: 189278
caacuugugaguuacuuac

SEQ ID NO: 189280 - RNA, 19 nt, Artificial Sequence
  Description of Artificial Sequence: Synthetic oligonucleotide
  Sense strand starting at position 2803 of SEQ ID NO: 2440
gccuguaaguaacucacaa

SEQ ID NO: 189281 - RNA, 19 nt, Artificial Sequence
  Description of Artificial Sequence: Synthetic oligonucleotide
  Antisense strand to SEQ ID NO: 189280
uugugaguuacuuacaggc

SEQ ID NO: 189282 - RNA, 19 nt, Artificial Sequence
  Description of Artificial Sequence: Synthetic oligonucleotide
  Sense strand starting at position 2735 of SEQ ID NO: 2440
uacuguuuguauuaagagu

SEQ ID NO: 189283 - RNA, 19 nt, Artificial Sequence
  Description of Artificial Sequence: Synthetic oligonucleotide
  Antisense strand to SEQ ID NO: 189282
acucuuaauacaaacagua

SEQ ID NO: 189284 - RNA, 19 nt, Artificial Sequence
  Description of Artificial Sequence: Synthetic oligonucleotide
  Sense strand starting at position 2710 of SEQ ID NO: 2440
aagguuaaaugcugcauuu

SEQ ID NO: 189285 - RNA, 19 nt, Artificial Sequence
  Description of Artificial Sequence: Synthetic oligonucleotide
  Antisense strand to SEQ ID NO: 189284
aaaugcagcauuuaaccuu

SEQ ID NO: 189286 - RNA, 19 nt, Artificial Sequence
  Description of Artificial Sequence: Synthetic oligonucleotide
  Sense strand starting at position 2662 of SEQ ID NO: 2440
aaaugugaguggcuggaaa

SEQ ID NO: 189287 - RNA, 19 nt, Artificial Sequence
  Description of Artificial Sequence: Synthetic oligonucleotide
  Antisense strand to SEQ ID NO: 189286
uuuccagccacucacauuu

SEQ ID NO: 189288 - RNA, 19 nt, Artificial Sequence
  Description of Artificial Sequence: Synthetic oligonucleotide
  Sense strand starting at position 2595 of SEQ ID NO: 2440
gcauacuggucacagcaaa

SEQ ID NO: 189289 - RNA, 19 nt, Artificial Sequence
  Description of Artificial Sequence: Synthetic oligonucleotide
  Antisense strand to SEQ ID NO: 189288
uuugcugugaccaguaugc

SEQ ID NO: 189290 - RNA, 19 nt, Artificial Sequence
  Description of Artificial Sequence: Synthetic oligonucleotide
  Sense strand starting at position 2435 of SEQ ID NO: 2440
ucaugauagcgacaucaau

SEQ ID NO: 189291 - RNA, 19 nt, Artificial Sequence
  Description of Artificial Sequence: Synthetic oligonucleotide
  Antisense strand to SEQ ID NO: 189290
auugaugucgcuaucauga

SEQ ID NO: 189292 - RNA, 19 nt, Artificial Sequence
  Description of Artificial Sequence: Synthetic oligonucleotide
  Sense strand starting at position 2347 of SEQ ID NO: 2440
aucccagauccauguucuu

SEQ ID NO: 189293 - RNA, 19 nt, Artificial Sequence
  Description of Artificial Sequence: Synthetic oligonucleotide
  Antisense strand to SEQ ID NO: 189292
aagaacauggaucugggau

SEQ ID NO: 189294 - RNA, 19 nt, Artificial Sequence
  Description of Artificial Sequence: Synthetic oligonucleotide
  Sense strand starting at position 2330 of SEQ ID NO: 2440
gaagccaggucuuccaaau

SEQ ID NO: 189295 - RNA, 19 nt, Artificial Sequence
  Description of Artificial Sequence: Synthetic oligonucleotide
  Antisense strand to SEQ ID NO: 189294
auuuggaagaccuggcuuc

SEQ ID NO: 189296 - RNA, 19 nt, Artificial Sequence
  Description of Artificial Sequence: Synthetic oligonucleotide
  Sense strand starting at position 2304 of SEQ ID NO: 2440
gucacagaguugguuagua

SEQ ID NO: 189297 - RNA, 19 nt, Artificial Sequence
  Description of Artificial Sequence: Synthetic oligonucleotide
  Antisense strand to SEQ ID NO: 189296
uacuaaccaacucugugac

SEQ ID NO: 189298 - RNA, 19 nt, Artificial Sequence
  Description of Artificial Sequence: Synthetic oligonucleotide
  Sense strand starting at position 2260 of SEQ ID NO: 2440
guccucauguuacagaagu

SEQ ID NO: 189299 - RNA, 19 nt, Artificial Sequence
  Description of Artificial Sequence: Synthetic oligonucleotide
  Antisense strand to SEQ ID NO: 189298
acuucuguaacaugaggac

SEQ ID NO: 189300 - RNA, 19 nt, Artificial Sequence
  Description of Artificial Sequence: Synthetic oligonucleotide
  Sense strand starting at position 2258 of SEQ ID NO: 2440
guguccucauguuacagaa

SEQ ID NO: 189301 - RNA, 19 nt, Artificial Sequence
  Description of Artificial Sequence: Synthetic oligonucleotide
  Antisense strand to SEQ ID NO: 189300
uucuguaacaugaggacac

SEQ ID NO: 189302 - RNA, 19 nt, Artificial Sequence
  Description of Artificial Sequence: Synthetic oligonucleotide
  Sense strand starting at position 2252 of SEQ ID NO: 2440
aguccaguguccucauguu

SEQ ID NO: 189303 - RNA, 19 nt, Artificial Sequence
  Description of Artificial Sequence: Synthetic oligonucleotide
  Antisense strand to SEQ ID NO: 189302
aacaugaggacacuggacu

SEQ ID NO: 189304 - RNA, 19 nt, Artificial Sequence
  Description of Artificial Sequence: Synthetic oligonucleotide
  Sense strand starting at position 2197 of SEQ ID NO: 2440
ucuuucuuagagggcuuua

SEQ ID NO: 189305 - RNA, 19 nt, Artificial Sequence
  Description of Artificial Sequence: Synthetic oligonucleotide
  Antisense strand to SEQ ID NO: 189304
uaaagcccucuaagaaaga

SEQ ID NO: 189306 - RNA, 19 nt, Artificial Sequence
  Description of Artificial Sequence: Synthetic oligonucleotide
  Sense strand starting at position 2180 of SEQ ID NO: 2440
ggagaacauucccgaacuc

SEQ ID NO: 189307 - RNA, 19 nt, Artificial Sequence
  Description of Artificial Sequence: Synthetic oligonucleotide
  Antisense strand to SEQ ID NO: 189306
gaguucgggaauguucucc

SEQ ID NO: 189308 - RNA, 19 nt, Artificial Sequence
  Description of Artificial Sequence: Synthetic oligonucleotide
  Sense strand starting at position 2179 of SEQ ID NO: 2440
uggagaacauucccgaacu

SEQ ID NO: 189309 - RNA, 19 nt, Artificial Sequence
  Description of Artificial Sequence: Synthetic oligonucleotide
  Antisense strand to SEQ ID NO: 189308
aguucgggaauguucucca

SEQ ID NO: 189310 - RNA, 19 nt, Artificial Sequence
  Description of Artificial Sequence: Synthetic oligonucleotide
  Sense strand starting at position 2041 of SEQ ID NO: 2440
uggguuuauuacucaagca

SEQ ID NO: 189311 - RNA, 19 nt, Artificial Sequence
  Description of Artificial Sequence: Synthetic oligonucleotide
  Antisense strand to SEQ ID NO: 189310
ugcuugaguaauaaaccca

SEQ ID NO: 189312 - RNA, 19 nt, Artificial Sequence
  Description of Artificial Sequence: Synthetic oligonucleotide
  Sense strand starting at position 2032 of SEQ ID NO: 2440
aucuguuaguggguuuauu

SEQ ID NO: 189313 - RNA, 19 nt, Artificial Sequence
  Description of Artificial Sequence: Synthetic oligonucleotide
  Antisense strand to SEQ ID NO: 189312
aauaaacccacuaacagau

SEQ ID NO: 189314 - RNA, 19 nt, Artificial Sequence
  Description of Artificial Sequence: Synthetic oligonucleotide
  Sense strand starting at position 2030 of SEQ ID NO: 2440
gaaucuguuaguggguuua

SEQ ID NO: 189315 - RNA, 19 nt, Artificial Sequence
  Description of Artificial Sequence: Synthetic oligonucleotide
  Antisense strand to SEQ ID NO: 189314
uaaacccacuaacagauuc

SEQ ID NO: 189316 - RNA, 19 nt, Artificial Sequence
  Description of Artificial Sequence: Synthetic oligonucleotide
  Sense strand starting at position 2013 of SEQ ID NO: 2440
cuccacaauucguaccaga

SEQ ID NO: 189317 - RNA, 19 nt, Artificial Sequence
  Description of Artificial Sequence: Synthetic oligonucleotide
  Antisense strand to SEQ ID NO: 189316
ucugguacgaauuguggag

SEQ ID NO: 189318 - RNA, 19 nt, Artificial Sequence
  Description of Artificial Sequence: Synthetic oligonucleotide
  Sense strand starting at position 379 of SEQ ID NO: 2441
aguuuaaaguccuuaacua

SEQ ID NO: 189319 - RNA, 19 nt, Artificial Sequence
  Description of Artificial Sequence: Synthetic oligonucleotide
  Antisense strand to SEQ ID NO: 189318
uaguuaaggacuuuaaacu

SEQ ID NO: 189320 - RNA, 19 nt, Artificial Sequence
  Description of Artificial Sequence: Synthetic oligonucleotide
  Sense strand starting at position 380 of SEQ ID NO: 2441
guuuaaaguccuuaacuag

SEQ ID NO: 189321 - RNA, 19 nt, Artificial Sequence
  Description of Artificial Sequence: Synthetic oligonucleotide
  Antisense strand to SEQ ID NO: 189320
cuaguuaaggacuuuaaac

SEQ ID NO: 189322 - RNA, 19 nt, Artificial Sequence
  Description of Artificial Sequence: Synthetic oligonucleotide
  Sense strand starting at position 387 of SEQ ID NO: 2441
guccuuaacuagguuuaca

SEQ ID NO: 189323 - RNA, 19 nt, Artificial Sequence
  Description of Artificial Sequence: Synthetic oligonucleotide
  Antisense strand to SEQ ID NO: 189322
uguaaaccuaguuaaggac

SEQ ID NO: 189324 - RNA, 19 nt, Artificial Sequence
  Description of Artificial Sequence: Synthetic oligonucleotide
  Sense strand starting at position 536 of SEQ ID NO: 2441
gcguucgagcgauucucau

SEQ ID NO: 189325 - RNA, 19 nt, Artificial Sequence
  Description of Artificial Sequence: Synthetic oligonucleotide
  Antisense strand to SEQ ID NO: 189324
augagaaucgcucgaacgc

SEQ ID NO: 189326 - RNA, 19 nt, Artificial Sequence
  Description of Artificial Sequence: Synthetic oligonucleotide
  Sense strand starting at position 714 of SEQ ID NO: 2441
gauuacaagcgugagacaa

SEQ ID NO: 189327 - RNA, 19 nt, Artificial Sequence
  Description of Artificial Sequence: Synthetic oligonucleotide
  Antisense strand to SEQ ID NO: 189326
uugucucacgcuuguaauc

SEQ ID NO: 189328 - RNA, 19 nt, Artificial Sequence
  Description of Artificial Sequence: Synthetic oligonucleotide
  Sense strand starting at position 743 of SEQ ID NO: 2441
ccagucugcuucuuuauuu

SEQ ID NO: 189329 - RNA, 19 nt, Artificial Sequence
  Description of Artificial Sequence: Synthetic oligonucleotide
  Antisense strand to SEQ ID NO: 189328
aaauaaagaagcagacugg

SEQ ID NO: 189330 - RNA, 19 nt, Artificial Sequence
  Description of Artificial Sequence: Synthetic oligonucleotide
  Sense strand starting at position 782 of SEQ ID NO: 2441
ucucuacgaagaugaguuu

SEQ ID NO: 189331 - RNA, 19 nt, Artificial Sequence
  Description of Artificial Sequence: Synthetic oligonucleotide
  Antisense strand to SEQ ID NO: 189330
aaacucaucuucguagaga

SEQ ID NO: 189332 - RNA, 19 nt, Artificial Sequence
  Description of Artificial Sequence: Synthetic oligonucleotide
  Sense strand starting at position 853 of SEQ ID NO: 2441
cugagcuucccuuagaucu

SEQ ID NO: 189333 - RNA, 19 nt, Artificial Sequence
  Description of Artificial Sequence: Synthetic oligonucleotide
  Antisense strand to SEQ ID NO: 189332
agaucuaagggaagcucag

SEQ ID NO: 189334 - RNA, 19 nt, Artificial Sequence
  Description of Artificial Sequence: Synthetic oligonucleotide
  Sense strand starting at position 1014 of SEQ ID NO: 2441
gucucugagcucuggguga

SEQ ID NO: 189335 - RNA, 19 nt, Artificial Sequence
  Description of Artificial Sequence: Synthetic oligonucleotide
  Antisense strand to SEQ ID NO: 189334
ucacccagagcucagagac

SEQ ID NO: 189336 - RNA, 19 nt, Artificial Sequence
  Description of Artificial Sequence: Synthetic oligonucleotide
  Sense strand starting at position 1016 of SEQ ID NO: 2441
cucugagcucugggugaca

SEQ ID NO: 189337 - RNA, 19 nt, Artificial Sequence
  Description of Artificial Sequence: Synthetic oligonucleotide
  Antisense strand to SEQ ID NO: 189336
ugucacccagagcucagag

SEQ ID NO: 189338 - RNA, 19 nt, Artificial Sequence
  Description of Artificial Sequence: Synthetic oligonucleotide
  Sense strand starting at position 1018 of SEQ ID NO: 2441
cugagcucugggugacaau

SEQ ID NO: 189339 - RNA, 19 nt, Artificial Sequence
  Description of Artificial Sequence: Synthetic oligonucleotide
  Antisense strand to SEQ ID NO: 189338
auugucacccagagcucag

SEQ ID NO: 189340 - RNA, 19 nt, Artificial Sequence
  Description of Artificial Sequence: Synthetic oligonucleotide
  Sense strand starting at position 1025 of SEQ ID NO: 2441
cugggugacaauggugaua

SEQ ID NO: 189341 - RNA, 19 nt, Artificial Sequence
  Description of Artificial Sequence: Synthetic oligonucleotide
  Antisense strand to SEQ ID NO: 189340
uaucaccauugucacccag

SEQ ID NO: 189342 - RNA, 19 nt, Artificial Sequence
  Description of Artificial Sequence: Synthetic oligonucleotide
  Sense strand starting at position 1083 of SEQ ID NO: 2441
acccauaaguguucuagga

SEQ ID NO: 189343 - RNA, 19 nt, Artificial Sequence
  Description of Artificial Sequence: Synthetic oligonucleotide
  Antisense strand to SEQ ID NO: 189342
uccuagaacacuuaugggu

SEQ ID NO: 189344 - RNA, 19 nt, Artificial Sequence
  Description of Artificial Sequence: Synthetic oligonucleotide
  Sense strand starting at position 1087 of SEQ ID NO: 2441
auaaguguucuaggagccu

SEQ ID NO: 189345 - RNA, 19 nt, Artificial Sequence
  Description of Artificial Sequence: Synthetic oligonucleotide
  Antisense strand to SEQ ID NO: 189344
aggcuccuagaacacuuau

SEQ ID NO: 189346 - RNA, 19 nt, Artificial Sequence
  Description of Artificial Sequence: Synthetic oligonucleotide
  Sense strand starting at position 1146 of SEQ ID NO: 2441
aucaucucugcuuaaagga

SEQ ID NO: 189347 - RNA, 19 nt, Artificial Sequence
  Description of Artificial Sequence: Synthetic oligonucleotide
  Antisense strand to SEQ ID NO: 189346
uccuuuaagcagagaugau

SEQ ID NO: 189348 - RNA, 19 nt, Artificial Sequence
  Description of Artificial Sequence: Synthetic oligonucleotide
  Sense strand starting at position 1153 of SEQ ID NO: 2441
cugcuuaaaggaugaauaa

SEQ ID NO: 189349 - RNA, 19 nt, Artificial Sequence
  Description of Artificial Sequence: Synthetic oligonucleotide
  Antisense strand to SEQ ID NO: 189348
uuauucauccuuuaagcag

SEQ ID NO: 189350 - RNA, 19 nt, Artificial Sequence
  Description of Artificial Sequence: Synthetic oligonucleotide
  Sense strand starting at position 1304 of SEQ ID NO: 2441
gcaucacucgcucuagcuu

SEQ ID NO: 189351 - RNA, 19 nt, Artificial Sequence
  Description of Artificial Sequence: Synthetic oligonucleotide
  Antisense strand to SEQ ID NO: 189350
aagcuagagcgagugaugc

SEQ ID NO: 189352 - RNA, 19 nt, Artificial Sequence
  Description of Artificial Sequence: Synthetic oligonucleotide
  Sense strand starting at position 1352 of SEQ ID NO: 2441
cgcaguacgaaugaaugaa

SEQ ID NO: 189353 - RNA, 19 nt, Artificial Sequence
  Description of Artificial Sequence: Synthetic oligonucleotide
  Antisense strand to SEQ ID NO: 189352
uucauucauucguacugcg

SEQ ID NO: 189354 - RNA, 19 nt, Artificial Sequence
  Description of Artificial Sequence: Synthetic oligonucleotide
  Sense strand starting at position 2004 of SEQ ID NO: 2441
cagcguccucgcuaggaga

SEQ ID NO: 189355 - RNA, 19 nt, Artificial Sequence
  Description of Artificial Sequence: Synthetic oligonucleotide
  Antisense strand to SEQ ID NO: 189354
ucuccuagcgaggacgcug

SEQ ID NO: 189356 - RNA, 19 nt, Artificial Sequence
  Description of Artificial Sequence: Synthetic oligonucleotide
  Sense strand starting at position 2072 of SEQ ID NO: 2441
caguacuucggcgcucaga

SEQ ID NO: 189357 - RNA, 19 nt, Artificial Sequence
  Description of Artificial Sequence: Synthetic oligonucleotide
  Antisense strand to SEQ ID NO: 189356
ucugagcgccgaaguacug

SEQ ID NO: 189358 - RNA, 19 nt, Artificial Sequence
  Description of Artificial Sequence: Synthetic oligonucleotide
  Sense strand starting at position 2074 of SEQ ID NO: 2441
guacuucggcgcucagagu

SEQ ID NO: 189359 - RNA, 19 nt, Artificial Sequence
  Description of Artificial Sequence: Synthetic oligonucleotide
  Antisense strand to SEQ ID NO: 189358
acucugagcgccgaaguac

SEQ ID NO: 189360 - RNA, 19 nt, Artificial Sequence
  Description of Artificial Sequence: Synthetic oligonucleotide
  Sense strand starting at position 2087 of SEQ ID NO: 2441
cagaguuguccucauugua

SEQ ID NO: 189361 - RNA, 19 nt, Artificial Sequence
  Description of Artificial Sequence: Synthetic oligonucleotide
  Antisense strand to SEQ ID NO: 189360
uacaaugaggacaacucug

SEQ ID NO: 189362 - RNA, 19 nt, Artificial Sequence
  Description of Artificial Sequence: Synthetic oligonucleotide
  Sense strand starting at position 2176 of SEQ ID NO: 2441
cuguguuaagcgcuuuaca

SEQ ID NO: 189363 - RNA, 19 nt, Artificial Sequence
  Description of Artificial Sequence: Synthetic oligonucleotide
  Antisense strand to SEQ ID NO: 189362
uguaaagcgcuuaacacag

SEQ ID NO: 189364 - RNA, 19 nt, Artificial Sequence
  Description of Artificial Sequence: Synthetic oligonucleotide
  Sense strand starting at position 2178 of SEQ ID NO: 2441
guguuaagcgcuuuacaug

SEQ ID NO: 189365 - RNA, 19 nt, Artificial Sequence
  Description of Artificial Sequence: Synthetic oligonucleotide
  Antisense strand to SEQ ID NO: 189364
cauguaaagcgcuuaacac

SEQ ID NO: 189366 - RNA, 19 nt, Artificial Sequence
  Description of Artificial Sequence: Synthetic oligonucleotide
  Sense strand starting at position 2277 of SEQ ID NO: 2441
aguguaaaucaauguccau

SEQ ID NO: 189367 - RNA, 19 nt, Artificial Sequence
  Description of Artificial Sequence: Synthetic oligonucleotide
  Antisense strand to SEQ ID NO: 189366
auggacauugauuuacacu

SEQ ID NO: 189368 - RNA, 19 nt, Artificial Sequence
  Description of Artificial Sequence: Synthetic oligonucleotide
  Sense strand starting at position 2284 of SEQ ID NO: 2441
aucaauguccauggucaca

SEQ ID NO: 189369 - RNA, 19 nt, Artificial Sequence
  Description of Artificial Sequence: Synthetic oligonucleotide
  Antisense strand to SEQ ID NO: 189368
ugugaccauggacauugau

SEQ ID NO: 189370 - RNA, 19 nt, Artificial Sequence
  Description of Artificial Sequence: Synthetic oligonucleotide
  Sense strand starting at position 2294 of SEQ ID NO: 2441
auggucacauaucuuguaa

SEQ ID NO: 189371 - RNA, 19 nt, Artificial Sequence
  Description of Artificial Sequence: Synthetic oligonucleotide
  Antisense strand to SEQ ID NO: 189370
uuacaagauaugugaccau

SEQ ID NO: 189372 - RNA, 19 nt, Artificial Sequence
  Description of Artificial Sequence: Synthetic oligonucleotide
  Sense strand starting at position 2302 of SEQ ID NO: 2441
auaucuuguaaguggugga

SEQ ID NO: 189373 - RNA, 19 nt, Artificial Sequence
  Description of Artificial Sequence: Synthetic oligonucleotide
  Antisense strand to SEQ ID NO: 189372
uccaccacuuacaagauau

SEQ ID NO: 189374 - RNA, 19 nt, Artificial Sequence
  Description of Artificial Sequence: Synthetic oligonucleotide
  Sense strand starting at position 2312 of SEQ ID NO: 2441
agugguggaccggagauau

SEQ ID NO: 189375 - RNA, 19 nt, Artificial Sequence
  Description of Artificial Sequence: Synthetic oligonucleotide
  Antisense strand to SEQ ID NO: 189374
auaucuccgguccaccacu

SEQ ID NO: 189376 - RNA, 19 nt, Artificial Sequence
  Description of Artificial Sequence: Synthetic oligonucleotide
  Sense strand starting at position 2409 of SEQ ID NO: 2441
gauugucuuggacgugaau

SEQ ID NO: 189377 - RNA, 19 nt, Artificial Sequence
  Description of Artificial Sequence: Synthetic oligonucleotide
  Antisense strand to SEQ ID NO: 189376
auucacguccaagacaauc

SEQ ID NO: 189378 - RNA, 19 nt, Artificial Sequence
  Description of Artificial Sequence: Synthetic oligonucleotide
  Sense strand starting at position 2411 of SEQ ID NO: 2441
uugucuuggacgugaauaa

SEQ ID NO: 189379 - RNA, 19 nt, Artificial Sequence
  Description of Artificial Sequence: Synthetic oligonucleotide
  Antisense strand to SEQ ID NO: 189378
uuauucacguccaagacaa

SEQ ID NO: 189380 - RNA, 19 nt, Artificial Sequence
  Description of Artificial Sequence: Synthetic oligonucleotide
  Sense strand starting at position 2412 of SEQ ID NO: 2441
ugucuuggacgugaauaaa

SEQ ID NO: 189381 - RNA, 19 nt, Artificial Sequence
  Description of Artificial Sequence: Synthetic oligonucleotide
  Antisense strand to SEQ ID NO: 189380
uuuauucacguccaagaca

SEQ ID NO: 189382 - RNA, 19 nt, Artificial Sequence
  Description of Artificial Sequence: Synthetic oligonucleotide
  Sense strand starting at position 2421 of SEQ ID NO: 2441
cgugaauaaaggugucuga

SEQ ID NO: 189383 - RNA, 19 nt, Artificial Sequence
  Description of Artificial Sequence: Synthetic oligonucleotide
  Antisense strand to SEQ ID NO: 189382
ucagacaccuuuauucacg

SEQ ID NO: 189384 - RNA, 19 nt, Artificial Sequence
  Description of Artificial Sequence: Synthetic oligonucleotide
  Sense strand starting at position 2646 of SEQ ID NO: 2441
ucacauggauuugguaaga

SEQ ID NO: 189385 - RNA, 19 nt, Artificial Sequence
  Description of Artificial Sequence: Synthetic oligonucleotide
  Antisense strand to SEQ ID NO: 189384
ucuuaccaaauccauguga

SEQ ID NO: 189386 - RNA, 19 nt, Artificial Sequence
  Description of Artificial Sequence: Synthetic oligonucleotide
  Sense strand starting at position 2665 of SEQ ID NO: 2441
auaccaacgcugugugaau

SEQ ID NO: 189387 - RNA, 19 nt, Artificial Sequence
  Description of Artificial Sequence: Synthetic oligonucleotide
  Antisense strand to SEQ ID NO: 189386
auucacacagcguugguau

SEQ ID NO: 189388 - RNA, 19 nt, Artificial Sequence
  Description of Artificial Sequence: Synthetic oligonucleotide
  Sense strand starting at position 2750 of SEQ ID NO: 2441
gggagacuguucccuagag

SEQ ID NO: 189389 - RNA, 19 nt, Artificial Sequence
  Description of Artificial Sequence: Synthetic oligonucleotide
  Antisense strand to SEQ ID NO: 189388
cucuagggaacagucuccc

SEQ ID NO: 189390 - RNA, 19 nt, Artificial Sequence
  Description of Artificial Sequence: Synthetic oligonucleotide
  Sense strand starting at position 2751 of SEQ ID NO: 2441
ggagacuguucccuagaga

SEQ ID NO: 189391 - RNA, 19 nt, Artificial Sequence
  Description of Artificial Sequence: Synthetic oligonucleotide
  Antisense strand to SEQ ID NO: 189390
ucucuagggaacagucucc

SEQ ID NO: 189392 - RNA, 19 nt, Artificial Sequence
  Description of Artificial Sequence: Synthetic oligonucleotide
  Sense strand starting at position 2754 of SEQ ID NO: 2441
gacuguucccuagagauuc

SEQ ID NO: 189393 - RNA, 19 nt, Artificial Sequence
  Description of Artificial Sequence: Synthetic oligonucleotide
  Antisense strand to SEQ ID NO: 189392
gaaucucuagggaacaguc

SEQ ID NO: 189394 - RNA, 19 nt, Artificial Sequence
  Description of Artificial Sequence: Synthetic oligonucleotide
  Sense strand starting at position 2876 of SEQ ID NO: 2441
cccuucuugucuuuagguu

SEQ ID NO: 189395 - RNA, 19 nt, Artificial Sequence
  Description of Artificial Sequence: Synthetic oligonucleotide
  Antisense strand to SEQ ID NO: 189394
aaccuaaagacaagaaggg

SEQ ID NO: 189396 - RNA, 19 nt, Artificial Sequence
  Description of Artificial Sequence: Synthetic oligonucleotide
  Sense strand starting at position 3454 of SEQ ID NO: 2441
ugaccugaacaguguacau

SEQ ID NO: 189397 - RNA, 19 nt, Artificial Sequence
  Description of Artificial Sequence: Synthetic oligonucleotide
  Antisense strand to SEQ ID NO: 189396
auguacacuguucagguca

SEQ ID NO: 189398 - RNA, 19 nt, Artificial Sequence
  Description of Artificial Sequence: Synthetic oligonucleotide
  Sense strand starting at position 3616 of SEQ ID NO: 2442
cuagucauugucuaaugaa

SEQ ID NO: 189399 - RNA, 19 nt, Artificial Sequence
  Description of Artificial Sequence: Synthetic oligonucleotide
  Antisense strand to SEQ ID NO: 189398
uucauuagacaaugacuag

SEQ ID NO: 189400 - RNA, 19 nt, Artificial Sequence
  Description of Artificial Sequence: Synthetic oligonucleotide
  Sense strand starting at position 3615 of SEQ ID NO: 2442
acuagucauugucuaauga

SEQ ID NO: 189401 - RNA, 19 nt, Artificial Sequence
  Description of Artificial Sequence: Synthetic oligonucleotide
  Antisense strand to SEQ ID NO: 189400
ucauuagacaaugacuagu

SEQ ID NO: 189402 - RNA, 19 nt, Artificial Sequence
  Description of Artificial Sequence: Synthetic oligonucleotide
  Sense strand starting at position 3612 of SEQ ID NO: 2442
uccacuagucauugucuaa

SEQ ID NO: 189403 - RNA, 19 nt, Artificial Sequence
  Description of Artificial Sequence: Synthetic oligonucleotide
  Antisense strand to SEQ ID NO: 189402
uuagacaaugacuagugga

SEQ ID NO: 189404 - RNA, 19 nt, Artificial Sequence
  Description of Artificial Sequence: Synthetic oligonucleotide
  Sense strand starting at position 3611 of SEQ ID NO: 2442
guccacuagucauugucua

SEQ ID NO: 189405 - RNA, 19 nt, Artificial Sequence
  Description of Artificial Sequence: Synthetic oligonucleotide
  Antisense strand to SEQ ID NO: 189404
uagacaaugacuaguggac

SEQ ID NO: 189406 - RNA, 19 nt, Artificial Sequence
  Description of Artificial Sequence: Synthetic oligonucleotide
  Sense strand starting at position 3496 of SEQ ID NO: 2442
aucguaucgaggcaagaau

SEQ ID NO: 189407 - RNA, 19 nt, Artificial Sequence
  Description of Artificial Sequence: Synthetic oligonucleotide
  Antisense strand to SEQ ID NO: 189406
auucuugccucgauacgau

SEQ ID NO: 189408 - RNA, 19 nt, Artificial Sequence
  Description of Artificial Sequence: Synthetic oligonucleotide
  Sense strand starting at position 3492 of SEQ ID NO: 2442
ggaaaucguaucgaggcaa

SEQ ID NO: 189409 - RNA, 19 nt, Artificial Sequence
  Description of Artificial Sequence: Synthetic oligonucleotide
  Antisense strand to SEQ ID NO: 189408
uugccucgauacgauuucc

SEQ ID NO: 189410 - RNA, 19 nt, Artificial Sequence
  Description of Artificial Sequence: Synthetic oligonucleotide
  Sense strand starting at position 3480 of SEQ ID NO: 2442
cgucaagaaauuggaaauc

SEQ ID NO: 189411 - RNA, 19 nt, Artificial Sequence
  Description of Artificial Sequence: Synthetic oligonucleotide
  Antisense strand to SEQ ID NO: 189410
gauuuccaauuucuugacg

SEQ ID NO: 189412 - RNA, 19 nt, Artificial Sequence
  Description of Artificial Sequence: Synthetic oligonucleotide
  Sense strand starting at position 3479 of SEQ ID NO: 2442
ccgucaagaaauuggaaau

SEQ ID NO: 189413 - RNA, 19 nt, Artificial Sequence
  Description of Artificial Sequence: Synthetic oligonucleotide
  Antisense strand to SEQ ID NO: 189412
auuuccaauuucuugacgg

SEQ ID NO: 189414 - RNA, 19 nt, Artificial Sequence
  Description of Artificial Sequence: Synthetic oligonucleotide
  Sense strand starting at position 3471 of SEQ ID NO: 2442
aaugucugccgucaagaaa

SEQ ID NO: 189415 - RNA, 19 nt, Artificial Sequence
  Description of Artificial Sequence: Synthetic oligonucleotide
  Antisense strand to SEQ ID NO: 189414
uuucuugacggcagacauu

SEQ ID NO: 189416 - RNA, 19 nt, Artificial Sequence
  Description of Artificial Sequence: Synthetic oligonucleotide
  Sense strand starting at position 3455 of SEQ ID NO: 2442
gccacaaagacguggaaau

SEQ ID NO: 189417 - RNA, 19 nt, Artificial Sequence
  Description of Artificial Sequence: Synthetic oligonucleotide
  Antisense strand to SEQ ID NO: 189416
auuuccacgucuuuguggc

SEQ ID NO: 189418 - RNA, 19 nt, Artificial Sequence
  Description of Artificial Sequence: Synthetic oligonucleotide
  Sense strand starting at position 3435 of SEQ ID NO: 2442
auuagacugcguuaaucac

SEQ ID NO: 189419 - RNA, 19 nt, Artificial Sequence
  Description of Artificial Sequence: Synthetic oligonucleotide
  Antisense strand to SEQ ID NO: 189418
gugauuaacgcagucuaau

SEQ ID NO: 189420 - RNA, 19 nt, Artificial Sequence
  Description of Artificial Sequence: Synthetic oligonucleotide
  Sense strand starting at position 3433 of SEQ ID NO: 2442
caauuagacugcguuaauc

SEQ ID NO: 189421 - RNA, 19 nt, Artificial Sequence
  Description of Artificial Sequence: Synthetic oligonucleotide
  Antisense strand to SEQ ID NO: 189420
gauuaacgcagucuaauug

SEQ ID NO: 189422 - RNA, 19 nt, Artificial Sequence
  Description of Artificial Sequence: Synthetic oligonucleotide
  Sense strand starting at position 3323 of SEQ ID NO: 2442
cuuaauugauacguaucua

SEQ ID NO: 189423 - RNA, 19 nt, Artificial Sequence
  Description of Artificial Sequence: Synthetic oligonucleotide
  Antisense strand to SEQ ID NO: 189422
uagauacguaucaauuaag

SEQ ID NO: 189424 - RNA, 19 nt, Artificial Sequence
  Description of Artificial Sequence: Synthetic oligonucleotide
  Sense strand starting at position 3308 of SEQ ID NO: 2442
gccucagcuugauuccuua

SEQ ID NO: 189425 - RNA, 19 nt, Artificial Sequence
  Description of Artificial Sequence: Synthetic oligonucleotide
  Antisense strand to SEQ ID NO: 189424
uaaggaaucaagcugaggc

SEQ ID NO: 189426 - RNA, 19 nt, Artificial Sequence
  Description of Artificial Sequence: Synthetic oligonucleotide
  Sense strand starting at position 3302 of SEQ ID NO: 2442
gcagaugccucagcuugau

SEQ ID NO: 189427 - RNA, 19 nt, Artificial Sequence
  Description of Artificial Sequence: Synthetic oligonucleotide
  Antisense strand to SEQ ID NO: 189426
aucaagcugaggcaucugc

SEQ ID NO: 189428 - RNA, 19 nt, Artificial Sequence
  Description of Artificial Sequence: Synthetic oligonucleotide
  Sense strand starting at position 3227 of SEQ ID NO: 2442
guguacuuacacuguuaca

SEQ ID NO: 189429 - RNA, 19 nt, Artificial Sequence
  Description of Artificial Sequence: Synthetic oligonucleotide
  Antisense strand to SEQ ID NO: 189428
uguaacaguguaaguacac

SEQ ID NO: 189430 - RNA, 19 nt, Artificial Sequence
  Description of Artificial Sequence: Synthetic oligonucleotide
  Sense strand starting at position 3163 of SEQ ID NO: 2442
ucaucaugucacgggcaga

SEQ ID NO: 189431 - RNA, 19 nt, Artificial Sequence
  Description of Artificial Sequence: Synthetic oligonucleotide
  Antisense strand to SEQ ID NO: 189430
ucugcccgugacaugauga

SEQ ID NO: 189432 - RNA, 19 nt, Artificial Sequence
  Description of Artificial Sequence: Synthetic oligonucleotide
  Sense strand starting at position 3151 of SEQ ID NO: 2442
gucguucuuacgucaucau

SEQ ID NO: 189433 - RNA, 19 nt, Artificial Sequence
  Description of Artificial Sequence: Synthetic oligonucleotide
  Antisense strand to SEQ ID NO: 189432
augaugacguaagaacgac

SEQ ID NO: 189434 - RNA, 19 nt, Artificial Sequence
  Description of Artificial Sequence: Synthetic oligonucleotide
  Sense strand starting at position 3145 of SEQ ID NO: 2442
cugggagucguucuuacgu

SEQ ID NO: 189435 - RNA, 19 nt, Artificial Sequence
  Description of Artificial Sequence: Synthetic oligonucleotide
  Antisense strand to SEQ ID NO: 189434
acguaagaacgacucccag

SEQ ID NO: 189436 - RNA, 19 nt, Artificial Sequence
  Description of Artificial Sequence: Synthetic oligonucleotide
  Sense strand starting at position 3138 of SEQ ID NO: 2442
gcaguuucugggagucguu

SEQ ID NO: 189437 - RNA, 19 nt, Artificial Sequence
  Description of Artificial Sequence: Synthetic oligonucleotide
  Antisense strand to SEQ ID NO: 189436
aacgacucccagaaacugc

SEQ ID NO: 189438 - RNA, 19 nt, Artificial Sequence
  Description of Artificial Sequence: Synthetic oligonucleotide
  Sense strand starting at position 2743 of SEQ ID NO: 2442
ugacuuggccgugagaaag

SEQ ID NO: 189439 - RNA, 19 nt, Artificial Sequence
  Description of Artificial Sequence: Synthetic oligonucleotide
  Antisense strand to SEQ ID NO: 189438
cuuucucacggccaaguca

SEQ ID NO: 189440 - RNA, 19 nt, Artificial Sequence
  Description of Artificial Sequence: Synthetic oligonucleotide
  Sense strand starting at position 2742 of SEQ ID NO: 2442
gugacuuggccgugagaaa

SEQ ID NO: 189441 - RNA, 19 nt, Artificial Sequence
  Description of Artificial Sequence: Synthetic oligonucleotide
  Antisense strand to SEQ ID NO: 189440
uuucucacggccaagucac

SEQ ID NO: 189442 - RNA, 19 nt, Artificial Sequence
  Description of Artificial Sequence: Synthetic oligonucleotide
  Sense strand starting at position 2740 of SEQ ID NO: 2442
gggugacuuggccgugaga

SEQ ID NO: 189443 - RNA, 19 nt, Artificial Sequence
  Description of Artificial Sequence: Synthetic oligonucleotide
  Antisense strand to SEQ ID NO: 189442
ucucacggccaagucaccc

SEQ ID NO: 189444 - RNA, 19 nt, Artificial Sequence
  Description of Artificial Sequence: Synthetic oligonucleotide
  Sense strand starting at position 1211 of SEQ ID NO: 2442
guaguucgccgugcauaaa

SEQ ID NO: 189445 - RNA, 19 nt, Artificial Sequence
  Description of Artificial Sequence: Synthetic oligonucleotide
  Antisense strand to SEQ ID NO: 189444
uuuaugcacggcgaacuac

SEQ ID NO: 189446 - RNA, 19 nt, Artificial Sequence
  Description of Artificial Sequence: Synthetic oligonucleotide
  Sense strand starting at position 1118 of SEQ ID NO: 2442
cgcggauccauagagguuu

SEQ ID NO: 189447 - RNA, 19 nt, Artificial Sequence
  Description of Artificial Sequence: Synthetic oligonucleotide
  Antisense strand to SEQ ID NO: 189446
aaaccucuauggauccgcg

SEQ ID NO: 189448 - RNA, 19 nt, Artificial Sequence
  Description of Artificial Sequence: Synthetic oligonucleotide
  Sense strand starting at position 916 of SEQ ID NO: 2442
ggagacauccucgggagau

SEQ ID NO: 189449 - RNA, 19 nt, Artificial Sequence
  Description of Artificial Sequence: Synthetic oligonucleotide
  Antisense strand to SEQ ID NO: 189448
aucucccgaggaugucucc

SEQ ID NO: 189450 - RNA, 19 nt, Artificial Sequence
  Description of Artificial Sequence: Synthetic oligonucleotide
  Sense strand starting at position 904 of SEQ ID NO: 2442
acacuuaguccaggagaca

SEQ ID NO: 189451 - RNA, 19 nt, Artificial Sequence
  Description of Artificial Sequence: Synthetic oligonucleotide
  Antisense strand to SEQ ID NO: 189450
ugucuccuggacuaagugu

SEQ ID NO: 189452 - RNA, 19 nt, Artificial Sequence
  Description of Artificial Sequence: Synthetic oligonucleotide
  Sense strand starting at position 883 of SEQ ID NO: 2442
cggugagugacauaauuau

SEQ ID NO: 189453 - RNA, 19 nt, Artificial Sequence
  Description of Artificial Sequence: Synthetic oligonucleotide
  Antisense strand to SEQ ID NO: 189452
auaauuaugucacucaccg

SEQ ID NO: 189454 - RNA, 19 nt, Artificial Sequence
  Description of Artificial Sequence: Synthetic oligonucleotide
  Sense strand starting at position 793 of SEQ ID NO: 2442
ggcggagaguuaaagagua

SEQ ID NO: 189455 - RNA, 19 nt, Artificial Sequence
  Description of Artificial Sequence: Synthetic oligonucleotide
  Antisense strand to SEQ ID NO: 189454
uacucuuuaacucuccgcc

SEQ ID NO: 189456 - RNA, 19 nt, Artificial Sequence
  Description of Artificial Sequence: Synthetic oligonucleotide
  Sense strand starting at position 770 of SEQ ID NO: 2442
cuucguucccauuagaaag

SEQ ID NO: 189457 - RNA, 19 nt, Artificial Sequence
  Description of Artificial Sequence: Synthetic oligonucleotide
  Antisense strand to SEQ ID NO: 189456
cuuucuaaugggaacgaag

SEQ ID NO: 189458 - RNA, 19 nt, Artificial Sequence
  Description of Artificial Sequence: Synthetic oligonucleotide
  Sense strand starting at position 661 of SEQ ID NO: 2442
cugcgacaucucugaaugu

SEQ ID NO: 189459 - RNA, 19 nt, Artificial Sequence
  Description of Artificial Sequence: Synthetic oligonucleotide
  Antisense strand to SEQ ID NO: 189458
acauucagagaugucgcag

SEQ ID NO: 189460 - RNA, 19 nt, Artificial Sequence
  Description of Artificial Sequence: Synthetic oligonucleotide
  Sense strand starting at position 515 of SEQ ID NO: 2442
uguuuaugaucacaagaaa

SEQ ID NO: 189461 - RNA, 19 nt, Artificial Sequence
  Description of Artificial Sequence: Synthetic oligonucleotide
  Antisense strand to SEQ ID NO: 189460
uuucuugugaucauaaaca

SEQ ID NO: 189462 - RNA, 19 nt, Artificial Sequence
  Description of Artificial Sequence: Synthetic oligonucleotide
  Sense strand starting at position 465 of SEQ ID NO: 2442
aucugugucccuuaacaau

SEQ ID NO: 189463 - RNA, 19 nt, Artificial Sequence
  Description of Artificial Sequence: Synthetic oligonucleotide
  Antisense strand to SEQ ID NO: 189462
auuguuaagggacacagau

SEQ ID NO: 189464 - RNA, 19 nt, Artificial Sequence
  Description of Artificial Sequence: Synthetic oligonucleotide
  Sense strand starting at position 463 of SEQ ID NO: 2442
ugaucugugucccuuaaca

SEQ ID NO: 189465 - RNA, 19 nt, Artificial Sequence
  Description of Artificial Sequence: Synthetic oligonucleotide
  Antisense strand to SEQ ID NO: 189464
uguuaagggacacagauca

SEQ ID NO: 189466 - RNA, 19 nt, Artificial Sequence
  Description of Artificial Sequence: Synthetic oligonucleotide
  Sense strand starting at position 461 of SEQ ID NO: 2442
cuugaucugugucccuuaa

SEQ ID NO: 189467 - RNA, 19 nt, Artificial Sequence
  Description of Artificial Sequence: Synthetic oligonucleotide
  Antisense strand to SEQ ID NO: 189466
uuaagggacacagaucaag

SEQ ID NO: 189468 - RNA, 19 nt, Artificial Sequence
  Description of Artificial Sequence: Synthetic oligonucleotide
  Sense strand starting at position 422 of SEQ ID NO: 2442
ugaucuuucugcucagaaa

SEQ ID NO: 189469 - RNA, 19 nt, Artificial Sequence
  Description of Artificial Sequence: Synthetic oligonucleotide
  Antisense strand to SEQ ID NO: 189468
uuucugagcagaaagauca

SEQ ID NO: 189470 - RNA, 19 nt, Artificial Sequence
  Description of Artificial Sequence: Synthetic oligonucleotide
  Sense strand starting at position 420 of SEQ ID NO: 2442
ucugaucuuucugcucaga

SEQ ID NO: 189471 - RNA, 19 nt, Artificial Sequence
  Description of Artificial Sequence: Synthetic oligonucleotide
  Antisense strand to SEQ ID NO: 189470
ucugagcagaaagaucaga

SEQ ID NO: 189472 - RNA, 19 nt, Artificial Sequence
  Description of Artificial Sequence: Synthetic oligonucleotide
  Sense strand starting at position 324 of SEQ ID NO: 2442
uucugaaauccuggaaagu

SEQ ID NO: 189473 - RNA, 19 nt, Artificial Sequence
  Description of Artificial Sequence: Synthetic oligonucleotide
  Antisense strand to SEQ ID NO: 189472
acuuuccaggauuucagaa

SEQ ID NO: 189474 - RNA, 19 nt, Artificial Sequence
  Description of Artificial Sequence: Synthetic oligonucleotide
  Sense strand starting at position 145 of SEQ ID NO: 2442
ugguauacaugucucaaau

SEQ ID NO: 189475 - RNA, 19 nt, Artificial Sequence
  Description of Artificial Sequence: Synthetic oligonucleotide
  Antisense strand to SEQ ID NO: 189474
auuugagacauguauacca

SEQ ID NO: 189476 - RNA, 19 nt, Artificial Sequence
  Description of Artificial Sequence: Synthetic oligonucleotide
  Sense strand starting at position 30 of SEQ ID NO: 2442
uccaacguuuaguuucuaa

SEQ ID NO: 189477 - RNA, 19 nt, Artificial Sequence
  Description of Artificial Sequence: Synthetic oligonucleotide
  Antisense strand to SEQ ID NO: 189476
uuagaaacuaaacguugga

SEQ ID NO: 189478 - RNA, 19 nt, Artificial Sequence
  Description of Artificial Sequence: Synthetic oligonucleotide
  Sense strand starting at position 3968 of SEQ ID NO: 2443
gcugucagcugcucugaca

SEQ ID NO: 189479 - RNA, 19 nt, Artificial Sequence
  Description of Artificial Sequence: Synthetic oligonucleotide
  Antisense strand to SEQ ID NO: 189478
ugucagagcagcugacagc

SEQ ID NO: 189480 - RNA, 19 nt, Artificial Sequence
  Description of Artificial Sequence: Synthetic oligonucleotide
  Sense strand starting at position 3932 of SEQ ID NO: 2443
gucuguguguuagaauaaa

SEQ ID NO: 189481 - RNA, 19 nt, Artificial Sequence
  Description of Artificial Sequence: Synthetic oligonucleotide
  Antisense strand to SEQ ID NO: 189480
uuuauucuaacacacagac

SEQ ID NO: 189482 - RNA, 19 nt, Artificial Sequence
  Description of Artificial Sequence: Synthetic oligonucleotide
  Sense strand starting at position 3930 of SEQ ID NO: 2443
cugucuguguguuagaaua

SEQ ID NO: 189483 - RNA, 19 nt, Artificial Sequence
  Description of Artificial Sequence: Synthetic oligonucleotide
  Antisense strand to SEQ ID NO: 189482
uauucuaacacacagacag

SEQ ID NO: 189484 - RNA, 19 nt, Artificial Sequence
  Description of Artificial Sequence: Synthetic oligonucleotide
  Sense strand starting at position 3664 of SEQ ID NO: 2443
uuccuaaacuggguuagaa

SEQ ID NO: 189485 - RNA, 19 nt, Artificial Sequence
  Description of Artificial Sequence: Synthetic oligonucleotide
  Antisense strand to SEQ ID NO: 189484
uucuaacccaguuuaggaa

SEQ ID NO: 189486 - RNA, 19 nt, Artificial Sequence
  Description of Artificial Sequence: Synthetic oligonucleotide
  Sense strand starting at position 3663 of SEQ ID NO: 2443
auuccuaaacuggguuaga

SEQ ID NO: 189487 - RNA, 19 nt, Artificial Sequence
  Description of Artificial Sequence: Synthetic oligonucleotide
  Antisense strand to SEQ ID NO: 189486
ucuaacccaguuuaggaau

SEQ ID NO: 189488 - RNA, 19 nt, Artificial Sequence
  Description of Artificial Sequence: Synthetic oligonucleotide
  Sense strand starting at position 3560 of SEQ ID NO: 2443
guuauuuacucgcucaagu

SEQ ID NO: 189489 - RNA, 19 nt, Artificial Sequence
  Description of Artificial Sequence: Synthetic oligonucleotide
  Antisense strand to SEQ ID NO: 189488
acuugagcgaguaaauaac

SEQ ID NO: 189490 - RNA, 19 nt, Artificial Sequence
  Description of Artificial Sequence: Synthetic oligonucleotide
  Sense strand starting at position 3450 of SEQ ID NO: 2443
ucuaaauagcagugaacaa

SEQ ID NO: 189491 - RNA, 19 nt, Artificial Sequence
  Description of Artificial Sequence: Synthetic oligonucleotide
  Antisense strand to SEQ ID NO: 189490
uuguucacugcuauuuaga

SEQ ID NO: 189492 - RNA, 19 nt, Artificial Sequence
  Description of Artificial Sequence: Synthetic oligonucleotide
  Sense strand starting at position 3405 of SEQ ID NO: 2443
uggauuccaguuuacuauu

SEQ ID NO: 189493 - RNA, 19 nt, Artificial Sequence
  Description of Artificial Sequence: Synthetic oligonucleotide
  Antisense strand to SEQ ID NO: 189492
aauaguaaacuggaaucca

SEQ ID NO: 189494 - RNA, 19 nt, Artificial Sequence
  Description of Artificial Sequence: Synthetic oligonucleotide
  Sense strand starting at position 3395 of SEQ ID NO: 2443
guuugaaugcuggauucca

SEQ ID NO: 189495 - RNA, 19 nt, Artificial Sequence
  Description of Artificial Sequence: Synthetic oligonucleotide
  Antisense strand to SEQ ID NO: 189494
uggaauccagcauucaaac

SEQ ID NO: 189496 - RNA, 19 nt, Artificial Sequence
  Description of Artificial Sequence: Synthetic oligonucleotide
  Sense strand starting at position 3361 of SEQ ID NO: 2443
cuagcugcuuaacuagaau

SEQ ID NO: 189497 - RNA, 19 nt, Artificial Sequence
  Description of Artificial Sequence: Synthetic oligonucleotide
  Antisense strand to SEQ ID NO: 189496
auucuaguuaagcagcuag

SEQ ID NO: 189498 - RNA, 19 nt, Artificial Sequence
  Description of Artificial Sequence: Synthetic oligonucleotide
  Sense strand starting at position 3300 of SEQ ID NO: 2443
aguagugcugcucaauguu

SEQ ID NO: 189499 - RNA, 19 nt, Artificial Sequence
  Description of Artificial Sequence: Synthetic oligonucleotide
  Antisense strand to SEQ ID NO: 189498
aacauugagcagcacuacu

SEQ ID NO: 189500 - RNA, 19 nt, Artificial Sequence
  Description of Artificial Sequence: Synthetic oligonucleotide
  Sense strand starting at position 3287 of SEQ ID NO: 2443
agcuguauguuucaguagu

SEQ ID NO: 189501 - RNA, 19 nt, Artificial Sequence
  Description of Artificial Sequence: Synthetic oligonucleotide
  Antisense strand to SEQ ID NO: 189500
acuacugaaacauacagcu

SEQ ID NO: 189502 - RNA, 19 nt, Artificial Sequence
  Description of Artificial Sequence: Synthetic oligonucleotide
  Sense strand starting at position 3280 of SEQ ID NO: 2443
gcacuacagcuguauguuu

SEQ ID NO: 189503 - RNA, 19 nt, Artificial Sequence
  Description of Artificial Sequence: Synthetic oligonucleotide
  Antisense strand to SEQ ID NO: 189502
aaacauacagcuguagugc

SEQ ID NO: 189504 - RNA, 19 nt, Artificial Sequence
  Description of Artificial Sequence: Synthetic oligonucleotide
  Sense strand starting at position 3110 of SEQ ID NO: 2443
cuaaauuagucgcuaacac

SEQ ID NO: 189505 - RNA, 19 nt, Artificial Sequence
  Description of Artificial Sequence: Synthetic oligonucleotide
  Antisense strand to SEQ ID NO: 189504
guguuagcgacuaauuuag

SEQ ID NO: 189506 - RNA, 19 nt, Artificial Sequence
  Description of Artificial Sequence: Synthetic oligonucleotide
  Sense strand starting at position 3107 of SEQ ID NO: 2443
guucuaaauuagucgcuaa

SEQ ID NO: 189507 - RNA, 19 nt, Artificial Sequence
  Description of Artificial Sequence: Synthetic oligonucleotide
  Antisense strand to SEQ ID NO: 189506
uuagcgacuaauuuagaac

SEQ ID NO: 189508 - RNA, 19 nt, Artificial Sequence
  Description of Artificial Sequence: Synthetic oligonucleotide
  Sense strand starting at position 3050 of SEQ ID NO: 2443
agaauagaggagugcgauu

SEQ ID NO: 189509 - RNA, 19 nt, Artificial Sequence
  Description of Artificial Sequence: Synthetic oligonucleotide
  Antisense strand to SEQ ID NO: 189508
aaucgcacuccucuauucu

SEQ ID NO: 189510 - RNA, 19 nt, Artificial Sequence
  Description of Artificial Sequence: Synthetic oligonucleotide
  Sense strand starting at position 3023 of SEQ ID NO: 2443
gcagcugcugcccagauaa

SEQ ID NO: 189511 - RNA, 19 nt, Artificial Sequence
  Description of Artificial Sequence: Synthetic oligonucleotide
  Antisense strand to SEQ ID NO: 189510
uuaucugggcagcagcugc

SEQ ID NO: 189512 - RNA, 19 nt, Artificial Sequence
  Description of Artificial Sequence: Synthetic oligonucleotide
  Sense strand starting at position 2931 of SEQ ID NO: 2443
gguagccgugaucaaauua

SEQ ID NO: 189513 - RNA, 19 nt, Artificial Sequence
  Description of Artificial Sequence: Synthetic oligonucleotide
  Antisense strand to SEQ ID NO: 189512
uaauuugaucacggcuacc

SEQ ID NO: 189514 - RNA, 19 nt, Artificial Sequence
  Description of Artificial Sequence: Synthetic oligonucleotide
  Sense strand starting at position 2928 of SEQ ID NO: 2443
caagguagccgugaucaaa

SEQ ID NO: 189515 - RNA, 19 nt, Artificial Sequence
  Description of Artificial Sequence: Synthetic oligonucleotide
  Antisense strand to SEQ ID NO: 189514
uuugaucacggcuaccuug

SEQ ID NO: 189516 - RNA, 19 nt, Artificial Sequence
  Description of Artificial Sequence: Synthetic oligonucleotide
  Sense strand starting at position 2815 of SEQ ID NO: 2443
augccacugcuagaauaaa

SEQ ID NO: 189517 - RNA, 19 nt, Artificial Sequence
  Description of Artificial Sequence: Synthetic oligonucleotide
  Antisense strand to SEQ ID NO: 189516
uuuauucuagcaguggcau

SEQ ID NO: 189518 - RNA, 19 nt, Artificial Sequence
  Description of Artificial Sequence: Synthetic oligonucleotide
  Sense strand starting at position 2813 of SEQ ID NO: 2443
agaugccacugcuagaaua

SEQ ID NO: 189519 - RNA, 19 nt, Artificial Sequence
  Description of Artificial Sequence: Synthetic oligonucleotide
  Antisense strand to SEQ ID NO: 189518
uauucuagcaguggcaucu

SEQ ID NO: 189520 - RNA, 19 nt, Artificial Sequence
  Description of Artificial Sequence: Synthetic oligonucleotide
  Sense strand starting at position 2810 of SEQ ID NO: 2443
gcaagaugccacugcuaga

SEQ ID NO: 189521 - RNA, 19 nt, Artificial Sequence
  Description of Artificial Sequence: Synthetic oligonucleotide
  Antisense strand to SEQ ID NO: 189520
ucuagcaguggcaucuugc

SEQ ID NO: 189522 - RNA, 19 nt, Artificial Sequence
  Description of Artificial Sequence: Synthetic oligonucleotide
  Sense strand starting at position 2797 of SEQ ID NO: 2443
ccagacacauucugcaaga

SEQ ID NO: 189523 - RNA, 19 nt, Artificial Sequence
  Description of Artificial Sequence: Synthetic oligonucleotide
  Antisense strand to SEQ ID NO: 189522
ucuugcagaaugugucugg

SEQ ID NO: 189524 - RNA, 19 nt, Artificial Sequence
  Description of Artificial Sequence: Synthetic oligonucleotide
  Sense strand starting at position 2333 of SEQ ID NO: 2443
gcauacagcgcuuaaauaa

SEQ ID NO: 189525 - RNA, 19 nt, Artificial Sequence
  Description of Artificial Sequence: Synthetic oligonucleotide
  Antisense strand to SEQ ID NO: 189524
uuauuuaagcgcuguaugc

SEQ ID NO: 189526 - RNA, 19 nt, Artificial Sequence
  Description of Artificial Sequence: Synthetic oligonucleotide
  Sense strand starting at position 2265 of SEQ ID NO: 2443
aaacuuugauccguugcaa

SEQ ID NO: 189527 - RNA, 19 nt, Artificial Sequence
  Description of Artificial Sequence: Synthetic oligonucleotide
  Antisense strand to SEQ ID NO: 189526
uugcaacggaucaaaguuu

SEQ ID NO: 189528 - RNA, 19 nt, Artificial Sequence
  Description of Artificial Sequence: Synthetic oligonucleotide
  Sense strand starting at position 2182 of SEQ ID NO: 2443
guaguuacauuucuuugua

SEQ ID NO: 189529 - RNA, 19 nt, Artificial Sequence
  Description of Artificial Sequence: Synthetic oligonucleotide
  Antisense strand to SEQ ID NO: 189528
uacaaagaaauguaacuac

SEQ ID NO: 189530 - RNA, 19 nt, Artificial Sequence
  Description of Artificial Sequence: Synthetic oligonucleotide
  Sense strand starting at position 3531 of SEQ ID NO: 2444
guaguucgccgugcauaaa

SEQ ID NO: 189531 - RNA, 19 nt, Artificial Sequence
  Description of Artificial Sequence: Synthetic oligonucleotide
  Antisense strand to SEQ ID NO: 189530
uuuaugcacggcgaacuac

SEQ ID NO: 189532 - RNA, 19 nt, Artificial Sequence
  Description of Artificial Sequence: Synthetic oligonucleotide
  Sense strand starting at position 3438 of SEQ ID NO: 2444
cgcggauccauagagguuu

SEQ ID NO: 189533 - RNA, 19 nt, Artificial Sequence
  Description of Artificial Sequence: Synthetic oligonucleotide
  Antisense strand to SEQ ID NO: 189532
aaaccucuauggauccgcg

SEQ ID NO: 189534 - RNA, 19 nt, Artificial Sequence
  Description of Artificial Sequence: Synthetic oligonucleotide
  Sense strand starting at position 3236 of SEQ ID NO: 2444
ggagacauccucgggagau

SEQ ID NO: 189535 - RNA, 19 nt, Artificial Sequence
  Description of Artificial Sequence: Synthetic oligonucleotide
  Antisense strand to SEQ ID NO: 189534
aucucccgaggaugucucc

SEQ ID NO: 189536 - RNA, 19 nt, Artificial Sequence
  Description of Artificial Sequence: Synthetic oligonucleotide
  Sense strand starting at position 3224 of SEQ ID NO: 2444
acacuuaguccaggagaca

SEQ ID NO: 189537 - RNA, 19 nt, Artificial Sequence
  Description of Artificial Sequence: Synthetic oligonucleotide
  Antisense strand to SEQ ID NO: 189536
ugucuccuggacuaagugu

SEQ ID NO: 189538 - RNA, 19 nt, Artificial Sequence
  Description of Artificial Sequence: Synthetic oligonucleotide
  Sense strand starting at position 3203 of SEQ ID NO: 2444
cggugagugacauaauuau

SEQ ID NO: 189539 - RNA, 19 nt, Artificial Sequence
  Description of Artificial Sequence: Synthetic oligonucleotide
  Antisense strand to SEQ ID NO: 189538
auaauuaugucacucaccg

SEQ ID NO: 189540 - RNA, 19 nt, Artificial Sequence
  Description of Artificial Sequence: Synthetic oligonucleotide
  Sense strand starting at position 3113 of SEQ ID NO: 2444
ggcggagaguuaaagagua

SEQ ID NO: 189541 - RNA, 19 nt, Artificial Sequence
  Description of Artificial Sequence: Synthetic oligonucleotide
  Antisense strand to SEQ ID NO: 189540
uacucuuuaacucuccgcc

SEQ ID NO: 189542 - RNA, 19 nt, Artificial Sequence
  Description of Artificial Sequence: Synthetic oligonucleotide
  Sense strand starting at position 3090 of SEQ ID NO: 2444
cuucguucccauuagaaag

SEQ ID NO: 189543 - RNA, 19 nt, Artificial Sequence
  Description of Artificial Sequence: Synthetic oligonucleotide
  Antisense strand to SEQ ID NO: 189542
cuuucuaaugggaacgaag

SEQ ID NO: 189544 - RNA, 19 nt, Artificial Sequence
  Description of Artificial Sequence: Synthetic oligonucleotide
  Sense strand starting at position 2981 of SEQ ID NO: 2444
cugcgacaucucugaaugu

SEQ ID NO: 189545 - RNA, 19 nt, Artificial Sequence
  Description of Artificial Sequence: Synthetic oligonucleotide
  Antisense strand to SEQ ID NO: 189544
acauucagagaugucgcag

SEQ ID NO: 189546 - RNA, 19 nt, Artificial Sequence
  Description of Artificial Sequence: Synthetic oligonucleotide
  Sense strand starting at position 2835 of SEQ ID NO: 2444
uguuuaugaucacaagaaa

SEQ ID NO: 189547 - RNA, 19 nt, Artificial Sequence
  Description of Artificial Sequence: Synthetic oligonucleotide
  Antisense strand to SEQ ID NO: 189546
uuucuugugaucauaaaca

SEQ ID NO: 189548 - RNA, 19 nt, Artificial Sequence
  Description of Artificial Sequence: Synthetic oligonucleotide
  Sense strand starting at position 2785 of SEQ ID NO: 2444
aucugugucccuuaacaau

SEQ ID NO: 189549 - RNA, 19 nt, Artificial Sequence
  Description of Artificial Sequence: Synthetic oligonucleotide
  Antisense strand to SEQ ID NO: 189548
auuguuaagggacacagau

SEQ ID NO: 189550 - RNA, 19 nt, Artificial Sequence
  Description of Artificial Sequence: Synthetic oligonucleotide
  Sense strand starting at position 2783 of SEQ ID NO: 2444
ugaucugugucccuuaaca

SEQ ID NO: 189551 - RNA, 19 nt, Artificial Sequence
  Description of Artificial Sequence: Synthetic oligonucleotide
  Antisense strand to SEQ ID NO: 189550
uguuaagggacacagauca

SEQ ID NO: 189552 - RNA, 19 nt, Artificial Sequence
  Description of Artificial Sequence: Synthetic oligonucleotide
  Sense strand starting at position 2781 of SEQ ID NO: 2444
cuugaucugugucccuuaa

SEQ ID NO: 189553 - RNA, 19 nt, Artificial Sequence
  Description of Artificial Sequence: Synthetic oligonucleotide
  Antisense strand to SEQ ID NO: 189552
uuaagggacacagaucaag

SEQ ID NO: 189554 - RNA, 19 nt, Artificial Sequence
  Description of Artificial Sequence: Synthetic oligonucleotide
  Sense strand starting at position 2742 of SEQ ID NO: 2444
ugaucuuucugcucagaaa

SEQ ID NO: 189555 - RNA, 19 nt, Artificial Sequence
  Description of Artificial Sequence: Synthetic oligonucleotide
  Antisense strand to SEQ ID NO: 189554
uuucugagcagaaagauca

SEQ ID NO: 189556 - RNA, 19 nt, Artificial Sequence
  Description of Artificial Sequence: Synthetic oligonucleotide
  Sense strand starting at position 2740 of SEQ ID NO: 2444
ucugaucuuucugcucaga

SEQ ID NO: 189557 - RNA, 19 nt, Artificial Sequence
  Description of Artificial Sequence: Synthetic oligonucleotide
  Antisense strand to SEQ ID NO: 189556
ucugagcagaaagaucaga

SEQ ID NO: 189558 - RNA, 19 nt, Artificial Sequence
  Description of Artificial Sequence: Synthetic oligonucleotide
  Sense strand starting at position 2644 of SEQ ID NO: 2444
uucugaaauccuggaaagu

SEQ ID NO: 189559 - RNA, 19 nt, Artificial Sequence
  Description of Artificial Sequence: Synthetic oligonucleotide
  Antisense strand to SEQ ID NO: 189558
acuuuccaggauuucagaa

SEQ ID NO: 189560 - RNA, 19 nt, Artificial Sequence
  Description of Artificial Sequence: Synthetic oligonucleotide
  Sense strand starting at position 2465 of SEQ ID NO: 2444
ugguauacaugucucaaau

SEQ ID NO: 189561 - RNA, 19 nt, Artificial Sequence
  Description of Artificial Sequence: Synthetic oligonucleotide
  Antisense strand to SEQ ID NO: 189560
auuugagacauguauacca

SEQ ID NO: 189562 - RNA, 19 nt, Artificial Sequence
  Description of Artificial Sequence: Synthetic oligonucleotide
  Sense strand starting at position 2456 of SEQ ID NO: 2444
cugagauaaugguauacau

SEQ ID NO: 189563 - RNA, 19 nt, Artificial Sequence
  Description of Artificial Sequence: Synthetic oligonucleotide
  Antisense strand to SEQ ID NO: 189562
auguauaccauuaucucag

SEQ ID NO: 189564 - RNA, 19 nt, Artificial Sequence
  Description of Artificial Sequence: Synthetic oligonucleotide
  Sense strand starting at position 2350 of SEQ ID NO: 2444
uccaacguuuaguuucuaa

SEQ ID NO: 189565 - RNA, 19 nt, Artificial Sequence
  Description of Artificial Sequence: Synthetic oligonucleotide
  Antisense strand to SEQ ID NO: 189564
uuagaaacuaaacguugga

SEQ ID NO: 189566 - RNA, 19 nt, Artificial Sequence
  Description of Artificial Sequence: Synthetic oligonucleotide
  Sense strand starting at position 2234 of SEQ ID NO: 2444
uacuguauuuauggaauag

SEQ ID NO: 189567 - RNA, 19 nt, Artificial Sequence
  Description of Artificial Sequence: Synthetic oligonucleotide
  Antisense strand to SEQ ID NO: 189566
cuauuccauaaauacagua

SEQ ID NO: 189568 - RNA, 19 nt, Artificial Sequence
  Description of Artificial Sequence: Synthetic oligonucleotide
  Sense strand starting at position 2140 of SEQ ID NO: 2444
ucucuucuguuaguauaaa

SEQ ID NO: 189569 - RNA, 19 nt, Artificial Sequence
  Description of Artificial Sequence: Synthetic oligonucleotide
  Antisense strand to SEQ ID NO: 189568
uuuauacuaacagaagaga

SEQ ID NO: 189570 - RNA, 19 nt, Artificial Sequence
  Description of Artificial Sequence: Synthetic oligonucleotide
  Sense strand starting at position 1718 of SEQ ID NO: 2444
uuccuaaacuggguuagaa

SEQ ID NO: 189571 - RNA, 19 nt, Artificial Sequence
  Description of Artificial Sequence: Synthetic oligonucleotide
  Antisense strand to SEQ ID NO: 189570
uucuaacccaguuuaggaa

SEQ ID NO: 189572 - RNA, 19 nt, Artificial Sequence
  Description of Artificial Sequence: Synthetic oligonucleotide
  Sense strand starting at position 1717 of SEQ ID NO: 2444
auuccuaaacuggguuaga

SEQ ID NO: 189573 - RNA, 19 nt, Artificial Sequence
  Description of Artificial Sequence: Synthetic oligonucleotide
  Antisense strand to SEQ ID NO: 189572
ucuaacccaguuuaggaau

SEQ ID NO: 189574 - RNA, 19 nt, Artificial Sequence
  Description of Artificial Sequence: Synthetic oligonucleotide
  Sense strand starting at position 1614 of SEQ ID NO: 2444
guuauuuacucgcucaagu

SEQ ID NO: 189575 - RNA, 19 nt, Artificial Sequence
  Description of Artificial Sequence: Synthetic oligonucleotide
  Antisense strand to SEQ ID NO: 189574
acuugagcgaguaaauaac

SEQ ID NO: 189576 - RNA, 19 nt, Artificial Sequence
  Description of Artificial Sequence: Synthetic oligonucleotide
  Sense strand starting at position 1504 of SEQ ID NO: 2444
ucuaaauagcagugaacaa

SEQ ID NO: 189577 - RNA, 19 nt, Artificial Sequence
  Description of Artificial Sequence: Synthetic oligonucleotide
  Antisense strand to SEQ ID NO: 189576
uuguucacugcuauuuaga

SEQ ID NO: 189578 - RNA, 19 nt, Artificial Sequence
  Description of Artificial Sequence: Synthetic oligonucleotide
  Sense strand starting at position 1459 of SEQ ID NO: 2444
uggauuccaguuuacuauu

SEQ ID NO: 189579 - RNA, 19 nt, Artificial Sequence
  Description of Artificial Sequence: Synthetic oligonucleotide
  Antisense strand to SEQ ID NO: 189578
aauaguaaacuggaaucca

SEQ ID NO: 189580 - RNA, 19 nt, Artificial Sequence
  Description of Artificial Sequence: Synthetic oligonucleotide
  Sense strand starting at position 1449 of SEQ ID NO: 2444
guuugaaugcuggauucca

SEQ ID NO: 189581 - RNA, 19 nt, Artificial Sequence
  Description of Artificial Sequence: Synthetic oligonucleotide
  Antisense strand to SEQ ID NO: 189580
uggaauccagcauucaaac

SEQ ID NO: 189582 - RNA, 19 nt, Artificial Sequence
  Description of Artificial Sequence: Synthetic oligonucleotide
  Sense strand starting at position 1415 of SEQ ID NO: 2444
cuagcugcuuaacuagaau

SEQ ID NO: 189583 - RNA, 19 nt, Artificial Sequence
  Description of Artificial Sequence: Synthetic oligonucleotide
  Antisense strand to SEQ ID NO: 189582
auucuaguuaagcagcuag

SEQ ID NO: 189584 - RNA, 19 nt, Artificial Sequence
  Description of Artificial Sequence: Synthetic oligonucleotide
  Sense strand starting at position 1354 of SEQ ID NO: 2444
aguagugcugcucaauguu

SEQ ID NO: 189585 - RNA, 19 nt, Artificial Sequence
  Description of Artificial Sequence: Synthetic oligonucleotide
  Antisense strand to SEQ ID NO: 189584
aacauugagcagcacuacu

SEQ ID NO: 189586 - RNA, 19 nt, Artificial Sequence
  Description of Artificial Sequence: Synthetic oligonucleotide
  Sense strand starting at position 1334 of SEQ ID NO: 2444
gcacuacagcuguauguuu

SEQ ID NO: 189587 - RNA, 19 nt, Artificial Sequence
  Description of Artificial Sequence: Synthetic oligonucleotide
  Antisense strand to SEQ ID NO: 189586
aaacauacagcuguagugc

SEQ ID NO: 189588 - RNA, 19 nt, Artificial Sequence
  Description of Artificial Sequence: Synthetic oligonucleotide
  Sense strand starting at position 1164 of SEQ ID NO: 2444
cuaaauuagucgcuaacac

SEQ ID NO: 189589 - RNA, 19 nt, Artificial Sequence
  Description of Artificial Sequence: Synthetic oligonucleotide
  Antisense strand to SEQ ID NO: 189588
guguuagcgacuaauuuag

SEQ ID NO: 189590 - RNA, 19 nt, Artificial Sequence
  Description of Artificial Sequence: Synthetic oligonucleotide
  Sense strand starting at position 1161 of SEQ ID NO: 2444
guucuaaauuagucgcuaa

SEQ ID NO: 189591 - RNA, 19 nt, Artificial Sequence
  Description of Artificial Sequence: Synthetic oligonucleotide
  Antisense strand to SEQ ID NO: 189590
uuagcgacuaauuuagaac

SEQ ID NO: 189592 - RNA, 19 nt, Artificial Sequence
  Description of Artificial Sequence: Synthetic oligonucleotide
  Sense strand starting at position 1104 of SEQ ID NO: 2444
agaauagaggagugcgauu

SEQ ID NO: 189593 - RNA, 19 nt, Artificial Sequence
  Description of Artificial Sequence: Synthetic oligonucleotide
  Antisense strand to SEQ ID NO: 189592
aaucgcacuccucuauucu

SEQ ID NO: 189594 - RNA, 19 nt, Artificial Sequence
  Description of Artificial Sequence: Synthetic oligonucleotide
  Sense strand starting at position 1077 of SEQ ID NO: 2444
gcagcugcugcccagauaa

SEQ ID NO: 189595 - RNA, 19 nt, Artificial Sequence
  Description of Artificial Sequence: Synthetic oligonucleotide
  Antisense strand to SEQ ID NO: 189594
uuaucugggcagcagcugc

SEQ ID NO: 189596 - RNA, 19 nt, Artificial Sequence
  Description of Artificial Sequence: Synthetic oligonucleotide
  Sense strand starting at position 985 of SEQ ID NO: 2444
gguagccgugaucaaauua

SEQ ID NO: 189597 - RNA, 19 nt, Artificial Sequence
  Description of Artificial Sequence: Synthetic oligonucleotide
  Antisense strand to SEQ ID NO: 189596
uaauuugaucacggcuacc

SEQ ID NO: 189598 - RNA, 19 nt, Artificial Sequence
  Description of Artificial Sequence: Synthetic oligonucleotide
  Sense strand starting at position 982 of SEQ ID NO: 2444
caagguagccgugaucaaa

SEQ ID NO: 189599 - RNA, 19 nt, Artificial Sequence
  Description of Artificial Sequence: Synthetic oligonucleotide
  Antisense strand to SEQ ID NO: 189598
uuugaucacggcuaccuug

SEQ ID NO: 189600 - RNA, 19 nt, Artificial Sequence
  Description of Artificial Sequence: Synthetic oligonucleotide
  Sense strand starting at position 869 of SEQ ID NO: 2444
augccacugcuagaauaaa

SEQ ID NO: 189601 - RNA, 19 nt, Artificial Sequence
  Description of Artificial Sequence: Synthetic oligonucleotide
  Antisense strand to SEQ ID NO: 189600
uuuauucuagcaguggcau

SEQ ID NO: 189602 - RNA, 19 nt, Artificial Sequence
  Description of Artificial Sequence: Synthetic oligonucleotide
  Sense strand starting at position 864 of SEQ ID NO: 2444
gcaagaugccacugcuaga

SEQ ID NO: 189603 - RNA, 19 nt, Artificial Sequence
  Description of Artificial Sequence: Synthetic oligonucleotide
  Antisense strand to SEQ ID NO: 189602
ucuagcaguggcaucuugc

SEQ ID NO: 189604 - RNA, 19 nt, Artificial Sequence
  Description of Artificial Sequence: Synthetic oligonucleotide
  Sense strand starting at position 387 of SEQ ID NO: 2444
gcauacagcgcuuaaauaa

SEQ ID NO: 189605 - RNA, 19 nt, Artificial Sequence
  Description of Artificial Sequence: Synthetic oligonucleotide
  Antisense strand to SEQ ID NO: 189604
uuauuuaagcgcuguaugc

SEQ ID NO: 189606 - RNA, 19 nt, Artificial Sequence
  Description of Artificial Sequence: Synthetic oligonucleotide
  Sense strand starting at position 319 of SEQ ID NO: 2444
aaacuuugauccguugcaa

SEQ ID NO: 189607 - RNA, 19 nt, Artificial Sequence
  Description of Artificial Sequence: Synthetic oligonucleotide
  Antisense strand to SEQ ID NO: 189606
uugcaacggaucaaaguuu

SEQ ID NO: 189608 - RNA, 19 nt, Artificial Sequence
  Description of Artificial Sequence: Synthetic oligonucleotide
  Sense strand starting at position 236 of SEQ ID NO: 2444
guaguuacauuucuuugua

SEQ ID NO: 189609 - RNA, 19 nt, Artificial Sequence
  Description of Artificial Sequence: Synthetic oligonucleotide
  Antisense strand to SEQ ID NO: 189608
uacaaagaaauguaacuac

SEQ ID NO: 189610 - RNA, 19 nt, Artificial Sequence
  Description of Artificial Sequence: Synthetic oligonucleotide
  Sense strand starting at position 3890 of SEQ ID NO: 2445
augauuaucuauguuagug

SEQ ID NO: 189611 - RNA, 19 nt, Artificial Sequence
  Description of Artificial Sequence: Synthetic oligonucleotide
  Antisense strand to SEQ ID NO: 189610
cacuaacauagauaaucau

SEQ ID NO: 189612 - RNA, 19 nt, Artificial Sequence
  Description of Artificial Sequence: Synthetic oligonucleotide
  Sense strand starting at position 3889 of SEQ ID NO: 2445
gaugauuaucuauguuagu

SEQ ID NO: 189613 - RNA, 19 nt, Artificial Sequence
  Description of Artificial Sequence: Synthetic oligonucleotide
  Antisense strand to SEQ ID NO: 189612
acuaacauagauaaucauc

SEQ ID NO: 189614 - RNA, 19 nt, Artificial Sequence
  Description of Artificial Sequence: Synthetic oligonucleotide
  Sense strand starting at position 3670 of SEQ ID NO: 2445
ucuugagugcuagaaugau

SEQ ID NO: 189615 - RNA, 19 nt, Artificial Sequence
  Description of Artificial Sequence: Synthetic oligonucleotide
  Antisense strand to SEQ ID NO: 189614
aucauucuagcacucaaga

SEQ ID NO: 189616 - RNA, 19 nt, Artificial Sequence
  Description of Artificial Sequence: Synthetic oligonucleotide
  Sense strand starting at position 3634 of SEQ ID NO: 2445
uuggaugugccacaaugau

SEQ ID NO: 189617 - RNA, 19 nt, Artificial Sequence
  Description of Artificial Sequence: Synthetic oligonucleotide
  Antisense strand to SEQ ID NO: 189616
aucauuguggcacauccaa

SEQ ID NO: 189618 - RNA, 19 nt, Artificial Sequence
  Description of Artificial Sequence: Synthetic oligonucleotide
  Sense strand starting at position 3623 of SEQ ID NO: 2445
guuuaaagccauuggaugu

SEQ ID NO: 189619 - RNA, 19 nt, Artificial Sequence
  Description of Artificial Sequence: Synthetic oligonucleotide
  Antisense strand to SEQ ID NO: 189618
acauccaauggcuuuaaac

SEQ ID NO: 189620 - RNA, 19 nt, Artificial Sequence
  Description of Artificial Sequence: Synthetic oligonucleotide
  Sense strand starting at position 3457 of SEQ ID NO: 2445
cugaaauucuauucugagg

SEQ ID NO: 189621 - RNA, 19 nt, Artificial Sequence
  Description of Artificial Sequence: Synthetic oligonucleotide
  Antisense strand to SEQ ID NO: 189620
ccucagaauagaauuucag

SEQ ID NO: 189622 - RNA, 19 nt, Artificial Sequence
  Description of Artificial Sequence: Synthetic oligonucleotide
  Sense strand starting at position 3426 of SEQ ID NO: 2445
augcuuuaagaguagugga

SEQ ID NO: 189623 - RNA, 19 nt, Artificial Sequence
  Description of Artificial Sequence: Synthetic oligonucleotide
  Antisense strand to SEQ ID NO: 189622
uccacuacucuuaaagcau

SEQ ID NO: 189624 - RNA, 19 nt, Artificial Sequence
  Description of Artificial Sequence: Synthetic oligonucleotide
  Sense strand starting at position 3351 of SEQ ID NO: 2445
gcaccuuauggacagguaa

SEQ ID NO: 189625 - RNA, 19 nt, Artificial Sequence
  Description of Artificial Sequence: Synthetic oligonucleotide
  Antisense strand to SEQ ID NO: 189624
uuaccuguccauaaggugc

SEQ ID NO: 189626 - RNA, 19 nt, Artificial Sequence
  Description of Artificial Sequence: Synthetic oligonucleotide
  Sense strand starting at position 3298 of SEQ ID NO: 2445
accugaucucuuuagguau

SEQ ID NO: 189627 - RNA, 19 nt, Artificial Sequence
  Description of Artificial Sequence: Synthetic oligonucleotide
  Antisense strand to SEQ ID NO: 189626
auaccuaaagagaucaggu

SEQ ID NO: 189628 - RNA, 19 nt, Artificial Sequence
  Description of Artificial Sequence: Synthetic oligonucleotide
  Sense strand starting at position 3202 of SEQ ID NO: 2445
guauguuaccugcaucauu

SEQ ID NO: 189629 - RNA, 19 nt, Artificial Sequence
  Description of Artificial Sequence: Synthetic oligonucleotide
  Antisense strand to SEQ ID NO: 189628
aaugaugcagguaacauac

SEQ ID NO: 189630 - RNA, 19 nt, Artificial Sequence
  Description of Artificial Sequence: Synthetic oligonucleotide
  Sense strand starting at position 3181 of SEQ ID NO: 2445
ccugucgcuagauaaugaa

SEQ ID NO: 189631 - RNA, 19 nt, Artificial Sequence
  Description of Artificial Sequence: Synthetic oligonucleotide
  Antisense strand to SEQ ID NO: 189630
uucauuaucuagcgacagg

SEQ ID NO: 189632 - RNA, 19 nt, Artificial Sequence
  Description of Artificial Sequence: Synthetic oligonucleotide
  Sense strand starting at position 3177 of SEQ ID NO: 2445
uuuaccugucgcuagauaa

SEQ ID NO: 189633 - RNA, 19 nt, Artificial Sequence
  Description of Artificial Sequence: Synthetic oligonucleotide
  Antisense strand to SEQ ID NO: 189632
uuaucuagcgacagguaaa

SEQ ID NO: 189634 - RNA, 19 nt, Artificial Sequence
  Description of Artificial Sequence: Synthetic oligonucleotide
  Sense strand starting at position 3143 of SEQ ID NO: 2445
ggugcagugcuucuuugua

SEQ ID NO: 189635 - RNA, 19 nt, Artificial Sequence
  Description of Artificial Sequence: Synthetic oligonucleotide
  Antisense strand to SEQ ID NO: 189634
uacaaagaagcacugcacc

SEQ ID NO: 189636 - RNA, 19 nt, Artificial Sequence
  Description of Artificial Sequence: Synthetic oligonucleotide
  Sense strand starting at position 2768 of SEQ ID NO: 2445
gugguaguccacgugcuua

SEQ ID NO: 189637 - RNA, 19 nt, Artificial Sequence
  Description of Artificial Sequence: Synthetic oligonucleotide
  Antisense strand to SEQ ID NO: 189636
uaagcacguggacuaccac

SEQ ID NO: 189638 - RNA, 19 nt, Artificial Sequence
  Description of Artificial Sequence: Synthetic oligonucleotide
  Sense strand starting at position 2740 of SEQ ID NO: 2445
agccguccgcucucaugaa

SEQ ID NO: 189639 - RNA, 19 nt, Artificial Sequence
  Description of Artificial Sequence: Synthetic oligonucleotide
  Antisense strand to SEQ ID NO: 189638
uucaugagagcggacggcu

SEQ ID NO: 189640 - RNA, 19 nt, Artificial Sequence
  Description of Artificial Sequence: Synthetic oligonucleotide
  Sense strand starting at position 2696 of SEQ ID NO: 2445
acccgaguaagcuauuguu

SEQ ID NO: 189641 - RNA, 19 nt, Artificial Sequence
  Description of Artificial Sequence: Synthetic oligonucleotide
  Antisense strand to SEQ ID NO: 189640
aacaauagcuuacucgggu

SEQ ID NO: 189642 - RNA, 19 nt, Artificial Sequence
  Description of Artificial Sequence: Synthetic oligonucleotide
  Sense strand starting at position 2691 of SEQ ID NO: 2445
gagucacccgaguaagcua

SEQ ID NO: 189643 - RNA, 19 nt, Artificial Sequence
  Description of Artificial Sequence: Synthetic oligonucleotide
  Antisense strand to SEQ ID NO: 189642
uagcuuacucgggugacuc

SEQ ID NO: 189644 - RNA, 19 nt, Artificial Sequence
  Description of Artificial Sequence: Synthetic oligonucleotide
  Sense strand starting at position 2625 of SEQ ID NO: 2445
gccuguguugguagggaca

SEQ ID NO: 189645 - RNA, 19 nt, Artificial Sequence
  Description of Artificial Sequence: Synthetic oligonucleotide
  Antisense strand to SEQ ID NO: 189644
ugucccuaccaacacaggc

SEQ ID NO: 189646 - RNA, 19 nt, Artificial Sequence
  Description of Artificial Sequence: Synthetic oligonucleotide
  Sense strand starting at position 2462 of SEQ ID NO: 2445
ccugaauugacugggacuu

SEQ ID NO: 189647 - RNA, 19 nt, Artificial Sequence
  Description of Artificial Sequence: Synthetic oligonucleotide
  Antisense strand to SEQ ID NO: 189646
aagucccagucaauucagg

SEQ ID NO: 189648 - RNA, 19 nt, Artificial Sequence
  Description of Artificial Sequence: Synthetic oligonucleotide
  Sense strand starting at position 2461 of SEQ ID NO: 2445
cccugaauugacugggacu

SEQ ID NO: 189649 - RNA, 19 nt, Artificial Sequence
  Description of Artificial Sequence: Synthetic oligonucleotide
  Antisense strand to SEQ ID NO: 189648
agucccagucaauucaggg

SEQ ID NO: 189650 - RNA, 19 nt, Artificial Sequence
  Description of Artificial Sequence: Synthetic oligonucleotide
  Sense strand starting at position 2386 of SEQ ID NO: 2445
acuccugugagguauguuu

SEQ ID NO: 189651 - RNA, 19 nt, Artificial Sequence
  Description of Artificial Sequence: Synthetic oligonucleotide
  Antisense strand to SEQ ID NO: 189650
aaacauaccucacaggagu

SEQ ID NO: 189652 - RNA, 19 nt, Artificial Sequence
  Description of Artificial Sequence: Synthetic oligonucleotide
  Sense strand starting at position 2310 of SEQ ID NO: 2445
ugcgucgugacgucaucaa

SEQ ID NO: 189653 - RNA, 19 nt, Artificial Sequence
  Description of Artificial Sequence: Synthetic oligonucleotide
  Antisense strand to SEQ ID NO: 189652
uugaugacgucacgacgca

SEQ ID NO: 189654 - RNA, 19 nt, Artificial Sequence
  Description of Artificial Sequence: Synthetic oligonucleotide
  Sense strand starting at position 1489 of SEQ ID NO: 2445
uuucuucugcguuaggaag

SEQ ID NO: 189655 - RNA, 19 nt, Artificial Sequence
  Description of Artificial Sequence: Synthetic oligonucleotide
  Antisense strand to SEQ ID NO: 189654
cuuccuaacgcagaagaaa

SEQ ID NO: 189656 - RNA, 19 nt, Artificial Sequence
  Description of Artificial Sequence: Synthetic oligonucleotide
  Sense strand starting at position 989 of SEQ ID NO: 2445
agcuguauacaagauaguu

SEQ ID NO: 189657 - RNA, 19 nt, Artificial Sequence
  Description of Artificial Sequence: Synthetic oligonucleotide
  Antisense strand to SEQ ID NO: 189656
aacuaucuuguauacagcu

SEQ ID NO: 189658 - RNA, 19 nt, Artificial Sequence
  Description of Artificial Sequence: Synthetic oligonucleotide
  Sense strand starting at position 984 of SEQ ID NO: 2445
ccugaagcuguauacaaga

SEQ ID NO: 189659 - RNA, 19 nt, Artificial Sequence
  Description of Artificial Sequence: Synthetic oligonucleotide
  Antisense strand to SEQ ID NO: 189658
ucuuguauacagcuucagg

SEQ ID NO: 189660 - RNA, 19 nt, Artificial Sequence
  Description of Artificial Sequence: Synthetic oligonucleotide
  Sense strand starting at position 888 of SEQ ID NO: 2445
cuuaguucuccagauccga

SEQ ID NO: 189661 - RNA, 19 nt, Artificial Sequence
  Description of Artificial Sequence: Synthetic oligonucleotide
  Antisense strand to SEQ ID NO: 189660
ucggaucuggagaacuaag

SEQ ID NO: 189662 - RNA, 19 nt, Artificial Sequence
  Description of Artificial Sequence: Synthetic oligonucleotide
  Sense strand starting at position 863 of SEQ ID NO: 2445
ggugaugaauacuuccauc

SEQ ID NO: 189663 - RNA, 19 nt, Artificial Sequence
  Description of Artificial Sequence: Synthetic oligonucleotide
  Antisense strand to SEQ ID NO: 189662
gauggaaguauucaucacc

SEQ ID NO: 189664 - RNA, 19 nt, Artificial Sequence
  Description of Artificial Sequence: Synthetic oligonucleotide
  Sense strand starting at position 857 of SEQ ID NO: 2445
cgagguggugaugaauacu

SEQ ID NO: 189665 - RNA, 19 nt, Artificial Sequence
  Description of Artificial Sequence: Synthetic oligonucleotide
  Antisense strand to SEQ ID NO: 189664
aguauucaucaccaccucg

SEQ ID NO: 189666 - RNA, 19 nt, Artificial Sequence
  Description of Artificial Sequence: Synthetic oligonucleotide
  Sense strand starting at position 854 of SEQ ID NO: 2445
uuccgagguggugaugaau

SEQ ID NO: 189667 - RNA, 19 nt, Artificial Sequence
  Description of Artificial Sequence: Synthetic oligonucleotide
  Antisense strand to SEQ ID NO: 189666
auucaucaccaccucggaa

SEQ ID NO: 189668 - RNA, 19 nt, Artificial Sequence
  Description of Artificial Sequence: Synthetic oligonucleotide
  Sense strand starting at position 822 of SEQ ID NO: 2445
cuggguaaaucugccaaau

SEQ ID NO: 189669 - RNA, 19 nt, Artificial Sequence
  Description of Artificial Sequence: Synthetic oligonucleotide
  Antisense strand to SEQ ID NO: 189668
auuuggcagauuuacccag

SEQ ID NO: 189670 - RNA, 19 nt, Artificial Sequence
  Description of Artificial Sequence: Synthetic oligonucleotide
  Sense strand starting at position 813 of SEQ ID NO: 2445
uuaggaaagcuggguaaau

SEQ ID NO: 189671 - RNA, 19 nt, Artificial Sequence
  Description of Artificial Sequence: Synthetic oligonucleotide
  Antisense strand to SEQ ID NO: 189670
auuuacccagcuuuccuaa

SEQ ID NO: 189672 - RNA, 19 nt, Artificial Sequence
  Description of Artificial Sequence: Synthetic oligonucleotide
  Sense strand starting at position 718 of SEQ ID NO: 2445
ugguuauagggcugugaag

SEQ ID NO: 189673 - RNA, 19 nt, Artificial Sequence
  Description of Artificial Sequence: Synthetic oligonucleotide
  Antisense strand to SEQ ID NO: 189672
cuucacagcccuauaacca

SEQ ID NO: 189674 - RNA, 19 nt, Artificial Sequence
  Description of Artificial Sequence: Synthetic oligonucleotide
  Sense strand starting at position 659 of SEQ ID NO: 2445
augaauguaggcuaauauu

SEQ ID NO: 189675 - RNA, 19 nt, Artificial Sequence
  Description of Artificial Sequence: Synthetic oligonucleotide
  Antisense strand to SEQ ID NO: 189674
aauauuagccuacauucau

SEQ ID NO: 189676 - RNA, 19 nt, Artificial Sequence
  Description of Artificial Sequence: Synthetic oligonucleotide
  Sense strand starting at position 657 of SEQ ID NO: 2445
acaugaauguaggcuaaua

SEQ ID NO: 189677 - RNA, 19 nt, Artificial Sequence
  Description of Artificial Sequence: Synthetic oligonucleotide
  Antisense strand to SEQ ID NO: 189676
uauuagccuacauucaugu

SEQ ID NO: 189678 - RNA, 19 nt, Artificial Sequence
  Description of Artificial Sequence: Synthetic oligonucleotide
  Sense strand starting at position 581 of SEQ ID NO: 2445
ugauaucccucuucuuagu

SEQ ID NO: 189679 - RNA, 19 nt, Artificial Sequence
  Description of Artificial Sequence: Synthetic oligonucleotide
  Antisense strand to SEQ ID NO: 189678
acuaagaagagggauauca

SEQ ID NO: 189680 - RNA, 19 nt, Artificial Sequence
  Description of Artificial Sequence: Synthetic oligonucleotide
  Sense strand starting at position 543 of SEQ ID NO: 2445
gaggaaagcuuucugaaua

SEQ ID NO: 189681 - RNA, 19 nt, Artificial Sequence
  Description of Artificial Sequence: Synthetic oligonucleotide
  Antisense strand to SEQ ID NO: 189680
uauucagaaagcuuuccuc

SEQ ID NO: 189682 - RNA, 19 nt, Artificial Sequence
  Description of Artificial Sequence: Synthetic oligonucleotide
  Sense strand starting at position 491 of SEQ ID NO: 2445
guacuugcagacugaauau

SEQ ID NO: 189683 - RNA, 19 nt, Artificial Sequence
  Description of Artificial Sequence: Synthetic oligonucleotide
  Antisense strand to SEQ ID NO: 189682
auauucagucugcaaguac

SEQ ID NO: 189684 - RNA, 19 nt, Artificial Sequence
  Description of Artificial Sequence: Synthetic oligonucleotide
  Sense strand starting at position 475 of SEQ ID NO: 2445
aaguguuaacuauaaggua

SEQ ID NO: 189685 - RNA, 19 nt, Artificial Sequence
  Description of Artificial Sequence: Synthetic oligonucleotide
  Antisense strand to SEQ ID NO: 189684
uaccuuauaguuaacacuu

SEQ ID NO: 189686 - RNA, 19 nt, Artificial Sequence
  Description of Artificial Sequence: Synthetic oligonucleotide
  Sense strand starting at position 391 of SEQ ID NO: 2445
ucauguuaugaccaugcuu

SEQ ID NO: 189687 - RNA, 19 nt, Artificial Sequence
  Description of Artificial Sequence: Synthetic oligonucleotide
  Antisense strand to SEQ ID NO: 189686
aagcauggucauaacauga

SEQ ID NO: 189688 - RNA, 19 nt, Artificial Sequence
  Description of Artificial Sequence: Synthetic oligonucleotide
  Sense strand starting at position 290 of SEQ ID NO: 2445
auauuuagauguggaaaca

SEQ ID NO: 189689 - RNA, 19 nt, Artificial Sequence
  Description of Artificial Sequence: Synthetic oligonucleotide
  Antisense strand to SEQ ID NO: 189688
uguuuccacaucuaaauau

SEQ ID NO: 189690 - RNA, 19 nt, Artificial Sequence
  Description of Artificial Sequence: Synthetic oligonucleotide
  Sense strand starting at position 3959 of SEQ ID NO: 2446
gcuguaugugaaugcagau

SEQ ID NO: 189691 - RNA, 19 nt, Artificial Sequence
  Description of Artificial Sequence: Synthetic oligonucleotide
  Antisense strand to SEQ ID NO: 189690
aucugcauucacauacagc

SEQ ID NO: 189692 - RNA, 19 nt, Artificial Sequence
  Description of Artificial Sequence: Synthetic oligonucleotide
  Sense strand starting at position 3953 of SEQ ID NO: 2446
caaugugcuguaugugaau

SEQ ID NO: 189693 - RNA, 19 nt, Artificial Sequence
  Description of Artificial Sequence: Synthetic oligonucleotide
  Antisense strand to SEQ ID NO: 189692
auucacauacagcacauug

SEQ ID NO: 189694 - RNA, 19 nt, Artificial Sequence
  Description of Artificial Sequence: Synthetic oligonucleotide
  Sense strand starting at position 3951 of SEQ ID NO: 2446
gccaaugugcuguauguga

SEQ ID NO: 189695 - RNA, 19 nt, Artificial Sequence
  Description of Artificial Sequence: Synthetic oligonucleotide
  Antisense strand to SEQ ID NO: 189694
ucacauacagcacauuggc

SEQ ID NO: 189696 - RNA, 19 nt, Artificial Sequence
  Description of Artificial Sequence: Synthetic oligonucleotide
  Sense strand starting at position 3940 of SEQ ID NO: 2446
acaguaucauugccaaugu

SEQ ID NO: 189697 - RNA, 19 nt, Artificial Sequence
  Description of Artificial Sequence: Synthetic oligonucleotide
  Antisense strand to SEQ ID NO: 189696
acauuggcaaugauacugu

SEQ ID NO: 189698 - RNA, 19 nt, Artificial Sequence
  Description of Artificial Sequence: Synthetic oligonucleotide
  Sense strand starting at position 3574 of SEQ ID NO: 2446
guaggugcucuagaaauau

SEQ ID NO: 189699 - RNA, 19 nt, Artificial Sequence
  Description of Artificial Sequence: Synthetic oligonucleotide
  Antisense strand to SEQ ID NO: 189698
auauuucuagagcaccuac

SEQ ID NO: 189700 - RNA, 19 nt, Artificial Sequence
  Description of Artificial Sequence: Synthetic oligonucleotide
  Sense strand starting at position 3570 of SEQ ID NO: 2446
cauaguaggugcucuagaa

SEQ ID NO: 189701 - RNA, 19 nt, Artificial Sequence
  Description of Artificial Sequence: Synthetic oligonucleotide
  Antisense strand to SEQ ID NO: 189700
uucuagagcaccuacuaug

SEQ ID NO: 189702 - RNA, 19 nt, Artificial Sequence
  Description of Artificial Sequence: Synthetic oligonucleotide
  Sense strand starting at position 3519 of SEQ ID NO: 2446
aacauaggguugcuagauu

SEQ ID NO: 189703 - RNA, 19 nt, Artificial Sequence
  Description of Artificial Sequence: Synthetic oligonucleotide
  Antisense strand to SEQ ID NO: 189702
aaucuagcaacccuauguu

SEQ ID NO: 189704 - RNA, 19 nt, Artificial Sequence
  Description of Artificial Sequence: Synthetic oligonucleotide
  Sense strand starting at position 3517 of SEQ ID NO: 2446
ggaacauaggguugcuaga

SEQ ID NO: 189705 - RNA, 19 nt, Artificial Sequence
  Description of Artificial Sequence: Synthetic oligonucleotide
  Antisense strand to SEQ ID NO: 189704
ucuagcaacccuauguucc

SEQ ID NO: 189706 - RNA, 19 nt, Artificial Sequence
  Description of Artificial Sequence: Synthetic oligonucleotide
  Sense strand starting at position 3419 of SEQ ID NO: 2446
gcuguuauuuagucacuuu

SEQ ID NO: 189707 - RNA, 19 nt, Artificial Sequence
  Description of Artificial Sequence: Synthetic oligonucleotide
  Antisense strand to SEQ ID NO: 189706
aaagugacuaaauaacagc

SEQ ID NO: 189708 - RNA, 19 nt, Artificial Sequence
  Description of Artificial Sequence: Synthetic oligonucleotide
  Sense strand starting at position 3418 of SEQ ID NO: 2446
agcuguuauuuagucacuu

SEQ ID NO: 189709 - RNA, 19 nt, Artificial Sequence
  Description of Artificial Sequence: Synthetic oligonucleotide
  Antisense strand to SEQ ID NO: 189708
aagugacuaaauaacagcu

SEQ ID NO: 189710 - RNA, 19 nt, Artificial Sequence
  Description of Artificial Sequence: Synthetic oligonucleotide
  Sense strand starting at position 3415 of SEQ ID NO: 2446
uguagcuguuauuuaguca

SEQ ID NO: 189711 - RNA, 19 nt, Artificial Sequence
  Description of Artificial Sequence: Synthetic oligonucleotide
  Antisense strand to SEQ ID NO: 189710
ugacuaaauaacagcuaca

SEQ ID NO: 189712 - RNA, 19 nt, Artificial Sequence
  Description of Artificial Sequence: Synthetic oligonucleotide
  Sense strand starting at position 3408 of SEQ ID NO: 2446
gauuuacuguagcuguuau

SEQ ID NO: 189713 - RNA, 19 nt, Artificial Sequence
  Description of Artificial Sequence: Synthetic oligonucleotide
  Antisense strand to SEQ ID NO: 189712
auaacagcuacaguaaauc

SEQ ID NO: 189714 - RNA, 19 nt, Artificial Sequence
  Description of Artificial Sequence: Synthetic oligonucleotide
  Sense strand starting at position 3328 of SEQ ID NO: 2446
guacacuguuguccucaua

SEQ ID NO: 189715 - RNA, 19 nt, Artificial Sequence
  Description of Artificial Sequence: Synthetic oligonucleotide
  Antisense strand to SEQ ID NO: 189714
uaugaggacaacaguguac

SEQ ID NO: 189716 - RNA, 19 nt, Artificial Sequence
  Description of Artificial Sequence: Synthetic oligonucleotide
  Sense strand starting at position 3327 of SEQ ID NO: 2446
gguacacuguuguccucau

SEQ ID NO: 189717 - RNA, 19 nt, Artificial Sequence
  Description of Artificial Sequence: Synthetic oligonucleotide
  Antisense strand to SEQ ID NO: 189716
augaggacaacaguguacc

SEQ ID NO: 189718 - RNA, 19 nt, Artificial Sequence
  Description of Artificial Sequence: Synthetic oligonucleotide
  Sense strand starting at position 3180 of SEQ ID NO: 2446
cgucauugaccauaaacuu

SEQ ID NO: 189719 - RNA, 19 nt, Artificial Sequence
  Description of Artificial Sequence: Synthetic oligonucleotide
  Antisense strand to SEQ ID NO: 189718
aaguuuauggucaaugacg

SEQ ID NO: 189720 - RNA, 19 nt, Artificial Sequence
  Description of Artificial Sequence: Synthetic oligonucleotide
  Sense strand starting at position 3140 of SEQ ID NO: 2446
ggucgaucauauuuacugu

SEQ ID NO: 189721 - RNA, 19 nt, Artificial Sequence
  Description of Artificial Sequence: Synthetic oligonucleotide
  Antisense strand to SEQ ID NO: 189720
acaguaaauaugaucgacc

SEQ ID NO: 189722 - RNA, 19 nt, Artificial Sequence
  Description of Artificial Sequence: Synthetic oligonucleotide
  Sense strand starting at position 3107 of SEQ ID NO: 2446
gcagaacugucacuugcau

SEQ ID NO: 189723 - RNA, 19 nt, Artificial Sequence
  Description of Artificial Sequence: Synthetic oligonucleotide
  Antisense strand to SEQ ID NO: 189722
augcaagugacaguucugc

SEQ ID NO: 189724 - RNA, 19 nt, Artificial Sequence
  Description of Artificial Sequence: Synthetic oligonucleotide
  Sense strand starting at position 3042 of SEQ ID NO: 2446
gagagcugucucuggcuga

SEQ ID NO: 189725 - RNA, 19 nt, Artificial Sequence
  Description of Artificial Sequence: Synthetic oligonucleotide
  Antisense strand to SEQ ID NO: 189724
ucagccagagacagcucuc

SEQ ID NO: 189726 - RNA, 19 nt, Artificial Sequence
  Description of Artificial Sequence: Synthetic oligonucleotide
  Sense strand starting at position 2964 of SEQ ID NO: 2446
ccagccaucuuagugcaau

SEQ ID NO: 189727 - RNA, 19 nt, Artificial Sequence
  Description of Artificial Sequence: Synthetic oligonucleotide
  Antisense strand to SEQ ID NO: 189726
auugcacuaagauggcugg

SEQ ID NO: 189728 - RNA, 19 nt, Artificial Sequence
  Description of Artificial Sequence: Synthetic oligonucleotide
  Sense strand starting at position 2946 of SEQ ID NO: 2446
acaguuacgugcccaaauc

SEQ ID NO: 189729 - RNA, 19 nt, Artificial Sequence
  Description of Artificial Sequence: Synthetic oligonucleotide
  Antisense strand to SEQ ID NO: 189728
gauuugggcacguaacugu

SEQ ID NO: 189730 - RNA, 19 nt, Artificial Sequence
  Description of Artificial Sequence: Synthetic oligonucleotide
  Sense strand starting at position 2943 of SEQ ID NO: 2446
cugacaguuacgugcccaa

SEQ ID NO: 189731 - RNA, 19 nt, Artificial Sequence
  Description of Artificial Sequence: Synthetic oligonucleotide
  Antisense strand to SEQ ID NO: 189730
uugggcacguaacugucag

SEQ ID NO: 189732 - RNA, 19 nt, Artificial Sequence
  Description of Artificial Sequence: Synthetic oligonucleotide
  Sense strand starting at position 2749 of SEQ ID NO: 2446
gggauuuaguccuagcuuu

SEQ ID NO: 189733 - RNA, 19 nt, Artificial Sequence
  Description of Artificial Sequence: Synthetic oligonucleotide
  Antisense strand to SEQ ID NO: 189732
aaagcuaggacuaaauccc

SEQ ID NO: 189734 - RNA, 19 nt, Artificial Sequence
  Description of Artificial Sequence: Synthetic oligonucleotide
  Sense strand starting at position 2474 of SEQ ID NO: 2446
uaaggaaaguucuaaugga

SEQ ID NO: 189735 - RNA, 19 nt, Artificial Sequence
  Description of Artificial Sequence: Synthetic oligonucleotide
  Antisense strand to SEQ ID NO: 189734
uccauuagaacuuuccuua

SEQ ID NO: 189736 - RNA, 19 nt, Artificial Sequence
  Description of Artificial Sequence: Synthetic oligonucleotide
  Sense strand starting at position 2209 of SEQ ID NO: 2446
augggagauucgcucuugu

SEQ ID NO: 189737 - RNA, 19 nt, Artificial Sequence
  Description of Artificial Sequence: Synthetic oligonucleotide
  Antisense strand to SEQ ID NO: 189736
acaagagcgaaucucccau

SEQ ID NO: 189738 - RNA, 19 nt, Artificial Sequence
  Description of Artificial Sequence: Synthetic oligonucleotide
  Sense strand starting at position 1750 of SEQ ID NO: 2446
gcggaagggucuguauaca

SEQ ID NO: 189739 - RNA, 19 nt, Artificial Sequence
  Description of Artificial Sequence: Synthetic oligonucleotide
  Antisense strand to SEQ ID NO: 189738
uguauacagacccuuccgc

SEQ ID NO: 189740 - RNA, 19 nt, Artificial Sequence
  Description of Artificial Sequence: Synthetic oligonucleotide
  Sense strand starting at position 867 of SEQ ID NO: 2446
auuucuuccucguuuguaa

SEQ ID NO: 189741 - RNA, 19 nt, Artificial Sequence
  Description of Artificial Sequence: Synthetic oligonucleotide
  Antisense strand to SEQ ID NO: 189740
uuacaaacgaggaagaaau

SEQ ID NO: 189742 - RNA, 19 nt, Artificial Sequence
  Description of Artificial Sequence: Synthetic oligonucleotide
  Sense strand starting at position 658 of SEQ ID NO: 2446
cugagauuguaauuaaauc

SEQ ID NO: 189743 - RNA, 19 nt, Artificial Sequence
  Description of Artificial Sequence: Synthetic oligonucleotide
  Antisense strand to SEQ ID NO: 189742
gauuuaauuacaaucucag

SEQ ID NO: 189744 - RNA, 19 nt, Artificial Sequence
  Description of Artificial Sequence: Synthetic oligonucleotide
  Sense strand starting at position 618 of SEQ ID NO: 2446
gcagaaguuugaugauuua

SEQ ID NO: 189745 - RNA, 19 nt, Artificial Sequence
  Description of Artificial Sequence: Synthetic oligonucleotide
  Antisense strand to SEQ ID NO: 189744
uaaaucaucaaacuucugc

SEQ ID NO: 189746 - RNA, 19 nt, Artificial Sequence
  Description of Artificial Sequence: Synthetic oligonucleotide
  Sense strand starting at position 452 of SEQ ID NO: 2446
uugaaacgucucugguaca

SEQ ID NO: 189747 - RNA, 19 nt, Artificial Sequence
  Description of Artificial Sequence: Synthetic oligonucleotide
  Antisense strand to SEQ ID NO: 189746
uguaccagagacguuucaa

SEQ ID NO: 189748 - RNA, 19 nt, Artificial Sequence
  Description of Artificial Sequence: Synthetic oligonucleotide
  Sense strand starting at position 346 of SEQ ID NO: 2446
aucuuugucuaccuguaua

SEQ ID NO: 189749 - RNA, 19 nt, Artificial Sequence
  Description of Artificial Sequence: Synthetic oligonucleotide
  Antisense strand to SEQ ID NO: 189748
uauacagguagacaaagau

SEQ ID NO: 189750 - RNA, 19 nt, Artificial Sequence
  Description of Artificial Sequence: Synthetic oligonucleotide
  Sense strand starting at position 328 of SEQ ID NO: 2446
acagcuguauuugaaauua

SEQ ID NO: 189751 - RNA, 19 nt, Artificial Sequence
  Description of Artificial Sequence: Synthetic oligonucleotide
  Antisense strand to SEQ ID NO: 189750
uaauuucaaauacagcugu

SEQ ID NO: 189752 - RNA, 19 nt, Artificial Sequence
  Description of Artificial Sequence: Synthetic oligonucleotide
  Sense strand starting at position 205 of SEQ ID NO: 2446
ugucauaguauugguguga

SEQ ID NO: 189753 - RNA, 19 nt, Artificial Sequence
  Description of Artificial Sequence: Synthetic oligonucleotide
  Antisense strand to SEQ ID NO: 189752
ucacaccaauacuaugaca

SEQ ID NO: 189754 - RNA, 19 nt, Artificial Sequence
  Description of Artificial Sequence: Synthetic oligonucleotide
  Sense strand starting at position 158 of SEQ ID NO: 2446
ugaguuuguuuccucuaug

SEQ ID NO: 189755 - RNA, 19 nt, Artificial Sequence
  Description of Artificial Sequence: Synthetic oligonucleotide
  Antisense strand to SEQ ID NO: 189754
cauagaggaaacaaacuca

SEQ ID NO: 189756 - RNA, 19 nt, Artificial Sequence
  Description of Artificial Sequence: Synthetic oligonucleotide
  Sense strand starting at position 157 of SEQ ID NO: 2446
gugaguuuguuuccucuau

SEQ ID NO: 189757 - RNA, 19 nt, Artificial Sequence
  Description of Artificial Sequence: Synthetic oligonucleotide
  Antisense strand to SEQ ID NO: 189756
auagaggaaacaaacucac

SEQ ID NO: 189758 - RNA, 19 nt, Artificial Sequence
  Description of Artificial Sequence: Synthetic oligonucleotide
  Sense strand starting at position 130 of SEQ ID NO: 2446
cuauguaaccucgaacauc

SEQ ID NO: 189759 - RNA, 19 nt, Artificial Sequence
  Description of Artificial Sequence: Synthetic oligonucleotide
  Antisense strand to SEQ ID NO: 189758
gauguucgagguuacauag

SEQ ID NO: 189760 - RNA, 19 nt, Artificial Sequence
  Description of Artificial Sequence: Synthetic oligonucleotide
  Sense strand starting at position 126 of SEQ ID NO: 2446
uuagcuauguaaccucgaa

SEQ ID NO: 189761 - RNA, 19 nt, Artificial Sequence
  Description of Artificial Sequence: Synthetic oligonucleotide
  Antisense strand to SEQ ID NO: 189760
uucgagguuacauagcuaa

SEQ ID NO: 189762 - RNA, 19 nt, Artificial Sequence
  Description of Artificial Sequence: Synthetic oligonucleotide
  Sense strand starting at position 115 of SEQ ID NO: 2446
agcugaaugccuuagcuau

SEQ ID NO: 189763 - RNA, 19 nt, Artificial Sequence
  Description of Artificial Sequence: Synthetic oligonucleotide
  Antisense strand to SEQ ID NO: 189762
auagcuaaggcauucagcu

SEQ ID NO: 189764 - RNA, 19 nt, Artificial Sequence
  Description of Artificial Sequence: Synthetic oligonucleotide
  Sense strand starting at position 89 of SEQ ID NO: 2446
gugugaucagauuagcuuc

SEQ ID NO: 189765 - RNA, 19 nt, Artificial Sequence
  Description of Artificial Sequence: Synthetic oligonucleotide
  Antisense strand to SEQ ID NO: 189764
gaagcuaaucugaucacac

SEQ ID NO: 189766 - RNA, 19 nt, Artificial Sequence
  Description of Artificial Sequence: Synthetic oligonucleotide
  Sense strand starting at position 80 of SEQ ID NO: 2446
ggguguucagugugaucag

SEQ ID NO: 189767 - RNA, 19 nt, Artificial Sequence
  Description of Artificial Sequence: Synthetic oligonucleotide
  Antisense strand to SEQ ID NO: 189766
cugaucacacugaacaccc

SEQ ID NO: 189768 - RNA, 19 nt, Artificial Sequence
  Description of Artificial Sequence: Synthetic oligonucleotide
  Sense strand starting at position 78 of SEQ ID NO: 2446
caggguguucagugugauc

SEQ ID NO: 189769 - RNA, 19 nt, Artificial Sequence
  Description of Artificial Sequence: Synthetic oligonucleotide
  Antisense strand to SEQ ID NO: 189768
gaucacacugaacacccug

SEQ ID NO: 189770 - RNA, 19 nt, Artificial Sequence
  Description of Artificial Sequence: Synthetic oligonucleotide
  Sense strand starting at position 237 of SEQ ID NO: 2447
uguauaauauaaccagagu

SEQ ID NO: 189771 - RNA, 19 nt, Artificial Sequence
  Description of Artificial Sequence: Synthetic oligonucleotide
  Antisense strand to SEQ ID NO: 189770
acucugguuauauuauaca

SEQ ID NO: 189772 - RNA, 19 nt, Artificial Sequence
  Description of Artificial Sequence: Synthetic oligonucleotide
  Sense strand starting at position 240 of SEQ ID NO: 2447
auaauauaaccagagugcu

SEQ ID NO: 189773 - RNA, 19 nt, Artificial Sequence
  Description of Artificial Sequence: Synthetic oligonucleotide
  Antisense strand to SEQ ID NO: 189772
agcacucugguuauauuau

SEQ ID NO: 189774 - RNA, 19 nt, Artificial Sequence
  Description of Artificial Sequence: Synthetic oligonucleotide
  Sense strand starting at position 252 of SEQ ID NO: 2447
gagugcuacuaacuaggau

SEQ ID NO: 189775 - RNA, 19 nt, Artificial Sequence
  Description of Artificial Sequence: Synthetic oligonucleotide
  Antisense strand to SEQ ID NO: 189774
auccuaguuaguagcacuc

SEQ ID NO: 189776 - RNA, 19 nt, Artificial Sequence
  Description of Artificial Sequence: Synthetic oligonucleotide
  Sense strand starting at position 264 of SEQ ID NO: 2447
cuaggauacuaccuaaagu

SEQ ID NO: 189777 - RNA, 19 nt, Artificial Sequence
  Description of Artificial Sequence: Synthetic oligonucleotide
  Antisense strand to SEQ ID NO: 189776
acuuuagguaguauccuag

SEQ ID NO: 189778 - RNA, 19 nt, Artificial Sequence
  Description of Artificial Sequence: Synthetic oligonucleotide
  Sense strand starting at position 280 of SEQ ID NO: 2447
agucucuaucuacaguauu

SEQ ID NO: 189779 - RNA, 19 nt, Artificial Sequence
  Description of Artificial Sequence: Synthetic oligonucleotide
  Antisense strand to SEQ ID NO: 189778
aauacuguagauagagacu

SEQ ID NO: 189780 - RNA, 19 nt, Artificial Sequence
  Description of Artificial Sequence: Synthetic oligonucleotide
  Sense strand starting at position 561 of SEQ ID NO: 2447
gcaaauacaugaucuaaug

SEQ ID NO: 189781 - RNA, 19 nt, Artificial Sequence
  Description of Artificial Sequence: Synthetic oligonucleotide
  Antisense strand to SEQ ID NO: 189780
cauuagaucauguauuugc

SEQ ID NO: 189782 - RNA, 19 nt, Artificial Sequence
  Description of Artificial Sequence: Synthetic oligonucleotide
  Sense strand starting at position 578 of SEQ ID NO: 2447
ugaugugucacugggagau

SEQ ID NO: 189783 - RNA, 19 nt, Artificial Sequence
  Description of Artificial Sequence: Synthetic oligonucleotide
  Antisense strand to SEQ ID NO: 189782
aucucccagugacacauca

SEQ ID NO: 189784 - RNA, 19 nt, Artificial Sequence
  Description of Artificial Sequence: Synthetic oligonucleotide
  Sense strand starting at position 716 of SEQ ID NO: 2447
agaaguuacuuuccaaguu

SEQ ID NO: 189785 - RNA, 19 nt, Artificial Sequence
  Description of Artificial Sequence: Synthetic oligonucleotide
  Antisense strand to SEQ ID NO: 189784
aacuuggaaaguaacuucu

SEQ ID NO: 189786 - RNA, 19 nt, Artificial Sequence
  Description of Artificial Sequence: Synthetic oligonucleotide
  Sense strand starting at position 809 of SEQ ID NO: 2447
uaccuauucggucaaaugu

SEQ ID NO: 189787 - RNA, 19 nt, Artificial Sequence
  Description of Artificial Sequence: Synthetic oligonucleotide
  Antisense strand to SEQ ID NO: 189786
acauuugaccgaauaggua

SEQ ID NO: 189788 - RNA, 19 nt, Artificial Sequence
  Description of Artificial Sequence: Synthetic oligonucleotide
  Sense strand starting at position 870 of SEQ ID NO: 2447
cugaaugaccacuggaguu

SEQ ID NO: 189789 - RNA, 19 nt, Artificial Sequence
  Description of Artificial Sequence: Synthetic oligonucleotide
  Antisense strand to SEQ ID NO: 189788
aacuccaguggucauucag

SEQ ID NO: 189790 - RNA, 19 nt, Artificial Sequence
  Description of Artificial Sequence: Synthetic oligonucleotide
  Sense strand starting at position 1033 of SEQ ID NO: 2447
cuuccaggguccucagaau

SEQ ID NO: 189791 - RNA, 19 nt, Artificial Sequence
  Description of Artificial Sequence: Synthetic oligonucleotide
  Antisense strand to SEQ ID NO: 189790
auucugaggacccuggaag

SEQ ID NO: 189792 - RNA, 19 nt, Artificial Sequence
  Description of Artificial Sequence: Synthetic oligonucleotide
  Sense strand starting at position 1174 of SEQ ID NO: 2447
gaucuucuugcggagaaac

SEQ ID NO: 189793 - RNA, 19 nt, Artificial Sequence
  Description of Artificial Sequence: Synthetic oligonucleotide
  Antisense strand to SEQ ID NO: 189792
guuucuccgcaagaagauc

SEQ ID NO: 189794 - RNA, 19 nt, Artificial Sequence
  Description of Artificial Sequence: Synthetic oligonucleotide
  Sense strand starting at position 1176 of SEQ ID NO: 2447
ucuucuugcggagaaacuu

SEQ ID NO: 189795 - RNA, 19 nt, Artificial Sequence
  Description of Artificial Sequence: Synthetic oligonucleotide
  Antisense strand to SEQ ID NO: 189794
aaguuucuccgcaagaaga

SEQ ID NO: 189796 - RNA, 19 nt, Artificial Sequence
  Description of Artificial Sequence: Synthetic oligonucleotide
  Sense strand starting at position 1252 of SEQ ID NO: 2447
gccaaaugauucucuaaag

SEQ ID NO: 189797 - RNA, 19 nt, Artificial Sequence
  Description of Artificial Sequence: Synthetic oligonucleotide
  Antisense strand to SEQ ID NO: 189796
cuuuagagaaucauuuggc

SEQ ID NO: 189798 - RNA, 19 nt, Artificial Sequence
  Description of Artificial Sequence: Synthetic oligonucleotide
  Sense strand starting at position 1348 of SEQ ID NO: 2447
guuucuucuggugaugacu

SEQ ID NO: 189799 - RNA, 19 nt, Artificial Sequence
  Description of Artificial Sequence: Synthetic oligonucleotide
  Antisense strand to SEQ ID NO: 189798
agucaucaccagaagaaac

SEQ ID NO: 189800 - RNA, 19 nt, Artificial Sequence
  Description of Artificial Sequence: Synthetic oligonucleotide
  Sense strand starting at position 1488 of SEQ ID NO: 2447
aaauucugauguguaaaga

SEQ ID NO: 189801 - RNA, 19 nt, Artificial Sequence
  Description of Artificial Sequence: Synthetic oligonucleotide
  Antisense strand to SEQ ID NO: 189800
ucuuuacacaucagaauuu

SEQ ID NO: 189802 - RNA, 19 nt, Artificial Sequence
  Description of Artificial Sequence: Synthetic oligonucleotide
  Sense strand starting at position 1784 of SEQ ID NO: 2447
agugaagagcuucaggagu

SEQ ID NO: 189803 - RNA, 19 nt, Artificial Sequence
  Description of Artificial Sequence: Synthetic oligonucleotide
  Antisense strand to SEQ ID NO: 189802
acuccugaagcucuucacu

SEQ ID NO: 189804 - RNA, 19 nt, Artificial Sequence
  Description of Artificial Sequence: Synthetic oligonucleotide
  Sense strand starting at position 1802 of SEQ ID NO: 2447
uuggucuuccugcagaaug

SEQ ID NO: 189805 - RNA, 19 nt, Artificial Sequence
  Description of Artificial Sequence: Synthetic oligonucleotide
  Antisense strand to SEQ ID NO: 189804
cauucugcaggaagaccaa

SEQ ID NO: 189806 - RNA, 19 nt, Artificial Sequence
  Description of Artificial Sequence: Synthetic oligonucleotide
  Sense strand starting at position 1813 of SEQ ID NO: 2447
gcagaaugaguauagguca

SEQ ID NO: 189807 - RNA, 19 nt, Artificial Sequence
  Description of Artificial Sequence: Synthetic oligonucleotide
  Antisense strand to SEQ ID NO: 189806
ugaccuauacucauucugc

SEQ ID NO: 189808 - RNA, 19 nt, Artificial Sequence
  Description of Artificial Sequence: Synthetic oligonucleotide
  Sense strand starting at position 1816 of SEQ ID NO: 2447
gaaugaguauaggucacuu

SEQ ID NO: 189809 - RNA, 19 nt, Artificial Sequence
  Description of Artificial Sequence: Synthetic oligonucleotide
  Antisense strand to SEQ ID NO: 189808
aagugaccuauacucauuc

SEQ ID NO: 189810 - RNA, 19 nt, Artificial Sequence
  Description of Artificial Sequence: Synthetic oligonucleotide
  Sense strand starting at position 1870 of SEQ ID NO: 2447
ucuuuaugauagccuagau

SEQ ID NO: 189811 - RNA, 19 nt, Artificial Sequence
  Description of Artificial Sequence: Synthetic oligonucleotide
  Antisense strand to SEQ ID NO: 189810
aucuaggcuaucauaaaga

SEQ ID NO: 189812 - RNA, 19 nt, Artificial Sequence
  Description of Artificial Sequence: Synthetic oligonucleotide
  Sense strand starting at position 1883 of SEQ ID NO: 2447
cuagauggaucuucucaag

SEQ ID NO: 189813 - RNA, 19 nt, Artificial Sequence
  Description of Artificial Sequence: Synthetic oligonucleotide
  Antisense strand to SEQ ID NO: 189812
cuugagaagauccaucuag

SEQ ID NO: 189814 - RNA, 19 nt, Artificial Sequence
  Description of Artificial Sequence: Synthetic oligonucleotide
  Sense strand starting at position 1894 of SEQ ID NO: 2447
uucucaagauuugaaguaa

SEQ ID NO: 189815 - RNA, 19 nt, Artificial Sequence
  Description of Artificial Sequence: Synthetic oligonucleotide
  Antisense strand to SEQ ID NO: 189814
uuacuucaaaucuugagaa

SEQ ID NO: 189816 - RNA, 19 nt, Artificial Sequence
  Description of Artificial Sequence: Synthetic oligonucleotide
  Sense strand starting at position 1992 of SEQ ID NO: 2447
aaacuagauugucuuggau

SEQ ID NO: 189817 - RNA, 19 nt, Artificial Sequence
  Description of Artificial Sequence: Synthetic oligonucleotide
  Antisense strand to SEQ ID NO: 189816
auccaagacaaucuaguuu

SEQ ID NO: 189818 - RNA, 19 nt, Artificial Sequence
  Description of Artificial Sequence: Synthetic oligonucleotide
  Sense strand starting at position 1995 of SEQ ID NO: 2447
cuagauugucuuggauaac

SEQ ID NO: 189819 - RNA, 19 nt, Artificial Sequence
  Description of Artificial Sequence: Synthetic oligonucleotide
  Antisense strand to SEQ ID NO: 189818
guuauccaagacaaucuag

SEQ ID NO: 189820 - RNA, 19 nt, Artificial Sequence
  Description of Artificial Sequence: Synthetic oligonucleotide
  Sense strand starting at position 2111 of SEQ ID NO: 2447
ggcaaucaucaacgaauuc

SEQ ID NO: 189821 - RNA, 19 nt, Artificial Sequence
  Description of Artificial Sequence: Synthetic oligonucleotide
  Antisense strand to SEQ ID NO: 189820
gaauucguugaugauugcc

SEQ ID NO: 189822 - RNA, 19 nt, Artificial Sequence
  Description of Artificial Sequence: Synthetic oligonucleotide
  Sense strand starting at position 2319 of SEQ ID NO: 2447
gagaucuuccaagaucguu

SEQ ID NO: 189823 - RNA, 19 nt, Artificial Sequence
  Description of Artificial Sequence: Synthetic oligonucleotide
  Antisense strand to SEQ ID NO: 189822
aacgaucuuggaagaucuc

SEQ ID NO: 189824 - RNA, 19 nt, Artificial Sequence
  Description of Artificial Sequence: Synthetic oligonucleotide
  Sense strand starting at position 2601 of SEQ ID NO: 2447
cggagaaugcgcuuguagu

SEQ ID NO: 189825 - RNA, 19 nt, Artificial Sequence
  Description of Artificial Sequence: Synthetic oligonucleotide
  Antisense strand to SEQ ID NO: 189824
acuacaagcgcauucuccg

SEQ ID NO: 189826 - RNA, 19 nt, Artificial Sequence
  Description of Artificial Sequence: Synthetic oligonucleotide
  Sense strand starting at position 2641 of SEQ ID NO: 2447
cacccaguuucccugggaa

SEQ ID NO: 189827 - RNA, 19 nt, Artificial Sequence
  Description of Artificial Sequence: Synthetic oligonucleotide
  Antisense strand to SEQ ID NO: 189826
uucccagggaaacugggug

SEQ ID NO: 189828 - RNA, 19 nt, Artificial Sequence
  Description of Artificial Sequence: Synthetic oligonucleotide
  Sense strand starting at position 3082 of SEQ ID NO: 2447
ggaggauggacgcagaguu

SEQ ID NO: 189829 - RNA, 19 nt, Artificial Sequence
  Description of Artificial Sequence: Synthetic oligonucleotide
  Antisense strand to SEQ ID NO: 189828
aacucugcguccauccucc

SEQ ID NO: 189830 - RNA, 19 nt, Artificial Sequence
  Description of Artificial Sequence: Synthetic oligonucleotide
  Sense strand starting at position 3241 of SEQ ID NO: 2447
ugcugaucucguuucguua

SEQ ID NO: 189831 - RNA, 19 nt, Artificial Sequence
  Description of Artificial Sequence: Synthetic oligonucleotide
  Antisense strand to SEQ ID NO: 189830
uaacgaaacgagaucagca

SEQ ID NO: 189832 - RNA, 19 nt, Artificial Sequence
  Description of Artificial Sequence: Synthetic oligonucleotide
  Sense strand starting at position 3242 of SEQ ID NO: 2447
gcugaucucguuucguuau

SEQ ID NO: 189833 - RNA, 19 nt, Artificial Sequence
  Description of Artificial Sequence: Synthetic oligonucleotide
  Antisense strand to SEQ ID NO: 189832
auaacgaaacgagaucagc

SEQ ID NO: 189834 - RNA, 19 nt, Artificial Sequence
  Description of Artificial Sequence: Synthetic oligonucleotide
  Sense strand starting at position 3267 of SEQ ID NO: 2447
gacuuaaacgguuaaaucu

SEQ ID NO: 189835 - RNA, 19 nt, Artificial Sequence
  Description of Artificial Sequence: Synthetic oligonucleotide
  Antisense strand to SEQ ID NO: 189834
agauuuaaccguuuaaguc

SEQ ID NO: 189836 - RNA, 19 nt, Artificial Sequence
  Description of Artificial Sequence: Synthetic oligonucleotide
  Sense strand starting at position 3465 of SEQ ID NO: 2447
ccaggaggugcugauauca

SEQ ID NO: 189837 - RNA, 19 nt, Artificial Sequence
  Description of Artificial Sequence: Synthetic oligonucleotide
  Antisense strand to SEQ ID NO: 189836
ugauaucagcaccuccugg

SEQ ID NO: 189838 - RNA, 19 nt, Artificial Sequence
  Description of Artificial Sequence: Synthetic oligonucleotide
  Sense strand starting at position 3479 of SEQ ID NO: 2447
uaucauuuaucugcggacu

SEQ ID NO: 189839 - RNA, 19 nt, Artificial Sequence
  Description of Artificial Sequence: Synthetic oligonucleotide
  Antisense strand to SEQ ID NO: 189838
aguccgcagauaaaugaua

SEQ ID NO: 189840 - RNA, 19 nt, Artificial Sequence
  Description of Artificial Sequence: Synthetic oligonucleotide
  Sense strand starting at position 3574 of SEQ ID NO: 2447
uaggauggguggccuaauu

SEQ ID NO: 189841 - RNA, 19 nt, Artificial Sequence
  Description of Artificial Sequence: Synthetic oligonucleotide
  Antisense strand to SEQ ID NO: 189840
aauuaggccacccauccua

SEQ ID NO: 189842 - RNA, 19 nt, Artificial Sequence
  Description of Artificial Sequence: Synthetic oligonucleotide
  Sense strand starting at position 3661 of SEQ ID NO: 2447
gaagaacuccugcagaguu

SEQ ID NO: 189843 - RNA, 19 nt, Artificial Sequence
  Description of Artificial Sequence: Synthetic oligonucleotide
  Antisense strand to SEQ ID NO: 189842
aacucugcaggaguucuuc

SEQ ID NO: 189844 - RNA, 19 nt, Artificial Sequence
  Description of Artificial Sequence: Synthetic oligonucleotide
  Sense strand starting at position 3823 of SEQ ID NO: 2447
ucauaucaccugugagacu

SEQ ID NO: 189845 - RNA, 19 nt, Artificial Sequence
  Description of Artificial Sequence: Synthetic oligonucleotide
  Antisense strand to SEQ ID NO: 189844
agucucacaggugauauga

SEQ ID NO: 189846 - RNA, 19 nt, Artificial Sequence
  Description of Artificial Sequence: Synthetic oligonucleotide
  Sense strand starting at position 3832 of SEQ ID NO: 2447
cugugagacucaucccaca

SEQ ID NO: 189847 - RNA, 19 nt, Artificial Sequence
  Description of Artificial Sequence: Synthetic oligonucleotide
  Antisense strand to SEQ ID NO: 189846
ugugggaugagucucacag

SEQ ID NO: 189848 - RNA, 19 nt, Artificial Sequence
  Description of Artificial Sequence: Synthetic oligonucleotide
  Sense strand starting at position 3903 of SEQ ID NO: 2447
gaugguagucugcagauau

SEQ ID NO: 189849 - RNA, 19 nt, Artificial Sequence
  Description of Artificial Sequence: Synthetic oligonucleotide
  Antisense strand to SEQ ID NO: 189848
auaucugcagacuaccauc

SEQ ID NO: 189850 - RNA, 19 nt, Artificial Sequence
  Description of Artificial Sequence: Synthetic oligonucleotide
  Sense strand starting at position 3965 of SEQ ID NO: 2448
cugucuuuggcaugggcaa

SEQ ID NO: 189851 - RNA, 19 nt, Artificial Sequence
  Description of Artificial Sequence: Synthetic oligonucleotide
  Antisense strand to SEQ ID NO: 189850
uugcccaugccaaagacag

SEQ ID NO: 189852 - RNA, 19 nt, Artificial Sequence
  Description of Artificial Sequence: Synthetic oligonucleotide
  Sense strand starting at position 3838 of SEQ ID NO: 2448
cugaguccuuagcuaccua

SEQ ID NO: 189853 - RNA, 19 nt, Artificial Sequence
  Description of Artificial Sequence: Synthetic oligonucleotide
  Antisense strand to SEQ ID NO: 189852
uagguagcuaaggacucag

SEQ ID NO: 189854 - RNA, 19 nt, Artificial Sequence
  Description of Artificial Sequence: Synthetic oligonucleotide
  Sense strand starting at position 3834 of SEQ ID NO: 2448
ggaccugaguccuuagcua

SEQ ID NO: 189855 - RNA, 19 nt, Artificial Sequence
  Description of Artificial Sequence: Synthetic oligonucleotide
  Antisense strand to SEQ ID NO: 189854
uagcuaaggacucaggucc

SEQ ID NO: 189856 - RNA, 19 nt, Artificial Sequence
  Description of Artificial Sequence: Synthetic oligonucleotide
  Sense strand starting at position 3774 of SEQ ID NO: 2448
guauuccugucccuacaga

SEQ ID NO: 189857 - RNA, 19 nt, Artificial Sequence
  Description of Artificial Sequence: Synthetic oligonucleotide
  Antisense strand to SEQ ID NO: 189856
ucuguagggacaggaauac

SEQ ID NO: 189858 - RNA, 19 nt, Artificial Sequence
  Description of Artificial Sequence: Synthetic oligonucleotide
  Sense strand starting at position 3734 of SEQ ID NO: 2448
ugguuucucugaguccuga

SEQ ID NO: 189859 - RNA, 19 nt, Artificial Sequence
  Description of Artificial Sequence: Synthetic oligonucleotide
  Antisense strand to SEQ ID NO: 189858
ucaggacucagagaaacca

SEQ ID NO: 189860 - RNA, 19 nt, Artificial Sequence
  Description of Artificial Sequence: Synthetic oligonucleotide
  Sense strand starting at position 3732 of SEQ ID NO: 2448
ugugguuucucugaguccu

SEQ ID NO: 189861 - RNA, 19 nt, Artificial Sequence
  Description of Artificial Sequence: Synthetic oligonucleotide
  Antisense strand to SEQ ID NO: 189860
aggacucagagaaaccaca

SEQ ID NO: 189862 - RNA, 19 nt, Artificial Sequence
  Description of Artificial Sequence: Synthetic oligonucleotide
  Sense strand starting at position 3627 of SEQ ID NO: 2448
cagagagguuacgaucuga

SEQ ID NO: 189863 - RNA, 19 nt, Artificial Sequence
  Description of Artificial Sequence: Synthetic oligonucleotide
  Antisense strand to SEQ ID NO: 189862
ucagaucguaaccucucug

SEQ ID NO: 189864 - RNA, 19 nt, Artificial Sequence
  Description of Artificial Sequence: Synthetic oligonucleotide
  Sense strand starting at position 3548 of SEQ ID NO: 2448
gguucuguauggcucauga

SEQ ID NO: 189865 - RNA, 19 nt, Artificial Sequence
  Description of Artificial Sequence: Synthetic oligonucleotide
  Antisense strand to SEQ ID NO: 189864
ucaugagccauacagaacc

SEQ ID NO: 189866 - RNA, 19 nt, Artificial Sequence
  Description of Artificial Sequence: Synthetic oligonucleotide
  Sense strand starting at position 3441 of SEQ ID NO: 2448
agacuauacuaggcauagu

SEQ ID NO: 189867 - RNA, 19 nt, Artificial Sequence
  Description of Artificial Sequence: Synthetic oligonucleotide
  Antisense strand to SEQ ID NO: 189866
acuaugccuaguauagucu

SEQ ID NO: 189868 - RNA, 19 nt, Artificial Sequence
  Description of Artificial Sequence: Synthetic oligonucleotide
  Sense strand starting at position 3438 of SEQ ID NO: 2448
gcuagacuauacuaggcau

SEQ ID NO: 189869 - RNA, 19 nt, Artificial Sequence
  Description of Artificial Sequence: Synthetic oligonucleotide
  Antisense strand to SEQ ID NO: 189868
augccuaguauagucuagc

SEQ ID NO: 189870 - RNA, 19 nt, Artificial Sequence
  Description of Artificial Sequence: Synthetic oligonucleotide
  Sense strand starting at position 3419 of SEQ ID NO: 2448
ggagaauuguaccagggca

SEQ ID NO: 189871 - RNA, 19 nt, Artificial Sequence
  Description of Artificial Sequence: Synthetic oligonucleotide
  Antisense strand to SEQ ID NO: 189870
ugcccugguacaauucucc

SEQ ID NO: 189872 - RNA, 19 nt, Artificial Sequence
  Description of Artificial Sequence: Synthetic oligonucleotide
  Sense strand starting at position 3408 of SEQ ID NO: 2448
gcaagauacugggagaauu

SEQ ID NO: 189873 - RNA, 19 nt, Artificial Sequence
  Description of Artificial Sequence: Synthetic oligonucleotide
  Antisense strand to SEQ ID NO: 189872
aauucucccaguaucuugc

SEQ ID NO: 189874 - RNA, 19 nt, Artificial Sequence
  Description of Artificial Sequence: Synthetic oligonucleotide
  Sense strand starting at position 2189 of SEQ ID NO: 2448
acuugaauccguuacaccu

SEQ ID NO: 189875 - RNA, 19 nt, Artificial Sequence
  Description of Artificial Sequence: Synthetic oligonucleotide
  Antisense strand to SEQ ID NO: 189874
agguguaacggauucaagu

SEQ ID NO: 189876 - RNA, 19 nt, Artificial Sequence
  Description of Artificial Sequence: Synthetic oligonucleotide
  Sense strand starting at position 1621 of SEQ ID NO: 2448
gggccagggucgugaagaa

SEQ ID NO: 189877 - RNA, 19 nt, Artificial Sequence
  Description of Artificial Sequence: Synthetic oligonucleotide
  Antisense strand to SEQ ID NO: 189876
uucuucacgacccuggccc

SEQ ID NO: 189878 - RNA, 19 nt, Artificial Sequence
  Description of Artificial Sequence: Synthetic oligonucleotide
  Sense strand starting at position 1478 of SEQ ID NO: 2448
guuggccucuacucaaaua

SEQ ID NO: 189879 - RNA, 19 nt, Artificial Sequence
  Description of Artificial Sequence: Synthetic oligonucleotide
  Antisense strand to SEQ ID NO: 189878
uauuugaguagaggccaac

SEQ ID NO: 189880 - RNA, 19 nt, Artificial Sequence
  Description of Artificial Sequence: Synthetic oligonucleotide
  Sense strand starting at position 1475 of SEQ ID NO: 2448
gaaguuggccucuacucaa

SEQ ID NO: 189881 - RNA, 19 nt, Artificial Sequence
  Description of Artificial Sequence: Synthetic oligonucleotide
  Antisense strand to SEQ ID NO: 189880
uugaguagaggccaacuuc

SEQ ID NO: 189882 - RNA, 19 nt, Artificial Sequence
  Description of Artificial Sequence: Synthetic oligonucleotide
  Sense strand starting at position 1442 of SEQ ID NO: 2448
gagaaagcuccuggaguca

SEQ ID NO: 189883 - RNA, 19 nt, Artificial Sequence
  Description of Artificial Sequence: Synthetic oligonucleotide
  Antisense strand to SEQ ID NO: 189882
ugacuccaggagcuuucuc

SEQ ID NO: 189884 - RNA, 19 nt, Artificial Sequence
  Description of Artificial Sequence: Synthetic oligonucleotide
  Sense strand starting at position 1441 of SEQ ID NO: 2448
agagaaagcuccuggaguc

SEQ ID NO: 189885 - RNA, 19 nt, Artificial Sequence
  Description of Artificial Sequence: Synthetic oligonucleotide
  Antisense strand to SEQ ID NO: 189884
gacuccaggagcuuucucu

SEQ ID NO: 189886 - RNA, 19 nt, Artificial Sequence
  Description of Artificial Sequence: Synthetic oligonucleotide
  Sense strand starting at position 683 of SEQ ID NO: 2448
ggcacaguaccucauuacu

SEQ ID NO: 189887 - RNA, 19 nt, Artificial Sequence
  Description of Artificial Sequence: Synthetic oligonucleotide
  Antisense strand to SEQ ID NO: 189886
aguaaugagguacugugcc

SEQ ID NO: 189888 - RNA, 19 nt, Artificial Sequence
  Description of Artificial Sequence: Synthetic oligonucleotide
  Sense strand starting at position 640 of SEQ ID NO: 2448
agugucuauucccucuauu

SEQ ID NO: 189889 - RNA, 19 nt, Artificial Sequence
  Description of Artificial Sequence: Synthetic oligonucleotide
  Antisense strand to SEQ ID NO: 189888
aauagagggaauagacacu

SEQ ID NO: 189890 - RNA, 19 nt, Artificial Sequence
  Description of Artificial Sequence: Synthetic oligonucleotide
  Sense strand starting at position 613 of SEQ ID NO: 2448
agcccagggucccuauuau

SEQ ID NO: 189891 - RNA, 19 nt, Artificial Sequence
  Description of Artificial Sequence: Synthetic oligonucleotide
  Antisense strand to SEQ ID NO: 189890
auaauagggacccugggcu

SEQ ID NO: 189892 - RNA, 19 nt, Artificial Sequence
  Description of Artificial Sequence: Synthetic oligonucleotide
  Sense strand starting at position 482 of SEQ ID NO: 2448
uguauagucuuuguacaaa

SEQ ID NO: 189893 - RNA, 19 nt, Artificial Sequence
  Description of Artificial Sequence: Synthetic oligonucleotide
  Antisense strand to SEQ ID NO: 189892
uuuguacaaagacuauaca

SEQ ID NO: 189894 - RNA, 19 nt, Artificial Sequence
  Description of Artificial Sequence: Synthetic oligonucleotide
  Sense strand starting at position 481 of SEQ ID NO: 2448
uuguauagucuuuguacaa

SEQ ID NO: 189895 - RNA, 19 nt, Artificial Sequence
  Description of Artificial Sequence: Synthetic oligonucleotide
  Antisense strand to SEQ ID NO: 189894
uuguacaaagacuauacaa

SEQ ID NO: 189896 - RNA, 19 nt, Artificial Sequence
  Description of Artificial Sequence: Synthetic oligonucleotide
  Sense strand starting at position 480 of SEQ ID NO: 2448
uuuguauagucuuuguaca

SEQ ID NO: 189897 - RNA, 19 nt, Artificial Sequence
  Description of Artificial Sequence: Synthetic oligonucleotide
  Antisense strand to SEQ ID NO: 189896
uguacaaagacuauacaaa

SEQ ID NO: 189898 - RNA, 19 nt, Artificial Sequence
  Description of Artificial Sequence: Synthetic oligonucleotide
  Sense strand starting at position 295 of SEQ ID NO: 2448
ugucuuaagguccacauau

SEQ ID NO: 189899 - RNA, 19 nt, Artificial Sequence
  Description of Artificial Sequence: Synthetic oligonucleotide
  Antisense strand to SEQ ID NO: 189898
auauguggaccuuaagaca

SEQ ID NO: 189900 - RNA, 19 nt, Artificial Sequence
  Description of Artificial Sequence: Synthetic oligonucleotide
  Sense strand starting at position 288 of SEQ ID NO: 2448
cagagauugucuuaagguc

SEQ ID NO: 189901 - RNA, 19 nt, Artificial Sequence
  Description of Artificial Sequence: Synthetic oligonucleotide
  Antisense strand to SEQ ID NO: 189900
gaccuuaagacaaucucug

SEQ ID NO: 189902 - RNA, 19 nt, Artificial Sequence
  Description of Artificial Sequence: Synthetic oligonucleotide
  Sense strand starting at position 283 of SEQ ID NO: 2448
auuaacagagauugucuua

SEQ ID NO: 189903 - RNA, 19 nt, Artificial Sequence
  Description of Artificial Sequence: Synthetic oligonucleotide
  Antisense strand to SEQ ID NO: 189902
uaagacaaucucuguuaau

SEQ ID NO: 189904 - RNA, 19 nt, Artificial Sequence
  Description of Artificial Sequence: Synthetic oligonucleotide
  Sense strand starting at position 260 of SEQ ID NO: 2448
gagaaagccuguuccaaac

SEQ ID NO: 189905 - RNA, 19 nt, Artificial Sequence
  Description of Artificial Sequence: Synthetic oligonucleotide
  Antisense strand to SEQ ID NO: 189904
guuuggaacaggcuuucuc

SEQ ID NO: 189906 - RNA, 19 nt, Artificial Sequence
  Description of Artificial Sequence: Synthetic oligonucleotide
  Sense strand starting at position 247 of SEQ ID NO: 2448
ccagcuuccuuuggagaaa

SEQ ID NO: 189907 - RNA, 19 nt, Artificial Sequence
  Description of Artificial Sequence: Synthetic oligonucleotide
  Antisense strand to SEQ ID NO: 189906
uuucuccaaaggaagcugg

SEQ ID NO: 189908 - RNA, 19 nt, Artificial Sequence
  Description of Artificial Sequence: Synthetic oligonucleotide
  Sense strand starting at position 246 of SEQ ID NO: 2448
accagcuuccuuuggagaa

SEQ ID NO: 189909 - RNA, 19 nt, Artificial Sequence
  Description of Artificial Sequence: Synthetic oligonucleotide
  Antisense strand to SEQ ID NO: 189908
uucuccaaaggaagcuggu

SEQ ID NO: 189910 - RNA, 19 nt, Artificial Sequence
  Description of Artificial Sequence: Synthetic oligonucleotide
  Sense strand starting at position 98 of SEQ ID NO: 2448
gaggaaaguggcuguguuu

SEQ ID NO: 189911 - RNA, 19 nt, Artificial Sequence
  Description of Artificial Sequence: Synthetic oligonucleotide
  Antisense strand to SEQ ID NO: 189910
aaacacagccacuuuccuc

SEQ ID NO: 189912 - RNA, 19 nt, Artificial Sequence
  Description of Artificial Sequence: Synthetic oligonucleotide
  Sense strand starting at position 78 of SEQ ID NO: 2448
gcaucugaaucuuggauuc

SEQ ID NO: 189913 - RNA, 19 nt, Artificial Sequence
  Description of Artificial Sequence: Synthetic oligonucleotide
  Antisense strand to SEQ ID NO: 189912
gaauccaagauucagaugc

SEQ ID NO: 189914 - RNA, 19 nt, Artificial Sequence
  Description of Artificial Sequence: Synthetic oligonucleotide
  Sense strand starting at position 72 of SEQ ID NO: 2448
ggcagagcaucugaaucuu

SEQ ID NO: 189915 - RNA, 19 nt, Artificial Sequence
  Description of Artificial Sequence: Synthetic oligonucleotide
  Antisense strand to SEQ ID NO: 189914
aagauucagaugcucugcc

SEQ ID NO: 189916 - RNA, 19 nt, Artificial Sequence
  Description of Artificial Sequence: Synthetic oligonucleotide
  Sense strand starting at position 3690 of SEQ ID NO: 2449
cgaguaauccgcuccgggu

SEQ ID NO: 189917 - RNA, 19 nt, Artificial Sequence
  Description of Artificial Sequence: Synthetic oligonucleotide
  Antisense strand to SEQ ID NO: 189916
acccggagcggauuacucg

SEQ ID NO: 189918 - RNA, 19 nt, Artificial Sequence
  Description of Artificial Sequence: Synthetic oligonucleotide
  Sense strand starting at position 3679 of SEQ ID NO: 2449
gcgcucuggcucgaguaau

SEQ ID NO: 189919 - RNA, 19 nt, Artificial Sequence
  Description of Artificial Sequence: Synthetic oligonucleotide
  Antisense strand to SEQ ID NO: 189918
auuacucgagccagagcgc

SEQ ID NO: 189920 - RNA, 19 nt, Artificial Sequence
  Description of Artificial Sequence: Synthetic oligonucleotide
  Sense strand starting at position 3678 of SEQ ID NO: 2449
ggcgcucuggcucgaguaa

SEQ ID NO: 189921 - RNA, 19 nt, Artificial Sequence
  Description of Artificial Sequence: Synthetic oligonucleotide
  Antisense strand to SEQ ID NO: 189920
uuacucgagccagagcgcc

SEQ ID NO: 189922 - RNA, 19 nt, Artificial Sequence
  Description of Artificial Sequence: Synthetic oligonucleotide
  Sense strand starting at position 3677 of SEQ ID NO: 2449
gggcgcucuggcucgagua

SEQ ID NO: 189923 - RNA, 19 nt, Artificial Sequence
  Description of Artificial Sequence: Synthetic oligonucleotide
  Antisense strand to SEQ ID NO: 189922
uacucgagccagagcgccc

SEQ ID NO: 189924 - RNA, 19 nt, Artificial Sequence
  Description of Artificial Sequence: Synthetic oligonucleotide
  Sense strand starting at position 3170 of SEQ ID NO: 2449
gauguuucugacugagccu

SEQ ID NO: 189925 - RNA, 19 nt, Artificial Sequence
  Description of Artificial Sequence: Synthetic oligonucleotide
  Antisense strand to SEQ ID NO: 189924
aggcucagucagaaacauc

SEQ ID NO: 189926 - RNA, 19 nt, Artificial Sequence
  Description of Artificial Sequence: Synthetic oligonucleotide
  Sense strand starting at position 3166 of SEQ ID NO: 2449
gaaggauguuucugacuga

SEQ ID NO: 189927 - RNA, 19 nt, Artificial Sequence
  Description of Artificial Sequence: Synthetic oligonucleotide
  Antisense strand to SEQ ID NO: 189926
ucagucagaaacauccuuc

SEQ ID NO: 189928 - RNA, 19 nt, Artificial Sequence
  Description of Artificial Sequence: Synthetic oligonucleotide
  Sense strand starting at position 3092 of SEQ ID NO: 2449
gugugguauguguagguuu

SEQ ID NO: 189929 - RNA, 19 nt, Artificial Sequence
  Description of Artificial Sequence: Synthetic oligonucleotide
  Antisense strand to SEQ ID NO: 189928
aaaccuacacauaccacac

SEQ ID NO: 189930 - RNA, 19 nt, Artificial Sequence
  Description of Artificial Sequence: Synthetic oligonucleotide
  Sense strand starting at position 3039 of SEQ ID NO: 2449
caugaauucgcugagagac

SEQ ID NO: 189931 - RNA, 19 nt, Artificial Sequence
  Description of Artificial Sequence: Synthetic oligonucleotide
  Antisense strand to SEQ ID NO: 189930
gucucucagcgaauucaug

SEQ ID NO: 189932 - RNA, 19 nt, Artificial Sequence
  Description of Artificial Sequence: Synthetic oligonucleotide
  Sense strand starting at position 3038 of SEQ ID NO: 2449
acaugaauucgcugagaga

SEQ ID NO: 189933 - RNA, 19 nt, Artificial Sequence
  Description of Artificial Sequence: Synthetic oligonucleotide
  Antisense strand to SEQ ID NO: 189932
ucucucagcgaauucaugu

SEQ ID NO: 189934 - RNA, 19 nt, Artificial Sequence
  Description of Artificial Sequence: Synthetic oligonucleotide
  Sense strand starting at position 3036 of SEQ ID NO: 2449
ugacaugaauucgcugaga

SEQ ID NO: 189935 - RNA, 19 nt, Artificial Sequence
  Description of Artificial Sequence: Synthetic oligonucleotide
  Antisense strand to SEQ ID NO: 189934
ucucagcgaauucauguca

SEQ ID NO: 189936 - RNA, 19 nt, Artificial Sequence
  Description of Artificial Sequence: Synthetic oligonucleotide
  Sense strand starting at position 3027 of SEQ ID NO: 2449
gggauagcuugacaugaau

SEQ ID NO: 189937 - RNA, 19 nt, Artificial Sequence
  Description of Artificial Sequence: Synthetic oligonucleotide
  Antisense strand to SEQ ID NO: 189936
auucaugucaagcuauccc

SEQ ID NO: 189938 - RNA, 19 nt, Artificial Sequence
  Description of Artificial Sequence: Synthetic oligonucleotide
  Sense strand starting at position 2612 of SEQ ID NO: 2449
ggaaggguaugagagguua

SEQ ID NO: 189939 - RNA, 19 nt, Artificial Sequence
  Description of Artificial Sequence: Synthetic oligonucleotide
  Antisense strand to SEQ ID NO: 189938
uaaccucucauacccuucc

SEQ ID NO: 189940 - RNA, 19 nt, Artificial Sequence
  Description of Artificial Sequence: Synthetic oligonucleotide
  Sense strand starting at position 2409 of SEQ ID NO: 2449
cgcucauuggccugaauac

SEQ ID NO: 189941 - RNA, 19 nt, Artificial Sequence
  Description of Artificial Sequence: Synthetic oligonucleotide
  Antisense strand to SEQ ID NO: 189940
guauucaggccaaugagcg

SEQ ID NO: 189942 - RNA, 19 nt, Artificial Sequence
  Description of Artificial Sequence: Synthetic oligonucleotide
  Sense strand starting at position 1629 of SEQ ID NO: 2449
ugcaguagucucgagccua

SEQ ID NO: 189943 - RNA, 19 nt, Artificial Sequence
  Description of Artificial Sequence: Synthetic oligonucleotide
  Antisense strand to SEQ ID NO: 189942
uaggcucgagacuacugca

SEQ ID NO: 189944 - RNA, 19 nt, Artificial Sequence
  Description of Artificial Sequence: Synthetic oligonucleotide
  Sense strand starting at position 1571 of SEQ ID NO: 2449
augugaucugcaugcgugu

SEQ ID NO: 189945 - RNA, 19 nt, Artificial Sequence
  Description of Artificial Sequence: Synthetic oligonucleotide
  Antisense strand to SEQ ID NO: 189944
acacgcaugcagaucacau

SEQ ID NO: 189946 - RNA, 19 nt, Artificial Sequence
  Description of Artificial Sequence: Synthetic oligonucleotide
  Sense strand starting at position 1569 of SEQ ID NO: 2449
gaaugugaucugcaugcgu

SEQ ID NO: 189947 - RNA, 19 nt, Artificial Sequence
  Description of Artificial Sequence: Synthetic oligonucleotide
  Antisense strand to SEQ ID NO: 189946
acgcaugcagaucacauuc

SEQ ID NO: 189948 - RNA, 19 nt, Artificial Sequence
  Description of Artificial Sequence: Synthetic oligonucleotide
  Sense strand starting at position 1565 of SEQ ID NO: 2449
gugggaaugugaucugcau

SEQ ID NO: 189949 - RNA, 19 nt, Artificial Sequence
  Description of Artificial Sequence: Synthetic oligonucleotide
  Antisense strand to SEQ ID NO: 189948
augcagaucacauucccac

SEQ ID NO: 189950 - RNA, 19 nt, Artificial Sequence
  Description of Artificial Sequence: Synthetic oligonucleotide
  Sense strand starting at position 1417 of SEQ ID NO: 2449
gucugaucccaggagaagu

SEQ ID NO: 189951 - RNA, 19 nt, Artificial Sequence
  Description of Artificial Sequence: Synthetic oligonucleotide
  Antisense strand to SEQ ID NO: 189950
acuucuccugggaucagac

SEQ ID NO: 189952 - RNA, 19 nt, Artificial Sequence
  Description of Artificial Sequence: Synthetic oligonucleotide
  Sense strand starting at position 1414 of SEQ ID NO: 2449
ucugucugaucccaggaga

SEQ ID NO: 189953 - RNA, 19 nt, Artificial Sequence
  Description of Artificial Sequence: Synthetic oligonucleotide
  Antisense strand to SEQ ID NO: 189952
ucuccugggaucagacaga

SEQ ID NO: 189954 - RNA, 19 nt, Artificial Sequence
  Description of Artificial Sequence: Synthetic oligonucleotide
  Sense strand starting at position 1294 of SEQ ID NO: 2449
guccgucagcguuuccauu

SEQ ID NO: 189955 - RNA, 19 nt, Artificial Sequence
  Description of Artificial Sequence: Synthetic oligonucleotide
  Antisense strand to SEQ ID NO: 189954
aauggaaacgcugacggac

SEQ ID NO: 189956 - RNA, 19 nt, Artificial Sequence
  Description of Artificial Sequence: Synthetic oligonucleotide
  Sense strand starting at position 1288 of SEQ ID NO: 2449
guuagaguccgucagcguu

SEQ ID NO: 189957 - RNA, 19 nt, Artificial Sequence
  Description of Artificial Sequence: Synthetic oligonucleotide
  Antisense strand to SEQ ID NO: 189956
aacgcugacggacucuaac

SEQ ID NO: 189958 - RNA, 19 nt, Artificial Sequence
  Description of Artificial Sequence: Synthetic oligonucleotide
  Sense strand starting at position 1276 of SEQ ID NO: 2449
cgcguuguccuaguuagag

SEQ ID NO: 189959 - RNA, 19 nt, Artificial Sequence
  Description of Artificial Sequence: Synthetic oligonucleotide
  Antisense strand to SEQ ID NO: 189958
cucuaacuaggacaacgcg

SEQ ID NO: 189960 - RNA, 19 nt, Artificial Sequence
  Description of Artificial Sequence: Synthetic oligonucleotide
  Sense strand starting at position 1275 of SEQ ID NO: 2449
gcgcguuguccuaguuaga

SEQ ID NO: 189961 - RNA, 19 nt, Artificial Sequence
  Description of Artificial Sequence: Synthetic oligonucleotide
  Antisense strand to SEQ ID NO: 189960
ucuaacuaggacaacgcgc

SEQ ID NO: 189962 - RNA, 19 nt, Artificial Sequence
  Description of Artificial Sequence: Synthetic oligonucleotide
  Sense strand starting at position 1273 of SEQ ID NO: 2449
gugcgcguuguccuaguua

SEQ ID NO: 189963 - RNA, 19 nt, Artificial Sequence
  Description of Artificial Sequence: Synthetic oligonucleotide
  Antisense strand to SEQ ID NO: 189962
uaacuaggacaacgcgcac

SEQ ID NO: 189964 - RNA, 19 nt, Artificial Sequence
  Description of Artificial Sequence: Synthetic oligonucleotide
  Sense strand starting at position 1145 of SEQ ID NO: 2449
gcgcaagaaaccgaauagu

SEQ ID NO: 189965 - RNA, 19 nt, Artificial Sequence
  Description of Artificial Sequence: Synthetic oligonucleotide
  Antisense strand to SEQ ID NO: 189964
acuauucgguuucuugcgc

SEQ ID NO: 189966 - RNA, 19 nt, Artificial Sequence
  Description of Artificial Sequence: Synthetic oligonucleotide
  Sense strand starting at position 1079 of SEQ ID NO: 2449
cguucuaugucgguucaga

SEQ ID NO: 189967 - RNA, 19 nt, Artificial Sequence
  Description of Artificial Sequence: Synthetic oligonucleotide
  Antisense strand to SEQ ID NO: 189966
ucugaaccgacauagaacg

SEQ ID NO: 189968 - RNA, 19 nt, Artificial Sequence
  Description of Artificial Sequence: Synthetic oligonucleotide
  Sense strand starting at position 1070 of SEQ ID NO: 2449
gagagcggucguucuaugu

SEQ ID NO: 189969 - RNA, 19 nt, Artificial Sequence
  Description of Artificial Sequence: Synthetic oligonucleotide
  Antisense strand to SEQ ID NO: 189968
acauagaacgaccgcucuc

SEQ ID NO: 189970 - RNA, 19 nt, Artificial Sequence
  Description of Artificial Sequence: Synthetic oligonucleotide
  Sense strand starting at position 951 of SEQ ID NO: 2449
ggagaauucuuccuaguca

SEQ ID NO: 189971 - RNA, 19 nt, Artificial Sequence
  Description of Artificial Sequence: Synthetic oligonucleotide
  Antisense strand to SEQ ID NO: 189970
ugacuaggaagaauucucc

SEQ ID NO: 189972 - RNA, 19 nt, Artificial Sequence
  Description of Artificial Sequence: Synthetic oligonucleotide
  Sense strand starting at position 948 of SEQ ID NO: 2449
guaggagaauucuuccuag

SEQ ID NO: 189973 - RNA, 19 nt, Artificial Sequence
  Description of Artificial Sequence: Synthetic oligonucleotide
  Antisense strand to SEQ ID NO: 189972
cuaggaagaauucuccuac

SEQ ID NO: 189974 - RNA, 19 nt, Artificial Sequence
  Description of Artificial Sequence: Synthetic oligonucleotide
  Sense strand starting at position 940 of SEQ ID NO: 2449
gguaguagguaggagaauu

SEQ ID NO: 189975 - RNA, 19 nt, Artificial Sequence
  Description of Artificial Sequence: Synthetic oligonucleotide
  Antisense strand to SEQ ID NO: 189974
aauucuccuaccuacuacc

SEQ ID NO: 189976 - RNA, 19 nt, Artificial Sequence
  Description of Artificial Sequence: Synthetic oligonucleotide
  Sense strand starting at position 939 of SEQ ID NO: 2449
ggguaguagguaggagaau

SEQ ID NO: 189977 - RNA, 19 nt, Artificial Sequence
  Description of Artificial Sequence: Synthetic oligonucleotide
  Antisense strand to SEQ ID NO: 189976
auucuccuaccuacuaccc

SEQ ID NO: 189978 - RNA, 19 nt, Artificial Sequence
  Description of Artificial Sequence: Synthetic oligonucleotide
  Sense strand starting at position 862 of SEQ ID NO: 2449
cucuguagguucuacaaca

SEQ ID NO: 189979 - RNA, 19 nt, Artificial Sequence
  Description of Artificial Sequence: Synthetic oligonucleotide
  Antisense strand to SEQ ID NO: 189978
uguuguagaaccuacagag

SEQ ID NO: 189980 - RNA, 19 nt, Artificial Sequence
  Description of Artificial Sequence: Synthetic oligonucleotide
  Sense strand starting at position 577 of SEQ ID NO: 2449
gaggucucaccaugucuca

SEQ ID NO: 189981 - RNA, 19 nt, Artificial Sequence
  Description of Artificial Sequence: Synthetic oligonucleotide
  Antisense strand to SEQ ID NO: 189980
ugagacauggugagaccuc

SEQ ID NO: 189982 - RNA, 19 nt, Artificial Sequence
  Description of Artificial Sequence: Synthetic oligonucleotide
  Sense strand starting at position 484 of SEQ ID NO: 2449
gcucguuuccuguggguca

SEQ ID NO: 189983 - RNA, 19 nt, Artificial Sequence
  Description of Artificial Sequence: Synthetic oligonucleotide
  Antisense strand to SEQ ID NO: 189982
ugacccacaggaaacgagc

SEQ ID NO: 189984 - RNA, 19 nt, Artificial Sequence
  Description of Artificial Sequence: Synthetic oligonucleotide
  Sense strand starting at position 311 of SEQ ID NO: 2449
gggaauagcugcgcugacu

SEQ ID NO: 189985 - RNA, 19 nt, Artificial Sequence
  Description of Artificial Sequence: Synthetic oligonucleotide
  Antisense strand to SEQ ID NO: 189984
agucagcgcagcuauuccc

SEQ ID NO: 189986 - RNA, 19 nt, Artificial Sequence
  Description of Artificial Sequence: Synthetic oligonucleotide
  Sense strand starting at position 3963 of SEQ ID NO: 2450
agggagaggguuuguguaa

SEQ ID NO: 189987 - RNA, 19 nt, Artificial Sequence
  Description of Artificial Sequence: Synthetic oligonucleotide
  Antisense strand to SEQ ID NO: 189986
uuacacaaacccucucccu

SEQ ID NO: 189988 - RNA, 19 nt, Artificial Sequence
  Description of Artificial Sequence: Synthetic oligonucleotide
  Sense strand starting at position 3856 of SEQ ID NO: 2450
ggagacagaugguaaucaa

SEQ ID NO: 189989 - RNA, 19 nt, Artificial Sequence
  Description of Artificial Sequence: Synthetic oligonucleotide
  Antisense strand to SEQ ID NO: 189988
uugauuaccaucugucucc

SEQ ID NO: 189990 - RNA, 19 nt, Artificial Sequence
  Description of Artificial Sequence: Synthetic oligonucleotide
  Sense strand starting at position 3756 of SEQ ID NO: 2450
gccugcuaaggguaaaguu

SEQ ID NO: 189991 - RNA, 19 nt, Artificial Sequence
  Description of Artificial Sequence: Synthetic oligonucleotide
  Antisense strand to SEQ ID NO: 189990
aacuuuacccuuagcaggc

SEQ ID NO: 189992 - RNA, 19 nt, Artificial Sequence
  Description of Artificial Sequence: Synthetic oligonucleotide
  Sense strand starting at position 3324 of SEQ ID NO: 2450
accauuaaccagugcuagu

SEQ ID NO: 189993 - RNA, 19 nt, Artificial Sequence
  Description of Artificial Sequence: Synthetic oligonucleotide
  Antisense strand to SEQ ID NO: 189992
acuagcacugguuaauggu

SEQ ID NO: 189994 - RNA, 19 nt, Artificial Sequence
  Description of Artificial Sequence: Synthetic oligonucleotide
  Sense strand starting at position 3311 of SEQ ID NO: 2450
augcuagagcuccaccauu

SEQ ID NO: 189995 - RNA, 19 nt, Artificial Sequence
  Description of Artificial Sequence: Synthetic oligonucleotide
  Antisense strand to SEQ ID NO: 189994
aaugguggagcucuagcau

SEQ ID NO: 189996 - RNA, 19 nt, Artificial Sequence
  Description of Artificial Sequence: Synthetic oligonucleotide
  Sense strand starting at position 3095 of SEQ ID NO: 2450
gcagcugaaccaggagaau

SEQ ID NO: 189997 - RNA, 19 nt, Artificial Sequence
  Description of Artificial Sequence: Synthetic oligonucleotide
  Antisense strand to SEQ ID NO: 189996
auucuccugguucagcugc

SEQ ID NO: 189998 - RNA, 19 nt, Artificial Sequence
  Description of Artificial Sequence: Synthetic oligonucleotide
  Sense strand starting at position 2902 of SEQ ID NO: 2450
ugauaaacucuuuguugag

SEQ ID NO: 189999 - RNA, 19 nt, Artificial Sequence
  Description of Artificial Sequence: Synthetic oligonucleotide
  Antisense strand to SEQ ID NO: 189998
cucaacaaagaguuuauca

SEQ ID NO: 190000 - RNA, 19 nt, Artificial Sequence
  Description of Artificial Sequence: Synthetic oligonucleotide
  Sense strand starting at position 2901 of SEQ ID NO: 2450
gugauaaacucuuuguuga

SEQ ID NO: 190001 - RNA, 19 nt, Artificial Sequence
  Description of Artificial Sequence: Synthetic oligonucleotide
  Antisense strand to SEQ ID NO: 190000
ucaacaaagaguuuaucac

SEQ ID NO: 190002 - RNA, 19 nt, Artificial Sequence
  Description of Artificial Sequence: Synthetic oligonucleotide
  Sense strand starting at position 2888 of SEQ ID NO: 2450
gcacaucagguuggugaua

SEQ ID NO: 190003 - RNA, 19 nt, Artificial Sequence
  Description of Artificial Sequence: Synthetic oligonucleotide
  Antisense strand to SEQ ID NO: 190002
uaucaccaaccugaugugc

SEQ ID NO: 190004 - RNA, 19 nt, Artificial Sequence
  Description of Artificial Sequence: Synthetic oligonucleotide
  Sense strand starting at position 2743 of SEQ ID NO: 2450
guuggauguacucagauua

SEQ ID NO: 190005 - RNA, 19 nt, Artificial Sequence
  Description of Artificial Sequence: Synthetic oligonucleotide
  Antisense strand to SEQ ID NO: 190004
uaaucugaguacauccaac

SEQ ID NO: 190006 - RNA, 19 nt, Artificial Sequence
  Description of Artificial Sequence: Synthetic oligonucleotide
  Sense strand starting at position 2657 of SEQ ID NO: 2450
agaggugcuuugcuauuua

SEQ ID NO: 190007 - RNA, 19 nt, Artificial Sequence
  Description of Artificial Sequence: Synthetic oligonucleotide
  Antisense strand to SEQ ID NO: 190006
uaaauagcaaagcaccucu

SEQ ID NO: 190008 - RNA, 19 nt, Artificial Sequence
  Description of Artificial Sequence: Synthetic oligonucleotide
  Sense strand starting at position 2584 of SEQ ID NO: 2450
aggaauaauuagcuaugca

SEQ ID NO: 190009 - RNA, 19 nt, Artificial Sequence
  Description of Artificial Sequence: Synthetic oligonucleotide
  Antisense strand to SEQ ID NO: 190008
ugcauagcuaauuauuccu

SEQ ID NO: 190010 - RNA, 19 nt, Artificial Sequence
  Description of Artificial Sequence: Synthetic oligonucleotide
  Sense strand starting at position 2562 of SEQ ID NO: 2450
gacaguuuguaacuuugau

SEQ ID NO: 190011 - RNA, 19 nt, Artificial Sequence
  Description of Artificial Sequence: Synthetic oligonucleotide
  Antisense strand to SEQ ID NO: 190010
aucaaaguuacaaacuguc

SEQ ID NO: 190012 - RNA, 19 nt, Artificial Sequence
  Description of Artificial Sequence: Synthetic oligonucleotide
  Sense strand starting at position 2399 of SEQ ID NO: 2450
guagaagcauuacuucuau

SEQ ID NO: 190013 - RNA, 19 nt, Artificial Sequence
  Description of Artificial Sequence: Synthetic oligonucleotide
  Antisense strand to SEQ ID NO: 190012
auagaaguaaugcuucuac

SEQ ID NO: 190014 - RNA, 19 nt, Artificial Sequence
  Description of Artificial Sequence: Synthetic oligonucleotide
  Sense strand starting at position 2390 of SEQ ID NO: 2450
acuguuacuguagaagcau

SEQ ID NO: 190015 - RNA, 19 nt, Artificial Sequence
  Description of Artificial Sequence: Synthetic oligonucleotide
  Antisense strand to SEQ ID NO: 190014
augcuucuacaguaacagu

SEQ ID NO: 190016 - RNA, 19 nt, Artificial Sequence
  Description of Artificial Sequence: Synthetic oligonucleotide
  Sense strand starting at position 2322 of SEQ ID NO: 2450
cgucucuaauauuuagagu

SEQ ID NO: 190017 - RNA, 19 nt, Artificial Sequence
  Description of Artificial Sequence: Synthetic oligonucleotide
  Antisense strand to SEQ ID NO: 190016
acucuaaauauuagagacg

SEQ ID NO: 190018 - RNA, 19 nt, Artificial Sequence
  Description of Artificial Sequence: Synthetic oligonucleotide
  Sense strand starting at position 2218 of SEQ ID NO: 2450
auucuuaguuaaguccaga

SEQ ID NO: 190019 - RNA, 19 nt, Artificial Sequence
  Description of Artificial Sequence: Synthetic oligonucleotide
  Antisense strand to SEQ ID NO: 190018
ucuggacuuaacuaagaau

SEQ ID NO: 190020 - RNA, 19 nt, Artificial Sequence
  Description of Artificial Sequence: Synthetic oligonucleotide
  Sense strand starting at position 2062 of SEQ ID NO: 2450
uaaguuuagcaacgucaaa

SEQ ID NO: 190021 - RNA, 19 nt, Artificial Sequence
  Description of Artificial Sequence: Synthetic oligonucleotide
  Antisense strand to SEQ ID NO: 190020
uuugacguugcuaaacuua

SEQ ID NO: 190022 - RNA, 19 nt, Artificial Sequence
  Description of Artificial Sequence: Synthetic oligonucleotide
  Sense strand starting at position 2033 of SEQ ID NO: 2450
uguauaaguacaugugaca

SEQ ID NO: 190023 - RNA, 19 nt, Artificial Sequence
  Description of Artificial Sequence: Synthetic oligonucleotide
  Antisense strand to SEQ ID NO: 190022
ugucacauguacuuauaca

SEQ ID NO: 190024 - RNA, 19 nt, Artificial Sequence
  Description of Artificial Sequence: Synthetic oligonucleotide
  Sense strand starting at position 2023 of SEQ ID NO: 2450
ccacaauuacuguauaagu

SEQ ID NO: 190025 - RNA, 19 nt, Artificial Sequence
  Description of Artificial Sequence: Synthetic oligonucleotide
  Antisense strand to SEQ ID NO: 190024
acuuauacaguaauugugg

SEQ ID NO: 190026 - RNA, 19 nt, Artificial Sequence
  Description of Artificial Sequence: Synthetic oligonucleotide
  Sense strand starting at position 1985 of SEQ ID NO: 2450
ggauuugguuuaggaaaga

SEQ ID NO: 190027 - RNA, 19 nt, Artificial Sequence
  Description of Artificial Sequence: Synthetic oligonucleotide
  Antisense strand to SEQ ID NO: 190026
ucuuuccuaaaccaaaucc

SEQ ID NO: 190028 - RNA, 19 nt, Artificial Sequence
  Description of Artificial Sequence: Synthetic oligonucleotide
  Sense strand starting at position 1011 of SEQ ID NO: 2450
ggugaguucgcccucgguu

SEQ ID NO: 190029 - RNA, 19 nt, Artificial Sequence
  Description of Artificial Sequence: Synthetic oligonucleotide
  Antisense strand to SEQ ID NO: 190028
aaccgagggcgaacucacc

SEQ ID NO: 190030 - RNA, 19 nt, Artificial Sequence
  Description of Artificial Sequence: Synthetic oligonucleotide
  Sense strand starting at position 957 of SEQ ID NO: 2450
auguaagguuccguccaga

SEQ ID NO: 190031 - RNA, 19 nt, Artificial Sequence
  Description of Artificial Sequence: Synthetic oligonucleotide
  Antisense strand to SEQ ID NO: 190030
ucuggacggaaccuuacau

SEQ ID NO: 190032 - RNA, 19 nt, Artificial Sequence
  Description of Artificial Sequence: Synthetic oligonucleotide
  Sense strand starting at position 944 of SEQ ID NO: 2450
gguagagaugagcauguaa

SEQ ID NO: 190033 - RNA, 19 nt, Artificial Sequence
  Description of Artificial Sequence: Synthetic oligonucleotide
  Antisense strand to SEQ ID NO: 190032
uuacaugcucaucucuacc

SEQ ID NO: 190034 - RNA, 19 nt, Artificial Sequence
  Description of Artificial Sequence: Synthetic oligonucleotide
  Sense strand starting at position 874 of SEQ ID NO: 2450
gauacauaagcgcaucuga

SEQ ID NO: 190035 - RNA, 19 nt, Artificial Sequence
  Description of Artificial Sequence: Synthetic oligonucleotide
  Antisense strand to SEQ ID NO: 190034
ucagaugcgcuuauguauc

SEQ ID NO: 190036 - RNA, 19 nt, Artificial Sequence
  Description of Artificial Sequence: Synthetic oligonucleotide
  Sense strand starting at position 835 of SEQ ID NO: 2450
cuuagaaugauguggagua

SEQ ID NO: 190037 - RNA, 19 nt, Artificial Sequence
  Description of Artificial Sequence: Synthetic oligonucleotide
  Antisense strand to SEQ ID NO: 190036
uacuccacaucauucuaag

SEQ ID NO: 190038 - RNA, 19 nt, Artificial Sequence
  Description of Artificial Sequence: Synthetic oligonucleotide
  Sense strand starting at position 753 of SEQ ID NO: 2450
guuuaucaagcauagaggu

SEQ ID NO: 190039 - RNA, 19 nt, Artificial Sequence
  Description of Artificial Sequence: Synthetic oligonucleotide
  Antisense strand to SEQ ID NO: 190038
accucuaugcuugauaaac

SEQ ID NO: 190040 - RNA, 19 nt, Artificial Sequence
  Description of Artificial Sequence: Synthetic oligonucleotide
  Sense strand starting at position 730 of SEQ ID NO: 2450
uuuaaaguugugcaacuau

SEQ ID NO: 190041 - RNA, 19 nt, Artificial Sequence
  Description of Artificial Sequence: Synthetic oligonucleotide
  Antisense strand to SEQ ID NO: 190040
auaguugcacaacuuuaaa

SEQ ID NO: 190042 - RNA, 19 nt, Artificial Sequence
  Description of Artificial Sequence: Synthetic oligonucleotide
  Sense strand starting at position 525 of SEQ ID NO: 2450
uaaagacuccucuggaggu

SEQ ID NO: 190043 - RNA, 19 nt, Artificial Sequence
  Description of Artificial Sequence: Synthetic oligonucleotide
  Antisense strand to SEQ ID NO: 190042
accuccagaggagucuuua

SEQ ID NO: 190044 - RNA, 19 nt, Artificial Sequence
  Description of Artificial Sequence: Synthetic oligonucleotide
  Sense strand starting at position 452 of SEQ ID NO: 2450
uuuggaggcuuuccugaaa

SEQ ID NO: 190045 - RNA, 19 nt, Artificial Sequence
  Description of Artificial Sequence: Synthetic oligonucleotide
  Antisense strand to SEQ ID NO: 190044
uuucaggaaagccuccaaa

SEQ ID NO: 190046 - RNA, 19 nt, Artificial Sequence
  Description of Artificial Sequence: Synthetic oligonucleotide
  Sense strand starting at position 352 of SEQ ID NO: 2450
gaucccugcuuaucaguga

SEQ ID NO: 190047 - RNA, 19 nt, Artificial Sequence
  Description of Artificial Sequence: Synthetic oligonucleotide
  Antisense strand to SEQ ID NO: 190046
ucacugauaagcagggauc

SEQ ID NO: 190048 - RNA, 19 nt, Artificial Sequence
  Description of Artificial Sequence: Synthetic oligonucleotide
  Sense strand starting at position 314 of SEQ ID NO: 2450
uuguguggccagagagguu

SEQ ID NO: 190049 - RNA, 19 nt, Artificial Sequence
  Description of Artificial Sequence: Synthetic oligonucleotide
  Antisense strand to SEQ ID NO: 190048
aaccucucuggccacacaa

SEQ ID NO: 190050 - RNA, 19 nt, Artificial Sequence
  Description of Artificial Sequence: Synthetic oligonucleotide
  Sense strand starting at position 310 of SEQ ID NO: 2450
ccacuuguguggccagaga

SEQ ID NO: 190051 - RNA, 19 nt, Artificial Sequence
  Description of Artificial Sequence: Synthetic oligonucleotide
  Antisense strand to SEQ ID NO: 190050
ucucuggccacacaagugg

SEQ ID NO: 190052 - RNA, 19 nt, Artificial Sequence
  Description of Artificial Sequence: Synthetic oligonucleotide
  Sense strand starting at position 207 of SEQ ID NO: 2450
uggagucccuacucauuau

SEQ ID NO: 190053 - RNA, 19 nt, Artificial Sequence
  Description of Artificial Sequence: Synthetic oligonucleotide
  Antisense strand to SEQ ID NO: 190052
auaaugaguagggacucca

SEQ ID NO: 190054 - RNA, 19 nt, Artificial Sequence
  Description of Artificial Sequence: Synthetic oligonucleotide
  Sense strand starting at position 175 of SEQ ID NO: 2450
ggagauaaggguuaguggu

SEQ ID NO: 190055 - RNA, 19 nt, Artificial Sequence
  Description of Artificial Sequence: Synthetic oligonucleotide
  Antisense strand to SEQ ID NO: 190054
accacuaacccuuaucucc

SEQ ID NO: 190056 - RNA, 19 nt, Artificial Sequence
  Description of Artificial Sequence: Synthetic oligonucleotide
  Sense strand starting at position 76 of SEQ ID NO: 2450
agauuuaaaugacauacga

SEQ ID NO: 190057 - RNA, 19 nt, Artificial Sequence
  Description of Artificial Sequence: Synthetic oligonucleotide
  Antisense strand to SEQ ID NO: 190056
ucguaugucauuuaaaucu

SEQ ID NO: 190058 - RNA, 19 nt, Artificial Sequence
  Description of Artificial Sequence: Synthetic oligonucleotide
  Sense strand starting at position 39 of SEQ ID NO: 2450
cugaguuaagucuauuaca

SEQ ID NO: 190059 - RNA, 19 nt, Artificial Sequence
  Description of Artificial Sequence: Synthetic oligonucleotide
  Antisense strand to SEQ ID NO: 190058
uguaauagacuuaacucag

SEQ ID NO: 190060 - RNA, 19 nt, Artificial Sequence
  Description of Artificial Sequence: Synthetic oligonucleotide
  Sense strand starting at position 33 of SEQ ID NO: 2450
gugucacugaguuaagucu

SEQ ID NO: 190061 - RNA, 19 nt, Artificial Sequence
  Description of Artificial Sequence: Synthetic oligonucleotide
  Antisense strand to SEQ ID NO: 190060
agacuuaacucagugacac

SEQ ID NO: 190062 - RNA, 19 nt, Artificial Sequence
  Description of Artificial Sequence: Synthetic oligonucleotide
  Sense strand starting at position 27 of SEQ ID NO: 2450
aucauugugucacugaguu

SEQ ID NO: 190063 - RNA, 19 nt, Artificial Sequence
  Description of Artificial Sequence: Synthetic oligonucleotide
  Antisense strand to SEQ ID NO: 190062
aacucagugacacaaugau

SEQ ID NO: 190064 - RNA, 19 nt, Artificial Sequence
  Description of Artificial Sequence: Synthetic oligonucleotide
  Sense strand starting at position 20 of SEQ ID NO: 2450
uuaacauaucauuguguca

SEQ ID NO: 190065 - RNA, 19 nt, Artificial Sequence
  Description of Artificial Sequence: Synthetic oligonucleotide
  Antisense strand to SEQ ID NO: 190064
ugacacaaugauauguuaa

SEQ ID NO: 190066 - RNA, 19 nt, Artificial Sequence
  Description of Artificial Sequence: Synthetic oligonucleotide
  Sense strand starting at position 3468 of SEQ ID NO: 2451
augccauuggguugaggaa

SEQ ID NO: 190067 - RNA, 19 nt, Artificial Sequence
  Description of Artificial Sequence: Synthetic oligonucleotide
  Antisense strand to SEQ ID NO: 190066
uuccucaacccaauggcau

SEQ ID NO: 190068 - RNA, 19 nt, Artificial Sequence
  Description of Artificial Sequence: Synthetic oligonucleotide
  Sense strand starting at position 3464 of SEQ ID NO: 2451
gagaaugccauuggguuga

SEQ ID NO: 190069 - RNA, 19 nt, Artificial Sequence
  Description of Artificial Sequence: Synthetic oligonucleotide
  Antisense strand to SEQ ID NO: 190068
ucaacccaauggcauucuc

SEQ ID NO: 190070 - RNA, 19 nt, Artificial Sequence
  Description of Artificial Sequence: Synthetic oligonucleotide
  Sense strand starting at position 3463 of SEQ ID NO: 2451
ggagaaugccauuggguug

SEQ ID NO: 190071 - RNA, 19 nt, Artificial Sequence
  Description of Artificial Sequence: Synthetic oligonucleotide
  Antisense strand to SEQ ID NO: 190070
caacccaauggcauucucc

SEQ ID NO: 190072 - RNA, 19 nt, Artificial Sequence
  Description of Artificial Sequence: Synthetic oligonucleotide
  Sense strand starting at position 3441 of SEQ ID NO: 2451
guugguacauaucuaagaa

SEQ ID NO: 190073 - RNA, 19 nt, Artificial Sequence
  Description of Artificial Sequence: Synthetic oligonucleotide
  Antisense strand to SEQ ID NO: 190072
uucuuagauauguaccaac

SEQ ID NO: 190074 - RNA, 19 nt, Artificial Sequence
  Description of Artificial Sequence: Synthetic oligonucleotide
  Sense strand starting at position 3438 of SEQ ID NO: 2451
ccgguugguacauaucuaa

SEQ ID NO: 190075 - RNA, 19 nt, Artificial Sequence
  Description of Artificial Sequence: Synthetic oligonucleotide
  Antisense strand to SEQ ID NO: 190074
uuagauauguaccaaccgg

SEQ ID NO: 190076 - RNA, 19 nt, Artificial Sequence
  Description of Artificial Sequence: Synthetic oligonucleotide
  Sense strand starting at position 3404 of SEQ ID NO: 2451
ggaguagugagccaugcua

SEQ ID NO: 190077 - RNA, 19 nt, Artificial Sequence
  Description of Artificial Sequence: Synthetic oligonucleotide
  Antisense strand to SEQ ID NO: 190076
uagcauggcucacuacucc

SEQ ID NO: 190078 - RNA, 19 nt, Artificial Sequence
  Description of Artificial Sequence: Synthetic oligonucleotide
  Sense strand starting at position 3047 of SEQ ID NO: 2451
acucuaugccaguaugacu

SEQ ID NO: 190079 - RNA, 19 nt, Artificial Sequence
  Description of Artificial Sequence: Synthetic oligonucleotide
  Antisense strand to SEQ ID NO: 190078
agucauacuggcauagagu

SEQ ID NO: 190080 - RNA, 19 nt, Artificial Sequence
  Description of Artificial Sequence: Synthetic oligonucleotide
  Sense strand starting at position 2897 of SEQ ID NO: 2451
uguauaugucuccauguca

SEQ ID NO: 190081 - RNA, 19 nt, Artificial Sequence
  Description of Artificial Sequence: Synthetic oligonucleotide
  Antisense strand to SEQ ID NO: 190080
ugacauggagacauauaca

SEQ ID NO: 190082 - RNA, 19 nt, Artificial Sequence
  Description of Artificial Sequence: Synthetic oligonucleotide
  Sense strand starting at position 2885 of SEQ ID NO: 2451
gggcauauucccuguauau

SEQ ID NO: 190083 - RNA, 19 nt, Artificial Sequence
  Description of Artificial Sequence: Synthetic oligonucleotide
  Antisense strand to SEQ ID NO: 190082
auauacagggaauaugccc

SEQ ID NO: 190084 - RNA, 19 nt, Artificial Sequence
  Description of Artificial Sequence: Synthetic oligonucleotide
  Sense strand starting at position 2884 of SEQ ID NO: 2451
agggcauauucccuguaua

SEQ ID NO: 190085 - RNA, 19 nt, Artificial Sequence
  Description of Artificial Sequence: Synthetic oligonucleotide
  Antisense strand to SEQ ID NO: 190084
uauacagggaauaugcccu

SEQ ID NO: 190086 - RNA, 19 nt, Artificial Sequence
  Description of Artificial Sequence: Synthetic oligonucleotide
  Sense strand starting at position 2797 of SEQ ID NO: 2451
caggguucuuuccuucuga

SEQ ID NO: 190087 - RNA, 19 nt, Artificial Sequence
  Description of Artificial Sequence: Synthetic oligonucleotide
  Antisense strand to SEQ ID NO: 190086
ucagaaggaaagaacccug

SEQ ID NO: 190088 - RNA, 19 nt, Artificial Sequence
  Description of Artificial Sequence: Synthetic oligonucleotide
  Sense strand starting at position 2748 of SEQ ID NO: 2451
agaucuuauugucugacaa

SEQ ID NO: 190089 - RNA, 19 nt, Artificial Sequence
  Description of Artificial Sequence: Synthetic oligonucleotide
  Antisense strand to SEQ ID NO: 190088
uugucagacaauaagaucu

SEQ ID NO: 190090 - RNA, 19 nt, Artificial Sequence
  Description of Artificial Sequence: Synthetic oligonucleotide
  Sense strand starting at position 2686 of SEQ ID NO: 2451
ggguguauucguuugcuag

SEQ ID NO: 190091 - RNA, 19 nt, Artificial Sequence
  Description of Artificial Sequence: Synthetic oligonucleotide
  Antisense strand to SEQ ID NO: 190090
cuagcaaacgaauacaccc

SEQ ID NO: 190092 - RNA, 19 nt, Artificial Sequence
  Description of Artificial Sequence: Synthetic oligonucleotide
  Sense strand starting at position 2665 of SEQ ID NO: 2451
cagggagcuuaguucucau

SEQ ID NO: 190093 - RNA, 19 nt, Artificial Sequence
  Description of Artificial Sequence: Synthetic oligonucleotide
  Antisense strand to SEQ ID NO: 190092
augagaacuaagcucccug

SEQ ID NO: 190094 - RNA, 19 nt, Artificial Sequence
  Description of Artificial Sequence: Synthetic oligonucleotide
  Sense strand starting at position 2568 of SEQ ID NO: 2451
auacuagugaaacgguuaa

SEQ ID NO: 190095 - RNA, 19 nt, Artificial Sequence
  Description of Artificial Sequence: Synthetic oligonucleotide
  Antisense strand to SEQ ID NO: 190094
uuaaccguuucacuaguau

SEQ ID NO: 190096 - RNA, 19 nt, Artificial Sequence
  Description of Artificial Sequence: Synthetic oligonucleotide
  Sense strand starting at position 2391 of SEQ ID NO: 2451
cucaucaguccgcacauau

SEQ ID NO: 190097 - RNA, 19 nt, Artificial Sequence
  Description of Artificial Sequence: Synthetic oligonucleotide
  Antisense strand to SEQ ID NO: 190096
auaugugcggacugaugag

SEQ ID NO: 190098 - RNA, 19 nt, Artificial Sequence
  Description of Artificial Sequence: Synthetic oligonucleotide
  Sense strand starting at position 2363 of SEQ ID NO: 2451
aaugcaguccagggaauaa

SEQ ID NO: 190099 - RNA, 19 nt, Artificial Sequence
  Description of Artificial Sequence: Synthetic oligonucleotide
  Antisense strand to SEQ ID NO: 190098
uuauucccuggacugcauu

SEQ ID NO: 190100 - RNA, 19 nt, Artificial Sequence
  Description of Artificial Sequence: Synthetic oligonucleotide
  Sense strand starting at position 2362 of SEQ ID NO: 2451
uaaugcaguccagggaaua

SEQ ID NO: 190101 - RNA, 19 nt, Artificial Sequence
  Description of Artificial Sequence: Synthetic oligonucleotide
  Antisense strand to SEQ ID NO: 190100
uauucccuggacugcauua

SEQ ID NO: 190102 - RNA, 19 nt, Artificial Sequence
  Description of Artificial Sequence: Synthetic oligonucleotide
  Sense strand starting at position 2322 of SEQ ID NO: 2451
ggucucuuugucuggagag

SEQ ID NO: 190103 - RNA, 19 nt, Artificial Sequence
  Description of Artificial Sequence: Synthetic oligonucleotide
  Antisense strand to SEQ ID NO: 190102
cucuccagacaaagagacc

SEQ ID NO: 190104 - RNA, 19 nt, Artificial Sequence
  Description of Artificial Sequence: Synthetic oligonucleotide
  Sense strand starting at position 1662 of SEQ ID NO: 2451
ggcaccauucaccguggaa

SEQ ID NO: 190105 - RNA, 19 nt, Artificial Sequence
  Description of Artificial Sequence: Synthetic oligonucleotide
  Antisense strand to SEQ ID NO: 190104
uuccacggugaauggugcc

SEQ ID NO: 190106 - RNA, 19 nt, Artificial Sequence
  Description of Artificial Sequence: Synthetic oligonucleotide
  Sense strand starting at position 1467 of SEQ ID NO: 2451
aucuaaacugcucgcaaga

SEQ ID NO: 190107 - RNA, 19 nt, Artificial Sequence
  Description of Artificial Sequence: Synthetic oligonucleotide
  Antisense strand to SEQ ID NO: 190106
ucuugcgagcaguuuagau

SEQ ID NO: 190108 - RNA, 19 nt, Artificial Sequence
  Description of Artificial Sequence: Synthetic oligonucleotide
  Sense strand starting at position 1433 of SEQ ID NO: 2451
ccauuuccauacgaagaau

SEQ ID NO: 190109 - RNA, 19 nt, Artificial Sequence
  Description of Artificial Sequence: Synthetic oligonucleotide
  Antisense strand to SEQ ID NO: 190108
auucuucguauggaaaugg

SEQ ID NO: 190110 - RNA, 19 nt, Artificial Sequence
  Description of Artificial Sequence: Synthetic oligonucleotide
  Sense strand starting at position 1376 of SEQ ID NO: 2451
ggaagucacuccuuucuuu

SEQ ID NO: 190111 - RNA, 19 nt, Artificial Sequence
  Description of Artificial Sequence: Synthetic oligonucleotide
  Antisense strand to SEQ ID NO: 190110
aaagaaaggagugacuucc

SEQ ID NO: 190112 - RNA, 19 nt, Artificial Sequence
  Description of Artificial Sequence: Synthetic oligonucleotide
  Sense strand starting at position 1307 of SEQ ID NO: 2451
gguugacauccuuaaccac

SEQ ID NO: 190113 - RNA, 19 nt, Artificial Sequence
  Description of Artificial Sequence: Synthetic oligonucleotide
  Antisense strand to SEQ ID NO: 190112
gugguuaaggaugucaacc

SEQ ID NO: 190114 - RNA, 19 nt, Artificial Sequence
  Description of Artificial Sequence: Synthetic oligonucleotide
  Sense strand starting at position 1045 of SEQ ID NO: 2451
guuggagugcacgauccua

SEQ ID NO: 190115 - RNA, 19 nt, Artificial Sequence
  Description of Artificial Sequence: Synthetic oligonucleotide
  Antisense strand to SEQ ID NO: 190114
uaggaucgugcacuccaac

SEQ ID NO: 190116 - RNA, 19 nt, Artificial Sequence
  Description of Artificial Sequence: Synthetic oligonucleotide
  Sense strand starting at position 801 of SEQ ID NO: 2451
gaguccuagccagaucaca

SEQ ID NO: 190117 - RNA, 19 nt, Artificial Sequence
  Description of Artificial Sequence: Synthetic oligonucleotide
  Antisense strand to SEQ ID NO: 190116
ugugaucuggcuaggacuc

SEQ ID NO: 190118 - RNA, 19 nt, Artificial Sequence
  Description of Artificial Sequence: Synthetic oligonucleotide
  Sense strand starting at position 784 of SEQ ID NO: 2451
cucauauacccuugaggga

SEQ ID NO: 190119 - RNA, 19 nt, Artificial Sequence
  Description of Artificial Sequence: Synthetic oligonucleotide
  Antisense strand to SEQ ID NO: 190118
ucccucaaggguauaugag

SEQ ID NO: 190120 - RNA, 19 nt, Artificial Sequence
  Description of Artificial Sequence: Synthetic oligonucleotide
  Sense strand starting at position 731 of SEQ ID NO: 2451
gccuguccuccaggagaca

SEQ ID NO: 190121 - RNA, 19 nt, Artificial Sequence
  Description of Artificial Sequence: Synthetic oligonucleotide
  Antisense strand to SEQ ID NO: 190120
ugucuccuggaggacaggc

SEQ ID NO: 190122 - RNA, 19 nt, Artificial Sequence
  Description of Artificial Sequence: Synthetic oligonucleotide
  Sense strand starting at position 729 of SEQ ID NO: 2451
gugccuguccuccaggaga

SEQ ID NO: 190123 - RNA, 19 nt, Artificial Sequence
  Description of Artificial Sequence: Synthetic oligonucleotide
  Antisense strand to SEQ ID NO: 190122
ucuccuggaggacaggcac

SEQ ID NO: 190124 - RNA, 19 nt, Artificial Sequence
  Description of Artificial Sequence: Synthetic oligonucleotide
  Sense strand starting at position 598 of SEQ ID NO: 2451
gcacauuuauccgcacucu

SEQ ID NO: 190125 - RNA, 19 nt, Artificial Sequence
  Description of Artificial Sequence: Synthetic oligonucleotide
  Antisense strand to SEQ ID NO: 190124
agagugcggauaaaugugc

SEQ ID NO: 190126 - RNA, 19 nt, Artificial Sequence
  Description of Artificial Sequence: Synthetic oligonucleotide
  Sense strand starting at position 578 of SEQ ID NO: 2451
agggcagacugcucucaga

SEQ ID NO: 190127 - RNA, 19 nt, Artificial Sequence
  Description of Artificial Sequence: Synthetic oligonucleotide
  Antisense strand to SEQ ID NO: 190126
ucugagagcagucugcccu

SEQ ID NO: 190128 - RNA, 19 nt, Artificial Sequence
  Description of Artificial Sequence: Synthetic oligonucleotide
  Sense strand starting at position 552 of SEQ ID NO: 2451
ccacuuaucccagaagagc

SEQ ID NO: 190129 - RNA, 19 nt, Artificial Sequence
  Description of Artificial Sequence: Synthetic oligonucleotide
  Antisense strand to SEQ ID NO: 190128
gcucuucugggauaagugg

SEQ ID NO: 190130 - RNA, 19 nt, Artificial Sequence
  Description of Artificial Sequence: Synthetic oligonucleotide
  Sense strand starting at position 422 of SEQ ID NO: 2451
agucuauccguauaguauu

SEQ ID NO: 190131 - RNA, 19 nt, Artificial Sequence
  Description of Artificial Sequence: Synthetic oligonucleotide
  Antisense strand to SEQ ID NO: 190130
aauacuauacggauagacu

SEQ ID NO: 190132 - RNA, 19 nt, Artificial Sequence
  Description of Artificial Sequence: Synthetic oligonucleotide
  Sense strand starting at position 420 of SEQ ID NO: 2451
aaagucuauccguauagua

SEQ ID NO: 190133 - RNA, 19 nt, Artificial Sequence
  Description of Artificial Sequence: Synthetic oligonucleotide
  Antisense strand to SEQ ID NO: 190132
uacuauacggauagacuuu

SEQ ID NO: 190134 - RNA, 19 nt, Artificial Sequence
  Description of Artificial Sequence: Synthetic oligonucleotide
  Sense strand starting at position 314 of SEQ ID NO: 2451
gccuccuuuccagaaauag

SEQ ID NO: 190135 - RNA, 19 nt, Artificial Sequence
  Description of Artificial Sequence: Synthetic oligonucleotide
  Antisense strand to SEQ ID NO: 190134
cuauuucuggaaaggaggc

SEQ ID NO: 190136 - RNA, 19 nt, Artificial Sequence
  Description of Artificial Sequence: Synthetic oligonucleotide
  Sense strand starting at position 254 of SEQ ID NO: 2451
uguaguauggucugaucua

SEQ ID NO: 190137 - RNA, 19 nt, Artificial Sequence
  Description of Artificial Sequence: Synthetic oligonucleotide
  Antisense strand to SEQ ID NO: 190136
uagaucagaccauacuaca

SEQ ID NO: 190138 - RNA, 19 nt, Artificial Sequence
  Description of Artificial Sequence: Synthetic oligonucleotide
  Sense strand starting at position 215 of SEQ ID NO: 2451
gguagauaaauauguaagu

SEQ ID NO: 190139 - RNA, 19 nt, Artificial Sequence
  Description of Artificial Sequence: Synthetic oligonucleotide
  Antisense strand to SEQ ID NO: 190138
acuuacauauuuaucuacc

SEQ ID NO: 190140 - RNA, 19 nt, Artificial Sequence
  Description of Artificial Sequence: Synthetic oligonucleotide
  Sense strand starting at position 207 of SEQ ID NO: 2451
guaagccagguagauaaau

SEQ ID NO: 190141 - RNA, 19 nt, Artificial Sequence
  Description of Artificial Sequence: Synthetic oligonucleotide
  Antisense strand to SEQ ID NO: 190140
auuuaucuaccuggcuuac

SEQ ID NO: 190142 - RNA, 19 nt, Artificial Sequence
  Description of Artificial Sequence: Synthetic oligonucleotide
  Sense strand starting at position 205 of SEQ ID NO: 2451
ugguaagccagguagauaa

SEQ ID NO: 190143 - RNA, 19 nt, Artificial Sequence
  Description of Artificial Sequence: Synthetic oligonucleotide
  Antisense strand to SEQ ID NO: 190142
uuaucuaccuggcuuacca

SEQ ID NO: 190144 - RNA, 19 nt, Artificial Sequence
  Description of Artificial Sequence: Synthetic oligonucleotide
  Sense strand starting at position 203 of SEQ ID NO: 2451
guugguaagccagguagau

SEQ ID NO: 190145 - RNA, 19 nt, Artificial Sequence
  Description of Artificial Sequence: Synthetic oligonucleotide
  Antisense strand to SEQ ID NO: 190144
aucuaccuggcuuaccaac

SEQ ID NO: 190146 - RNA, 19 nt, Artificial Sequence
  Description of Artificial Sequence: Synthetic oligonucleotide
  Sense strand starting at position 672 of SEQ ID NO: 2452
ccgcaaacggccuauaaua

SEQ ID NO: 190147 - RNA, 19 nt, Artificial Sequence
  Description of Artificial Sequence: Synthetic oligonucleotide
  Antisense strand to SEQ ID NO: 190146
uauuauaggccguuugcgg

SEQ ID NO: 190148 - RNA, 19 nt, Artificial Sequence
  Description of Artificial Sequence: Synthetic oligonucleotide
  Sense strand starting at position 674 of SEQ ID NO: 2452
gcaaacggccuauaauauu

SEQ ID NO: 190149 - RNA, 19 nt, Artificial Sequence
  Description of Artificial Sequence: Synthetic oligonucleotide
  Antisense strand to SEQ ID NO: 190148
aauauuauaggccguuugc

SEQ ID NO: 190150 - RNA, 19 nt, Artificial Sequence
  Description of Artificial Sequence: Synthetic oligonucleotide
  Sense strand starting at position 752 of SEQ ID NO: 2452
gcacauugccuagaauacu

SEQ ID NO: 190151 - RNA, 19 nt, Artificial Sequence
  Description of Artificial Sequence: Synthetic oligonucleotide
  Antisense strand to SEQ ID NO: 190150
aguauucuaggcaaugugc

SEQ ID NO: 190152 - RNA, 19 nt, Artificial Sequence
  Description of Artificial Sequence: Synthetic oligonucleotide
  Sense strand starting at position 795 of SEQ ID NO: 2452
agaggacaaugagaaauua

SEQ ID NO: 190153 - RNA, 19 nt, Artificial Sequence
  Description of Artificial Sequence: Synthetic oligonucleotide
  Antisense strand to SEQ ID NO: 190152
uaauuucucauuguccucu

SEQ ID NO: 190154 - RNA, 19 nt, Artificial Sequence
  Description of Artificial Sequence: Synthetic oligonucleotide
  Sense strand starting at position 937 of SEQ ID NO: 2452
gccuaaagucacuaagcga

SEQ ID NO: 190155 - RNA, 19 nt, Artificial Sequence
  Description of Artificial Sequence: Synthetic oligonucleotide
  Antisense strand to SEQ ID NO: 190154
ucgcuuagugacuuuaggc

SEQ ID NO: 190156 - RNA, 19 nt, Artificial Sequence
  Description of Artificial Sequence: Synthetic oligonucleotide
  Sense strand starting at position 1431 of SEQ ID NO: 2452
uugcuaauaugaucgaggu

SEQ ID NO: 190157 - RNA, 19 nt, Artificial Sequence
  Description of Artificial Sequence: Synthetic oligonucleotide
  Antisense strand to SEQ ID NO: 190156
accucgaucauauuagcaa

SEQ ID NO: 190158 - RNA, 19 nt, Artificial Sequence
  Description of Artificial Sequence: Synthetic oligonucleotide
  Sense strand starting at position 1433 of SEQ ID NO: 2452
gcuaauaugaucgagguga

SEQ ID NO: 190159 - RNA, 19 nt, Artificial Sequence
  Description of Artificial Sequence: Synthetic oligonucleotide
  Antisense strand to SEQ ID NO: 190158
ucaccucgaucauauuagc

SEQ ID NO: 190160 - RNA, 19 nt, Artificial Sequence
  Description of Artificial Sequence: Synthetic oligonucleotide
  Sense strand starting at position 1435 of SEQ ID NO: 2452
uaauaugaucgaggugaaa

SEQ ID NO: 190161 - RNA, 19 nt, Artificial Sequence
  Description of Artificial Sequence: Synthetic oligonucleotide
  Antisense strand to SEQ ID NO: 190160
uuucaccucgaucauauua

SEQ ID NO: 190162 - RNA, 19 nt, Artificial Sequence
  Description of Artificial Sequence: Synthetic oligonucleotide
  Sense strand starting at position 1437 of SEQ ID NO: 2452
auaugaucgaggugaaaca

SEQ ID NO: 190163 - RNA, 19 nt, Artificial Sequence
  Description of Artificial Sequence: Synthetic oligonucleotide
  Antisense strand to SEQ ID NO: 190162
uguuucaccucgaucauau

SEQ ID NO: 190164 - RNA, 19 nt, Artificial Sequence
  Description of Artificial Sequence: Synthetic oligonucleotide
  Sense strand starting at position 1509 of SEQ ID NO: 2452
uaaucucaccguugggaaa

SEQ ID NO: 190165 - RNA, 19 nt, Artificial Sequence
  Description of Artificial Sequence: Synthetic oligonucleotide
  Antisense strand to SEQ ID NO: 190164
uuucccaacggugagauua

SEQ ID NO: 190166 - RNA, 19 nt, Artificial Sequence
  Description of Artificial Sequence: Synthetic oligonucleotide
  Sense strand starting at position 1510 of SEQ ID NO: 2452
aaucucaccguugggaaau

SEQ ID NO: 190167 - RNA, 19 nt, Artificial Sequence
  Description of Artificial Sequence: Synthetic oligonucleotide
  Antisense strand to SEQ ID NO: 190166
auuucccaacggugagauu

SEQ ID NO: 190168 - RNA, 19 nt, Artificial Sequence
  Description of Artificial Sequence: Synthetic oligonucleotide
  Sense strand starting at position 1584 of SEQ ID NO: 2452
cgaagauaaaugugauuag

SEQ ID NO: 190169 - RNA, 19 nt, Artificial Sequence
  Description of Artificial Sequence: Synthetic oligonucleotide
  Antisense strand to SEQ ID NO: 190168
cuaaucacauuuaucuucg

SEQ ID NO: 190170 - RNA, 19 nt, Artificial Sequence
  Description of Artificial Sequence: Synthetic oligonucleotide
  Sense strand starting at position 1587 of SEQ ID NO: 2452
agauaaaugugauuaggca

SEQ ID NO: 190171 - RNA, 19 nt, Artificial Sequence
  Description of Artificial Sequence: Synthetic oligonucleotide
  Antisense strand to SEQ ID NO: 190170
ugccuaaucacauuuaucu

SEQ ID NO: 190172 - RNA, 19 nt, Artificial Sequence
  Description of Artificial Sequence: Synthetic oligonucleotide
  Sense strand starting at position 1596 of SEQ ID NO: 2452
ugauuaggcacauguggaa

SEQ ID NO: 190173 - RNA, 19 nt, Artificial Sequence
  Description of Artificial Sequence: Synthetic oligonucleotide
  Antisense strand to SEQ ID NO: 190172
uuccacaugugccuaauca

SEQ ID NO: 190174 - RNA, 19 nt, Artificial Sequence
  Description of Artificial Sequence: Synthetic oligonucleotide
  Sense strand starting at position 1646 of SEQ ID NO: 2452
agguuucgcgacuauuaaa

SEQ ID NO: 190175 - RNA, 19 nt, Artificial Sequence
  Description of Artificial Sequence: Synthetic oligonucleotide
  Antisense strand to SEQ ID NO: 190174
uuuaauagucgcgaaaccu

SEQ ID NO: 190176 - RNA, 19 nt, Artificial Sequence
  Description of Artificial Sequence: Synthetic oligonucleotide
  Sense strand starting at position 1730 of SEQ ID NO: 2452
augggaucaugccugaagu

SEQ ID NO: 190177 - RNA, 19 nt, Artificial Sequence
  Description of Artificial Sequence: Synthetic oligonucleotide
  Antisense strand to SEQ ID NO: 190176
acuucaggcaugaucccau

SEQ ID NO: 190178 - RNA, 19 nt, Artificial Sequence
  Description of Artificial Sequence: Synthetic oligonucleotide
  Sense strand starting at position 1731 of SEQ ID NO: 2452
ugggaucaugccugaagua

SEQ ID NO: 190179 - RNA, 19 nt, Artificial Sequence
  Description of Artificial Sequence: Synthetic oligonucleotide
  Antisense strand to SEQ ID NO: 190178
uacuucaggcaugauccca

SEQ ID NO: 190180 - RNA, 19 nt, Artificial Sequence
  Description of Artificial Sequence: Synthetic oligonucleotide
  Sense strand starting at position 1732 of SEQ ID NO: 2452
gggaucaugccugaaguac

SEQ ID NO: 190181 - RNA, 19 nt, Artificial Sequence
  Description of Artificial Sequence: Synthetic oligonucleotide
  Antisense strand to SEQ ID NO: 190180
guacuucaggcaugauccc

SEQ ID NO: 190182 - RNA, 19 nt, Artificial Sequence
  Description of Artificial Sequence: Synthetic oligonucleotide
  Sense strand starting at position 1809 of SEQ ID NO: 2452
ugugcuuacauguaaagag

SEQ ID NO: 190183 - RNA, 19 nt, Artificial Sequence
  Description of Artificial Sequence: Synthetic oligonucleotide
  Antisense strand to SEQ ID NO: 190182
cucuuuacauguaagcaca

SEQ ID NO: 190184 - RNA, 19 nt, Artificial Sequence
  Description of Artificial Sequence: Synthetic oligonucleotide
  Sense strand starting at position 1939 of SEQ ID NO: 2452
gcgccaugacugcaggauu

SEQ ID NO: 190185 - RNA, 19 nt, Artificial Sequence
  Description of Artificial Sequence: Synthetic oligonucleotide
  Antisense strand to SEQ ID NO: 190184
aauccugcagucauggcgc

SEQ ID NO: 190186 - RNA, 19 nt, Artificial Sequence
  Description of Artificial Sequence: Synthetic oligonucleotide
  Sense strand starting at position 2102 of SEQ ID NO: 2452
gccgcuuggaucgcauauu

SEQ ID NO: 190187 - RNA, 19 nt, Artificial Sequence
  Description of Artificial Sequence: Synthetic oligonucleotide
  Antisense strand to SEQ ID NO: 190186
aauaugcgauccaagcggc

SEQ ID NO: 190188 - RNA, 19 nt, Artificial Sequence
  Description of Artificial Sequence: Synthetic oligonucleotide
  Sense strand starting at position 3150 of SEQ ID NO: 2452
gggauggcccgaggaguuu

SEQ ID NO: 190189 - RNA, 19 nt, Artificial Sequence
  Description of Artificial Sequence: Synthetic oligonucleotide
  Antisense strand to SEQ ID NO: 190188
aaacuccucgggccauccc

SEQ ID NO: 190190 - RNA, 19 nt, Artificial Sequence
  Description of Artificial Sequence: Synthetic oligonucleotide
  Sense strand starting at position 3162 of SEQ ID NO: 2452
ggaguuucggcgccgcgaa

SEQ ID NO: 190191 - RNA, 19 nt, Artificial Sequence
  Description of Artificial Sequence: Synthetic oligonucleotide
  Antisense strand to SEQ ID NO: 190190
uucgcggcgccgaaacucc

SEQ ID NO: 190192 - RNA, 19 nt, Artificial Sequence
  Description of Artificial Sequence: Synthetic oligonucleotide
  Sense strand starting at position 3261 of SEQ ID NO: 2452
gguggcuuugcagaggauu

SEQ ID NO: 190193 - RNA, 19 nt, Artificial Sequence
  Description of Artificial Sequence: Synthetic oligonucleotide
  Antisense strand to SEQ ID NO: 190192
aauccucugcaaagccacc

SEQ ID NO: 190194 - RNA, 19 nt, Artificial Sequence
  Description of Artificial Sequence: Synthetic oligonucleotide
  Sense strand starting at position 3264 of SEQ ID NO: 2452
ggcuuugcagaggauuacu

SEQ ID NO: 190195 - RNA, 19 nt, Artificial Sequence
  Description of Artificial Sequence: Synthetic oligonucleotide
  Antisense strand to SEQ ID NO: 190194
aguaauccucugcaaagcc

SEQ ID NO: 190196 - RNA, 19 nt, Artificial Sequence
  Description of Artificial Sequence: Synthetic oligonucleotide
  Sense strand starting at position 3467 of SEQ ID NO: 2452
gauguaaccaggugacaug

SEQ ID NO: 190197 - RNA, 19 nt, Artificial Sequence
  Description of Artificial Sequence: Synthetic oligonucleotide
  Antisense strand to SEQ ID NO: 190196
caugucaccugguuacauc

SEQ ID NO: 190198 - RNA, 19 nt, Artificial Sequence
  Description of Artificial Sequence: Synthetic oligonucleotide
  Sense strand starting at position 3482 of SEQ ID NO: 2452
caugacucucccgaacguu

SEQ ID NO: 190199 - RNA, 19 nt, Artificial Sequence
  Description of Artificial Sequence: Synthetic oligonucleotide
  Antisense strand to SEQ ID NO: 190198
aacguucgggagagucaug

SEQ ID NO: 190200 - RNA, 19 nt, Artificial Sequence
  Description of Artificial Sequence: Synthetic oligonucleotide
  Sense strand starting at position 3520 of SEQ ID NO: 2452
guagauuucucauauugau

SEQ ID NO: 190201 - RNA, 19 nt, Artificial Sequence
  Description of Artificial Sequence: Synthetic oligonucleotide
  Antisense strand to SEQ ID NO: 190200
aucaauaugagaaaucuac

SEQ ID NO: 190202 - RNA, 19 nt, Artificial Sequence
  Description of Artificial Sequence: Synthetic oligonucleotide
  Sense strand starting at position 3566 of SEQ ID NO: 2452
ggagaaggcaugugaucaa

SEQ ID NO: 190203 - RNA, 19 nt, Artificial Sequence
  Description of Artificial Sequence: Synthetic oligonucleotide
  Antisense strand to SEQ ID NO: 190202
uugaucacaugccuucucc

SEQ ID NO: 190204 - RNA, 19 nt, Artificial Sequence
  Description of Artificial Sequence: Synthetic oligonucleotide
  Sense strand starting at position 3695 of SEQ ID NO: 2452
auuaaauagcuguagcuga

SEQ ID NO: 190205 - RNA, 19 nt, Artificial Sequence
  Description of Artificial Sequence: Synthetic oligonucleotide
  Antisense strand to SEQ ID NO: 190204
ucagcuacagcuauuuaau

SEQ ID NO: 190206 - RNA, 19 nt, Artificial Sequence
  Description of Artificial Sequence: Synthetic oligonucleotide
  Sense strand starting at position 3700 of SEQ ID NO: 2452
auagcuguagcugaugaua

SEQ ID NO: 190207 - RNA, 19 nt, Artificial Sequence
  Description of Artificial Sequence: Synthetic oligonucleotide
  Antisense strand to SEQ ID NO: 190206
uaucaucagcuacagcuau

SEQ ID NO: 190208 - RNA, 19 nt, Artificial Sequence
  Description of Artificial Sequence: Synthetic oligonucleotide
  Sense strand starting at position 3703 of SEQ ID NO: 2452
gcuguagcugaugauaaua

SEQ ID NO: 190209 - RNA, 19 nt, Artificial Sequence
  Description of Artificial Sequence: Synthetic oligonucleotide
  Antisense strand to SEQ ID NO: 190208
uauuaucaucagcuacagc

SEQ ID NO: 190210 - RNA, 19 nt, Artificial Sequence
  Description of Artificial Sequence: Synthetic oligonucleotide
  Sense strand starting at position 3711 of SEQ ID NO: 2452
ugaugauaauaccuguaau

SEQ ID NO: 190211 - RNA, 19 nt, Artificial Sequence
  Description of Artificial Sequence: Synthetic oligonucleotide
  Antisense strand to SEQ ID NO: 190210
auuacagguauuaucauca

SEQ ID NO: 190212 - RNA, 19 nt, Artificial Sequence
  Description of Artificial Sequence: Synthetic oligonucleotide
  Sense strand starting at position 3724 of SEQ ID NO: 2452
uguaauaauaguggcugua

SEQ ID NO: 190213 - RNA, 19 nt, Artificial Sequence
  Description of Artificial Sequence: Synthetic oligonucleotide
  Antisense strand to SEQ ID NO: 190212
uacagccacuauuauuaca

SEQ ID NO: 190214 - RNA, 19 nt, Artificial Sequence
  Description of Artificial Sequence: Synthetic oligonucleotide
  Sense strand starting at position 3779 of SEQ ID NO: 2452
guauuauggccaggagcag

SEQ ID NO: 190215 - RNA, 19 nt, Artificial Sequence
  Description of Artificial Sequence: Synthetic oligonucleotide
  Antisense strand to SEQ ID NO: 190214
cugcuccuggccauaauac

SEQ ID NO: 190216 - RNA, 19 nt, Artificial Sequence
  Description of Artificial Sequence: Synthetic oligonucleotide
  Sense strand starting at position 3866 of SEQ ID NO: 2452
gagaccagcccugggaaua

SEQ ID NO: 190217 - RNA, 19 nt, Artificial Sequence
  Description of Artificial Sequence: Synthetic oligonucleotide
  Antisense strand to SEQ ID NO: 190216
uauucccagggcuggucuc

SEQ ID NO: 190218 - RNA, 19 nt, Artificial Sequence
  Description of Artificial Sequence: Synthetic oligonucleotide
  Sense strand starting at position 3877 of SEQ ID NO: 2452
ugggaauacccucgucucu

SEQ ID NO: 190219 - RNA, 19 nt, Artificial Sequence
  Description of Artificial Sequence: Synthetic oligonucleotide
  Antisense strand to SEQ ID NO: 190218
agagacgaggguauuccca

SEQ ID NO: 190220 - RNA, 19 nt, Artificial Sequence
  Description of Artificial Sequence: Synthetic oligonucleotide
  Sense strand starting at position 3879 of SEQ ID NO: 2452
ggaauacccucgucucuac

SEQ ID NO: 190221 - RNA, 19 nt, Artificial Sequence
  Description of Artificial Sequence: Synthetic oligonucleotide
  Antisense strand to SEQ ID NO: 190220
guagagacgaggguauucc

SEQ ID NO: 190222 - RNA, 19 nt, Artificial Sequence
  Description of Artificial Sequence: Synthetic oligonucleotide
  Sense strand starting at position 3924 of SEQ ID NO: 2452
guauuacaaugagucuagu

SEQ ID NO: 190223 - RNA, 19 nt, Artificial Sequence
  Description of Artificial Sequence: Synthetic oligonucleotide
  Antisense strand to SEQ ID NO: 190222
acuagacucauuguaauac

SEQ ID NO: 190224 - RNA, 19 nt, Artificial Sequence
  Description of Artificial Sequence: Synthetic oligonucleotide
  Sense strand starting at position 3933 of SEQ ID NO: 2452
ugagucuaguccuuacaac

SEQ ID NO: 190225 - RNA, 19 nt, Artificial Sequence
  Description of Artificial Sequence: Synthetic oligonucleotide
  Antisense strand to SEQ ID NO: 190224
guuguaaggacuagacuca

SEQ ID NO: 190226 - RNA, 19 nt, Artificial Sequence
  Description of Artificial Sequence: Synthetic oligonucleotide
  Sense strand starting at position 3694 of SEQ ID NO: 2453
aguaucauugauuguaaga

SEQ ID NO: 190227 - RNA, 19 nt, Artificial Sequence
  Description of Artificial Sequence: Synthetic oligonucleotide
  Antisense strand to SEQ ID NO: 190226
ucuuacaaucaaugauacu

SEQ ID NO: 190228 - RNA, 19 nt, Artificial Sequence
  Description of Artificial Sequence: Synthetic oligonucleotide
  Sense strand starting at position 3693 of SEQ ID NO: 2453
aaguaucauugauuguaag

SEQ ID NO: 190229 - RNA, 19 nt, Artificial Sequence
  Description of Artificial Sequence: Synthetic oligonucleotide
  Antisense strand to SEQ ID NO: 190228
cuuacaaucaaugauacuu

SEQ ID NO: 190230 - RNA, 19 nt, Artificial Sequence
  Description of Artificial Sequence: Synthetic oligonucleotide
  Sense strand starting at position 3689 of SEQ ID NO: 2453
ccuaaaguaucauugauug

SEQ ID NO: 190231 - RNA, 19 nt, Artificial Sequence
  Description of Artificial Sequence: Synthetic oligonucleotide
  Antisense strand to SEQ ID NO: 190230
caaucaaugauacuuuagg

SEQ ID NO: 190232 - RNA, 19 nt, Artificial Sequence
  Description of Artificial Sequence: Synthetic oligonucleotide
  Sense strand starting at position 3652 of SEQ ID NO: 2453
gugugcuauauagaguuua

SEQ ID NO: 190233 - RNA, 19 nt, Artificial Sequence
  Description of Artificial Sequence: Synthetic oligonucleotide
  Antisense strand to SEQ ID NO: 190232
uaaacucuauauagcacac

SEQ ID NO: 190234 - RNA, 19 nt, Artificial Sequence
  Description of Artificial Sequence: Synthetic oligonucleotide
  Sense strand starting at position 3648 of SEQ ID NO: 2453
acuagugugcuauauagag

SEQ ID NO: 190235 - RNA, 19 nt, Artificial Sequence
  Description of Artificial Sequence: Synthetic oligonucleotide
  Antisense strand to SEQ ID NO: 190234
cucuauauagcacacuagu

SEQ ID NO: 190236 - RNA, 19 nt, Artificial Sequence
  Description of Artificial Sequence: Synthetic oligonucleotide
  Sense strand starting at position 3536 of SEQ ID NO: 2453
ccaauuucugucugugcca

SEQ ID NO: 190237 - RNA, 19 nt, Artificial Sequence
  Description of Artificial Sequence: Synthetic oligonucleotide
  Antisense strand to SEQ ID NO: 190236
uggcacagacagaaauugg

SEQ ID NO: 190238 - RNA, 19 nt, Artificial Sequence
  Description of Artificial Sequence: Synthetic oligonucleotide
  Sense strand starting at position 3517 of SEQ ID NO: 2453
gugugacucuuacugguaa

SEQ ID NO: 190239 - RNA, 19 nt, Artificial Sequence
  Description of Artificial Sequence: Synthetic oligonucleotide
  Antisense strand to SEQ ID NO: 190238
uuaccaguaagagucacac

SEQ ID NO: 190240 - RNA, 19 nt, Artificial Sequence
  Description of Artificial Sequence: Synthetic oligonucleotide
  Sense strand starting at position 3385 of SEQ ID NO: 2453
caaucucugccuuacguga

SEQ ID NO: 190241 - RNA, 19 nt, Artificial Sequence
  Description of Artificial Sequence: Synthetic oligonucleotide
  Antisense strand to SEQ ID NO: 190240
ucacguaaggcagagauug

SEQ ID NO: 190242 - RNA, 19 nt, Artificial Sequence
  Description of Artificial Sequence: Synthetic oligonucleotide
  Sense strand starting at position 3291 of SEQ ID NO: 2453
aggaauuuaucagagcaga

SEQ ID NO: 190243 - RNA, 19 nt, Artificial Sequence
  Description of Artificial Sequence: Synthetic oligonucleotide
  Antisense strand to SEQ ID NO: 190242
ucugcucugauaaauuccu

SEQ ID NO: 190244 - RNA, 19 nt, Artificial Sequence
  Description of Artificial Sequence: Synthetic oligonucleotide
  Sense strand starting at position 3289 of SEQ ID NO: 2453
cuaggaauuuaucagagca

SEQ ID NO: 190245 - RNA, 19 nt, Artificial Sequence
  Description of Artificial Sequence: Synthetic oligonucleotide
  Antisense strand to SEQ ID NO: 190244
ugcucugauaaauuccuag

SEQ ID NO: 190246 - RNA, 19 nt, Artificial Sequence
  Description of Artificial Sequence: Synthetic oligonucleotide
  Sense strand starting at position 3281 of SEQ ID NO: 2453
gcccaagacuaggaauuua

SEQ ID NO: 190247 - RNA, 19 nt, Artificial Sequence
  Description of Artificial Sequence: Synthetic oligonucleotide
  Antisense strand to SEQ ID NO: 190246
uaaauuccuagucuugggc

SEQ ID NO: 190248 - RNA, 19 nt, Artificial Sequence
  Description of Artificial Sequence: Synthetic oligonucleotide
  Sense strand starting at position 3258 of SEQ ID NO: 2453
uggugaugugcgaguccca

SEQ ID NO: 190249 - RNA, 19 nt, Artificial Sequence
  Description of Artificial Sequence: Synthetic oligonucleotide
  Antisense strand to SEQ ID NO: 190248
ugggacucgcacaucacca

SEQ ID NO: 190250 - RNA, 19 nt, Artificial Sequence
  Description of Artificial Sequence: Synthetic oligonucleotide
  Sense strand starting at position 3155 of SEQ ID NO: 2453
ggauauaguugugcuacua

SEQ ID NO: 190251 - RNA, 19 nt, Artificial Sequence
  Description of Artificial Sequence: Synthetic oligonucleotide
  Antisense strand to SEQ ID NO: 190250
uaguagcacaacuauaucc

SEQ ID NO: 190252 - RNA, 19 nt, Artificial Sequence
  Description of Artificial Sequence: Synthetic oligonucleotide
  Sense strand starting at position 3148 of SEQ ID NO: 2453
ggguaaaggauauaguugu

SEQ ID NO: 190253 - RNA, 19 nt, Artificial Sequence
  Description of Artificial Sequence: Synthetic oligonucleotide
  Antisense strand to SEQ ID NO: 190252
acaacuauauccuuuaccc

SEQ ID NO: 190254 - RNA, 19 nt, Artificial Sequence
  Description of Artificial Sequence: Synthetic oligonucleotide
  Sense strand starting at position 3110 of SEQ ID NO: 2453
gcagaacucuaauuaggug

SEQ ID NO: 190255 - RNA, 19 nt, Artificial Sequence
  Description of Artificial Sequence: Synthetic oligonucleotide
  Antisense strand to SEQ ID NO: 190254
caccuaauuagaguucugc

SEQ ID NO: 190256 - RNA, 19 nt, Artificial Sequence
  Description of Artificial Sequence: Synthetic oligonucleotide
  Sense strand starting at position 2419 of SEQ ID NO: 2453
guguuucuuugauuucuua

SEQ ID NO: 190257 - RNA, 19 nt, Artificial Sequence
  Description of Artificial Sequence: Synthetic oligonucleotide
  Antisense strand to SEQ ID NO: 190256
uaagaaaucaaagaaacac

SEQ ID NO: 190258 - RNA, 19 nt, Artificial Sequence
  Description of Artificial Sequence: Synthetic oligonucleotide
  Sense strand starting at position 2394 of SEQ ID NO: 2453
agaagugagauugggcuuu

SEQ ID NO: 190259 - RNA, 19 nt, Artificial Sequence
  Description of Artificial Sequence: Synthetic oligonucleotide
  Antisense strand to SEQ ID NO: 190258
aaagcccaaucucacuucu

SEQ ID NO: 190260 - RNA, 19 nt, Artificial Sequence
  Description of Artificial Sequence: Synthetic oligonucleotide
  Sense strand starting at position 2352 of SEQ ID NO: 2453
gcaugcaauguagaaugau

SEQ ID NO: 190261 - RNA, 19 nt, Artificial Sequence
  Description of Artificial Sequence: Synthetic oligonucleotide
  Antisense strand to SEQ ID NO: 190260
aucauucuacauugcaugc

SEQ ID NO: 190262 - RNA, 19 nt, Artificial Sequence
  Description of Artificial Sequence: Synthetic oligonucleotide
  Sense strand starting at position 2348 of SEQ ID NO: 2453
cuaagcaugcaauguagaa

SEQ ID NO: 190263 - RNA, 19 nt, Artificial Sequence
  Description of Artificial Sequence: Synthetic oligonucleotide
  Antisense strand to SEQ ID NO: 190262
uucuacauugcaugcuuag

SEQ ID NO: 190264 - RNA, 19 nt, Artificial Sequence
  Description of Artificial Sequence: Synthetic oligonucleotide
  Sense strand starting at position 2284 of SEQ ID NO: 2453
uugcuuaaugaguaaaucu

SEQ ID NO: 190265 - RNA, 19 nt, Artificial Sequence
  Description of Artificial Sequence: Synthetic oligonucleotide
  Antisense strand to SEQ ID NO: 190264
agauuuacucauuaagcaa

SEQ ID NO: 190266 - RNA, 19 nt, Artificial Sequence
  Description of Artificial Sequence: Synthetic oligonucleotide
  Sense strand starting at position 2283 of SEQ ID NO: 2453
uuugcuuaaugaguaaauc

SEQ ID NO: 190267 - RNA, 19 nt, Artificial Sequence
  Description of Artificial Sequence: Synthetic oligonucleotide
  Antisense strand to SEQ ID NO: 190266
gauuuacucauuaagcaaa

SEQ ID NO: 190268 - RNA, 19 nt, Artificial Sequence
  Description of Artificial Sequence: Synthetic oligonucleotide
  Sense strand starting at position 2274 of SEQ ID NO: 2453
accaaaguguuugcuuaau

SEQ ID NO: 190269 - RNA, 19 nt, Artificial Sequence
  Description of Artificial Sequence: Synthetic oligonucleotide
  Antisense strand to SEQ ID NO: 190268
auuaagcaaacacuuuggu

SEQ ID NO: 190270 - RNA, 19 nt, Artificial Sequence
  Description of Artificial Sequence: Synthetic oligonucleotide
  Sense strand starting at position 2250 of SEQ ID NO: 2453
ucaguaagcgcucaauuua

SEQ ID NO: 190271 - RNA, 19 nt, Artificial Sequence
  Description of Artificial Sequence: Synthetic oligonucleotide
  Antisense strand to SEQ ID NO: 190270
uaaauugagcgcuuacuga

SEQ ID NO: 190272 - RNA, 19 nt, Artificial Sequence
  Description of Artificial Sequence: Synthetic oligonucleotide
  Sense strand starting at position 2054 of SEQ ID NO: 2453
agauguaguuccucuauga

SEQ ID NO: 190273 - RNA, 19 nt, Artificial Sequence
  Description of Artificial Sequence: Synthetic oligonucleotide
  Antisense strand to SEQ ID NO: 190272
ucauagaggaacuacaucu

SEQ ID NO: 190274 - RNA, 19 nt, Artificial Sequence
  Description of Artificial Sequence: Synthetic oligonucleotide
  Sense strand starting at position 2045 of SEQ ID NO: 2453
gauucuggaagauguaguu

SEQ ID NO: 190275 - RNA, 19 nt, Artificial Sequence
  Description of Artificial Sequence: Synthetic oligonucleotide
  Antisense strand to SEQ ID NO: 190274
aacuacaucuuccagaauc

SEQ ID NO: 190276 - RNA, 19 nt, Artificial Sequence
  Description of Artificial Sequence: Synthetic oligonucleotide
  Sense strand starting at position 2041 of SEQ ID NO: 2453
cgaggauucuggaagaugu

SEQ ID NO: 190277 - RNA, 19 nt, Artificial Sequence
  Description of Artificial Sequence: Synthetic oligonucleotide
  Antisense strand to SEQ ID NO: 190276
acaucuuccagaauccucg

SEQ ID NO: 190278 - RNA, 19 nt, Artificial Sequence
  Description of Artificial Sequence: Synthetic oligonucleotide
  Sense strand starting at position 1817 of SEQ ID NO: 2453
cgggucuaguuaccagaga

SEQ ID NO: 190279 - RNA, 19 nt, Artificial Sequence
  Description of Artificial Sequence: Synthetic oligonucleotide
  Antisense strand to SEQ ID NO: 190278
ucucugguaacuagacccg

SEQ ID NO: 190280 - RNA, 19 nt, Artificial Sequence
  Description of Artificial Sequence: Synthetic oligonucleotide
  Sense strand starting at position 1116 of SEQ ID NO: 2453
aggaauccgcaccgauuau

SEQ ID NO: 190281 - RNA, 19 nt, Artificial Sequence
  Description of Artificial Sequence: Synthetic oligonucleotide
  Antisense strand to SEQ ID NO: 190280
auaaucggugcggauuccu

SEQ ID NO: 190282 - RNA, 19 nt, Artificial Sequence
  Description of Artificial Sequence: Synthetic oligonucleotide
  Sense strand starting at position 927 of SEQ ID NO: 2453
acgcuauagagauagcaaa

SEQ ID NO: 190283 - RNA, 19 nt, Artificial Sequence
  Description of Artificial Sequence: Synthetic oligonucleotide
  Antisense strand to SEQ ID NO: 190282
uuugcuaucucuauagcgu

SEQ ID NO: 190284 - RNA, 19 nt, Artificial Sequence
  Description of Artificial Sequence: Synthetic oligonucleotide
  Sense strand starting at position 921 of SEQ ID NO: 2453
aguuguacgcuauagagau

SEQ ID NO: 190285 - RNA, 19 nt, Artificial Sequence
  Description of Artificial Sequence: Synthetic oligonucleotide
  Antisense strand to SEQ ID NO: 190284
aucucuauagcguacaacu

SEQ ID NO: 190286 - RNA, 19 nt, Artificial Sequence
  Description of Artificial Sequence: Synthetic oligonucleotide
  Sense strand starting at position 919 of SEQ ID NO: 2453
caaguuguacgcuauagag

SEQ ID NO: 190287 - RNA, 19 nt, Artificial Sequence
  Description of Artificial Sequence: Synthetic oligonucleotide
  Antisense strand to SEQ ID NO: 190286
cucuauagcguacaacuug

SEQ ID NO: 190288 - RNA, 19 nt, Artificial Sequence
  Description of Artificial Sequence: Synthetic oligonucleotide
  Sense strand starting at position 903 of SEQ ID NO: 2453
gccuguaaguaacucacaa

SEQ ID NO: 190289 - RNA, 19 nt, Artificial Sequence
  Description of Artificial Sequence: Synthetic oligonucleotide
  Antisense strand to SEQ ID NO: 190288
uugugaguuacuuacaggc

SEQ ID NO: 190290 - RNA, 19 nt, Artificial Sequence
  Description of Artificial Sequence: Synthetic oligonucleotide
  Sense strand starting at position 762 of SEQ ID NO: 2453
aaaugugaguggcuggaaa

SEQ ID NO: 190291 - RNA, 19 nt, Artificial Sequence
  Description of Artificial Sequence: Synthetic oligonucleotide
  Antisense strand to SEQ ID NO: 190290
uuuccagccacucacauuu

SEQ ID NO: 190292 - RNA, 19 nt, Artificial Sequence
  Description of Artificial Sequence: Synthetic oligonucleotide
  Sense strand starting at position 535 of SEQ ID NO: 2453
ucaugauagcgacaucaau

SEQ ID NO: 190293 - RNA, 19 nt, Artificial Sequence
  Description of Artificial Sequence: Synthetic oligonucleotide
  Antisense strand to SEQ ID NO: 190292
auugaugucgcuaucauga

SEQ ID NO: 190294 - RNA, 19 nt, Artificial Sequence
  Description of Artificial Sequence: Synthetic oligonucleotide
  Sense strand starting at position 447 of SEQ ID NO: 2453
aucccagauccauguucuu

SEQ ID NO: 190295 - RNA, 19 nt, Artificial Sequence
  Description of Artificial Sequence: Synthetic oligonucleotide
  Antisense strand to SEQ ID NO: 190294
aagaacauggaucugggau

SEQ ID NO: 190296 - RNA, 19 nt, Artificial Sequence
  Description of Artificial Sequence: Synthetic oligonucleotide
  Sense strand starting at position 430 of SEQ ID NO: 2453
gaagccaggucuuccaaau

SEQ ID NO: 190297 - RNA, 19 nt, Artificial Sequence
  Description of Artificial Sequence: Synthetic oligonucleotide
  Antisense strand to SEQ ID NO: 190296
auuuggaagaccuggcuuc

SEQ ID NO: 190298 - RNA, 19 nt, Artificial Sequence
  Description of Artificial Sequence: Synthetic oligonucleotide
  Sense strand starting at position 297 of SEQ ID NO: 2453
ucuuucuuagagggcuuua

SEQ ID NO: 190299 - RNA, 19 nt, Artificial Sequence
  Description of Artificial Sequence: Synthetic oligonucleotide
  Antisense strand to SEQ ID NO: 190298
uaaagcccucuaagaaaga

SEQ ID NO: 190300 - RNA, 19 nt, Artificial Sequence
  Description of Artificial Sequence: Synthetic oligonucleotide
  Sense strand starting at position 279 of SEQ ID NO: 2453
uggagaacauucccgaacu

SEQ ID NO: 190301 - RNA, 19 nt, Artificial Sequence
  Description of Artificial Sequence: Synthetic oligonucleotide
  Antisense strand to SEQ ID NO: 190300
aguucgggaauguucucca

SEQ ID NO: 190302 - RNA, 19 nt, Artificial Sequence
  Description of Artificial Sequence: Synthetic oligonucleotide
  Sense strand starting at position 141 of SEQ ID NO: 2453
uggguuuauuacucaagca

SEQ ID NO: 190303 - RNA, 19 nt, Artificial Sequence
  Description of Artificial Sequence: Synthetic oligonucleotide
  Antisense strand to SEQ ID NO: 190302
ugcuugaguaauaaaccca

SEQ ID NO: 190304 - RNA, 19 nt, Artificial Sequence
  Description of Artificial Sequence: Synthetic oligonucleotide
  Sense strand starting at position 130 of SEQ ID NO: 2453
gaaucuguuaguggguuua

SEQ ID NO: 190305 - RNA, 19 nt, Artificial Sequence
  Description of Artificial Sequence: Synthetic oligonucleotide
  Antisense strand to SEQ ID NO: 190304
uaaacccacuaacagauuc

SEQ ID NO: 190306 - RNA, 19 nt, Artificial Sequence
  Description of Artificial Sequence: Synthetic oligonucleotide
  Sense strand starting at position 3929 of SEQ ID NO: 2454
ccuggucaucuuugaagac

SEQ ID NO: 190307 - RNA, 19 nt, Artificial Sequence
  Description of Artificial Sequence: Synthetic oligonucleotide
  Antisense strand to SEQ ID NO: 190306
gucuucaaagaugaccagg

SEQ ID NO: 190308 - RNA, 19 nt, Artificial Sequence
  Description of Artificial Sequence: Synthetic oligonucleotide
  Sense strand starting at position 3925 of SEQ ID NO: 2454
guugccuggucaucuuuga

SEQ ID NO: 190309 - RNA, 19 nt, Artificial Sequence
  Description of Artificial Sequence: Synthetic oligonucleotide
  Antisense strand to SEQ ID NO: 190308
ucaaagaugaccaggcaac

SEQ ID NO: 190310 - RNA, 19 nt, Artificial Sequence
  Description of Artificial Sequence: Synthetic oligonucleotide
  Sense strand starting at position 3919 of SEQ ID NO: 2454
ugcuuuguugccuggucau

SEQ ID NO: 190311 - RNA, 19 nt, Artificial Sequence
  Description of Artificial Sequence: Synthetic oligonucleotide
  Antisense strand to SEQ ID NO: 190310
augaccaggcaacaaagca

SEQ ID NO: 190312 - RNA, 19 nt, Artificial Sequence
  Description of Artificial Sequence: Synthetic oligonucleotide
  Sense strand starting at position 3890 of SEQ ID NO: 2454
gcuugcuugcucuuaccua

SEQ ID NO: 190313 - RNA, 19 nt, Artificial Sequence
  Description of Artificial Sequence: Synthetic oligonucleotide
  Antisense strand to SEQ ID NO: 190312
uagguaagagcaagcaagc

SEQ ID NO: 190314 - RNA, 19 nt, Artificial Sequence
  Description of Artificial Sequence: Synthetic oligonucleotide
  Sense strand starting at position 3661 of SEQ ID NO: 2454
ucuuguauguaucuuaaug

SEQ ID NO: 190315 - RNA, 19 nt, Artificial Sequence
  Description of Artificial Sequence: Synthetic oligonucleotide
  Antisense strand to SEQ ID NO: 190314
cauuaagauacauacaaga

SEQ ID NO: 190316 - RNA, 19 nt, Artificial Sequence
  Description of Artificial Sequence: Synthetic oligonucleotide
  Sense strand starting at position 3649 of SEQ ID NO: 2454
ugcuuuggauauucuugua

SEQ ID NO: 190317 - RNA, 19 nt, Artificial Sequence
  Description of Artificial Sequence: Synthetic oligonucleotide
  Antisense strand to SEQ ID NO: 190316
uacaagaauauccaaagca

SEQ ID NO: 190318 - RNA, 19 nt, Artificial Sequence
  Description of Artificial Sequence: Synthetic oligonucleotide
  Sense strand starting at position 3646 of SEQ ID NO: 2454
cugugcuuuggauauucuu

SEQ ID NO: 190319 - RNA, 19 nt, Artificial Sequence
  Description of Artificial Sequence: Synthetic oligonucleotide
  Antisense strand to SEQ ID NO: 190318
aagaauauccaaagcacag

SEQ ID NO: 190320 - RNA, 19 nt, Artificial Sequence
  Description of Artificial Sequence: Synthetic oligonucleotide
  Sense strand starting at position 3642 of SEQ ID NO: 2454
aagacugugcuuuggauau

SEQ ID NO: 190321 - RNA, 19 nt, Artificial Sequence
  Description of Artificial Sequence: Synthetic oligonucleotide
  Antisense strand to SEQ ID NO: 190320
auauccaaagcacagucuu

SEQ ID NO: 190322 - RNA, 19 nt, Artificial Sequence
  Description of Artificial Sequence: Synthetic oligonucleotide
  Sense strand starting at position 3640 of SEQ ID NO: 2454
caaagacugugcuuuggau

SEQ ID NO: 190323 - RNA, 19 nt, Artificial Sequence
  Description of Artificial Sequence: Synthetic oligonucleotide
  Antisense strand to SEQ ID NO: 190322
auccaaagcacagucuuug

SEQ ID NO: 190324 - RNA, 19 nt, Artificial Sequence
  Description of Artificial Sequence: Synthetic oligonucleotide
  Sense strand starting at position 3570 of SEQ ID NO: 2454
ugaauauaccacugguuac

SEQ ID NO: 190325 - RNA, 19 nt, Artificial Sequence
  Description of Artificial Sequence: Synthetic oligonucleotide
  Antisense strand to SEQ ID NO: 190324
guaaccagugguauauuca

SEQ ID NO: 190326 - RNA, 19 nt, Artificial Sequence
  Description of Artificial Sequence: Synthetic oligonucleotide
  Sense strand starting at position 3404 of SEQ ID NO: 2454
cccuaagugggauauugua

SEQ ID NO: 190327 - RNA, 19 nt, Artificial Sequence
  Description of Artificial Sequence: Synthetic oligonucleotide
  Antisense strand to SEQ ID NO: 190326
uacaauaucccacuuaggg

SEQ ID NO: 190328 - RNA, 19 nt, Artificial Sequence
  Description of Artificial Sequence: Synthetic oligonucleotide
  Sense strand starting at position 3401 of SEQ ID NO: 2454
caucccuaagugggauauu

SEQ ID NO: 190329 - RNA, 19 nt, Artificial Sequence
  Description of Artificial Sequence: Synthetic oligonucleotide
  Antisense strand to SEQ ID NO: 190328
aauaucccacuuagggaug

SEQ ID NO: 190330 - RNA, 19 nt, Artificial Sequence
  Description of Artificial Sequence: Synthetic oligonucleotide
  Sense strand starting at position 3354 of SEQ ID NO: 2454
gcuagucauucucuugcuu

SEQ ID NO: 190331 - RNA, 19 nt, Artificial Sequence
  Description of Artificial Sequence: Synthetic oligonucleotide
  Antisense strand to SEQ ID NO: 190330
aagcaagagaaugacuagc

SEQ ID NO: 190332 - RNA, 19 nt, Artificial Sequence
  Description of Artificial Sequence: Synthetic oligonucleotide
  Sense strand starting at position 3350 of SEQ ID NO: 2454
uugugcuagucauucucuu

SEQ ID NO: 190333 - RNA, 19 nt, Artificial Sequence
  Description of Artificial Sequence: Synthetic oligonucleotide
  Antisense strand to SEQ ID NO: 190332
aagagaaugacuagcacaa

SEQ ID NO: 190334 - RNA, 19 nt, Artificial Sequence
  Description of Artificial Sequence: Synthetic oligonucleotide
  Sense strand starting at position 3327 of SEQ ID NO: 2454
agaacuaguuuccugaacu

SEQ ID NO: 190335 - RNA, 19 nt, Artificial Sequence
  Description of Artificial Sequence: Synthetic oligonucleotide
  Antisense strand to SEQ ID NO: 190334
aguucaggaaacuaguucu

SEQ ID NO: 190336 - RNA, 19 nt, Artificial Sequence
  Description of Artificial Sequence: Synthetic oligonucleotide
  Sense strand starting at position 3126 of SEQ ID NO: 2454
guauccuauaagugcuagu

SEQ ID NO: 190337 - RNA, 19 nt, Artificial Sequence
  Description of Artificial Sequence: Synthetic oligonucleotide
  Antisense strand to SEQ ID NO: 190336
acuagcacuuauaggauac

SEQ ID NO: 190338 - RNA, 19 nt, Artificial Sequence
  Description of Artificial Sequence: Synthetic oligonucleotide
  Sense strand starting at position 3122 of SEQ ID NO: 2454
gcauguauccuauaagugc

SEQ ID NO: 190339 - RNA, 19 nt, Artificial Sequence
  Description of Artificial Sequence: Synthetic oligonucleotide
  Antisense strand to SEQ ID NO: 190338
gcacuuauaggauacaugc

SEQ ID NO: 190340 - RNA, 19 nt, Artificial Sequence
  Description of Artificial Sequence: Synthetic oligonucleotide
  Sense strand starting at position 3118 of SEQ ID NO: 2454
auaggcauguauccuauaa

SEQ ID NO: 190341 - RNA, 19 nt, Artificial Sequence
  Description of Artificial Sequence: Synthetic oligonucleotide
  Antisense strand to SEQ ID NO: 190340
uuauaggauacaugccuau

SEQ ID NO: 190342 - RNA, 19 nt, Artificial Sequence
  Description of Artificial Sequence: Synthetic oligonucleotide
  Sense strand starting at position 3085 of SEQ ID NO: 2454
gccaguccuuuguuacauu

SEQ ID NO: 190343 - RNA, 19 nt, Artificial Sequence
  Description of Artificial Sequence: Synthetic oligonucleotide
  Antisense strand to SEQ ID NO: 190342
aauguaacaaaggacuggc

SEQ ID NO: 190344 - RNA, 19 nt, Artificial Sequence
  Description of Artificial Sequence: Synthetic oligonucleotide
  Sense strand starting at position 3083 of SEQ ID NO: 2454
gugccaguccuuuguuaca

SEQ ID NO: 190345 - RNA, 19 nt, Artificial Sequence
  Description of Artificial Sequence: Synthetic oligonucleotide
  Antisense strand to SEQ ID NO: 190344
uguaacaaaggacuggcac

SEQ ID NO: 190346 - RNA, 19 nt, Artificial Sequence
  Description of Artificial Sequence: Synthetic oligonucleotide
  Sense strand starting at position 3081 of SEQ ID NO: 2454
augugccaguccuuuguua

SEQ ID NO: 190347 - RNA, 19 nt, Artificial Sequence
  Description of Artificial Sequence: Synthetic oligonucleotide
  Antisense strand to SEQ ID NO: 190346
uaacaaaggacuggcacau

SEQ ID NO: 190348 - RNA, 19 nt, Artificial Sequence
  Description of Artificial Sequence: Synthetic oligonucleotide
  Sense strand starting at position 2901 of SEQ ID NO: 2454
cuauucuagugcuccuauu

SEQ ID NO: 190349 - RNA, 19 nt, Artificial Sequence
  Description of Artificial Sequence: Synthetic oligonucleotide
  Antisense strand to SEQ ID NO: 190348
aauaggagcacuagaauag

SEQ ID NO: 190350 - RNA, 19 nt, Artificial Sequence
  Description of Artificial Sequence: Synthetic oligonucleotide
  Sense strand starting at position 2837 of SEQ ID NO: 2454
uugagaaauucugcaaagg

SEQ ID NO: 190351 - RNA, 19 nt, Artificial Sequence
  Description of Artificial Sequence: Synthetic oligonucleotide
  Antisense strand to SEQ ID NO: 190350
ccuuugcagaauuucucaa

SEQ ID NO: 190352 - RNA, 19 nt, Artificial Sequence
  Description of Artificial Sequence: Synthetic oligonucleotide
  Sense strand starting at position 2826 of SEQ ID NO: 2454
ugauguuacccuugagaaa

SEQ ID NO: 190353 - RNA, 19 nt, Artificial Sequence
  Description of Artificial Sequence: Synthetic oligonucleotide
  Antisense strand to SEQ ID NO: 190352
uuucucaaggguaacauca

SEQ ID NO: 190354 - RNA, 19 nt, Artificial Sequence
  Description of Artificial Sequence: Synthetic oligonucleotide
  Sense strand starting at position 2809 of SEQ ID NO: 2454
gacagaggucauuaugcug

SEQ ID NO: 190355 - RNA, 19 nt, Artificial Sequence
  Description of Artificial Sequence: Synthetic oligonucleotide
  Antisense strand to SEQ ID NO: 190354
cagcauaaugaccucuguc

SEQ ID NO: 190356 - RNA, 19 nt, Artificial Sequence
  Description of Artificial Sequence: Synthetic oligonucleotide
  Sense strand starting at position 2736 of SEQ ID NO: 2454
uuuaguuucccaggucaga

SEQ ID NO: 190357 - RNA, 19 nt, Artificial Sequence
  Description of Artificial Sequence: Synthetic oligonucleotide
  Antisense strand to SEQ ID NO: 190356
ucugaccugggaaacuaaa

SEQ ID NO: 190358 - RNA, 19 nt, Artificial Sequence
  Description of Artificial Sequence: Synthetic oligonucleotide
  Sense strand starting at position 2714 of SEQ ID NO: 2454
acccuugcuccaugaagau

SEQ ID NO: 190359 - RNA, 19 nt, Artificial Sequence
  Description of Artificial Sequence: Synthetic oligonucleotide
  Antisense strand to SEQ ID NO: 190358
aucuucauggagcaagggu

SEQ ID NO: 190360 - RNA, 19 nt, Artificial Sequence
  Description of Artificial Sequence: Synthetic oligonucleotide
  Sense strand starting at position 2546 of SEQ ID NO: 2454
guacuuuacuaggaccaaa

SEQ ID NO: 190361 - RNA, 19 nt, Artificial Sequence
  Description of Artificial Sequence: Synthetic oligonucleotide
  Antisense strand to SEQ ID NO: 190360
uuugguccuaguaaaguac

SEQ ID NO: 190362 - RNA, 19 nt, Artificial Sequence
  Description of Artificial Sequence: Synthetic oligonucleotide
  Sense strand starting at position 2545 of SEQ ID NO: 2454
uguacuuuacuaggaccaa

SEQ ID NO: 190363 - RNA, 19 nt, Artificial Sequence
  Description of Artificial Sequence: Synthetic oligonucleotide
  Antisense strand to SEQ ID NO: 190362
uugguccuaguaaaguaca

SEQ ID NO: 190364 - RNA, 19 nt, Artificial Sequence
  Description of Artificial Sequence: Synthetic oligonucleotide
  Sense strand starting at position 2416 of SEQ ID NO: 2454
ugguuauagacagguacau

SEQ ID NO: 190365 - RNA, 19 nt, Artificial Sequence
  Description of Artificial Sequence: Synthetic oligonucleotide
  Antisense strand to SEQ ID NO: 190364
auguaccugucuauaacca

SEQ ID NO: 190366 - RNA, 19 nt, Artificial Sequence
  Description of Artificial Sequence: Synthetic oligonucleotide
  Sense strand starting at position 2407 of SEQ ID NO: 2454
gcagguccaugguuauaga

SEQ ID NO: 190367 - RNA, 19 nt, Artificial Sequence
  Description of Artificial Sequence: Synthetic oligonucleotide
  Antisense strand to SEQ ID NO: 190366
ucuauaaccauggaccugc

SEQ ID NO: 190368 - RNA, 19 nt, Artificial Sequence
  Description of Artificial Sequence: Synthetic oligonucleotide
  Sense strand starting at position 2404 of SEQ ID NO: 2454
gaggcagguccaugguuau

SEQ ID NO: 190369 - RNA, 19 nt, Artificial Sequence
  Description of Artificial Sequence: Synthetic oligonucleotide
  Antisense strand to SEQ ID NO: 190368
auaaccauggaccugccuc

SEQ ID NO: 190370 - RNA, 19 nt, Artificial Sequence
  Description of Artificial Sequence: Synthetic oligonucleotide
  Sense strand starting at position 2356 of SEQ ID NO: 2454
gugcgcaucgagugaauca

SEQ ID NO: 190371 - RNA, 19 nt, Artificial Sequence
  Description of Artificial Sequence: Synthetic oligonucleotide
  Antisense strand to SEQ ID NO: 190370
ugauucacucgaugcgcac

SEQ ID NO: 190372 - RNA, 19 nt, Artificial Sequence
  Description of Artificial Sequence: Synthetic oligonucleotide
  Sense strand starting at position 1307 of SEQ ID NO: 2454
ggaacuuagucugaacuaa

SEQ ID NO: 190373 - RNA, 19 nt, Artificial Sequence
  Description of Artificial Sequence: Synthetic oligonucleotide
  Antisense strand to SEQ ID NO: 190372
uuaguucagacuaaguucc

SEQ ID NO: 190374 - RNA, 19 nt, Artificial Sequence
  Description of Artificial Sequence: Synthetic oligonucleotide
  Sense strand starting at position 1306 of SEQ ID NO: 2454
cggaacuuagucugaacua

SEQ ID NO: 190375 - RNA, 19 nt, Artificial Sequence
  Description of Artificial Sequence: Synthetic oligonucleotide
  Antisense strand to SEQ ID NO: 190374
uaguucagacuaaguuccg

SEQ ID NO: 190376 - RNA, 19 nt, Artificial Sequence
  Description of Artificial Sequence: Synthetic oligonucleotide
  Sense strand starting at position 1167 of SEQ ID NO: 2454
guguuauuaguucagguug

SEQ ID NO: 190377 - RNA, 19 nt, Artificial Sequence
  Description of Artificial Sequence: Synthetic oligonucleotide
  Antisense strand to SEQ ID NO: 190376
caaccugaacuaauaacac

SEQ ID NO: 190378 - RNA, 19 nt, Artificial Sequence
  Description of Artificial Sequence: Synthetic oligonucleotide
  Sense strand starting at position 1165 of SEQ ID NO: 2454
ucguguuauuaguucaggu

SEQ ID NO: 190379 - RNA, 19 nt, Artificial Sequence
  Description of Artificial Sequence: Synthetic oligonucleotide
  Antisense strand to SEQ ID NO: 190378
accugaacuaauaacacga

SEQ ID NO: 190380 - RNA, 19 nt, Artificial Sequence
  Description of Artificial Sequence: Synthetic oligonucleotide
  Sense strand starting at position 1139 of SEQ ID NO: 2454
agggauugguggcacuaca

SEQ ID NO: 190381 - RNA, 19 nt, Artificial Sequence
  Description of Artificial Sequence: Synthetic oligonucleotide
  Antisense strand to SEQ ID NO: 190380
uguagugccaccaaucccu

SEQ ID NO: 190382 - RNA, 19 nt, Artificial Sequence
  Description of Artificial Sequence: Synthetic oligonucleotide
  Sense strand starting at position 550 of SEQ ID NO: 2454
auguguccuggccacagaa

SEQ ID NO: 190383 - RNA, 19 nt, Artificial Sequence
  Description of Artificial Sequence: Synthetic oligonucleotide
  Antisense strand to SEQ ID NO: 190382
uucuguggccaggacacau

SEQ ID NO: 190384 - RNA, 19 nt, Artificial Sequence
  Description of Artificial Sequence: Synthetic oligonucleotide
  Sense strand starting at position 36 of SEQ ID NO: 2454
gaggucacucuuggacaca

SEQ ID NO: 190385 - RNA, 19 nt, Artificial Sequence
  Description of Artificial Sequence: Synthetic oligonucleotide
  Antisense strand to SEQ ID NO: 190384
uguguccaagagugaccuc

SEQ ID NO: 190386 - RNA, 19 nt, Artificial Sequence
  Description of Artificial Sequence: Synthetic oligonucleotide
  Sense strand starting at position 53 of SEQ ID NO: 2455
aggugucacuuagaauuua

SEQ ID NO: 190387 - RNA, 19 nt, Artificial Sequence
  Description of Artificial Sequence: Synthetic oligonucleotide
  Antisense strand to SEQ ID NO: 190386
uaaauucuaagugacaccu

SEQ ID NO: 190388 - RNA, 19 nt, Artificial Sequence
  Description of Artificial Sequence: Synthetic oligonucleotide
  Sense strand starting at position 392 of SEQ ID NO: 2455
aguauaugguuucuaagaa

SEQ ID NO: 190389 - RNA, 19 nt, Artificial Sequence
  Description of Artificial Sequence: Synthetic oligonucleotide
  Antisense strand to SEQ ID NO: 190388
uucuuagaaaccauauacu

SEQ ID NO: 190390 - RNA, 19 nt, Artificial Sequence
  Description of Artificial Sequence: Synthetic oligonucleotide
  Sense strand starting at position 457 of SEQ ID NO: 2455
acuaaugaguuaucuuaag

SEQ ID NO: 190391 - RNA, 19 nt, Artificial Sequence
  Description of Artificial Sequence: Synthetic oligonucleotide
  Antisense strand to SEQ ID NO: 190390
cuuaagauaacucauuagu

SEQ ID NO: 190392 - RNA, 19 nt, Artificial Sequence
  Description of Artificial Sequence: Synthetic oligonucleotide
  Sense strand starting at position 509 of SEQ ID NO: 2455
accaguugugacuaaucag

SEQ ID NO: 190393 - RNA, 19 nt, Artificial Sequence
  Description of Artificial Sequence: Synthetic oligonucleotide
  Antisense strand to SEQ ID NO: 190392
cugauuagucacaacuggu

SEQ ID NO: 190394 - RNA, 19 nt, Artificial Sequence
  Description of Artificial Sequence: Synthetic oligonucleotide
  Sense strand starting at position 512 of SEQ ID NO: 2455
aguugugacuaaucaguac

SEQ ID NO: 190395 - RNA, 19 nt, Artificial Sequence
  Description of Artificial Sequence: Synthetic oligonucleotide
  Antisense strand to SEQ ID NO: 190394
guacugauuagucacaacu

SEQ ID NO: 190396 - RNA, 19 nt, Artificial Sequence
  Description of Artificial Sequence: Synthetic oligonucleotide
  Sense strand starting at position 539 of SEQ ID NO: 2455
aguguagugacauacauga

SEQ ID NO: 190397 - RNA, 19 nt, Artificial Sequence
  Description of Artificial Sequence: Synthetic oligonucleotide
  Antisense strand to SEQ ID NO: 190396
ucauguaugucacuacacu

SEQ ID NO: 190398 - RNA, 19 nt, Artificial Sequence
  Description of Artificial Sequence: Synthetic oligonucleotide
  Sense strand starting at position 541 of SEQ ID NO: 2455
uguagugacauacaugagu

SEQ ID NO: 190399 - RNA, 19 nt, Artificial Sequence
  Description of Artificial Sequence: Synthetic oligonucleotide
  Antisense strand to SEQ ID NO: 190398
acucauguaugucacuaca

SEQ ID NO: 190400 - RNA, 19 nt, Artificial Sequence
  Description of Artificial Sequence: Synthetic oligonucleotide
  Sense strand starting at position 546 of SEQ ID NO: 2455
ugacauacaugaguucuaa

SEQ ID NO: 190401 - RNA, 19 nt, Artificial Sequence
  Description of Artificial Sequence: Synthetic oligonucleotide
  Antisense strand to SEQ ID NO: 190400
uuagaacucauguauguca

SEQ ID NO: 190402 - RNA, 19 nt, Artificial Sequence
  Description of Artificial Sequence: Synthetic oligonucleotide
  Sense strand starting at position 670 of SEQ ID NO: 2455
ggugguauucucugaauua

SEQ ID NO: 190403 - RNA, 19 nt, Artificial Sequence
  Description of Artificial Sequence: Synthetic oligonucleotide
  Antisense strand to SEQ ID NO: 190402
uaauucagagaauaccacc

SEQ ID NO: 190404 - RNA, 19 nt, Artificial Sequence
  Description of Artificial Sequence: Synthetic oligonucleotide
  Sense strand starting at position 687 of SEQ ID NO: 2455
uaucauaucuggcugggau

SEQ ID NO: 190405 - RNA, 19 nt, Artificial Sequence
  Description of Artificial Sequence: Synthetic oligonucleotide
  Antisense strand to SEQ ID NO: 190404
aucccagccagauaugaua

SEQ ID NO: 190406 - RNA, 19 nt, Artificial Sequence
  Description of Artificial Sequence: Synthetic oligonucleotide
  Sense strand starting at position 688 of SEQ ID NO: 2455
aucauaucuggcugggauu

SEQ ID NO: 190407 - RNA, 19 nt, Artificial Sequence
  Description of Artificial Sequence: Synthetic oligonucleotide
  Antisense strand to SEQ ID NO: 190406
aaucccagccagauaugau

SEQ ID NO: 190408 - RNA, 19 nt, Artificial Sequence
  Description of Artificial Sequence: Synthetic oligonucleotide
  Sense strand starting at position 689 of SEQ ID NO: 2455
ucauaucuggcugggauua

SEQ ID NO: 190409 - RNA, 19 nt, Artificial Sequence
  Description of Artificial Sequence: Synthetic oligonucleotide
  Antisense strand to SEQ ID NO: 190408
uaaucccagccagauauga

SEQ ID NO: 190410 - RNA, 19 nt, Artificial Sequence
  Description of Artificial Sequence: Synthetic oligonucleotide
  Sense strand starting at position 690 of SEQ ID NO: 2455
cauaucuggcugggauuau

SEQ ID NO: 190411 - RNA, 19 nt, Artificial Sequence
  Description of Artificial Sequence: Synthetic oligonucleotide
  Antisense strand to SEQ ID NO: 190410
auaaucccagccagauaug

SEQ ID NO: 190412 - RNA, 19 nt, Artificial Sequence
  Description of Artificial Sequence: Synthetic oligonucleotide
  Sense strand starting at position 782 of SEQ ID NO: 2455
caaacauuucgcugcugua

SEQ ID NO: 190413 - RNA, 19 nt, Artificial Sequence
  Description of Artificial Sequence: Synthetic oligonucleotide
  Antisense strand to SEQ ID NO: 190412
uacagcagcgaaauguuug

SEQ ID NO: 190414 - RNA, 19 nt, Artificial Sequence
  Description of Artificial Sequence: Synthetic oligonucleotide
  Sense strand starting at position 972 of SEQ ID NO: 2455
gcagauauacgguaucuaa

SEQ ID NO: 190415 - RNA, 19 nt, Artificial Sequence
  Description of Artificial Sequence: Synthetic oligonucleotide
  Antisense strand to SEQ ID NO: 190414
uuagauaccguauaucugc

SEQ ID NO: 190416 - RNA, 19 nt, Artificial Sequence
  Description of Artificial Sequence: Synthetic oligonucleotide
  Sense strand starting at position 975 of SEQ ID NO: 2455
gauauacgguaucuaagau

SEQ ID NO: 190417 - RNA, 19 nt, Artificial Sequence
  Description of Artificial Sequence: Synthetic oligonucleotide
  Antisense strand to SEQ ID NO: 190416
aucuuagauaccguauauc

SEQ ID NO: 190418 - RNA, 19 nt, Artificial Sequence
  Description of Artificial Sequence: Synthetic oligonucleotide
  Sense strand starting at position 1374 of SEQ ID NO: 2455
auuauaugcguguauacau

SEQ ID NO: 190419 - RNA, 19 nt, Artificial Sequence
  Description of Artificial Sequence: Synthetic oligonucleotide
  Antisense strand to SEQ ID NO: 190418
auguauacacgcauauaau

SEQ ID NO: 190420 - RNA, 19 nt, Artificial Sequence
  Description of Artificial Sequence: Synthetic oligonucleotide
  Sense strand starting at position 1409 of SEQ ID NO: 2455
gucaccuaugucuaagcaa

SEQ ID NO: 190421 - RNA, 19 nt, Artificial Sequence
  Description of Artificial Sequence: Synthetic oligonucleotide
  Antisense strand to SEQ ID NO: 190420
uugcuuagacauaggugac

SEQ ID NO: 190422 - RNA, 19 nt, Artificial Sequence
  Description of Artificial Sequence: Synthetic oligonucleotide
  Sense strand starting at position 1417 of SEQ ID NO: 2455
ugucuaagcaagggugaaa

SEQ ID NO: 190423 - RNA, 19 nt, Artificial Sequence
  Description of Artificial Sequence: Synthetic oligonucleotide
  Antisense strand to SEQ ID NO: 190422
uuucacccuugcuuagaca

SEQ ID NO: 190424 - RNA, 19 nt, Artificial Sequence
  Description of Artificial Sequence: Synthetic oligonucleotide
  Sense strand starting at position 2365 of SEQ ID NO: 2455
gcgcgagagacacucguua

SEQ ID NO: 190425 - RNA, 19 nt, Artificial Sequence
  Description of Artificial Sequence: Synthetic oligonucleotide
  Antisense strand to SEQ ID NO: 190424
uaacgagugucucucgcgc

SEQ ID NO: 190426 - RNA, 19 nt, Artificial Sequence
  Description of Artificial Sequence: Synthetic oligonucleotide
  Sense strand starting at position 2376 of SEQ ID NO: 2455
acucguuagcucgcgagga

SEQ ID NO: 190427 - RNA, 19 nt, Artificial Sequence
  Description of Artificial Sequence: Synthetic oligonucleotide
  Antisense strand to SEQ ID NO: 190426
uccucgcgagcuaacgagu

SEQ ID NO: 190428 - RNA, 19 nt, Artificial Sequence
  Description of Artificial Sequence: Synthetic oligonucleotide
  Sense strand starting at position 2502 of SEQ ID NO: 2455
cggguuagccgcgcugauu

SEQ ID NO: 190429 - RNA, 19 nt, Artificial Sequence
  Description of Artificial Sequence: Synthetic oligonucleotide
  Antisense strand to SEQ ID NO: 190428
aaucagcgcggcuaacccg

SEQ ID NO: 190430 - RNA, 19 nt, Artificial Sequence
  Description of Artificial Sequence: Synthetic oligonucleotide
  Sense strand starting at position 2869 of SEQ ID NO: 2455
gcaguucaggaaugaagga

SEQ ID NO: 190431 - RNA, 19 nt, Artificial Sequence
  Description of Artificial Sequence: Synthetic oligonucleotide
  Antisense strand to SEQ ID NO: 190430
uccuucauuccugaacugc

SEQ ID NO: 190432 - RNA, 19 nt, Artificial Sequence
  Description of Artificial Sequence: Synthetic oligonucleotide
  Sense strand starting at position 3187 of SEQ ID NO: 2455
guccuuugaguuugacaca

SEQ ID NO: 190433 - RNA, 19 nt, Artificial Sequence
  Description of Artificial Sequence: Synthetic oligonucleotide
  Antisense strand to SEQ ID NO: 190432
ugugucaaacucaaaggac

SEQ ID NO: 190434 - RNA, 19 nt, Artificial Sequence
  Description of Artificial Sequence: Synthetic oligonucleotide
  Sense strand starting at position 3277 of SEQ ID NO: 2455
acaagauagugccuuauaa

SEQ ID NO: 190435 - RNA, 19 nt, Artificial Sequence
  Description of Artificial Sequence: Synthetic oligonucleotide
  Antisense strand to SEQ ID NO: 190434
uuauaaggcacuaucuugu

SEQ ID NO: 190436 - RNA, 19 nt, Artificial Sequence
  Description of Artificial Sequence: Synthetic oligonucleotide
  Sense strand starting at position 3517 of SEQ ID NO: 2455
ggcguuuaucaacaugaug

SEQ ID NO: 190437 - RNA, 19 nt, Artificial Sequence
  Description of Artificial Sequence: Synthetic oligonucleotide
  Antisense strand to SEQ ID NO: 190436
caucauguugauaaacgcc

SEQ ID NO: 190438 - RNA, 19 nt, Artificial Sequence
  Description of Artificial Sequence: Synthetic oligonucleotide
  Sense strand starting at position 3528 of SEQ ID NO: 2455
acaugaugccuuugagcaa

SEQ ID NO: 190439 - RNA, 19 nt, Artificial Sequence
  Description of Artificial Sequence: Synthetic oligonucleotide
  Antisense strand to SEQ ID NO: 190438
uugcucaaaggcaucaugu

SEQ ID NO: 190440 - RNA, 19 nt, Artificial Sequence
  Description of Artificial Sequence: Synthetic oligonucleotide
  Sense strand starting at position 3532 of SEQ ID NO: 2455
gaugccuuugagcaaaugu

SEQ ID NO: 190441 - RNA, 19 nt, Artificial Sequence
  Description of Artificial Sequence: Synthetic oligonucleotide
  Antisense strand to SEQ ID NO: 190440
acauuugcucaaaggcauc

SEQ ID NO: 190442 - RNA, 19 nt, Artificial Sequence
  Description of Artificial Sequence: Synthetic oligonucleotide
  Sense strand starting at position 3601 of SEQ ID NO: 2455
gcuugacuagccuggaaac

SEQ ID NO: 190443 - RNA, 19 nt, Artificial Sequence
  Description of Artificial Sequence: Synthetic oligonucleotide
  Antisense strand to SEQ ID NO: 190442
guuuccaggcuagucaagc

SEQ ID NO: 190444 - RNA, 19 nt, Artificial Sequence
  Description of Artificial Sequence: Synthetic oligonucleotide
  Sense strand starting at position 3602 of SEQ ID NO: 2455
cuugacuagccuggaaaca

SEQ ID NO: 190445 - RNA, 19 nt, Artificial Sequence
  Description of Artificial Sequence: Synthetic oligonucleotide
  Antisense strand to SEQ ID NO: 190444
uguuuccaggcuagucaag

SEQ ID NO: 190446 - RNA, 19 nt, Artificial Sequence
  Description of Artificial Sequence: Synthetic oligonucleotide
  Sense strand starting at position 3706 of SEQ ID NO: 2455
auagcaguguccuuagaac

SEQ ID NO: 190447 - RNA, 19 nt, Artificial Sequence
  Description of Artificial Sequence: Synthetic oligonucleotide
  Antisense strand to SEQ ID NO: 190446
guucuaaggacacugcuau

SEQ ID NO: 190448 - RNA, 19 nt, Artificial Sequence
  Description of Artificial Sequence: Synthetic oligonucleotide
  Sense strand starting at position 3770 of SEQ ID NO: 2455
uuguuaggugccuagggaa

SEQ ID NO: 190449 - RNA, 19 nt, Artificial Sequence
  Description of Artificial Sequence: Synthetic oligonucleotide
  Antisense strand to SEQ ID NO: 190448
uucccuaggcaccuaacaa

SEQ ID NO: 190450 - RNA, 19 nt, Artificial Sequence
  Description of Artificial Sequence: Synthetic oligonucleotide
  Sense strand starting at position 3839 of SEQ ID NO: 2455
gcaggugagcuacaauaaa

SEQ ID NO: 190451 - RNA, 19 nt, Artificial Sequence
  Description of Artificial Sequence: Synthetic oligonucleotide
  Antisense strand to SEQ ID NO: 190450
uuuauuguagcucaccugc

SEQ ID NO: 190452 - RNA, 19 nt, Artificial Sequence
  Description of Artificial Sequence: Synthetic oligonucleotide
  Sense strand starting at position 3886 of SEQ ID NO: 2455
ggcaaauccagaggagagu

SEQ ID NO: 190453 - RNA, 19 nt, Artificial Sequence
  Description of Artificial Sequence: Synthetic oligonucleotide
  Antisense strand to SEQ ID NO: 190452
acucuccucuggauuugcc

SEQ ID NO: 190454 - RNA, 19 nt, Artificial Sequence
  Description of Artificial Sequence: Synthetic oligonucleotide
  Sense strand starting at position 3892 of SEQ ID NO: 2455
uccagaggagagugugaua

SEQ ID NO: 190455 - RNA, 19 nt, Artificial Sequence
  Description of Artificial Sequence: Synthetic oligonucleotide
  Antisense strand to SEQ ID NO: 190454
uaucacacucuccucugga

SEQ ID NO: 190456 - RNA, 19 nt, Artificial Sequence
  Description of Artificial Sequence: Synthetic oligonucleotide
  Sense strand starting at position 3922 of SEQ ID NO: 2455
ggugagacuuccguggaag

SEQ ID NO: 190457 - RNA, 19 nt, Artificial Sequence
  Description of Artificial Sequence: Synthetic oligonucleotide
  Antisense strand to SEQ ID NO: 190456
cuuccacggaagucucacc

SEQ ID NO: 190458 - RNA, 19 nt, Artificial Sequence
  Description of Artificial Sequence: Synthetic oligonucleotide
  Sense strand starting at position 3923 of SEQ ID NO: 2455
gugagacuuccguggaaga

SEQ ID NO: 190459 - RNA, 19 nt, Artificial Sequence
  Description of Artificial Sequence: Synthetic oligonucleotide
  Antisense strand to SEQ ID NO: 190458
ucuuccacggaagucucac

SEQ ID NO: 190460 - RNA, 19 nt, Artificial Sequence
  Description of Artificial Sequence: Synthetic oligonucleotide
  Sense strand starting at position 3924 of SEQ ID NO: 2455
ugagacuuccguggaagaa

SEQ ID NO: 190461 - RNA, 19 nt, Artificial Sequence
  Description of Artificial Sequence: Synthetic oligonucleotide
  Antisense strand to SEQ ID NO: 190460
uucuuccacggaagucuca

SEQ ID NO: 190462 - RNA, 19 nt, Artificial Sequence
  Description of Artificial Sequence: Synthetic oligonucleotide
  Sense strand starting at position 3946 of SEQ ID NO: 2455
aaagcuggaccuugaagau

SEQ ID NO: 190463 - RNA, 19 nt, Artificial Sequence
  Description of Artificial Sequence: Synthetic oligonucleotide
  Antisense strand to SEQ ID NO: 190462
aucuucaagguccagcuuu

SEQ ID NO: 190464 - RNA, 19 nt, Artificial Sequence
  Description of Artificial Sequence: Synthetic oligonucleotide
  Sense strand starting at position 3980 of SEQ ID NO: 2455
cagacacaugucugugauu

SEQ ID NO: 190465 - RNA, 19 nt, Artificial Sequence
  Description of Artificial Sequence: Synthetic oligonucleotide
  Antisense strand to SEQ ID NO: 190464
aaucacagacaugugucug

SEQ ID NO: 190466 - RNA, 19 nt, Artificial Sequence
  Description of Artificial Sequence: Synthetic oligonucleotide
  Sense strand starting at position 3969 of SEQ ID NO: 2456
cgagcuccauuguuuauuu

SEQ ID NO: 190467 - RNA, 19 nt, Artificial Sequence
  Description of Artificial Sequence: Synthetic oligonucleotide
  Antisense strand to SEQ ID NO: 190466
aaauaaacaauggagcucg

SEQ ID NO: 190468 - RNA, 19 nt, Artificial Sequence
  Description of Artificial Sequence: Synthetic oligonucleotide
  Sense strand starting at position 3968 of SEQ ID NO: 2456
gcgagcuccauuguuuauu

SEQ ID NO: 190469 - RNA, 19 nt, Artificial Sequence
  Description of Artificial Sequence: Synthetic oligonucleotide
  Antisense strand to SEQ ID NO: 190468
aauaaacaauggagcucgc

SEQ ID NO: 190470 - RNA, 19 nt, Artificial Sequence
  Description of Artificial Sequence: Synthetic oligonucleotide
  Sense strand starting at position 3648 of SEQ ID NO: 2456
gacaaucucucuguguuga

SEQ ID NO: 190471 - RNA, 19 nt, Artificial Sequence
  Description of Artificial Sequence: Synthetic oligonucleotide
  Antisense strand to SEQ ID NO: 190470
ucaacacagagagauuguc

SEQ ID NO: 190472 - RNA, 19 nt, Artificial Sequence
  Description of Artificial Sequence: Synthetic oligonucleotide
  Sense strand starting at position 3519 of SEQ ID NO: 2456
gcgaauauuugcccaaaug

SEQ ID NO: 190473 - RNA, 19 nt, Artificial Sequence
  Description of Artificial Sequence: Synthetic oligonucleotide
  Antisense strand to SEQ ID NO: 190472
cauuugggcaaauauucgc

SEQ ID NO: 190474 - RNA, 19 nt, Artificial Sequence
  Description of Artificial Sequence: Synthetic oligonucleotide
  Sense strand starting at position 3518 of SEQ ID NO: 2456
ugcgaauauuugcccaaau

SEQ ID NO: 190475 - RNA, 19 nt, Artificial Sequence
  Description of Artificial Sequence: Synthetic oligonucleotide
  Antisense strand to SEQ ID NO: 190474
auuugggcaaauauucgca

SEQ ID NO: 190476 - RNA, 19 nt, Artificial Sequence
  Description of Artificial Sequence: Synthetic oligonucleotide
  Sense strand starting at position 3517 of SEQ ID NO: 2456
cugcgaauauuugcccaaa

SEQ ID NO: 190477 - RNA, 19 nt, Artificial Sequence
  Description of Artificial Sequence: Synthetic oligonucleotide
  Antisense strand to SEQ ID NO: 190476
uuugggcaaauauucgcag

SEQ ID NO: 190478 - RNA, 19 nt, Artificial Sequence
  Description of Artificial Sequence: Synthetic oligonucleotide
  Sense strand starting at position 3492 of SEQ ID NO: 2456
guuuacaugguuuacuauu

SEQ ID NO: 190479 - RNA, 19 nt, Artificial Sequence
  Description of Artificial Sequence: Synthetic oligonucleotide
  Antisense strand to SEQ ID NO: 190478
aauaguaaaccauguaaac

SEQ ID NO: 190480 - RNA, 19 nt, Artificial Sequence
  Description of Artificial Sequence: Synthetic oligonucleotide
  Sense strand starting at position 3490 of SEQ ID NO: 2456
auguuuacaugguuuacua

SEQ ID NO: 190481 - RNA, 19 nt, Artificial Sequence
  Description of Artificial Sequence: Synthetic oligonucleotide
  Antisense strand to SEQ ID NO: 190480
uaguaaaccauguaaacau

SEQ ID NO: 190482 - RNA, 19 nt, Artificial Sequence
  Description of Artificial Sequence: Synthetic oligonucleotide
  Sense strand starting at position 3158 of SEQ ID NO: 2456
ggccuaagccauuauuauc

SEQ ID NO: 190483 - RNA, 19 nt, Artificial Sequence
  Description of Artificial Sequence: Synthetic oligonucleotide
  Antisense strand to SEQ ID NO: 190482
gauaauaauggcuuaggcc

SEQ ID NO: 190484 - RNA, 19 nt, Artificial Sequence
  Description of Artificial Sequence: Synthetic oligonucleotide
  Sense strand starting at position 3038 of SEQ ID NO: 2456
ccuguuuaggcucagacga

SEQ ID NO: 190485 - RNA, 19 nt, Artificial Sequence
  Description of Artificial Sequence: Synthetic oligonucleotide
  Antisense strand to SEQ ID NO: 190484
ucgucugagccuaaacagg

SEQ ID NO: 190486 - RNA, 19 nt, Artificial Sequence
  Description of Artificial Sequence: Synthetic oligonucleotide
  Sense strand starting at position 2959 of SEQ ID NO: 2456
gaagcagauuucgaacuga

SEQ ID NO: 190487 - RNA, 19 nt, Artificial Sequence
  Description of Artificial Sequence: Synthetic oligonucleotide
  Antisense strand to SEQ ID NO: 190486
ucaguucgaaaucugcuuc

SEQ ID NO: 190488 - RNA, 19 nt, Artificial Sequence
  Description of Artificial Sequence: Synthetic oligonucleotide
  Sense strand starting at position 2943 of SEQ ID NO: 2456
uaccaaguacgugauagaa

SEQ ID NO: 190489 - RNA, 19 nt, Artificial Sequence
  Description of Artificial Sequence: Synthetic oligonucleotide
  Antisense strand to SEQ ID NO: 190488
uucuaucacguacuuggua

SEQ ID NO: 190490 - RNA, 19 nt, Artificial Sequence
  Description of Artificial Sequence: Synthetic oligonucleotide
  Sense strand starting at position 2942 of SEQ ID NO: 2456
uuaccaaguacgugauaga

SEQ ID NO: 190491 - RNA, 19 nt, Artificial Sequence
  Description of Artificial Sequence: Synthetic oligonucleotide
  Antisense strand to SEQ ID NO: 190490
ucuaucacguacuugguaa

SEQ ID NO: 190492 - RNA, 19 nt, Artificial Sequence
  Description of Artificial Sequence: Synthetic oligonucleotide
  Sense strand starting at position 2938 of SEQ ID NO: 2456
agacuuaccaaguacguga

SEQ ID NO: 190493 - RNA, 19 nt, Artificial Sequence
  Description of Artificial Sequence: Synthetic oligonucleotide
  Antisense strand to SEQ ID NO: 190492
ucacguacuugguaagucu

SEQ ID NO: 190494 - RNA, 19 nt, Artificial Sequence
  Description of Artificial Sequence: Synthetic oligonucleotide
  Sense strand starting at position 2855 of SEQ ID NO: 2456
aaguguuucguauaugaaa

SEQ ID NO: 190495 - RNA, 19 nt, Artificial Sequence
  Description of Artificial Sequence: Synthetic oligonucleotide
  Antisense strand to SEQ ID NO: 190494
uuucauauacgaaacacuu

SEQ ID NO: 190496 - RNA, 19 nt, Artificial Sequence
  Description of Artificial Sequence: Synthetic oligonucleotide
  Sense strand starting at position 2697 of SEQ ID NO: 2456
gaguguguagaaugaauga

SEQ ID NO: 190497 - RNA, 19 nt, Artificial Sequence
  Description of Artificial Sequence: Synthetic oligonucleotide
  Antisense strand to SEQ ID NO: 190496
ucauucauucuacacacuc

SEQ ID NO: 190498 - RNA, 19 nt, Artificial Sequence
  Description of Artificial Sequence: Synthetic oligonucleotide
  Sense strand starting at position 2053 of SEQ ID NO: 2456
ucagaaagauaugcccaau

SEQ ID NO: 190499 - RNA, 19 nt, Artificial Sequence
  Description of Artificial Sequence: Synthetic oligonucleotide
  Antisense strand to SEQ ID NO: 190498
auugggcauaucuuucuga

SEQ ID NO: 190500 - RNA, 19 nt, Artificial Sequence
  Description of Artificial Sequence: Synthetic oligonucleotide
  Sense strand starting at position 2042 of SEQ ID NO: 2456
cucucaugacgucagaaag

SEQ ID NO: 190501 - RNA, 19 nt, Artificial Sequence
  Description of Artificial Sequence: Synthetic oligonucleotide
  Antisense strand to SEQ ID NO: 190500
cuuucugacgucaugagag

SEQ ID NO: 190502 - RNA, 19 nt, Artificial Sequence
  Description of Artificial Sequence: Synthetic oligonucleotide
  Sense strand starting at position 1627 of SEQ ID NO: 2456
aggccuuucucccugggaa

SEQ ID NO: 190503 - RNA, 19 nt, Artificial Sequence
  Description of Artificial Sequence: Synthetic oligonucleotide
  Antisense strand to SEQ ID NO: 190502
uucccagggagaaaggccu

SEQ ID NO: 190504 - RNA, 19 nt, Artificial Sequence
  Description of Artificial Sequence: Synthetic oligonucleotide
  Sense strand starting at position 1537 of SEQ ID NO: 2456
acaguaggcccugaucaaa

SEQ ID NO: 190505 - RNA, 19 nt, Artificial Sequence
  Description of Artificial Sequence: Synthetic oligonucleotide
  Antisense strand to SEQ ID NO: 190504
uuugaucagggccuacugu

SEQ ID NO: 190506 - RNA, 19 nt, Artificial Sequence
  Description of Artificial Sequence: Synthetic oligonucleotide
  Sense strand starting at position 1536 of SEQ ID NO: 2456
uacaguaggcccugaucaa

SEQ ID NO: 190507 - RNA, 19 nt, Artificial Sequence
  Description of Artificial Sequence: Synthetic oligonucleotide
  Antisense strand to SEQ ID NO: 190506
uugaucagggccuacugua

SEQ ID NO: 190508 - RNA, 19 nt, Artificial Sequence
  Description of Artificial Sequence: Synthetic oligonucleotide
  Sense strand starting at position 1487 of SEQ ID NO: 2456
ggagaaggagucggacauu

SEQ ID NO: 190509 - RNA, 19 nt, Artificial Sequence
  Description of Artificial Sequence: Synthetic oligonucleotide
  Antisense strand to SEQ ID NO: 190508
aauguccgacuccuucucc

SEQ ID NO: 190510 - RNA, 19 nt, Artificial Sequence
  Description of Artificial Sequence: Synthetic oligonucleotide
  Sense strand starting at position 1474 of SEQ ID NO: 2456
aagacugugcucuggagaa

SEQ ID NO: 190511 - RNA, 19 nt, Artificial Sequence
  Description of Artificial Sequence: Synthetic oligonucleotide
  Antisense strand to SEQ ID NO: 190510
uucuccagagcacagucuu

SEQ ID NO: 190512 - RNA, 19 nt, Artificial Sequence
  Description of Artificial Sequence: Synthetic oligonucleotide
  Sense strand starting at position 1346 of SEQ ID NO: 2456
guuaaacgcccugagagua

SEQ ID NO: 190513 - RNA, 19 nt, Artificial Sequence
  Description of Artificial Sequence: Synthetic oligonucleotide
  Antisense strand to SEQ ID NO: 190512
uacucucagggcguuuaac

SEQ ID NO: 190514 - RNA, 19 nt, Artificial Sequence
  Description of Artificial Sequence: Synthetic oligonucleotide
  Sense strand starting at position 1303 of SEQ ID NO: 2456
ccauguauuagugagguca

SEQ ID NO: 190515 - RNA, 19 nt, Artificial Sequence
  Description of Artificial Sequence: Synthetic oligonucleotide
  Antisense strand to SEQ ID NO: 190514
ugaccucacuaauacaugg

SEQ ID NO: 190516 - RNA, 19 nt, Artificial Sequence
  Description of Artificial Sequence: Synthetic oligonucleotide
  Sense strand starting at position 1153 of SEQ ID NO: 2456
aguaguucucuauggaagg

SEQ ID NO: 190517 - RNA, 19 nt, Artificial Sequence
  Description of Artificial Sequence: Synthetic oligonucleotide
  Antisense strand to SEQ ID NO: 190516
ccuuccauagagaacuacu

SEQ ID NO: 190518 - RNA, 19 nt, Artificial Sequence
  Description of Artificial Sequence: Synthetic oligonucleotide
  Sense strand starting at position 1151 of SEQ ID NO: 2456
caaguaguucucuauggaa

SEQ ID NO: 190519 - RNA, 19 nt, Artificial Sequence
  Description of Artificial Sequence: Synthetic oligonucleotide
  Antisense strand to SEQ ID NO: 190518
uuccauagagaacuacuug

SEQ ID NO: 190520 - RNA, 19 nt, Artificial Sequence
  Description of Artificial Sequence: Synthetic oligonucleotide
  Sense strand starting at position 1150 of SEQ ID NO: 2456
acaaguaguucucuaugga

SEQ ID NO: 190521 - RNA, 19 nt, Artificial Sequence
  Description of Artificial Sequence: Synthetic oligonucleotide
  Antisense strand to SEQ ID NO: 190520
uccauagagaacuacuugu

SEQ ID NO: 190522 - RNA, 19 nt, Artificial Sequence
  Description of Artificial Sequence: Synthetic oligonucleotide
  Sense strand starting at position 1030 of SEQ ID NO: 2456
gucugaccgcuaucacgua

SEQ ID NO: 190523 - RNA, 19 nt, Artificial Sequence
  Description of Artificial Sequence: Synthetic oligonucleotide
  Antisense strand to SEQ ID NO: 190522
uacgugauagcggucagac

SEQ ID NO: 190524 - RNA, 19 nt, Artificial Sequence
  Description of Artificial Sequence: Synthetic oligonucleotide
  Sense strand starting at position 869 of SEQ ID NO: 2456
ccaagugguccacauacau

SEQ ID NO: 190525 - RNA, 19 nt, Artificial Sequence
  Description of Artificial Sequence: Synthetic oligonucleotide
  Antisense strand to SEQ ID NO: 190524
auguauguggaccacuugg

SEQ ID NO: 190526 - RNA, 19 nt, Artificial Sequence
  Description of Artificial Sequence: Synthetic oligonucleotide
  Sense strand starting at position 853 of SEQ ID NO: 2456
aggauuacugcauauccca

SEQ ID NO: 190527 - RNA, 19 nt, Artificial Sequence
  Description of Artificial Sequence: Synthetic oligonucleotide
  Antisense strand to SEQ ID NO: 190526
ugggauaugcaguaauccu

SEQ ID NO: 190528 - RNA, 19 nt, Artificial Sequence
  Description of Artificial Sequence: Synthetic oligonucleotide
  Sense strand starting at position 839 of SEQ ID NO: 2456
ugacaucucugaccaggau

SEQ ID NO: 190529 - RNA, 19 nt, Artificial Sequence
  Description of Artificial Sequence: Synthetic oligonucleotide
  Antisense strand to SEQ ID NO: 190528
auccuggucagagauguca

SEQ ID NO: 190530 - RNA, 19 nt, Artificial Sequence
  Description of Artificial Sequence: Synthetic oligonucleotide
  Sense strand starting at position 823 of SEQ ID NO: 2456
auaucucaguccucacuga

SEQ ID NO: 190531 - RNA, 19 nt, Artificial Sequence
  Description of Artificial Sequence: Synthetic oligonucleotide
  Antisense strand to SEQ ID NO: 190530
ucagugaggacugagauau

SEQ ID NO: 190532 - RNA, 19 nt, Artificial Sequence
  Description of Artificial Sequence: Synthetic oligonucleotide
  Sense strand starting at position 698 of SEQ ID NO: 2456
gccagaaaccuaggaguua

SEQ ID NO: 190533 - RNA, 19 nt, Artificial Sequence
  Description of Artificial Sequence: Synthetic oligonucleotide
  Antisense strand to SEQ ID NO: 190532
uaacuccuagguuucuggc

SEQ ID NO: 190534 - RNA, 19 nt, Artificial Sequence
  Description of Artificial Sequence: Synthetic oligonucleotide
  Sense strand starting at position 651 of SEQ ID NO: 2456
uuccgugauagugagugaa

SEQ ID NO: 190535 - RNA, 19 nt, Artificial Sequence
  Description of Artificial Sequence: Synthetic oligonucleotide
  Antisense strand to SEQ ID NO: 190534
uucacucacuaucacggaa

SEQ ID NO: 190536 - RNA, 19 nt, Artificial Sequence
  Description of Artificial Sequence: Synthetic oligonucleotide
  Sense strand starting at position 645 of SEQ ID NO: 2456
gagggauuccgugauagug

SEQ ID NO: 190537 - RNA, 19 nt, Artificial Sequence
  Description of Artificial Sequence: Synthetic oligonucleotide
  Antisense strand to SEQ ID NO: 190536
cacuaucacggaaucccuc

SEQ ID NO: 190538 - RNA, 19 nt, Artificial Sequence
  Description of Artificial Sequence: Synthetic oligonucleotide
  Sense strand starting at position 623 of SEQ ID NO: 2456
ucuaguguucccuauccag

SEQ ID NO: 190539 - RNA, 19 nt, Artificial Sequence
  Description of Artificial Sequence: Synthetic oligonucleotide
  Antisense strand to SEQ ID NO: 190538
cuggauagggaacacuaga

SEQ ID NO: 190540 - RNA, 19 nt, Artificial Sequence
  Description of Artificial Sequence: Synthetic oligonucleotide
  Sense strand starting at position 102 of SEQ ID NO: 2456
guuggaacuagucaagguu

SEQ ID NO: 190541 - RNA, 19 nt, Artificial Sequence
  Description of Artificial Sequence: Synthetic oligonucleotide
  Antisense strand to SEQ ID NO: 190540
aaccuugacuaguuccaac

SEQ ID NO: 190542 - RNA, 19 nt, Artificial Sequence
  Description of Artificial Sequence: Synthetic oligonucleotide
  Sense strand starting at position 93 of SEQ ID NO: 2456
ccauuaaauguuggaacua

SEQ ID NO: 190543 - RNA, 19 nt, Artificial Sequence
  Description of Artificial Sequence: Synthetic oligonucleotide
  Antisense strand to SEQ ID NO: 190542
uaguuccaacauuuaaugg

SEQ ID NO: 190544 - RNA, 19 nt, Artificial Sequence
  Description of Artificial Sequence: Synthetic oligonucleotide
  Sense strand starting at position 29 of SEQ ID NO: 2456
cugagacauucuuccaguc

SEQ ID NO: 190545 - RNA, 19 nt, Artificial Sequence
  Description of Artificial Sequence: Synthetic oligonucleotide
  Antisense strand to SEQ ID NO: 190544
gacuggaagaaugucucag

SEQ ID NO: 190546 - RNA, 19 nt, Artificial Sequence
  Description of Artificial Sequence: Synthetic oligonucleotide
  Sense strand starting at position 3809 of SEQ ID NO: 2457
uagacauacugguuccagu

SEQ ID NO: 190547 - RNA, 19 nt, Artificial Sequence
  Description of Artificial Sequence: Synthetic oligonucleotide
  Antisense strand to SEQ ID NO: 190546
acuggaaccaguaugucua

SEQ ID NO: 190548 - RNA, 19 nt, Artificial Sequence
  Description of Artificial Sequence: Synthetic oligonucleotide
  Sense strand starting at position 3778 of SEQ ID NO: 2457
gcuccuuggcuguggaaca

SEQ ID NO: 190549 - RNA, 19 nt, Artificial Sequence
  Description of Artificial Sequence: Synthetic oligonucleotide
  Antisense strand to SEQ ID NO: 190548
uguuccacagccaaggagc

SEQ ID NO: 190550 - RNA, 19 nt, Artificial Sequence
  Description of Artificial Sequence: Synthetic oligonucleotide
  Sense strand starting at position 3412 of SEQ ID NO: 2457
ugccaucuccuaugguuaa

SEQ ID NO: 190551 - RNA, 19 nt, Artificial Sequence
  Description of Artificial Sequence: Synthetic oligonucleotide
  Antisense strand to SEQ ID NO: 190550
uuaaccauaggagauggca

SEQ ID NO: 190552 - RNA, 19 nt, Artificial Sequence
  Description of Artificial Sequence: Synthetic oligonucleotide
  Sense strand starting at position 3394 of SEQ ID NO: 2457
guggcaucccaucaucauu

SEQ ID NO: 190553 - RNA, 19 nt, Artificial Sequence
  Description of Artificial Sequence: Synthetic oligonucleotide
  Antisense strand to SEQ ID NO: 190552
aaugaugaugggaugccac

SEQ ID NO: 190554 - RNA, 19 nt, Artificial Sequence
  Description of Artificial Sequence: Synthetic oligonucleotide
  Sense strand starting at position 3347 of SEQ ID NO: 2457
agacuaugaugauagaguu

SEQ ID NO: 190555 - RNA, 19 nt, Artificial Sequence
  Description of Artificial Sequence: Synthetic oligonucleotide
  Antisense strand to SEQ ID NO: 190554
aacucuaucaucauagucu

SEQ ID NO: 190556 - RNA, 19 nt, Artificial Sequence
  Description of Artificial Sequence: Synthetic oligonucleotide
  Sense strand starting at position 3334 of SEQ ID NO: 2457
ggucucuagcuccagacua

SEQ ID NO: 190557 - RNA, 19 nt, Artificial Sequence
  Description of Artificial Sequence: Synthetic oligonucleotide
  Antisense strand to SEQ ID NO: 190556
uagucuggagcuagagacc

SEQ ID NO: 190558 - RNA, 19 nt, Artificial Sequence
  Description of Artificial Sequence: Synthetic oligonucleotide
  Sense strand starting at position 3134 of SEQ ID NO: 2457
gcgacuguuuaacugaaga

SEQ ID NO: 190559 - RNA, 19 nt, Artificial Sequence
  Description of Artificial Sequence: Synthetic oligonucleotide
  Antisense strand to SEQ ID NO: 190558
ucuucaguuaaacagucgc

SEQ ID NO: 190560 - RNA, 19 nt, Artificial Sequence
  Description of Artificial Sequence: Synthetic oligonucleotide
  Sense strand starting at position 3127 of SEQ ID NO: 2457
cuuccuugcgacuguuuaa

SEQ ID NO: 190561 - RNA, 19 nt, Artificial Sequence
  Description of Artificial Sequence: Synthetic oligonucleotide
  Antisense strand to SEQ ID NO: 190560
uuaaacagucgcaaggaag

SEQ ID NO: 190562 - RNA, 19 nt, Artificial Sequence
  Description of Artificial Sequence: Synthetic oligonucleotide
  Sense strand starting at position 3119 of SEQ ID NO: 2457
agaauuaacuuccuugcga

SEQ ID NO: 190563 - RNA, 19 nt, Artificial Sequence
  Description of Artificial Sequence: Synthetic oligonucleotide
  Antisense strand to SEQ ID NO: 190562
ucgcaaggaaguuaauucu

SEQ ID NO: 190564 - RNA, 19 nt, Artificial Sequence
  Description of Artificial Sequence: Synthetic oligonucleotide
  Sense strand starting at position 3042 of SEQ ID NO: 2457
gcugcaaucaggcugcauu

SEQ ID NO: 190565 - RNA, 19 nt, Artificial Sequence
  Description of Artificial Sequence: Synthetic oligonucleotide
  Antisense strand to SEQ ID NO: 190564
aaugcagccugauugcagc

SEQ ID NO: 190566 - RNA, 19 nt, Artificial Sequence
  Description of Artificial Sequence: Synthetic oligonucleotide
  Sense strand starting at position 2601 of SEQ ID NO: 2457
caggaauucugggaguauu

SEQ ID NO: 190567 - RNA, 19 nt, Artificial Sequence
  Description of Artificial Sequence: Synthetic oligonucleotide
  Antisense strand to SEQ ID NO: 190566
aauacucccagaauuccug

SEQ ID NO: 190568 - RNA, 19 nt, Artificial Sequence
  Description of Artificial Sequence: Synthetic oligonucleotide
  Sense strand starting at position 2600 of SEQ ID NO: 2457
ucaggaauucugggaguau

SEQ ID NO: 190569 - RNA, 19 nt, Artificial Sequence
  Description of Artificial Sequence: Synthetic oligonucleotide
  Antisense strand to SEQ ID NO: 190568
auacucccagaauuccuga

SEQ ID NO: 190570 - RNA, 19 nt, Artificial Sequence
  Description of Artificial Sequence: Synthetic oligonucleotide
  Sense strand starting at position 2424 of SEQ ID NO: 2457
cacgauuugcuuugaaagc

SEQ ID NO: 190571 - RNA, 19 nt, Artificial Sequence
  Description of Artificial Sequence: Synthetic oligonucleotide
  Antisense strand to SEQ ID NO: 190570
gcuuucaaagcaaaucgug

SEQ ID NO: 190572 - RNA, 19 nt, Artificial Sequence
  Description of Artificial Sequence: Synthetic oligonucleotide
  Sense strand starting at position 2421 of SEQ ID NO: 2457
gcacacgauuugcuuugaa

SEQ ID NO: 190573 - RNA, 19 nt, Artificial Sequence
  Description of Artificial Sequence: Synthetic oligonucleotide
  Antisense strand to SEQ ID NO: 190572
uucaaagcaaaucgugugc

SEQ ID NO: 190574 - RNA, 19 nt, Artificial Sequence
  Description of Artificial Sequence: Synthetic oligonucleotide
  Sense strand starting at position 2313 of SEQ ID NO: 2457
uggacuucgugaucuacuu

SEQ ID NO: 190575 - RNA, 19 nt, Artificial Sequence
  Description of Artificial Sequence: Synthetic oligonucleotide
  Antisense strand to SEQ ID NO: 190574
aaguagaucacgaagucca

SEQ ID NO: 190576 - RNA, 19 nt, Artificial Sequence
  Description of Artificial Sequence: Synthetic oligonucleotide
  Sense strand starting at position 2311 of SEQ ID NO: 2457
gguggacuucgugaucuac

SEQ ID NO: 190577 - RNA, 19 nt, Artificial Sequence
  Description of Artificial Sequence: Synthetic oligonucleotide
  Antisense strand to SEQ ID NO: 190576
guagaucacgaaguccacc

SEQ ID NO: 190578 - RNA, 19 nt, Artificial Sequence
  Description of Artificial Sequence: Synthetic oligonucleotide
  Sense strand starting at position 2298 of SEQ ID NO: 2457
ccgagauucagguggugga

SEQ ID NO: 190579 - RNA, 19 nt, Artificial Sequence
  Description of Artificial Sequence: Synthetic oligonucleotide
  Antisense strand to SEQ ID NO: 190578
uccaccaccugaaucucgg

SEQ ID NO: 190580 - RNA, 19 nt, Artificial Sequence
  Description of Artificial Sequence: Synthetic oligonucleotide
  Sense strand starting at position 2234 of SEQ ID NO: 2457
cuuucuguucugcaagcaa

SEQ ID NO: 190581 - RNA, 19 nt, Artificial Sequence
  Description of Artificial Sequence: Synthetic oligonucleotide
  Antisense strand to SEQ ID NO: 190580
uugcuugcagaacagaaag

SEQ ID NO: 190582 - RNA, 19 nt, Artificial Sequence
  Description of Artificial Sequence: Synthetic oligonucleotide
  Sense strand starting at position 1126 of SEQ ID NO: 2457
auacaagggucagaaagaa

SEQ ID NO: 190583 - RNA, 19 nt, Artificial Sequence
  Description of Artificial Sequence: Synthetic oligonucleotide
  Antisense strand to SEQ ID NO: 190582
uucuuucugacccuuguau

SEQ ID NO: 190584 - RNA, 19 nt, Artificial Sequence
  Description of Artificial Sequence: Synthetic oligonucleotide
  Sense strand starting at position 1054 of SEQ ID NO: 2457
ggaugacuaggauguuuau

SEQ ID NO: 190585 - RNA, 19 nt, Artificial Sequence
  Description of Artificial Sequence: Synthetic oligonucleotide
  Antisense strand to SEQ ID NO: 190584
auaaacauccuagucaucc

SEQ ID NO: 190586 - RNA, 19 nt, Artificial Sequence
  Description of Artificial Sequence: Synthetic oligonucleotide
  Sense strand starting at position 1052 of SEQ ID NO: 2457
gaggaugacuaggauguuu

SEQ ID NO: 190587 - RNA, 19 nt, Artificial Sequence
  Description of Artificial Sequence: Synthetic oligonucleotide
  Antisense strand to SEQ ID NO: 190586
aaacauccuagucauccuc

SEQ ID NO: 190588 - RNA, 19 nt, Artificial Sequence
  Description of Artificial Sequence: Synthetic oligonucleotide
  Sense strand starting at position 1051 of SEQ ID NO: 2457
cgaggaugacuaggauguu

SEQ ID NO: 190589 - RNA, 19 nt, Artificial Sequence
  Description of Artificial Sequence: Synthetic oligonucleotide
  Antisense strand to SEQ ID NO: 190588
aacauccuagucauccucg

SEQ ID NO: 190590 - RNA, 19 nt, Artificial Sequence
  Description of Artificial Sequence: Synthetic oligonucleotide
  Sense strand starting at position 916 of SEQ ID NO: 2457
gcccgagaggcccaaagau

SEQ ID NO: 190591 - RNA, 19 nt, Artificial Sequence
  Description of Artificial Sequence: Synthetic oligonucleotide
  Antisense strand to SEQ ID NO: 190590
aucuuugggccucucgggc

SEQ ID NO: 190592 - RNA, 19 nt, Artificial Sequence
  Description of Artificial Sequence: Synthetic oligonucleotide
  Sense strand starting at position 889 of SEQ ID NO: 2457
aaggaagguucuggagaag

SEQ ID NO: 190593 - RNA, 19 nt, Artificial Sequence
  Description of Artificial Sequence: Synthetic oligonucleotide
  Antisense strand to SEQ ID NO: 190592
cuucuccagaaccuuccuu

SEQ ID NO: 190594 - RNA, 19 nt, Artificial Sequence
  Description of Artificial Sequence: Synthetic oligonucleotide
  Sense strand starting at position 888 of SEQ ID NO: 2457
uaaggaagguucuggagaa

SEQ ID NO: 190595 - RNA, 19 nt, Artificial Sequence
  Description of Artificial Sequence: Synthetic oligonucleotide
  Antisense strand to SEQ ID NO: 190594
uucuccagaaccuuccuua

SEQ ID NO: 190596 - RNA, 19 nt, Artificial Sequence
  Description of Artificial Sequence: Synthetic oligonucleotide
  Sense strand starting at position 762 of SEQ ID NO: 2457
agggacguuccagaauguu

SEQ ID NO: 190597 - RNA, 19 nt, Artificial Sequence
  Description of Artificial Sequence: Synthetic oligonucleotide
  Antisense strand to SEQ ID NO: 190596
aacauucuggaacgucccu

SEQ ID NO: 190598 - RNA, 19 nt, Artificial Sequence
  Description of Artificial Sequence: Synthetic oligonucleotide
  Sense strand starting at position 700 of SEQ ID NO: 2457
uccgaagucuuuccugaaa

SEQ ID NO: 190599 - RNA, 19 nt, Artificial Sequence
  Description of Artificial Sequence: Synthetic oligonucleotide
  Antisense strand to SEQ ID NO: 190598
uuucaggaaagacuucgga

SEQ ID NO: 190600 - RNA, 19 nt, Artificial Sequence
  Description of Artificial Sequence: Synthetic oligonucleotide
  Sense strand starting at position 670 of SEQ ID NO: 2457
gggcaaauaugaccuguca

SEQ ID NO: 190601 - RNA, 19 nt, Artificial Sequence
  Description of Artificial Sequence: Synthetic oligonucleotide
  Antisense strand to SEQ ID NO: 190600
ugacaggucauauuugccc

SEQ ID NO: 190602 - RNA, 19 nt, Artificial Sequence
  Description of Artificial Sequence: Synthetic oligonucleotide
  Sense strand starting at position 611 of SEQ ID NO: 2457
gauuaugugugggccaauc

SEQ ID NO: 190603 - RNA, 19 nt, Artificial Sequence
  Description of Artificial Sequence: Synthetic oligonucleotide
  Antisense strand to SEQ ID NO: 190602
gauuggcccacacauaauc

SEQ ID NO: 190604 - RNA, 19 nt, Artificial Sequence
  Description of Artificial Sequence: Synthetic oligonucleotide
  Sense strand starting at position 610 of SEQ ID NO: 2457
agauuaugugugggccaau

SEQ ID NO: 190605 - RNA, 19 nt, Artificial Sequence
  Description of Artificial Sequence: Synthetic oligonucleotide
  Antisense strand to SEQ ID NO: 190604
auuggcccacacauaaucu

SEQ ID NO: 190606 - RNA, 19 nt, Artificial Sequence
  Description of Artificial Sequence: Synthetic oligonucleotide
  Sense strand starting at position 608 of SEQ ID NO: 2457
ggagauuaugugugggcca

SEQ ID NO: 190607 - RNA, 19 nt, Artificial Sequence
  Description of Artificial Sequence: Synthetic oligonucleotide
  Antisense strand to SEQ ID NO: 190606
uggcccacacauaaucucc

SEQ ID NO: 190608 - RNA, 19 nt, Artificial Sequence
  Description of Artificial Sequence: Synthetic oligonucleotide
  Sense strand starting at position 409 of SEQ ID NO: 2457
cuguuagaguucuuaacua

SEQ ID NO: 190609 - RNA, 19 nt, Artificial Sequence
  Description of Artificial Sequence: Synthetic oligonucleotide
  Antisense strand to SEQ ID NO: 190608
uaguuaagaacucuaacag

SEQ ID NO: 190610 - RNA, 19 nt, Artificial Sequence
  Description of Artificial Sequence: Synthetic oligonucleotide
  Sense strand starting at position 371 of SEQ ID NO: 2457
gcaauuaguggguggugga

SEQ ID NO: 190611 - RNA, 19 nt, Artificial Sequence
  Description of Artificial Sequence: Synthetic oligonucleotide
  Antisense strand to SEQ ID NO: 190610
uccaccacccacuaauugc

SEQ ID NO: 190612 - RNA, 19 nt, Artificial Sequence
  Description of Artificial Sequence: Synthetic oligonucleotide
  Sense strand starting at position 141 of SEQ ID NO: 2457
cuaugauagccuuaccaug

SEQ ID NO: 190613 - RNA, 19 nt, Artificial Sequence
  Description of Artificial Sequence: Synthetic oligonucleotide
  Antisense strand to SEQ ID NO: 190612
caugguaaggcuaucauag

SEQ ID NO: 190614 - RNA, 19 nt, Artificial Sequence
  Description of Artificial Sequence: Synthetic oligonucleotide
  Sense strand starting at position 131 of SEQ ID NO: 2457
gcgggugucucuaugauag

SEQ ID NO: 190615 - RNA, 19 nt, Artificial Sequence
  Description of Artificial Sequence: Synthetic oligonucleotide
  Antisense strand to SEQ ID NO: 190614
cuaucauagagacacccgc

SEQ ID NO: 190616 - RNA, 19 nt, Artificial Sequence
  Description of Artificial Sequence: Synthetic oligonucleotide
  Sense strand starting at position 129 of SEQ ID NO: 2457
gggcgggugucucuaugau

SEQ ID NO: 190617 - RNA, 19 nt, Artificial Sequence
  Description of Artificial Sequence: Synthetic oligonucleotide
  Antisense strand to SEQ ID NO: 190616
aucauagagacacccgccc

SEQ ID NO: 190618 - RNA, 19 nt, Artificial Sequence
  Description of Artificial Sequence: Synthetic oligonucleotide
  Sense strand starting at position 92 of SEQ ID NO: 2457
gcagauacaugaucuggca

SEQ ID NO: 190619 - RNA, 19 nt, Artificial Sequence
  Description of Artificial Sequence: Synthetic oligonucleotide
  Antisense strand to SEQ ID NO: 190618
ugccagaucauguaucugc

SEQ ID NO: 190620 - RNA, 19 nt, Artificial Sequence
  Description of Artificial Sequence: Synthetic oligonucleotide
  Sense strand starting at position 83 of SEQ ID NO: 2457
cccaaaguugcagauacau

SEQ ID NO: 190621 - RNA, 19 nt, Artificial Sequence
  Description of Artificial Sequence: Synthetic oligonucleotide
  Antisense strand to SEQ ID NO: 190620
auguaucugcaacuuuggg

SEQ ID NO: 190622 - RNA, 19 nt, Artificial Sequence
  Description of Artificial Sequence: Synthetic oligonucleotide
  Sense strand starting at position 43 of SEQ ID NO: 2457
gcuaauuuauaggaagucu

SEQ ID NO: 190623 - RNA, 19 nt, Artificial Sequence
  Description of Artificial Sequence: Synthetic oligonucleotide
  Antisense strand to SEQ ID NO: 190622
agacuuccuauaaauuagc

SEQ ID NO: 190624 - RNA, 19 nt, Artificial Sequence
  Description of Artificial Sequence: Synthetic oligonucleotide
  Sense strand starting at position 9 of SEQ ID NO: 2457
gggcagagugugugguuaa

SEQ ID NO: 190625 - RNA, 19 nt, Artificial Sequence
  Description of Artificial Sequence: Synthetic oligonucleotide
  Antisense strand to SEQ ID NO: 190624
uuaaccacacacucugccc

SEQ ID NO: 190626 - RNA, 19 nt, Artificial Sequence
  Description of Artificial Sequence: Synthetic oligonucleotide
  Sense strand starting at position 3803 of SEQ ID NO: 2458
guaagucacgaucauacca

SEQ ID NO: 190627 - RNA, 19 nt, Artificial Sequence
  Description of Artificial Sequence: Synthetic oligonucleotide
  Antisense strand to SEQ ID NO: 190626
ugguaugaucgugacuuac

SEQ ID NO: 190628 - RNA, 19 nt, Artificial Sequence
  Description of Artificial Sequence: Synthetic oligonucleotide
  Sense strand starting at position 3800 of SEQ ID NO: 2458
gcaguaagucacgaucaua

SEQ ID NO: 190629 - RNA, 19 nt, Artificial Sequence
  Description of Artificial Sequence: Synthetic oligonucleotide
  Antisense strand to SEQ ID NO: 190628
uaugaucgugacuuacugc

SEQ ID NO: 190630 - RNA, 19 nt, Artificial Sequence
  Description of Artificial Sequence: Synthetic oligonucleotide
  Sense strand starting at position 3541 of SEQ ID NO: 2458
agaauuauuugaugcaaac

SEQ ID NO: 190631 - RNA, 19 nt, Artificial Sequence
  Description of Artificial Sequence: Synthetic oligonucleotide
  Antisense strand to SEQ ID NO: 190630
guuugcaucaaauaauucu

SEQ ID NO: 190632 - RNA, 19 nt, Artificial Sequence
  Description of Artificial Sequence: Synthetic oligonucleotide
  Sense strand starting at position 3472 of SEQ ID NO: 2458
acuagauucuuagugagaa

SEQ ID NO: 190633 - RNA, 19 nt, Artificial Sequence
  Description of Artificial Sequence: Synthetic oligonucleotide
  Antisense strand to SEQ ID NO: 190632
uucucacuaagaaucuagu

SEQ ID NO: 190634 - RNA, 19 nt, Artificial Sequence
  Description of Artificial Sequence: Synthetic oligonucleotide
  Sense strand starting at position 3469 of SEQ ID NO: 2458
gaaacuagauucuuaguga

SEQ ID NO: 190635 - RNA, 19 nt, Artificial Sequence
  Description of Artificial Sequence: Synthetic oligonucleotide
  Antisense strand to SEQ ID NO: 190634
ucacuaagaaucuaguuuc

SEQ ID NO: 190636 - RNA, 19 nt, Artificial Sequence
  Description of Artificial Sequence: Synthetic oligonucleotide
  Sense strand starting at position 3341 of SEQ ID NO: 2458
ucaccagaugcuuggcaaa

SEQ ID NO: 190637 - RNA, 19 nt, Artificial Sequence
  Description of Artificial Sequence: Synthetic oligonucleotide
  Antisense strand to SEQ ID NO: 190636
uuugccaagcaucugguga

SEQ ID NO: 190638 - RNA, 19 nt, Artificial Sequence
  Description of Artificial Sequence: Synthetic oligonucleotide
  Sense strand starting at position 3317 of SEQ ID NO: 2458
uuaagacugucucugacua

SEQ ID NO: 190639 - RNA, 19 nt, Artificial Sequence
  Description of Artificial Sequence: Synthetic oligonucleotide
  Antisense strand to SEQ ID NO: 190638
uagucagagacagucuuaa

SEQ ID NO: 190640 - RNA, 19 nt, Artificial Sequence
  Description of Artificial Sequence: Synthetic oligonucleotide
  Sense strand starting at position 3306 of SEQ ID NO: 2458
auuaucuugguuuaagacu

SEQ ID NO: 190641 - RNA, 19 nt, Artificial Sequence
  Description of Artificial Sequence: Synthetic oligonucleotide
  Antisense strand to SEQ ID NO: 190640
agucuuaaaccaagauaau

SEQ ID NO: 190642 - RNA, 19 nt, Artificial Sequence
  Description of Artificial Sequence: Synthetic oligonucleotide
  Sense strand starting at position 3304 of SEQ ID NO: 2458
acauuaucuugguuuaaga

SEQ ID NO: 190643 - RNA, 19 nt, Artificial Sequence
  Description of Artificial Sequence: Synthetic oligonucleotide
  Antisense strand to SEQ ID NO: 190642
ucuuaaaccaagauaaugu

SEQ ID NO: 190644 - RNA, 19 nt, Artificial Sequence
  Description of Artificial Sequence: Synthetic oligonucleotide
  Sense strand starting at position 3303 of SEQ ID NO: 2458
gacauuaucuugguuuaag

SEQ ID NO: 190645 - RNA, 19 nt, Artificial Sequence
  Description of Artificial Sequence: Synthetic oligonucleotide
  Antisense strand to SEQ ID NO: 190644
cuuaaaccaagauaauguc

SEQ ID NO: 190646 - RNA, 19 nt, Artificial Sequence
  Description of Artificial Sequence: Synthetic oligonucleotide
  Sense strand starting at position 3302 of SEQ ID NO: 2458
agacauuaucuugguuuaa

SEQ ID NO: 190647 - RNA, 19 nt, Artificial Sequence
  Description of Artificial Sequence: Synthetic oligonucleotide
  Antisense strand to SEQ ID NO: 190646
uuaaaccaagauaaugucu

SEQ ID NO: 190648 - RNA, 19 nt, Artificial Sequence
  Description of Artificial Sequence: Synthetic oligonucleotide
  Sense strand starting at position 3299 of SEQ ID NO: 2458
cucagacauuaucuugguu

SEQ ID NO: 190649 - RNA, 19 nt, Artificial Sequence
  Description of Artificial Sequence: Synthetic oligonucleotide
  Antisense strand to SEQ ID NO: 190648
aaccaagauaaugucugag

SEQ ID NO: 190650 - RNA, 19 nt, Artificial Sequence
  Description of Artificial Sequence: Synthetic oligonucleotide
  Sense strand starting at position 2822 of SEQ ID NO: 2458
guaucaacccacuguagaa

SEQ ID NO: 190651 - RNA, 19 nt, Artificial Sequence
  Description of Artificial Sequence: Synthetic oligonucleotide
  Antisense strand to SEQ ID NO: 190650
uucuacaguggguugauac

SEQ ID NO: 190652 - RNA, 19 nt, Artificial Sequence
  Description of Artificial Sequence: Synthetic oligonucleotide
  Sense strand starting at position 2814 of SEQ ID NO: 2458
ggauauuuguaucaaccca

SEQ ID NO: 190653 - RNA, 19 nt, Artificial Sequence
  Description of Artificial Sequence: Synthetic oligonucleotide
  Antisense strand to SEQ ID NO: 190652
uggguugauacaaauaucc

SEQ ID NO: 190654 - RNA, 19 nt, Artificial Sequence
  Description of Artificial Sequence: Synthetic oligonucleotide
  Sense strand starting at position 2811 of SEQ ID NO: 2458
cuaggauauuuguaucaac

SEQ ID NO: 190655 - RNA, 19 nt, Artificial Sequence
  Description of Artificial Sequence: Synthetic oligonucleotide
  Antisense strand to SEQ ID NO: 190654
guugauacaaauauccuag

SEQ ID NO: 190656 - RNA, 19 nt, Artificial Sequence
  Description of Artificial Sequence: Synthetic oligonucleotide
  Sense strand starting at position 2695 of SEQ ID NO: 2458
ggaacuuaauuacauugaa

SEQ ID NO: 190657 - RNA, 19 nt, Artificial Sequence
  Description of Artificial Sequence: Synthetic oligonucleotide
  Antisense strand to SEQ ID NO: 190656
uucaauguaauuaaguucc

SEQ ID NO: 190658 - RNA, 19 nt, Artificial Sequence
  Description of Artificial Sequence: Synthetic oligonucleotide
  Sense strand starting at position 2643 of SEQ ID NO: 2458
cuuauuggcccugcguaua

SEQ ID NO: 190659 - RNA, 19 nt, Artificial Sequence
  Description of Artificial Sequence: Synthetic oligonucleotide
  Antisense strand to SEQ ID NO: 190658
uauacgcagggccaauaag

SEQ ID NO: 190660 - RNA, 19 nt, Artificial Sequence
  Description of Artificial Sequence: Synthetic oligonucleotide
  Sense strand starting at position 2611 of SEQ ID NO: 2458
uauucugaguguguaagau

SEQ ID NO: 190661 - RNA, 19 nt, Artificial Sequence
  Description of Artificial Sequence: Synthetic oligonucleotide
  Antisense strand to SEQ ID NO: 190660
aucuuacacacucagaaua

SEQ ID NO: 190662 - RNA, 19 nt, Artificial Sequence
  Description of Artificial Sequence: Synthetic oligonucleotide
  Sense strand starting at position 2610 of SEQ ID NO: 2458
cuauucugaguguguaaga

SEQ ID NO: 190663 - RNA, 19 nt, Artificial Sequence
  Description of Artificial Sequence: Synthetic oligonucleotide
  Antisense strand to SEQ ID NO: 190662
ucuuacacacucagaauag

SEQ ID NO: 190664 - RNA, 19 nt, Artificial Sequence
  Description of Artificial Sequence: Synthetic oligonucleotide
  Sense strand starting at position 2608 of SEQ ID NO: 2458
aucuauucugaguguguaa

SEQ ID NO: 190665 - RNA, 19 nt, Artificial Sequence
  Description of Artificial Sequence: Synthetic oligonucleotide
  Antisense strand to SEQ ID NO: 190664
uuacacacucagaauagau

SEQ ID NO: 190666 - RNA, 19 nt, Artificial Sequence
  Description of Artificial Sequence: Synthetic oligonucleotide
  Sense strand starting at position 2602 of SEQ ID NO: 2458
ucaguuaucuauucugagu

SEQ ID NO: 190667 - RNA, 19 nt, Artificial Sequence
  Description of Artificial Sequence: Synthetic oligonucleotide
  Antisense strand to SEQ ID NO: 190666
acucagaauagauaacuga

SEQ ID NO: 190668 - RNA, 19 nt, Artificial Sequence
  Description of Artificial Sequence: Synthetic oligonucleotide
  Sense strand starting at position 1633 of SEQ ID NO: 2458
acaguuaauggcugagaag

SEQ ID NO: 190669 - RNA, 19 nt, Artificial Sequence
  Description of Artificial Sequence: Synthetic oligonucleotide
  Antisense strand to SEQ ID NO: 190668
cuucucagccauuaacugu

SEQ ID NO: 190670 - RNA, 19 nt, Artificial Sequence
  Description of Artificial Sequence: Synthetic oligonucleotide
  Sense strand starting at position 1632 of SEQ ID NO: 2458
aacaguuaauggcugagaa

SEQ ID NO: 190671 - RNA, 19 nt, Artificial Sequence
  Description of Artificial Sequence: Synthetic oligonucleotide
  Antisense strand to SEQ ID NO: 190670
uucucagccauuaacuguu

SEQ ID NO: 190672 - RNA, 19 nt, Artificial Sequence
  Description of Artificial Sequence: Synthetic oligonucleotide
  Sense strand starting at position 1616 of SEQ ID NO: 2458
cgaaucuuacucgggaaac

SEQ ID NO: 190673 - RNA, 19 nt, Artificial Sequence
  Description of Artificial Sequence: Synthetic oligonucleotide
  Antisense strand to SEQ ID NO: 190672
guuucccgaguaagauucg

SEQ ID NO: 190674 - RNA, 19 nt, Artificial Sequence
  Description of Artificial Sequence: Synthetic oligonucleotide
  Sense strand starting at position 1615 of SEQ ID NO: 2458
ucgaaucuuacucgggaaa

SEQ ID NO: 190675 - RNA, 19 nt, Artificial Sequence
  Description of Artificial Sequence: Synthetic oligonucleotide
  Antisense strand to SEQ ID NO: 190674
uuucccgaguaagauucga

SEQ ID NO: 190676 - RNA, 19 nt, Artificial Sequence
  Description of Artificial Sequence: Synthetic oligonucleotide
  Sense strand starting at position 1614 of SEQ ID NO: 2458
uucgaaucuuacucgggaa

SEQ ID NO: 190677 - RNA, 19 nt, Artificial Sequence
  Description of Artificial Sequence: Synthetic oligonucleotide
  Antisense strand to SEQ ID NO: 190676
uucccgaguaagauucgaa

SEQ ID NO: 190678 - RNA, 19 nt, Artificial Sequence
  Description of Artificial Sequence: Synthetic oligonucleotide
  Sense strand starting at position 1613 of SEQ ID NO: 2458
uuucgaaucuuacucggga

SEQ ID NO: 190679 - RNA, 19 nt, Artificial Sequence
  Description of Artificial Sequence: Synthetic oligonucleotide
  Antisense strand to SEQ ID NO: 190678
ucccgaguaagauucgaaa

SEQ ID NO: 190680 - RNA, 19 nt, Artificial Sequence
  Description of Artificial Sequence: Synthetic oligonucleotide
  Sense strand starting at position 1543 of SEQ ID NO: 2458
ggaauuggagcuugugaga

SEQ ID NO: 190681 - RNA, 19 nt, Artificial Sequence
  Description of Artificial Sequence: Synthetic oligonucleotide
  Antisense strand to SEQ ID NO: 190680
ucucacaagcuccaauucc

SEQ ID NO: 190682 - RNA, 19 nt, Artificial Sequence
  Description of Artificial Sequence: Synthetic oligonucleotide
  Sense strand starting at position 1504 of SEQ ID NO: 2458
gugugacuauaugcagaga

SEQ ID NO: 190683 - RNA, 19 nt, Artificial Sequence
  Description of Artificial Sequence: Synthetic oligonucleotide
  Antisense strand to SEQ ID NO: 190682
ucucugcauauagucacac

SEQ ID NO: 190684 - RNA, 19 nt, Artificial Sequence
  Description of Artificial Sequence: Synthetic oligonucleotide
  Sense strand starting at position 1461 of SEQ ID NO: 2458
auggguaugugacuuauag

SEQ ID NO: 190685 - RNA, 19 nt, Artificial Sequence
  Description of Artificial Sequence: Synthetic oligonucleotide
  Antisense strand to SEQ ID NO: 190684
cuauaagucacauacccau

SEQ ID NO: 190686 - RNA, 19 nt, Artificial Sequence
  Description of Artificial Sequence: Synthetic oligonucleotide
  Sense strand starting at position 1456 of SEQ ID NO: 2458
gaaggauggguaugugacu

SEQ ID NO: 190687 - RNA, 19 nt, Artificial Sequence
  Description of Artificial Sequence: Synthetic oligonucleotide
  Antisense strand to SEQ ID NO: 190686
agucacauacccauccuuc

SEQ ID NO: 190688 - RNA, 19 nt, Artificial Sequence
  Description of Artificial Sequence: Synthetic oligonucleotide
  Sense strand starting at position 1450 of SEQ ID NO: 2458
guuggagaaggauggguau

SEQ ID NO: 190689 - RNA, 19 nt, Artificial Sequence
  Description of Artificial Sequence: Synthetic oligonucleotide
  Antisense strand to SEQ ID NO: 190688
auacccauccuucuccaac

SEQ ID NO: 190690 - RNA, 19 nt, Artificial Sequence
  Description of Artificial Sequence: Synthetic oligonucleotide
  Sense strand starting at position 1280 of SEQ ID NO: 2458
acuacugcagaauaguaau

SEQ ID NO: 190691 - RNA, 19 nt, Artificial Sequence
  Description of Artificial Sequence: Synthetic oligonucleotide
  Antisense strand to SEQ ID NO: 190690
auuacuauucugcaguagu

SEQ ID NO: 190692 - RNA, 19 nt, Artificial Sequence
  Description of Artificial Sequence: Synthetic oligonucleotide
  Sense strand starting at position 954 of SEQ ID NO: 2458
agacaaugcuaggcauaca

SEQ ID NO: 190693 - RNA, 19 nt, Artificial Sequence
  Description of Artificial Sequence: Synthetic oligonucleotide
  Antisense strand to SEQ ID NO: 190692
uguaugccuagcauugucu

SEQ ID NO: 190694 - RNA, 19 nt, Artificial Sequence
  Description of Artificial Sequence: Synthetic oligonucleotide
  Sense strand starting at position 940 of SEQ ID NO: 2458
uguaauguugguugagaca

SEQ ID NO: 190695 - RNA, 19 nt, Artificial Sequence
  Description of Artificial Sequence: Synthetic oligonucleotide
  Antisense strand to SEQ ID NO: 190694
ugucucaaccaacauuaca

SEQ ID NO: 190696 - RNA, 19 nt, Artificial Sequence
  Description of Artificial Sequence: Synthetic oligonucleotide
  Sense strand starting at position 939 of SEQ ID NO: 2458
uuguaauguugguugagac

SEQ ID NO: 190697 - RNA, 19 nt, Artificial Sequence
  Description of Artificial Sequence: Synthetic oligonucleotide
  Antisense strand to SEQ ID NO: 190696
gucucaaccaacauuacaa

SEQ ID NO: 190698 - RNA, 19 nt, Artificial Sequence
  Description of Artificial Sequence: Synthetic oligonucleotide
  Sense strand starting at position 924 of SEQ ID NO: 2458
uuguauucuauagaguugu

SEQ ID NO: 190699 - RNA, 19 nt, Artificial Sequence
  Description of Artificial Sequence: Synthetic oligonucleotide
  Antisense strand to SEQ ID NO: 190698
acaacucuauagaauacaa

SEQ ID NO: 190700 - RNA, 19 nt, Artificial Sequence
  Description of Artificial Sequence: Synthetic oligonucleotide
  Sense strand starting at position 586 of SEQ ID NO: 2458
acuccagaaucugcagaaa

SEQ ID NO: 190701 - RNA, 19 nt, Artificial Sequence
  Description of Artificial Sequence: Synthetic oligonucleotide
  Antisense strand to SEQ ID NO: 190700
uuucugcagauucuggagu

SEQ ID NO: 190702 - RNA, 19 nt, Artificial Sequence
  Description of Artificial Sequence: Synthetic oligonucleotide
  Sense strand starting at position 570 of SEQ ID NO: 2458
agcacuugucuccagaacu

SEQ ID NO: 190703 - RNA, 19 nt, Artificial Sequence
  Description of Artificial Sequence: Synthetic oligonucleotide
  Antisense strand to SEQ ID NO: 190702
aguucuggagacaagugcu

SEQ ID NO: 190704 - RNA, 19 nt, Artificial Sequence
  Description of Artificial Sequence: Synthetic oligonucleotide
  Sense strand starting at position 70 of SEQ ID NO: 2458
caaugaaguguguaccuau

SEQ ID NO: 190705 - RNA, 19 nt, Artificial Sequence
  Description of Artificial Sequence: Synthetic oligonucleotide
  Antisense strand to SEQ ID NO: 190704
auagguacacacuucauug

SEQ ID NO: 190706 - RNA, 19 nt, Artificial Sequence
  Description of Artificial Sequence: Synthetic oligonucleotide
  Sense strand starting at position 3956 of SEQ ID NO: 2459
auaugaggcucuguccuaa

SEQ ID NO: 190707 - RNA, 19 nt, Artificial Sequence
  Description of Artificial Sequence: Synthetic oligonucleotide
  Antisense strand to SEQ ID NO: 190706
uuaggacagagccucauau

SEQ ID NO: 190708 - RNA, 19 nt, Artificial Sequence
  Description of Artificial Sequence: Synthetic oligonucleotide
  Sense strand starting at position 3937 of SEQ ID NO: 2459
agcauauaauaguuacaga

SEQ ID NO: 190709 - RNA, 19 nt, Artificial Sequence
  Description of Artificial Sequence: Synthetic oligonucleotide
  Antisense strand to SEQ ID NO: 190708
ucuguaacuauuauaugcu

SEQ ID NO: 190710 - RNA, 19 nt, Artificial Sequence
  Description of Artificial Sequence: Synthetic oligonucleotide
  Sense strand starting at position 3866 of SEQ ID NO: 2459
ccagauauccgugguuuaa

SEQ ID NO: 190711 - RNA, 19 nt, Artificial Sequence
  Description of Artificial Sequence: Synthetic oligonucleotide
  Antisense strand to SEQ ID NO: 190710
uuaaaccacggauaucugg

SEQ ID NO: 190712 - RNA, 19 nt, Artificial Sequence
  Description of Artificial Sequence: Synthetic oligonucleotide
  Sense strand starting at position 3471 of SEQ ID NO: 2459
guuagaauauaguccuagu

SEQ ID NO: 190713 - RNA, 19 nt, Artificial Sequence
  Description of Artificial Sequence: Synthetic oligonucleotide
  Antisense strand to SEQ ID NO: 190712
acuaggacuauauucuaac

SEQ ID NO: 190714 - RNA, 19 nt, Artificial Sequence
  Description of Artificial Sequence: Synthetic oligonucleotide
  Sense strand starting at position 3364 of SEQ ID NO: 2459
gcuguuaugaaccgaaugu

SEQ ID NO: 190715 - RNA, 19 nt, Artificial Sequence
  Description of Artificial Sequence: Synthetic oligonucleotide
  Antisense strand to SEQ ID NO: 190714
acauucgguucauaacagc

SEQ ID NO: 190716 - RNA, 19 nt, Artificial Sequence
  Description of Artificial Sequence: Synthetic oligonucleotide
  Sense strand starting at position 3223 of SEQ ID NO: 2459
gcgauuauacuguaaugcu

SEQ ID NO: 190717 - RNA, 19 nt, Artificial Sequence
  Description of Artificial Sequence: Synthetic oligonucleotide
  Antisense strand to SEQ ID NO: 190716
agcauuacaguauaaucgc

SEQ ID NO: 190718 - RNA, 19 nt, Artificial Sequence
  Description of Artificial Sequence: Synthetic oligonucleotide
  Sense strand starting at position 2987 of SEQ ID NO: 2459
uggauuccgguauauuguu

SEQ ID NO: 190719 - RNA, 19 nt, Artificial Sequence
  Description of Artificial Sequence: Synthetic oligonucleotide
  Antisense strand to SEQ ID NO: 190718
aacaauauaccggaaucca

SEQ ID NO: 190720 - RNA, 19 nt, Artificial Sequence
  Description of Artificial Sequence: Synthetic oligonucleotide
  Sense strand starting at position 2985 of SEQ ID NO: 2459
aauggauuccgguauauug

SEQ ID NO: 190721 - RNA, 19 nt, Artificial Sequence
  Description of Artificial Sequence: Synthetic oligonucleotide
  Antisense strand to SEQ ID NO: 190720
caauauaccggaauccauu

SEQ ID NO: 190722 - RNA, 19 nt, Artificial Sequence
  Description of Artificial Sequence: Synthetic oligonucleotide
  Sense strand starting at position 2965 of SEQ ID NO: 2459
uuauucucagcagacaguu

SEQ ID NO: 190723 - RNA, 19 nt, Artificial Sequence
  Description of Artificial Sequence: Synthetic oligonucleotide
  Antisense strand to SEQ ID NO: 190722
aacugucugcugagaauaa

SEQ ID NO: 190724 - RNA, 19 nt, Artificial Sequence
  Description of Artificial Sequence: Synthetic oligonucleotide
  Sense strand starting at position 2960 of SEQ ID NO: 2459
guuauuuauucucagcaga

SEQ ID NO: 190725 - RNA, 19 nt, Artificial Sequence
  Description of Artificial Sequence: Synthetic oligonucleotide
  Antisense strand to SEQ ID NO: 190724
ucugcugagaauaaauaac

SEQ ID NO: 190726 - RNA, 19 nt, Artificial Sequence
  Description of Artificial Sequence: Synthetic oligonucleotide
  Sense strand starting at position 2853 of SEQ ID NO: 2459
cuuugaaacccgugacaaa

SEQ ID NO: 190727 - RNA, 19 nt, Artificial Sequence
  Description of Artificial Sequence: Synthetic oligonucleotide
  Antisense strand to SEQ ID NO: 190726
uuugucacggguuucaaag

SEQ ID NO: 190728 - RNA, 19 nt, Artificial Sequence
  Description of Artificial Sequence: Synthetic oligonucleotide
  Sense strand starting at position 2851 of SEQ ID NO: 2459
gccuuugaaacccgugaca

SEQ ID NO: 190729 - RNA, 19 nt, Artificial Sequence
  Description of Artificial Sequence: Synthetic oligonucleotide
  Antisense strand to SEQ ID NO: 190728
ugucacggguuucaaaggc

SEQ ID NO: 190730 - RNA, 19 nt, Artificial Sequence
  Description of Artificial Sequence: Synthetic oligonucleotide
  Sense strand starting at position 2810 of SEQ ID NO: 2459
ucuuuccuccgcugggaaa

SEQ ID NO: 190731 - RNA, 19 nt, Artificial Sequence
  Description of Artificial Sequence: Synthetic oligonucleotide
  Antisense strand to SEQ ID NO: 190730
uuucccagcggaggaaaga

SEQ ID NO: 190732 - RNA, 19 nt, Artificial Sequence
  Description of Artificial Sequence: Synthetic oligonucleotide
  Sense strand starting at position 2260 of SEQ ID NO: 2459
acuagucggcuguagcaaa

SEQ ID NO: 190733 - RNA, 19 nt, Artificial Sequence
  Description of Artificial Sequence: Synthetic oligonucleotide
  Antisense strand to SEQ ID NO: 190732
uuugcuacagccgacuagu

SEQ ID NO: 190734 - RNA, 19 nt, Artificial Sequence
  Description of Artificial Sequence: Synthetic oligonucleotide
  Sense strand starting at position 2212 of SEQ ID NO: 2459
caguaauuauguguaaagu

SEQ ID NO: 190735 - RNA, 19 nt, Artificial Sequence
  Description of Artificial Sequence: Synthetic oligonucleotide
  Antisense strand to SEQ ID NO: 190734
acuuuacacauaauuacug

SEQ ID NO: 190736 - RNA, 19 nt, Artificial Sequence
  Description of Artificial Sequence: Synthetic oligonucleotide
  Sense strand starting at position 2211 of SEQ ID NO: 2459
gcaguaauuauguguaaag

SEQ ID NO: 190737 - RNA, 19 nt, Artificial Sequence
  Description of Artificial Sequence: Synthetic oligonucleotide
  Antisense strand to SEQ ID NO: 190736
cuuuacacauaauuacugc

SEQ ID NO: 190738 - RNA, 19 nt, Artificial Sequence
  Description of Artificial Sequence: Synthetic oligonucleotide
  Sense strand starting at position 2210 of SEQ ID NO: 2459
ggcaguaauuauguguaaa

SEQ ID NO: 190739 - RNA, 19 nt, Artificial Sequence
  Description of Artificial Sequence: Synthetic oligonucleotide
  Antisense strand to SEQ ID NO: 190738
uuuacacauaauuacugcc

SEQ ID NO: 190740 - RNA, 19 nt, Artificial Sequence
  Description of Artificial Sequence: Synthetic oligonucleotide
  Sense strand starting at position 2062 of SEQ ID NO: 2459
ggcagaacgcuagaacaua

SEQ ID NO: 190741 - RNA, 19 nt, Artificial Sequence
  Description of Artificial Sequence: Synthetic oligonucleotide
  Antisense strand to SEQ ID NO: 190740
uauguucuagcguucugcc

SEQ ID NO: 190742 - RNA, 19 nt, Artificial Sequence
  Description of Artificial Sequence: Synthetic oligonucleotide
  Sense strand starting at position 2049 of SEQ ID NO: 2459
ggcucagucauagggcaga

SEQ ID NO: 190743 - RNA, 19 nt, Artificial Sequence
  Description of Artificial Sequence: Synthetic oligonucleotide
  Antisense strand to SEQ ID NO: 190742
ucugcccuaugacugagcc

SEQ ID NO: 190744 - RNA, 19 nt, Artificial Sequence
  Description of Artificial Sequence: Synthetic oligonucleotide
  Sense strand starting at position 1335 of SEQ ID NO: 2459
cccacauggccaugggaaa

SEQ ID NO: 190745 - RNA, 19 nt, Artificial Sequence
  Description of Artificial Sequence: Synthetic oligonucleotide
  Antisense strand to SEQ ID NO: 190744
uuucccauggccauguggg

SEQ ID NO: 190746 - RNA, 19 nt, Artificial Sequence
  Description of Artificial Sequence: Synthetic oligonucleotide
  Sense strand starting at position 1174 of SEQ ID NO: 2459
ugcuuucuagcacaaguua

SEQ ID NO: 190747 - RNA, 19 nt, Artificial Sequence
  Description of Artificial Sequence: Synthetic oligonucleotide
  Antisense strand to SEQ ID NO: 190746
uaacuugugcuagaaagca

SEQ ID NO: 190748 - RNA, 19 nt, Artificial Sequence
  Description of Artificial Sequence: Synthetic oligonucleotide
  Sense strand starting at position 1103 of SEQ ID NO: 2459
aaaucugucgagugagaga

SEQ ID NO: 190749 - RNA, 19 nt, Artificial Sequence
  Description of Artificial Sequence: Synthetic oligonucleotide
  Antisense strand to SEQ ID NO: 190748
ucucucacucgacagauuu

SEQ ID NO: 190750 - RNA, 19 nt, Artificial Sequence
  Description of Artificial Sequence: Synthetic oligonucleotide
  Sense strand starting at position 1069 of SEQ ID NO: 2459
guguuaccaucaguuugga

SEQ ID NO: 190751 - RNA, 19 nt, Artificial Sequence
  Description of Artificial Sequence: Synthetic oligonucleotide
  Antisense strand to SEQ ID NO: 190750
uccaaacugaugguaacac

SEQ ID NO: 190752 - RNA, 19 nt, Artificial Sequence
  Description of Artificial Sequence: Synthetic oligonucleotide
  Sense strand starting at position 1038 of SEQ ID NO: 2459
aggugaucauguggaauuu

SEQ ID NO: 190753 - RNA, 19 nt, Artificial Sequence
  Description of Artificial Sequence: Synthetic oligonucleotide
  Antisense strand to SEQ ID NO: 190752
aaauuccacaugaucaccu

SEQ ID NO: 190754 - RNA, 19 nt, Artificial Sequence
  Description of Artificial Sequence: Synthetic oligonucleotide
  Sense strand starting at position 967 of SEQ ID NO: 2459
guguauuaauuaccuccaa

SEQ ID NO: 190755 - RNA, 19 nt, Artificial Sequence
  Description of Artificial Sequence: Synthetic oligonucleotide
  Antisense strand to SEQ ID NO: 190754
uuggagguaauuaauacac

SEQ ID NO: 190756 - RNA, 19 nt, Artificial Sequence
  Description of Artificial Sequence: Synthetic oligonucleotide
  Sense strand starting at position 849 of SEQ ID NO: 2459
ucauuauuggcacgcauuu

SEQ ID NO: 190757 - RNA, 19 nt, Artificial Sequence
  Description of Artificial Sequence: Synthetic oligonucleotide
  Antisense strand to SEQ ID NO: 190756
aaaugcgugccaauaauga

SEQ ID NO: 190758 - RNA, 19 nt, Artificial Sequence
  Description of Artificial Sequence: Synthetic oligonucleotide
  Sense strand starting at position 439 of SEQ ID NO: 2459
auaucaugugaguaucugu

SEQ ID NO: 190759 - RNA, 19 nt, Artificial Sequence
  Description of Artificial Sequence: Synthetic oligonucleotide
  Antisense strand to SEQ ID NO: 190758
acagauacucacaugauau

SEQ ID NO: 190760 - RNA, 19 nt, Artificial Sequence
  Description of Artificial Sequence: Synthetic oligonucleotide
  Sense strand starting at position 426 of SEQ ID NO: 2459
ggauaauacuuugauauca

SEQ ID NO: 190761 - RNA, 19 nt, Artificial Sequence
  Description of Artificial Sequence: Synthetic oligonucleotide
  Antisense strand to SEQ ID NO: 190760
ugauaucaaaguauuaucc

SEQ ID NO: 190762 - RNA, 19 nt, Artificial Sequence
  Description of Artificial Sequence: Synthetic oligonucleotide
  Sense strand starting at position 400 of SEQ ID NO: 2459
cuugccauuuaguaaguaa

SEQ ID NO: 190763 - RNA, 19 nt, Artificial Sequence
  Description of Artificial Sequence: Synthetic oligonucleotide
  Antisense strand to SEQ ID NO: 190762
uuacuuacuaaauggcaag

SEQ ID NO: 190764 - RNA, 19 nt, Artificial Sequence
  Description of Artificial Sequence: Synthetic oligonucleotide
  Sense strand starting at position 399 of SEQ ID NO: 2459
ccuugccauuuaguaagua

SEQ ID NO: 190765 - RNA, 19 nt, Artificial Sequence
  Description of Artificial Sequence: Synthetic oligonucleotide
  Antisense strand to SEQ ID NO: 190764
uacuuacuaaauggcaagg

SEQ ID NO: 190766 - RNA, 19 nt, Artificial Sequence
  Description of Artificial Sequence: Synthetic oligonucleotide
  Sense strand starting at position 296 of SEQ ID NO: 2459
auuacaguaucugcaaagu

SEQ ID NO: 190767 - RNA, 19 nt, Artificial Sequence
  Description of Artificial Sequence: Synthetic oligonucleotide
  Antisense strand to SEQ ID NO: 190766
acuuugcagauacuguaau

SEQ ID NO: 190768 - RNA, 19 nt, Artificial Sequence
  Description of Artificial Sequence: Synthetic oligonucleotide
  Sense strand starting at position 276 of SEQ ID NO: 2459
ggugguaccaggugcuuua

SEQ ID NO: 190769 - RNA, 19 nt, Artificial Sequence
  Description of Artificial Sequence: Synthetic oligonucleotide
  Antisense strand to SEQ ID NO: 190768
uaaagcaccugguaccacc

SEQ ID NO: 190770 - RNA, 19 nt, Artificial Sequence
  Description of Artificial Sequence: Synthetic oligonucleotide
  Sense strand starting at position 260 of SEQ ID NO: 2459
guaggaauaccuuguaggu

SEQ ID NO: 190771 - RNA, 19 nt, Artificial Sequence
  Description of Artificial Sequence: Synthetic oligonucleotide
  Antisense strand to SEQ ID NO: 190770
accuacaagguauuccuac

SEQ ID NO: 190772 - RNA, 19 nt, Artificial Sequence
  Description of Artificial Sequence: Synthetic oligonucleotide
  Sense strand starting at position 168 of SEQ ID NO: 2459
ugagguuuaucucauuucu

SEQ ID NO: 190773 - RNA, 19 nt, Artificial Sequence
  Description of Artificial Sequence: Synthetic oligonucleotide
  Antisense strand to SEQ ID NO: 190772
agaaaugagauaaaccuca

SEQ ID NO: 190774 - RNA, 19 nt, Artificial Sequence
  Description of Artificial Sequence: Synthetic oligonucleotide
  Sense strand starting at position 165 of SEQ ID NO: 2459
augugagguuuaucucauu

SEQ ID NO: 190775 - RNA, 19 nt, Artificial Sequence
  Description of Artificial Sequence: Synthetic oligonucleotide
  Antisense strand to SEQ ID NO: 190774
aaugagauaaaccucacau

SEQ ID NO: 190776 - RNA, 19 nt, Artificial Sequence
  Description of Artificial Sequence: Synthetic oligonucleotide
  Sense strand starting at position 156 of SEQ ID NO: 2459
guauccucaaugugagguu

SEQ ID NO: 190777 - RNA, 19 nt, Artificial Sequence
  Description of Artificial Sequence: Synthetic oligonucleotide
  Antisense strand to SEQ ID NO: 190776
aaccucacauugaggauac

SEQ ID NO: 190778 - RNA, 19 nt, Artificial Sequence
  Description of Artificial Sequence: Synthetic oligonucleotide
  Sense strand starting at position 150 of SEQ ID NO: 2459
cugacuguauccucaaugu

SEQ ID NO: 190779 - RNA, 19 nt, Artificial Sequence
  Description of Artificial Sequence: Synthetic oligonucleotide
  Antisense strand to SEQ ID NO: 190778
acauugaggauacagucag

SEQ ID NO: 190780 - RNA, 19 nt, Artificial Sequence
  Description of Artificial Sequence: Synthetic oligonucleotide
  Sense strand starting at position 148 of SEQ ID NO: 2459
gucugacuguauccucaau

SEQ ID NO: 190781 - RNA, 19 nt, Artificial Sequence
  Description of Artificial Sequence: Synthetic oligonucleotide
  Antisense strand to SEQ ID NO: 190780
auugaggauacagucagac

SEQ ID NO: 190782 - RNA, 19 nt, Artificial Sequence
  Description of Artificial Sequence: Synthetic oligonucleotide
  Sense strand starting at position 139 of SEQ ID NO: 2459
acaagaacagucugacugu

SEQ ID NO: 190783 - RNA, 19 nt, Artificial Sequence
  Description of Artificial Sequence: Synthetic oligonucleotide
  Antisense strand to SEQ ID NO: 190782
acagucagacuguucuugu

SEQ ID NO: 190784 - RNA, 19 nt, Artificial Sequence
  Description of Artificial Sequence: Synthetic oligonucleotide
  Sense strand starting at position 33 of SEQ ID NO: 2459
ccaggaguuaaucaaggcu

SEQ ID NO: 190785 - RNA, 19 nt, Artificial Sequence
  Description of Artificial Sequence: Synthetic oligonucleotide
  Antisense strand to SEQ ID NO: 190784
agccuugauuaacuccugg

SEQ ID NO: 190786 - RNA, 19 nt, Artificial Sequence
  Description of Artificial Sequence: Synthetic oligonucleotide
  Sense strand starting at position 3977 of SEQ ID NO: 2460
gauugagaucauuagcgcu

SEQ ID NO: 190787 - RNA, 19 nt, Artificial Sequence
  Description of Artificial Sequence: Synthetic oligonucleotide
  Antisense strand to SEQ ID NO: 190786
agcgcuaaugaucucaauc

SEQ ID NO: 190788 - RNA, 19 nt, Artificial Sequence
  Description of Artificial Sequence: Synthetic oligonucleotide
  Sense strand starting at position 3917 of SEQ ID NO: 2460
ugcuguaagggucauuugu

SEQ ID NO: 190789 - RNA, 19 nt, Artificial Sequence
  Description of Artificial Sequence: Synthetic oligonucleotide
  Antisense strand to SEQ ID NO: 190788
acaaaugacccuuacagca

SEQ ID NO: 190790 - RNA, 19 nt, Artificial Sequence
  Description of Artificial Sequence: Synthetic oligonucleotide
  Sense strand starting at position 3776 of SEQ ID NO: 2460
gugauucuaugaguuaggu

SEQ ID NO: 190791 - RNA, 19 nt, Artificial Sequence
  Description of Artificial Sequence: Synthetic oligonucleotide
  Antisense strand to SEQ ID NO: 190790
accuaacucauagaaucac

SEQ ID NO: 190792 - RNA, 19 nt, Artificial Sequence
  Description of Artificial Sequence: Synthetic oligonucleotide
  Sense strand starting at position 3534 of SEQ ID NO: 2460
uagguuauggccuaaugau

SEQ ID NO: 190793 - RNA, 19 nt, Artificial Sequence
  Description of Artificial Sequence: Synthetic oligonucleotide
  Antisense strand to SEQ ID NO: 190792
aucauuaggccauaaccua

SEQ ID NO: 190794 - RNA, 19 nt, Artificial Sequence
  Description of Artificial Sequence: Synthetic oligonucleotide
  Sense strand starting at position 3388 of SEQ ID NO: 2460
cacuaauggguuuauguaa

SEQ ID NO: 190795 - RNA, 19 nt, Artificial Sequence
  Description of Artificial Sequence: Synthetic oligonucleotide
  Antisense strand to SEQ ID NO: 190794
uuacauaaacccauuagug

SEQ ID NO: 190796 - RNA, 19 nt, Artificial Sequence
  Description of Artificial Sequence: Synthetic oligonucleotide
  Sense strand starting at position 3357 of SEQ ID NO: 2460
ucccuagucugggugaaau

SEQ ID NO: 190797 - RNA, 19 nt, Artificial Sequence
  Description of Artificial Sequence: Synthetic oligonucleotide
  Antisense strand to SEQ ID NO: 190796
auuucacccagacuaggga

SEQ ID NO: 190798 - RNA, 19 nt, Artificial Sequence
  Description of Artificial Sequence: Synthetic oligonucleotide
  Sense strand starting at position 3356 of SEQ ID NO: 2460
cucccuagucugggugaaa

SEQ ID NO: 190799 - RNA, 19 nt, Artificial Sequence
  Description of Artificial Sequence: Synthetic oligonucleotide
  Antisense strand to SEQ ID NO: 190798
uuucacccagacuagggag

SEQ ID NO: 190800 - RNA, 19 nt, Artificial Sequence
  Description of Artificial Sequence: Synthetic oligonucleotide
  Sense strand starting at position 3313 of SEQ ID NO: 2460
guaacuguauuucugucaa

SEQ ID NO: 190801 - RNA, 19 nt, Artificial Sequence
  Description of Artificial Sequence: Synthetic oligonucleotide
  Antisense strand to SEQ ID NO: 190800
uugacagaaauacaguuac

SEQ ID NO: 190802 - RNA, 19 nt, Artificial Sequence
  Description of Artificial Sequence: Synthetic oligonucleotide
  Sense strand starting at position 2984 of SEQ ID NO: 2460
gguauacuagaauguguag

SEQ ID NO: 190803 - RNA, 19 nt, Artificial Sequence
  Description of Artificial Sequence: Synthetic oligonucleotide
  Antisense strand to SEQ ID NO: 190802
cuacacauucuaguauacc

SEQ ID NO: 190804 - RNA, 19 nt, Artificial Sequence
  Description of Artificial Sequence: Synthetic oligonucleotide
  Sense strand starting at position 2819 of SEQ ID NO: 2460
uggaaucauucuguuuaca

SEQ ID NO: 190805 - RNA, 19 nt, Artificial Sequence
  Description of Artificial Sequence: Synthetic oligonucleotide
  Antisense strand to SEQ ID NO: 190804
uguaaacagaaugauucca

SEQ ID NO: 190806 - RNA, 19 nt, Artificial Sequence
  Description of Artificial Sequence: Synthetic oligonucleotide
  Sense strand starting at position 2774 of SEQ ID NO: 2460
cuaguaaggcucugaagga

SEQ ID NO: 190807 - RNA, 19 nt, Artificial Sequence
  Description of Artificial Sequence: Synthetic oligonucleotide
  Antisense strand to SEQ ID NO: 190806
uccuucagagccuuacuag

SEQ ID NO: 190808 - RNA, 19 nt, Artificial Sequence
  Description of Artificial Sequence: Synthetic oligonucleotide
  Sense strand starting at position 2651 of SEQ ID NO: 2460
acggguuguccugaaauuc

SEQ ID NO: 190809 - RNA, 19 nt, Artificial Sequence
  Description of Artificial Sequence: Synthetic oligonucleotide
  Antisense strand to SEQ ID NO: 190808
gaauuucaggacaacccgu

SEQ ID NO: 190810 - RNA, 19 nt, Artificial Sequence
  Description of Artificial Sequence: Synthetic oligonucleotide
  Sense strand starting at position 2516 of SEQ ID NO: 2460
cuguguagaucauuaagaa

SEQ ID NO: 190811 - RNA, 19 nt, Artificial Sequence
  Description of Artificial Sequence: Synthetic oligonucleotide
  Antisense strand to SEQ ID NO: 190810
uucuuaaugaucuacacag

SEQ ID NO: 190812 - RNA, 19 nt, Artificial Sequence
  Description of Artificial Sequence: Synthetic oligonucleotide
  Sense strand starting at position 2514 of SEQ ID NO: 2460
uacuguguagaucauuaag

SEQ ID NO: 190813 - RNA, 19 nt, Artificial Sequence
  Description of Artificial Sequence: Synthetic oligonucleotide
  Antisense strand to SEQ ID NO: 190812
cuuaaugaucuacacagua

SEQ ID NO: 190814 - RNA, 19 nt, Artificial Sequence
  Description of Artificial Sequence: Synthetic oligonucleotide
  Sense strand starting at position 2511 of SEQ ID NO: 2460
aucuacuguguagaucauu

SEQ ID NO: 190815 - RNA, 19 nt, Artificial Sequence
  Description of Artificial Sequence: Synthetic oligonucleotide
  Antisense strand to SEQ ID NO: 190814
aaugaucuacacaguagau

SEQ ID NO: 190816 - RNA, 19 nt, Artificial Sequence
  Description of Artificial Sequence: Synthetic oligonucleotide
  Sense strand starting at position 2509 of SEQ ID NO: 2460
uuaucuacuguguagauca

SEQ ID NO: 190817 - RNA, 19 nt, Artificial Sequence
  Description of Artificial Sequence: Synthetic oligonucleotide
  Antisense strand to SEQ ID NO: 190816
ugaucuacacaguagauaa

SEQ ID NO: 190818 - RNA, 19 nt, Artificial Sequence
  Description of Artificial Sequence: Synthetic oligonucleotide
  Sense strand starting at position 2478 of SEQ ID NO: 2460
aaggaauugucuuugaccu

SEQ ID NO: 190819 - RNA, 19 nt, Artificial Sequence
  Description of Artificial Sequence: Synthetic oligonucleotide
  Antisense strand to SEQ ID NO: 190818
aggucaaagacaauuccuu

SEQ ID NO: 190820 - RNA, 19 nt, Artificial Sequence
  Description of Artificial Sequence: Synthetic oligonucleotide
  Sense strand starting at position 2473 of SEQ ID NO: 2460
agacgaaggaauugucuuu

SEQ ID NO: 190821 - RNA, 19 nt, Artificial Sequence
  Description of Artificial Sequence: Synthetic oligonucleotide
  Antisense strand to SEQ ID NO: 190820
aaagacaauuccuucgucu

SEQ ID NO: 190822 - RNA, 19 nt, Artificial Sequence
  Description of Artificial Sequence: Synthetic oligonucleotide
  Sense strand starting at position 2401 of SEQ ID NO: 2460
augcgucuggaugaaagaa

SEQ ID NO: 190823 - RNA, 19 nt, Artificial Sequence
  Description of Artificial Sequence: Synthetic oligonucleotide
  Antisense strand to SEQ ID NO: 190822
uucuuucauccagacgcau

SEQ ID NO: 190824 - RNA, 19 nt, Artificial Sequence
  Description of Artificial Sequence: Synthetic oligonucleotide
  Sense strand starting at position 2335 of SEQ ID NO: 2460
aagggaaucuccguuugac

SEQ ID NO: 190825 - RNA, 19 nt, Artificial Sequence
  Description of Artificial Sequence: Synthetic oligonucleotide
  Antisense strand to SEQ ID NO: 190824
gucaaacggagauucccuu

SEQ ID NO: 190826 - RNA, 19 nt, Artificial Sequence
  Description of Artificial Sequence: Synthetic oligonucleotide
  Sense strand starting at position 2270 of SEQ ID NO: 2460
ucguucucucccgaagaua

SEQ ID NO: 190827 - RNA, 19 nt, Artificial Sequence
  Description of Artificial Sequence: Synthetic oligonucleotide
  Antisense strand to SEQ ID NO: 190826
uaucuucgggagagaacga

SEQ ID NO: 190828 - RNA, 19 nt, Artificial Sequence
  Description of Artificial Sequence: Synthetic oligonucleotide
  Sense strand starting at position 1141 of SEQ ID NO: 2460
aagguuguucucgagcaag

SEQ ID NO: 190829 - RNA, 19 nt, Artificial Sequence
  Description of Artificial Sequence: Synthetic oligonucleotide
  Antisense strand to SEQ ID NO: 190828
cuugcucgagaacaaccuu

SEQ ID NO: 190830 - RNA, 19 nt, Artificial Sequence
  Description of Artificial Sequence: Synthetic oligonucleotide
  Sense strand starting at position 995 of SEQ ID NO: 2460
gugaguguuuaucuacaaa

SEQ ID NO: 190831 - RNA, 19 nt, Artificial Sequence
  Description of Artificial Sequence: Synthetic oligonucleotide
  Antisense strand to SEQ ID NO: 190830
uuuguagauaaacacucac

SEQ ID NO: 190832 - RNA, 19 nt, Artificial Sequence
  Description of Artificial Sequence: Synthetic oligonucleotide
  Sense strand starting at position 991 of SEQ ID NO: 2460
aacugugaguguuuaucua

SEQ ID NO: 190833 - RNA, 19 nt, Artificial Sequence
  Description of Artificial Sequence: Synthetic oligonucleotide
  Antisense strand to SEQ ID NO: 190832
uagauaaacacucacaguu

SEQ ID NO: 190834 - RNA, 19 nt, Artificial Sequence
  Description of Artificial Sequence: Synthetic oligonucleotide
  Sense strand starting at position 988 of SEQ ID NO: 2460
uauaacugugaguguuuau

SEQ ID NO: 190835 - RNA, 19 nt, Artificial Sequence
  Description of Artificial Sequence: Synthetic oligonucleotide
  Antisense strand to SEQ ID NO: 190834
auaaacacucacaguuaua

SEQ ID NO: 190836 - RNA, 19 nt, Artificial Sequence
  Description of Artificial Sequence: Synthetic oligonucleotide
  Sense strand starting at position 987 of SEQ ID NO: 2460
uuauaacugugaguguuua

SEQ ID NO: 190837 - RNA, 19 nt, Artificial Sequence
  Description of Artificial Sequence: Synthetic oligonucleotide
  Antisense strand to SEQ ID NO: 190836
uaaacacucacaguuauaa

SEQ ID NO: 190838 - RNA, 19 nt, Artificial Sequence
  Description of Artificial Sequence: Synthetic oligonucleotide
  Sense strand starting at position 893 of SEQ ID NO: 2460
ucucuuuaaguggaacauu

SEQ ID NO: 190839 - RNA, 19 nt, Artificial Sequence
  Description of Artificial Sequence: Synthetic oligonucleotide
  Antisense strand to SEQ ID NO: 190838
aauguuccacuuaaagaga

SEQ ID NO: 190840 - RNA, 19 nt, Artificial Sequence
  Description of Artificial Sequence: Synthetic oligonucleotide
  Sense strand starting at position 875 of SEQ ID NO: 2460
ugccaacuauucucuggau

SEQ ID NO: 190841 - RNA, 19 nt, Artificial Sequence
  Description of Artificial Sequence: Synthetic oligonucleotide
  Antisense strand to SEQ ID NO: 190840
auccagagaauaguuggca

SEQ ID NO: 190842 - RNA, 19 nt, Artificial Sequence
  Description of Artificial Sequence: Synthetic oligonucleotide
  Sense strand starting at position 847 of SEQ ID NO: 2460
ggcacuuaaagaggacuua

SEQ ID NO: 190843 - RNA, 19 nt, Artificial Sequence
  Description of Artificial Sequence: Synthetic oligonucleotide
  Antisense strand to SEQ ID NO: 190842
uaaguccucuuuaagugcc

SEQ ID NO: 190844 - RNA, 19 nt, Artificial Sequence
  Description of Artificial Sequence: Synthetic oligonucleotide
  Sense strand starting at position 825 of SEQ ID NO: 2460
ucagguauuuauuagggua

SEQ ID NO: 190845 - RNA, 19 nt, Artificial Sequence
  Description of Artificial Sequence: Synthetic oligonucleotide
  Antisense strand to SEQ ID NO: 190844
uacccuaauaaauaccuga

SEQ ID NO: 190846 - RNA, 19 nt, Artificial Sequence
  Description of Artificial Sequence: Synthetic oligonucleotide
  Sense strand starting at position 727 of SEQ ID NO: 2460
ucugacuuacgguaucaaa

SEQ ID NO: 190847 - RNA, 19 nt, Artificial Sequence
  Description of Artificial Sequence: Synthetic oligonucleotide
  Antisense strand to SEQ ID NO: 190846
uuugauaccguaagucaga

SEQ ID NO: 190848 - RNA, 19 nt, Artificial Sequence
  Description of Artificial Sequence: Synthetic oligonucleotide
  Sense strand starting at position 511 of SEQ ID NO: 2460
guuuacaaucugugagauu

SEQ ID NO: 190849 - RNA, 19 nt, Artificial Sequence
  Description of Artificial Sequence: Synthetic oligonucleotide
  Antisense strand to SEQ ID NO: 190848
aaucucacagauuguaaac

SEQ ID NO: 190850 - RNA, 19 nt, Artificial Sequence
  Description of Artificial Sequence: Synthetic oligonucleotide
  Sense strand starting at position 510 of SEQ ID NO: 2460
uguuuacaaucugugagau

SEQ ID NO: 190851 - RNA, 19 nt, Artificial Sequence
  Description of Artificial Sequence: Synthetic oligonucleotide
  Antisense strand to SEQ ID NO: 190850
aucucacagauuguaaaca

SEQ ID NO: 190852 - RNA, 19 nt, Artificial Sequence
  Description of Artificial Sequence: Synthetic oligonucleotide
  Sense strand starting at position 495 of SEQ ID NO: 2460
auuauaaaccuguacuguu

SEQ ID NO: 190853 - RNA, 19 nt, Artificial Sequence
  Description of Artificial Sequence: Synthetic oligonucleotide
  Antisense strand to SEQ ID NO: 190852
aacaguacagguuuauaau

SEQ ID NO: 190854 - RNA, 19 nt, Artificial Sequence
  Description of Artificial Sequence: Synthetic oligonucleotide
  Sense strand starting at position 485 of SEQ ID NO: 2460
guacgagcccauuauaaac

SEQ ID NO: 190855 - RNA, 19 nt, Artificial Sequence
  Description of Artificial Sequence: Synthetic oligonucleotide
  Antisense strand to SEQ ID NO: 190854
guuuauaaugggcucguac

SEQ ID NO: 190856 - RNA, 19 nt, Artificial Sequence
  Description of Artificial Sequence: Synthetic oligonucleotide
  Sense strand starting at position 482 of SEQ ID NO: 2460
ucaguacgagcccauuaua

SEQ ID NO: 190857 - RNA, 19 nt, Artificial Sequence
  Description of Artificial Sequence: Synthetic oligonucleotide
  Antisense strand to SEQ ID NO: 190856
uauaaugggcucguacuga

SEQ ID NO: 190858 - RNA, 19 nt, Artificial Sequence
  Description of Artificial Sequence: Synthetic oligonucleotide
  Sense strand starting at position 320 of SEQ ID NO: 2460
gguaguuacccauauucuu

SEQ ID NO: 190859 - RNA, 19 nt, Artificial Sequence
  Description of Artificial Sequence: Synthetic oligonucleotide
  Antisense strand to SEQ ID NO: 190858
aagaauauggguaacuacc

SEQ ID NO: 190860 - RNA, 19 nt, Artificial Sequence
  Description of Artificial Sequence: Synthetic oligonucleotide
  Sense strand starting at position 317 of SEQ ID NO: 2460
uuagguaguuacccauauu

SEQ ID NO: 190861 - RNA, 19 nt, Artificial Sequence
  Description of Artificial Sequence: Synthetic oligonucleotide
  Antisense strand to SEQ ID NO: 190860
aauauggguaacuaccuaa

SEQ ID NO: 190862 - RNA, 19 nt, Artificial Sequence
  Description of Artificial Sequence: Synthetic oligonucleotide
  Sense strand starting at position 299 of SEQ ID NO: 2460
gguuaagucagggaucuuu

SEQ ID NO: 190863 - RNA, 19 nt, Artificial Sequence
  Description of Artificial Sequence: Synthetic oligonucleotide
  Antisense strand to SEQ ID NO: 190862
aaagaucccugacuuaacc

SEQ ID NO: 190864 - RNA, 19 nt, Artificial Sequence
  Description of Artificial Sequence: Synthetic oligonucleotide
  Sense strand starting at position 298 of SEQ ID NO: 2460
agguuaagucagggaucuu

SEQ ID NO: 190865 - RNA, 19 nt, Artificial Sequence
  Description of Artificial Sequence: Synthetic oligonucleotide
  Antisense strand to SEQ ID NO: 190864
aagaucccugacuuaaccu

SEQ ID NO: 190866 - RNA, 19 nt, Artificial Sequence
  Description of Artificial Sequence: Synthetic oligonucleotide
  Sense strand starting at position 3674 of SEQ ID NO: 2461
guagauucucuuggauaca

SEQ ID NO: 190867 - RNA, 19 nt, Artificial Sequence
  Description of Artificial Sequence: Synthetic oligonucleotide
  Antisense strand to SEQ ID NO: 190866
uguauccaagagaaucuac

SEQ ID NO: 190868 - RNA, 19 nt, Artificial Sequence
  Description of Artificial Sequence: Synthetic oligonucleotide
  Sense strand starting at position 3671 of SEQ ID NO: 2461
uauguagauucucuuggau

SEQ ID NO: 190869 - RNA, 19 nt, Artificial Sequence
  Description of Artificial Sequence: Synthetic oligonucleotide
  Antisense strand to SEQ ID NO: 190868
auccaagagaaucuacaua

SEQ ID NO: 190870 - RNA, 19 nt, Artificial Sequence
  Description of Artificial Sequence: Synthetic oligonucleotide
  Sense strand starting at position 3670 of SEQ ID NO: 2461
uuauguagauucucuugga

SEQ ID NO: 190871 - RNA, 19 nt, Artificial Sequence
  Description of Artificial Sequence: Synthetic oligonucleotide
  Antisense strand to SEQ ID NO: 190870
uccaagagaaucuacauaa

SEQ ID NO: 190872 - RNA, 19 nt, Artificial Sequence
  Description of Artificial Sequence: Synthetic oligonucleotide
  Sense strand starting at position 3619 of SEQ ID NO: 2461
ugaagagcucauuagugua

SEQ ID NO: 190873 - RNA, 19 nt, Artificial Sequence
  Description of Artificial Sequence: Synthetic oligonucleotide
  Antisense strand to SEQ ID NO: 190872
uacacuaaugagcucuuca

SEQ ID NO: 190874 - RNA, 19 nt, Artificial Sequence
  Description of Artificial Sequence: Synthetic oligonucleotide
  Sense strand starting at position 3616 of SEQ ID NO: 2461
uguugaagagcucauuagu

SEQ ID NO: 190875 - RNA, 19 nt, Artificial Sequence
  Description of Artificial Sequence: Synthetic oligonucleotide
  Antisense strand to SEQ ID NO: 190874
acuaaugagcucuucaaca

SEQ ID NO: 190876 - RNA, 19 nt, Artificial Sequence
  Description of Artificial Sequence: Synthetic oligonucleotide
  Sense strand starting at position 3570 of SEQ ID NO: 2461
uuuguuagaguacaaucua

SEQ ID NO: 190877 - RNA, 19 nt, Artificial Sequence
  Description of Artificial Sequence: Synthetic oligonucleotide
  Antisense strand to SEQ ID NO: 190876
uagauuguacucuaacaaa

SEQ ID NO: 190878 - RNA, 19 nt, Artificial Sequence
  Description of Artificial Sequence: Synthetic oligonucleotide
  Sense strand starting at position 3436 of SEQ ID NO: 2461
gaagaauuccagcguagag

SEQ ID NO: 190879 - RNA, 19 nt, Artificial Sequence
  Description of Artificial Sequence: Synthetic oligonucleotide
  Antisense strand to SEQ ID NO: 190878
cucuacgcuggaauucuuc

SEQ ID NO: 190880 - RNA, 19 nt, Artificial Sequence
  Description of Artificial Sequence: Synthetic oligonucleotide
  Sense strand starting at position 3415 of SEQ ID NO: 2461
uugugaugauuacucacuu

SEQ ID NO: 190881 - RNA, 19 nt, Artificial Sequence
  Description of Artificial Sequence: Synthetic oligonucleotide
  Antisense strand to SEQ ID NO: 190880
aagugaguaaucaucacaa

SEQ ID NO: 190882 - RNA, 19 nt, Artificial Sequence
  Description of Artificial Sequence: Synthetic oligonucleotide
  Sense strand starting at position 3403 of SEQ ID NO: 2461
uacuaaagaugauugugau

SEQ ID NO: 190883 - RNA, 19 nt, Artificial Sequence
  Description of Artificial Sequence: Synthetic oligonucleotide
  Antisense strand to SEQ ID NO: 190882
aucacaaucaucuuuagua

SEQ ID NO: 190884 - RNA, 19 nt, Artificial Sequence
  Description of Artificial Sequence: Synthetic oligonucleotide
  Sense strand starting at position 3359 of SEQ ID NO: 2461
guguguuaucaauauuugc

SEQ ID NO: 190885 - RNA, 19 nt, Artificial Sequence
  Description of Artificial Sequence: Synthetic oligonucleotide
  Antisense strand to SEQ ID NO: 190884
gcaaauauugauaacacac

SEQ ID NO: 190886 - RNA, 19 nt, Artificial Sequence
  Description of Artificial Sequence: Synthetic oligonucleotide
  Sense strand starting at position 3325 of SEQ ID NO: 2461
auguguucccaauagaauu

SEQ ID NO: 190887 - RNA, 19 nt, Artificial Sequence
  Description of Artificial Sequence: Synthetic oligonucleotide
  Antisense strand to SEQ ID NO: 190886
aauucuauugggaacacau

SEQ ID NO: 190888 - RNA, 19 nt, Artificial Sequence
  Description of Artificial Sequence: Synthetic oligonucleotide
  Sense strand starting at position 3321 of SEQ ID NO: 2461
agagauguguucccaauag

SEQ ID NO: 190889 - RNA, 19 nt, Artificial Sequence
  Description of Artificial Sequence: Synthetic oligonucleotide
  Antisense strand to SEQ ID NO: 190888
cuauugggaacacaucucu

SEQ ID NO: 190890 - RNA, 19 nt, Artificial Sequence
  Description of Artificial Sequence: Synthetic oligonucleotide
  Sense strand starting at position 3134 of SEQ ID NO: 2461
ccaaacgauugauugacau

SEQ ID NO: 190891 - RNA, 19 nt, Artificial Sequence
  Description of Artificial Sequence: Synthetic oligonucleotide
  Antisense strand to SEQ ID NO: 190890
augucaaucaaucguuugg

SEQ ID NO: 190892 - RNA, 19 nt, Artificial Sequence
  Description of Artificial Sequence: Synthetic oligonucleotide
  Sense strand starting at position 3075 of SEQ ID NO: 2461
ugaauugucagcugaugaa

SEQ ID NO: 190893 - RNA, 19 nt, Artificial Sequence
  Description of Artificial Sequence: Synthetic oligonucleotide
  Antisense strand to SEQ ID NO: 190892
uucaucagcugacaauuca

SEQ ID NO: 190894 - RNA, 19 nt, Artificial Sequence
  Description of Artificial Sequence: Synthetic oligonucleotide
  Sense strand starting at position 3073 of SEQ ID NO: 2461
caugaauugucagcugaug

SEQ ID NO: 190895 - RNA, 19 nt, Artificial Sequence
  Description of Artificial Sequence: Synthetic oligonucleotide
  Antisense strand to SEQ ID NO: 190894
caucagcugacaauucaug

SEQ ID NO: 190896 - RNA, 19 nt, Artificial Sequence
  Description of Artificial Sequence: Synthetic oligonucleotide
  Sense strand starting at position 2947 of SEQ ID NO: 2461
cucugagaguaauuaguau

SEQ ID NO: 190897 - RNA, 19 nt, Artificial Sequence
  Description of Artificial Sequence: Synthetic oligonucleotide
  Antisense strand to SEQ ID NO: 190896
auacuaauuacucucagag

SEQ ID NO: 190898 - RNA, 19 nt, Artificial Sequence
  Description of Artificial Sequence: Synthetic oligonucleotide
  Sense strand starting at position 2893 of SEQ ID NO: 2461
ugcuaaagauguguugaaa

SEQ ID NO: 190899 - RNA, 19 nt, Artificial Sequence
  Description of Artificial Sequence: Synthetic oligonucleotide
  Antisense strand to SEQ ID NO: 190898
uuucaacacaucuuuagca

SEQ ID NO: 190900 - RNA, 19 nt, Artificial Sequence
  Description of Artificial Sequence: Synthetic oligonucleotide
  Sense strand starting at position 2892 of SEQ ID NO: 2461
augcuaaagauguguugaa

SEQ ID NO: 190901 - RNA, 19 nt, Artificial Sequence
  Description of Artificial Sequence: Synthetic oligonucleotide
  Antisense strand to SEQ ID NO: 190900
uucaacacaucuuuagcau

SEQ ID NO: 190902 - RNA, 19 nt, Artificial Sequence
  Description of Artificial Sequence: Synthetic oligonucleotide
  Sense strand starting at position 2833 of SEQ ID NO: 2461
acaauaaagugagcuaaau

SEQ ID NO: 190903 - RNA, 19 nt, Artificial Sequence
  Description of Artificial Sequence: Synthetic oligonucleotide
  Antisense strand to SEQ ID NO: 190902
auuuagcucacuuuauugu

SEQ ID NO: 190904 - RNA, 19 nt, Artificial Sequence
  Description of Artificial Sequence: Synthetic oligonucleotide
  Sense strand starting at position 2780 of SEQ ID NO: 2461
gaugauuaauugguuaaac

SEQ ID NO: 190905 - RNA, 19 nt, Artificial Sequence
  Description of Artificial Sequence: Synthetic oligonucleotide
  Antisense strand to SEQ ID NO: 190904
guuuaaccaauuaaucauc

SEQ ID NO: 190906 - RNA, 19 nt, Artificial Sequence
  Description of Artificial Sequence: Synthetic oligonucleotide
  Sense strand starting at position 2777 of SEQ ID NO: 2461
ucugaugauuaauugguua

SEQ ID NO: 190907 - RNA, 19 nt, Artificial Sequence
  Description of Artificial Sequence: Synthetic oligonucleotide
  Antisense strand to SEQ ID NO: 190906
uaaccaauuaaucaucaga

SEQ ID NO: 190908 - RNA, 19 nt, Artificial Sequence
  Description of Artificial Sequence: Synthetic oligonucleotide
  Sense strand starting at position 2765 of SEQ ID NO: 2461
accgaaaguuaaucugaug

SEQ ID NO: 190909 - RNA, 19 nt, Artificial Sequence
  Description of Artificial Sequence: Synthetic oligonucleotide
  Antisense strand to SEQ ID NO: 190908
caucagauuaacuuucggu

SEQ ID NO: 190910 - RNA, 19 nt, Artificial Sequence
  Description of Artificial Sequence: Synthetic oligonucleotide
  Sense strand starting at position 2755 of SEQ ID NO: 2461
cauuauucugaccgaaagu

SEQ ID NO: 190911 - RNA, 19 nt, Artificial Sequence
  Description of Artificial Sequence: Synthetic oligonucleotide
  Antisense strand to SEQ ID NO: 190910
acuuucggucagaauaaug

SEQ ID NO: 190912 - RNA, 19 nt, Artificial Sequence
  Description of Artificial Sequence: Synthetic oligonucleotide
  Sense strand starting at position 2754 of SEQ ID NO: 2461
ccauuauucugaccgaaag

SEQ ID NO: 190913 - RNA, 19 nt, Artificial Sequence
  Description of Artificial Sequence: Synthetic oligonucleotide
  Antisense strand to SEQ ID NO: 190912
cuuucggucagaauaaugg

SEQ ID NO: 190914 - RNA, 19 nt, Artificial Sequence
  Description of Artificial Sequence: Synthetic oligonucleotide
  Sense strand starting at position 2674 of SEQ ID NO: 2461
cgccauuucucucuuggaa

SEQ ID NO: 190915 - RNA, 19 nt, Artificial Sequence
  Description of Artificial Sequence: Synthetic oligonucleotide
  Antisense strand to SEQ ID NO: 190914
uuccaagagagaaauggcg

SEQ ID NO: 190916 - RNA, 19 nt, Artificial Sequence
  Description of Artificial Sequence: Synthetic oligonucleotide
  Sense strand starting at position 2647 of SEQ ID NO: 2461
guacauauuugcgucagua

SEQ ID NO: 190917 - RNA, 19 nt, Artificial Sequence
  Description of Artificial Sequence: Synthetic oligonucleotide
  Antisense strand to SEQ ID NO: 190916
uacugacgcaaauauguac

SEQ ID NO: 190918 - RNA, 19 nt, Artificial Sequence
  Description of Artificial Sequence: Synthetic oligonucleotide
  Sense strand starting at position 2634 of SEQ ID NO: 2461
uuacuuuaucuagguacau

SEQ ID NO: 190919 - RNA, 19 nt, Artificial Sequence
  Description of Artificial Sequence: Synthetic oligonucleotide
  Antisense strand to SEQ ID NO: 190918
auguaccuagauaaaguaa

SEQ ID NO: 190920 - RNA, 19 nt, Artificial Sequence
  Description of Artificial Sequence: Synthetic oligonucleotide
  Sense strand starting at position 2603 of SEQ ID NO: 2461
guggguuagacauaccuga

SEQ ID NO: 190921 - RNA, 19 nt, Artificial Sequence
  Description of Artificial Sequence: Synthetic oligonucleotide
  Antisense strand to SEQ ID NO: 190920
ucagguaugucuaacccac

SEQ ID NO: 190922 - RNA, 19 nt, Artificial Sequence
  Description of Artificial Sequence: Synthetic oligonucleotide
  Sense strand starting at position 2597 of SEQ ID NO: 2461
gauagcguggguuagacau

SEQ ID NO: 190923 - RNA, 19 nt, Artificial Sequence
  Description of Artificial Sequence: Synthetic oligonucleotide
  Antisense strand to SEQ ID NO: 190922
augucuaacccacgcuauc

SEQ ID NO: 190924 - RNA, 19 nt, Artificial Sequence
  Description of Artificial Sequence: Synthetic oligonucleotide
  Sense strand starting at position 2470 of SEQ ID NO: 2461
ggaauucaagcguaugaga

SEQ ID NO: 190925 - RNA, 19 nt, Artificial Sequence
  Description of Artificial Sequence: Synthetic oligonucleotide
  Antisense strand to SEQ ID NO: 190924
ucucauacgcuugaauucc

SEQ ID NO: 190926 - RNA, 19 nt, Artificial Sequence
  Description of Artificial Sequence: Synthetic oligonucleotide
  Sense strand starting at position 2159 of SEQ ID NO: 2461
cggcgaaguccuccucuuu

SEQ ID NO: 190927 - RNA, 19 nt, Artificial Sequence
  Description of Artificial Sequence: Synthetic oligonucleotide
  Antisense strand to SEQ ID NO: 190926
aaagaggaggacuucgccg

SEQ ID NO: 190928 - RNA, 19 nt, Artificial Sequence
  Description of Artificial Sequence: Synthetic oligonucleotide
  Sense strand starting at position 1307 of SEQ ID NO: 2461
gaggaaguugggugucuaa

SEQ ID NO: 190929 - RNA, 19 nt, Artificial Sequence
  Description of Artificial Sequence: Synthetic oligonucleotide
  Antisense strand to SEQ ID NO: 190928
uuagacacccaacuuccuc

SEQ ID NO: 190930 - RNA, 19 nt, Artificial Sequence
  Description of Artificial Sequence: Synthetic oligonucleotide
  Sense strand starting at position 1306 of SEQ ID NO: 2461
ugaggaaguugggugucua

SEQ ID NO: 190931 - RNA, 19 nt, Artificial Sequence
  Description of Artificial Sequence: Synthetic oligonucleotide
  Antisense strand to SEQ ID NO: 190930
uagacacccaacuuccuca

SEQ ID NO: 190932 - RNA, 19 nt, Artificial Sequence
  Description of Artificial Sequence: Synthetic oligonucleotide
  Sense strand starting at position 1278 of SEQ ID NO: 2461
augguuaggcaugauuaca

SEQ ID NO: 190933 - RNA, 19 nt, Artificial Sequence
  Description of Artificial Sequence: Synthetic oligonucleotide
  Antisense strand to SEQ ID NO: 190932
uguaaucaugccuaaccau

SEQ ID NO: 190934 - RNA, 19 nt, Artificial Sequence
  Description of Artificial Sequence: Synthetic oligonucleotide
  Sense strand starting at position 773 of SEQ ID NO: 2461
ucagguaaauuguuaacuu

SEQ ID NO: 190935 - RNA, 19 nt, Artificial Sequence
  Description of Artificial Sequence: Synthetic oligonucleotide
  Antisense strand to SEQ ID NO: 190934
aaguuaacaauuuaccuga

SEQ ID NO: 190936 - RNA, 19 nt, Artificial Sequence
  Description of Artificial Sequence: Synthetic oligonucleotide
  Sense strand starting at position 766 of SEQ ID NO: 2461
gguuaucucagguaaauug

SEQ ID NO: 190937 - RNA, 19 nt, Artificial Sequence
  Description of Artificial Sequence: Synthetic oligonucleotide
  Antisense strand to SEQ ID NO: 190936
caauuuaccugagauaacc

SEQ ID NO: 190938 - RNA, 19 nt, Artificial Sequence
  Description of Artificial Sequence: Synthetic oligonucleotide
  Sense strand starting at position 551 of SEQ ID NO: 2461
ggagaaucauuugaacauc

SEQ ID NO: 190939 - RNA, 19 nt, Artificial Sequence
  Description of Artificial Sequence: Synthetic oligonucleotide
  Antisense strand to SEQ ID NO: 190938
gauguucaaaugauucucc

SEQ ID NO: 190940 - RNA, 19 nt, Artificial Sequence
  Description of Artificial Sequence: Synthetic oligonucleotide
  Sense strand starting at position 443 of SEQ ID NO: 2461
auucuauccuggccaagau

SEQ ID NO: 190941 - RNA, 19 nt, Artificial Sequence
  Description of Artificial Sequence: Synthetic oligonucleotide
  Antisense strand to SEQ ID NO: 190940
aucuuggccaggauagaau

SEQ ID NO: 190942 - RNA, 19 nt, Artificial Sequence
  Description of Artificial Sequence: Synthetic oligonucleotide
  Sense strand starting at position 371 of SEQ ID NO: 2461
uugagcuaugaugaugcua

SEQ ID NO: 190943 - RNA, 19 nt, Artificial Sequence
  Description of Artificial Sequence: Synthetic oligonucleotide
  Antisense strand to SEQ ID NO: 190942
uagcaucaucauagcucaa

SEQ ID NO: 190944 - RNA, 19 nt, Artificial Sequence
  Description of Artificial Sequence: Synthetic oligonucleotide
  Sense strand starting at position 207 of SEQ ID NO: 2461
gcaagaugacuugagucca

SEQ ID NO: 190945 - RNA, 19 nt, Artificial Sequence
  Description of Artificial Sequence: Synthetic oligonucleotide
  Antisense strand to SEQ ID NO: 190944
uggacucaagucaucuugc

SEQ ID NO: 190946 - RNA, 19 nt, Artificial Sequence
  Description of Artificial Sequence: Synthetic oligonucleotide
  Sense strand starting at position 3696 of SEQ ID NO: 2463
cucggagggucacauuuaa

SEQ ID NO: 190947 - RNA, 19 nt, Artificial Sequence
  Description of Artificial Sequence: Synthetic oligonucleotide
  Antisense strand to SEQ ID NO: 190946
uuaaaugugacccuccgag

SEQ ID NO: 190948 - RNA, 19 nt, Artificial Sequence
  Description of Artificial Sequence: Synthetic oligonucleotide
  Sense strand starting at position 2781 of SEQ ID NO: 2463
gaguuaugccagcagcaaa

SEQ ID NO: 190949 - RNA, 19 nt, Artificial Sequence
  Description of Artificial Sequence: Synthetic oligonucleotide
  Antisense strand to SEQ ID NO: 190948
uuugcugcuggcauaacuc

SEQ ID NO: 190950 - RNA, 19 nt, Artificial Sequence
  Description of Artificial Sequence: Synthetic oligonucleotide
  Sense strand starting at position 2773 of SEQ ID NO: 2463
agguauccgaguuaugcca

SEQ ID NO: 190951 - RNA, 19 nt, Artificial Sequence
  Description of Artificial Sequence: Synthetic oligonucleotide
  Antisense strand to SEQ ID NO: 190950
uggcauaacucggauaccu

SEQ ID NO: 190952 - RNA, 19 nt, Artificial Sequence
  Description of Artificial Sequence: Synthetic oligonucleotide
  Sense strand starting at position 2745 of SEQ ID NO: 2463
ggcuuaaaggaucaguguu

SEQ ID NO: 190953 - RNA, 19 nt, Artificial Sequence
  Description of Artificial Sequence: Synthetic oligonucleotide
  Antisense strand to SEQ ID NO: 190952
aacacugauccuuuaagcc

SEQ ID NO: 190954 - RNA, 19 nt, Artificial Sequence
  Description of Artificial Sequence: Synthetic oligonucleotide
  Sense strand starting at position 2719 of SEQ ID NO: 2463
uuucuaucucuuggagguu

SEQ ID NO: 190955 - RNA, 19 nt, Artificial Sequence
  Description of Artificial Sequence: Synthetic oligonucleotide
  Antisense strand to SEQ ID NO: 190954
aaccuccaagagauagaaa

SEQ ID NO: 190956 - RNA, 19 nt, Artificial Sequence
  Description of Artificial Sequence: Synthetic oligonucleotide
  Sense strand starting at position 2696 of SEQ ID NO: 2463
uuccacuguguuuaauauu

SEQ ID NO: 190957 - RNA, 19 nt, Artificial Sequence
  Description of Artificial Sequence: Synthetic oligonucleotide
  Antisense strand to SEQ ID NO: 190956
aauauuaaacacaguggaa

SEQ ID NO: 190958 - RNA, 19 nt, Artificial Sequence
  Description of Artificial Sequence: Synthetic oligonucleotide
  Sense strand starting at position 2690 of SEQ ID NO: 2463
ugacauuuccacuguguuu

SEQ ID NO: 190959 - RNA, 19 nt, Artificial Sequence
  Description of Artificial Sequence: Synthetic oligonucleotide
  Antisense strand to SEQ ID NO: 190958
aaacacaguggaaauguca

SEQ ID NO: 190960 - RNA, 19 nt, Artificial Sequence
  Description of Artificial Sequence: Synthetic oligonucleotide
  Sense strand starting at position 2664 of SEQ ID NO: 2463
ggcaauguugauuaucuca

SEQ ID NO: 190961 - RNA, 19 nt, Artificial Sequence
  Description of Artificial Sequence: Synthetic oligonucleotide
  Antisense strand to SEQ ID NO: 190960
ugagauaaucaacauugcc

SEQ ID NO: 190962 - RNA, 19 nt, Artificial Sequence
  Description of Artificial Sequence: Synthetic oligonucleotide
  Sense strand starting at position 2663 of SEQ ID NO: 2463
gggcaauguugauuaucuc

SEQ ID NO: 190963 - RNA, 19 nt, Artificial Sequence
  Description of Artificial Sequence: Synthetic oligonucleotide
  Antisense strand to SEQ ID NO: 190962
gagauaaucaacauugccc

SEQ ID NO: 190964 - RNA, 19 nt, Artificial Sequence
  Description of Artificial Sequence: Synthetic oligonucleotide
  Sense strand starting at position 2573 of SEQ ID NO: 2463
gcgggugacaaucaacauu

SEQ ID NO: 190965 - RNA, 19 nt, Artificial Sequence
  Description of Artificial Sequence: Synthetic oligonucleotide
  Antisense strand to SEQ ID NO: 190964
aauguugauugucacccgc

SEQ ID NO: 190966 - RNA, 19 nt, Artificial Sequence
  Description of Artificial Sequence: Synthetic oligonucleotide
  Sense strand starting at position 2371 of SEQ ID NO: 2463
cucuaaagucuuuaagucu

SEQ ID NO: 190967 - RNA, 19 nt, Artificial Sequence
  Description of Artificial Sequence: Synthetic oligonucleotide
  Antisense strand to SEQ ID NO: 190966
agacuuaaagacuuuagag

SEQ ID NO: 190968 - RNA, 19 nt, Artificial Sequence
  Description of Artificial Sequence: Synthetic oligonucleotide
  Sense strand starting at position 2370 of SEQ ID NO: 2463
ucucuaaagucuuuaaguc

SEQ ID NO: 190969 - RNA, 19 nt, Artificial Sequence
  Description of Artificial Sequence: Synthetic oligonucleotide
  Antisense strand to SEQ ID NO: 190968
gacuuaaagacuuuagaga

SEQ ID NO: 190970 - RNA, 19 nt, Artificial Sequence
  Description of Artificial Sequence: Synthetic oligonucleotide
  Sense strand starting at position 2361 of SEQ ID NO: 2463
acucuaaagucucuaaagu

SEQ ID NO: 190971 - RNA, 19 nt, Artificial Sequence
  Description of Artificial Sequence: Synthetic oligonucleotide
  Antisense strand to SEQ ID NO: 190970
acuuuagagacuuuagagu

SEQ ID NO: 190972 - RNA, 19 nt, Artificial Sequence
  Description of Artificial Sequence: Synthetic oligonucleotide
  Sense strand starting at position 2066 of SEQ ID NO: 2463
ugaauacacuagucugaau

SEQ ID NO: 190973 - RNA, 19 nt, Artificial Sequence
  Description of Artificial Sequence: Synthetic oligonucleotide
  Antisense strand to SEQ ID NO: 190972
auucagacuaguguauuca

SEQ ID NO: 190974 - RNA, 19 nt, Artificial Sequence
  Description of Artificial Sequence: Synthetic oligonucleotide
  Sense strand starting at position 1770 of SEQ ID NO: 2463
acuugagacucagugaucu

SEQ ID NO: 190975 - RNA, 19 nt, Artificial Sequence
  Description of Artificial Sequence: Synthetic oligonucleotide
  Antisense strand to SEQ ID NO: 190974
agaucacugagucucaagu

SEQ ID NO: 190976 - RNA, 19 nt, Artificial Sequence
  Description of Artificial Sequence: Synthetic oligonucleotide
  Sense strand starting at position 1752 of SEQ ID NO: 2463
gcucaaugauacucaauga

SEQ ID NO: 190977 - RNA, 19 nt, Artificial Sequence
  Description of Artificial Sequence: Synthetic oligonucleotide
  Antisense strand to SEQ ID NO: 190976
ucauugaguaucauugagc

SEQ ID NO: 190978 - RNA, 19 nt, Artificial Sequence
  Description of Artificial Sequence: Synthetic oligonucleotide
  Sense strand starting at position 1743 of SEQ ID NO: 2463
cuggcucuggcucaaugau

SEQ ID NO: 190979 - RNA, 19 nt, Artificial Sequence
  Description of Artificial Sequence: Synthetic oligonucleotide
  Antisense strand to SEQ ID NO: 190978
aucauugagccagagccag

SEQ ID NO: 190980 - RNA, 19 nt, Artificial Sequence
  Description of Artificial Sequence: Synthetic oligonucleotide
  Sense strand starting at position 1675 of SEQ ID NO: 2463
ucuacuaggguguaaacuu

SEQ ID NO: 190981 - RNA, 19 nt, Artificial Sequence
  Description of Artificial Sequence: Synthetic oligonucleotide
  Antisense strand to SEQ ID NO: 190980
aaguuuacacccuaguaga

SEQ ID NO: 190982 - RNA, 19 nt, Artificial Sequence
  Description of Artificial Sequence: Synthetic oligonucleotide
  Sense strand starting at position 1042 of SEQ ID NO: 2463
ugaaacucugccugaucuu

SEQ ID NO: 190983 - RNA, 19 nt, Artificial Sequence
  Description of Artificial Sequence: Synthetic oligonucleotide
  Antisense strand to SEQ ID NO: 190982
aagaucaggcagaguuuca

SEQ ID NO: 190984 - RNA, 19 nt, Artificial Sequence
  Description of Artificial Sequence: Synthetic oligonucleotide
  Sense strand starting at position 1041 of SEQ ID NO: 2463
cugaaacucugccugaucu

SEQ ID NO: 190985 - RNA, 19 nt, Artificial Sequence
  Description of Artificial Sequence: Synthetic oligonucleotide
  Antisense strand to SEQ ID NO: 190984
agaucaggcagaguuucag

SEQ ID NO: 190986 - RNA, 19 nt, Artificial Sequence
  Description of Artificial Sequence: Synthetic oligonucleotide
  Sense strand starting at position 1002 of SEQ ID NO: 2463
gcugacuucuggguuaaug

SEQ ID NO: 190987 - RNA, 19 nt, Artificial Sequence
  Description of Artificial Sequence: Synthetic oligonucleotide
  Antisense strand to SEQ ID NO: 190986
cauuaacccagaagucagc

SEQ ID NO: 190988 - RNA, 19 nt, Artificial Sequence
  Description of Artificial Sequence: Synthetic oligonucleotide
  Sense strand starting at position 1001 of SEQ ID NO: 2463
ggcugacuucuggguuaau

SEQ ID NO: 190989 - RNA, 19 nt, Artificial Sequence
  Description of Artificial Sequence: Synthetic oligonucleotide
  Antisense strand to SEQ ID NO: 190988
auuaacccagaagucagcc

SEQ ID NO: 190990 - RNA, 19 nt, Artificial Sequence
  Description of Artificial Sequence: Synthetic oligonucleotide
  Sense strand starting at position 777 of SEQ ID NO: 2463
ggaggagcuguucagccua

SEQ ID NO: 190991 - RNA, 19 nt, Artificial Sequence
  Description of Artificial Sequence: Synthetic oligonucleotide
  Antisense strand to SEQ ID NO: 190990
uaggcugaacagcuccucc

SEQ ID NO: 190992 - RNA, 19 nt, Artificial Sequence
  Description of Artificial Sequence: Synthetic oligonucleotide
  Sense strand starting at position 666 of SEQ ID NO: 2463
cauagaauccaaggugugu

SEQ ID NO: 190993 - RNA, 19 nt, Artificial Sequence
  Description of Artificial Sequence: Synthetic oligonucleotide
  Antisense strand to SEQ ID NO: 190992
acacaccuuggauucuaug

SEQ ID NO: 190994 - RNA, 19 nt, Artificial Sequence
  Description of Artificial Sequence: Synthetic oligonucleotide
  Sense strand starting at position 642 of SEQ ID NO: 2463
aguguuagacuaggcugau

SEQ ID NO: 190995 - RNA, 19 nt, Artificial Sequence
  Description of Artificial Sequence: Synthetic oligonucleotide
  Antisense strand to SEQ ID NO: 190994
aucagccuagucuaacacu

SEQ ID NO: 190996 - RNA, 19 nt, Artificial Sequence
  Description of Artificial Sequence: Synthetic oligonucleotide
  Sense strand starting at position 615 of SEQ ID NO: 2463
ccuucuguagucuaagaau

SEQ ID NO: 190997 - RNA, 19 nt, Artificial Sequence
  Description of Artificial Sequence: Synthetic oligonucleotide
  Antisense strand to SEQ ID NO: 190996
auucuuagacuacagaagg

SEQ ID NO: 190998 - RNA, 19 nt, Artificial Sequence
  Description of Artificial Sequence: Synthetic oligonucleotide
  Sense strand starting at position 610 of SEQ ID NO: 2463
cagagccuucuguagucua

SEQ ID NO: 190999 - RNA, 19 nt, Artificial Sequence
  Description of Artificial Sequence: Synthetic oligonucleotide
  Antisense strand to SEQ ID NO: 190998
uagacuacagaaggcucug

SEQ ID NO: 191000 - RNA, 19 nt, Artificial Sequence
  Description of Artificial Sequence: Synthetic oligonucleotide
  Sense strand starting at position 600 of SEQ ID NO: 2463
ucuagugucccagagccuu

SEQ ID NO: 191001 - RNA, 19 nt, Artificial Sequence
  Description of Artificial Sequence: Synthetic oligonucleotide
  Antisense strand to SEQ ID NO: 191000
aaggcucugggacacuaga

SEQ ID NO: 191002 - RNA, 19 nt, Artificial Sequence
  Description of Artificial Sequence: Synthetic oligonucleotide
  Sense strand starting at position 530 of SEQ ID NO: 2463
gauuaaucugugugaagca

SEQ ID NO: 191003 - RNA, 19 nt, Artificial Sequence
  Description of Artificial Sequence: Synthetic oligonucleotide
  Antisense strand to SEQ ID NO: 191002
ugcuucacacagauuaauc

SEQ ID NO: 191004 - RNA, 19 nt, Artificial Sequence
  Description of Artificial Sequence: Synthetic oligonucleotide
  Sense strand starting at position 529 of SEQ ID NO: 2463
agauuaaucugugugaagc

SEQ ID NO: 191005 - RNA, 19 nt, Artificial Sequence
  Description of Artificial Sequence: Synthetic oligonucleotide
  Antisense strand to SEQ ID NO: 191004
gcuucacacagauuaaucu

SEQ ID NO: 191006 - RNA, 19 nt, Artificial Sequence
  Description of Artificial Sequence: Synthetic oligonucleotide
  Sense strand starting at position 528 of SEQ ID NO: 2463
aagauuaaucugugugaag

SEQ ID NO: 191007 - RNA, 19 nt, Artificial Sequence
  Description of Artificial Sequence: Synthetic oligonucleotide
  Antisense strand to SEQ ID NO: 191006
cuucacacagauuaaucuu

SEQ ID NO: 191008 - RNA, 19 nt, Artificial Sequence
  Description of Artificial Sequence: Synthetic oligonucleotide
  Sense strand starting at position 527 of SEQ ID NO: 2463
aaagauuaaucugugugaa

SEQ ID NO: 191009 - RNA, 19 nt, Artificial Sequence
  Description of Artificial Sequence: Synthetic oligonucleotide
  Antisense strand to SEQ ID NO: 191008
uucacacagauuaaucuuu

SEQ ID NO: 191010 - RNA, 19 nt, Artificial Sequence
  Description of Artificial Sequence: Synthetic oligonucleotide
  Sense strand starting at position 507 of SEQ ID NO: 2463
uugaguuauggugaggauu

SEQ ID NO: 191011 - RNA, 19 nt, Artificial Sequence
  Description of Artificial Sequence: Synthetic oligonucleotide
  Antisense strand to SEQ ID NO: 191010
aauccucaccauaacucaa

SEQ ID NO: 191012 - RNA, 19 nt, Artificial Sequence
  Description of Artificial Sequence: Synthetic oligonucleotide
  Sense strand starting at position 496 of SEQ ID NO: 2463
acaugcugaaguugaguua

SEQ ID NO: 191013 - RNA, 19 nt, Artificial Sequence
  Description of Artificial Sequence: Synthetic oligonucleotide
  Antisense strand to SEQ ID NO: 191012
uaacucaacuucagcaugu

SEQ ID NO: 191014 - RNA, 19 nt, Artificial Sequence
  Description of Artificial Sequence: Synthetic oligonucleotide
  Sense strand starting at position 478 of SEQ ID NO: 2463
auguguccuucuuuaugaa

SEQ ID NO: 191015 - RNA, 19 nt, Artificial Sequence
  Description of Artificial Sequence: Synthetic oligonucleotide
  Antisense strand to SEQ ID NO: 191014
uucauaaagaaggacacau

SEQ ID NO: 191016 - RNA, 19 nt, Artificial Sequence
  Description of Artificial Sequence: Synthetic oligonucleotide
  Sense strand starting at position 396 of SEQ ID NO: 2463
auacaugauuggguuaaac

SEQ ID NO: 191017 - RNA, 19 nt, Artificial Sequence
  Description of Artificial Sequence: Synthetic oligonucleotide
  Antisense strand to SEQ ID NO: 191016
guuuaacccaaucauguau

SEQ ID NO: 191018 - RNA, 19 nt, Artificial Sequence
  Description of Artificial Sequence: Synthetic oligonucleotide
  Sense strand starting at position 394 of SEQ ID NO: 2463
ugauacaugauuggguuaa

SEQ ID NO: 191019 - RNA, 19 nt, Artificial Sequence
  Description of Artificial Sequence: Synthetic oligonucleotide
  Antisense strand to SEQ ID NO: 191018
uuaacccaaucauguauca

SEQ ID NO: 191020 - RNA, 19 nt, Artificial Sequence
  Description of Artificial Sequence: Synthetic oligonucleotide
  Sense strand starting at position 393 of SEQ ID NO: 2463
augauacaugauuggguua

SEQ ID NO: 191021 - RNA, 19 nt, Artificial Sequence
  Description of Artificial Sequence: Synthetic oligonucleotide
  Antisense strand to SEQ ID NO: 191020
uaacccaaucauguaucau

SEQ ID NO: 191022 - RNA, 19 nt, Artificial Sequence
  Description of Artificial Sequence: Synthetic oligonucleotide
  Sense strand starting at position 392 of SEQ ID NO: 2463
gaugauacaugauuggguu

SEQ ID NO: 191023 - RNA, 19 nt, Artificial Sequence
  Description of Artificial Sequence: Synthetic oligonucleotide
  Antisense strand to SEQ ID NO: 191022
aacccaaucauguaucauc

SEQ ID NO: 191024 - RNA, 19 nt, Artificial Sequence
  Description of Artificial Sequence: Synthetic oligonucleotide
  Sense strand starting at position 340 of SEQ ID NO: 2463
aucuaucuugauugacaga

SEQ ID NO: 191025 - RNA, 19 nt, Artificial Sequence
  Description of Artificial Sequence: Synthetic oligonucleotide
  Antisense strand to SEQ ID NO: 191024
ucugucaaucaagauagau

SEQ ID NO: 191026 - RNA, 19 nt, Artificial Sequence
  Description of Artificial Sequence: Synthetic oligonucleotide
  Sense strand starting at position 3886 of SEQ ID NO: 2462
guggcuaauuuguuaaucu

SEQ ID NO: 191027 - RNA, 19 nt, Artificial Sequence
  Description of Artificial Sequence: Synthetic oligonucleotide
  Antisense strand to SEQ ID NO: 191026
agauuaacaaauuagccac

SEQ ID NO: 191028 - RNA, 19 nt, Artificial Sequence
  Description of Artificial Sequence: Synthetic oligonucleotide
  Sense strand starting at position 3833 of SEQ ID NO: 2462
gucagaaucuuggccucca

SEQ ID NO: 191029 - RNA, 19 nt, Artificial Sequence
  Description of Artificial Sequence: Synthetic oligonucleotide
  Antisense strand to SEQ ID NO: 191028
uggaggccaagauucugac

SEQ ID NO: 191030 - RNA, 19 nt, Artificial Sequence
  Description of Artificial Sequence: Synthetic oligonucleotide
  Sense strand starting at position 3744 of SEQ ID NO: 2462
uuuaucuaucuggguggua

SEQ ID NO: 191031 - RNA, 19 nt, Artificial Sequence
  Description of Artificial Sequence: Synthetic oligonucleotide
  Antisense strand to SEQ ID NO: 191030
uaccacccagauagauaaa

SEQ ID NO: 191032 - RNA, 19 nt, Artificial Sequence
  Description of Artificial Sequence: Synthetic oligonucleotide
  Sense strand starting at position 3733 of SEQ ID NO: 2462
agaugagccuguuuaucua

SEQ ID NO: 191033 - RNA, 19 nt, Artificial Sequence
  Description of Artificial Sequence: Synthetic oligonucleotide
  Antisense strand to SEQ ID NO: 191032
uagauaaacaggcucaucu

SEQ ID NO: 191034 - RNA, 19 nt, Artificial Sequence
  Description of Artificial Sequence: Synthetic oligonucleotide
  Sense strand starting at position 3417 of SEQ ID NO: 2462
aagugaugucauuguaaau

SEQ ID NO: 191035 - RNA, 19 nt, Artificial Sequence
  Description of Artificial Sequence: Synthetic oligonucleotide
  Antisense strand to SEQ ID NO: 191034
auuuacaaugacaucacuu

SEQ ID NO: 191036 - RNA, 19 nt, Artificial Sequence
  Description of Artificial Sequence: Synthetic oligonucleotide
  Sense strand starting at position 3167 of SEQ ID NO: 2462
auacgaguaacugaaguua

SEQ ID NO: 191037 - RNA, 19 nt, Artificial Sequence
  Description of Artificial Sequence: Synthetic oligonucleotide
  Antisense strand to SEQ ID NO: 191036
uaacuucaguuacucguau

SEQ ID NO: 191038 - RNA, 19 nt, Artificial Sequence
  Description of Artificial Sequence: Synthetic oligonucleotide
  Sense strand starting at position 3118 of SEQ ID NO: 2462
uggaauuagccucaaaucu

SEQ ID NO: 191039 - RNA, 19 nt, Artificial Sequence
  Description of Artificial Sequence: Synthetic oligonucleotide
  Antisense strand to SEQ ID NO: 191038
agauuugaggcuaauucca

SEQ ID NO: 191040 - RNA, 19 nt, Artificial Sequence
  Description of Artificial Sequence: Synthetic oligonucleotide
  Sense strand starting at position 3095 of SEQ ID NO: 2462
ugcuaugguccuuaaauau

SEQ ID NO: 191041 - RNA, 19 nt, Artificial Sequence
  Description of Artificial Sequence: Synthetic oligonucleotide
  Antisense strand to SEQ ID NO: 191040
auauuuaaggaccauagca

SEQ ID NO: 191042 - RNA, 19 nt, Artificial Sequence
  Description of Artificial Sequence: Synthetic oligonucleotide
  Sense strand starting at position 3094 of SEQ ID NO: 2462
cugcuaugguccuuaaaua

SEQ ID NO: 191043 - RNA, 19 nt, Artificial Sequence
  Description of Artificial Sequence: Synthetic oligonucleotide
  Antisense strand to SEQ ID NO: 191042
uauuuaaggaccauagcag

SEQ ID NO: 191044 - RNA, 19 nt, Artificial Sequence
  Description of Artificial Sequence: Synthetic oligonucleotide
  Sense strand starting at position 2914 of SEQ ID NO: 2462
acgaacuaacugugcuauu

SEQ ID NO: 191045 - RNA, 19 nt, Artificial Sequence
  Description of Artificial Sequence: Synthetic oligonucleotide
  Antisense strand to SEQ ID NO: 191044
aauagcacaguuaguucgu

SEQ ID NO: 191046 - RNA, 19 nt, Artificial Sequence
  Description of Artificial Sequence: Synthetic oligonucleotide
  Sense strand starting at position 2912 of SEQ ID NO: 2462
ggacgaacuaacugugcua

SEQ ID NO: 191047 - RNA, 19 nt, Artificial Sequence
  Description of Artificial Sequence: Synthetic oligonucleotide
  Antisense strand to SEQ ID NO: 191046
uagcacaguuaguucgucc

SEQ ID NO: 191048 - RNA, 19 nt, Artificial Sequence
  Description of Artificial Sequence: Synthetic oligonucleotide
  Sense strand starting at position 2413 of SEQ ID NO: 2462
gugccaguugcagaguaaa

SEQ ID NO: 191049 - RNA, 19 nt, Artificial Sequence
  Description of Artificial Sequence: Synthetic oligonucleotide
  Antisense strand to SEQ ID NO: 191048
uuuacucugcaacuggcac

SEQ ID NO: 191050 - RNA, 19 nt, Artificial Sequence
  Description of Artificial Sequence: Synthetic oligonucleotide
  Sense strand starting at position 2396 of SEQ ID NO: 2462
caggcaauguuagcaaagu

SEQ ID NO: 191051 - RNA, 19 nt, Artificial Sequence
  Description of Artificial Sequence: Synthetic oligonucleotide
  Antisense strand to SEQ ID NO: 191050
acuuugcuaacauugccug

SEQ ID NO: 191052 - RNA, 19 nt, Artificial Sequence
  Description of Artificial Sequence: Synthetic oligonucleotide
  Sense strand starting at position 2136 of SEQ ID NO: 2462
ggaucuuacccuugaaguc

SEQ ID NO: 191053 - RNA, 19 nt, Artificial Sequence
  Description of Artificial Sequence: Synthetic oligonucleotide
  Antisense strand to SEQ ID NO: 191052
gacuucaaggguaagaucc

SEQ ID NO: 191054 - RNA, 19 nt, Artificial Sequence
  Description of Artificial Sequence: Synthetic oligonucleotide
  Sense strand starting at position 2050 of SEQ ID NO: 2462
ggucccagcucccugaauu

SEQ ID NO: 191055 - RNA, 19 nt, Artificial Sequence
  Description of Artificial Sequence: Synthetic oligonucleotide
  Antisense strand to SEQ ID NO: 191054
aauucagggagcugggacc

SEQ ID NO: 191056 - RNA, 19 nt, Artificial Sequence
  Description of Artificial Sequence: Synthetic oligonucleotide
  Sense strand starting at position 1792 of SEQ ID NO: 2462
acucaaagcuccgucucua

SEQ ID NO: 191057 - RNA, 19 nt, Artificial Sequence
  Description of Artificial Sequence: Synthetic oligonucleotide
  Antisense strand to SEQ ID NO: 191056
uagagacggagcuuugagu

SEQ ID NO: 191058 - RNA, 19 nt, Artificial Sequence
  Description of Artificial Sequence: Synthetic oligonucleotide
  Sense strand starting at position 1704 of SEQ ID NO: 2462
cuaugagggcaagguuaaa

SEQ ID NO: 191059 - RNA, 19 nt, Artificial Sequence
  Description of Artificial Sequence: Synthetic oligonucleotide
  Antisense strand to SEQ ID NO: 191058
uuuaaccuugcccucauag

SEQ ID NO: 191060 - RNA, 19 nt, Artificial Sequence
  Description of Artificial Sequence: Synthetic oligonucleotide
  Sense strand starting at position 1701 of SEQ ID NO: 2462
agucuaugagggcaagguu

SEQ ID NO: 191061 - RNA, 19 nt, Artificial Sequence
  Description of Artificial Sequence: Synthetic oligonucleotide
  Antisense strand to SEQ ID NO: 191060
aaccuugcccucauagacu

SEQ ID NO: 191062 - RNA, 19 nt, Artificial Sequence
  Description of Artificial Sequence: Synthetic oligonucleotide
  Sense strand starting at position 1572 of SEQ ID NO: 2462
gagagauacaggugugaug

SEQ ID NO: 191063 - RNA, 19 nt, Artificial Sequence
  Description of Artificial Sequence: Synthetic oligonucleotide
  Antisense strand to SEQ ID NO: 191062
caucacaccuguaucucuc

SEQ ID NO: 191064 - RNA, 19 nt, Artificial Sequence
  Description of Artificial Sequence: Synthetic oligonucleotide
  Sense strand starting at position 1555 of SEQ ID NO: 2462
aucacugcucaaugaagga

SEQ ID NO: 191065 - RNA, 19 nt, Artificial Sequence
  Description of Artificial Sequence: Synthetic oligonucleotide
  Antisense strand to SEQ ID NO: 191064
uccuucauugagcagugau

SEQ ID NO: 191066 - RNA, 19 nt, Artificial Sequence
  Description of Artificial Sequence: Synthetic oligonucleotide
  Sense strand starting at position 1293 of SEQ ID NO: 2462
uggcacgaucucgacuaaa

SEQ ID NO: 191067 - RNA, 19 nt, Artificial Sequence
  Description of Artificial Sequence: Synthetic oligonucleotide
  Antisense strand to SEQ ID NO: 191066
uuuagucgagaucgugcca

SEQ ID NO: 191068 - RNA, 19 nt, Artificial Sequence
  Description of Artificial Sequence: Synthetic oligonucleotide
  Sense strand starting at position 1148 of SEQ ID NO: 2462
guagacaugggucauguca

SEQ ID NO: 191069 - RNA, 19 nt, Artificial Sequence
  Description of Artificial Sequence: Synthetic oligonucleotide
  Antisense strand to SEQ ID NO: 191068
ugacaugacccaugucuac

SEQ ID NO: 191070 - RNA, 19 nt, Artificial Sequence
  Description of Artificial Sequence: Synthetic oligonucleotide
  Sense strand starting at position 1086 of SEQ ID NO: 2462
uguuguugcagauaaagua

SEQ ID NO: 191071 - RNA, 19 nt, Artificial Sequence
  Description of Artificial Sequence: Synthetic oligonucleotide
  Antisense strand to SEQ ID NO: 191070
uacuuuaucugcaacaaca

SEQ ID NO: 191072 - RNA, 19 nt, Artificial Sequence
  Description of Artificial Sequence: Synthetic oligonucleotide
  Sense strand starting at position 1084 of SEQ ID NO: 2462
acuguuguugcagauaaag

SEQ ID NO: 191073 - RNA, 19 nt, Artificial Sequence
  Description of Artificial Sequence: Synthetic oligonucleotide
  Antisense strand to SEQ ID NO: 191072
cuuuaucugcaacaacagu

SEQ ID NO: 191074 - RNA, 19 nt, Artificial Sequence
  Description of Artificial Sequence: Synthetic oligonucleotide
  Sense strand starting at position 1079 of SEQ ID NO: 2462
gugggacuguuguugcaga

SEQ ID NO: 191075 - RNA, 19 nt, Artificial Sequence
  Description of Artificial Sequence: Synthetic oligonucleotide
  Antisense strand to SEQ ID NO: 191074
ucugcaacaacagucccac

SEQ ID NO: 191076 - RNA, 19 nt, Artificial Sequence
  Description of Artificial Sequence: Synthetic oligonucleotide
  Sense strand starting at position 802 of SEQ ID NO: 2462
gguggauugcuucgauuca

SEQ ID NO: 191077 - RNA, 19 nt, Artificial Sequence
  Description of Artificial Sequence: Synthetic oligonucleotide
  Antisense strand to SEQ ID NO: 191076
ugaaucgaagcaauccacc

SEQ ID NO: 191078 - RNA, 19 nt, Artificial Sequence
  Description of Artificial Sequence: Synthetic oligonucleotide
  Sense strand starting at position 704 of SEQ ID NO: 2462
gcggauauuccugguauag

SEQ ID NO: 191079 - RNA, 19 nt, Artificial Sequence
  Description of Artificial Sequence: Synthetic oligonucleotide
  Antisense strand to SEQ ID NO: 191078
cuauaccaggaauauccgc

SEQ ID NO: 191080 - RNA, 19 nt, Artificial Sequence
  Description of Artificial Sequence: Synthetic oligonucleotide
  Sense strand starting at position 694 of SEQ ID NO: 2462
accaaugauggcggauauu

SEQ ID NO: 191081 - RNA, 19 nt, Artificial Sequence
  Description of Artificial Sequence: Synthetic oligonucleotide
  Antisense strand to SEQ ID NO: 191080
aauauccgccaucauuggu

SEQ ID NO: 191082 - RNA, 19 nt, Artificial Sequence
  Description of Artificial Sequence: Synthetic oligonucleotide
  Sense strand starting at position 649 of SEQ ID NO: 2462
ucuucugggaggugaaauu

SEQ ID NO: 191083 - RNA, 19 nt, Artificial Sequence
  Description of Artificial Sequence: Synthetic oligonucleotide
  Antisense strand to SEQ ID NO: 191082
aauuucaccucccagaaga

SEQ ID NO: 191084 - RNA, 19 nt, Artificial Sequence
  Description of Artificial Sequence: Synthetic oligonucleotide
  Sense strand starting at position 647 of SEQ ID NO: 2462
agucuucugggaggugaaa

SEQ ID NO: 191085 - RNA, 19 nt, Artificial Sequence
  Description of Artificial Sequence: Synthetic oligonucleotide
  Antisense strand to SEQ ID NO: 191084
uuucaccucccagaagacu

SEQ ID NO: 191086 - RNA, 19 nt, Artificial Sequence
  Description of Artificial Sequence: Synthetic oligonucleotide
  Sense strand starting at position 640 of SEQ ID NO: 2462
gacggucagucuucuggga

SEQ ID NO: 191087 - RNA, 19 nt, Artificial Sequence
  Description of Artificial Sequence: Synthetic oligonucleotide
  Antisense strand to SEQ ID NO: 191086
ucccagaagacugaccguc

SEQ ID NO: 191088 - RNA, 19 nt, Artificial Sequence
  Description of Artificial Sequence: Synthetic oligonucleotide
  Sense strand starting at position 589 of SEQ ID NO: 2462
ugucccaaccaguaaguau

SEQ ID NO: 191089 - RNA, 19 nt, Artificial Sequence
  Description of Artificial Sequence: Synthetic oligonucleotide
  Antisense strand to SEQ ID NO: 191088
auacuuacugguugggaca

SEQ ID NO: 191090 - RNA, 19 nt, Artificial Sequence
  Description of Artificial Sequence: Synthetic oligonucleotide
  Sense strand starting at position 566 of SEQ ID NO: 2462
ccggguuacacugaugagu

SEQ ID NO: 191091 - RNA, 19 nt, Artificial Sequence
  Description of Artificial Sequence: Synthetic oligonucleotide
  Antisense strand to SEQ ID NO: 191090
acucaucaguguaacccgg

SEQ ID NO: 191092 - RNA, 19 nt, Artificial Sequence
  Description of Artificial Sequence: Synthetic oligonucleotide
  Sense strand starting at position 538 of SEQ ID NO: 2462
gagccaucauuuccgaagu

SEQ ID NO: 191093 - RNA, 19 nt, Artificial Sequence
  Description of Artificial Sequence: Synthetic oligonucleotide
  Antisense strand to SEQ ID NO: 191092
acuucggaaaugauggcuc

SEQ ID NO: 191094 - RNA, 19 nt, Artificial Sequence
  Description of Artificial Sequence: Synthetic oligonucleotide
  Sense strand starting at position 517 of SEQ ID NO: 2462
guuaauucugcaggcaaug

SEQ ID NO: 191095 - RNA, 19 nt, Artificial Sequence
  Description of Artificial Sequence: Synthetic oligonucleotide
  Antisense strand to SEQ ID NO: 191094
cauugccugcagaauuaac

SEQ ID NO: 191096 - RNA, 19 nt, Artificial Sequence
  Description of Artificial Sequence: Synthetic oligonucleotide
  Sense strand starting at position 515 of SEQ ID NO: 2462
ugguuaauucugcaggcaa

SEQ ID NO: 191097 - RNA, 19 nt, Artificial Sequence
  Description of Artificial Sequence: Synthetic oligonucleotide
  Antisense strand to SEQ ID NO: 191096
uugccugcagaauuaacca

SEQ ID NO: 191098 - RNA, 19 nt, Artificial Sequence
  Description of Artificial Sequence: Synthetic oligonucleotide
  Sense strand starting at position 514 of SEQ ID NO: 2462
augguuaauucugcaggca

SEQ ID NO: 191099 - RNA, 19 nt, Artificial Sequence
  Description of Artificial Sequence: Synthetic oligonucleotide
  Antisense strand to SEQ ID NO: 191098
ugccugcagaauuaaccau

SEQ ID NO: 191100 - RNA, 19 nt, Artificial Sequence
  Description of Artificial Sequence: Synthetic oligonucleotide
  Sense strand starting at position 473 of SEQ ID NO: 2462
ggcagaaggcuauauguuu

SEQ ID NO: 191101 - RNA, 19 nt, Artificial Sequence
  Description of Artificial Sequence: Synthetic oligonucleotide
  Antisense strand to SEQ ID NO: 191100
aaacauauagccuucugcc

SEQ ID NO: 191102 - RNA, 19 nt, Artificial Sequence
  Description of Artificial Sequence: Synthetic oligonucleotide
  Sense strand starting at position 427 of SEQ ID NO: 2462
aacugaguucugcaagguc

SEQ ID NO: 191103 - RNA, 19 nt, Artificial Sequence
  Description of Artificial Sequence: Synthetic oligonucleotide
  Antisense strand to SEQ ID NO: 191102
gaccuugcagaacucaguu

SEQ ID NO: 191104 - RNA, 19 nt, Artificial Sequence
  Description of Artificial Sequence: Synthetic oligonucleotide
  Sense strand starting at position 29 of SEQ ID NO: 2462
gugguauggacacaagcaa

SEQ ID NO: 191105 - RNA, 19 nt, Artificial Sequence
  Description of Artificial Sequence: Synthetic oligonucleotide
  Antisense strand to SEQ ID NO: 191104
uugcuuguguccauaccac

SEQ ID NO: 191106 - RNA, 19 nt, Artificial Sequence
  Description of Artificial Sequence: Synthetic oligonucleotide
  Sense strand starting at position 3977 of SEQ ID NO: 2464
agaugaagccucugaggcu

SEQ ID NO: 191107 - RNA, 19 nt, Artificial Sequence
  Description of Artificial Sequence: Synthetic oligonucleotide
  Antisense strand to SEQ ID NO: 191106
agccucagaggcuucaucu

SEQ ID NO: 191108 - RNA, 19 nt, Artificial Sequence
  Description of Artificial Sequence: Synthetic oligonucleotide
  Sense strand starting at position 3952 of SEQ ID NO: 2464
aguuuagucuaacuccaca

SEQ ID NO: 191109 - RNA, 19 nt, Artificial Sequence
  Description of Artificial Sequence: Synthetic oligonucleotide
  Antisense strand to SEQ ID NO: 191108
uguggaguuagacuaaacu

SEQ ID NO: 191110 - RNA, 19 nt, Artificial Sequence
  Description of Artificial Sequence: Synthetic oligonucleotide
  Sense strand starting at position 3916 of SEQ ID NO: 2464
aauguugaguuucucagau

SEQ ID NO: 191111 - RNA, 19 nt, Artificial Sequence
  Description of Artificial Sequence: Synthetic oligonucleotide
  Antisense strand to SEQ ID NO: 191110
aucugagaaacucaacauu

SEQ ID NO: 191112 - RNA, 19 nt, Artificial Sequence
  Description of Artificial Sequence: Synthetic oligonucleotide
  Sense strand starting at position 3771 of SEQ ID NO: 2464
guggaauacucccuucuaa

SEQ ID NO: 191113 - RNA, 19 nt, Artificial Sequence
  Description of Artificial Sequence: Synthetic oligonucleotide
  Antisense strand to SEQ ID NO: 191112
uuagaagggaguauuccac

SEQ ID NO: 191114 - RNA, 19 nt, Artificial Sequence
  Description of Artificial Sequence: Synthetic oligonucleotide
  Sense strand starting at position 3718 of SEQ ID NO: 2464
cagggaauguggcuacaua

SEQ ID NO: 191115 - RNA, 19 nt, Artificial Sequence
  Description of Artificial Sequence: Synthetic oligonucleotide
  Antisense strand to SEQ ID NO: 191114
uauguagccacauucccug

SEQ ID NO: 191116 - RNA, 19 nt, Artificial Sequence
  Description of Artificial Sequence: Synthetic oligonucleotide
  Sense strand starting at position 3668 of SEQ ID NO: 2464
guuccauguccaggacaag

SEQ ID NO: 191117 - RNA, 19 nt, Artificial Sequence
  Description of Artificial Sequence: Synthetic oligonucleotide
  Antisense strand to SEQ ID NO: 191116
cuuguccuggacauggaac

SEQ ID NO: 191118 - RNA, 19 nt, Artificial Sequence
  Description of Artificial Sequence: Synthetic oligonucleotide
  Sense strand starting at position 3586 of SEQ ID NO: 2464
uucacuccucgguaggaga

SEQ ID NO: 191119 - RNA, 19 nt, Artificial Sequence
  Description of Artificial Sequence: Synthetic oligonucleotide
  Antisense strand to SEQ ID NO: 191118
ucuccuaccgaggagugaa

SEQ ID NO: 191120 - RNA, 19 nt, Artificial Sequence
  Description of Artificial Sequence: Synthetic oligonucleotide
  Sense strand starting at position 3526 of SEQ ID NO: 2464
ggugaaauugcuggaaguu

SEQ ID NO: 191121 - RNA, 19 nt, Artificial Sequence
  Description of Artificial Sequence: Synthetic oligonucleotide
  Antisense strand to SEQ ID NO: 191120
aacuuccagcaauuucacc

SEQ ID NO: 191122 - RNA, 19 nt, Artificial Sequence
  Description of Artificial Sequence: Synthetic oligonucleotide
  Sense strand starting at position 3329 of SEQ ID NO: 2464
ggagacauauaguaagaaa

SEQ ID NO: 191123 - RNA, 19 nt, Artificial Sequence
  Description of Artificial Sequence: Synthetic oligonucleotide
  Antisense strand to SEQ ID NO: 191122
uuucuuacuauaugucucc

SEQ ID NO: 191124 - RNA, 19 nt, Artificial Sequence
  Description of Artificial Sequence: Synthetic oligonucleotide
  Sense strand starting at position 3308 of SEQ ID NO: 2464
augauaguucagggacagu

SEQ ID NO: 191125 - RNA, 19 nt, Artificial Sequence
  Description of Artificial Sequence: Synthetic oligonucleotide
  Antisense strand to SEQ ID NO: 191124
acugucccugaacuaucau

SEQ ID NO: 191126 - RNA, 19 nt, Artificial Sequence
  Description of Artificial Sequence: Synthetic oligonucleotide
  Sense strand starting at position 3181 of SEQ ID NO: 2464
gggucuaucuuguuccaaa

SEQ ID NO: 191127 - RNA, 19 nt, Artificial Sequence
  Description of Artificial Sequence: Synthetic oligonucleotide
  Antisense strand to SEQ ID NO: 191126
uuuggaacaagauagaccc

SEQ ID NO: 191128 - RNA, 19 nt, Artificial Sequence
  Description of Artificial Sequence: Synthetic oligonucleotide
  Sense strand starting at position 3128 of SEQ ID NO: 2464
ugccuuaaaggauaagcau

SEQ ID NO: 191129 - RNA, 19 nt, Artificial Sequence
  Description of Artificial Sequence: Synthetic oligonucleotide
  Antisense strand to SEQ ID NO: 191128
augcuuauccuuuaaggca

SEQ ID NO: 191130 - RNA, 19 nt, Artificial Sequence
  Description of Artificial Sequence: Synthetic oligonucleotide
  Sense strand starting at position 3119 of SEQ ID NO: 2464
uugacaaucugccuuaaag

SEQ ID NO: 191131 - RNA, 19 nt, Artificial Sequence
  Description of Artificial Sequence: Synthetic oligonucleotide
  Antisense strand to SEQ ID NO: 191130
cuuuaaggcagauugucaa

SEQ ID NO: 191132 - RNA, 19 nt, Artificial Sequence
  Description of Artificial Sequence: Synthetic oligonucleotide
  Sense strand starting at position 3108 of SEQ ID NO: 2464
auugaaggagcuugacaau

SEQ ID NO: 191133 - RNA, 19 nt, Artificial Sequence
  Description of Artificial Sequence: Synthetic oligonucleotide
  Antisense strand to SEQ ID NO: 191132
auugucaagcuccuucaau

SEQ ID NO: 191134 - RNA, 19 nt, Artificial Sequence
  Description of Artificial Sequence: Synthetic oligonucleotide
  Sense strand starting at position 3082 of SEQ ID NO: 2464
gaugauggguguccucauu

SEQ ID NO: 191135 - RNA, 19 nt, Artificial Sequence
  Description of Artificial Sequence: Synthetic oligonucleotide
  Antisense strand to SEQ ID NO: 191134
aaugaggacacccaucauc

SEQ ID NO: 191136 - RNA, 19 nt, Artificial Sequence
  Description of Artificial Sequence: Synthetic oligonucleotide
  Sense strand starting at position 2966 of SEQ ID NO: 2464
gucuucaggcgagagauaa

SEQ ID NO: 191137 - RNA, 19 nt, Artificial Sequence
  Description of Artificial Sequence: Synthetic oligonucleotide
  Antisense strand to SEQ ID NO: 191136
uuaucucucgccugaagac

SEQ ID NO: 191138 - RNA, 19 nt, Artificial Sequence
  Description of Artificial Sequence: Synthetic oligonucleotide
  Sense strand starting at position 2964 of SEQ ID NO: 2464
cugucuucaggcgagagau

SEQ ID NO: 191139 - RNA, 19 nt, Artificial Sequence
  Description of Artificial Sequence: Synthetic oligonucleotide
  Antisense strand to SEQ ID NO: 191138
aucucucgccugaagacag

SEQ ID NO: 191140 - RNA, 19 nt, Artificial Sequence
  Description of Artificial Sequence: Synthetic oligonucleotide
  Sense strand starting at position 2825 of SEQ ID NO: 2464
ggagaaggaucuuagggaa

SEQ ID NO: 191141 - RNA, 19 nt, Artificial Sequence
  Description of Artificial Sequence: Synthetic oligonucleotide
  Antisense strand to SEQ ID NO: 191140
uucccuaagauccuucucc

SEQ ID NO: 191142 - RNA, 19 nt, Artificial Sequence
  Description of Artificial Sequence: Synthetic oligonucleotide
  Sense strand starting at position 2582 of SEQ ID NO: 2464
ugaaguucucaguggaccu

SEQ ID NO: 191143 - RNA, 19 nt, Artificial Sequence
  Description of Artificial Sequence: Synthetic oligonucleotide
  Antisense strand to SEQ ID NO: 191142
agguccacugagaacuuca

SEQ ID NO: 191144 - RNA, 19 nt, Artificial Sequence
  Description of Artificial Sequence: Synthetic oligonucleotide
  Sense strand starting at position 2488 of SEQ ID NO: 2464
uggagaauugggugcaaug

SEQ ID NO: 191145 - RNA, 19 nt, Artificial Sequence
  Description of Artificial Sequence: Synthetic oligonucleotide
  Antisense strand to SEQ ID NO: 191144
cauugcacccaauucucca

SEQ ID NO: 191146 - RNA, 19 nt, Artificial Sequence
  Description of Artificial Sequence: Synthetic oligonucleotide
  Sense strand starting at position 2363 of SEQ ID NO: 2464
ggccaaauccugcaagucu

SEQ ID NO: 191147 - RNA, 19 nt, Artificial Sequence
  Description of Artificial Sequence: Synthetic oligonucleotide
  Antisense strand to SEQ ID NO: 191146
agacuugcaggauuuggcc

SEQ ID NO: 191148 - RNA, 19 nt, Artificial Sequence
  Description of Artificial Sequence: Synthetic oligonucleotide
  Sense strand starting at position 2234 of SEQ ID NO: 2464
cgguuucuuaaagggauca

SEQ ID NO: 191149 - RNA, 19 nt, Artificial Sequence
  Description of Artificial Sequence: Synthetic oligonucleotide
  Antisense strand to SEQ ID NO: 191148
ugaucccuuuaagaaaccg

SEQ ID NO: 191150 - RNA, 19 nt, Artificial Sequence
  Description of Artificial Sequence: Synthetic oligonucleotide
  Sense strand starting at position 2227 of SEQ ID NO: 2464
ccgccugcgguuucuuaaa

SEQ ID NO: 191151 - RNA, 19 nt, Artificial Sequence
  Description of Artificial Sequence: Synthetic oligonucleotide
  Antisense strand to SEQ ID NO: 191150
uuuaagaaaccgcaggcgg

SEQ ID NO: 191152 - RNA, 19 nt, Artificial Sequence
  Description of Artificial Sequence: Synthetic oligonucleotide
  Sense strand starting at position 1601 of SEQ ID NO: 2464
ccucccugggccuagauau

SEQ ID NO: 191153 - RNA, 19 nt, Artificial Sequence
  Description of Artificial Sequence: Synthetic oligonucleotide
  Antisense strand to SEQ ID NO: 191152
auaucuaggcccagggagg

SEQ ID NO: 191154 - RNA, 19 nt, Artificial Sequence
  Description of Artificial Sequence: Synthetic oligonucleotide
  Sense strand starting at position 1540 of SEQ ID NO: 2464
acuuccagacucugaugua

SEQ ID NO: 191155 - RNA, 19 nt, Artificial Sequence
  Description of Artificial Sequence: Synthetic oligonucleotide
  Antisense strand to SEQ ID NO: 191154
uacaucagagucuggaagu

SEQ ID NO: 191156 - RNA, 19 nt, Artificial Sequence
  Description of Artificial Sequence: Synthetic oligonucleotide
  Sense strand starting at position 1455 of SEQ ID NO: 2464
ugaagaacccuccgguuau

SEQ ID NO: 191157 - RNA, 19 nt, Artificial Sequence
  Description of Artificial Sequence: Synthetic oligonucleotide
  Antisense strand to SEQ ID NO: 191156
auaaccggaggguucuuca

SEQ ID NO: 191158 - RNA, 19 nt, Artificial Sequence
  Description of Artificial Sequence: Synthetic oligonucleotide
  Sense strand starting at position 1432 of SEQ ID NO: 2464
aaaugaauucgcgauggug

SEQ ID NO: 191159 - RNA, 19 nt, Artificial Sequence
  Description of Artificial Sequence: Synthetic oligonucleotide
  Antisense strand to SEQ ID NO: 191158
caccaucgcgaauucauuu

SEQ ID NO: 191160 - RNA, 19 nt, Artificial Sequence
  Description of Artificial Sequence: Synthetic oligonucleotide
  Sense strand starting at position 1382 of SEQ ID NO: 2464
ccgacuuuggucuagauaa

SEQ ID NO: 191161 - RNA, 19 nt, Artificial Sequence
  Description of Artificial Sequence: Synthetic oligonucleotide
  Antisense strand to SEQ ID NO: 191160
uuaucuagaccaaagucgg

SEQ ID NO: 191162 - RNA, 19 nt, Artificial Sequence
  Description of Artificial Sequence: Synthetic oligonucleotide
  Sense strand starting at position 1094 of SEQ ID NO: 2464
ucgauaguacaguauuguu

SEQ ID NO: 191163 - RNA, 19 nt, Artificial Sequence
  Description of Artificial Sequence: Synthetic oligonucleotide
  Antisense strand to SEQ ID NO: 191162
aacaauacuguacuaucga

SEQ ID NO: 191164 - RNA, 19 nt, Artificial Sequence
  Description of Artificial Sequence: Synthetic oligonucleotide
  Sense strand starting at position 1086 of SEQ ID NO: 2464
uugcucaaucgauaguaca

SEQ ID NO: 191165 - RNA, 19 nt, Artificial Sequence
  Description of Artificial Sequence: Synthetic oligonucleotide
  Antisense strand to SEQ ID NO: 191164
uguacuaucgauugagcaa

SEQ ID NO: 191166 - RNA, 19 nt, Artificial Sequence
  Description of Artificial Sequence: Synthetic oligonucleotide
  Sense strand starting at position 1079 of SEQ ID NO: 2464
agggauauugcucaaucga

SEQ ID NO: 191167 - RNA, 19 nt, Artificial Sequence
  Description of Artificial Sequence: Synthetic oligonucleotide
  Antisense strand to SEQ ID NO: 191166
ucgauugagcaauaucccu

SEQ ID NO: 191168 - RNA, 19 nt, Artificial Sequence
  Description of Artificial Sequence: Synthetic oligonucleotide
  Sense strand starting at position 1078 of SEQ ID NO: 2464
gagggauauugcucaaucg

SEQ ID NO: 191169 - RNA, 19 nt, Artificial Sequence
  Description of Artificial Sequence: Synthetic oligonucleotide
  Antisense strand to SEQ ID NO: 191168
cgauugagcaauaucccuc

SEQ ID NO: 191170 - RNA, 19 nt, Artificial Sequence
  Description of Artificial Sequence: Synthetic oligonucleotide
  Sense strand starting at position 984 of SEQ ID NO: 2464
aauugaucguuucugaaac

SEQ ID NO: 191171 - RNA, 19 nt, Artificial Sequence
  Description of Artificial Sequence: Synthetic oligonucleotide
  Antisense strand to SEQ ID NO: 191170
guuucagaaacgaucaauu

SEQ ID NO: 191172 - RNA, 19 nt, Artificial Sequence
  Description of Artificial Sequence: Synthetic oligonucleotide
  Sense strand starting at position 905 of SEQ ID NO: 2464
gcaucauuacgagauuacu

SEQ ID NO: 191173 - RNA, 19 nt, Artificial Sequence
  Description of Artificial Sequence: Synthetic oligonucleotide
  Antisense strand to SEQ ID NO: 191172
aguaaucucguaaugaugc

SEQ ID NO: 191174 - RNA, 19 nt, Artificial Sequence
  Description of Artificial Sequence: Synthetic oligonucleotide
  Sense strand starting at position 809 of SEQ ID NO: 2464
uagguucuaggaggaguua

SEQ ID NO: 191175 - RNA, 19 nt, Artificial Sequence
  Description of Artificial Sequence: Synthetic oligonucleotide
  Antisense strand to SEQ ID NO: 191174
uaacuccuccuagaaccua

SEQ ID NO: 191176 - RNA, 19 nt, Artificial Sequence
  Description of Artificial Sequence: Synthetic oligonucleotide
  Sense strand starting at position 749 of SEQ ID NO: 2464
agcugugugaucuaaguaa

SEQ ID NO: 191177 - RNA, 19 nt, Artificial Sequence
  Description of Artificial Sequence: Synthetic oligonucleotide
  Antisense strand to SEQ ID NO: 191176
uuacuuagaucacacagcu

SEQ ID NO: 191178 - RNA, 19 nt, Artificial Sequence
  Description of Artificial Sequence: Synthetic oligonucleotide
  Sense strand starting at position 696 of SEQ ID NO: 2464
ggcacuauaguugggacaa

SEQ ID NO: 191179 - RNA, 19 nt, Artificial Sequence
  Description of Artificial Sequence: Synthetic oligonucleotide
  Antisense strand to SEQ ID NO: 191178
uugucccaacuauagugcc

SEQ ID NO: 191180 - RNA, 19 nt, Artificial Sequence
  Description of Artificial Sequence: Synthetic oligonucleotide
  Sense strand starting at position 612 of SEQ ID NO: 2464
uugacacuucuuuggucau

SEQ ID NO: 191181 - RNA, 19 nt, Artificial Sequence
  Description of Artificial Sequence: Synthetic oligonucleotide
  Antisense strand to SEQ ID NO: 191180
augaccaaagaagugucaa

SEQ ID NO: 191182 - RNA, 19 nt, Artificial Sequence
  Description of Artificial Sequence: Synthetic oligonucleotide
  Sense strand starting at position 553 of SEQ ID NO: 2464
uauaauauugacggauagu

SEQ ID NO: 191183 - RNA, 19 nt, Artificial Sequence
  Description of Artificial Sequence: Synthetic oligonucleotide
  Antisense strand to SEQ ID NO: 191182
acuauccgucaauauuaua

SEQ ID NO: 191184 - RNA, 19 nt, Artificial Sequence
  Description of Artificial Sequence: Synthetic oligonucleotide
  Sense strand starting at position 14 of SEQ ID NO: 2464
uaauuauugcauuagguga

SEQ ID NO: 191185 - RNA, 19 nt, Artificial Sequence
  Description of Artificial Sequence: Synthetic oligonucleotide
  Antisense strand to SEQ ID NO: 191184
ucaccuaaugcaauaauua

SEQ ID NO: 191186 - RNA, 19 nt, Artificial Sequence
  Description of Artificial Sequence: Synthetic oligonucleotide
  Sense strand starting at position 460 of SEQ ID NO: 2465
gucucaguuuggguuauuu

SEQ ID NO: 191187 - RNA, 19 nt, Artificial Sequence
  Description of Artificial Sequence: Synthetic oligonucleotide
  Antisense strand to SEQ ID NO: 191186
aaauaacccaaacugagac

SEQ ID NO: 191188 - RNA, 19 nt, Artificial Sequence
  Description of Artificial Sequence: Synthetic oligonucleotide
  Sense strand starting at position 491 of SEQ ID NO: 2465
ccagaagccguuuaacuaa

SEQ ID NO: 191189 - RNA, 19 nt, Artificial Sequence
  Description of Artificial Sequence: Synthetic oligonucleotide
  Antisense strand to SEQ ID NO: 191188
uuaguuaaacggcuucugg

SEQ ID NO: 191190 - RNA, 19 nt, Artificial Sequence
  Description of Artificial Sequence: Synthetic oligonucleotide
  Sense strand starting at position 567 of SEQ ID NO: 2465
ugaaaugcuuacuugagca

SEQ ID NO: 191191 - RNA, 19 nt, Artificial Sequence
  Description of Artificial Sequence: Synthetic oligonucleotide
  Antisense strand to SEQ ID NO: 191190
ugcucaaguaagcauuuca

SEQ ID NO: 191192 - RNA, 19 nt, Artificial Sequence
  Description of Artificial Sequence: Synthetic oligonucleotide
  Sense strand starting at position 716 of SEQ ID NO: 2465
auuucuucuugguaaugga

SEQ ID NO: 191193 - RNA, 19 nt, Artificial Sequence
  Description of Artificial Sequence: Synthetic oligonucleotide
  Antisense strand to SEQ ID NO: 191192
uccauuaccaagaagaaau

SEQ ID NO: 191194 - RNA, 19 nt, Artificial Sequence
  Description of Artificial Sequence: Synthetic oligonucleotide
  Sense strand starting at position 726 of SEQ ID NO: 2465
gguaauggauaguuggaca

SEQ ID NO: 191195 - RNA, 19 nt, Artificial Sequence
  Description of Artificial Sequence: Synthetic oligonucleotide
  Antisense strand to SEQ ID NO: 191194
uguccaacuauccauuacc

SEQ ID NO: 191196 - RNA, 19 nt, Artificial Sequence
  Description of Artificial Sequence: Synthetic oligonucleotide
  Sense strand starting at position 990 of SEQ ID NO: 2465
uccuauguugaagguuauu

SEQ ID NO: 191197 - RNA, 19 nt, Artificial Sequence
  Description of Artificial Sequence: Synthetic oligonucleotide
  Antisense strand to SEQ ID NO: 191196
aauaaccuucaacauagga

SEQ ID NO: 191198 - RNA, 19 nt, Artificial Sequence
  Description of Artificial Sequence: Synthetic oligonucleotide
  Sense strand starting at position 1160 of SEQ ID NO: 2465
ggcccugaccuauaacuca

SEQ ID NO: 191199 - RNA, 19 nt, Artificial Sequence
  Description of Artificial Sequence: Synthetic oligonucleotide
  Antisense strand to SEQ ID NO: 191198
ugaguuauaggucagggcc

SEQ ID NO: 191200 - RNA, 19 nt, Artificial Sequence
  Description of Artificial Sequence: Synthetic oligonucleotide
  Sense strand starting at position 1216 of SEQ ID NO: 2465
ggccuaacgcuagauguga

SEQ ID NO: 191201 - RNA, 19 nt, Artificial Sequence
  Description of Artificial Sequence: Synthetic oligonucleotide
  Antisense strand to SEQ ID NO: 191200
ucacaucuagcguuaggcc

SEQ ID NO: 191202 - RNA, 19 nt, Artificial Sequence
  Description of Artificial Sequence: Synthetic oligonucleotide
  Sense strand starting at position 1428 of SEQ ID NO: 2465
aacuaaacgggacgaauua

SEQ ID NO: 191203 - RNA, 19 nt, Artificial Sequence
  Description of Artificial Sequence: Synthetic oligonucleotide
  Antisense strand to SEQ ID NO: 191202
uaauucgucccguuuaguu

SEQ ID NO: 191204 - RNA, 19 nt, Artificial Sequence
  Description of Artificial Sequence: Synthetic oligonucleotide
  Sense strand starting at position 1468 of SEQ ID NO: 2465
caaaguugucuuuauccga

SEQ ID NO: 191205 - RNA, 19 nt, Artificial Sequence
  Description of Artificial Sequence: Synthetic oligonucleotide
  Antisense strand to SEQ ID NO: 191204
ucggauaaagacaacuuug

SEQ ID NO: 191206 - RNA, 19 nt, Artificial Sequence
  Description of Artificial Sequence: Synthetic oligonucleotide
  Sense strand starting at position 1483 of SEQ ID NO: 2465
ccgaauaguccgggaugga

SEQ ID NO: 191207 - RNA, 19 nt, Artificial Sequence
  Description of Artificial Sequence: Synthetic oligonucleotide
  Antisense strand to SEQ ID NO: 191206
uccaucccggacuauucgg

SEQ ID NO: 191208 - RNA, 19 nt, Artificial Sequence
  Description of Artificial Sequence: Synthetic oligonucleotide
  Sense strand starting at position 1484 of SEQ ID NO: 2465
cgaauaguccgggauggaa

SEQ ID NO: 191209 - RNA, 19 nt, Artificial Sequence
  Description of Artificial Sequence: Synthetic oligonucleotide
  Antisense strand to SEQ ID NO: 191208
uuccaucccggacuauucg

SEQ ID NO: 191210 - RNA, 19 nt, Artificial Sequence
  Description of Artificial Sequence: Synthetic oligonucleotide
  Sense strand starting at position 1680 of SEQ ID NO: 2465
gacugagagcgguggacua

SEQ ID NO: 191211 - RNA, 19 nt, Artificial Sequence
  Description of Artificial Sequence: Synthetic oligonucleotide
  Antisense strand to SEQ ID NO: 191210
uaguccaccgcucucaguc

SEQ ID NO: 191212 - RNA, 19 nt, Artificial Sequence
  Description of Artificial Sequence: Synthetic oligonucleotide
  Sense strand starting at position 1692 of SEQ ID NO: 2465
uggacuagccagugaaugu

SEQ ID NO: 191213 - RNA, 19 nt, Artificial Sequence
  Description of Artificial Sequence: Synthetic oligonucleotide
  Antisense strand to SEQ ID NO: 191212
acauucacuggcuagucca

SEQ ID NO: 191214 - RNA, 19 nt, Artificial Sequence
  Description of Artificial Sequence: Synthetic oligonucleotide
  Sense strand starting at position 1886 of SEQ ID NO: 2465
ggaaccaaguccucugcau

SEQ ID NO: 191215 - RNA, 19 nt, Artificial Sequence
  Description of Artificial Sequence: Synthetic oligonucleotide
  Antisense strand to SEQ ID NO: 191214
augcagaggacuugguucc

SEQ ID NO: 191216 - RNA, 19 nt, Artificial Sequence
  Description of Artificial Sequence: Synthetic oligonucleotide
  Sense strand starting at position 1900 of SEQ ID NO: 2465
ugcaucuagacagggauua

SEQ ID NO: 191217 - RNA, 19 nt, Artificial Sequence
  Description of Artificial Sequence: Synthetic oligonucleotide
  Antisense strand to SEQ ID NO: 191216
uaaucccugucuagaugca

SEQ ID NO: 191218 - RNA, 19 nt, Artificial Sequence
  Description of Artificial Sequence: Synthetic oligonucleotide
  Sense strand starting at position 1901 of SEQ ID NO: 2465
gcaucuagacagggauuau

SEQ ID NO: 191219 - RNA, 19 nt, Artificial Sequence
  Description of Artificial Sequence: Synthetic oligonucleotide
  Antisense strand to SEQ ID NO: 191218
auaaucccugucuagaugc

SEQ ID NO: 191220 - RNA, 19 nt, Artificial Sequence
  Description of Artificial Sequence: Synthetic oligonucleotide
  Sense strand starting at position 1930 of SEQ ID NO: 2465
ggaauuccgccugauccau

SEQ ID NO: 191221 - RNA, 19 nt, Artificial Sequence
  Description of Artificial Sequence: Synthetic oligonucleotide
  Antisense strand to SEQ ID NO: 191220
auggaucaggcggaauucc

SEQ ID NO: 191222 - RNA, 19 nt, Artificial Sequence
  Description of Artificial Sequence: Synthetic oligonucleotide
  Sense strand starting at position 2020 of SEQ ID NO: 2465
accugagcugaguagaacu

SEQ ID NO: 191223 - RNA, 19 nt, Artificial Sequence
  Description of Artificial Sequence: Synthetic oligonucleotide
  Antisense strand to SEQ ID NO: 191222
aguucuacucagcucaggu

SEQ ID NO: 191224 - RNA, 19 nt, Artificial Sequence
  Description of Artificial Sequence: Synthetic oligonucleotide
  Sense strand starting at position 2127 of SEQ ID NO: 2465
gcuguaagugcucuauagc

SEQ ID NO: 191225 - RNA, 19 nt, Artificial Sequence
  Description of Artificial Sequence: Synthetic oligonucleotide
  Antisense strand to SEQ ID NO: 191224
gcuauagagcacuuacagc

SEQ ID NO: 191226 - RNA, 19 nt, Artificial Sequence
  Description of Artificial Sequence: Synthetic oligonucleotide
  Sense strand starting at position 2458 of SEQ ID NO: 2465
auuuaacccuaagagguau

SEQ ID NO: 191227 - RNA, 19 nt, Artificial Sequence
  Description of Artificial Sequence: Synthetic oligonucleotide
  Antisense strand to SEQ ID NO: 191226
auaccucuuaggguuaaau

SEQ ID NO: 191228 - RNA, 19 nt, Artificial Sequence
  Description of Artificial Sequence: Synthetic oligonucleotide
  Sense strand starting at position 2555 of SEQ ID NO: 2465
cacagauacguguaugauu

SEQ ID NO: 191229 - RNA, 19 nt, Artificial Sequence
  Description of Artificial Sequence: Synthetic oligonucleotide
  Antisense strand to SEQ ID NO: 191228
aaucauacacguaucugug

SEQ ID NO: 191230 - RNA, 19 nt, Artificial Sequence
  Description of Artificial Sequence: Synthetic oligonucleotide
  Sense strand starting at position 2560 of SEQ ID NO: 2465
auacguguaugauuuguga

SEQ ID NO: 191231 - RNA, 19 nt, Artificial Sequence
  Description of Artificial Sequence: Synthetic oligonucleotide
  Antisense strand to SEQ ID NO: 191230
ucacaaaucauacacguau

SEQ ID NO: 191232 - RNA, 19 nt, Artificial Sequence
  Description of Artificial Sequence: Synthetic oligonucleotide
  Sense strand starting at position 2562 of SEQ ID NO: 2465
acguguaugauuugugacu

SEQ ID NO: 191233 - RNA, 19 nt, Artificial Sequence
  Description of Artificial Sequence: Synthetic oligonucleotide
  Antisense strand to SEQ ID NO: 191232
agucacaaaucauacacgu

SEQ ID NO: 191234 - RNA, 19 nt, Artificial Sequence
  Description of Artificial Sequence: Synthetic oligonucleotide
  Sense strand starting at position 2592 of SEQ ID NO: 2465
uugacugcuguauaguauu

SEQ ID NO: 191235 - RNA, 19 nt, Artificial Sequence
  Description of Artificial Sequence: Synthetic oligonucleotide
  Antisense strand to SEQ ID NO: 191234
aauacuauacagcagucaa

SEQ ID NO: 191236 - RNA, 19 nt, Artificial Sequence
  Description of Artificial Sequence: Synthetic oligonucleotide
  Sense strand starting at position 2700 of SEQ ID NO: 2465
cugugaacauucuugucau

SEQ ID NO: 191237 - RNA, 19 nt, Artificial Sequence
  Description of Artificial Sequence: Synthetic oligonucleotide
  Antisense strand to SEQ ID NO: 191236
augacaagaauguucacag

SEQ ID NO: 191238 - RNA, 19 nt, Artificial Sequence
  Description of Artificial Sequence: Synthetic oligonucleotide
  Sense strand starting at position 2706 of SEQ ID NO: 2465
acauucuugucauugguga

SEQ ID NO: 191239 - RNA, 19 nt, Artificial Sequence
  Description of Artificial Sequence: Synthetic oligonucleotide
  Antisense strand to SEQ ID NO: 191238
ucaccaaugacaagaaugu

SEQ ID NO: 191240 - RNA, 19 nt, Artificial Sequence
  Description of Artificial Sequence: Synthetic oligonucleotide
  Sense strand starting at position 2708 of SEQ ID NO: 2465
auucuugucauuggugaug

SEQ ID NO: 191241 - RNA, 19 nt, Artificial Sequence
  Description of Artificial Sequence: Synthetic oligonucleotide
  Antisense strand to SEQ ID NO: 191240
caucaccaaugacaagaau

SEQ ID NO: 191242 - RNA, 19 nt, Artificial Sequence
  Description of Artificial Sequence: Synthetic oligonucleotide
  Sense strand starting at position 2711 of SEQ ID NO: 2465
cuugucauuggugauguua

SEQ ID NO: 191243 - RNA, 19 nt, Artificial Sequence
  Description of Artificial Sequence: Synthetic oligonucleotide
  Antisense strand to SEQ ID NO: 191242
uaacaucaccaaugacaag

SEQ ID NO: 191244 - RNA, 19 nt, Artificial Sequence
  Description of Artificial Sequence: Synthetic oligonucleotide
  Sense strand starting at position 3040 of SEQ ID NO: 2465
uuugguaacgauuaaagca

SEQ ID NO: 191245 - RNA, 19 nt, Artificial Sequence
  Description of Artificial Sequence: Synthetic oligonucleotide
  Antisense strand to SEQ ID NO: 191244
ugcuuuaaucguuaccaaa

SEQ ID NO: 191246 - RNA, 19 nt, Artificial Sequence
  Description of Artificial Sequence: Synthetic oligonucleotide
  Sense strand starting at position 3164 of SEQ ID NO: 2465
uccauuugaugacauggaa

SEQ ID NO: 191247 - RNA, 19 nt, Artificial Sequence
  Description of Artificial Sequence: Synthetic oligonucleotide
  Antisense strand to SEQ ID NO: 191246
uuccaugucaucaaaugga

SEQ ID NO: 191248 - RNA, 19 nt, Artificial Sequence
  Description of Artificial Sequence: Synthetic oligonucleotide
  Sense strand starting at position 3239 of SEQ ID NO: 2465
aggagcuuagcccgaaaca

SEQ ID NO: 191249 - RNA, 19 nt, Artificial Sequence
  Description of Artificial Sequence: Synthetic oligonucleotide
  Antisense strand to SEQ ID NO: 191248
uguuucgggcuaagcuccu

SEQ ID NO: 191250 - RNA, 19 nt, Artificial Sequence
  Description of Artificial Sequence: Synthetic oligonucleotide
  Sense strand starting at position 3240 of SEQ ID NO: 2465
ggagcuuagcccgaaacaa

SEQ ID NO: 191251 - RNA, 19 nt, Artificial Sequence
  Description of Artificial Sequence: Synthetic oligonucleotide
  Antisense strand to SEQ ID NO: 191250
uuguuucgggcuaagcucc

SEQ ID NO: 191252 - RNA, 19 nt, Artificial Sequence
  Description of Artificial Sequence: Synthetic oligonucleotide
  Sense strand starting at position 3322 of SEQ ID NO: 2465
aagugaaauugcuuguuau

SEQ ID NO: 191253 - RNA, 19 nt, Artificial Sequence
  Description of Artificial Sequence: Synthetic oligonucleotide
  Antisense strand to SEQ ID NO: 191252
auaacaagcaauuucacuu

SEQ ID NO: 191254 - RNA, 19 nt, Artificial Sequence
  Description of Artificial Sequence: Synthetic oligonucleotide
  Sense strand starting at position 3625 of SEQ ID NO: 2465
uuuguauuggauugacauu

SEQ ID NO: 191255 - RNA, 19 nt, Artificial Sequence
  Description of Artificial Sequence: Synthetic oligonucleotide
  Antisense strand to SEQ ID NO: 191254
aaugucaauccaauacaaa

SEQ ID NO: 191256 - RNA, 19 nt, Artificial Sequence
  Description of Artificial Sequence: Synthetic oligonucleotide
  Sense strand starting at position 3726 of SEQ ID NO: 2465
aaacauuaaggcgauggua

SEQ ID NO: 191257 - RNA, 19 nt, Artificial Sequence
  Description of Artificial Sequence: Synthetic oligonucleotide
  Antisense strand to SEQ ID NO: 191256
uaccaucgccuuaauguuu

SEQ ID NO: 191258 - RNA, 19 nt, Artificial Sequence
  Description of Artificial Sequence: Synthetic oligonucleotide
  Sense strand starting at position 3728 of SEQ ID NO: 2465
acauuaaggcgaugguaua

SEQ ID NO: 191259 - RNA, 19 nt, Artificial Sequence
  Description of Artificial Sequence: Synthetic oligonucleotide
  Antisense strand to SEQ ID NO: 191258
uauaccaucgccuuaaugu

SEQ ID NO: 191260 - RNA, 19 nt, Artificial Sequence
  Description of Artificial Sequence: Synthetic oligonucleotide
  Sense strand starting at position 3729 of SEQ ID NO: 2465
cauuaaggcgaugguauaa

SEQ ID NO: 191261 - RNA, 19 nt, Artificial Sequence
  Description of Artificial Sequence: Synthetic oligonucleotide
  Antisense strand to SEQ ID NO: 191260
uuauaccaucgccuuaaug

SEQ ID NO: 191262 - RNA, 19 nt, Artificial Sequence
  Description of Artificial Sequence: Synthetic oligonucleotide
  Sense strand starting at position 3734 of SEQ ID NO: 2465
aggcgaugguauaagaagu

SEQ ID NO: 191263 - RNA, 19 nt, Artificial Sequence
  Description of Artificial Sequence: Synthetic oligonucleotide
  Antisense strand to SEQ ID NO: 191262
acuucuuauaccaucgccu

SEQ ID NO: 191264 - RNA, 19 nt, Artificial Sequence
  Description of Artificial Sequence: Synthetic oligonucleotide
  Sense strand starting at position 3878 of SEQ ID NO: 2465
guaugauaacaauguuccu

SEQ ID NO: 191265 - RNA, 19 nt, Artificial Sequence
  Description of Artificial Sequence: Synthetic oligonucleotide
  Antisense strand to SEQ ID NO: 191264
aggaacauuguuaucauac

SEQ ID NO: 191266 - RNA, 19 nt, Artificial Sequence
  Description of Artificial Sequence: Synthetic oligonucleotide
  Sense strand starting at position 297 of SEQ ID NO: 2466
agcagaaagugcucuugau

SEQ ID NO: 191267 - RNA, 19 nt, Artificial Sequence
  Description of Artificial Sequence: Synthetic oligonucleotide
  Antisense strand to SEQ ID NO: 191266
aucaagagcacuuucugcu

SEQ ID NO: 191268 - RNA, 19 nt, Artificial Sequence
  Description of Artificial Sequence: Synthetic oligonucleotide
  Sense strand starting at position 301 of SEQ ID NO: 2466
gaaagugcucuugauccca

SEQ ID NO: 191269 - RNA, 19 nt, Artificial Sequence
  Description of Artificial Sequence: Synthetic oligonucleotide
  Antisense strand to SEQ ID NO: 191268
ugggaucaagagcacuuuc

SEQ ID NO: 191270 - RNA, 19 nt, Artificial Sequence
  Description of Artificial Sequence: Synthetic oligonucleotide
  Sense strand starting at position 303 of SEQ ID NO: 2466
aagugcucuugaucccaga

SEQ ID NO: 191271 - RNA, 19 nt, Artificial Sequence
  Description of Artificial Sequence: Synthetic oligonucleotide
  Antisense strand to SEQ ID NO: 191270
ucugggaucaagagcacuu

SEQ ID NO: 191272 - RNA, 19 nt, Artificial Sequence
  Description of Artificial Sequence: Synthetic oligonucleotide
  Sense strand starting at position 353 of SEQ ID NO: 2466
acagccaggucuuuccaua

SEQ ID NO: 191273 - RNA, 19 nt, Artificial Sequence
  Description of Artificial Sequence: Synthetic oligonucleotide
  Antisense strand to SEQ ID NO: 191272
uauggaaagaccuggcugu

SEQ ID NO: 191274 - RNA, 19 nt, Artificial Sequence
  Description of Artificial Sequence: Synthetic oligonucleotide
  Sense strand starting at position 564 of SEQ ID NO: 2466
gcgggaacaccucagcaaa

SEQ ID NO: 191275 - RNA, 19 nt, Artificial Sequence
  Description of Artificial Sequence: Synthetic oligonucleotide
  Antisense strand to SEQ ID NO: 191274
uuugcugagguguucccgc

SEQ ID NO: 191276 - RNA, 19 nt, Artificial Sequence
  Description of Artificial Sequence: Synthetic oligonucleotide
  Sense strand starting at position 655 of SEQ ID NO: 2466
ccagaugcuccauggcaua

SEQ ID NO: 191277 - RNA, 19 nt, Artificial Sequence
  Description of Artificial Sequence: Synthetic oligonucleotide
  Antisense strand to SEQ ID NO: 191276
uaugccauggagcaucugg

SEQ ID NO: 191278 - RNA, 19 nt, Artificial Sequence
  Description of Artificial Sequence: Synthetic oligonucleotide
  Sense strand starting at position 813 of SEQ ID NO: 2466
ugguacagagauugaucuu

SEQ ID NO: 191279 - RNA, 19 nt, Artificial Sequence
  Description of Artificial Sequence: Synthetic oligonucleotide
  Antisense strand to SEQ ID NO: 191278
aagaucaaucucuguacca

SEQ ID NO: 191280 - RNA, 19 nt, Artificial Sequence
  Description of Artificial Sequence: Synthetic oligonucleotide
  Sense strand starting at position 819 of SEQ ID NO: 2466
agagauugaucuucucacu

SEQ ID NO: 191281 - RNA, 19 nt, Artificial Sequence
  Description of Artificial Sequence: Synthetic oligonucleotide
  Antisense strand to SEQ ID NO: 191280
agugagaagaucaaucucu

SEQ ID NO: 191282 - RNA, 19 nt, Artificial Sequence
  Description of Artificial Sequence: Synthetic oligonucleotide
  Sense strand starting at position 965 of SEQ ID NO: 2466
gcugcuguacagggaauau

SEQ ID NO: 191283 - RNA, 19 nt, Artificial Sequence
  Description of Artificial Sequence: Synthetic oligonucleotide
  Antisense strand to SEQ ID NO: 191282
auauucccuguacagcagc

SEQ ID NO: 191284 - RNA, 19 nt, Artificial Sequence
  Description of Artificial Sequence: Synthetic oligonucleotide
  Sense strand starting at position 975 of SEQ ID NO: 2466
agggaauauuuggagguga

SEQ ID NO: 191285 - RNA, 19 nt, Artificial Sequence
  Description of Artificial Sequence: Synthetic oligonucleotide
  Antisense strand to SEQ ID NO: 191284
ucaccuccaaauauucccu

SEQ ID NO: 191286 - RNA, 19 nt, Artificial Sequence
  Description of Artificial Sequence: Synthetic oligonucleotide
  Sense strand starting at position 996 of SEQ ID NO: 2466
cagaguuaggugggcucaa

SEQ ID NO: 191287 - RNA, 19 nt, Artificial Sequence
  Description of Artificial Sequence: Synthetic oligonucleotide
  Antisense strand to SEQ ID NO: 191286
uugagcccaccuaacucug

SEQ ID NO: 191288 - RNA, 19 nt, Artificial Sequence
  Description of Artificial Sequence: Synthetic oligonucleotide
  Sense strand starting at position 997 of SEQ ID NO: 2466
agaguuaggugggcucaaa

SEQ ID NO: 191289 - RNA, 19 nt, Artificial Sequence
  Description of Artificial Sequence: Synthetic oligonucleotide
  Antisense strand to SEQ ID NO: 191288
uuugagcccaccuaacucu

SEQ ID NO: 191290 - RNA, 19 nt, Artificial Sequence
  Description of Artificial Sequence: Synthetic oligonucleotide
  Sense strand starting at position 1193 of SEQ ID NO: 2466
ccagcagaggucuacaagu

SEQ ID NO: 191291 - RNA, 19 nt, Artificial Sequence
  Description of Artificial Sequence: Synthetic oligonucleotide
  Antisense strand to SEQ ID NO: 191290
acuuguagaccucugcugg

SEQ ID NO: 191292 - RNA, 19 nt, Artificial Sequence
  Description of Artificial Sequence: Synthetic oligonucleotide
  Sense strand starting at position 1261 of SEQ ID NO: 2466
uucccaugagucuggaacu

SEQ ID NO: 191293 - RNA, 19 nt, Artificial Sequence
  Description of Artificial Sequence: Synthetic oligonucleotide
  Antisense strand to SEQ ID NO: 191292
aguuccagacucaugggaa

SEQ ID NO: 191294 - RNA, 19 nt, Artificial Sequence
  Description of Artificial Sequence: Synthetic oligonucleotide
  Sense strand starting at position 1386 of SEQ ID NO: 2466
ugacuagaugugcaaucuu

SEQ ID NO: 191295 - RNA, 19 nt, Artificial Sequence
  Description of Artificial Sequence: Synthetic oligonucleotide
  Antisense strand to SEQ ID NO: 191294
aagauugcacaucuaguca

SEQ ID NO: 191296 - RNA, 19 nt, Artificial Sequence
  Description of Artificial Sequence: Synthetic oligonucleotide
  Sense strand starting at position 1393 of SEQ ID NO: 2466
augugcaaucuuuagcaga

SEQ ID NO: 191297 - RNA, 19 nt, Artificial Sequence
  Description of Artificial Sequence: Synthetic oligonucleotide
  Antisense strand to SEQ ID NO: 191296
ucugcuaaagauugcacau

SEQ ID NO: 191298 - RNA, 19 nt, Artificial Sequence
  Description of Artificial Sequence: Synthetic oligonucleotide
  Sense strand starting at position 1443 of SEQ ID NO: 2466
cugcaaagccaggauuacu

SEQ ID NO: 191299 - RNA, 19 nt, Artificial Sequence
  Description of Artificial Sequence: Synthetic oligonucleotide
  Antisense strand to SEQ ID NO: 191298
aguaauccuggcuuugcag

SEQ ID NO: 191300 - RNA, 19 nt, Artificial Sequence
  Description of Artificial Sequence: Synthetic oligonucleotide
  Sense strand starting at position 2151 of SEQ ID NO: 2466
gcugguaacugacuaaaca

SEQ ID NO: 191301 - RNA, 19 nt, Artificial Sequence
  Description of Artificial Sequence: Synthetic oligonucleotide
  Antisense strand to SEQ ID NO: 191300
uguuuagucaguuaccagc

SEQ ID NO: 191302 - RNA, 19 nt, Artificial Sequence
  Description of Artificial Sequence: Synthetic oligonucleotide
  Sense strand starting at position 2489 of SEQ ID NO: 2466
uaagucucuuugccugaga

SEQ ID NO: 191303 - RNA, 19 nt, Artificial Sequence
  Description of Artificial Sequence: Synthetic oligonucleotide
  Antisense strand to SEQ ID NO: 191302
ucucaggcaaagagacuua

SEQ ID NO: 191304 - RNA, 19 nt, Artificial Sequence
  Description of Artificial Sequence: Synthetic oligonucleotide
  Sense strand starting at position 2490 of SEQ ID NO: 2466
aagucucuuugccugagau

SEQ ID NO: 191305 - RNA, 19 nt, Artificial Sequence
  Description of Artificial Sequence: Synthetic oligonucleotide
  Antisense strand to SEQ ID NO: 191304
aucucaggcaaagagacuu

SEQ ID NO: 191306 - RNA, 19 nt, Artificial Sequence
  Description of Artificial Sequence: Synthetic oligonucleotide
  Sense strand starting at position 2491 of SEQ ID NO: 2466
agucucuuugccugagaua

SEQ ID NO: 191307 - RNA, 19 nt, Artificial Sequence
  Description of Artificial Sequence: Synthetic oligonucleotide
  Antisense strand to SEQ ID NO: 191306
uaucucaggcaaagagacu

SEQ ID NO: 191308 - RNA, 19 nt, Artificial Sequence
  Description of Artificial Sequence: Synthetic oligonucleotide
  Sense strand starting at position 2492 of SEQ ID NO: 2466
gucucuuugccugagauau

SEQ ID NO: 191309 - RNA, 19 nt, Artificial Sequence
  Description of Artificial Sequence: Synthetic oligonucleotide
  Antisense strand to SEQ ID NO: 191308
auaucucaggcaaagagac

SEQ ID NO: 191310 - RNA, 19 nt, Artificial Sequence
  Description of Artificial Sequence: Synthetic oligonucleotide
  Sense strand starting at position 2543 of SEQ ID NO: 2466
aaaugugaaagguguuuga

SEQ ID NO: 191311 - RNA, 19 nt, Artificial Sequence
  Description of Artificial Sequence: Synthetic oligonucleotide
  Antisense strand to SEQ ID NO: 191310
ucaaacaccuuucacauuu

SEQ ID NO: 191312 - RNA, 19 nt, Artificial Sequence
  Description of Artificial Sequence: Synthetic oligonucleotide
  Sense strand starting at position 2567 of SEQ ID NO: 2466
cagauacuugcauggauag

SEQ ID NO: 191313 - RNA, 19 nt, Artificial Sequence
  Description of Artificial Sequence: Synthetic oligonucleotide
  Antisense strand to SEQ ID NO: 191312
cuauccaugcaaguaucug

SEQ ID NO: 191314 - RNA, 19 nt, Artificial Sequence
  Description of Artificial Sequence: Synthetic oligonucleotide
  Sense strand starting at position 2568 of SEQ ID NO: 2466
agauacuugcauggauaga

SEQ ID NO: 191315 - RNA, 19 nt, Artificial Sequence
  Description of Artificial Sequence: Synthetic oligonucleotide
  Antisense strand to SEQ ID NO: 191314
ucuauccaugcaaguaucu

SEQ ID NO: 191316 - RNA, 19 nt, Artificial Sequence
  Description of Artificial Sequence: Synthetic oligonucleotide
  Sense strand starting at position 2631 of SEQ ID NO: 2466
uugcucuuaccuggaaauc

SEQ ID NO: 191317 - RNA, 19 nt, Artificial Sequence
  Description of Artificial Sequence: Synthetic oligonucleotide
  Antisense strand to SEQ ID NO: 191316
gauuuccagguaagagcaa

SEQ ID NO: 191318 - RNA, 19 nt, Artificial Sequence
  Description of Artificial Sequence: Synthetic oligonucleotide
  Sense strand starting at position 2632 of SEQ ID NO: 2466
ugcucuuaccuggaaaucu

SEQ ID NO: 191319 - RNA, 19 nt, Artificial Sequence
  Description of Artificial Sequence: Synthetic oligonucleotide
  Antisense strand to SEQ ID NO: 191318
agauuuccagguaagagca

SEQ ID NO: 191320 - RNA, 19 nt, Artificial Sequence
  Description of Artificial Sequence: Synthetic oligonucleotide
  Sense strand starting at position 2641 of SEQ ID NO: 2466
cuggaaaucugucuaaagc

SEQ ID NO: 191321 - RNA, 19 nt, Artificial Sequence
  Description of Artificial Sequence: Synthetic oligonucleotide
  Antisense strand to SEQ ID NO: 191320
gcuuuagacagauuuccag

SEQ ID NO: 191322 - RNA, 19 nt, Artificial Sequence
  Description of Artificial Sequence: Synthetic oligonucleotide
  Sense strand starting at position 2642 of SEQ ID NO: 2466
uggaaaucugucuaaagcu

SEQ ID NO: 191323 - RNA, 19 nt, Artificial Sequence
  Description of Artificial Sequence: Synthetic oligonucleotide
  Antisense strand to SEQ ID NO: 191322
agcuuuagacagauuucca

SEQ ID NO: 191324 - RNA, 19 nt, Artificial Sequence
  Description of Artificial Sequence: Synthetic oligonucleotide
  Sense strand starting at position 2773 of SEQ ID NO: 2466
uuuaaagaagcuuguguga

SEQ ID NO: 191325 - RNA, 19 nt, Artificial Sequence
  Description of Artificial Sequence: Synthetic oligonucleotide
  Antisense strand to SEQ ID NO: 191324
ucacacaagcuucuuuaaa

SEQ ID NO: 191326 - RNA, 19 nt, Artificial Sequence
  Description of Artificial Sequence: Synthetic oligonucleotide
  Sense strand starting at position 2776 of SEQ ID NO: 2466
aaagaagcuugugugacau

SEQ ID NO: 191327 - RNA, 19 nt, Artificial Sequence
  Description of Artificial Sequence: Synthetic oligonucleotide
  Antisense strand to SEQ ID NO: 191326
augucacacaagcuucuuu

SEQ ID NO: 191328 - RNA, 19 nt, Artificial Sequence
  Description of Artificial Sequence: Synthetic oligonucleotide
  Sense strand starting at position 2782 of SEQ ID NO: 2466
gcuugugugacauaggaaa

SEQ ID NO: 191329 - RNA, 19 nt, Artificial Sequence
  Description of Artificial Sequence: Synthetic oligonucleotide
  Antisense strand to SEQ ID NO: 191328
uuuccuaugucacacaagc

SEQ ID NO: 191330 - RNA, 19 nt, Artificial Sequence
  Description of Artificial Sequence: Synthetic oligonucleotide
  Sense strand starting at position 2985 of SEQ ID NO: 2466
cugguauauugggccagaa

SEQ ID NO: 191331 - RNA, 19 nt, Artificial Sequence
  Description of Artificial Sequence: Synthetic oligonucleotide
  Antisense strand to SEQ ID NO: 191330
uucuggcccaauauaccag

SEQ ID NO: 191332 - RNA, 19 nt, Artificial Sequence
  Description of Artificial Sequence: Synthetic oligonucleotide
  Sense strand starting at position 3415 of SEQ ID NO: 2466
gcugguuggcuagaagacu

SEQ ID NO: 191333 - RNA, 19 nt, Artificial Sequence
  Description of Artificial Sequence: Synthetic oligonucleotide
  Antisense strand to SEQ ID NO: 191332
agucuucuagccaaccagc

SEQ ID NO: 191334 - RNA, 19 nt, Artificial Sequence
  Description of Artificial Sequence: Synthetic oligonucleotide
  Sense strand starting at position 3521 of SEQ ID NO: 2466
agucuuugucacuagucca

SEQ ID NO: 191335 - RNA, 19 nt, Artificial Sequence
  Description of Artificial Sequence: Synthetic oligonucleotide
  Antisense strand to SEQ ID NO: 191334
uggacuagugacaaagacu

SEQ ID NO: 191336 - RNA, 19 nt, Artificial Sequence
  Description of Artificial Sequence: Synthetic oligonucleotide
  Sense strand starting at position 3524 of SEQ ID NO: 2466
cuuugucacuaguccaaau

SEQ ID NO: 191337 - RNA, 19 nt, Artificial Sequence
  Description of Artificial Sequence: Synthetic oligonucleotide
  Antisense strand to SEQ ID NO: 191336
auuuggacuagugacaaag

SEQ ID NO: 191338 - RNA, 19 nt, Artificial Sequence
  Description of Artificial Sequence: Synthetic oligonucleotide
  Sense strand starting at position 3796 of SEQ ID NO: 2466
uaaagaugugacugcaagu

SEQ ID NO: 191339 - RNA, 19 nt, Artificial Sequence
  Description of Artificial Sequence: Synthetic oligonucleotide
  Antisense strand to SEQ ID NO: 191338
acuugcagucacaucuuua

SEQ ID NO: 191340 - RNA, 19 nt, Artificial Sequence
  Description of Artificial Sequence: Synthetic oligonucleotide
  Sense strand starting at position 3930 of SEQ ID NO: 2466
cauggaguucuggguaacu

SEQ ID NO: 191341 - RNA, 19 nt, Artificial Sequence
  Description of Artificial Sequence: Synthetic oligonucleotide
  Antisense strand to SEQ ID NO: 191340
aguuacccagaacuccaug

SEQ ID NO: 191342 - RNA, 19 nt, Artificial Sequence
  Description of Artificial Sequence: Synthetic oligonucleotide
  Sense strand starting at position 3932 of SEQ ID NO: 2466
uggaguucuggguaacuug

SEQ ID NO: 191343 - RNA, 19 nt, Artificial Sequence
  Description of Artificial Sequence: Synthetic oligonucleotide
  Antisense strand to SEQ ID NO: 191342
caaguuacccagaacucca

SEQ ID NO: 191344 - RNA, 19 nt, Artificial Sequence
  Description of Artificial Sequence: Synthetic oligonucleotide
  Sense strand starting at position 3943 of SEQ ID NO: 2466
guaacuugucuuugcauuu

SEQ ID NO: 191345 - RNA, 19 nt, Artificial Sequence
  Description of Artificial Sequence: Synthetic oligonucleotide
  Antisense strand to SEQ ID NO: 191344
aaaugcaaagacaaguuac

SEQ ID NO: 191346 - RNA, 19 nt, Artificial Sequence
  Description of Artificial Sequence: Synthetic oligonucleotide
  Sense strand starting at position 82 of SEQ ID NO: 2467
gggcauacagccuaaugaa

SEQ ID NO: 191347 - RNA, 19 nt, Artificial Sequence
  Description of Artificial Sequence: Synthetic oligonucleotide
  Antisense strand to SEQ ID NO: 191346
uucauuaggcuguaugccc

SEQ ID NO: 191348 - RNA, 19 nt, Artificial Sequence
  Description of Artificial Sequence: Synthetic oligonucleotide
  Sense strand starting at position 147 of SEQ ID NO: 2467
gggacauacucagugcuuu

SEQ ID NO: 191349 - RNA, 19 nt, Artificial Sequence
  Description of Artificial Sequence: Synthetic oligonucleotide
  Antisense strand to SEQ ID NO: 191348
aaagcacugaguauguccc

SEQ ID NO: 191350 - RNA, 19 nt, Artificial Sequence
  Description of Artificial Sequence: Synthetic oligonucleotide
  Sense strand starting at position 151 of SEQ ID NO: 2467
cauacucagugcuuugaga

SEQ ID NO: 191351 - RNA, 19 nt, Artificial Sequence
  Description of Artificial Sequence: Synthetic oligonucleotide
  Antisense strand to SEQ ID NO: 191350
ucucaaagcacugaguaug

SEQ ID NO: 191352 - RNA, 19 nt, Artificial Sequence
  Description of Artificial Sequence: Synthetic oligonucleotide
  Sense strand starting at position 162 of SEQ ID NO: 2467
cuuugagagcacugaggaa

SEQ ID NO: 191353 - RNA, 19 nt, Artificial Sequence
  Description of Artificial Sequence: Synthetic oligonucleotide
  Antisense strand to SEQ ID NO: 191352
uuccucagugcucucaaag

SEQ ID NO: 191354 - RNA, 19 nt, Artificial Sequence
  Description of Artificial Sequence: Synthetic oligonucleotide
  Sense strand starting at position 184 of SEQ ID NO: 2467
caccuaggccaguaugaga

SEQ ID NO: 191355 - RNA, 19 nt, Artificial Sequence
  Description of Artificial Sequence: Synthetic oligonucleotide
  Antisense strand to SEQ ID NO: 191354
ucucauacuggccuaggug

SEQ ID NO: 191356 - RNA, 19 nt, Artificial Sequence
  Description of Artificial Sequence: Synthetic oligonucleotide
  Sense strand starting at position 213 of SEQ ID NO: 2467
acagcuucuugaucuguua

SEQ ID NO: 191357 - RNA, 19 nt, Artificial Sequence
  Description of Artificial Sequence: Synthetic oligonucleotide
  Antisense strand to SEQ ID NO: 191356
uaacagaucaagaagcugu

SEQ ID NO: 191358 - RNA, 19 nt, Artificial Sequence
  Description of Artificial Sequence: Synthetic oligonucleotide
  Sense strand starting at position 302 of SEQ ID NO: 2467
gagagcaugucagcucaaa

SEQ ID NO: 191359 - RNA, 19 nt, Artificial Sequence
  Description of Artificial Sequence: Synthetic oligonucleotide
  Antisense strand to SEQ ID NO: 191358
uuugagcugacaugcucuc

SEQ ID NO: 191360 - RNA, 19 nt, Artificial Sequence
  Description of Artificial Sequence: Synthetic oligonucleotide
  Sense strand starting at position 327 of SEQ ID NO: 2467
caugguuucccaggagaua

SEQ ID NO: 191361 - RNA, 19 nt, Artificial Sequence
  Description of Artificial Sequence: Synthetic oligonucleotide
  Antisense strand to SEQ ID NO: 191360
uaucuccugggaaaccaug

SEQ ID NO: 191362 - RNA, 19 nt, Artificial Sequence
  Description of Artificial Sequence: Synthetic oligonucleotide
  Sense strand starting at position 385 of SEQ ID NO: 2467
accuuuaucuucuugguuu

SEQ ID NO: 191363 - RNA, 19 nt, Artificial Sequence
  Description of Artificial Sequence: Synthetic oligonucleotide
  Antisense strand to SEQ ID NO: 191362
aaaccaagaagauaaaggu

SEQ ID NO: 191364 - RNA, 19 nt, Artificial Sequence
  Description of Artificial Sequence: Synthetic oligonucleotide
  Sense strand starting at position 702 of SEQ ID NO: 2467
ggauuaaccugauacuuuc

SEQ ID NO: 191365 - RNA, 19 nt, Artificial Sequence
  Description of Artificial Sequence: Synthetic oligonucleotide
  Antisense strand to SEQ ID NO: 191364
gaaaguaucagguuaaucc

SEQ ID NO: 191366 - RNA, 19 nt, Artificial Sequence
  Description of Artificial Sequence: Synthetic oligonucleotide
  Sense strand starting at position 759 of SEQ ID NO: 2467
cuaaauggugauugugacu

SEQ ID NO: 191367 - RNA, 19 nt, Artificial Sequence
  Description of Artificial Sequence: Synthetic oligonucleotide
  Antisense strand to SEQ ID NO: 191366
agucacaaucaccauuuag

SEQ ID NO: 191368 - RNA, 19 nt, Artificial Sequence
  Description of Artificial Sequence: Synthetic oligonucleotide
  Sense strand starting at position 764 of SEQ ID NO: 2467
uggugauugugacuuauuc

SEQ ID NO: 191369 - RNA, 19 nt, Artificial Sequence
  Description of Artificial Sequence: Synthetic oligonucleotide
  Antisense strand to SEQ ID NO: 191368
gaauaagucacaaucacca

SEQ ID NO: 191370 - RNA, 19 nt, Artificial Sequence
  Description of Artificial Sequence: Synthetic oligonucleotide
  Sense strand starting at position 881 of SEQ ID NO: 2467
ugccauuugcccuagcagu

SEQ ID NO: 191371 - RNA, 19 nt, Artificial Sequence
  Description of Artificial Sequence: Synthetic oligonucleotide
  Antisense strand to SEQ ID NO: 191370
acugcuagggcaaauggca

SEQ ID NO: 191372 - RNA, 19 nt, Artificial Sequence
  Description of Artificial Sequence: Synthetic oligonucleotide
  Sense strand starting at position 995 of SEQ ID NO: 2467
agggaaagcuuuccacaua

SEQ ID NO: 191373 - RNA, 19 nt, Artificial Sequence
  Description of Artificial Sequence: Synthetic oligonucleotide
  Antisense strand to SEQ ID NO: 191372
uauguggaaagcuuucccu

SEQ ID NO: 191374 - RNA, 19 nt, Artificial Sequence
  Description of Artificial Sequence: Synthetic oligonucleotide
  Sense strand starting at position 1318 of SEQ ID NO: 2467
ugauuugucucccacauug

SEQ ID NO: 191375 - RNA, 19 nt, Artificial Sequence
  Description of Artificial Sequence: Synthetic oligonucleotide
  Antisense strand to SEQ ID NO: 191374
caaugugggagacaaauca

SEQ ID NO: 191376 - RNA, 19 nt, Artificial Sequence
  Description of Artificial Sequence: Synthetic oligonucleotide
  Sense strand starting at position 1328 of SEQ ID NO: 2467
cccacauuggaauguuaga

SEQ ID NO: 191377 - RNA, 19 nt, Artificial Sequence
  Description of Artificial Sequence: Synthetic oligonucleotide
  Antisense strand to SEQ ID NO: 191376
ucuaacauuccaauguggg

SEQ ID NO: 191378 - RNA, 19 nt, Artificial Sequence
  Description of Artificial Sequence: Synthetic oligonucleotide
  Sense strand starting at position 1338 of SEQ ID NO: 2467
aauguuagaucuuugaagg

SEQ ID NO: 191379 - RNA, 19 nt, Artificial Sequence
  Description of Artificial Sequence: Synthetic oligonucleotide
  Antisense strand to SEQ ID NO: 191378
ccuucaaagaucuaacauu

SEQ ID NO: 191380 - RNA, 19 nt, Artificial Sequence
  Description of Artificial Sequence: Synthetic oligonucleotide
  Sense strand starting at position 1339 of SEQ ID NO: 2467
auguuagaucuuugaagga

SEQ ID NO: 191381 - RNA, 19 nt, Artificial Sequence
  Description of Artificial Sequence: Synthetic oligonucleotide
  Antisense strand to SEQ ID NO: 191380
uccuucaaagaucuaacau

SEQ ID NO: 191382 - RNA, 19 nt, Artificial Sequence
  Description of Artificial Sequence: Synthetic oligonucleotide
  Sense strand starting at position 1437 of SEQ ID NO: 2467
ugacgaauaagugggagau

SEQ ID NO: 191383 - RNA, 19 nt, Artificial Sequence
  Description of Artificial Sequence: Synthetic oligonucleotide
  Antisense strand to SEQ ID NO: 191382
aucucccacuuauucguca

SEQ ID NO: 191384 - RNA, 19 nt, Artificial Sequence
  Description of Artificial Sequence: Synthetic oligonucleotide
  Sense strand starting at position 1439 of SEQ ID NO: 2467
acgaauaagugggagauga

SEQ ID NO: 191385 - RNA, 19 nt, Artificial Sequence
  Description of Artificial Sequence: Synthetic oligonucleotide
  Antisense strand to SEQ ID NO: 191384
ucaucucccacuuauucgu

SEQ ID NO: 191386 - RNA, 19 nt, Artificial Sequence
  Description of Artificial Sequence: Synthetic oligonucleotide
  Sense strand starting at position 1505 of SEQ ID NO: 2467
ugaggugucccuugcagag

SEQ ID NO: 191387 - RNA, 19 nt, Artificial Sequence
  Description of Artificial Sequence: Synthetic oligonucleotide
  Antisense strand to SEQ ID NO: 191386
cucugcaagggacaccuca

SEQ ID NO: 191388 - RNA, 19 nt, Artificial Sequence
  Description of Artificial Sequence: Synthetic oligonucleotide
  Sense strand starting at position 1853 of SEQ ID NO: 2467
acgugacucgacuaacauc

SEQ ID NO: 191389 - RNA, 19 nt, Artificial Sequence
  Description of Artificial Sequence: Synthetic oligonucleotide
  Antisense strand to SEQ ID NO: 191388
gauguuagucgagucacgu

SEQ ID NO: 191390 - RNA, 19 nt, Artificial Sequence
  Description of Artificial Sequence: Synthetic oligonucleotide
  Sense strand starting at position 1862 of SEQ ID NO: 2467
gacuaacaucuggguguau

SEQ ID NO: 191391 - RNA, 19 nt, Artificial Sequence
  Description of Artificial Sequence: Synthetic oligonucleotide
  Antisense strand to SEQ ID NO: 191390
auacacccagauguuaguc

SEQ ID NO: 191392 - RNA, 19 nt, Artificial Sequence
  Description of Artificial Sequence: Synthetic oligonucleotide
  Sense strand starting at position 1863 of SEQ ID NO: 2467
acuaacaucuggguguauu

SEQ ID NO: 191393 - RNA, 19 nt, Artificial Sequence
  Description of Artificial Sequence: Synthetic oligonucleotide
  Antisense strand to SEQ ID NO: 191392
aauacacccagauguuagu

SEQ ID NO: 191394 - RNA, 19 nt, Artificial Sequence
  Description of Artificial Sequence: Synthetic oligonucleotide
  Sense strand starting at position 1864 of SEQ ID NO: 2467
cuaacaucuggguguauug

SEQ ID NO: 191395 - RNA, 19 nt, Artificial Sequence
  Description of Artificial Sequence: Synthetic oligonucleotide
  Antisense strand to SEQ ID NO: 191394
caauacacccagauguuag

SEQ ID NO: 191396 - RNA, 19 nt, Artificial Sequence
  Description of Artificial Sequence: Synthetic oligonucleotide
  Sense strand starting at position 1871 of SEQ ID NO: 2467
cuggguguauugcugaagu

SEQ ID NO: 191397 - RNA, 19 nt, Artificial Sequence
  Description of Artificial Sequence: Synthetic oligonucleotide
  Antisense strand to SEQ ID NO: 191396
acuucagcaauacacccag

SEQ ID NO: 191398 - RNA, 19 nt, Artificial Sequence
  Description of Artificial Sequence: Synthetic oligonucleotide
  Sense strand starting at position 1873 of SEQ ID NO: 2467
ggguguauugcugaaguug

SEQ ID NO: 191399 - RNA, 19 nt, Artificial Sequence
  Description of Artificial Sequence: Synthetic oligonucleotide
  Antisense strand to SEQ ID NO: 191398
caacuucagcaauacaccc

SEQ ID NO: 191400 - RNA, 19 nt, Artificial Sequence
  Description of Artificial Sequence: Synthetic oligonucleotide
  Sense strand starting at position 1931 of SEQ ID NO: 2467
acaagucccacgggucaaa

SEQ ID NO: 191401 - RNA, 19 nt, Artificial Sequence
  Description of Artificial Sequence: Synthetic oligonucleotide
  Antisense strand to SEQ ID NO: 191400
uuugacccgugggacuugu

SEQ ID NO: 191402 - RNA, 19 nt, Artificial Sequence
  Description of Artificial Sequence: Synthetic oligonucleotide
  Sense strand starting at position 1942 of SEQ ID NO: 2467
gggucaaauggccgagaaa

SEQ ID NO: 191403 - RNA, 19 nt, Artificial Sequence
  Description of Artificial Sequence: Synthetic oligonucleotide
  Antisense strand to SEQ ID NO: 191402
uuucucggccauuugaccc

SEQ ID NO: 191404 - RNA, 19 nt, Artificial Sequence
  Description of Artificial Sequence: Synthetic oligonucleotide
  Sense strand starting at position 1943 of SEQ ID NO: 2467
ggucaaauggccgagaaac

SEQ ID NO: 191405 - RNA, 19 nt, Artificial Sequence
  Description of Artificial Sequence: Synthetic oligonucleotide
  Antisense strand to SEQ ID NO: 191404
guuucucggccauuugacc

SEQ ID NO: 191406 - RNA, 19 nt, Artificial Sequence
  Description of Artificial Sequence: Synthetic oligonucleotide
  Sense strand starting at position 2002 of SEQ ID NO: 2467
gccgguaagggucaaacau

SEQ ID NO: 191407 - RNA, 19 nt, Artificial Sequence
  Description of Artificial Sequence: Synthetic oligonucleotide
  Antisense strand to SEQ ID NO: 191406
auguuugacccuuaccggc

SEQ ID NO: 191408 - RNA, 19 nt, Artificial Sequence
  Description of Artificial Sequence: Synthetic oligonucleotide
  Sense strand starting at position 3739 of SEQ ID NO: 2467
cgaagugggaaaggucauu

SEQ ID NO: 191409 - RNA, 19 nt, Artificial Sequence
  Description of Artificial Sequence: Synthetic oligonucleotide
  Antisense strand to SEQ ID NO: 191408
aaugaccuuucccacuucg

SEQ ID NO: 191410 - RNA, 19 nt, Artificial Sequence
  Description of Artificial Sequence: Synthetic oligonucleotide
  Sense strand starting at position 3751 of SEQ ID NO: 2467
ggucauuccagguggagua

SEQ ID NO: 191411 - RNA, 19 nt, Artificial Sequence
  Description of Artificial Sequence: Synthetic oligonucleotide
  Antisense strand to SEQ ID NO: 191410
uacuccaccuggaaugacc

SEQ ID NO: 191412 - RNA, 19 nt, Artificial Sequence
  Description of Artificial Sequence: Synthetic oligonucleotide
  Sense strand starting at position 3752 of SEQ ID NO: 2467
gucauuccagguggaguau

SEQ ID NO: 191413 - RNA, 19 nt, Artificial Sequence
  Description of Artificial Sequence: Synthetic oligonucleotide
  Antisense strand to SEQ ID NO: 191412
auacuccaccuggaaugac

SEQ ID NO: 191414 - RNA, 19 nt, Artificial Sequence
  Description of Artificial Sequence: Synthetic oligonucleotide
  Sense strand starting at position 3764 of SEQ ID NO: 2467
ggaguauggcaguaggaau

SEQ ID NO: 191415 - RNA, 19 nt, Artificial Sequence
  Description of Artificial Sequence: Synthetic oligonucleotide
  Antisense strand to SEQ ID NO: 191414
auuccuacugccauacucc

SEQ ID NO: 191416 - RNA, 19 nt, Artificial Sequence
  Description of Artificial Sequence: Synthetic oligonucleotide
  Sense strand starting at position 3807 of SEQ ID NO: 2467
accgaagugcuuugguaag

SEQ ID NO: 191417 - RNA, 19 nt, Artificial Sequence
  Description of Artificial Sequence: Synthetic oligonucleotide
  Antisense strand to SEQ ID NO: 191416
cuuaccaaagcacuucggu

SEQ ID NO: 191418 - RNA, 19 nt, Artificial Sequence
  Description of Artificial Sequence: Synthetic oligonucleotide
  Sense strand starting at position 3843 of SEQ ID NO: 2467
agagauggcuugcuuugua

SEQ ID NO: 191419 - RNA, 19 nt, Artificial Sequence
  Description of Artificial Sequence: Synthetic oligonucleotide
  Antisense strand to SEQ ID NO: 191418
uacaaagcaagccaucucu

SEQ ID NO: 191420 - RNA, 19 nt, Artificial Sequence
  Description of Artificial Sequence: Synthetic oligonucleotide
  Sense strand starting at position 3846 of SEQ ID NO: 2467
gauggcuugcuuuguagaa

SEQ ID NO: 191421 - RNA, 19 nt, Artificial Sequence
  Description of Artificial Sequence: Synthetic oligonucleotide
  Antisense strand to SEQ ID NO: 191420
uucuacaaagcaagccauc

SEQ ID NO: 191422 - RNA, 19 nt, Artificial Sequence
  Description of Artificial Sequence: Synthetic oligonucleotide
  Sense strand starting at position 3850 of SEQ ID NO: 2467
gcuugcuuuguagaagacu

SEQ ID NO: 191423 - RNA, 19 nt, Artificial Sequence
  Description of Artificial Sequence: Synthetic oligonucleotide
  Antisense strand to SEQ ID NO: 191422
agucuucuacaaagcaagc

SEQ ID NO: 191424 - RNA, 19 nt, Artificial Sequence
  Description of Artificial Sequence: Synthetic oligonucleotide
  Sense strand starting at position 3853 of SEQ ID NO: 2467
ugcuuuguagaagacuuua

SEQ ID NO: 191425 - RNA, 19 nt, Artificial Sequence
  Description of Artificial Sequence: Synthetic oligonucleotide
  Antisense strand to SEQ ID NO: 191424
uaaagucuucuacaaagca

SEQ ID NO: 191426 - RNA, 19 nt, Artificial Sequence
  Description of Artificial Sequence: Synthetic oligonucleotide
  Sense strand starting at position 84 of SEQ ID NO: 2468
cgugaagguuccaaaggga

SEQ ID NO: 191427 - RNA, 19 nt, Artificial Sequence
  Description of Artificial Sequence: Synthetic oligonucleotide
  Antisense strand to SEQ ID NO: 191426
ucccuuuggaaccuucacg

SEQ ID NO: 191428 - RNA, 19 nt, Artificial Sequence
  Description of Artificial Sequence: Synthetic oligonucleotide
  Sense strand starting at position 111 of SEQ ID NO: 2468
uccaaagacguuugugagu

SEQ ID NO: 191429 - RNA, 19 nt, Artificial Sequence
  Description of Artificial Sequence: Synthetic oligonucleotide
  Antisense strand to SEQ ID NO: 191428
acucacaaacgucuuugga

SEQ ID NO: 191430 - RNA, 19 nt, Artificial Sequence
  Description of Artificial Sequence: Synthetic oligonucleotide
  Sense strand starting at position 189 of SEQ ID NO: 2468
aggugauuauucucuguuu

SEQ ID NO: 191431 - RNA, 19 nt, Artificial Sequence
  Description of Artificial Sequence: Synthetic oligonucleotide
  Antisense strand to SEQ ID NO: 191430
aaacagagaauaaucaccu

SEQ ID NO: 191432 - RNA, 19 nt, Artificial Sequence
  Description of Artificial Sequence: Synthetic oligonucleotide
  Sense strand starting at position 231 of SEQ ID NO: 2468
cuccucacugcucagugaa

SEQ ID NO: 191433 - RNA, 19 nt, Artificial Sequence
  Description of Artificial Sequence: Synthetic oligonucleotide
  Antisense strand to SEQ ID NO: 191432
uucacugagcagugaggag

SEQ ID NO: 191434 - RNA, 19 nt, Artificial Sequence
  Description of Artificial Sequence: Synthetic oligonucleotide
  Sense strand starting at position 317 of SEQ ID NO: 2468
guuguaaauuggagaggug

SEQ ID NO: 191435 - RNA, 19 nt, Artificial Sequence
  Description of Artificial Sequence: Synthetic oligonucleotide
  Antisense strand to SEQ ID NO: 191434
caccucuccaauuuacaac

SEQ ID NO: 191436 - RNA, 19 nt, Artificial Sequence
  Description of Artificial Sequence: Synthetic oligonucleotide
  Sense strand starting at position 331 of SEQ ID NO: 2468
aggugaaguuggaguuuga

SEQ ID NO: 191437 - RNA, 19 nt, Artificial Sequence
  Description of Artificial Sequence: Synthetic oligonucleotide
  Antisense strand to SEQ ID NO: 191436
ucaaacuccaacuucaccu

SEQ ID NO: 191438 - RNA, 19 nt, Artificial Sequence
  Description of Artificial Sequence: Synthetic oligonucleotide
  Sense strand starting at position 335 of SEQ ID NO: 2468
gaaguuggaguuugagagu

SEQ ID NO: 191439 - RNA, 19 nt, Artificial Sequence
  Description of Artificial Sequence: Synthetic oligonucleotide
  Antisense strand to SEQ ID NO: 191438
acucucaaacuccaacuuc

SEQ ID NO: 191440 - RNA, 19 nt, Artificial Sequence
  Description of Artificial Sequence: Synthetic oligonucleotide
  Sense strand starting at position 385 of SEQ ID NO: 2468
cugcaaguucuagaaguua

SEQ ID NO: 191441 - RNA, 19 nt, Artificial Sequence
  Description of Artificial Sequence: Synthetic oligonucleotide
  Antisense strand to SEQ ID NO: 191440
uaacuucuagaacuugcag

SEQ ID NO: 191442 - RNA, 19 nt, Artificial Sequence
  Description of Artificial Sequence: Synthetic oligonucleotide
  Sense strand starting at position 410 of SEQ ID NO: 2468
ggaauacggucauggauuu

SEQ ID NO: 191443 - RNA, 19 nt, Artificial Sequence
  Description of Artificial Sequence: Synthetic oligonucleotide
  Antisense strand to SEQ ID NO: 191442
aaauccaugaccguauucc

SEQ ID NO: 191444 - RNA, 19 nt, Artificial Sequence
  Description of Artificial Sequence: Synthetic oligonucleotide
  Sense strand starting at position 440 of SEQ ID NO: 2468
ugccuuacauuugggaaau

SEQ ID NO: 191445 - RNA, 19 nt, Artificial Sequence
  Description of Artificial Sequence: Synthetic oligonucleotide
  Antisense strand to SEQ ID NO: 191444
auuucccaaauguaaggca

SEQ ID NO: 191446 - RNA, 19 nt, Artificial Sequence
  Description of Artificial Sequence: Synthetic oligonucleotide
  Sense strand starting at position 441 of SEQ ID NO: 2468
gccuuacauuugggaaaug

SEQ ID NO: 191447 - RNA, 19 nt, Artificial Sequence
  Description of Artificial Sequence: Synthetic oligonucleotide
  Antisense strand to SEQ ID NO: 191446
cauuucccaaauguaaggc

SEQ ID NO: 191448 - RNA, 19 nt, Artificial Sequence
  Description of Artificial Sequence: Synthetic oligonucleotide
  Sense strand starting at position 571 of SEQ ID NO: 2468
gggcuucauucugccggaa

SEQ ID NO: 191449 - RNA, 19 nt, Artificial Sequence
  Description of Artificial Sequence: Synthetic oligonucleotide
  Antisense strand to SEQ ID NO: 191448
uuccggcagaaugaagccc

SEQ ID NO: 191450 - RNA, 19 nt, Artificial Sequence
  Description of Artificial Sequence: Synthetic oligonucleotide
  Sense strand starting at position 963 of SEQ ID NO: 2468
ggucuccucccuuaaguga

SEQ ID NO: 191451 - RNA, 19 nt, Artificial Sequence
  Description of Artificial Sequence: Synthetic oligonucleotide
  Antisense strand to SEQ ID NO: 191450
ucacuuaagggaggagacc

SEQ ID NO: 191452 - RNA, 19 nt, Artificial Sequence
  Description of Artificial Sequence: Synthetic oligonucleotide
  Sense strand starting at position 979 of SEQ ID NO: 2468
ugaugauggugcccugagu

SEQ ID NO: 191453 - RNA, 19 nt, Artificial Sequence
  Description of Artificial Sequence: Synthetic oligonucleotide
  Antisense strand to SEQ ID NO: 191452
acucagggcaccaucauca

SEQ ID NO: 191454 - RNA, 19 nt, Artificial Sequence
  Description of Artificial Sequence: Synthetic oligonucleotide
  Sense strand starting at position 992 of SEQ ID NO: 2468
cugaguuccucaccaagaa

SEQ ID NO: 191455 - RNA, 19 nt, Artificial Sequence
  Description of Artificial Sequence: Synthetic oligonucleotide
  Antisense strand to SEQ ID NO: 191454
uucuuggugaggaacucag

SEQ ID NO: 191456 - RNA, 19 nt, Artificial Sequence
  Description of Artificial Sequence: Synthetic oligonucleotide
  Sense strand starting at position 1303 of SEQ ID NO: 2468
uuugguuuguuuccuuaca

SEQ ID NO: 191457 - RNA, 19 nt, Artificial Sequence
  Description of Artificial Sequence: Synthetic oligonucleotide
  Antisense strand to SEQ ID NO: 191456
uguaaggaaacaaaccaaa

SEQ ID NO: 191458 - RNA, 19 nt, Artificial Sequence
  Description of Artificial Sequence: Synthetic oligonucleotide
  Sense strand starting at position 1305 of SEQ ID NO: 2468
ugguuuguuuccuuacaca

SEQ ID NO: 191459 - RNA, 19 nt, Artificial Sequence
  Description of Artificial Sequence: Synthetic oligonucleotide
  Antisense strand to SEQ ID NO: 191458
uguguaaggaaacaaacca

SEQ ID NO: 191460 - RNA, 19 nt, Artificial Sequence
  Description of Artificial Sequence: Synthetic oligonucleotide
  Sense strand starting at position 1413 of SEQ ID NO: 2468
gcucaaacucuguaacgcu

SEQ ID NO: 191461 - RNA, 19 nt, Artificial Sequence
  Description of Artificial Sequence: Synthetic oligonucleotide
  Antisense strand to SEQ ID NO: 191460
agcguuacagaguuugagc

SEQ ID NO: 191462 - RNA, 19 nt, Artificial Sequence
  Description of Artificial Sequence: Synthetic oligonucleotide
  Sense strand starting at position 1421 of SEQ ID NO: 2468
ucuguaacgcuuuaauuaa

SEQ ID NO: 191463 - RNA, 19 nt, Artificial Sequence
  Description of Artificial Sequence: Synthetic oligonucleotide
  Antisense strand to SEQ ID NO: 191462
uuaauuaaagcguuacaga

SEQ ID NO: 191464 - RNA, 19 nt, Artificial Sequence
  Description of Artificial Sequence: Synthetic oligonucleotide
  Sense strand starting at position 2106 of SEQ ID NO: 2468
cucuuagugacaggugaca

SEQ ID NO: 191465 - RNA, 19 nt, Artificial Sequence
  Description of Artificial Sequence: Synthetic oligonucleotide
  Antisense strand to SEQ ID NO: 191464
ugucaccugucacuaagag

SEQ ID NO: 191466 - RNA, 19 nt, Artificial Sequence
  Description of Artificial Sequence: Synthetic oligonucleotide
  Sense strand starting at position 2158 of SEQ ID NO: 2468
ggcuacagcucuucuccaa

SEQ ID NO: 191467 - RNA, 19 nt, Artificial Sequence
  Description of Artificial Sequence: Synthetic oligonucleotide
  Antisense strand to SEQ ID NO: 191466
uuggagaagagcuguagcc

SEQ ID NO: 191468 - RNA, 19 nt, Artificial Sequence
  Description of Artificial Sequence: Synthetic oligonucleotide
  Sense strand starting at position 2165 of SEQ ID NO: 2468
gcucuucuccaagaggguu

SEQ ID NO: 191469 - RNA, 19 nt, Artificial Sequence
  Description of Artificial Sequence: Synthetic oligonucleotide
  Antisense strand to SEQ ID NO: 191468
aacccucuuggagaagagc

SEQ ID NO: 191470 - RNA, 19 nt, Artificial Sequence
  Description of Artificial Sequence: Synthetic oligonucleotide
  Sense strand starting at position 2241 of SEQ ID NO: 2468
ccuuguauacaauguuaca

SEQ ID NO: 191471 - RNA, 19 nt, Artificial Sequence
  Description of Artificial Sequence: Synthetic oligonucleotide
  Antisense strand to SEQ ID NO: 191470
uguaacauuguauacaagg

SEQ ID NO: 191472 - RNA, 19 nt, Artificial Sequence
  Description of Artificial Sequence: Synthetic oligonucleotide
  Sense strand starting at position 2667 of SEQ ID NO: 2468
gccacauucuaggugcuaa

SEQ ID NO: 191473 - RNA, 19 nt, Artificial Sequence
  Description of Artificial Sequence: Synthetic oligonucleotide
  Antisense strand to SEQ ID NO: 191472
uuagcaccuagaauguggc

SEQ ID NO: 191474 - RNA, 19 nt, Artificial Sequence
  Description of Artificial Sequence: Synthetic oligonucleotide
  Sense strand starting at position 2696 of SEQ ID NO: 2468
gugggcaaugacugucaca

SEQ ID NO: 191475 - RNA, 19 nt, Artificial Sequence
  Description of Artificial Sequence: Synthetic oligonucleotide
  Antisense strand to SEQ ID NO: 191474
ugugacagucauugcccac

SEQ ID NO: 191476 - RNA, 19 nt, Artificial Sequence
  Description of Artificial Sequence: Synthetic oligonucleotide
  Sense strand starting at position 2861 of SEQ ID NO: 2468
agagaagugggcugcaaua

SEQ ID NO: 191477 - RNA, 19 nt, Artificial Sequence
  Description of Artificial Sequence: Synthetic oligonucleotide
  Antisense strand to SEQ ID NO: 191476
uauugcagcccacuucucu

SEQ ID NO: 191478 - RNA, 19 nt, Artificial Sequence
  Description of Artificial Sequence: Synthetic oligonucleotide
  Sense strand starting at position 2863 of SEQ ID NO: 2468
agaagugggcugcaauaaa

SEQ ID NO: 191479 - RNA, 19 nt, Artificial Sequence
  Description of Artificial Sequence: Synthetic oligonucleotide
  Antisense strand to SEQ ID NO: 191478
uuuauugcagcccacuucu

SEQ ID NO: 191480 - RNA, 19 nt, Artificial Sequence
  Description of Artificial Sequence: Synthetic oligonucleotide
  Sense strand starting at position 2882 of SEQ ID NO: 2468
gaaguaucuagagggaguc

SEQ ID NO: 191481 - RNA, 19 nt, Artificial Sequence
  Description of Artificial Sequence: Synthetic oligonucleotide
  Antisense strand to SEQ ID NO: 191480
gacucccucuagauacuuc

SEQ ID NO: 191482 - RNA, 19 nt, Artificial Sequence
  Description of Artificial Sequence: Synthetic oligonucleotide
  Sense strand starting at position 3118 of SEQ ID NO: 2468
ccuccugugguguggaauu

SEQ ID NO: 191483 - RNA, 19 nt, Artificial Sequence
  Description of Artificial Sequence: Synthetic oligonucleotide
  Antisense strand to SEQ ID NO: 191482
aauuccacaccacaggagg

SEQ ID NO: 191484 - RNA, 19 nt, Artificial Sequence
  Description of Artificial Sequence: Synthetic oligonucleotide
  Sense strand starting at position 3132 of SEQ ID NO: 2468
gaauuuaagugugugaguu

SEQ ID NO: 191485 - RNA, 19 nt, Artificial Sequence
  Description of Artificial Sequence: Synthetic oligonucleotide
  Antisense strand to SEQ ID NO: 191484
aacucacacacuuaaauuc

SEQ ID NO: 191486 - RNA, 19 nt, Artificial Sequence
  Description of Artificial Sequence: Synthetic oligonucleotide
  Sense strand starting at position 3133 of SEQ ID NO: 2468
aauuuaagugugugaguuu

SEQ ID NO: 191487 - RNA, 19 nt, Artificial Sequence
  Description of Artificial Sequence: Synthetic oligonucleotide
  Antisense strand to SEQ ID NO: 191486
aaacucacacacuuaaauu

SEQ ID NO: 191488 - RNA, 19 nt, Artificial Sequence
  Description of Artificial Sequence: Synthetic oligonucleotide
  Sense strand starting at position 3136 of SEQ ID NO: 2468
uuaagugugugaguuuaag

SEQ ID NO: 191489 - RNA, 19 nt, Artificial Sequence
  Description of Artificial Sequence: Synthetic oligonucleotide
  Antisense strand to SEQ ID NO: 191488
cuuaaacucacacacuuaa

SEQ ID NO: 191490 - RNA, 19 nt, Artificial Sequence
  Description of Artificial Sequence: Synthetic oligonucleotide
  Sense strand starting at position 3142 of SEQ ID NO: 2468
gugugaguuuaagcacaaa

SEQ ID NO: 191491 - RNA, 19 nt, Artificial Sequence
  Description of Artificial Sequence: Synthetic oligonucleotide
  Antisense strand to SEQ ID NO: 191490
uuugugcuuaaacucacac

SEQ ID NO: 191492 - RNA, 19 nt, Artificial Sequence
  Description of Artificial Sequence: Synthetic oligonucleotide
  Sense strand starting at position 3145 of SEQ ID NO: 2468
ugaguuuaagcacaaauca

SEQ ID NO: 191493 - RNA, 19 nt, Artificial Sequence
  Description of Artificial Sequence: Synthetic oligonucleotide
  Antisense strand to SEQ ID NO: 191492
ugauuugugcuuaaacuca

SEQ ID NO: 191494 - RNA, 19 nt, Artificial Sequence
  Description of Artificial Sequence: Synthetic oligonucleotide
  Sense strand starting at position 3370 of SEQ ID NO: 2468
auuagauugagcuggucca

SEQ ID NO: 191495 - RNA, 19 nt, Artificial Sequence
  Description of Artificial Sequence: Synthetic oligonucleotide
  Antisense strand to SEQ ID NO: 191494
uggaccagcucaaucuaau

SEQ ID NO: 191496 - RNA, 19 nt, Artificial Sequence
  Description of Artificial Sequence: Synthetic oligonucleotide
  Sense strand starting at position 3561 of SEQ ID NO: 2468
auggacuuguuauuaugga

SEQ ID NO: 191497 - RNA, 19 nt, Artificial Sequence
  Description of Artificial Sequence: Synthetic oligonucleotide
  Antisense strand to SEQ ID NO: 191496
uccauaauaacaaguccau

SEQ ID NO: 191498 - RNA, 19 nt, Artificial Sequence
  Description of Artificial Sequence: Synthetic oligonucleotide
  Sense strand starting at position 3579 of SEQ ID NO: 2468
agaugacaggguugugaaa

SEQ ID NO: 191499 - RNA, 19 nt, Artificial Sequence
  Description of Artificial Sequence: Synthetic oligonucleotide
  Antisense strand to SEQ ID NO: 191498
uuucacaacccugucaucu

SEQ ID NO: 191500 - RNA, 19 nt, Artificial Sequence
  Description of Artificial Sequence: Synthetic oligonucleotide
  Sense strand starting at position 3666 of SEQ ID NO: 2468
uuucuacugccagagcaaa

SEQ ID NO: 191501 - RNA, 19 nt, Artificial Sequence
  Description of Artificial Sequence: Synthetic oligonucleotide
  Antisense strand to SEQ ID NO: 191500
uuugcucuggcaguagaaa

SEQ ID NO: 191502 - RNA, 19 nt, Artificial Sequence
  Description of Artificial Sequence: Synthetic oligonucleotide
  Sense strand starting at position 3682 of SEQ ID NO: 2468
aaauaaggccagugagauu

SEQ ID NO: 191503 - RNA, 19 nt, Artificial Sequence
  Description of Artificial Sequence: Synthetic oligonucleotide
  Antisense strand to SEQ ID NO: 191502
aaucucacuggccuuauuu

SEQ ID NO: 191504 - RNA, 19 nt, Artificial Sequence
  Description of Artificial Sequence: Synthetic oligonucleotide
  Sense strand starting at position 3780 of SEQ ID NO: 2468
gaugaagaguugcugccau

SEQ ID NO: 191505 - RNA, 19 nt, Artificial Sequence
  Description of Artificial Sequence: Synthetic oligonucleotide
  Antisense strand to SEQ ID NO: 191504
auggcagcaacucuucauc

SEQ ID NO: 191506 - RNA, 19 nt, Artificial Sequence
  Description of Artificial Sequence: Synthetic oligonucleotide
  Sense strand starting at position 62 of SEQ ID NO: 2469
cuacuuaucugaccuuguu

SEQ ID NO: 191507 - RNA, 19 nt, Artificial Sequence
  Description of Artificial Sequence: Synthetic oligonucleotide
  Antisense strand to SEQ ID NO: 191506
aacaaggucagauaaguag

SEQ ID NO: 191508 - RNA, 19 nt, Artificial Sequence
  Description of Artificial Sequence: Synthetic oligonucleotide
  Sense strand starting at position 83 of SEQ ID NO: 2469
ccacuuguacuuuggagaa

SEQ ID NO: 191509 - RNA, 19 nt, Artificial Sequence
  Description of Artificial Sequence: Synthetic oligonucleotide
  Antisense strand to SEQ ID NO: 191508
uucuccaaaguacaagugg

SEQ ID NO: 191510 - RNA, 19 nt, Artificial Sequence
  Description of Artificial Sequence: Synthetic oligonucleotide
  Sense strand starting at position 108 of SEQ ID NO: 2469
uggucuccacacuauuauu

SEQ ID NO: 191511 - RNA, 19 nt, Artificial Sequence
  Description of Artificial Sequence: Synthetic oligonucleotide
  Antisense strand to SEQ ID NO: 191510
aauaauaguguggagacca

SEQ ID NO: 191512 - RNA, 19 nt, Artificial Sequence
  Description of Artificial Sequence: Synthetic oligonucleotide
  Sense strand starting at position 334 of SEQ ID NO: 2469
ugaguaacucugcauguuu

SEQ ID NO: 191513 - RNA, 19 nt, Artificial Sequence
  Description of Artificial Sequence: Synthetic oligonucleotide
  Antisense strand to SEQ ID NO: 191512
aaacaugcagaguuacuca

SEQ ID NO: 191514 - RNA, 19 nt, Artificial Sequence
  Description of Artificial Sequence: Synthetic oligonucleotide
  Sense strand starting at position 388 of SEQ ID NO: 2469
ggucuucuguuccuuauuu

SEQ ID NO: 191515 - RNA, 19 nt, Artificial Sequence
  Description of Artificial Sequence: Synthetic oligonucleotide
  Antisense strand to SEQ ID NO: 191514
aaauaaggaacagaagacc

SEQ ID NO: 191516 - RNA, 19 nt, Artificial Sequence
  Description of Artificial Sequence: Synthetic oligonucleotide
  Sense strand starting at position 452 of SEQ ID NO: 2469
guauuucccugagacaaca

SEQ ID NO: 191517 - RNA, 19 nt, Artificial Sequence
  Description of Artificial Sequence: Synthetic oligonucleotide
  Antisense strand to SEQ ID NO: 191516
uguugucucagggaaauac

SEQ ID NO: 191518 - RNA, 19 nt, Artificial Sequence
  Description of Artificial Sequence: Synthetic oligonucleotide
  Sense strand starting at position 474 of SEQ ID NO: 2469
ccagauuacccauauuggu

SEQ ID NO: 191519 - RNA, 19 nt, Artificial Sequence
  Description of Artificial Sequence: Synthetic oligonucleotide
  Antisense strand to SEQ ID NO: 191518
accaauauggguaaucugg

SEQ ID NO: 191520 - RNA, 19 nt, Artificial Sequence
  Description of Artificial Sequence: Synthetic oligonucleotide
  Sense strand starting at position 642 of SEQ ID NO: 2469
ugugucucuccauauggua

SEQ ID NO: 191521 - RNA, 19 nt, Artificial Sequence
  Description of Artificial Sequence: Synthetic oligonucleotide
  Antisense strand to SEQ ID NO: 191520
uaccauauggagagacaca

SEQ ID NO: 191522 - RNA, 19 nt, Artificial Sequence
  Description of Artificial Sequence: Synthetic oligonucleotide
  Sense strand starting at position 650 of SEQ ID NO: 2469
uccauaugguacuucugaa

SEQ ID NO: 191523 - RNA, 19 nt, Artificial Sequence
  Description of Artificial Sequence: Synthetic oligonucleotide
  Antisense strand to SEQ ID NO: 191522
uucagaaguaccauaugga

SEQ ID NO: 191524 - RNA, 19 nt, Artificial Sequence
  Description of Artificial Sequence: Synthetic oligonucleotide
  Sense strand starting at position 738 of SEQ ID NO: 2469
guagguauuucugaaugaa

SEQ ID NO: 191525 - RNA, 19 nt, Artificial Sequence
  Description of Artificial Sequence: Synthetic oligonucleotide
  Antisense strand to SEQ ID NO: 191524
uucauucagaaauaccuac

SEQ ID NO: 191526 - RNA, 19 nt, Artificial Sequence
  Description of Artificial Sequence: Synthetic oligonucleotide
  Sense strand starting at position 778 of SEQ ID NO: 2469
cuggaaaggucuuucuccu

SEQ ID NO: 191527 - RNA, 19 nt, Artificial Sequence
  Description of Artificial Sequence: Synthetic oligonucleotide
  Antisense strand to SEQ ID NO: 191526
aggagaaagaccuuuccag

SEQ ID NO: 191528 - RNA, 19 nt, Artificial Sequence
  Description of Artificial Sequence: Synthetic oligonucleotide
  Sense strand starting at position 788 of SEQ ID NO: 2469
cuuucuccuguaugaauga

SEQ ID NO: 191529 - RNA, 19 nt, Artificial Sequence
  Description of Artificial Sequence: Synthetic oligonucleotide
  Antisense strand to SEQ ID NO: 191528
ucauucauacaggagaaag

SEQ ID NO: 191530 - RNA, 19 nt, Artificial Sequence
  Description of Artificial Sequence: Synthetic oligonucleotide
  Sense strand starting at position 845 of SEQ ID NO: 2469
gcacuacagugaucacaga

SEQ ID NO: 191531 - RNA, 19 nt, Artificial Sequence
  Description of Artificial Sequence: Synthetic oligonucleotide
  Antisense strand to SEQ ID NO: 191530
ucugugaucacuguagugc

SEQ ID NO: 191532 - RNA, 19 nt, Artificial Sequence
  Description of Artificial Sequence: Synthetic oligonucleotide
  Sense strand starting at position 854 of SEQ ID NO: 2469
ugaucacagauaugagguu

SEQ ID NO: 191533 - RNA, 19 nt, Artificial Sequence
  Description of Artificial Sequence: Synthetic oligonucleotide
  Antisense strand to SEQ ID NO: 191532
aaccucauaucugugauca

SEQ ID NO: 191534 - RNA, 19 nt, Artificial Sequence
  Description of Artificial Sequence: Synthetic oligonucleotide
  Sense strand starting at position 948 of SEQ ID NO: 2469
uggcuuugauucccugaga

SEQ ID NO: 191535 - RNA, 19 nt, Artificial Sequence
  Description of Artificial Sequence: Synthetic oligonucleotide
  Antisense strand to SEQ ID NO: 191534
ucucagggaaucaaagcca

SEQ ID NO: 191536 - RNA, 19 nt, Artificial Sequence
  Description of Artificial Sequence: Synthetic oligonucleotide
  Sense strand starting at position 949 of SEQ ID NO: 2469
ggcuuugauucccugagau

SEQ ID NO: 191537 - RNA, 19 nt, Artificial Sequence
  Description of Artificial Sequence: Synthetic oligonucleotide
  Antisense strand to SEQ ID NO: 191536
aucucagggaaucaaagcc

SEQ ID NO: 191538 - RNA, 19 nt, Artificial Sequence
  Description of Artificial Sequence: Synthetic oligonucleotide
  Sense strand starting at position 951 of SEQ ID NO: 2469
cuuugauucccugagauuc

SEQ ID NO: 191539 - RNA, 19 nt, Artificial Sequence
  Description of Artificial Sequence: Synthetic oligonucleotide
  Antisense strand to SEQ ID NO: 191538
gaaucucagggaaucaaag

SEQ ID NO: 191540 - RNA, 19 nt, Artificial Sequence
  Description of Artificial Sequence: Synthetic oligonucleotide
  Sense strand starting at position 1095 of SEQ ID NO: 2469
ggacaugcugguggagaau

SEQ ID NO: 191541 - RNA, 19 nt, Artificial Sequence
  Description of Artificial Sequence: Synthetic oligonucleotide
  Antisense strand to SEQ ID NO: 191540
auucuccaccagcaugucc

SEQ ID NO: 191542 - RNA, 19 nt, Artificial Sequence
  Description of Artificial Sequence: Synthetic oligonucleotide
  Sense strand starting at position 1263 of SEQ ID NO: 2469
guuugaugcuaaccaaaga

SEQ ID NO: 191543 - RNA, 19 nt, Artificial Sequence
  Description of Artificial Sequence: Synthetic oligonucleotide
  Antisense strand to SEQ ID NO: 191542
ucuuugguuagcaucaaac

SEQ ID NO: 191544 - RNA, 19 nt, Artificial Sequence
  Description of Artificial Sequence: Synthetic oligonucleotide
  Sense strand starting at position 1990 of SEQ ID NO: 2469
gcgcagugucugcugggaa

SEQ ID NO: 191545 - RNA, 19 nt, Artificial Sequence
  Description of Artificial Sequence: Synthetic oligonucleotide
  Antisense strand to SEQ ID NO: 191544
uucccagcagacacugcgc

SEQ ID NO: 191546 - RNA, 19 nt, Artificial Sequence
  Description of Artificial Sequence: Synthetic oligonucleotide
  Sense strand starting at position 2204 of SEQ ID NO: 2469
gaugaaagugguugagggu

SEQ ID NO: 191547 - RNA, 19 nt, Artificial Sequence
  Description of Artificial Sequence: Synthetic oligonucleotide
  Antisense strand to SEQ ID NO: 191546
acccucaaccacuuucauc

SEQ ID NO: 191548 - RNA, 19 nt, Artificial Sequence
  Description of Artificial Sequence: Synthetic oligonucleotide
  Sense strand starting at position 2520 of SEQ ID NO: 2469
acuaauaaugggcgcauau

SEQ ID NO: 191549 - RNA, 19 nt, Artificial Sequence
  Description of Artificial Sequence: Synthetic oligonucleotide
  Antisense strand to SEQ ID NO: 191548
auaugcgcccauuauuagu

SEQ ID NO: 191550 - RNA, 19 nt, Artificial Sequence
  Description of Artificial Sequence: Synthetic oligonucleotide
  Sense strand starting at position 2530 of SEQ ID NO: 2469
ggcgcauauccuuugcauu

SEQ ID NO: 191551 - RNA, 19 nt, Artificial Sequence
  Description of Artificial Sequence: Synthetic oligonucleotide
  Antisense strand to SEQ ID NO: 191550
aaugcaaaggauaugcgcc

SEQ ID NO: 191552 - RNA, 19 nt, Artificial Sequence
  Description of Artificial Sequence: Synthetic oligonucleotide
  Sense strand starting at position 2532 of SEQ ID NO: 2469
cgcauauccuuugcauuua

SEQ ID NO: 191553 - RNA, 19 nt, Artificial Sequence
  Description of Artificial Sequence: Synthetic oligonucleotide
  Antisense strand to SEQ ID NO: 191552
uaaaugcaaaggauaugcg

SEQ ID NO: 191554 - RNA, 19 nt, Artificial Sequence
  Description of Artificial Sequence: Synthetic oligonucleotide
  Sense strand starting at position 2553 of SEQ ID NO: 2469
ggaggagccugcuuugaaa

SEQ ID NO: 191555 - RNA, 19 nt, Artificial Sequence
  Description of Artificial Sequence: Synthetic oligonucleotide
  Antisense strand to SEQ ID NO: 191554
uuucaaagcaggcuccucc

SEQ ID NO: 191556 - RNA, 19 nt, Artificial Sequence
  Description of Artificial Sequence: Synthetic oligonucleotide
  Sense strand starting at position 2662 of SEQ ID NO: 2469
gaggaaaccgagcguaauc

SEQ ID NO: 191557 - RNA, 19 nt, Artificial Sequence
  Description of Artificial Sequence: Synthetic oligonucleotide
  Antisense strand to SEQ ID NO: 191556
gauuacgcucgguuuccuc

SEQ ID NO: 191558 - RNA, 19 nt, Artificial Sequence
  Description of Artificial Sequence: Synthetic oligonucleotide
  Sense strand starting at position 2802 of SEQ ID NO: 2469
cccuuuauauuguuuauga

SEQ ID NO: 191559 - RNA, 19 nt, Artificial Sequence
  Description of Artificial Sequence: Synthetic oligonucleotide
  Antisense strand to SEQ ID NO: 191558
ucauaaacaauauaaaggg

SEQ ID NO: 191560 - RNA, 19 nt, Artificial Sequence
  Description of Artificial Sequence: Synthetic oligonucleotide
  Sense strand starting at position 2845 of SEQ ID NO: 2469
agagcucugcuaggaucaa

SEQ ID NO: 191561 - RNA, 19 nt, Artificial Sequence
  Description of Artificial Sequence: Synthetic oligonucleotide
  Antisense strand to SEQ ID NO: 191560
uugauccuagcagagcucu

SEQ ID NO: 191562 - RNA, 19 nt, Artificial Sequence
  Description of Artificial Sequence: Synthetic oligonucleotide
  Sense strand starting at position 2888 of SEQ ID NO: 2469
ccgagaaacucauugcaaa

SEQ ID NO: 191563 - RNA, 19 nt, Artificial Sequence
  Description of Artificial Sequence: Synthetic oligonucleotide
  Antisense strand to SEQ ID NO: 191562
uuugcaaugaguuucucgg

SEQ ID NO: 191564 - RNA, 19 nt, Artificial Sequence
  Description of Artificial Sequence: Synthetic oligonucleotide
  Sense strand starting at position 2889 of SEQ ID NO: 2469
cgagaaacucauugcaaau

SEQ ID NO: 191565 - RNA, 19 nt, Artificial Sequence
  Description of Artificial Sequence: Synthetic oligonucleotide
  Antisense strand to SEQ ID NO: 191564
auuugcaaugaguuucucg

SEQ ID NO: 191566 - RNA, 19 nt, Artificial Sequence
  Description of Artificial Sequence: Synthetic oligonucleotide
  Sense strand starting at position 3025 of SEQ ID NO: 2469
ucauguuaagcaugcagaa

SEQ ID NO: 191567 - RNA, 19 nt, Artificial Sequence
  Description of Artificial Sequence: Synthetic oligonucleotide
  Antisense strand to SEQ ID NO: 191566
uucugcaugcuuaacauga

SEQ ID NO: 191568 - RNA, 19 nt, Artificial Sequence
  Description of Artificial Sequence: Synthetic oligonucleotide
  Sense strand starting at position 3242 of SEQ ID NO: 2469
gggauuauuuacuaauacu

SEQ ID NO: 191569 - RNA, 19 nt, Artificial Sequence
  Description of Artificial Sequence: Synthetic oligonucleotide
  Antisense strand to SEQ ID NO: 191568
aguauuaguaaauaauccc

SEQ ID NO: 191570 - RNA, 19 nt, Artificial Sequence
  Description of Artificial Sequence: Synthetic oligonucleotide
  Sense strand starting at position 3360 of SEQ ID NO: 2469
acauguaaguauuccacca

SEQ ID NO: 191571 - RNA, 19 nt, Artificial Sequence
  Description of Artificial Sequence: Synthetic oligonucleotide
  Antisense strand to SEQ ID NO: 191570
ugguggaauacuuacaugu

SEQ ID NO: 191572 - RNA, 19 nt, Artificial Sequence
  Description of Artificial Sequence: Synthetic oligonucleotide
  Sense strand starting at position 3515 of SEQ ID NO: 2469
uaaugaagcgacugaugau

SEQ ID NO: 191573 - RNA, 19 nt, Artificial Sequence
  Description of Artificial Sequence: Synthetic oligonucleotide
  Antisense strand to SEQ ID NO: 191572
aucaucagucgcuucauua

SEQ ID NO: 191574 - RNA, 19 nt, Artificial Sequence
  Description of Artificial Sequence: Synthetic oligonucleotide
  Sense strand starting at position 3591 of SEQ ID NO: 2469
aggauuagaguuugggacu

SEQ ID NO: 191575 - RNA, 19 nt, Artificial Sequence
  Description of Artificial Sequence: Synthetic oligonucleotide
  Antisense strand to SEQ ID NO: 191574
agucccaaacucuaauccu

SEQ ID NO: 191576 - RNA, 19 nt, Artificial Sequence
  Description of Artificial Sequence: Synthetic oligonucleotide
  Sense strand starting at position 3743 of SEQ ID NO: 2469
gagagcuuccuguaagcga

SEQ ID NO: 191577 - RNA, 19 nt, Artificial Sequence
  Description of Artificial Sequence: Synthetic oligonucleotide
  Antisense strand to SEQ ID NO: 191576
ucgcuuacaggaagcucuc

SEQ ID NO: 191578 - RNA, 19 nt, Artificial Sequence
  Description of Artificial Sequence: Synthetic oligonucleotide
  Sense strand starting at position 3756 of SEQ ID NO: 2469
aagcgaacccgugaagguu

SEQ ID NO: 191579 - RNA, 19 nt, Artificial Sequence
  Description of Artificial Sequence: Synthetic oligonucleotide
  Antisense strand to SEQ ID NO: 191578
aaccuucacggguucgcuu

SEQ ID NO: 191580 - RNA, 19 nt, Artificial Sequence
  Description of Artificial Sequence: Synthetic oligonucleotide
  Sense strand starting at position 3873 of SEQ ID NO: 2469
uuuguaauguccuuaauag

SEQ ID NO: 191581 - RNA, 19 nt, Artificial Sequence
  Description of Artificial Sequence: Synthetic oligonucleotide
  Antisense strand to SEQ ID NO: 191580
cuauuaaggacauuacaaa

SEQ ID NO: 191582 - RNA, 19 nt, Artificial Sequence
  Description of Artificial Sequence: Synthetic oligonucleotide
  Sense strand starting at position 3874 of SEQ ID NO: 2469
uuguaauguccuuaauagu

SEQ ID NO: 191583 - RNA, 19 nt, Artificial Sequence
  Description of Artificial Sequence: Synthetic oligonucleotide
  Antisense strand to SEQ ID NO: 191582
acuauuaaggacauuacaa

SEQ ID NO: 191584 - RNA, 19 nt, Artificial Sequence
  Description of Artificial Sequence: Synthetic oligonucleotide
  Sense strand starting at position 3978 of SEQ ID NO: 2469
cgauuuacagcuggucagu

SEQ ID NO: 191585 - RNA, 19 nt, Artificial Sequence
  Description of Artificial Sequence: Synthetic oligonucleotide
  Antisense strand to SEQ ID NO: 191584
acugaccagcuguaaaucg

SEQ ID NO: 191586 - RNA, 19 nt, Artificial Sequence
  Description of Artificial Sequence: Synthetic oligonucleotide
  Sense strand starting at position 3891 of SEQ ID NO: 2470
augauuauguguucuucua

SEQ ID NO: 191587 - RNA, 19 nt, Artificial Sequence
  Description of Artificial Sequence: Synthetic oligonucleotide
  Antisense strand to SEQ ID NO: 191586
uagaagaacacauaaucau

SEQ ID NO: 191588 - RNA, 19 nt, Artificial Sequence
  Description of Artificial Sequence: Synthetic oligonucleotide
  Sense strand starting at position 3783 of SEQ ID NO: 2470
uuauguugucaguaacagu

SEQ ID NO: 191589 - RNA, 19 nt, Artificial Sequence
  Description of Artificial Sequence: Synthetic oligonucleotide
  Antisense strand to SEQ ID NO: 191588
acuguuacugacaacauaa

SEQ ID NO: 191590 - RNA, 19 nt, Artificial Sequence
  Description of Artificial Sequence: Synthetic oligonucleotide
  Sense strand starting at position 3706 of SEQ ID NO: 2470
aggacauauucuguugcca

SEQ ID NO: 191591 - RNA, 19 nt, Artificial Sequence
  Description of Artificial Sequence: Synthetic oligonucleotide
  Antisense strand to SEQ ID NO: 191590
uggcaacagaauauguccu

SEQ ID NO: 191592 - RNA, 19 nt, Artificial Sequence
  Description of Artificial Sequence: Synthetic oligonucleotide
  Sense strand starting at position 3595 of SEQ ID NO: 2470
guacauuucucagggaaag

SEQ ID NO: 191593 - RNA, 19 nt, Artificial Sequence
  Description of Artificial Sequence: Synthetic oligonucleotide
  Antisense strand to SEQ ID NO: 191592
cuuucccugagaaauguac

SEQ ID NO: 191594 - RNA, 19 nt, Artificial Sequence
  Description of Artificial Sequence: Synthetic oligonucleotide
  Sense strand starting at position 3593 of SEQ ID NO: 2470
cuguacauuucucagggaa

SEQ ID NO: 191595 - RNA, 19 nt, Artificial Sequence
  Description of Artificial Sequence: Synthetic oligonucleotide
  Antisense strand to SEQ ID NO: 191594
uucccugagaaauguacag

SEQ ID NO: 191596 - RNA, 19 nt, Artificial Sequence
  Description of Artificial Sequence: Synthetic oligonucleotide
  Sense strand starting at position 3470 of SEQ ID NO: 2470
caagcacugugauccaaag

SEQ ID NO: 191597 - RNA, 19 nt, Artificial Sequence
  Description of Artificial Sequence: Synthetic oligonucleotide
  Antisense strand to SEQ ID NO: 191596
cuuuggaucacagugcuug

SEQ ID NO: 191598 - RNA, 19 nt, Artificial Sequence
  Description of Artificial Sequence: Synthetic oligonucleotide
  Sense strand starting at position 3140 of SEQ ID NO: 2470
agccuuauccaaggaggaa

SEQ ID NO: 191599 - RNA, 19 nt, Artificial Sequence
  Description of Artificial Sequence: Synthetic oligonucleotide
  Antisense strand to SEQ ID NO: 191598
uuccuccuuggauaaggcu

SEQ ID NO: 191600 - RNA, 19 nt, Artificial Sequence
  Description of Artificial Sequence: Synthetic oligonucleotide
  Sense strand starting at position 2840 of SEQ ID NO: 2470
uugguauucucauccagua

SEQ ID NO: 191601 - RNA, 19 nt, Artificial Sequence
  Description of Artificial Sequence: Synthetic oligonucleotide
  Antisense strand to SEQ ID NO: 191600
uacuggaugagaauaccaa

SEQ ID NO: 191602 - RNA, 19 nt, Artificial Sequence
  Description of Artificial Sequence: Synthetic oligonucleotide
  Sense strand starting at position 2794 of SEQ ID NO: 2470
cggagauggcaguggugaa

SEQ ID NO: 191603 - RNA, 19 nt, Artificial Sequence
  Description of Artificial Sequence: Synthetic oligonucleotide
  Antisense strand to SEQ ID NO: 191602
uucaccacugccaucuccg

SEQ ID NO: 191604 - RNA, 19 nt, Artificial Sequence
  Description of Artificial Sequence: Synthetic oligonucleotide
  Sense strand starting at position 2474 of SEQ ID NO: 2470
gauuaucgcuaugucaaua

SEQ ID NO: 191605 - RNA, 19 nt, Artificial Sequence
  Description of Artificial Sequence: Synthetic oligonucleotide
  Antisense strand to SEQ ID NO: 191604
uauugacauagcgauaauc

SEQ ID NO: 191606 - RNA, 19 nt, Artificial Sequence
  Description of Artificial Sequence: Synthetic oligonucleotide
  Sense strand starting at position 2473 of SEQ ID NO: 2470
ugauuaucgcuaugucaau

SEQ ID NO: 191607 - RNA, 19 nt, Artificial Sequence
  Description of Artificial Sequence: Synthetic oligonucleotide
  Antisense strand to SEQ ID NO: 191606
auugacauagcgauaauca

SEQ ID NO: 191608 - RNA, 19 nt, Artificial Sequence
  Description of Artificial Sequence: Synthetic oligonucleotide
  Sense strand starting at position 2471 of SEQ ID NO: 2470
ucugauuaucgcuauguca

SEQ ID NO: 191609 - RNA, 19 nt, Artificial Sequence
  Description of Artificial Sequence: Synthetic oligonucleotide
  Antisense strand to SEQ ID NO: 191608
ugacauagcgauaaucaga

SEQ ID NO: 191610 - RNA, 19 nt, Artificial Sequence
  Description of Artificial Sequence: Synthetic oligonucleotide
  Sense strand starting at position 2470 of SEQ ID NO: 2470
gucugauuaucgcuauguc

SEQ ID NO: 191611 - RNA, 19 nt, Artificial Sequence
  Description of Artificial Sequence: Synthetic oligonucleotide
  Antisense strand to SEQ ID NO: 191610
gacauagcgauaaucagac

SEQ ID NO: 191612 - RNA, 19 nt, Artificial Sequence
  Description of Artificial Sequence: Synthetic oligonucleotide
  Sense strand starting at position 2467 of SEQ ID NO: 2470
ggagucugauuaucgcuau

SEQ ID NO: 191613 - RNA, 19 nt, Artificial Sequence
  Description of Artificial Sequence: Synthetic oligonucleotide
  Antisense strand to SEQ ID NO: 191612
auagcgauaaucagacucc

SEQ ID NO: 191614 - RNA, 19 nt, Artificial Sequence
  Description of Artificial Sequence: Synthetic oligonucleotide
  Sense strand starting at position 2461 of SEQ ID NO: 2470
gcguauggagucugauuau

SEQ ID NO: 191615 - RNA, 19 nt, Artificial Sequence
  Description of Artificial Sequence: Synthetic oligonucleotide
  Antisense strand to SEQ ID NO: 191614
auaaucagacuccauacgc

SEQ ID NO: 191616 - RNA, 19 nt, Artificial Sequence
  Description of Artificial Sequence: Synthetic oligonucleotide
  Sense strand starting at position 2419 of SEQ ID NO: 2470
ucuagaagccuguggcaaa

SEQ ID NO: 191617 - RNA, 19 nt, Artificial Sequence
  Description of Artificial Sequence: Synthetic oligonucleotide
  Antisense strand to SEQ ID NO: 191616
uuugccacaggcuucuaga

SEQ ID NO: 191618 - RNA, 19 nt, Artificial Sequence
  Description of Artificial Sequence: Synthetic oligonucleotide
  Sense strand starting at position 2400 of SEQ ID NO: 2470
cacagaagucugggacguu

SEQ ID NO: 191619 - RNA, 19 nt, Artificial Sequence
  Description of Artificial Sequence: Synthetic oligonucleotide
  Antisense strand to SEQ ID NO: 191618
aacgucccagacuucugug

SEQ ID NO: 191620 - RNA, 19 nt, Artificial Sequence
  Description of Artificial Sequence: Synthetic oligonucleotide
  Sense strand starting at position 2335 of SEQ ID NO: 2470
uaguauuggcuagggauga

SEQ ID NO: 191621 - RNA, 19 nt, Artificial Sequence
  Description of Artificial Sequence: Synthetic oligonucleotide
  Antisense strand to SEQ ID NO: 191620
ucaucccuagccaauacua

SEQ ID NO: 191622 - RNA, 19 nt, Artificial Sequence
  Description of Artificial Sequence: Synthetic oligonucleotide
  Sense strand starting at position 2333 of SEQ ID NO: 2470
cuuaguauuggcuagggau

SEQ ID NO: 191623 - RNA, 19 nt, Artificial Sequence
  Description of Artificial Sequence: Synthetic oligonucleotide
  Antisense strand to SEQ ID NO: 191622
aucccuagccaauacuaag

SEQ ID NO: 191624 - RNA, 19 nt, Artificial Sequence
  Description of Artificial Sequence: Synthetic oligonucleotide
  Sense strand starting at position 2248 of SEQ ID NO: 2470
auguuugaaccuggcaaga

SEQ ID NO: 191625 - RNA, 19 nt, Artificial Sequence
  Description of Artificial Sequence: Synthetic oligonucleotide
  Antisense strand to SEQ ID NO: 191624
ucuugccagguucaaacau

SEQ ID NO: 191626 - RNA, 19 nt, Artificial Sequence
  Description of Artificial Sequence: Synthetic oligonucleotide
  Sense strand starting at position 1762 of SEQ ID NO: 2470
gccaucuugagacgguaaa

SEQ ID NO: 191627 - RNA, 19 nt, Artificial Sequence
  Description of Artificial Sequence: Synthetic oligonucleotide
  Antisense strand to SEQ ID NO: 191626
uuuaccgucucaagauggc

SEQ ID NO: 191628 - RNA, 19 nt, Artificial Sequence
  Description of Artificial Sequence: Synthetic oligonucleotide
  Sense strand starting at position 1400 of SEQ ID NO: 2470
ucuaucuggcaagaaguaa

SEQ ID NO: 191629 - RNA, 19 nt, Artificial Sequence
  Description of Artificial Sequence: Synthetic oligonucleotide
  Antisense strand to SEQ ID NO: 191628
uuacuucuugccagauaga

SEQ ID NO: 191630 - RNA, 19 nt, Artificial Sequence
  Description of Artificial Sequence: Synthetic oligonucleotide
  Sense strand starting at position 1278 of SEQ ID NO: 2470
ggaaacaucuugcuuucca

SEQ ID NO: 191631 - RNA, 19 nt, Artificial Sequence
  Description of Artificial Sequence: Synthetic oligonucleotide
  Antisense strand to SEQ ID NO: 191630
uggaaagcaagauguuucc

SEQ ID NO: 191632 - RNA, 19 nt, Artificial Sequence
  Description of Artificial Sequence: Synthetic oligonucleotide
  Sense strand starting at position 1263 of SEQ ID NO: 2470
ccaguuuacuaaccaggaa

SEQ ID NO: 191633 - RNA, 19 nt, Artificial Sequence
  Description of Artificial Sequence: Synthetic oligonucleotide
  Antisense strand to SEQ ID NO: 191632
uuccugguuaguaaacugg

SEQ ID NO: 191634 - RNA, 19 nt, Artificial Sequence
  Description of Artificial Sequence: Synthetic oligonucleotide
  Sense strand starting at position 1225 of SEQ ID NO: 2470
agggauuaauaagcaggua

SEQ ID NO: 191635 - RNA, 19 nt, Artificial Sequence
  Description of Artificial Sequence: Synthetic oligonucleotide
  Antisense strand to SEQ ID NO: 191634
uaccugcuuauuaaucccu

SEQ ID NO: 191636 - RNA, 19 nt, Artificial Sequence
  Description of Artificial Sequence: Synthetic oligonucleotide
  Sense strand starting at position 1113 of SEQ ID NO: 2470
ucuaaaugugaaggacauu

SEQ ID NO: 191637 - RNA, 19 nt, Artificial Sequence
  Description of Artificial Sequence: Synthetic oligonucleotide
  Antisense strand to SEQ ID NO: 191636
aauguccuucacauuuaga

SEQ ID NO: 191638 - RNA, 19 nt, Artificial Sequence
  Description of Artificial Sequence: Synthetic oligonucleotide
  Sense strand starting at position 1103 of SEQ ID NO: 2470
uguguacaggucuaaaugu

SEQ ID NO: 191639 - RNA, 19 nt, Artificial Sequence
  Description of Artificial Sequence: Synthetic oligonucleotide
  Antisense strand to SEQ ID NO: 191638
acauuuagaccuguacaca

SEQ ID NO: 191640 - RNA, 19 nt, Artificial Sequence
  Description of Artificial Sequence: Synthetic oligonucleotide
  Sense strand starting at position 1069 of SEQ ID NO: 2470
uuuauuuaauccguaaguc

SEQ ID NO: 191641 - RNA, 19 nt, Artificial Sequence
  Description of Artificial Sequence: Synthetic oligonucleotide
  Antisense strand to SEQ ID NO: 191640
gacuuacggauuaaauaaa

SEQ ID NO: 191642 - RNA, 19 nt, Artificial Sequence
  Description of Artificial Sequence: Synthetic oligonucleotide
  Sense strand starting at position 1028 of SEQ ID NO: 2470
auuaguaucugagacaacu

SEQ ID NO: 191643 - RNA, 19 nt, Artificial Sequence
  Description of Artificial Sequence: Synthetic oligonucleotide
  Antisense strand to SEQ ID NO: 191642
aguugucucagauacuaau

SEQ ID NO: 191644 - RNA, 19 nt, Artificial Sequence
  Description of Artificial Sequence: Synthetic oligonucleotide
  Sense strand starting at position 1026 of SEQ ID NO: 2470
gaauuaguaucugagacaa

SEQ ID NO: 191645 - RNA, 19 nt, Artificial Sequence
  Description of Artificial Sequence: Synthetic oligonucleotide
  Antisense strand to SEQ ID NO: 191644
uugucucagauacuaauuc

SEQ ID NO: 191646 - RNA, 19 nt, Artificial Sequence
  Description of Artificial Sequence: Synthetic oligonucleotide
  Sense strand starting at position 762 of SEQ ID NO: 2470
gacauaugcugagaucaca

SEQ ID NO: 191647 - RNA, 19 nt, Artificial Sequence
  Description of Artificial Sequence: Synthetic oligonucleotide
  Antisense strand to SEQ ID NO: 191646
ugugaucucagcauauguc

SEQ ID NO: 191648 - RNA, 19 nt, Artificial Sequence
  Description of Artificial Sequence: Synthetic oligonucleotide
  Sense strand starting at position 747 of SEQ ID NO: 2470
aagcucaucgaguaagaca

SEQ ID NO: 191649 - RNA, 19 nt, Artificial Sequence
  Description of Artificial Sequence: Synthetic oligonucleotide
  Antisense strand to SEQ ID NO: 191648
ugucuuacucgaugagcuu

SEQ ID NO: 191650 - RNA, 19 nt, Artificial Sequence
  Description of Artificial Sequence: Synthetic oligonucleotide
  Sense strand starting at position 714 of SEQ ID NO: 2470
uucuuuguugcaugaaaug

SEQ ID NO: 191651 - RNA, 19 nt, Artificial Sequence
  Description of Artificial Sequence: Synthetic oligonucleotide
  Antisense strand to SEQ ID NO: 191650
cauuucaugcaacaaagaa

SEQ ID NO: 191652 - RNA, 19 nt, Artificial Sequence
  Description of Artificial Sequence: Synthetic oligonucleotide
  Sense strand starting at position 707 of SEQ ID NO: 2470
gcuuuaauucuuuguugca

SEQ ID NO: 191653 - RNA, 19 nt, Artificial Sequence
  Description of Artificial Sequence: Synthetic oligonucleotide
  Antisense strand to SEQ ID NO: 191652
ugcaacaaagaauuaaagc

SEQ ID NO: 191654 - RNA, 19 nt, Artificial Sequence
  Description of Artificial Sequence: Synthetic oligonucleotide
  Sense strand starting at position 541 of SEQ ID NO: 2470
guuuaaagguaucuacauc

SEQ ID NO: 191655 - RNA, 19 nt, Artificial Sequence
  Description of Artificial Sequence: Synthetic oligonucleotide
  Antisense strand to SEQ ID NO: 191654
gauguagauaccuuuaaac

SEQ ID NO: 191656 - RNA, 19 nt, Artificial Sequence
  Description of Artificial Sequence: Synthetic oligonucleotide
  Sense strand starting at position 250 of SEQ ID NO: 2470
ggguguuggcauuaucauc

SEQ ID NO: 191657 - RNA, 19 nt, Artificial Sequence
  Description of Artificial Sequence: Synthetic oligonucleotide
  Antisense strand to SEQ ID NO: 191656
gaugauaaugccaacaccc

SEQ ID NO: 191658 - RNA, 19 nt, Artificial Sequence
  Description of Artificial Sequence: Synthetic oligonucleotide
  Sense strand starting at position 227 of SEQ ID NO: 2470
uuuguuagccucugcuaua

SEQ ID NO: 191659 - RNA, 19 nt, Artificial Sequence
  Description of Artificial Sequence: Synthetic oligonucleotide
  Antisense strand to SEQ ID NO: 191658
uauagcagaggcuaacaaa

SEQ ID NO: 191660 - RNA, 19 nt, Artificial Sequence
  Description of Artificial Sequence: Synthetic oligonucleotide
  Sense strand starting at position 192 of SEQ ID NO: 2470
aguggaaagaacuguuucu

SEQ ID NO: 191661 - RNA, 19 nt, Artificial Sequence
  Description of Artificial Sequence: Synthetic oligonucleotide
  Antisense strand to SEQ ID NO: 191660
agaaacaguucuuuccacu

SEQ ID NO: 191662 - RNA, 19 nt, Artificial Sequence
  Description of Artificial Sequence: Synthetic oligonucleotide
  Sense strand starting at position 90 of SEQ ID NO: 2470
agaauucuggcauauggca

SEQ ID NO: 191663 - RNA, 19 nt, Artificial Sequence
  Description of Artificial Sequence: Synthetic oligonucleotide
  Antisense strand to SEQ ID NO: 191662
ugccauaugccagaauucu

SEQ ID NO: 191664 - RNA, 19 nt, Artificial Sequence
  Description of Artificial Sequence: Synthetic oligonucleotide
  Sense strand starting at position 3 of SEQ ID NO: 2470
caaauacagcagugguaua

SEQ ID NO: 191665 - RNA, 19 nt, Artificial Sequence
  Description of Artificial Sequence: Synthetic oligonucleotide
  Antisense strand to SEQ ID NO: 191664
uauaccacugcuguauuug

SEQ ID NO: 191666 - RNA, 19 nt, Artificial Sequence
  Description of Artificial Sequence: Synthetic oligonucleotide
  Sense strand starting at position 3942 of SEQ ID NO: 2471
gcuugauacuaugugauga

SEQ ID NO: 191667 - RNA, 19 nt, Artificial Sequence
  Description of Artificial Sequence: Synthetic oligonucleotide
  Antisense strand to SEQ ID NO: 191666
ucaucacauaguaucaagc

SEQ ID NO: 191668 - RNA, 19 nt, Artificial Sequence
  Description of Artificial Sequence: Synthetic oligonucleotide
  Sense strand starting at position 3934 of SEQ ID NO: 2471
ugauaugugcuugauacua

SEQ ID NO: 191669 - RNA, 19 nt, Artificial Sequence
  Description of Artificial Sequence: Synthetic oligonucleotide
  Antisense strand to SEQ ID NO: 191668
uaguaucaagcacauauca

SEQ ID NO: 191670 - RNA, 19 nt, Artificial Sequence
  Description of Artificial Sequence: Synthetic oligonucleotide
  Sense strand starting at position 3933 of SEQ ID NO: 2471
uugauaugugcuugauacu

SEQ ID NO: 191671 - RNA, 19 nt, Artificial Sequence
  Description of Artificial Sequence: Synthetic oligonucleotide
  Antisense strand to SEQ ID NO: 191670
aguaucaagcacauaucaa

SEQ ID NO: 191672 - RNA, 19 nt, Artificial Sequence
  Description of Artificial Sequence: Synthetic oligonucleotide
  Sense strand starting at position 3923 of SEQ ID NO: 2471
acaaaucauguugauaugu

SEQ ID NO: 191673 - RNA, 19 nt, Artificial Sequence
  Description of Artificial Sequence: Synthetic oligonucleotide
  Antisense strand to SEQ ID NO: 191672
acauaucaacaugauuugu

SEQ ID NO: 191674 - RNA, 19 nt, Artificial Sequence
  Description of Artificial Sequence: Synthetic oligonucleotide
  Sense strand starting at position 3878 of SEQ ID NO: 2471
gaugacugcuacucagaca

SEQ ID NO: 191675 - RNA, 19 nt, Artificial Sequence
  Description of Artificial Sequence: Synthetic oligonucleotide
  Antisense strand to SEQ ID NO: 191674
ugucugaguagcagucauc

SEQ ID NO: 191676 - RNA, 19 nt, Artificial Sequence
  Description of Artificial Sequence: Synthetic oligonucleotide
  Sense strand starting at position 3779 of SEQ ID NO: 2471
cucccuacucuuuaggagu

SEQ ID NO: 191677 - RNA, 19 nt, Artificial Sequence
  Description of Artificial Sequence: Synthetic oligonucleotide
  Antisense strand to SEQ ID NO: 191676
acuccuaaagaguagggag

SEQ ID NO: 191678 - RNA, 19 nt, Artificial Sequence
  Description of Artificial Sequence: Synthetic oligonucleotide
  Sense strand starting at position 3719 of SEQ ID NO: 2471
auugucugugcagaagaau

SEQ ID NO: 191679 - RNA, 19 nt, Artificial Sequence
  Description of Artificial Sequence: Synthetic oligonucleotide
  Antisense strand to SEQ ID NO: 191678
auucuucugcacagacaau

SEQ ID NO: 191680 - RNA, 19 nt, Artificial Sequence
  Description of Artificial Sequence: Synthetic oligonucleotide
  Sense strand starting at position 3716 of SEQ ID NO: 2471
caaauugucugugcagaag

SEQ ID NO: 191681 - RNA, 19 nt, Artificial Sequence
  Description of Artificial Sequence: Synthetic oligonucleotide
  Antisense strand to SEQ ID NO: 191680
cuucugcacagacaauuug

SEQ ID NO: 191682 - RNA, 19 nt, Artificial Sequence
  Description of Artificial Sequence: Synthetic oligonucleotide
  Sense strand starting at position 3715 of SEQ ID NO: 2471
acaaauugucugugcagaa

SEQ ID NO: 191683 - RNA, 19 nt, Artificial Sequence
  Description of Artificial Sequence: Synthetic oligonucleotide
  Antisense strand to SEQ ID NO: 191682
uucugcacagacaauuugu

SEQ ID NO: 191684 - RNA, 19 nt, Artificial Sequence
  Description of Artificial Sequence: Synthetic oligonucleotide
  Sense strand starting at position 3714 of SEQ ID NO: 2471
gacaaauugucugugcaga

SEQ ID NO: 191685 - RNA, 19 nt, Artificial Sequence
  Description of Artificial Sequence: Synthetic oligonucleotide
  Antisense strand to SEQ ID NO: 191684
ucugcacagacaauuuguc

SEQ ID NO: 191686 - RNA, 19 nt, Artificial Sequence
  Description of Artificial Sequence: Synthetic oligonucleotide
  Sense strand starting at position 3713 of SEQ ID NO: 2471
agacaaauugucugugcag

SEQ ID NO: 191687 - RNA, 19 nt, Artificial Sequence
  Description of Artificial Sequence: Synthetic oligonucleotide
  Antisense strand to SEQ ID NO: 191686
cugcacagacaauuugucu

SEQ ID NO: 191688 - RNA, 19 nt, Artificial Sequence
  Description of Artificial Sequence: Synthetic oligonucleotide
  Sense strand starting at position 3712 of SEQ ID NO: 2471
gagacaaauugucugugca

SEQ ID NO: 191689 - RNA, 19 nt, Artificial Sequence
  Description of Artificial Sequence: Synthetic oligonucleotide
  Antisense strand to SEQ ID NO: 191688
ugcacagacaauuugucuc

SEQ ID NO: 191690 - RNA, 19 nt, Artificial Sequence
  Description of Artificial Sequence: Synthetic oligonucleotide
  Sense strand starting at position 3622 of SEQ ID NO: 2471
gccuuccaguuuccagaaa

SEQ ID NO: 191691 - RNA, 19 nt, Artificial Sequence
  Description of Artificial Sequence: Synthetic oligonucleotide
  Antisense strand to SEQ ID NO: 191690
uuucuggaaacuggaaggc

SEQ ID NO: 191692 - RNA, 19 nt, Artificial Sequence
  Description of Artificial Sequence: Synthetic oligonucleotide
  Sense strand starting at position 3549 of SEQ ID NO: 2471
cacucuuuccuggagaggu

SEQ ID NO: 191693 - RNA, 19 nt, Artificial Sequence
  Description of Artificial Sequence: Synthetic oligonucleotide
  Antisense strand to SEQ ID NO: 191692
accucuccaggaaagagug

SEQ ID NO: 191694 - RNA, 19 nt, Artificial Sequence
  Description of Artificial Sequence: Synthetic oligonucleotide
  Sense strand starting at position 3546 of SEQ ID NO: 2471
ggccacucuuuccuggaga

SEQ ID NO: 191695 - RNA, 19 nt, Artificial Sequence
  Description of Artificial Sequence: Synthetic oligonucleotide
  Antisense strand to SEQ ID NO: 191694
ucuccaggaaagaguggcc

SEQ ID NO: 191696 - RNA, 19 nt, Artificial Sequence
  Description of Artificial Sequence: Synthetic oligonucleotide
  Sense strand starting at position 3500 of SEQ ID NO: 2471
caugaauuaguuggaaugu

SEQ ID NO: 191697 - RNA, 19 nt, Artificial Sequence
  Description of Artificial Sequence: Synthetic oligonucleotide
  Antisense strand to SEQ ID NO: 191696
acauuccaacuaauucaug

SEQ ID NO: 191698 - RNA, 19 nt, Artificial Sequence
  Description of Artificial Sequence: Synthetic oligonucleotide
  Sense strand starting at position 3499 of SEQ ID NO: 2471
gcaugaauuaguuggaaug

SEQ ID NO: 191699 - RNA, 19 nt, Artificial Sequence
  Description of Artificial Sequence: Synthetic oligonucleotide
  Antisense strand to SEQ ID NO: 191698
cauuccaacuaauucaugc

SEQ ID NO: 191700 - RNA, 19 nt, Artificial Sequence
  Description of Artificial Sequence: Synthetic oligonucleotide
  Sense strand starting at position 3497 of SEQ ID NO: 2471
uggcaugaauuaguuggaa

SEQ ID NO: 191701 - RNA, 19 nt, Artificial Sequence
  Description of Artificial Sequence: Synthetic oligonucleotide
  Antisense strand to SEQ ID NO: 191700
uuccaacuaauucaugcca

SEQ ID NO: 191702 - RNA, 19 nt, Artificial Sequence
  Description of Artificial Sequence: Synthetic oligonucleotide
  Sense strand starting at position 3490 of SEQ ID NO: 2471
aucuguguggcaugaauua

SEQ ID NO: 191703 - RNA, 19 nt, Artificial Sequence
  Description of Artificial Sequence: Synthetic oligonucleotide
  Antisense strand to SEQ ID NO: 191702
uaauucaugccacacagau

SEQ ID NO: 191704 - RNA, 19 nt, Artificial Sequence
  Description of Artificial Sequence: Synthetic oligonucleotide
  Sense strand starting at position 3485 of SEQ ID NO: 2471
aagaaaucuguguggcaug

SEQ ID NO: 191705 - RNA, 19 nt, Artificial Sequence
  Description of Artificial Sequence: Synthetic oligonucleotide
  Antisense strand to SEQ ID NO: 191704
caugccacacagauuucuu

SEQ ID NO: 191706 - RNA, 19 nt, Artificial Sequence
  Description of Artificial Sequence: Synthetic oligonucleotide
  Sense strand starting at position 3484 of SEQ ID NO: 2471
caagaaaucuguguggcau

SEQ ID NO: 191707 - RNA, 19 nt, Artificial Sequence
  Description of Artificial Sequence: Synthetic oligonucleotide
  Antisense strand to SEQ ID NO: 191706
augccacacagauuucuug

SEQ ID NO: 191708 - RNA, 19 nt, Artificial Sequence
  Description of Artificial Sequence: Synthetic oligonucleotide
  Sense strand starting at position 3483 of SEQ ID NO: 2471
acaagaaaucuguguggca

SEQ ID NO: 191709 - RNA, 19 nt, Artificial Sequence
  Description of Artificial Sequence: Synthetic oligonucleotide
  Antisense strand to SEQ ID NO: 191708
ugccacacagauuucuugu

SEQ ID NO: 191710 - RNA, 19 nt, Artificial Sequence
  Description of Artificial Sequence: Synthetic oligonucleotide
  Sense strand starting at position 3431 of SEQ ID NO: 2471
gggacugcuuguucucaau

SEQ ID NO: 191711 - RNA, 19 nt, Artificial Sequence
  Description of Artificial Sequence: Synthetic oligonucleotide
  Antisense strand to SEQ ID NO: 191710
auugagaacaagcaguccc

SEQ ID NO: 191712 - RNA, 19 nt, Artificial Sequence
  Description of Artificial Sequence: Synthetic oligonucleotide
  Sense strand starting at position 3430 of SEQ ID NO: 2471
agggacugcuuguucucaa

SEQ ID NO: 191713 - RNA, 19 nt, Artificial Sequence
  Description of Artificial Sequence: Synthetic oligonucleotide
  Antisense strand to SEQ ID NO: 191712
uugagaacaagcagucccu

SEQ ID NO: 191714 - RNA, 19 nt, Artificial Sequence
  Description of Artificial Sequence: Synthetic oligonucleotide
  Sense strand starting at position 3369 of SEQ ID NO: 2471
cgaagauucuaguccagca

SEQ ID NO: 191715 - RNA, 19 nt, Artificial Sequence
  Description of Artificial Sequence: Synthetic oligonucleotide
  Antisense strand to SEQ ID NO: 191714
ugcuggacuagaaucuucg

SEQ ID NO: 191716 - RNA, 19 nt, Artificial Sequence
  Description of Artificial Sequence: Synthetic oligonucleotide
  Sense strand starting at position 3358 of SEQ ID NO: 2471
cccugcccucacgaagauu

SEQ ID NO: 191717 - RNA, 19 nt, Artificial Sequence
  Description of Artificial Sequence: Synthetic oligonucleotide
  Antisense strand to SEQ ID NO: 191716
aaucuucgugagggcaggg

SEQ ID NO: 191718 - RNA, 19 nt, Artificial Sequence
  Description of Artificial Sequence: Synthetic oligonucleotide
  Sense strand starting at position 2920 of SEQ ID NO: 2471
gagucuaucagagguggca

SEQ ID NO: 191719 - RNA, 19 nt, Artificial Sequence
  Description of Artificial Sequence: Synthetic oligonucleotide
  Antisense strand to SEQ ID NO: 191718
ugccaccucugauagacuc

SEQ ID NO: 191720 - RNA, 19 nt, Artificial Sequence
  Description of Artificial Sequence: Synthetic oligonucleotide
  Sense strand starting at position 1589 of SEQ ID NO: 2471
ggagaauugcagcaggguu

SEQ ID NO: 191721 - RNA, 19 nt, Artificial Sequence
  Description of Artificial Sequence: Synthetic oligonucleotide
  Antisense strand to SEQ ID NO: 191720
aacccugcugcaauucucc

SEQ ID NO: 191722 - RNA, 19 nt, Artificial Sequence
  Description of Artificial Sequence: Synthetic oligonucleotide
  Sense strand starting at position 1578 of SEQ ID NO: 2471
cauuguuuaccggagaauu

SEQ ID NO: 191723 - RNA, 19 nt, Artificial Sequence
  Description of Artificial Sequence: Synthetic oligonucleotide
  Antisense strand to SEQ ID NO: 191722
aauucuccgguaaacaaug

SEQ ID NO: 191724 - RNA, 19 nt, Artificial Sequence
  Description of Artificial Sequence: Synthetic oligonucleotide
  Sense strand starting at position 1575 of SEQ ID NO: 2471
aaucauuguuuaccggaga

SEQ ID NO: 191725 - RNA, 19 nt, Artificial Sequence
  Description of Artificial Sequence: Synthetic oligonucleotide
  Antisense strand to SEQ ID NO: 191724
ucuccgguaaacaaugauu

SEQ ID NO: 191726 - RNA, 19 nt, Artificial Sequence
  Description of Artificial Sequence: Synthetic oligonucleotide
  Sense strand starting at position 1573 of SEQ ID NO: 2471
ugaaucauuguuuaccgga

SEQ ID NO: 191727 - RNA, 19 nt, Artificial Sequence
  Description of Artificial Sequence: Synthetic oligonucleotide
  Antisense strand to SEQ ID NO: 191726
uccgguaaacaaugauuca

SEQ ID NO: 191728 - RNA, 19 nt, Artificial Sequence
  Description of Artificial Sequence: Synthetic oligonucleotide
  Sense strand starting at position 1548 of SEQ ID NO: 2471
auccguuuauuugcauuau

SEQ ID NO: 191729 - RNA, 19 nt, Artificial Sequence
  Description of Artificial Sequence: Synthetic oligonucleotide
  Antisense strand to SEQ ID NO: 191728
auaaugcaaauaaacggau

SEQ ID NO: 191730 - RNA, 19 nt, Artificial Sequence
  Description of Artificial Sequence: Synthetic oligonucleotide
  Sense strand starting at position 1538 of SEQ ID NO: 2471
gccguuugcaauccguuua

SEQ ID NO: 191731 - RNA, 19 nt, Artificial Sequence
  Description of Artificial Sequence: Synthetic oligonucleotide
  Antisense strand to SEQ ID NO: 191730
uaaacggauugcaaacggc

SEQ ID NO: 191732 - RNA, 19 nt, Artificial Sequence
  Description of Artificial Sequence: Synthetic oligonucleotide
  Sense strand starting at position 1188 of SEQ ID NO: 2471
cggaguuaacuuuaaauuc

SEQ ID NO: 191733 - RNA, 19 nt, Artificial Sequence
  Description of Artificial Sequence: Synthetic oligonucleotide
  Antisense strand to SEQ ID NO: 191732
gaauuuaaaguuaacuccg

SEQ ID NO: 191734 - RNA, 19 nt, Artificial Sequence
  Description of Artificial Sequence: Synthetic oligonucleotide
  Sense strand starting at position 1089 of SEQ ID NO: 2471
agaaaugggccucgagauc

SEQ ID NO: 191735 - RNA, 19 nt, Artificial Sequence
  Description of Artificial Sequence: Synthetic oligonucleotide
  Antisense strand to SEQ ID NO: 191734
gaucucgaggcccauuucu

SEQ ID NO: 191736 - RNA, 19 nt, Artificial Sequence
  Description of Artificial Sequence: Synthetic oligonucleotide
  Sense strand starting at position 1032 of SEQ ID NO: 2471
ugaggaaaccggcaguuaa

SEQ ID NO: 191737 - RNA, 19 nt, Artificial Sequence
  Description of Artificial Sequence: Synthetic oligonucleotide
  Antisense strand to SEQ ID NO: 191736
uuaacugccgguuuccuca

SEQ ID NO: 191738 - RNA, 19 nt, Artificial Sequence
  Description of Artificial Sequence: Synthetic oligonucleotide
  Sense strand starting at position 909 of SEQ ID NO: 2471
ggaucuagcuccuuacaau

SEQ ID NO: 191739 - RNA, 19 nt, Artificial Sequence
  Description of Artificial Sequence: Synthetic oligonucleotide
  Antisense strand to SEQ ID NO: 191738
auuguaaggagcuagaucc

SEQ ID NO: 191740 - RNA, 19 nt, Artificial Sequence
  Description of Artificial Sequence: Synthetic oligonucleotide
  Sense strand starting at position 851 of SEQ ID NO: 2471
gcuggaaauccuggaccca

SEQ ID NO: 191741 - RNA, 19 nt, Artificial Sequence
  Description of Artificial Sequence: Synthetic oligonucleotide
  Antisense strand to SEQ ID NO: 191740
uggguccaggauuuccagc

SEQ ID NO: 191742 - RNA, 19 nt, Artificial Sequence
  Description of Artificial Sequence: Synthetic oligonucleotide
  Sense strand starting at position 812 of SEQ ID NO: 2471
gugggacagcaggauuauu

SEQ ID NO: 191743 - RNA, 19 nt, Artificial Sequence
  Description of Artificial Sequence: Synthetic oligonucleotide
  Antisense strand to SEQ ID NO: 191742
aauaauccugcugucccac

SEQ ID NO: 191744 - RNA, 19 nt, Artificial Sequence
  Description of Artificial Sequence: Synthetic oligonucleotide
  Sense strand starting at position 354 of SEQ ID NO: 2471
ugaccuguccagcaagaua

SEQ ID NO: 191745 - RNA, 19 nt, Artificial Sequence
  Description of Artificial Sequence: Synthetic oligonucleotide
  Antisense strand to SEQ ID NO: 191744
uaucuugcuggacagguca

SEQ ID NO: 191746 - RNA, 19 nt, Artificial Sequence
  Description of Artificial Sequence: Synthetic oligonucleotide
  Sense strand starting at position 7 of SEQ ID NO: 2472
uuacuaaucccagggaauu

SEQ ID NO: 191747 - RNA, 19 nt, Artificial Sequence
  Description of Artificial Sequence: Synthetic oligonucleotide
  Antisense strand to SEQ ID NO: 191746
aauucccugggauuaguaa

SEQ ID NO: 191748 - RNA, 19 nt, Artificial Sequence
  Description of Artificial Sequence: Synthetic oligonucleotide
  Sense strand starting at position 375 of SEQ ID NO: 2472
gaggcaaugccggaaucua

SEQ ID NO: 191749 - RNA, 19 nt, Artificial Sequence
  Description of Artificial Sequence: Synthetic oligonucleotide
  Antisense strand to SEQ ID NO: 191748
uagauuccggcauugccuc

SEQ ID NO: 191750 - RNA, 19 nt, Artificial Sequence
  Description of Artificial Sequence: Synthetic oligonucleotide
  Sense strand starting at position 383 of SEQ ID NO: 2472
gccggaaucuacuaggaca

SEQ ID NO: 191751 - RNA, 19 nt, Artificial Sequence
  Description of Artificial Sequence: Synthetic oligonucleotide
  Antisense strand to SEQ ID NO: 191750
uguccuaguagauuccggc

SEQ ID NO: 191752 - RNA, 19 nt, Artificial Sequence
  Description of Artificial Sequence: Synthetic oligonucleotide
  Sense strand starting at position 543 of SEQ ID NO: 2472
gagcgaaguucgugaacca

SEQ ID NO: 191753 - RNA, 19 nt, Artificial Sequence
  Description of Artificial Sequence: Synthetic oligonucleotide
  Antisense strand to SEQ ID NO: 191752
ugguucacgaacuucgcuc

SEQ ID NO: 191754 - RNA, 19 nt, Artificial Sequence
  Description of Artificial Sequence: Synthetic oligonucleotide
  Sense strand starting at position 553 of SEQ ID NO: 2472
cgugaaccacucugccaau

SEQ ID NO: 191755 - RNA, 19 nt, Artificial Sequence
  Description of Artificial Sequence: Synthetic oligonucleotide
  Antisense strand to SEQ ID NO: 191754
auuggcagagugguucacg

SEQ ID NO: 191756 - RNA, 19 nt, Artificial Sequence
  Description of Artificial Sequence: Synthetic oligonucleotide
  Sense strand starting at position 756 of SEQ ID NO: 2472
ggcggaguauucucgcuuu

SEQ ID NO: 191757 - RNA, 19 nt, Artificial Sequence
  Description of Artificial Sequence: Synthetic oligonucleotide
  Antisense strand to SEQ ID NO: 191756
aaagcgagaauacuccgcc

SEQ ID NO: 191758 - RNA, 19 nt, Artificial Sequence
  Description of Artificial Sequence: Synthetic oligonucleotide
  Sense strand starting at position 784 of SEQ ID NO: 2472
gagacugcagcacgauuaa

SEQ ID NO: 191759 - RNA, 19 nt, Artificial Sequence
  Description of Artificial Sequence: Synthetic oligonucleotide
  Antisense strand to SEQ ID NO: 191758
uuaaucgugcugcagucuc

SEQ ID NO: 191760 - RNA, 19 nt, Artificial Sequence
  Description of Artificial Sequence: Synthetic oligonucleotide
  Sense strand starting at position 833 of SEQ ID NO: 2472
ccuagaagcuucucuugag

SEQ ID NO: 191761 - RNA, 19 nt, Artificial Sequence
  Description of Artificial Sequence: Synthetic oligonucleotide
  Antisense strand to SEQ ID NO: 191760
cucaagagaagcuucuagg

SEQ ID NO: 191762 - RNA, 19 nt, Artificial Sequence
  Description of Artificial Sequence: Synthetic oligonucleotide
  Sense strand starting at position 834 of SEQ ID NO: 2472
cuagaagcuucucuugagu

SEQ ID NO: 191763 - RNA, 19 nt, Artificial Sequence
  Description of Artificial Sequence: Synthetic oligonucleotide
  Antisense strand to SEQ ID NO: 191762
acucaagagaagcuucuag

SEQ ID NO: 191764 - RNA, 19 nt, Artificial Sequence
  Description of Artificial Sequence: Synthetic oligonucleotide
  Sense strand starting at position 854 of SEQ ID NO: 2472
gggccuuauuaucugcgaa

SEQ ID NO: 191765 - RNA, 19 nt, Artificial Sequence
  Description of Artificial Sequence: Synthetic oligonucleotide
  Antisense strand to SEQ ID NO: 191764
uucgcagauaauaaggccc

SEQ ID NO: 191766 - RNA, 19 nt, Artificial Sequence
  Description of Artificial Sequence: Synthetic oligonucleotide
  Sense strand starting at position 855 of SEQ ID NO: 2472
ggccuuauuaucugcgaag

SEQ ID NO: 191767 - RNA, 19 nt, Artificial Sequence
  Description of Artificial Sequence: Synthetic oligonucleotide
  Antisense strand to SEQ ID NO: 191766
cuucgcagauaauaaggcc

SEQ ID NO: 191768 - RNA, 19 nt, Artificial Sequence
  Description of Artificial Sequence: Synthetic oligonucleotide
  Sense strand starting at position 856 of SEQ ID NO: 2472
gccuuauuaucugcgaagu

SEQ ID NO: 191769 - RNA, 19 nt, Artificial Sequence
  Description of Artificial Sequence: Synthetic oligonucleotide
  Antisense strand to SEQ ID NO: 191768
acuucgcagauaauaaggc

SEQ ID NO: 191770 - RNA, 19 nt, Artificial Sequence
  Description of Artificial Sequence: Synthetic oligonucleotide
  Sense strand starting at position 857 of SEQ ID NO: 2472
ccuuauuaucugcgaaguc

SEQ ID NO: 191771 - RNA, 19 nt, Artificial Sequence
  Description of Artificial Sequence: Synthetic oligonucleotide
  Antisense strand to SEQ ID NO: 191770
gacuucgcagauaauaagg

SEQ ID NO: 191772 - RNA, 19 nt, Artificial Sequence
  Description of Artificial Sequence: Synthetic oligonucleotide
  Sense strand starting at position 858 of SEQ ID NO: 2472
cuuauuaucugcgaaguca

SEQ ID NO: 191773 - RNA, 19 nt, Artificial Sequence
  Description of Artificial Sequence: Synthetic oligonucleotide
  Antisense strand to SEQ ID NO: 191772
ugacuucgcagauaauaag

SEQ ID NO: 191774 - RNA, 19 nt, Artificial Sequence
  Description of Artificial Sequence: Synthetic oligonucleotide
  Sense strand starting at position 3977 of SEQ ID NO: 2472
augccuugauguguguaau

SEQ ID NO: 191775 - RNA, 19 nt, Artificial Sequence
  Description of Artificial Sequence: Synthetic oligonucleotide
  Antisense strand to SEQ ID NO: 191774
auuacacacaucaaggcau

SEQ ID NO: 191776 - RNA, 19 nt, Artificial Sequence
  Description of Artificial Sequence: Synthetic oligonucleotide
  Sense strand starting at position 3978 of SEQ ID NO: 2472
ugccuugauguguguaauc

SEQ ID NO: 191777 - RNA, 19 nt, Artificial Sequence
  Description of Artificial Sequence: Synthetic oligonucleotide
  Antisense strand to SEQ ID NO: 191776
gauuacacacaucaaggca

SEQ ID NO: 191778 - RNA, 19 nt, Artificial Sequence
  Description of Artificial Sequence: Synthetic oligonucleotide
  Sense strand starting at position 3980 of SEQ ID NO: 2472
ccuugauguguguaauccu

SEQ ID NO: 191779 - RNA, 19 nt, Artificial Sequence
  Description of Artificial Sequence: Synthetic oligonucleotide
  Antisense strand to SEQ ID NO: 191778
aggauuacacacaucaagg

SEQ ID NO: 191780 - RNA, 19 nt, Artificial Sequence
  Description of Artificial Sequence: Synthetic oligonucleotide
  Sense strand starting at position 3983 of SEQ ID NO: 2472
ugauguguguaauccuguu

SEQ ID NO: 191781 - RNA, 19 nt, Artificial Sequence
  Description of Artificial Sequence: Synthetic oligonucleotide
  Antisense strand to SEQ ID NO: 191780
aacaggauuacacacauca

SEQ ID NO: 191782 - RNA, 19 nt, Artificial Sequence
  Description of Artificial Sequence: Synthetic oligonucleotide
  Sense strand starting at position 65 of SEQ ID NO: 2473
aggcuugcagaccaugaaa

SEQ ID NO: 191783 - RNA, 19 nt, Artificial Sequence
  Description of Artificial Sequence: Synthetic oligonucleotide
  Antisense strand to SEQ ID NO: 191782
uuucauggucugcaagccu

SEQ ID NO: 191784 - RNA, 19 nt, Artificial Sequence
  Description of Artificial Sequence: Synthetic oligonucleotide
  Sense strand starting at position 92 of SEQ ID NO: 2473
agcugcccucucuaauaga

SEQ ID NO: 191785 - RNA, 19 nt, Artificial Sequence
  Description of Artificial Sequence: Synthetic oligonucleotide
  Antisense strand to SEQ ID NO: 191784
ucuauuagagagggcagcu

SEQ ID NO: 191786 - RNA, 19 nt, Artificial Sequence
  Description of Artificial Sequence: Synthetic oligonucleotide
  Sense strand starting at position 186 of SEQ ID NO: 2473
aucucuagaugagaaucua

SEQ ID NO: 191787 - RNA, 19 nt, Artificial Sequence
  Description of Artificial Sequence: Synthetic oligonucleotide
  Antisense strand to SEQ ID NO: 191786
uagauucucaucuagagau

SEQ ID NO: 191788 - RNA, 19 nt, Artificial Sequence
  Description of Artificial Sequence: Synthetic oligonucleotide
  Sense strand starting at position 194 of SEQ ID NO: 2473
augagaaucuacucagcua

SEQ ID NO: 191789 - RNA, 19 nt, Artificial Sequence
  Description of Artificial Sequence: Synthetic oligonucleotide
  Antisense strand to SEQ ID NO: 191788
uagcugaguagauucucau

SEQ ID NO: 191790 - RNA, 19 nt, Artificial Sequence
  Description of Artificial Sequence: Synthetic oligonucleotide
  Sense strand starting at position 308 of SEQ ID NO: 2473
uuuagcacccuagaguaaa

SEQ ID NO: 191791 - RNA, 19 nt, Artificial Sequence
  Description of Artificial Sequence: Synthetic oligonucleotide
  Antisense strand to SEQ ID NO: 191790
uuuacucuagggugcuaaa

SEQ ID NO: 191792 - RNA, 19 nt, Artificial Sequence
  Description of Artificial Sequence: Synthetic oligonucleotide
  Sense strand starting at position 362 of SEQ ID NO: 2473
acuauuaugccagaccugu

SEQ ID NO: 191793 - RNA, 19 nt, Artificial Sequence
  Description of Artificial Sequence: Synthetic oligonucleotide
  Antisense strand to SEQ ID NO: 191792
acaggucuggcauaauagu

SEQ ID NO: 191794 - RNA, 19 nt, Artificial Sequence
  Description of Artificial Sequence: Synthetic oligonucleotide
  Sense strand starting at position 373 of SEQ ID NO: 2473
agaccuguuuggucaguga

SEQ ID NO: 191795 - RNA, 19 nt, Artificial Sequence
  Description of Artificial Sequence: Synthetic oligonucleotide
  Antisense strand to SEQ ID NO: 191794
ucacugaccaaacaggucu

SEQ ID NO: 191796 - RNA, 19 nt, Artificial Sequence
  Description of Artificial Sequence: Synthetic oligonucleotide
  Sense strand starting at position 377 of SEQ ID NO: 2473
cuguuuggucagugaucug

SEQ ID NO: 191797 - RNA, 19 nt, Artificial Sequence
  Description of Artificial Sequence: Synthetic oligonucleotide
  Antisense strand to SEQ ID NO: 191796
cagaucacugaccaaacag

SEQ ID NO: 191798 - RNA, 19 nt, Artificial Sequence
  Description of Artificial Sequence: Synthetic oligonucleotide
  Sense strand starting at position 382 of SEQ ID NO: 2473
uggucagugaucuguacaa

SEQ ID NO: 191799 - RNA, 19 nt, Artificial Sequence
  Description of Artificial Sequence: Synthetic oligonucleotide
  Antisense strand to SEQ ID NO: 191798
uuguacagaucacugacca

SEQ ID NO: 191800 - RNA, 19 nt, Artificial Sequence
  Description of Artificial Sequence: Synthetic oligonucleotide
  Sense strand starting at position 384 of SEQ ID NO: 2473
gucagugaucuguacaaac

SEQ ID NO: 191801 - RNA, 19 nt, Artificial Sequence
  Description of Artificial Sequence: Synthetic oligonucleotide
  Antisense strand to SEQ ID NO: 191800
guuuguacagaucacugac

SEQ ID NO: 191802 - RNA, 19 nt, Artificial Sequence
  Description of Artificial Sequence: Synthetic oligonucleotide
  Sense strand starting at position 430 of SEQ ID NO: 2473
gcacaagaaaucugaacgu

SEQ ID NO: 191803 - RNA, 19 nt, Artificial Sequence
  Description of Artificial Sequence: Synthetic oligonucleotide
  Antisense strand to SEQ ID NO: 191802
acguucagauuucuugugc

SEQ ID NO: 191804 - RNA, 19 nt, Artificial Sequence
  Description of Artificial Sequence: Synthetic oligonucleotide
  Sense strand starting at position 483 of SEQ ID NO: 2473
acaauaugaccuggauguu

SEQ ID NO: 191805 - RNA, 19 nt, Artificial Sequence
  Description of Artificial Sequence: Synthetic oligonucleotide
  Antisense strand to SEQ ID NO: 191804
aacauccaggucauauugu

SEQ ID NO: 191806 - RNA, 19 nt, Artificial Sequence
  Description of Artificial Sequence: Synthetic oligonucleotide
  Sense strand starting at position 510 of SEQ ID NO: 2473
caaagaucugccugaggac

SEQ ID NO: 191807 - RNA, 19 nt, Artificial Sequence
  Description of Artificial Sequence: Synthetic oligonucleotide
  Antisense strand to SEQ ID NO: 191806
guccucaggcagaucuuug

SEQ ID NO: 191808 - RNA, 19 nt, Artificial Sequence
  Description of Artificial Sequence: Synthetic oligonucleotide
  Sense strand starting at position 571 of SEQ ID NO: 2473
accacuaggcuguguugaa

SEQ ID NO: 191809 - RNA, 19 nt, Artificial Sequence
  Description of Artificial Sequence: Synthetic oligonucleotide
  Antisense strand to SEQ ID NO: 191808
uucaacacagccuaguggu

SEQ ID NO: 191810 - RNA, 19 nt, Artificial Sequence
  Description of Artificial Sequence: Synthetic oligonucleotide
  Sense strand starting at position 572 of SEQ ID NO: 2473
ccacuaggcuguguugaaa

SEQ ID NO: 191811 - RNA, 19 nt, Artificial Sequence
  Description of Artificial Sequence: Synthetic oligonucleotide
  Antisense strand to SEQ ID NO: 191810
uuucaacacagccuagugg

SEQ ID NO: 191812 - RNA, 19 nt, Artificial Sequence
  Description of Artificial Sequence: Synthetic oligonucleotide
  Sense strand starting at position 575 of SEQ ID NO: 2473
cuaggcuguguugaaagaa

SEQ ID NO: 191813 - RNA, 19 nt, Artificial Sequence
  Description of Artificial Sequence: Synthetic oligonucleotide
  Antisense strand to SEQ ID NO: 191812
uucuuucaacacagccuag

SEQ ID NO: 191814 - RNA, 19 nt, Artificial Sequence
  Description of Artificial Sequence: Synthetic oligonucleotide
  Sense strand starting at position 686 of SEQ ID NO: 2473
gcauaacaucccgguaaag

SEQ ID NO: 191815 - RNA, 19 nt, Artificial Sequence
  Description of Artificial Sequence: Synthetic oligonucleotide
  Antisense strand to SEQ ID NO: 191814
cuuuaccgggauguuaugc

SEQ ID NO: 191816 - RNA, 19 nt, Artificial Sequence
  Description of Artificial Sequence: Synthetic oligonucleotide
  Sense strand starting at position 688 of SEQ ID NO: 2473
auaacaucccgguaaaggu

SEQ ID NO: 191817 - RNA, 19 nt, Artificial Sequence
  Description of Artificial Sequence: Synthetic oligonucleotide
  Antisense strand to SEQ ID NO: 191816
accuuuaccgggauguuau

SEQ ID NO: 191818 - RNA, 19 nt, Artificial Sequence
  Description of Artificial Sequence: Synthetic oligonucleotide
  Sense strand starting at position 721 of SEQ ID NO: 2473
uccagaggucuccauucuu

SEQ ID NO: 191819 - RNA, 19 nt, Artificial Sequence
  Description of Artificial Sequence: Synthetic oligonucleotide
  Antisense strand to SEQ ID NO: 191818
aagaauggagaccucugga

SEQ ID NO: 191820 - RNA, 19 nt, Artificial Sequence
  Description of Artificial Sequence: Synthetic oligonucleotide
  Sense strand starting at position 732 of SEQ ID NO: 2473
ccauucuucccgggugaga

SEQ ID NO: 191821 - RNA, 19 nt, Artificial Sequence
  Description of Artificial Sequence: Synthetic oligonucleotide
  Antisense strand to SEQ ID NO: 191820
ucucacccgggaagaaugg

SEQ ID NO: 191822 - RNA, 19 nt, Artificial Sequence
  Description of Artificial Sequence: Synthetic oligonucleotide
  Sense strand starting at position 734 of SEQ ID NO: 2473
auucuucccgggugagaua

SEQ ID NO: 191823 - RNA, 19 nt, Artificial Sequence
  Description of Artificial Sequence: Synthetic oligonucleotide
  Antisense strand to SEQ ID NO: 191822
uaucucacccgggaagaau

SEQ ID NO: 191824 - RNA, 19 nt, Artificial Sequence
  Description of Artificial Sequence: Synthetic oligonucleotide
  Sense strand starting at position 743 of SEQ ID NO: 2473
gggugagauacauggccau

SEQ ID NO: 191825 - RNA, 19 nt, Artificial Sequence
  Description of Artificial Sequence: Synthetic oligonucleotide
  Antisense strand to SEQ ID NO: 191824
auggccauguaucucaccc

SEQ ID NO: 191826 - RNA, 19 nt, Artificial Sequence
  Description of Artificial Sequence: Synthetic oligonucleotide
  Sense strand starting at position 772 of SEQ ID NO: 2473
gucacaggugccugaaauc

SEQ ID NO: 191827 - RNA, 19 nt, Artificial Sequence
  Description of Artificial Sequence: Synthetic oligonucleotide
  Antisense strand to SEQ ID NO: 191826
gauuucaggcaccugugac

SEQ ID NO: 191828 - RNA, 19 nt, Artificial Sequence
  Description of Artificial Sequence: Synthetic oligonucleotide
  Sense strand starting at position 1283 of SEQ ID NO: 2473
cguugugccacgcuuaagu

SEQ ID NO: 191829 - RNA, 19 nt, Artificial Sequence
  Description of Artificial Sequence: Synthetic oligonucleotide
  Antisense strand to SEQ ID NO: 191828
acuuaagcguggcacaacg

SEQ ID NO: 191830 - RNA, 19 nt, Artificial Sequence
  Description of Artificial Sequence: Synthetic oligonucleotide
  Sense strand starting at position 1307 of SEQ ID NO: 2473
cgccuuucucccuacagau

SEQ ID NO: 191831 - RNA, 19 nt, Artificial Sequence
  Description of Artificial Sequence: Synthetic oligonucleotide
  Antisense strand to SEQ ID NO: 191830
aucuguagggagaaaggcg

SEQ ID NO: 191832 - RNA, 19 nt, Artificial Sequence
  Description of Artificial Sequence: Synthetic oligonucleotide
  Sense strand starting at position 1337 of SEQ ID NO: 2473
agcugugagcuagaaggua

SEQ ID NO: 191833 - RNA, 19 nt, Artificial Sequence
  Description of Artificial Sequence: Synthetic oligonucleotide
  Antisense strand to SEQ ID NO: 191832
uaccuucuagcucacagcu

SEQ ID NO: 191834 - RNA, 19 nt, Artificial Sequence
  Description of Artificial Sequence: Synthetic oligonucleotide
  Sense strand starting at position 1401 of SEQ ID NO: 2473
acagcagguguucgauaua

SEQ ID NO: 191835 - RNA, 19 nt, Artificial Sequence
  Description of Artificial Sequence: Synthetic oligonucleotide
  Antisense strand to SEQ ID NO: 191834
uauaucgaacaccugcugu

SEQ ID NO: 191836 - RNA, 19 nt, Artificial Sequence
  Description of Artificial Sequence: Synthetic oligonucleotide
  Sense strand starting at position 1404 of SEQ ID NO: 2473
gcagguguucgauauaugu

SEQ ID NO: 191837 - RNA, 19 nt, Artificial Sequence
  Description of Artificial Sequence: Synthetic oligonucleotide
  Antisense strand to SEQ ID NO: 191836
acauauaucgaacaccugc

SEQ ID NO: 191838 - RNA, 19 nt, Artificial Sequence
  Description of Artificial Sequence: Synthetic oligonucleotide
  Sense strand starting at position 1406 of SEQ ID NO: 2473
agguguucgauauauguuu

SEQ ID NO: 191839 - RNA, 19 nt, Artificial Sequence
  Description of Artificial Sequence: Synthetic oligonucleotide
  Antisense strand to SEQ ID NO: 191838
aaacauauaucgaacaccu

SEQ ID NO: 191840 - RNA, 19 nt, Artificial Sequence
  Description of Artificial Sequence: Synthetic oligonucleotide
  Sense strand starting at position 1414 of SEQ ID NO: 2473
gauauauguuuguuuguga

SEQ ID NO: 191841 - RNA, 19 nt, Artificial Sequence
  Description of Artificial Sequence: Synthetic oligonucleotide
  Antisense strand to SEQ ID NO: 191840
ucacaaacaaacauauauc

SEQ ID NO: 191842 - RNA, 19 nt, Artificial Sequence
  Description of Artificial Sequence: Synthetic oligonucleotide
  Sense strand starting at position 1417 of SEQ ID NO: 2473
auauguuuguuugugacua

SEQ ID NO: 191843 - RNA, 19 nt, Artificial Sequence
  Description of Artificial Sequence: Synthetic oligonucleotide
  Antisense strand to SEQ ID NO: 191842
uagucacaaacaaacauau

SEQ ID NO: 191844 - RNA, 19 nt, Artificial Sequence
  Description of Artificial Sequence: Synthetic oligonucleotide
  Sense strand starting at position 1430 of SEQ ID NO: 2473
ugacuauacuggccuggua

SEQ ID NO: 191845 - RNA, 19 nt, Artificial Sequence
  Description of Artificial Sequence: Synthetic oligonucleotide
  Antisense strand to SEQ ID NO: 191844
uaccaggccaguauaguca

SEQ ID NO: 191846 - RNA, 19 nt, Artificial Sequence
  Description of Artificial Sequence: Synthetic oligonucleotide
  Sense strand starting at position 1469 of SEQ ID NO: 2473
uaucgaagccagcgaauua

SEQ ID NO: 191847 - RNA, 19 nt, Artificial Sequence
  Description of Artificial Sequence: Synthetic oligonucleotide
  Antisense strand to SEQ ID NO: 191846
uaauucgcuggcuucgaua

SEQ ID NO: 191848 - RNA, 19 nt, Artificial Sequence
  Description of Artificial Sequence: Synthetic oligonucleotide
  Sense strand starting at position 1485 of SEQ ID NO: 2473
uuacuaaucccagggaauu

SEQ ID NO: 191849 - RNA, 19 nt, Artificial Sequence
  Description of Artificial Sequence: Synthetic oligonucleotide
  Antisense strand to SEQ ID NO: 191848
aauucccugggauuaguaa

SEQ ID NO: 191850 - RNA, 19 nt, Artificial Sequence
  Description of Artificial Sequence: Synthetic oligonucleotide
  Sense strand starting at position 1853 of SEQ ID NO: 2473
gaggcaaugccggaaucua

SEQ ID NO: 191851 - RNA, 19 nt, Artificial Sequence
  Description of Artificial Sequence: Synthetic oligonucleotide
  Antisense strand to SEQ ID NO: 191850
uagauuccggcauugccuc

SEQ ID NO: 191852 - RNA, 19 nt, Artificial Sequence
  Description of Artificial Sequence: Synthetic oligonucleotide
  Sense strand starting at position 2031 of SEQ ID NO: 2473
cgugaaccacucugccaau

SEQ ID NO: 191853 - RNA, 19 nt, Artificial Sequence
  Description of Artificial Sequence: Synthetic oligonucleotide
  Antisense strand to SEQ ID NO: 191852
auuggcagagugguucacg

SEQ ID NO: 191854 - RNA, 19 nt, Artificial Sequence
  Description of Artificial Sequence: Synthetic oligonucleotide
  Sense strand starting at position 2262 of SEQ ID NO: 2473
gagacugcagcacgauuaa

SEQ ID NO: 191855 - RNA, 19 nt, Artificial Sequence
  Description of Artificial Sequence: Synthetic oligonucleotide
  Antisense strand to SEQ ID NO: 191854
uuaaucgugcugcagucuc

SEQ ID NO: 191856 - RNA, 19 nt, Artificial Sequence
  Description of Artificial Sequence: Synthetic oligonucleotide
  Sense strand starting at position 2311 of SEQ ID NO: 2473
ccuagaagcuucucuugag

SEQ ID NO: 191857 - RNA, 19 nt, Artificial Sequence
  Description of Artificial Sequence: Synthetic oligonucleotide
  Antisense strand to SEQ ID NO: 191856
cucaagagaagcuucuagg

SEQ ID NO: 191858 - RNA, 19 nt, Artificial Sequence
  Description of Artificial Sequence: Synthetic oligonucleotide
  Sense strand starting at position 2312 of SEQ ID NO: 2473
cuagaagcuucucuugagu

SEQ ID NO: 191859 - RNA, 19 nt, Artificial Sequence
  Description of Artificial Sequence: Synthetic oligonucleotide
  Antisense strand to SEQ ID NO: 191858
acucaagagaagcuucuag

SEQ ID NO: 191860 - RNA, 19 nt, Artificial Sequence
  Description of Artificial Sequence: Synthetic oligonucleotide
  Sense strand starting at position 2332 of SEQ ID NO: 2473
gggccuuauuaucugcgaa

SEQ ID NO: 191861 - RNA, 19 nt, Artificial Sequence
  Description of Artificial Sequence: Synthetic oligonucleotide
  Antisense strand to SEQ ID NO: 191860
uucgcagauaauaaggccc

SEQ ID NO: 191862 - RNA, 19 nt, Artificial Sequence
  Description of Artificial Sequence: Synthetic oligonucleotide
  Sense strand starting at position 10 of SEQ ID NO: 2474
uguggcuggucuuuacaca

SEQ ID NO: 191863 - RNA, 19 nt, Artificial Sequence
  Description of Artificial Sequence: Synthetic oligonucleotide
  Antisense strand to SEQ ID NO: 191862
uguguaaagaccagccaca

SEQ ID NO: 191864 - RNA, 19 nt, Artificial Sequence
  Description of Artificial Sequence: Synthetic oligonucleotide
  Sense strand starting at position 66 of SEQ ID NO: 2474
aguaccauuacguguggau

SEQ ID NO: 191865 - RNA, 19 nt, Artificial Sequence
  Description of Artificial Sequence: Synthetic oligonucleotide
  Antisense strand to SEQ ID NO: 191864
auccacacguaaugguacu

SEQ ID NO: 191866 - RNA, 19 nt, Artificial Sequence
  Description of Artificial Sequence: Synthetic oligonucleotide
  Sense strand starting at position 116 of SEQ ID NO: 2474
caggaaaucugggagaaag

SEQ ID NO: 191867 - RNA, 19 nt, Artificial Sequence
  Description of Artificial Sequence: Synthetic oligonucleotide
  Antisense strand to SEQ ID NO: 191866
cuuucucccagauuuccug

SEQ ID NO: 191868 - RNA, 19 nt, Artificial Sequence
  Description of Artificial Sequence: Synthetic oligonucleotide
  Sense strand starting at position 137 of SEQ ID NO: 2474
guggcauuucaacgugaca

SEQ ID NO: 191869 - RNA, 19 nt, Artificial Sequence
  Description of Artificial Sequence: Synthetic oligonucleotide
  Antisense strand to SEQ ID NO: 191868
ugucacguugaaaugccac

SEQ ID NO: 191870 - RNA, 19 nt, Artificial Sequence
  Description of Artificial Sequence: Synthetic oligonucleotide
  Sense strand starting at position 187 of SEQ ID NO: 2474
gcgccacaugcagauguaa

SEQ ID NO: 191871 - RNA, 19 nt, Artificial Sequence
  Description of Artificial Sequence: Synthetic oligonucleotide
  Antisense strand to SEQ ID NO: 191870
uuacaucugcauguggcgc

SEQ ID NO: 191872 - RNA, 19 nt, Artificial Sequence
  Description of Artificial Sequence: Synthetic oligonucleotide
  Sense strand starting at position 295 of SEQ ID NO: 2474
agccgaagucacuguucuu

SEQ ID NO: 191873 - RNA, 19 nt, Artificial Sequence
  Description of Artificial Sequence: Synthetic oligonucleotide
  Antisense strand to SEQ ID NO: 191872
aagaacagugacuucggcu

SEQ ID NO: 191874 - RNA, 19 nt, Artificial Sequence
  Description of Artificial Sequence: Synthetic oligonucleotide
  Sense strand starting at position 298 of SEQ ID NO: 2474
cgaagucacuguucuuguu

SEQ ID NO: 191875 - RNA, 19 nt, Artificial Sequence
  Description of Artificial Sequence: Synthetic oligonucleotide
  Antisense strand to SEQ ID NO: 191874
aacaagaacagugacuucg

SEQ ID NO: 191876 - RNA, 19 nt, Artificial Sequence
  Description of Artificial Sequence: Synthetic oligonucleotide
  Sense strand starting at position 306 of SEQ ID NO: 2474
cuguucuuguuauuaagac

SEQ ID NO: 191877 - RNA, 19 nt, Artificial Sequence
  Description of Artificial Sequence: Synthetic oligonucleotide
  Antisense strand to SEQ ID NO: 191876
gucuuaauaacaagaacag

SEQ ID NO: 191878 - RNA, 19 nt, Artificial Sequence
  Description of Artificial Sequence: Synthetic oligonucleotide
  Sense strand starting at position 521 of SEQ ID NO: 2474
ugcagucuaccagggacaa

SEQ ID NO: 191879 - RNA, 19 nt, Artificial Sequence
  Description of Artificial Sequence: Synthetic oligonucleotide
  Antisense strand to SEQ ID NO: 191878
uugucccugguagacugca

SEQ ID NO: 191880 - RNA, 19 nt, Artificial Sequence
  Description of Artificial Sequence: Synthetic oligonucleotide
  Sense strand starting at position 522 of SEQ ID NO: 2474
gcagucuaccagggacaaa

SEQ ID NO: 191881 - RNA, 19 nt, Artificial Sequence
  Description of Artificial Sequence: Synthetic oligonucleotide
  Antisense strand to SEQ ID NO: 191880
uuugucccugguagacugc

SEQ ID NO: 191882 - RNA, 19 nt, Artificial Sequence
  Description of Artificial Sequence: Synthetic oligonucleotide
  Sense strand starting at position 556 of SEQ ID NO: 2474
aaguaucagugguuuccua

SEQ ID NO: 191883 - RNA, 19 nt, Artificial Sequence
  Description of Artificial Sequence: Synthetic oligonucleotide
  Antisense strand to SEQ ID NO: 191882
uaggaaaccacugauacuu

SEQ ID NO: 191884 - RNA, 19 nt, Artificial Sequence
  Description of Artificial Sequence: Synthetic oligonucleotide
  Sense strand starting at position 563 of SEQ ID NO: 2474
agugguuuccuaugagccu

SEQ ID NO: 191885 - RNA, 19 nt, Artificial Sequence
  Description of Artificial Sequence: Synthetic oligonucleotide
  Antisense strand to SEQ ID NO: 191884
aggcucauaggaaaccacu

SEQ ID NO: 191886 - RNA, 19 nt, Artificial Sequence
  Description of Artificial Sequence: Synthetic oligonucleotide
  Sense strand starting at position 861 of SEQ ID NO: 2474
accaguauaccugguguuu

SEQ ID NO: 191887 - RNA, 19 nt, Artificial Sequence
  Description of Artificial Sequence: Synthetic oligonucleotide
  Antisense strand to SEQ ID NO: 191886
aaacaccagguauacuggu

SEQ ID NO: 191888 - RNA, 19 nt, Artificial Sequence
  Description of Artificial Sequence: Synthetic oligonucleotide
  Sense strand starting at position 867 of SEQ ID NO: 2474
auaccugguguuuaugauu

SEQ ID NO: 191889 - RNA, 19 nt, Artificial Sequence
  Description of Artificial Sequence: Synthetic oligonucleotide
  Antisense strand to SEQ ID NO: 191888
aaucauaaacaccagguau

SEQ ID NO: 191890 - RNA, 19 nt, Artificial Sequence
  Description of Artificial Sequence: Synthetic oligonucleotide
  Sense strand starting at position 875 of SEQ ID NO: 2474
uguuuaugauucccacuuu

SEQ ID NO: 191891 - RNA, 19 nt, Artificial Sequence
  Description of Artificial Sequence: Synthetic oligonucleotide
  Antisense strand to SEQ ID NO: 191890
aaagugggaaucauaaaca

SEQ ID NO: 191892 - RNA, 19 nt, Artificial Sequence
  Description of Artificial Sequence: Synthetic oligonucleotide
  Sense strand starting at position 895 of SEQ ID NO: 2474
gaacgcugggcccgugaaa

SEQ ID NO: 191893 - RNA, 19 nt, Artificial Sequence
  Description of Artificial Sequence: Synthetic oligonucleotide
  Antisense strand to SEQ ID NO: 191892
uuucacgggcccagcguuc

SEQ ID NO: 191894 - RNA, 19 nt, Artificial Sequence
  Description of Artificial Sequence: Synthetic oligonucleotide
  Sense strand starting at position 948 of SEQ ID NO: 2474
ccaucaggccucugugauc

SEQ ID NO: 191895 - RNA, 19 nt, Artificial Sequence
  Description of Artificial Sequence: Synthetic oligonucleotide
  Antisense strand to SEQ ID NO: 191894
gaucacagaggccugaugg

SEQ ID NO: 191896 - RNA, 19 nt, Artificial Sequence
  Description of Artificial Sequence: Synthetic oligonucleotide
  Sense strand starting at position 1119 of SEQ ID NO: 2474
acaacugagugguuccaga

SEQ ID NO: 191897 - RNA, 19 nt, Artificial Sequence
  Description of Artificial Sequence: Synthetic oligonucleotide
  Antisense strand to SEQ ID NO: 191896
ucuggaaccacucaguugu

SEQ ID NO: 191898 - RNA, 19 nt, Artificial Sequence
  Description of Artificial Sequence: Synthetic oligonucleotide
  Sense strand starting at position 1477 of SEQ ID NO: 2474
augccugaugaaugaacua

SEQ ID NO: 191899 - RNA, 19 nt, Artificial Sequence
  Description of Artificial Sequence: Synthetic oligonucleotide
  Antisense strand to SEQ ID NO: 191898
uaguucauucaucaggcau

SEQ ID NO: 191900 - RNA, 19 nt, Artificial Sequence
  Description of Artificial Sequence: Synthetic oligonucleotide
  Sense strand starting at position 1564 of SEQ ID NO: 2474
cgagcuggaucggcagaaa

SEQ ID NO: 191901 - RNA, 19 nt, Artificial Sequence
  Description of Artificial Sequence: Synthetic oligonucleotide
  Antisense strand to SEQ ID NO: 191900
uuucugccgauccagcucg

SEQ ID NO: 191902 - RNA, 19 nt, Artificial Sequence
  Description of Artificial Sequence: Synthetic oligonucleotide
  Sense strand starting at position 2773 of SEQ ID NO: 2474
cguugcucgcugaagugaa

SEQ ID NO: 191903 - RNA, 19 nt, Artificial Sequence
  Description of Artificial Sequence: Synthetic oligonucleotide
  Antisense strand to SEQ ID NO: 191902
uucacuucagcgagcaacg

SEQ ID NO: 191904 - RNA, 19 nt, Artificial Sequence
  Description of Artificial Sequence: Synthetic oligonucleotide
  Sense strand starting at position 2919 of SEQ ID NO: 2474
cugcacuaugcugaauaua

SEQ ID NO: 191905 - RNA, 19 nt, Artificial Sequence
  Description of Artificial Sequence: Synthetic oligonucleotide
  Antisense strand to SEQ ID NO: 191904
uauauucagcauagugcag

SEQ ID NO: 191906 - RNA, 19 nt, Artificial Sequence
  Description of Artificial Sequence: Synthetic oligonucleotide
  Sense strand starting at position 2927 of SEQ ID NO: 2474
ugcugaauauagcccaaau

SEQ ID NO: 191907 - RNA, 19 nt, Artificial Sequence
  Description of Artificial Sequence: Synthetic oligonucleotide
  Antisense strand to SEQ ID NO: 191906
auuugggcuauauucagca

SEQ ID NO: 191908 - RNA, 19 nt, Artificial Sequence
  Description of Artificial Sequence: Synthetic oligonucleotide
  Sense strand starting at position 2984 of SEQ ID NO: 2474
ggcuccagagcuugagaga

SEQ ID NO: 191909 - RNA, 19 nt, Artificial Sequence
  Description of Artificial Sequence: Synthetic oligonucleotide
  Antisense strand to SEQ ID NO: 191908
ucucucaagcucuggagcc

SEQ ID NO: 191910 - RNA, 19 nt, Artificial Sequence
  Description of Artificial Sequence: Synthetic oligonucleotide
  Sense strand starting at position 2985 of SEQ ID NO: 2474
gcuccagagcuugagagaa

SEQ ID NO: 191911 - RNA, 19 nt, Artificial Sequence
  Description of Artificial Sequence: Synthetic oligonucleotide
  Antisense strand to SEQ ID NO: 191910
uucucucaagcucuggagc

SEQ ID NO: 191912 - RNA, 19 nt, Artificial Sequence
  Description of Artificial Sequence: Synthetic oligonucleotide
  Sense strand starting at position 3054 of SEQ ID NO: 2474
ucugcucugcaccgaaauu

SEQ ID NO: 191913 - RNA, 19 nt, Artificial Sequence
  Description of Artificial Sequence: Synthetic oligonucleotide
  Antisense strand to SEQ ID NO: 191912
aauuucggugcagagcaga

SEQ ID NO: 191914 - RNA, 19 nt, Artificial Sequence
  Description of Artificial Sequence: Synthetic oligonucleotide
  Sense strand starting at position 3098 of SEQ ID NO: 2474
uggagaagauucuccgucu

SEQ ID NO: 191915 - RNA, 19 nt, Artificial Sequence
  Description of Artificial Sequence: Synthetic oligonucleotide
  Antisense strand to SEQ ID NO: 191914
agacggagaaucuucucca

SEQ ID NO: 191916 - RNA, 19 nt, Artificial Sequence
  Description of Artificial Sequence: Synthetic oligonucleotide
  Sense strand starting at position 3099 of SEQ ID NO: 2474
ggagaagauucuccgucuu

SEQ ID NO: 191917 - RNA, 19 nt, Artificial Sequence
  Description of Artificial Sequence: Synthetic oligonucleotide
  Antisense strand to SEQ ID NO: 191916
aagacggagaaucuucucc

SEQ ID NO: 191918 - RNA, 19 nt, Artificial Sequence
  Description of Artificial Sequence: Synthetic oligonucleotide
  Sense strand starting at position 3109 of SEQ ID NO: 2474
cuccgucuuccggagggua

SEQ ID NO: 191919 - RNA, 19 nt, Artificial Sequence
  Description of Artificial Sequence: Synthetic oligonucleotide
  Antisense strand to SEQ ID NO: 191918
uacccuccggaagacggag

SEQ ID NO: 191920 - RNA, 19 nt, Artificial Sequence
  Description of Artificial Sequence: Synthetic oligonucleotide
  Sense strand starting at position 3182 of SEQ ID NO: 2474
ggaaaucaguuucuccaaa

SEQ ID NO: 191921 - RNA, 19 nt, Artificial Sequence
  Description of Artificial Sequence: Synthetic oligonucleotide
  Antisense strand to SEQ ID NO: 191920
uuuggagaaacugauuucc

SEQ ID NO: 191922 - RNA, 19 nt, Artificial Sequence
  Description of Artificial Sequence: Synthetic oligonucleotide
  Sense strand starting at position 3310 of SEQ ID NO: 2474
cucugaacugcuggaauaa

SEQ ID NO: 191923 - RNA, 19 nt, Artificial Sequence
  Description of Artificial Sequence: Synthetic oligonucleotide
  Antisense strand to SEQ ID NO: 191922
uuauuccagcaguucagag

SEQ ID NO: 191924 - RNA, 19 nt, Artificial Sequence
  Description of Artificial Sequence: Synthetic oligonucleotide
  Sense strand starting at position 3328 of SEQ ID NO: 2474
aucacuucugacuagcaga

SEQ ID NO: 191925 - RNA, 19 nt, Artificial Sequence
  Description of Artificial Sequence: Synthetic oligonucleotide
  Antisense strand to SEQ ID NO: 191924
ucugcuagucagaagugau

SEQ ID NO: 191926 - RNA, 19 nt, Artificial Sequence
  Description of Artificial Sequence: Synthetic oligonucleotide
  Sense strand starting at position 3382 of SEQ ID NO: 2474
cugacuuuagcaggagaug

SEQ ID NO: 191927 - RNA, 19 nt, Artificial Sequence
  Description of Artificial Sequence: Synthetic oligonucleotide
  Antisense strand to SEQ ID NO: 191926
caucuccugcuaaagucag

SEQ ID NO: 191928 - RNA, 19 nt, Artificial Sequence
  Description of Artificial Sequence: Synthetic oligonucleotide
  Sense strand starting at position 3413 of SEQ ID NO: 2474
gagugaagcccuuguuugu

SEQ ID NO: 191929 - RNA, 19 nt, Artificial Sequence
  Description of Artificial Sequence: Synthetic oligonucleotide
  Antisense strand to SEQ ID NO: 191928
acaaacaagggcuucacuc

SEQ ID NO: 191930 - RNA, 19 nt, Artificial Sequence
  Description of Artificial Sequence: Synthetic oligonucleotide
  Sense strand starting at position 3423 of SEQ ID NO: 2474
cuuguuugugaacagugau

SEQ ID NO: 191931 - RNA, 19 nt, Artificial Sequence
  Description of Artificial Sequence: Synthetic oligonucleotide
  Antisense strand to SEQ ID NO: 191930
aucacuguucacaaacaag

SEQ ID NO: 191932 - RNA, 19 nt, Artificial Sequence
  Description of Artificial Sequence: Synthetic oligonucleotide
  Sense strand starting at position 3426 of SEQ ID NO: 2474
guuugugaacagugauugu

SEQ ID NO: 191933 - RNA, 19 nt, Artificial Sequence
  Description of Artificial Sequence: Synthetic oligonucleotide
  Antisense strand to SEQ ID NO: 191932
acaaucacuguucacaaac

SEQ ID NO: 191934 - RNA, 19 nt, Artificial Sequence
  Description of Artificial Sequence: Synthetic oligonucleotide
  Sense strand starting at position 3435 of SEQ ID NO: 2474
cagugauuguuucccggau

SEQ ID NO: 191935 - RNA, 19 nt, Artificial Sequence
  Description of Artificial Sequence: Synthetic oligonucleotide
  Antisense strand to SEQ ID NO: 191934
auccgggaaacaaucacug

SEQ ID NO: 191936 - RNA, 19 nt, Artificial Sequence
  Description of Artificial Sequence: Synthetic oligonucleotide
  Sense strand starting at position 3436 of SEQ ID NO: 2474
agugauuguuucccggaug

SEQ ID NO: 191937 - RNA, 19 nt, Artificial Sequence
  Description of Artificial Sequence: Synthetic oligonucleotide
  Antisense strand to SEQ ID NO: 191936
cauccgggaaacaaucacu

SEQ ID NO: 191938 - RNA, 19 nt, Artificial Sequence
  Description of Artificial Sequence: Synthetic oligonucleotide
  Sense strand starting at position 3439 of SEQ ID NO: 2474
gauuguuucccggaugaca

SEQ ID NO: 191939 - RNA, 19 nt, Artificial Sequence
  Description of Artificial Sequence: Synthetic oligonucleotide
  Antisense strand to SEQ ID NO: 191938
ugucauccgggaaacaauc

SEQ ID NO: 191940 - RNA, 19 nt, Artificial Sequence
  Description of Artificial Sequence: Synthetic oligonucleotide
  Sense strand starting at position 3717 of SEQ ID NO: 2474
cuuugauuggcccaggaac

SEQ ID NO: 191941 - RNA, 19 nt, Artificial Sequence
  Description of Artificial Sequence: Synthetic oligonucleotide
  Antisense strand to SEQ ID NO: 191940
guuccugggccaaucaaag

SEQ ID NO: 191942 - RNA, 19 nt, Artificial Sequence
  Description of Artificial Sequence: Synthetic oligonucleotide
  Sense strand starting at position 3811 of SEQ ID NO: 2475
guaggagugauguagugag

SEQ ID NO: 191943 - RNA, 19 nt, Artificial Sequence
  Description of Artificial Sequence: Synthetic oligonucleotide
  Antisense strand to SEQ ID NO: 191942
cucacuacaucacuccuac

SEQ ID NO: 191944 - RNA, 19 nt, Artificial Sequence
  Description of Artificial Sequence: Synthetic oligonucleotide
  Sense strand starting at position 3696 of SEQ ID NO: 2475
ggccacugucuccaaagau

SEQ ID NO: 191945 - RNA, 19 nt, Artificial Sequence
  Description of Artificial Sequence: Synthetic oligonucleotide
  Antisense strand to SEQ ID NO: 191944
aucuuuggagacaguggcc

SEQ ID NO: 191946 - RNA, 19 nt, Artificial Sequence
  Description of Artificial Sequence: Synthetic oligonucleotide
  Sense strand starting at position 3633 of SEQ ID NO: 2475
aucagaaagccaggacauu

SEQ ID NO: 191947 - RNA, 19 nt, Artificial Sequence
  Description of Artificial Sequence: Synthetic oligonucleotide
  Antisense strand to SEQ ID NO: 191946
aauguccuggcuuucugau

SEQ ID NO: 191948 - RNA, 19 nt, Artificial Sequence
  Description of Artificial Sequence: Synthetic oligonucleotide
  Sense strand starting at position 3336 of SEQ ID NO: 2475
acugguauccacugagcca

SEQ ID NO: 191949 - RNA, 19 nt, Artificial Sequence
  Description of Artificial Sequence: Synthetic oligonucleotide
  Antisense strand to SEQ ID NO: 191948
uggcucaguggauaccagu

SEQ ID NO: 191950 - RNA, 19 nt, Artificial Sequence
  Description of Artificial Sequence: Synthetic oligonucleotide
  Sense strand starting at position 3325 of SEQ ID NO: 2475
gagccagacucacugguau

SEQ ID NO: 191951 - RNA, 19 nt, Artificial Sequence
  Description of Artificial Sequence: Synthetic oligonucleotide
  Antisense strand to SEQ ID NO: 191950
auaccagugagucuggcuc

SEQ ID NO: 191952 - RNA, 19 nt, Artificial Sequence
  Description of Artificial Sequence: Synthetic oligonucleotide
  Sense strand starting at position 3260 of SEQ ID NO: 2475
gcuggugcaucuuuaauga

SEQ ID NO: 191953 - RNA, 19 nt, Artificial Sequence
  Description of Artificial Sequence: Synthetic oligonucleotide
  Antisense strand to SEQ ID NO: 191952
ucauuaaagaugcaccagc

SEQ ID NO: 191954 - RNA, 19 nt, Artificial Sequence
  Description of Artificial Sequence: Synthetic oligonucleotide
  Sense strand starting at position 3181 of SEQ ID NO: 2475
ggcagaagcuuguuccauc

SEQ ID NO: 191955 - RNA, 19 nt, Artificial Sequence
  Description of Artificial Sequence: Synthetic oligonucleotide
  Antisense strand to SEQ ID NO: 191954
gauggaacaagcuucugcc

SEQ ID NO: 191956 - RNA, 19 nt, Artificial Sequence
  Description of Artificial Sequence: Synthetic oligonucleotide
  Sense strand starting at position 2979 of SEQ ID NO: 2475
ggacacaacuaguaugacu

SEQ ID NO: 191957 - RNA, 19 nt, Artificial Sequence
  Description of Artificial Sequence: Synthetic oligonucleotide
  Antisense strand to SEQ ID NO: 191956
agucauacuaguugugucc

SEQ ID NO: 191958 - RNA, 19 nt, Artificial Sequence
  Description of Artificial Sequence: Synthetic oligonucleotide
  Sense strand starting at position 2807 of SEQ ID NO: 2475
gucuguugccaggaaacaa

SEQ ID NO: 191959 - RNA, 19 nt, Artificial Sequence
  Description of Artificial Sequence: Synthetic oligonucleotide
  Antisense strand to SEQ ID NO: 191958
uuguuuccuggcaacagac

SEQ ID NO: 191960 - RNA, 19 nt, Artificial Sequence
  Description of Artificial Sequence: Synthetic oligonucleotide
  Sense strand starting at position 2803 of SEQ ID NO: 2475
uggagucuguugccaggaa

SEQ ID NO: 191961 - RNA, 19 nt, Artificial Sequence
  Description of Artificial Sequence: Synthetic oligonucleotide
  Antisense strand to SEQ ID NO: 191960
uuccuggcaacagacucca

SEQ ID NO: 191962 - RNA, 19 nt, Artificial Sequence
  Description of Artificial Sequence: Synthetic oligonucleotide
  Sense strand starting at position 2763 of SEQ ID NO: 2475
gccagaggagcuuagcaau

SEQ ID NO: 191963 - RNA, 19 nt, Artificial Sequence
  Description of Artificial Sequence: Synthetic oligonucleotide
  Antisense strand to SEQ ID NO: 191962
auugcuaagcuccucuggc

SEQ ID NO: 191964 - RNA, 19 nt, Artificial Sequence
  Description of Artificial Sequence: Synthetic oligonucleotide
  Sense strand starting at position 2568 of SEQ ID NO: 2475
gggaucaguuccucucaca

SEQ ID NO: 191965 - RNA, 19 nt, Artificial Sequence
  Description of Artificial Sequence: Synthetic oligonucleotide
  Antisense strand to SEQ ID NO: 191964
ugugagaggaacugauccc

SEQ ID NO: 191966 - RNA, 19 nt, Artificial Sequence
  Description of Artificial Sequence: Synthetic oligonucleotide
  Sense strand starting at position 2537 of SEQ ID NO: 2475
gagugcaguccucaggcau

SEQ ID NO: 191967 - RNA, 19 nt, Artificial Sequence
  Description of Artificial Sequence: Synthetic oligonucleotide
  Antisense strand to SEQ ID NO: 191966
augccugaggacugcacuc

SEQ ID NO: 191968 - RNA, 19 nt, Artificial Sequence
  Description of Artificial Sequence: Synthetic oligonucleotide
  Sense strand starting at position 2505 of SEQ ID NO: 2475
aaccaaauccgugaagggu

SEQ ID NO: 191969 - RNA, 19 nt, Artificial Sequence
  Description of Artificial Sequence: Synthetic oligonucleotide
  Antisense strand to SEQ ID NO: 191968
acccuucacggauuugguu

SEQ ID NO: 191970 - RNA, 19 nt, Artificial Sequence
  Description of Artificial Sequence: Synthetic oligonucleotide
  Sense strand starting at position 2412 of SEQ ID NO: 2475
agggcuucccgagauaauc

SEQ ID NO: 191971 - RNA, 19 nt, Artificial Sequence
  Description of Artificial Sequence: Synthetic oligonucleotide
  Antisense strand to SEQ ID NO: 191970
gauuaucucgggaagcccu

SEQ ID NO: 191972 - RNA, 19 nt, Artificial Sequence
  Description of Artificial Sequence: Synthetic oligonucleotide
  Sense strand starting at position 2382 of SEQ ID NO: 2475
agugaauaaguuuggaauc

SEQ ID NO: 191973 - RNA, 19 nt, Artificial Sequence
  Description of Artificial Sequence: Synthetic oligonucleotide
  Antisense strand to SEQ ID NO: 191972
gauuccaaacuuauucacu

SEQ ID NO: 191974 - RNA, 19 nt, Artificial Sequence
  Description of Artificial Sequence: Synthetic oligonucleotide
  Sense strand starting at position 2369 of SEQ ID NO: 2475
guaaaugacugagagugaa

SEQ ID NO: 191975 - RNA, 19 nt, Artificial Sequence
  Description of Artificial Sequence: Synthetic oligonucleotide
  Antisense strand to SEQ ID NO: 191974
uucacucucagucauuuac

SEQ ID NO: 191976 - RNA, 19 nt, Artificial Sequence
  Description of Artificial Sequence: Synthetic oligonucleotide
  Sense strand starting at position 2366 of SEQ ID NO: 2475
uuaguaaaugacugagagu

SEQ ID NO: 191977 - RNA, 19 nt, Artificial Sequence
  Description of Artificial Sequence: Synthetic oligonucleotide
  Antisense strand to SEQ ID NO: 191976
acucucagucauuuacuaa

SEQ ID NO: 191978 - RNA, 19 nt, Artificial Sequence
  Description of Artificial Sequence: Synthetic oligonucleotide
  Sense strand starting at position 2350 of SEQ ID NO: 2475
cugugucaugaauaaauua

SEQ ID NO: 191979 - RNA, 19 nt, Artificial Sequence
  Description of Artificial Sequence: Synthetic oligonucleotide
  Antisense strand to SEQ ID NO: 191978
uaauuuauucaugacacag

SEQ ID NO: 191980 - RNA, 19 nt, Artificial Sequence
  Description of Artificial Sequence: Synthetic oligonucleotide
  Sense strand starting at position 2342 of SEQ ID NO: 2475
auaaaugucugugucauga

SEQ ID NO: 191981 - RNA, 19 nt, Artificial Sequence
  Description of Artificial Sequence: Synthetic oligonucleotide
  Antisense strand to SEQ ID NO: 191980
ucaugacacagacauuuau

SEQ ID NO: 191982 - RNA, 19 nt, Artificial Sequence
  Description of Artificial Sequence: Synthetic oligonucleotide
  Sense strand starting at position 2341 of SEQ ID NO: 2475
gauaaaugucugugucaug

SEQ ID NO: 191983 - RNA, 19 nt, Artificial Sequence
  Description of Artificial Sequence: Synthetic oligonucleotide
  Antisense strand to SEQ ID NO: 191982
caugacacagacauuuauc

SEQ ID NO: 191984 - RNA, 19 nt, Artificial Sequence
  Description of Artificial Sequence: Synthetic oligonucleotide
  Sense strand starting at position 2340 of SEQ ID NO: 2475
ugauaaaugucugugucau

SEQ ID NO: 191985 - RNA, 19 nt, Artificial Sequence
  Description of Artificial Sequence: Synthetic oligonucleotide
  Antisense strand to SEQ ID NO: 191984
augacacagacauuuauca

SEQ ID NO: 191986 - RNA, 19 nt, Artificial Sequence
  Description of Artificial Sequence: Synthetic oligonucleotide
  Sense strand starting at position 2339 of SEQ ID NO: 2475
cugauaaaugucuguguca

SEQ ID NO: 191987 - RNA, 19 nt, Artificial Sequence
  Description of Artificial Sequence: Synthetic oligonucleotide
  Antisense strand to SEQ ID NO: 191986
ugacacagacauuuaucag

SEQ ID NO: 191988 - RNA, 19 nt, Artificial Sequence
  Description of Artificial Sequence: Synthetic oligonucleotide
  Sense strand starting at position 2328 of SEQ ID NO: 2475
ucuggaaagcacugauaaa

SEQ ID NO: 191989 - RNA, 19 nt, Artificial Sequence
  Description of Artificial Sequence: Synthetic oligonucleotide
  Antisense strand to SEQ ID NO: 191988
uuuaucagugcuuuccaga

SEQ ID NO: 191990 - RNA, 19 nt, Artificial Sequence
  Description of Artificial Sequence: Synthetic oligonucleotide
  Sense strand starting at position 2320 of SEQ ID NO: 2475
gcuuuaucucuggaaagca

SEQ ID NO: 191991 - RNA, 19 nt, Artificial Sequence
  Description of Artificial Sequence: Synthetic oligonucleotide
  Antisense strand to SEQ ID NO: 191990
ugcuuuccagagauaaagc

SEQ ID NO: 191992 - RNA, 19 nt, Artificial Sequence
  Description of Artificial Sequence: Synthetic oligonucleotide
  Sense strand starting at position 2318 of SEQ ID NO: 2475
augcuuuaucucuggaaag

SEQ ID NO: 191993 - RNA, 19 nt, Artificial Sequence
  Description of Artificial Sequence: Synthetic oligonucleotide
  Antisense strand to SEQ ID NO: 191992
cuuuccagagauaaagcau

SEQ ID NO: 191994 - RNA, 19 nt, Artificial Sequence
  Description of Artificial Sequence: Synthetic oligonucleotide
  Sense strand starting at position 1569 of SEQ ID NO: 2475
aggauccgggucugagaaa

SEQ ID NO: 191995 - RNA, 19 nt, Artificial Sequence
  Description of Artificial Sequence: Synthetic oligonucleotide
  Antisense strand to SEQ ID NO: 191994
uuucucagacccggauccu

SEQ ID NO: 191996 - RNA, 19 nt, Artificial Sequence
  Description of Artificial Sequence: Synthetic oligonucleotide
  Sense strand starting at position 1513 of SEQ ID NO: 2475
aggugauagucucccaagu

SEQ ID NO: 191997 - RNA, 19 nt, Artificial Sequence
  Description of Artificial Sequence: Synthetic oligonucleotide
  Antisense strand to SEQ ID NO: 191996
acuugggagacuaucaccu

SEQ ID NO: 191998 - RNA, 19 nt, Artificial Sequence
  Description of Artificial Sequence: Synthetic oligonucleotide
  Sense strand starting at position 1472 of SEQ ID NO: 2475
aaguaccuccuguaggaau

SEQ ID NO: 191999 - RNA, 19 nt, Artificial Sequence
  Description of Artificial Sequence: Synthetic oligonucleotide
  Antisense strand to SEQ ID NO: 191998
auuccuacaggagguacuu

SEQ ID NO: 192000 - RNA, 19 nt, Artificial Sequence
  Description of Artificial Sequence: Synthetic oligonucleotide
  Sense strand starting at position 1313 of SEQ ID NO: 2475
gcugcuucagccugggaga

SEQ ID NO: 192001 - RNA, 19 nt, Artificial Sequence
  Description of Artificial Sequence: Synthetic oligonucleotide
  Antisense strand to SEQ ID NO: 192000
ucucccaggcugaagcagc

SEQ ID NO: 192002 - RNA, 19 nt, Artificial Sequence
  Description of Artificial Sequence: Synthetic oligonucleotide
  Sense strand starting at position 1007 of SEQ ID NO: 2475
guuagaguuggaggcaagu

SEQ ID NO: 192003 - RNA, 19 nt, Artificial Sequence
  Description of Artificial Sequence: Synthetic oligonucleotide
  Antisense strand to SEQ ID NO: 192002
acuugccuccaacucuaac

SEQ ID NO: 192004 - RNA, 19 nt, Artificial Sequence
  Description of Artificial Sequence: Synthetic oligonucleotide
  Sense strand starting at position 950 of SEQ ID NO: 2475
uacagaaaguaguagagaa

SEQ ID NO: 192005 - RNA, 19 nt, Artificial Sequence
  Description of Artificial Sequence: Synthetic oligonucleotide
  Antisense strand to SEQ ID NO: 192004
uucucuacuacuuucugua

SEQ ID NO: 192006 - RNA, 19 nt, Artificial Sequence
  Description of Artificial Sequence: Synthetic oligonucleotide
  Sense strand starting at position 817 of SEQ ID NO: 2475
agaguaaucugaucccacu

SEQ ID NO: 192007 - RNA, 19 nt, Artificial Sequence
  Description of Artificial Sequence: Synthetic oligonucleotide
  Antisense strand to SEQ ID NO: 192006
agugggaucagauuacucu

SEQ ID NO: 192008 - RNA, 19 nt, Artificial Sequence
  Description of Artificial Sequence: Synthetic oligonucleotide
  Sense strand starting at position 791 of SEQ ID NO: 2475
ggaucagucucugucagaa

SEQ ID NO: 192009 - RNA, 19 nt, Artificial Sequence
  Description of Artificial Sequence: Synthetic oligonucleotide
  Antisense strand to SEQ ID NO: 192008
uucugacagagacugaucc

SEQ ID NO: 192010 - RNA, 19 nt, Artificial Sequence
  Description of Artificial Sequence: Synthetic oligonucleotide
  Sense strand starting at position 790 of SEQ ID NO: 2475
gggaucagucucugucaga

SEQ ID NO: 192011 - RNA, 19 nt, Artificial Sequence
  Description of Artificial Sequence: Synthetic oligonucleotide
  Antisense strand to SEQ ID NO: 192010
ucugacagagacugauccc

SEQ ID NO: 192012 - RNA, 19 nt, Artificial Sequence
  Description of Artificial Sequence: Synthetic oligonucleotide
  Sense strand starting at position 333 of SEQ ID NO: 2475
uaccauagcuggguugaca

SEQ ID NO: 192013 - RNA, 19 nt, Artificial Sequence
  Description of Artificial Sequence: Synthetic oligonucleotide
  Antisense strand to SEQ ID NO: 192012
ugucaacccagcuauggua

SEQ ID NO: 192014 - RNA, 19 nt, Artificial Sequence
  Description of Artificial Sequence: Synthetic oligonucleotide
  Sense strand starting at position 271 of SEQ ID NO: 2475
ggguguuacagguaaguac

SEQ ID NO: 192015 - RNA, 19 nt, Artificial Sequence
  Description of Artificial Sequence: Synthetic oligonucleotide
  Antisense strand to SEQ ID NO: 192014
guacuuaccuguaacaccc

SEQ ID NO: 192016 - RNA, 19 nt, Artificial Sequence
  Description of Artificial Sequence: Synthetic oligonucleotide
  Sense strand starting at position 237 of SEQ ID NO: 2475
augcgauuucgacgcuuga

SEQ ID NO: 192017 - RNA, 19 nt, Artificial Sequence
  Description of Artificial Sequence: Synthetic oligonucleotide
  Antisense strand to SEQ ID NO: 192016
ucaagcgucgaaaucgcau

SEQ ID NO: 192018 - RNA, 19 nt, Artificial Sequence
  Description of Artificial Sequence: Synthetic oligonucleotide
  Sense strand starting at position 168 of SEQ ID NO: 2475
caugaagaccacuggucuu

SEQ ID NO: 192019 - RNA, 19 nt, Artificial Sequence
  Description of Artificial Sequence: Synthetic oligonucleotide
  Antisense strand to SEQ ID NO: 192018
aagaccaguggucuucaug

SEQ ID NO: 192020 - RNA, 19 nt, Artificial Sequence
  Description of Artificial Sequence: Synthetic oligonucleotide
  Sense strand starting at position 97 of SEQ ID NO: 2475
cucugagagcuugggucuu

SEQ ID NO: 192021 - RNA, 19 nt, Artificial Sequence
  Description of Artificial Sequence: Synthetic oligonucleotide
  Antisense strand to SEQ ID NO: 192020
aagacccaagcucucagag

SEQ ID NO: 192022 - RNA, 19 nt, Artificial Sequence
  Description of Artificial Sequence: Synthetic oligonucleotide
  Sense strand starting at position 347 of SEQ ID NO: 2477
gugccaggccaauaugaaa

SEQ ID NO: 192023 - RNA, 19 nt, Artificial Sequence
  Description of Artificial Sequence: Synthetic oligonucleotide
  Antisense strand to SEQ ID NO: 192022
uuucauauuggccuggcac

SEQ ID NO: 192024 - RNA, 19 nt, Artificial Sequence
  Description of Artificial Sequence: Synthetic oligonucleotide
  Sense strand starting at position 454 of SEQ ID NO: 2477
ccauuaguuguagauauuc

SEQ ID NO: 192025 - RNA, 19 nt, Artificial Sequence
  Description of Artificial Sequence: Synthetic oligonucleotide
  Antisense strand to SEQ ID NO: 192024
gaauaucuacaacuaaugg

SEQ ID NO: 192026 - RNA, 19 nt, Artificial Sequence
  Description of Artificial Sequence: Synthetic oligonucleotide
  Sense strand starting at position 633 of SEQ ID NO: 2477
cuuuaugauccaggaauac

SEQ ID NO: 192027 - RNA, 19 nt, Artificial Sequence
  Description of Artificial Sequence: Synthetic oligonucleotide
  Antisense strand to SEQ ID NO: 192026
guauuccuggaucauaaag

SEQ ID NO: 192028 - RNA, 19 nt, Artificial Sequence
  Description of Artificial Sequence: Synthetic oligonucleotide
  Sense strand starting at position 688 of SEQ ID NO: 2477
caagacuguucuguauuag

SEQ ID NO: 192029 - RNA, 19 nt, Artificial Sequence
  Description of Artificial Sequence: Synthetic oligonucleotide
  Antisense strand to SEQ ID NO: 192028
cuaauacagaacagucuug

SEQ ID NO: 192030 - RNA, 19 nt, Artificial Sequence
  Description of Artificial Sequence: Synthetic oligonucleotide
  Sense strand starting at position 689 of SEQ ID NO: 2477
aagacuguucuguauuaga

SEQ ID NO: 192031 - RNA, 19 nt, Artificial Sequence
  Description of Artificial Sequence: Synthetic oligonucleotide
  Antisense strand to SEQ ID NO: 192030
ucuaauacagaacagucuu

SEQ ID NO: 192032 - RNA, 19 nt, Artificial Sequence
  Description of Artificial Sequence: Synthetic oligonucleotide
  Sense strand starting at position 798 of SEQ ID NO: 2477
agaucuacacagugaucua

SEQ ID NO: 192033 - RNA, 19 nt, Artificial Sequence
  Description of Artificial Sequence: Synthetic oligonucleotide
  Antisense strand to SEQ ID NO: 192032
uagaucacuguguagaucu

SEQ ID NO: 192034 - RNA, 19 nt, Artificial Sequence
  Description of Artificial Sequence: Synthetic oligonucleotide
  Sense strand starting at position 801 of SEQ ID NO: 2477
ucuacacagugaucuaaug

SEQ ID NO: 192035 - RNA, 19 nt, Artificial Sequence
  Description of Artificial Sequence: Synthetic oligonucleotide
  Antisense strand to SEQ ID NO: 192034
cauuagaucacuguguaga

SEQ ID NO: 192036 - RNA, 19 nt, Artificial Sequence
  Description of Artificial Sequence: Synthetic oligonucleotide
  Sense strand starting at position 809 of SEQ ID NO: 2477
gugaucuaauguguuuaaa

SEQ ID NO: 192037 - RNA, 19 nt, Artificial Sequence
  Description of Artificial Sequence: Synthetic oligonucleotide
  Antisense strand to SEQ ID NO: 192036
uuuaaacacauuagaucac

SEQ ID NO: 192038 - RNA, 19 nt, Artificial Sequence
  Description of Artificial Sequence: Synthetic oligonucleotide
  Sense strand starting at position 1029 of SEQ ID NO: 2477
augucuaagcuagauuaua

SEQ ID NO: 192039 - RNA, 19 nt, Artificial Sequence
  Description of Artificial Sequence: Synthetic oligonucleotide
  Antisense strand to SEQ ID NO: 192038
uauaaucuagcuuagacau

SEQ ID NO: 192040 - RNA, 19 nt, Artificial Sequence
  Description of Artificial Sequence: Synthetic oligonucleotide
  Sense strand starting at position 1153 of SEQ ID NO: 2477
agguuuccuuucuuugaga

SEQ ID NO: 192041 - RNA, 19 nt, Artificial Sequence
  Description of Artificial Sequence: Synthetic oligonucleotide
  Antisense strand to SEQ ID NO: 192040
ucucaaagaaaggaaaccu

SEQ ID NO: 192042 - RNA, 19 nt, Artificial Sequence
  Description of Artificial Sequence: Synthetic oligonucleotide
  Sense strand starting at position 1155 of SEQ ID NO: 2477
guuuccuuucuuugagaaa

SEQ ID NO: 192043 - RNA, 19 nt, Artificial Sequence
  Description of Artificial Sequence: Synthetic oligonucleotide
  Antisense strand to SEQ ID NO: 192042
uuucucaaagaaaggaaac

SEQ ID NO: 192044 - RNA, 19 nt, Artificial Sequence
  Description of Artificial Sequence: Synthetic oligonucleotide
  Sense strand starting at position 1167 of SEQ ID NO: 2477
ugagaaacuuuaguugucu

SEQ ID NO: 192045 - RNA, 19 nt, Artificial Sequence
  Description of Artificial Sequence: Synthetic oligonucleotide
  Antisense strand to SEQ ID NO: 192044
agacaacuaaaguuucuca

SEQ ID NO: 192046 - RNA, 19 nt, Artificial Sequence
  Description of Artificial Sequence: Synthetic oligonucleotide
  Sense strand starting at position 1168 of SEQ ID NO: 2477
gagaaacuuuaguugucua

SEQ ID NO: 192047 - RNA, 19 nt, Artificial Sequence
  Description of Artificial Sequence: Synthetic oligonucleotide
  Antisense strand to SEQ ID NO: 192046
uagacaacuaaaguuucuc

SEQ ID NO: 192048 - RNA, 19 nt, Artificial Sequence
  Description of Artificial Sequence: Synthetic oligonucleotide
  Sense strand starting at position 1335 of SEQ ID NO: 2477
ugugauacuucuguugaaa

SEQ ID NO: 192049 - RNA, 19 nt, Artificial Sequence
  Description of Artificial Sequence: Synthetic oligonucleotide
  Antisense strand to SEQ ID NO: 192048
uuucaacagaaguaucaca

SEQ ID NO: 192050 - RNA, 19 nt, Artificial Sequence
  Description of Artificial Sequence: Synthetic oligonucleotide
  Sense strand starting at position 1406 of SEQ ID NO: 2477
ugaguuugaugaucacaca

SEQ ID NO: 192051 - RNA, 19 nt, Artificial Sequence
  Description of Artificial Sequence: Synthetic oligonucleotide
  Antisense strand to SEQ ID NO: 192050
ugugugaucaucaaacuca

SEQ ID NO: 192052 - RNA, 19 nt, Artificial Sequence
  Description of Artificial Sequence: Synthetic oligonucleotide
  Sense strand starting at position 1516 of SEQ ID NO: 2477
caacaagaguugucuguag

SEQ ID NO: 192053 - RNA, 19 nt, Artificial Sequence
  Description of Artificial Sequence: Synthetic oligonucleotide
  Antisense strand to SEQ ID NO: 192052
cuacagacaacucuuguug

SEQ ID NO: 192054 - RNA, 19 nt, Artificial Sequence
  Description of Artificial Sequence: Synthetic oligonucleotide
  Sense strand starting at position 1518 of SEQ ID NO: 2477
acaagaguugucuguagaa

SEQ ID NO: 192055 - RNA, 19 nt, Artificial Sequence
  Description of Artificial Sequence: Synthetic oligonucleotide
  Antisense strand to SEQ ID NO: 192054
uucuacagacaacucuugu

SEQ ID NO: 192056 - RNA, 19 nt, Artificial Sequence
  Description of Artificial Sequence: Synthetic oligonucleotide
  Sense strand starting at position 1520 of SEQ ID NO: 2477
aagaguugucuguagaagu

SEQ ID NO: 192057 - RNA, 19 nt, Artificial Sequence
  Description of Artificial Sequence: Synthetic oligonucleotide
  Antisense strand to SEQ ID NO: 192056
acuucuacagacaacucuu

SEQ ID NO: 192058 - RNA, 19 nt, Artificial Sequence
  Description of Artificial Sequence: Synthetic oligonucleotide
  Sense strand starting at position 1572 of SEQ ID NO: 2477
aguuuccaaucacugagaa

SEQ ID NO: 192059 - RNA, 19 nt, Artificial Sequence
  Description of Artificial Sequence: Synthetic oligonucleotide
  Antisense strand to SEQ ID NO: 192058
uucucagugauuggaaacu

SEQ ID NO: 192060 - RNA, 19 nt, Artificial Sequence
  Description of Artificial Sequence: Synthetic oligonucleotide
  Sense strand starting at position 1573 of SEQ ID NO: 2477
guuuccaaucacugagaag

SEQ ID NO: 192061 - RNA, 19 nt, Artificial Sequence
  Description of Artificial Sequence: Synthetic oligonucleotide
  Antisense strand to SEQ ID NO: 192060
cuucucagugauuggaaac

SEQ ID NO: 192062 - RNA, 19 nt, Artificial Sequence
  Description of Artificial Sequence: Synthetic oligonucleotide
  Sense strand starting at position 1611 of SEQ ID NO: 2477
ucagguucacgggagaagu

SEQ ID NO: 192063 - RNA, 19 nt, Artificial Sequence
  Description of Artificial Sequence: Synthetic oligonucleotide
  Antisense strand to SEQ ID NO: 192062
acuucucccgugaaccuga

SEQ ID NO: 192064 - RNA, 19 nt, Artificial Sequence
  Description of Artificial Sequence: Synthetic oligonucleotide
  Sense strand starting at position 1653 of SEQ ID NO: 2477
cagaguaacuucccaggga

SEQ ID NO: 192065 - RNA, 19 nt, Artificial Sequence
  Description of Artificial Sequence: Synthetic oligonucleotide
  Antisense strand to SEQ ID NO: 192064
ucccugggaaguuacucug

SEQ ID NO: 192066 - RNA, 19 nt, Artificial Sequence
  Description of Artificial Sequence: Synthetic oligonucleotide
  Sense strand starting at position 1657 of SEQ ID NO: 2477
guaacuucccagggacaca

SEQ ID NO: 192067 - RNA, 19 nt, Artificial Sequence
  Description of Artificial Sequence: Synthetic oligonucleotide
  Antisense strand to SEQ ID NO: 192066
ugugucccugggaaguuac

SEQ ID NO: 192068 - RNA, 19 nt, Artificial Sequence
  Description of Artificial Sequence: Synthetic oligonucleotide
  Sense strand starting at position 2970 of SEQ ID NO: 2477
uuuccucuuguugaggaaa

SEQ ID NO: 192069 - RNA, 19 nt, Artificial Sequence
  Description of Artificial Sequence: Synthetic oligonucleotide
  Antisense strand to SEQ ID NO: 192068
uuuccucaacaagaggaaa

SEQ ID NO: 192070 - RNA, 19 nt, Artificial Sequence
  Description of Artificial Sequence: Synthetic oligonucleotide
  Sense strand starting at position 3003 of SEQ ID NO: 2477
caaucacaacuguggagua

SEQ ID NO: 192071 - RNA, 19 nt, Artificial Sequence
  Description of Artificial Sequence: Synthetic oligonucleotide
  Antisense strand to SEQ ID NO: 192070
uacuccacaguugugauug

SEQ ID NO: 192072 - RNA, 19 nt, Artificial Sequence
  Description of Artificial Sequence: Synthetic oligonucleotide
  Sense strand starting at position 3153 of SEQ ID NO: 2477
caguuugacucucugagga

SEQ ID NO: 192073 - RNA, 19 nt, Artificial Sequence
  Description of Artificial Sequence: Synthetic oligonucleotide
  Antisense strand to SEQ ID NO: 192072
uccucagagagucaaacug

SEQ ID NO: 192074 - RNA, 19 nt, Artificial Sequence
  Description of Artificial Sequence: Synthetic oligonucleotide
  Sense strand starting at position 3203 of SEQ ID NO: 2477
gguucuacgaauuaaaguu

SEQ ID NO: 192075 - RNA, 19 nt, Artificial Sequence
  Description of Artificial Sequence: Synthetic oligonucleotide
  Antisense strand to SEQ ID NO: 192074
aacuuuaauucguagaacc

SEQ ID NO: 192076 - RNA, 19 nt, Artificial Sequence
  Description of Artificial Sequence: Synthetic oligonucleotide
  Sense strand starting at position 3222 of SEQ ID NO: 2477
auauaagaagcaugugaga

SEQ ID NO: 192077 - RNA, 19 nt, Artificial Sequence
  Description of Artificial Sequence: Synthetic oligonucleotide
  Antisense strand to SEQ ID NO: 192076
ucucacaugcuucuuauau

SEQ ID NO: 192078 - RNA, 19 nt, Artificial Sequence
  Description of Artificial Sequence: Synthetic oligonucleotide
  Sense strand starting at position 3224 of SEQ ID NO: 2477
auaagaagcaugugagaug

SEQ ID NO: 192079 - RNA, 19 nt, Artificial Sequence
  Description of Artificial Sequence: Synthetic oligonucleotide
  Antisense strand to SEQ ID NO: 192078
caucucacaugcuucuuau

SEQ ID NO: 192080 - RNA, 19 nt, Artificial Sequence
  Description of Artificial Sequence: Synthetic oligonucleotide
  Sense strand starting at position 3334 of SEQ ID NO: 2477
cacugagugggcuauucuu

SEQ ID NO: 192081 - RNA, 19 nt, Artificial Sequence
  Description of Artificial Sequence: Synthetic oligonucleotide
  Antisense strand to SEQ ID NO: 192080
aagaauagcccacucagug

SEQ ID NO: 192082 - RNA, 19 nt, Artificial Sequence
  Description of Artificial Sequence: Synthetic oligonucleotide
  Sense strand starting at position 3380 of SEQ ID NO: 2477
cugcuaacauguuuaagau

SEQ ID NO: 192083 - RNA, 19 nt, Artificial Sequence
  Description of Artificial Sequence: Synthetic oligonucleotide
  Antisense strand to SEQ ID NO: 192082
aucuuaaacauguuagcag

SEQ ID NO: 192084 - RNA, 19 nt, Artificial Sequence
  Description of Artificial Sequence: Synthetic oligonucleotide
  Sense strand starting at position 3381 of SEQ ID NO: 2477
ugcuaacauguuuaagauu

SEQ ID NO: 192085 - RNA, 19 nt, Artificial Sequence
  Description of Artificial Sequence: Synthetic oligonucleotide
  Antisense strand to SEQ ID NO: 192084
aaucuuaaacauguuagca

SEQ ID NO: 192086 - RNA, 19 nt, Artificial Sequence
  Description of Artificial Sequence: Synthetic oligonucleotide
  Sense strand starting at position 3547 of SEQ ID NO: 2477
guuauugacauucggaaga

SEQ ID NO: 192087 - RNA, 19 nt, Artificial Sequence
  Description of Artificial Sequence: Synthetic oligonucleotide
  Antisense strand to SEQ ID NO: 192086
ucuuccgaaugucaauaac

SEQ ID NO: 192088 - RNA, 19 nt, Artificial Sequence
  Description of Artificial Sequence: Synthetic oligonucleotide
  Sense strand starting at position 3588 of SEQ ID NO: 2477
ugacaagaaugagaaacau

SEQ ID NO: 192089 - RNA, 19 nt, Artificial Sequence
  Description of Artificial Sequence: Synthetic oligonucleotide
  Antisense strand to SEQ ID NO: 192088
auguuucucauucuuguca

SEQ ID NO: 192090 - RNA, 19 nt, Artificial Sequence
  Description of Artificial Sequence: Synthetic oligonucleotide
  Sense strand starting at position 3606 of SEQ ID NO: 2477
uucucuuuccuauggaaug

SEQ ID NO: 192091 - RNA, 19 nt, Artificial Sequence
  Description of Artificial Sequence: Synthetic oligonucleotide
  Antisense strand to SEQ ID NO: 192090
cauuccauaggaaagagaa

SEQ ID NO: 192092 - RNA, 19 nt, Artificial Sequence
  Description of Artificial Sequence: Synthetic oligonucleotide
  Sense strand starting at position 3740 of SEQ ID NO: 2477
guucuaacuugcucgauuu

SEQ ID NO: 192093 - RNA, 19 nt, Artificial Sequence
  Description of Artificial Sequence: Synthetic oligonucleotide
  Antisense strand to SEQ ID NO: 192092
aaaucgagcaaguuagaac

SEQ ID NO: 192094 - RNA, 19 nt, Artificial Sequence
  Description of Artificial Sequence: Synthetic oligonucleotide
  Sense strand starting at position 3885 of SEQ ID NO: 2477
acguauauauuugcaguca

SEQ ID NO: 192095 - RNA, 19 nt, Artificial Sequence
  Description of Artificial Sequence: Synthetic oligonucleotide
  Antisense strand to SEQ ID NO: 192094
ugacugcaaauauauacgu

SEQ ID NO: 192096 - RNA, 19 nt, Artificial Sequence
  Description of Artificial Sequence: Synthetic oligonucleotide
  Sense strand starting at position 3925 of SEQ ID NO: 2477
gaucauuucguuugcagaa

SEQ ID NO: 192097 - RNA, 19 nt, Artificial Sequence
  Description of Artificial Sequence: Synthetic oligonucleotide
  Antisense strand to SEQ ID NO: 192096
uucugcaaacgaaaugauc

SEQ ID NO: 192098 - RNA, 19 nt, Artificial Sequence
  Description of Artificial Sequence: Synthetic oligonucleotide
  Sense strand starting at position 3926 of SEQ ID NO: 2477
aucauuucguuugcagaau

SEQ ID NO: 192099 - RNA, 19 nt, Artificial Sequence
  Description of Artificial Sequence: Synthetic oligonucleotide
  Antisense strand to SEQ ID NO: 192098
auucugcaaacgaaaugau

SEQ ID NO: 192100 - RNA, 19 nt, Artificial Sequence
  Description of Artificial Sequence: Synthetic oligonucleotide
  Sense strand starting at position 3955 of SEQ ID NO: 2477
uggacauucucaguuuacu

SEQ ID NO: 192101 - RNA, 19 nt, Artificial Sequence
  Description of Artificial Sequence: Synthetic oligonucleotide
  Antisense strand to SEQ ID NO: 192100
aguaaacugagaaugucca

SEQ ID NO: 192102 - RNA, 19 nt, Artificial Sequence
  Description of Artificial Sequence: Synthetic oligonucleotide
  Sense strand starting at position 51 of SEQ ID NO: 2476
agaucuacacagugaucua

SEQ ID NO: 192103 - RNA, 19 nt, Artificial Sequence
  Description of Artificial Sequence: Synthetic oligonucleotide
  Antisense strand to SEQ ID NO: 192102
uagaucacuguguagaucu

SEQ ID NO: 192104 - RNA, 19 nt, Artificial Sequence
  Description of Artificial Sequence: Synthetic oligonucleotide
  Sense strand starting at position 54 of SEQ ID NO: 2476
ucuacacagugaucuaaug

SEQ ID NO: 192105 - RNA, 19 nt, Artificial Sequence
  Description of Artificial Sequence: Synthetic oligonucleotide
  Antisense strand to SEQ ID NO: 192104
cauuagaucacuguguaga

SEQ ID NO: 192106 - RNA, 19 nt, Artificial Sequence
  Description of Artificial Sequence: Synthetic oligonucleotide
  Sense strand starting at position 282 of SEQ ID NO: 2476
augucuaagcuagauuaua

SEQ ID NO: 192107 - RNA, 19 nt, Artificial Sequence
  Description of Artificial Sequence: Synthetic oligonucleotide
  Antisense strand to SEQ ID NO: 192106
uauaaucuagcuuagacau

SEQ ID NO: 192108 - RNA, 19 nt, Artificial Sequence
  Description of Artificial Sequence: Synthetic oligonucleotide
  Sense strand starting at position 406 of SEQ ID NO: 2476
agguuuccuuucuuugaga

SEQ ID NO: 192109 - RNA, 19 nt, Artificial Sequence
  Description of Artificial Sequence: Synthetic oligonucleotide
  Antisense strand to SEQ ID NO: 192108
ucucaaagaaaggaaaccu

SEQ ID NO: 192110 - RNA, 19 nt, Artificial Sequence
  Description of Artificial Sequence: Synthetic oligonucleotide
  Sense strand starting at position 408 of SEQ ID NO: 2476
guuuccuuucuuugagaaa

SEQ ID NO: 192111 - RNA, 19 nt, Artificial Sequence
  Description of Artificial Sequence: Synthetic oligonucleotide
  Antisense strand to SEQ ID NO: 192110
uuucucaaagaaaggaaac

SEQ ID NO: 192112 - RNA, 19 nt, Artificial Sequence
  Description of Artificial Sequence: Synthetic oligonucleotide
  Sense strand starting at position 420 of SEQ ID NO: 2476
ugagaaacuuuaguugucu

SEQ ID NO: 192113 - RNA, 19 nt, Artificial Sequence
  Description of Artificial Sequence: Synthetic oligonucleotide
  Antisense strand to SEQ ID NO: 192112
agacaacuaaaguuucuca

SEQ ID NO: 192114 - RNA, 19 nt, Artificial Sequence
  Description of Artificial Sequence: Synthetic oligonucleotide
  Sense strand starting at position 421 of SEQ ID NO: 2476
gagaaacuuuaguugucua

SEQ ID NO: 192115 - RNA, 19 nt, Artificial Sequence
  Description of Artificial Sequence: Synthetic oligonucleotide
  Antisense strand to SEQ ID NO: 192114
uagacaacuaaaguuucuc

SEQ ID NO: 192116 - RNA, 19 nt, Artificial Sequence
  Description of Artificial Sequence: Synthetic oligonucleotide
  Sense strand starting at position 588 of SEQ ID NO: 2476
ugugauacuucuguugaaa

SEQ ID NO: 192117 - RNA, 19 nt, Artificial Sequence
  Description of Artificial Sequence: Synthetic oligonucleotide
  Antisense strand to SEQ ID NO: 192116
uuucaacagaaguaucaca

SEQ ID NO: 192118 - RNA, 19 nt, Artificial Sequence
  Description of Artificial Sequence: Synthetic oligonucleotide
  Sense strand starting at position 659 of SEQ ID NO: 2476
ugaguuugaugaucacaca

SEQ ID NO: 192119 - RNA, 19 nt, Artificial Sequence
  Description of Artificial Sequence: Synthetic oligonucleotide
  Antisense strand to SEQ ID NO: 192118
ugugugaucaucaaacuca

SEQ ID NO: 192120 - RNA, 19 nt, Artificial Sequence
  Description of Artificial Sequence: Synthetic oligonucleotide
  Sense strand starting at position 771 of SEQ ID NO: 2476
acaagaguugucuguagaa

SEQ ID NO: 192121 - RNA, 19 nt, Artificial Sequence
  Description of Artificial Sequence: Synthetic oligonucleotide
  Antisense strand to SEQ ID NO: 192120
uucuacagacaacucuugu

SEQ ID NO: 192122 - RNA, 19 nt, Artificial Sequence
  Description of Artificial Sequence: Synthetic oligonucleotide
  Sense strand starting at position 773 of SEQ ID NO: 2476
aagaguugucuguagaagu

SEQ ID NO: 192123 - RNA, 19 nt, Artificial Sequence
  Description of Artificial Sequence: Synthetic oligonucleotide
  Antisense strand to SEQ ID NO: 192122
acuucuacagacaacucuu

SEQ ID NO: 192124 - RNA, 19 nt, Artificial Sequence
  Description of Artificial Sequence: Synthetic oligonucleotide
  Sense strand starting at position 825 of SEQ ID NO: 2476
aguuuccaaucacugagaa

SEQ ID NO: 192125 - RNA, 19 nt, Artificial Sequence
  Description of Artificial Sequence: Synthetic oligonucleotide
  Antisense strand to SEQ ID NO: 192124
uucucagugauuggaaacu

SEQ ID NO: 192126 - RNA, 19 nt, Artificial Sequence
  Description of Artificial Sequence: Synthetic oligonucleotide
  Sense strand starting at position 826 of SEQ ID NO: 2476
guuuccaaucacugagaag

SEQ ID NO: 192127 - RNA, 19 nt, Artificial Sequence
  Description of Artificial Sequence: Synthetic oligonucleotide
  Antisense strand to SEQ ID NO: 192126
cuucucagugauuggaaac

SEQ ID NO: 192128 - RNA, 19 nt, Artificial Sequence
  Description of Artificial Sequence: Synthetic oligonucleotide
  Sense strand starting at position 864 of SEQ ID NO: 2476
ucagguucacgggagaagu

SEQ ID NO: 192129 - RNA, 19 nt, Artificial Sequence
  Description of Artificial Sequence: Synthetic oligonucleotide
  Antisense strand to SEQ ID NO: 192128
acuucucccgugaaccuga

SEQ ID NO: 192130 - RNA, 19 nt, Artificial Sequence
  Description of Artificial Sequence: Synthetic oligonucleotide
  Sense strand starting at position 906 of SEQ ID NO: 2476
cagaguaacuucccaggga

SEQ ID NO: 192131 - RNA, 19 nt, Artificial Sequence
  Description of Artificial Sequence: Synthetic oligonucleotide
  Antisense strand to SEQ ID NO: 192130
ucccugggaaguuacucug

SEQ ID NO: 192132 - RNA, 19 nt, Artificial Sequence
  Description of Artificial Sequence: Synthetic oligonucleotide
  Sense strand starting at position 910 of SEQ ID NO: 2476
guaacuucccagggacaca

SEQ ID NO: 192133 - RNA, 19 nt, Artificial Sequence
  Description of Artificial Sequence: Synthetic oligonucleotide
  Antisense strand to SEQ ID NO: 192132
ugugucccugggaaguuac

SEQ ID NO: 192134 - RNA, 19 nt, Artificial Sequence
  Description of Artificial Sequence: Synthetic oligonucleotide
  Sense strand starting at position 2223 of SEQ ID NO: 2476
uuuccucuuguugaggaaa

SEQ ID NO: 192135 - RNA, 19 nt, Artificial Sequence
  Description of Artificial Sequence: Synthetic oligonucleotide
  Antisense strand to SEQ ID NO: 192134
uuuccucaacaagaggaaa

SEQ ID NO: 192136 - RNA, 19 nt, Artificial Sequence
  Description of Artificial Sequence: Synthetic oligonucleotide
  Sense strand starting at position 2256 of SEQ ID NO: 2476
caaucacaacuguggagua

SEQ ID NO: 192137 - RNA, 19 nt, Artificial Sequence
  Description of Artificial Sequence: Synthetic oligonucleotide
  Antisense strand to SEQ ID NO: 192136
uacuccacaguugugauug

SEQ ID NO: 192138 - RNA, 19 nt, Artificial Sequence
  Description of Artificial Sequence: Synthetic oligonucleotide
  Sense strand starting at position 2406 of SEQ ID NO: 2476
caguuugacucucugagga

SEQ ID NO: 192139 - RNA, 19 nt, Artificial Sequence
  Description of Artificial Sequence: Synthetic oligonucleotide
  Antisense strand to SEQ ID NO: 192138
uccucagagagucaaacug

SEQ ID NO: 192140 - RNA, 19 nt, Artificial Sequence
  Description of Artificial Sequence: Synthetic oligonucleotide
  Sense strand starting at position 2456 of SEQ ID NO: 2476
gguucuacgaauuaaaguu

SEQ ID NO: 192141 - RNA, 19 nt, Artificial Sequence
  Description of Artificial Sequence: Synthetic oligonucleotide
  Antisense strand to SEQ ID NO: 192140
aacuuuaauucguagaacc

SEQ ID NO: 192142 - RNA, 19 nt, Artificial Sequence
  Description of Artificial Sequence: Synthetic oligonucleotide
  Sense strand starting at position 2475 of SEQ ID NO: 2476
auauaagaagcaugugaga

SEQ ID NO: 192143 - RNA, 19 nt, Artificial Sequence
  Description of Artificial Sequence: Synthetic oligonucleotide
  Antisense strand to SEQ ID NO: 192142
ucucacaugcuucuuauau

SEQ ID NO: 192144 - RNA, 19 nt, Artificial Sequence
  Description of Artificial Sequence: Synthetic oligonucleotide
  Sense strand starting at position 2477 of SEQ ID NO: 2476
auaagaagcaugugagaug

SEQ ID NO: 192145 - RNA, 19 nt, Artificial Sequence
  Description of Artificial Sequence: Synthetic oligonucleotide
  Antisense strand to SEQ ID NO: 192144
caucucacaugcuucuuau

SEQ ID NO: 192146 - RNA, 19 nt, Artificial Sequence
  Description of Artificial Sequence: Synthetic oligonucleotide
  Sense strand starting at position 2587 of SEQ ID NO: 2476
cacugagugggcuauucuu

SEQ ID NO: 192147 - RNA, 19 nt, Artificial Sequence
  Description of Artificial Sequence: Synthetic oligonucleotide
  Antisense strand to SEQ ID NO: 192146
aagaauagcccacucagug

SEQ ID NO: 192148 - RNA, 19 nt, Artificial Sequence
  Description of Artificial Sequence: Synthetic oligonucleotide
  Sense strand starting at position 2634 of SEQ ID NO: 2476
ugcuaacauguuuaagauu

SEQ ID NO: 192149 - RNA, 19 nt, Artificial Sequence
  Description of Artificial Sequence: Synthetic oligonucleotide
  Antisense strand to SEQ ID NO: 192148
aaucuuaaacauguuagca

SEQ ID NO: 192150 - RNA, 19 nt, Artificial Sequence
  Description of Artificial Sequence: Synthetic oligonucleotide
  Sense strand starting at position 2800 of SEQ ID NO: 2476
guuauugacauucggaaga

SEQ ID NO: 192151 - RNA, 19 nt, Artificial Sequence
  Description of Artificial Sequence: Synthetic oligonucleotide
  Antisense strand to SEQ ID NO: 192150
ucuuccgaaugucaauaac

SEQ ID NO: 192152 - RNA, 19 nt, Artificial Sequence
  Description of Artificial Sequence: Synthetic oligonucleotide
  Sense strand starting at position 2841 of SEQ ID NO: 2476
ugacaagaaugagaaacau

SEQ ID NO: 192153 - RNA, 19 nt, Artificial Sequence
  Description of Artificial Sequence: Synthetic oligonucleotide
  Antisense strand to SEQ ID NO: 192152
auguuucucauucuuguca

SEQ ID NO: 192154 - RNA, 19 nt, Artificial Sequence
  Description of Artificial Sequence: Synthetic oligonucleotide
  Sense strand starting at position 2859 of SEQ ID NO: 2476
uucucuuuccuauggaaug

SEQ ID NO: 192155 - RNA, 19 nt, Artificial Sequence
  Description of Artificial Sequence: Synthetic oligonucleotide
  Antisense strand to SEQ ID NO: 192154
cauuccauaggaaagagaa

SEQ ID NO: 192156 - RNA, 19 nt, Artificial Sequence
  Description of Artificial Sequence: Synthetic oligonucleotide
  Sense strand starting at position 2993 of SEQ ID NO: 2476
guucuaacuugcucgauuu

SEQ ID NO: 192157 - RNA, 19 nt, Artificial Sequence
  Description of Artificial Sequence: Synthetic oligonucleotide
  Antisense strand to SEQ ID NO: 192156
aaaucgagcaaguuagaac

SEQ ID NO: 192158 - RNA, 19 nt, Artificial Sequence
  Description of Artificial Sequence: Synthetic oligonucleotide
  Sense strand starting at position 3138 of SEQ ID NO: 2476
acguauauauuugcaguca

SEQ ID NO: 192159 - RNA, 19 nt, Artificial Sequence
  Description of Artificial Sequence: Synthetic oligonucleotide
  Antisense strand to SEQ ID NO: 192158
ugacugcaaauauauacgu

SEQ ID NO: 192160 - RNA, 19 nt, Artificial Sequence
  Description of Artificial Sequence: Synthetic oligonucleotide
  Sense strand starting at position 3178 of SEQ ID NO: 2476
gaucauuucguuugcagaa

SEQ ID NO: 192161 - RNA, 19 nt, Artificial Sequence
  Description of Artificial Sequence: Synthetic oligonucleotide
  Antisense strand to SEQ ID NO: 192160
uucugcaaacgaaaugauc

SEQ ID NO: 192162 - RNA, 19 nt, Artificial Sequence
  Description of Artificial Sequence: Synthetic oligonucleotide
  Sense strand starting at position 3179 of SEQ ID NO: 2476
aucauuucguuugcagaau

SEQ ID NO: 192163 - RNA, 19 nt, Artificial Sequence
  Description of Artificial Sequence: Synthetic oligonucleotide
  Antisense strand to SEQ ID NO: 192162
auucugcaaacgaaaugau

SEQ ID NO: 192164 - RNA, 19 nt, Artificial Sequence
  Description of Artificial Sequence: Synthetic oligonucleotide
  Sense strand starting at position 3208 of SEQ ID NO: 2476
uggacauucucaguuuacu

SEQ ID NO: 192165 - RNA, 19 nt, Artificial Sequence
  Description of Artificial Sequence: Synthetic oligonucleotide
  Antisense strand to SEQ ID NO: 192164
aguaaacugagaaugucca

SEQ ID NO: 192166 - RNA, 19 nt, Artificial Sequence
  Description of Artificial Sequence: Synthetic oligonucleotide
  Sense strand starting at position 3308 of SEQ ID NO: 2476
gucauuaauguauaccacu

SEQ ID NO: 192167 - RNA, 19 nt, Artificial Sequence
  Description of Artificial Sequence: Synthetic oligonucleotide
  Antisense strand to SEQ ID NO: 192166
agugguauacauuaaugac

SEQ ID NO: 192168 - RNA, 19 nt, Artificial Sequence
  Description of Artificial Sequence: Synthetic oligonucleotide
  Sense strand starting at position 3325 of SEQ ID NO: 2476
cugacuaaugugcagacaa

SEQ ID NO: 192169 - RNA, 19 nt, Artificial Sequence
  Description of Artificial Sequence: Synthetic oligonucleotide
  Antisense strand to SEQ ID NO: 192168
uugucugcacauuagucag

SEQ ID NO: 192170 - RNA, 19 nt, Artificial Sequence
  Description of Artificial Sequence: Synthetic oligonucleotide
  Sense strand starting at position 3384 of SEQ ID NO: 2476
ucaggaacuugucucacua

SEQ ID NO: 192171 - RNA, 19 nt, Artificial Sequence
  Description of Artificial Sequence: Synthetic oligonucleotide
  Antisense strand to SEQ ID NO: 192170
uagugagacaaguuccuga

SEQ ID NO: 192172 - RNA, 19 nt, Artificial Sequence
  Description of Artificial Sequence: Synthetic oligonucleotide
  Sense strand starting at position 3441 of SEQ ID NO: 2476
uguaauacuguggaaguca

SEQ ID NO: 192173 - RNA, 19 nt, Artificial Sequence
  Description of Artificial Sequence: Synthetic oligonucleotide
  Antisense strand to SEQ ID NO: 192172
ugacuuccacaguauuaca

SEQ ID NO: 192174 - RNA, 19 nt, Artificial Sequence
  Description of Artificial Sequence: Synthetic oligonucleotide
  Sense strand starting at position 3500 of SEQ ID NO: 2476
aguaguaauaguugaugaa

SEQ ID NO: 192175 - RNA, 19 nt, Artificial Sequence
  Description of Artificial Sequence: Synthetic oligonucleotide
  Antisense strand to SEQ ID NO: 192174
uucaucaacuauuacuacu

SEQ ID NO: 192176 - RNA, 19 nt, Artificial Sequence
  Description of Artificial Sequence: Synthetic oligonucleotide
  Sense strand starting at position 3757 of SEQ ID NO: 2476
ucagaaacacuuggugaua

SEQ ID NO: 192177 - RNA, 19 nt, Artificial Sequence
  Description of Artificial Sequence: Synthetic oligonucleotide
  Antisense strand to SEQ ID NO: 192176
uaucaccaaguguuucuga

SEQ ID NO: 192178 - RNA, 19 nt, Artificial Sequence
  Description of Artificial Sequence: Synthetic oligonucleotide
  Sense strand starting at position 3810 of SEQ ID NO: 2476
ggaugauaguucguggaac

SEQ ID NO: 192179 - RNA, 19 nt, Artificial Sequence
  Description of Artificial Sequence: Synthetic oligonucleotide
  Antisense strand to SEQ ID NO: 192178
guuccacgaacuaucaucc

SEQ ID NO: 192180 - RNA, 19 nt, Artificial Sequence
  Description of Artificial Sequence: Synthetic oligonucleotide
  Sense strand starting at position 3812 of SEQ ID NO: 2476
augauaguucguggaacaa

SEQ ID NO: 192181 - RNA, 19 nt, Artificial Sequence
  Description of Artificial Sequence: Synthetic oligonucleotide
  Antisense strand to SEQ ID NO: 192180
uuguuccacgaacuaucau

SEQ ID NO: 192182 - RNA, 19 nt, Artificial Sequence
  Description of Artificial Sequence: Synthetic oligonucleotide
  Sense strand starting at position 150 of SEQ ID NO: 2478
ccaggaaacugagcuuuau

SEQ ID NO: 192183 - RNA, 19 nt, Artificial Sequence
  Description of Artificial Sequence: Synthetic oligonucleotide
  Antisense strand to SEQ ID NO: 192182
auaaagcucaguuuccugg

SEQ ID NO: 192184 - RNA, 19 nt, Artificial Sequence
  Description of Artificial Sequence: Synthetic oligonucleotide
  Sense strand starting at position 158 of SEQ ID NO: 2478
cugagcuuuauugagguua

SEQ ID NO: 192185 - RNA, 19 nt, Artificial Sequence
  Description of Artificial Sequence: Synthetic oligonucleotide
  Antisense strand to SEQ ID NO: 192184
uaaccucaauaaagcucag

SEQ ID NO: 192186 - RNA, 19 nt, Artificial Sequence
  Description of Artificial Sequence: Synthetic oligonucleotide
  Sense strand starting at position 524 of SEQ ID NO: 2478
uguggugcucaagaguauu

SEQ ID NO: 192187 - RNA, 19 nt, Artificial Sequence
  Description of Artificial Sequence: Synthetic oligonucleotide
  Antisense strand to SEQ ID NO: 192186
aauacucuugagcaccaca

SEQ ID NO: 192188 - RNA, 19 nt, Artificial Sequence
  Description of Artificial Sequence: Synthetic oligonucleotide
  Sense strand starting at position 527 of SEQ ID NO: 2478
ggugcucaagaguauuagu

SEQ ID NO: 192189 - RNA, 19 nt, Artificial Sequence
  Description of Artificial Sequence: Synthetic oligonucleotide
  Antisense strand to SEQ ID NO: 192188
acuaauacucuugagcacc

SEQ ID NO: 192190 - RNA, 19 nt, Artificial Sequence
  Description of Artificial Sequence: Synthetic oligonucleotide
  Sense strand starting at position 536 of SEQ ID NO: 2478
gaguauuagucacugagua

SEQ ID NO: 192191 - RNA, 19 nt, Artificial Sequence
  Description of Artificial Sequence: Synthetic oligonucleotide
  Antisense strand to SEQ ID NO: 192190
uacucagugacuaauacuc

SEQ ID NO: 192192 - RNA, 19 nt, Artificial Sequence
  Description of Artificial Sequence: Synthetic oligonucleotide
  Sense strand starting at position 537 of SEQ ID NO: 2478
aguauuagucacugaguau

SEQ ID NO: 192193 - RNA, 19 nt, Artificial Sequence
  Description of Artificial Sequence: Synthetic oligonucleotide
  Antisense strand to SEQ ID NO: 192192
auacucagugacuaauacu

SEQ ID NO: 192194 - RNA, 19 nt, Artificial Sequence
  Description of Artificial Sequence: Synthetic oligonucleotide
  Sense strand starting at position 538 of SEQ ID NO: 2478
guauuagucacugaguauu

SEQ ID NO: 192195 - RNA, 19 nt, Artificial Sequence
  Description of Artificial Sequence: Synthetic oligonucleotide
  Antisense strand to SEQ ID NO: 192194
aauacucagugacuaauac

SEQ ID NO: 192196 - RNA, 19 nt, Artificial Sequence
  Description of Artificial Sequence: Synthetic oligonucleotide
  Sense strand starting at position 602 of SEQ ID NO: 2478
gccaucucagacuggauaa

SEQ ID NO: 192197 - RNA, 19 nt, Artificial Sequence
  Description of Artificial Sequence: Synthetic oligonucleotide
  Antisense strand to SEQ ID NO: 192196
uuauccagucugagauggc

SEQ ID NO: 192198 - RNA, 19 nt, Artificial Sequence
  Description of Artificial Sequence: Synthetic oligonucleotide
  Sense strand starting at position 632 of SEQ ID NO: 2478
uuuguauuuggcugguaca

SEQ ID NO: 192199 - RNA, 19 nt, Artificial Sequence
  Description of Artificial Sequence: Synthetic oligonucleotide
  Antisense strand to SEQ ID NO: 192198
uguaccagccaaauacaaa

SEQ ID NO: 192200 - RNA, 19 nt, Artificial Sequence
  Description of Artificial Sequence: Synthetic oligonucleotide
  Sense strand starting at position 688 of SEQ ID NO: 2478
ugguuucugccugaucaug

SEQ ID NO: 192201 - RNA, 19 nt, Artificial Sequence
  Description of Artificial Sequence: Synthetic oligonucleotide
  Antisense strand to SEQ ID NO: 192200
caugaucaggcagaaacca

SEQ ID NO: 192202 - RNA, 19 nt, Artificial Sequence
  Description of Artificial Sequence: Synthetic oligonucleotide
  Sense strand starting at position 760 of SEQ ID NO: 2478
uucugcucuggauacagaa

SEQ ID NO: 192203 - RNA, 19 nt, Artificial Sequence
  Description of Artificial Sequence: Synthetic oligonucleotide
  Antisense strand to SEQ ID NO: 192202
uucuguauccagagcagaa

SEQ ID NO: 192204 - RNA, 19 nt, Artificial Sequence
  Description of Artificial Sequence: Synthetic oligonucleotide
  Sense strand starting at position 929 of SEQ ID NO: 2478
ggagcccagaucugacaua

SEQ ID NO: 192205 - RNA, 19 nt, Artificial Sequence
  Description of Artificial Sequence: Synthetic oligonucleotide
  Antisense strand to SEQ ID NO: 192204
uaugucagaucugggcucc

SEQ ID NO: 192206 - RNA, 19 nt, Artificial Sequence
  Description of Artificial Sequence: Synthetic oligonucleotide
  Sense strand starting at position 962 of SEQ ID NO: 2478
gaucuuagggagugaaugu

SEQ ID NO: 192207 - RNA, 19 nt, Artificial Sequence
  Description of Artificial Sequence: Synthetic oligonucleotide
  Antisense strand to SEQ ID NO: 192206
acauucacucccuaagauc

SEQ ID NO: 192208 - RNA, 19 nt, Artificial Sequence
  Description of Artificial Sequence: Synthetic oligonucleotide
  Sense strand starting at position 1087 of SEQ ID NO: 2478
cuggauuuguaugaaacac

SEQ ID NO: 192209 - RNA, 19 nt, Artificial Sequence
  Description of Artificial Sequence: Synthetic oligonucleotide
  Antisense strand to SEQ ID NO: 192208
guguuucauacaaauccag

SEQ ID NO: 192210 - RNA, 19 nt, Artificial Sequence
  Description of Artificial Sequence: Synthetic oligonucleotide
  Sense strand starting at position 1479 of SEQ ID NO: 2478
cuggcaaagucugcacaaa

SEQ ID NO: 192211 - RNA, 19 nt, Artificial Sequence
  Description of Artificial Sequence: Synthetic oligonucleotide
  Antisense strand to SEQ ID NO: 192210
uuugugcagacuuugccag

SEQ ID NO: 192212 - RNA, 19 nt, Artificial Sequence
  Description of Artificial Sequence: Synthetic oligonucleotide
  Sense strand starting at position 1480 of SEQ ID NO: 2478
uggcaaagucugcacaaau

SEQ ID NO: 192213 - RNA, 19 nt, Artificial Sequence
  Description of Artificial Sequence: Synthetic oligonucleotide
  Antisense strand to SEQ ID NO: 192212
auuugugcagacuuugcca

SEQ ID NO: 192214 - RNA, 19 nt, Artificial Sequence
  Description of Artificial Sequence: Synthetic oligonucleotide
  Sense strand starting at position 1493 of SEQ ID NO: 2478
acaaauauaccuggucuga

SEQ ID NO: 192215 - RNA, 19 nt, Artificial Sequence
  Description of Artificial Sequence: Synthetic oligonucleotide
  Antisense strand to SEQ ID NO: 192214
ucagaccagguauauuugu

SEQ ID NO: 192216 - RNA, 19 nt, Artificial Sequence
  Description of Artificial Sequence: Synthetic oligonucleotide
  Sense strand starting at position 1497 of SEQ ID NO: 2478
auauaccuggucugaaaga

SEQ ID NO: 192217 - RNA, 19 nt, Artificial Sequence
  Description of Artificial Sequence: Synthetic oligonucleotide
  Antisense strand to SEQ ID NO: 192216
ucuuucagaccagguauau

SEQ ID NO: 192218 - RNA, 19 nt, Artificial Sequence
  Description of Artificial Sequence: Synthetic oligonucleotide
  Sense strand starting at position 1738 of SEQ ID NO: 2478
ucauucuuuccagauugua

SEQ ID NO: 192219 - RNA, 19 nt, Artificial Sequence
  Description of Artificial Sequence: Synthetic oligonucleotide
  Antisense strand to SEQ ID NO: 192218
uacaaucuggaaagaauga

SEQ ID NO: 192220 - RNA, 19 nt, Artificial Sequence
  Description of Artificial Sequence: Synthetic oligonucleotide
  Sense strand starting at position 1846 of SEQ ID NO: 2478
gguugcuuaccugggaaau

SEQ ID NO: 192221 - RNA, 19 nt, Artificial Sequence
  Description of Artificial Sequence: Synthetic oligonucleotide
  Antisense strand to SEQ ID NO: 192220
auuucccagguaagcaacc

SEQ ID NO: 192222 - RNA, 19 nt, Artificial Sequence
  Description of Artificial Sequence: Synthetic oligonucleotide
  Sense strand starting at position 1847 of SEQ ID NO: 2478
guugcuuaccugggaaaug

SEQ ID NO: 192223 - RNA, 19 nt, Artificial Sequence
  Description of Artificial Sequence: Synthetic oligonucleotide
  Antisense strand to SEQ ID NO: 192222
cauuucccagguaagcaac

SEQ ID NO: 192224 - RNA, 19 nt, Artificial Sequence
  Description of Artificial Sequence: Synthetic oligonucleotide
  Sense strand starting at position 2383 of SEQ ID NO: 2478
aggacugugaguugcagaa

SEQ ID NO: 192225 - RNA, 19 nt, Artificial Sequence
  Description of Artificial Sequence: Synthetic oligonucleotide
  Antisense strand to SEQ ID NO: 192224
uucugcaacucacaguccu

SEQ ID NO: 192226 - RNA, 19 nt, Artificial Sequence
  Description of Artificial Sequence: Synthetic oligonucleotide
  Sense strand starting at position 2387 of SEQ ID NO: 2478
cugugaguugcagaacugu

SEQ ID NO: 192227 - RNA, 19 nt, Artificial Sequence
  Description of Artificial Sequence: Synthetic oligonucleotide
  Antisense strand to SEQ ID NO: 192226
acaguucugcaacucacag

SEQ ID NO: 192228 - RNA, 19 nt, Artificial Sequence
  Description of Artificial Sequence: Synthetic oligonucleotide
  Sense strand starting at position 2420 of SEQ ID NO: 2478
cccagaauucuuuguagca

SEQ ID NO: 192229 - RNA, 19 nt, Artificial Sequence
  Description of Artificial Sequence: Synthetic oligonucleotide
  Antisense strand to SEQ ID NO: 192228
ugcuacaaagaauucuggg

SEQ ID NO: 192230 - RNA, 19 nt, Artificial Sequence
  Description of Artificial Sequence: Synthetic oligonucleotide
  Sense strand starting at position 2421 of SEQ ID NO: 2478
ccagaauucuuuguagcag

SEQ ID NO: 192231 - RNA, 19 nt, Artificial Sequence
  Description of Artificial Sequence: Synthetic oligonucleotide
  Antisense strand to SEQ ID NO: 192230
cugcuacaaagaauucugg

SEQ ID NO: 192232 - RNA, 19 nt, Artificial Sequence
  Description of Artificial Sequence: Synthetic oligonucleotide
  Sense strand starting at position 2507 of SEQ ID NO: 2478
cugucuuaugcauacagau

SEQ ID NO: 192233 - RNA, 19 nt, Artificial Sequence
  Description of Artificial Sequence: Synthetic oligonucleotide
  Antisense strand to SEQ ID NO: 192232
aucuguaugcauaagacag

SEQ ID NO: 192234 - RNA, 19 nt, Artificial Sequence
  Description of Artificial Sequence: Synthetic oligonucleotide
  Sense strand starting at position 2560 of SEQ ID NO: 2478
cauugauucccaugcaggu

SEQ ID NO: 192235 - RNA, 19 nt, Artificial Sequence
  Description of Artificial Sequence: Synthetic oligonucleotide
  Antisense strand to SEQ ID NO: 192234
accugcaugggaaucaaug

SEQ ID NO: 192236 - RNA, 19 nt, Artificial Sequence
  Description of Artificial Sequence: Synthetic oligonucleotide
  Sense strand starting at position 2607 of SEQ ID NO: 2478
guagaagacucaguacauu

SEQ ID NO: 192237 - RNA, 19 nt, Artificial Sequence
  Description of Artificial Sequence: Synthetic oligonucleotide
  Antisense strand to SEQ ID NO: 192236
aauguacugagucuucuac

SEQ ID NO: 192238 - RNA, 19 nt, Artificial Sequence
  Description of Artificial Sequence: Synthetic oligonucleotide
  Sense strand starting at position 2654 of SEQ ID NO: 2478
ugcauuuauuaggaugaac

SEQ ID NO: 192239 - RNA, 19 nt, Artificial Sequence
  Description of Artificial Sequence: Synthetic oligonucleotide
  Antisense strand to SEQ ID NO: 192238
guucauccuaauaaaugca

SEQ ID NO: 192240 - RNA, 19 nt, Artificial Sequence
  Description of Artificial Sequence: Synthetic oligonucleotide
  Sense strand starting at position 2690 of SEQ ID NO: 2478
aggugauggaagugugguu

SEQ ID NO: 192241 - RNA, 19 nt, Artificial Sequence
  Description of Artificial Sequence: Synthetic oligonucleotide
  Antisense strand to SEQ ID NO: 192240
aaccacacuuccaucaccu

SEQ ID NO: 192242 - RNA, 19 nt, Artificial Sequence
  Description of Artificial Sequence: Synthetic oligonucleotide
  Sense strand starting at position 2717 of SEQ ID NO: 2478
gucacuagguggucacaaa

SEQ ID NO: 192243 - RNA, 19 nt, Artificial Sequence
  Description of Artificial Sequence: Synthetic oligonucleotide
  Antisense strand to SEQ ID NO: 192242
uuugugaccaccuagugac

SEQ ID NO: 192244 - RNA, 19 nt, Artificial Sequence
  Description of Artificial Sequence: Synthetic oligonucleotide
  Sense strand starting at position 2858 of SEQ ID NO: 2478
aggauacuauugccaucau

SEQ ID NO: 192245 - RNA, 19 nt, Artificial Sequence
  Description of Artificial Sequence: Synthetic oligonucleotide
  Antisense strand to SEQ ID NO: 192244
augauggcaauaguauccu

SEQ ID NO: 192246 - RNA, 19 nt, Artificial Sequence
  Description of Artificial Sequence: Synthetic oligonucleotide
  Sense strand starting at position 2926 of SEQ ID NO: 2478
cgguguuuggaacauagca

SEQ ID NO: 192247 - RNA, 19 nt, Artificial Sequence
  Description of Artificial Sequence: Synthetic oligonucleotide
  Antisense strand to SEQ ID NO: 192246
ugcuauguuccaaacaccg

SEQ ID NO: 192248 - RNA, 19 nt, Artificial Sequence
  Description of Artificial Sequence: Synthetic oligonucleotide
  Sense strand starting at position 3431 of SEQ ID NO: 2478
ugaauagugcggcauugaa

SEQ ID NO: 192249 - RNA, 19 nt, Artificial Sequence
  Description of Artificial Sequence: Synthetic oligonucleotide
  Antisense strand to SEQ ID NO: 192248
uucaaugccgcacuauuca

SEQ ID NO: 192250 - RNA, 19 nt, Artificial Sequence
  Description of Artificial Sequence: Synthetic oligonucleotide
  Sense strand starting at position 3507 of SEQ ID NO: 2478
caguaaugggauuguggau

SEQ ID NO: 192251 - RNA, 19 nt, Artificial Sequence
  Description of Artificial Sequence: Synthetic oligonucleotide
  Antisense strand to SEQ ID NO: 192250
auccacaaucccauuacug

SEQ ID NO: 192252 - RNA, 19 nt, Artificial Sequence
  Description of Artificial Sequence: Synthetic oligonucleotide
  Sense strand starting at position 3621 of SEQ ID NO: 2478
guugcuauuucuucgcaac

SEQ ID NO: 192253 - RNA, 19 nt, Artificial Sequence
  Description of Artificial Sequence: Synthetic oligonucleotide
  Antisense strand to SEQ ID NO: 192252
guugcgaagaaauagcaac

SEQ ID NO: 192254 - RNA, 19 nt, Artificial Sequence
  Description of Artificial Sequence: Synthetic oligonucleotide
  Sense strand starting at position 3623 of SEQ ID NO: 2478
ugcuauuucuucgcaaccu

SEQ ID NO: 192255 - RNA, 19 nt, Artificial Sequence
  Description of Artificial Sequence: Synthetic oligonucleotide
  Antisense strand to SEQ ID NO: 192254
agguugcgaagaaauagca

SEQ ID NO: 192256 - RNA, 19 nt, Artificial Sequence
  Description of Artificial Sequence: Synthetic oligonucleotide
  Sense strand starting at position 3853 of SEQ ID NO: 2478
uucguaaauuugcuuaagu

SEQ ID NO: 192257 - RNA, 19 nt, Artificial Sequence
  Description of Artificial Sequence: Synthetic oligonucleotide
  Antisense strand to SEQ ID NO: 192256
acuuaagcaaauuuacgaa

SEQ ID NO: 192258 - RNA, 19 nt, Artificial Sequence
  Description of Artificial Sequence: Synthetic oligonucleotide
  Sense strand starting at position 3854 of SEQ ID NO: 2478
ucguaaauuugcuuaaguu

SEQ ID NO: 192259 - RNA, 19 nt, Artificial Sequence
  Description of Artificial Sequence: Synthetic oligonucleotide
  Antisense strand to SEQ ID NO: 192258
aacuuaagcaaauuuacga

SEQ ID NO: 192260 - RNA, 19 nt, Artificial Sequence
  Description of Artificial Sequence: Synthetic oligonucleotide
  Sense strand starting at position 3855 of SEQ ID NO: 2478
cguaaauuugcuuaaguuc

SEQ ID NO: 192261 - RNA, 19 nt, Artificial Sequence
  Description of Artificial Sequence: Synthetic oligonucleotide
  Antisense strand to SEQ ID NO: 192260
gaacuuaagcaaauuuacg

SEQ ID NO: 192262 - RNA, 19 nt, Artificial Sequence
  Description of Artificial Sequence: Synthetic oligonucleotide
  Sense strand starting at position 22 of SEQ ID NO: 2479
cuucguacauuucuaguau

SEQ ID NO: 192263 - RNA, 19 nt, Artificial Sequence
  Description of Artificial Sequence: Synthetic oligonucleotide
  Antisense strand to SEQ ID NO: 192262
auacuagaaauguacgaag

SEQ ID NO: 192264 - RNA, 19 nt, Artificial Sequence
  Description of Artificial Sequence: Synthetic oligonucleotide
  Sense strand starting at position 57 of SEQ ID NO: 2479
cuaccugaugugcauaagu

SEQ ID NO: 192265 - RNA, 19 nt, Artificial Sequence
  Description of Artificial Sequence: Synthetic oligonucleotide
  Antisense strand to SEQ ID NO: 192264
acuuaugcacaucagguag

SEQ ID NO: 192266 - RNA, 19 nt, Artificial Sequence
  Description of Artificial Sequence: Synthetic oligonucleotide
  Sense strand starting at position 59 of SEQ ID NO: 2479
accugaugugcauaaguga

SEQ ID NO: 192267 - RNA, 19 nt, Artificial Sequence
  Description of Artificial Sequence: Synthetic oligonucleotide
  Antisense strand to SEQ ID NO: 192266
ucacuuaugcacaucaggu

SEQ ID NO: 192268 - RNA, 19 nt, Artificial Sequence
  Description of Artificial Sequence: Synthetic oligonucleotide
  Sense strand starting at position 62 of SEQ ID NO: 2479
ugaugugcauaagugaguu

SEQ ID NO: 192269 - RNA, 19 nt, Artificial Sequence
  Description of Artificial Sequence: Synthetic oligonucleotide
  Antisense strand to SEQ ID NO: 192268
aacucacuuaugcacauca

SEQ ID NO: 192270 - RNA, 19 nt, Artificial Sequence
  Description of Artificial Sequence: Synthetic oligonucleotide
  Sense strand starting at position 64 of SEQ ID NO: 2479
augugcauaagugaguuaa

SEQ ID NO: 192271 - RNA, 19 nt, Artificial Sequence
  Description of Artificial Sequence: Synthetic oligonucleotide
  Antisense strand to SEQ ID NO: 192270
uuaacucacuuaugcacau

SEQ ID NO: 192272 - RNA, 19 nt, Artificial Sequence
  Description of Artificial Sequence: Synthetic oligonucleotide
  Sense strand starting at position 66 of SEQ ID NO: 2479
gugcauaagugaguuaaua

SEQ ID NO: 192273 - RNA, 19 nt, Artificial Sequence
  Description of Artificial Sequence: Synthetic oligonucleotide
  Antisense strand to SEQ ID NO: 192272
uauuaacucacuuaugcac

SEQ ID NO: 192274 - RNA, 19 nt, Artificial Sequence
  Description of Artificial Sequence: Synthetic oligonucleotide
  Sense strand starting at position 209 of SEQ ID NO: 2479
aucuaaaugguuuaugcaa

SEQ ID NO: 192275 - RNA, 19 nt, Artificial Sequence
  Description of Artificial Sequence: Synthetic oligonucleotide
  Antisense strand to SEQ ID NO: 192274
uugcauaaaccauuuagau

SEQ ID NO: 192276 - RNA, 19 nt, Artificial Sequence
  Description of Artificial Sequence: Synthetic oligonucleotide
  Sense strand starting at position 216 of SEQ ID NO: 2479
ugguuuaugcaauauaguu

SEQ ID NO: 192277 - RNA, 19 nt, Artificial Sequence
  Description of Artificial Sequence: Synthetic oligonucleotide
  Antisense strand to SEQ ID NO: 192276
aacuauauugcauaaacca

SEQ ID NO: 192278 - RNA, 19 nt, Artificial Sequence
  Description of Artificial Sequence: Synthetic oligonucleotide
  Sense strand starting at position 248 of SEQ ID NO: 2479
cugcuaaaggucuauuauu

SEQ ID NO: 192279 - RNA, 19 nt, Artificial Sequence
  Description of Artificial Sequence: Synthetic oligonucleotide
  Antisense strand to SEQ ID NO: 192278
aauaauagaccuuuagcag

SEQ ID NO: 192280 - RNA, 19 nt, Artificial Sequence
  Description of Artificial Sequence: Synthetic oligonucleotide
  Sense strand starting at position 276 of SEQ ID NO: 2479
ugcaguggugcuuagggaa

SEQ ID NO: 192281 - RNA, 19 nt, Artificial Sequence
  Description of Artificial Sequence: Synthetic oligonucleotide
  Antisense strand to SEQ ID NO: 192280
uucccuaagcaccacugca

SEQ ID NO: 192282 - RNA, 19 nt, Artificial Sequence
  Description of Artificial Sequence: Synthetic oligonucleotide
  Sense strand starting at position 313 of SEQ ID NO: 2479
ucugaacacuaaguguuua

SEQ ID NO: 192283 - RNA, 19 nt, Artificial Sequence
  Description of Artificial Sequence: Synthetic oligonucleotide
  Antisense strand to SEQ ID NO: 192282
uaaacacuuaguguucaga

SEQ ID NO: 192284 - RNA, 19 nt, Artificial Sequence
  Description of Artificial Sequence: Synthetic oligonucleotide
  Sense strand starting at position 383 of SEQ ID NO: 2479
gggaguugagcccauucca

SEQ ID NO: 192285 - RNA, 19 nt, Artificial Sequence
  Description of Artificial Sequence: Synthetic oligonucleotide
  Antisense strand to SEQ ID NO: 192284
uggaaugggcucaacuccc

SEQ ID NO: 192286 - RNA, 19 nt, Artificial Sequence
  Description of Artificial Sequence: Synthetic oligonucleotide
  Sense strand starting at position 508 of SEQ ID NO: 2479
gcacaaugucaaggcagaa

SEQ ID NO: 192287 - RNA, 19 nt, Artificial Sequence
  Description of Artificial Sequence: Synthetic oligonucleotide
  Antisense strand to SEQ ID NO: 192286
uucugccuugacauugugc

SEQ ID NO: 192288 - RNA, 19 nt, Artificial Sequence
  Description of Artificial Sequence: Synthetic oligonucleotide
  Sense strand starting at position 537 of SEQ ID NO: 2479
ggaaauauggcacauguuu

SEQ ID NO: 192289 - RNA, 19 nt, Artificial Sequence
  Description of Artificial Sequence: Synthetic oligonucleotide
  Antisense strand to SEQ ID NO: 192288
aaacaugugccauauuucc

SEQ ID NO: 192290 - RNA, 19 nt, Artificial Sequence
  Description of Artificial Sequence: Synthetic oligonucleotide
  Sense strand starting at position 587 of SEQ ID NO: 2479
augcuauuccugugaaauc

SEQ ID NO: 192291 - RNA, 19 nt, Artificial Sequence
  Description of Artificial Sequence: Synthetic oligonucleotide
  Antisense strand to SEQ ID NO: 192290
gauuucacaggaauagcau

SEQ ID NO: 192292 - RNA, 19 nt, Artificial Sequence
  Description of Artificial Sequence: Synthetic oligonucleotide
  Sense strand starting at position 707 of SEQ ID NO: 2479
aguuaugucuugccuaaca

SEQ ID NO: 192293 - RNA, 19 nt, Artificial Sequence
  Description of Artificial Sequence: Synthetic oligonucleotide
  Antisense strand to SEQ ID NO: 192292
uguuaggcaagacauaacu

SEQ ID NO: 192294 - RNA, 19 nt, Artificial Sequence
  Description of Artificial Sequence: Synthetic oligonucleotide
  Sense strand starting at position 912 of SEQ ID NO: 2479
uagagugucagaugguuua

SEQ ID NO: 192295 - RNA, 19 nt, Artificial Sequence
  Description of Artificial Sequence: Synthetic oligonucleotide
  Antisense strand to SEQ ID NO: 192294
uaaaccaucugacacucua

SEQ ID NO: 192296 - RNA, 19 nt, Artificial Sequence
  Description of Artificial Sequence: Synthetic oligonucleotide
  Sense strand starting at position 1197 of SEQ ID NO: 2479
gguugcaaugagugagacu

SEQ ID NO: 192297 - RNA, 19 nt, Artificial Sequence
  Description of Artificial Sequence: Synthetic oligonucleotide
  Antisense strand to SEQ ID NO: 192296
agucucacucauugcaacc

SEQ ID NO: 192298 - RNA, 19 nt, Artificial Sequence
  Description of Artificial Sequence: Synthetic oligonucleotide
  Sense strand starting at position 1208 of SEQ ID NO: 2479
gugagacugcaucauugca

SEQ ID NO: 192299 - RNA, 19 nt, Artificial Sequence
  Description of Artificial Sequence: Synthetic oligonucleotide
  Antisense strand to SEQ ID NO: 192298
ugcaaugaugcagucucac

SEQ ID NO: 192300 - RNA, 19 nt, Artificial Sequence
  Description of Artificial Sequence: Synthetic oligonucleotide
  Sense strand starting at position 1372 of SEQ ID NO: 2479
cgguaccugguuuaugaau

SEQ ID NO: 192301 - RNA, 19 nt, Artificial Sequence
  Description of Artificial Sequence: Synthetic oligonucleotide
  Antisense strand to SEQ ID NO: 192300
auucauaaaccagguaccg

SEQ ID NO: 192302 - RNA, 19 nt, Artificial Sequence
  Description of Artificial Sequence: Synthetic oligonucleotide
  Sense strand starting at position 1380 of SEQ ID NO: 2479
gguuuaugaaucgccguuu

SEQ ID NO: 192303 - RNA, 19 nt, Artificial Sequence
  Description of Artificial Sequence: Synthetic oligonucleotide
  Antisense strand to SEQ ID NO: 192302
aaacggcgauucauaaacc

SEQ ID NO: 192304 - RNA, 19 nt, Artificial Sequence
  Description of Artificial Sequence: Synthetic oligonucleotide
  Sense strand starting at position 1383 of SEQ ID NO: 2479
uuaugaaucgccguuugcu

SEQ ID NO: 192305 - RNA, 19 nt, Artificial Sequence
  Description of Artificial Sequence: Synthetic oligonucleotide
  Antisense strand to SEQ ID NO: 192304
agcaaacggcgauucauaa

SEQ ID NO: 192306 - RNA, 19 nt, Artificial Sequence
  Description of Artificial Sequence: Synthetic oligonucleotide
  Sense strand starting at position 1869 of SEQ ID NO: 2479
ccaauacucgcaggucaca

SEQ ID NO: 192307 - RNA, 19 nt, Artificial Sequence
  Description of Artificial Sequence: Synthetic oligonucleotide
  Antisense strand to SEQ ID NO: 192306
ugugaccugcgaguauugg

SEQ ID NO: 192308 - RNA, 19 nt, Artificial Sequence
  Description of Artificial Sequence: Synthetic oligonucleotide
  Sense strand starting at position 2103 of SEQ ID NO: 2479
cccugagugacaggagauu

SEQ ID NO: 192309 - RNA, 19 nt, Artificial Sequence
  Description of Artificial Sequence: Synthetic oligonucleotide
  Antisense strand to SEQ ID NO: 192308
aaucuccugucacucaggg

SEQ ID NO: 192310 - RNA, 19 nt, Artificial Sequence
  Description of Artificial Sequence: Synthetic oligonucleotide
  Sense strand starting at position 2586 of SEQ ID NO: 2479
gaugcauaugcaugacaca

SEQ ID NO: 192311 - RNA, 19 nt, Artificial Sequence
  Description of Artificial Sequence: Synthetic oligonucleotide
  Antisense strand to SEQ ID NO: 192310
ugugucaugcauaugcauc

SEQ ID NO: 192312 - RNA, 19 nt, Artificial Sequence
  Description of Artificial Sequence: Synthetic oligonucleotide
  Sense strand starting at position 2608 of SEQ ID NO: 2479
ucaggauguccuugaugac

SEQ ID NO: 192313 - RNA, 19 nt, Artificial Sequence
  Description of Artificial Sequence: Synthetic oligonucleotide
  Antisense strand to SEQ ID NO: 192312
gucaucaaggacauccuga

SEQ ID NO: 192314 - RNA, 19 nt, Artificial Sequence
  Description of Artificial Sequence: Synthetic oligonucleotide
  Sense strand starting at position 2871 of SEQ ID NO: 2479
ccgguuggcuauuugugaa

SEQ ID NO: 192315 - RNA, 19 nt, Artificial Sequence
  Description of Artificial Sequence: Synthetic oligonucleotide
  Antisense strand to SEQ ID NO: 192314
uucacaaauagccaaccgg

SEQ ID NO: 192316 - RNA, 19 nt, Artificial Sequence
  Description of Artificial Sequence: Synthetic oligonucleotide
  Sense strand starting at position 2944 of SEQ ID NO: 2479
ugcgguuuccaagggagaa

SEQ ID NO: 192317 - RNA, 19 nt, Artificial Sequence
  Description of Artificial Sequence: Synthetic oligonucleotide
  Antisense strand to SEQ ID NO: 192316
uucucccuuggaaaccgca

SEQ ID NO: 192318 - RNA, 19 nt, Artificial Sequence
  Description of Artificial Sequence: Synthetic oligonucleotide
  Sense strand starting at position 2945 of SEQ ID NO: 2479
gcgguuuccaagggagaaa

SEQ ID NO: 192319 - RNA, 19 nt, Artificial Sequence
  Description of Artificial Sequence: Synthetic oligonucleotide
  Antisense strand to SEQ ID NO: 192318
uuucucccuuggaaaccgc

SEQ ID NO: 192320 - RNA, 19 nt, Artificial Sequence
  Description of Artificial Sequence: Synthetic oligonucleotide
  Sense strand starting at position 3017 of SEQ ID NO: 2479
acggaagguuguuuacagu

SEQ ID NO: 192321 - RNA, 19 nt, Artificial Sequence
  Description of Artificial Sequence: Synthetic oligonucleotide
  Antisense strand to SEQ ID NO: 192320
acuguaaacaaccuuccgu

SEQ ID NO: 192322 - RNA, 19 nt, Artificial Sequence
  Description of Artificial Sequence: Synthetic oligonucleotide
  Sense strand starting at position 3023 of SEQ ID NO: 2479
gguuguuuacaguaacuaa

SEQ ID NO: 192323 - RNA, 19 nt, Artificial Sequence
  Description of Artificial Sequence: Synthetic oligonucleotide
  Antisense strand to SEQ ID NO: 192322
uuaguuacuguaaacaacc

SEQ ID NO: 192324 - RNA, 19 nt, Artificial Sequence
  Description of Artificial Sequence: Synthetic oligonucleotide
  Sense strand starting at position 3062 of SEQ ID NO: 2479
caagaaaguugaguucgaa

SEQ ID NO: 192325 - RNA, 19 nt, Artificial Sequence
  Description of Artificial Sequence: Synthetic oligonucleotide
  Antisense strand to SEQ ID NO: 192324
uucgaacucaacuuucuug

SEQ ID NO: 192326 - RNA, 19 nt, Artificial Sequence
  Description of Artificial Sequence: Synthetic oligonucleotide
  Sense strand starting at position 3189 of SEQ ID NO: 2479
gaugaacacugguuugauc

SEQ ID NO: 192327 - RNA, 19 nt, Artificial Sequence
  Description of Artificial Sequence: Synthetic oligonucleotide
  Antisense strand to SEQ ID NO: 192326
gaucaaaccaguguucauc

SEQ ID NO: 192328 - RNA, 19 nt, Artificial Sequence
  Description of Artificial Sequence: Synthetic oligonucleotide
  Sense strand starting at position 3196 of SEQ ID NO: 2479
acugguuugauccgggaca

SEQ ID NO: 192329 - RNA, 19 nt, Artificial Sequence
  Description of Artificial Sequence: Synthetic oligonucleotide
  Antisense strand to SEQ ID NO: 192328
ugucccggaucaaaccagu

SEQ ID NO: 192330 - RNA, 19 nt, Artificial Sequence
  Description of Artificial Sequence: Synthetic oligonucleotide
  Sense strand starting at position 3198 of SEQ ID NO: 2479
ugguuugauccgggacaac

SEQ ID NO: 192331 - RNA, 19 nt, Artificial Sequence
  Description of Artificial Sequence: Synthetic oligonucleotide
  Antisense strand to SEQ ID NO: 192330
guugucccggaucaaacca

SEQ ID NO: 192332 - RNA, 19 nt, Artificial Sequence
  Description of Artificial Sequence: Synthetic oligonucleotide
  Sense strand starting at position 3675 of SEQ ID NO: 2479
cccgguaaucucuacaaau

SEQ ID NO: 192333 - RNA, 19 nt, Artificial Sequence
  Description of Artificial Sequence: Synthetic oligonucleotide
  Antisense strand to SEQ ID NO: 192332
auuuguagagauuaccggg

SEQ ID NO: 192334 - RNA, 19 nt, Artificial Sequence
  Description of Artificial Sequence: Synthetic oligonucleotide
  Sense strand starting at position 3728 of SEQ ID NO: 2479
gaggaugacugacaaagga

SEQ ID NO: 192335 - RNA, 19 nt, Artificial Sequence
  Description of Artificial Sequence: Synthetic oligonucleotide
  Antisense strand to SEQ ID NO: 192334
uccuuugucagucauccuc

SEQ ID NO: 192336 - RNA, 19 nt, Artificial Sequence
  Description of Artificial Sequence: Synthetic oligonucleotide
  Sense strand starting at position 3836 of SEQ ID NO: 2479
gagaguaaguuugcuaauu

SEQ ID NO: 192337 - RNA, 19 nt, Artificial Sequence
  Description of Artificial Sequence: Synthetic oligonucleotide
  Antisense strand to SEQ ID NO: 192336
aauuagcaaacuuacucuc

SEQ ID NO: 192338 - RNA, 19 nt, Artificial Sequence
  Description of Artificial Sequence: Synthetic oligonucleotide
  Sense strand starting at position 3859 of SEQ ID NO: 2479
aagccuuguccggcaguua

SEQ ID NO: 192339 - RNA, 19 nt, Artificial Sequence
  Description of Artificial Sequence: Synthetic oligonucleotide
  Antisense strand to SEQ ID NO: 192338
uaacugccggacaaggcuu

SEQ ID NO: 192340 - RNA, 19 nt, Artificial Sequence
  Description of Artificial Sequence: Synthetic oligonucleotide
  Sense strand starting at position 3947 of SEQ ID NO: 2479
ucucuuugguucccggaau

SEQ ID NO: 192341 - RNA, 19 nt, Artificial Sequence
  Description of Artificial Sequence: Synthetic oligonucleotide
  Antisense strand to SEQ ID NO: 192340
auuccgggaaccaaagaga

SEQ ID NO: 192342 - RNA, 19 nt, Artificial Sequence
  Description of Artificial Sequence: Synthetic oligonucleotide
  Sense strand starting at position 217 of SEQ ID NO: 2480
uuccuuguccuuugagaua

SEQ ID NO: 192343 - RNA, 19 nt, Artificial Sequence
  Description of Artificial Sequence: Synthetic oligonucleotide
  Antisense strand to SEQ ID NO: 192342
uaucucaaaggacaaggaa

SEQ ID NO: 192344 - RNA, 19 nt, Artificial Sequence
  Description of Artificial Sequence: Synthetic oligonucleotide
  Sense strand starting at position 329 of SEQ ID NO: 2480
acgugucuccaaggaauga

SEQ ID NO: 192345 - RNA, 19 nt, Artificial Sequence
  Description of Artificial Sequence: Synthetic oligonucleotide
  Antisense strand to SEQ ID NO: 192344
ucauuccuuggagacacgu

SEQ ID NO: 192346 - RNA, 19 nt, Artificial Sequence
  Description of Artificial Sequence: Synthetic oligonucleotide
  Sense strand starting at position 330 of SEQ ID NO: 2480
cgugucuccaaggaaugau

SEQ ID NO: 192347 - RNA, 19 nt, Artificial Sequence
  Description of Artificial Sequence: Synthetic oligonucleotide
  Antisense strand to SEQ ID NO: 192346
aucauuccuuggagacacg

SEQ ID NO: 192348 - RNA, 19 nt, Artificial Sequence
  Description of Artificial Sequence: Synthetic oligonucleotide
  Sense strand starting at position 478 of SEQ ID NO: 2480
uuuaaacuguccucuguga

SEQ ID NO: 192349 - RNA, 19 nt, Artificial Sequence
  Description of Artificial Sequence: Synthetic oligonucleotide
  Antisense strand to SEQ ID NO: 192348
ucacagaggacaguuuaaa

SEQ ID NO: 192350 - RNA, 19 nt, Artificial Sequence
  Description of Artificial Sequence: Synthetic oligonucleotide
  Sense strand starting at position 534 of SEQ ID NO: 2480
aagagaucuggcugcuaaa

SEQ ID NO: 192351 - RNA, 19 nt, Artificial Sequence
  Description of Artificial Sequence: Synthetic oligonucleotide
  Antisense strand to SEQ ID NO: 192350
uuuagcagccagaucucuu

SEQ ID NO: 192352 - RNA, 19 nt, Artificial Sequence
  Description of Artificial Sequence: Synthetic oligonucleotide
  Sense strand starting at position 567 of SEQ ID NO: 2480
aagauauaaggguggcuga

SEQ ID NO: 192353 - RNA, 19 nt, Artificial Sequence
  Description of Artificial Sequence: Synthetic oligonucleotide
  Antisense strand to SEQ ID NO: 192352
ucagccacccuuauaucuu

SEQ ID NO: 192354 - RNA, 19 nt, Artificial Sequence
  Description of Artificial Sequence: Synthetic oligonucleotide
  Sense strand starting at position 641 of SEQ ID NO: 2480
guaagaugugcacacucaa

SEQ ID NO: 192355 - RNA, 19 nt, Artificial Sequence
  Description of Artificial Sequence: Synthetic oligonucleotide
  Antisense strand to SEQ ID NO: 192354
uugagugugcacaucuuac

SEQ ID NO: 192356 - RNA, 19 nt, Artificial Sequence
  Description of Artificial Sequence: Synthetic oligonucleotide
  Sense strand starting at position 733 of SEQ ID NO: 2480
uccacucauguguaauguu

SEQ ID NO: 192357 - RNA, 19 nt, Artificial Sequence
  Description of Artificial Sequence: Synthetic oligonucleotide
  Antisense strand to SEQ ID NO: 192356
aacauuacacaugagugga

SEQ ID NO: 192358 - RNA, 19 nt, Artificial Sequence
  Description of Artificial Sequence: Synthetic oligonucleotide
  Sense strand starting at position 789 of SEQ ID NO: 2480
acgacucacuacucugaaa

SEQ ID NO: 192359 - RNA, 19 nt, Artificial Sequence
  Description of Artificial Sequence: Synthetic oligonucleotide
  Antisense strand to SEQ ID NO: 192358
uuucagaguagugagucgu

SEQ ID NO: 192360 - RNA, 19 nt, Artificial Sequence
  Description of Artificial Sequence: Synthetic oligonucleotide
  Sense strand starting at position 974 of SEQ ID NO: 2480
cuuagaaauguggaguguu

SEQ ID NO: 192361 - RNA, 19 nt, Artificial Sequence
  Description of Artificial Sequence: Synthetic oligonucleotide
  Antisense strand to SEQ ID NO: 192360
aacacuccacauuucuaag

SEQ ID NO: 192362 - RNA, 19 nt, Artificial Sequence
  Description of Artificial Sequence: Synthetic oligonucleotide
  Sense strand starting at position 977 of SEQ ID NO: 2480
agaaauguggaguguuaug

SEQ ID NO: 192363 - RNA, 19 nt, Artificial Sequence
  Description of Artificial Sequence: Synthetic oligonucleotide
  Antisense strand to SEQ ID NO: 192362
cauaacacuccacauuucu

SEQ ID NO: 192364 - RNA, 19 nt, Artificial Sequence
  Description of Artificial Sequence: Synthetic oligonucleotide
  Sense strand starting at position 1214 of SEQ ID NO: 2480
ggagauaucuggcugcaca

SEQ ID NO: 192365 - RNA, 19 nt, Artificial Sequence
  Description of Artificial Sequence: Synthetic oligonucleotide
  Antisense strand to SEQ ID NO: 192364
ugugcagccagauaucucc

SEQ ID NO: 192366 - RNA, 19 nt, Artificial Sequence
  Description of Artificial Sequence: Synthetic oligonucleotide
  Sense strand starting at position 1215 of SEQ ID NO: 2480
gagauaucuggcugcacag

SEQ ID NO: 192367 - RNA, 19 nt, Artificial Sequence
  Description of Artificial Sequence: Synthetic oligonucleotide
  Antisense strand to SEQ ID NO: 192366
cugugcagccagauaucuc

SEQ ID NO: 192368 - RNA, 19 nt, Artificial Sequence
  Description of Artificial Sequence: Synthetic oligonucleotide
  Sense strand starting at position 1255 of SEQ ID NO: 2480
acuguacacgaucaauuau

SEQ ID NO: 192369 - RNA, 19 nt, Artificial Sequence
  Description of Artificial Sequence: Synthetic oligonucleotide
  Antisense strand to SEQ ID NO: 192368
auaauugaucguguacagu

SEQ ID NO: 192370 - RNA, 19 nt, Artificial Sequence
  Description of Artificial Sequence: Synthetic oligonucleotide
  Sense strand starting at position 1356 of SEQ ID NO: 2480
ucacgacucucugcucaaa

SEQ ID NO: 192371 - RNA, 19 nt, Artificial Sequence
  Description of Artificial Sequence: Synthetic oligonucleotide
  Antisense strand to SEQ ID NO: 192370
uuugagcagagagucguga

SEQ ID NO: 192372 - RNA, 19 nt, Artificial Sequence
  Description of Artificial Sequence: Synthetic oligonucleotide
  Sense strand starting at position 1358 of SEQ ID NO: 2480
acgacucucugcucaaaua

SEQ ID NO: 192373 - RNA, 19 nt, Artificial Sequence
  Description of Artificial Sequence: Synthetic oligonucleotide
  Antisense strand to SEQ ID NO: 192372
uauuugagcagagagucgu

SEQ ID NO: 192374 - RNA, 19 nt, Artificial Sequence
  Description of Artificial Sequence: Synthetic oligonucleotide
  Sense strand starting at position 1359 of SEQ ID NO: 2480
cgacucucugcucaaauaa

SEQ ID NO: 192375 - RNA, 19 nt, Artificial Sequence
  Description of Artificial Sequence: Synthetic oligonucleotide
  Antisense strand to SEQ ID NO: 192374
uuauuugagcagagagucg

SEQ ID NO: 192376 - RNA, 19 nt, Artificial Sequence
  Description of Artificial Sequence: Synthetic oligonucleotide
  Sense strand starting at position 2201 of SEQ ID NO: 2480
auguccauuuaugaguaau

SEQ ID NO: 192377 - RNA, 19 nt, Artificial Sequence
  Description of Artificial Sequence: Synthetic oligonucleotide
  Antisense strand to SEQ ID NO: 192376
auuacucauaaauggacau

SEQ ID NO: 192378 - RNA, 19 nt, Artificial Sequence
  Description of Artificial Sequence: Synthetic oligonucleotide
  Sense strand starting at position 2335 of SEQ ID NO: 2480
cuugcuucuagugggauua

SEQ ID NO: 192379 - RNA, 19 nt, Artificial Sequence
  Description of Artificial Sequence: Synthetic oligonucleotide
  Antisense strand to SEQ ID NO: 192378
uaaucccacuagaagcaag

SEQ ID NO: 192380 - RNA, 19 nt, Artificial Sequence
  Description of Artificial Sequence: Synthetic oligonucleotide
  Sense strand starting at position 2425 of SEQ ID NO: 2480
gcguguguuccaguagcaa

SEQ ID NO: 192381 - RNA, 19 nt, Artificial Sequence
  Description of Artificial Sequence: Synthetic oligonucleotide
  Antisense strand to SEQ ID NO: 192380
uugcuacuggaacacacgc

SEQ ID NO: 192382 - RNA, 19 nt, Artificial Sequence
  Description of Artificial Sequence: Synthetic oligonucleotide
  Sense strand starting at position 2460 of SEQ ID NO: 2480
acgugaaauugauuacaau

SEQ ID NO: 192383 - RNA, 19 nt, Artificial Sequence
  Description of Artificial Sequence: Synthetic oligonucleotide
  Antisense strand to SEQ ID NO: 192382
auuguaaucaauuucacgu

SEQ ID NO: 192384 - RNA, 19 nt, Artificial Sequence
  Description of Artificial Sequence: Synthetic oligonucleotide
  Sense strand starting at position 2514 of SEQ ID NO: 2480
ucaauauaugaucgauguu

SEQ ID NO: 192385 - RNA, 19 nt, Artificial Sequence
  Description of Artificial Sequence: Synthetic oligonucleotide
  Antisense strand to SEQ ID NO: 192384
aacaucgaucauauauuga

SEQ ID NO: 192386 - RNA, 19 nt, Artificial Sequence
  Description of Artificial Sequence: Synthetic oligonucleotide
  Sense strand starting at position 2517 of SEQ ID NO: 2480
auauaugaucgauguuaag

SEQ ID NO: 192387 - RNA, 19 nt, Artificial Sequence
  Description of Artificial Sequence: Synthetic oligonucleotide
  Antisense strand to SEQ ID NO: 192386
cuuaacaucgaucauauau

SEQ ID NO: 192388 - RNA, 19 nt, Artificial Sequence
  Description of Artificial Sequence: Synthetic oligonucleotide
  Sense strand starting at position 2529 of SEQ ID NO: 2480
uguuaagcucgcgccuaau

SEQ ID NO: 192389 - RNA, 19 nt, Artificial Sequence
  Description of Artificial Sequence: Synthetic oligonucleotide
  Antisense strand to SEQ ID NO: 192388
auuaggcgcgagcuuaaca

SEQ ID NO: 192390 - RNA, 19 nt, Artificial Sequence
  Description of Artificial Sequence: Synthetic oligonucleotide
  Sense strand starting at position 2540 of SEQ ID NO: 2480
cgccuaauugaagagacua

SEQ ID NO: 192391 - RNA, 19 nt, Artificial Sequence
  Description of Artificial Sequence: Synthetic oligonucleotide
  Antisense strand to SEQ ID NO: 192390
uagucucuucaauuaggcg

SEQ ID NO: 192392 - RNA, 19 nt, Artificial Sequence
  Description of Artificial Sequence: Synthetic oligonucleotide
  Sense strand starting at position 2643 of SEQ ID NO: 2480
ggucgugggauuggaguua

SEQ ID NO: 192393 - RNA, 19 nt, Artificial Sequence
  Description of Artificial Sequence: Synthetic oligonucleotide
  Antisense strand to SEQ ID NO: 192392
uaacuccaaucccacgacc

SEQ ID NO: 192394 - RNA, 19 nt, Artificial Sequence
  Description of Artificial Sequence: Synthetic oligonucleotide
  Sense strand starting at position 2769 of SEQ ID NO: 2480
gugucacuaggcugauuga

SEQ ID NO: 192395 - RNA, 19 nt, Artificial Sequence
  Description of Artificial Sequence: Synthetic oligonucleotide
  Antisense strand to SEQ ID NO: 192394
ucaaucagccuagugacac

SEQ ID NO: 192396 - RNA, 19 nt, Artificial Sequence
  Description of Artificial Sequence: Synthetic oligonucleotide
  Sense strand starting at position 2770 of SEQ ID NO: 2480
ugucacuaggcugauugau

SEQ ID NO: 192397 - RNA, 19 nt, Artificial Sequence
  Description of Artificial Sequence: Synthetic oligonucleotide
  Antisense strand to SEQ ID NO: 192396
aucaaucagccuagugaca

SEQ ID NO: 192398 - RNA, 19 nt, Artificial Sequence
  Description of Artificial Sequence: Synthetic oligonucleotide
  Sense strand starting at position 2772 of SEQ ID NO: 2480
ucacuaggcugauugauca

SEQ ID NO: 192399 - RNA, 19 nt, Artificial Sequence
  Description of Artificial Sequence: Synthetic oligonucleotide
  Antisense strand to SEQ ID NO: 192398
ugaucaaucagccuaguga

SEQ ID NO: 192400 - RNA, 19 nt, Artificial Sequence
  Description of Artificial Sequence: Synthetic oligonucleotide
  Sense strand starting at position 2776 of SEQ ID NO: 2480
uaggcugauugaucaguua

SEQ ID NO: 192401 - RNA, 19 nt, Artificial Sequence
  Description of Artificial Sequence: Synthetic oligonucleotide
  Antisense strand to SEQ ID NO: 192400
uaacugaucaaucagccua

SEQ ID NO: 192402 - RNA, 19 nt, Artificial Sequence
  Description of Artificial Sequence: Synthetic oligonucleotide
  Sense strand starting at position 2944 of SEQ ID NO: 2480
aucacaauggcuugaccau

SEQ ID NO: 192403 - RNA, 19 nt, Artificial Sequence
  Description of Artificial Sequence: Synthetic oligonucleotide
  Antisense strand to SEQ ID NO: 192402
auggucaagccauugugau

SEQ ID NO: 192404 - RNA, 19 nt, Artificial Sequence
  Description of Artificial Sequence: Synthetic oligonucleotide
  Sense strand starting at position 2980 of SEQ ID NO: 2480
cggccuuacaaucgauaua

SEQ ID NO: 192405 - RNA, 19 nt, Artificial Sequence
  Description of Artificial Sequence: Synthetic oligonucleotide
  Antisense strand to SEQ ID NO: 192404
uauaucgauuguaaggccg

SEQ ID NO: 192406 - RNA, 19 nt, Artificial Sequence
  Description of Artificial Sequence: Synthetic oligonucleotide
  Sense strand starting at position 3169 of SEQ ID NO: 2480
ucacuuaucucagugagag

SEQ ID NO: 192407 - RNA, 19 nt, Artificial Sequence
  Description of Artificial Sequence: Synthetic oligonucleotide
  Antisense strand to SEQ ID NO: 192406
cucucacugagauaaguga

SEQ ID NO: 192408 - RNA, 19 nt, Artificial Sequence
  Description of Artificial Sequence: Synthetic oligonucleotide
  Sense strand starting at position 3170 of SEQ ID NO: 2480
cacuuaucucagugagagu

SEQ ID NO: 192409 - RNA, 19 nt, Artificial Sequence
  Description of Artificial Sequence: Synthetic oligonucleotide
  Antisense strand to SEQ ID NO: 192408
acucucacugagauaagug

SEQ ID NO: 192410 - RNA, 19 nt, Artificial Sequence
  Description of Artificial Sequence: Synthetic oligonucleotide
  Sense strand starting at position 3177 of SEQ ID NO: 2480
cucagugagaguugccaaa

SEQ ID NO: 192411 - RNA, 19 nt, Artificial Sequence
  Description of Artificial Sequence: Synthetic oligonucleotide
  Antisense strand to SEQ ID NO: 192410
uuuggcaacucucacugag

SEQ ID NO: 192412 - RNA, 19 nt, Artificial Sequence
  Description of Artificial Sequence: Synthetic oligonucleotide
  Sense strand starting at position 3179 of SEQ ID NO: 2480
cagugagaguugccaaaua

SEQ ID NO: 192413 - RNA, 19 nt, Artificial Sequence
  Description of Artificial Sequence: Synthetic oligonucleotide
  Antisense strand to SEQ ID NO: 192412
uauuuggcaacucucacug

SEQ ID NO: 192414 - RNA, 19 nt, Artificial Sequence
  Description of Artificial Sequence: Synthetic oligonucleotide
  Sense strand starting at position 3223 of SEQ ID NO: 2480
agguauuaguucucauucu

SEQ ID NO: 192415 - RNA, 19 nt, Artificial Sequence
  Description of Artificial Sequence: Synthetic oligonucleotide
  Antisense strand to SEQ ID NO: 192414
agaaugagaacuaauaccu

SEQ ID NO: 192416 - RNA, 19 nt, Artificial Sequence
  Description of Artificial Sequence: Synthetic oligonucleotide
  Sense strand starting at position 3415 of SEQ ID NO: 2480
uguauuuaaugagauucca

SEQ ID NO: 192417 - RNA, 19 nt, Artificial Sequence
  Description of Artificial Sequence: Synthetic oligonucleotide
  Antisense strand to SEQ ID NO: 192416
uggaaucucauuaaauaca

SEQ ID NO: 192418 - RNA, 19 nt, Artificial Sequence
  Description of Artificial Sequence: Synthetic oligonucleotide
  Sense strand starting at position 3825 of SEQ ID NO: 2480
guccuuguaccauauguuu

SEQ ID NO: 192419 - RNA, 19 nt, Artificial Sequence
  Description of Artificial Sequence: Synthetic oligonucleotide
  Antisense strand to SEQ ID NO: 192418
aaacauaugguacaaggac

SEQ ID NO: 192420 - RNA, 19 nt, Artificial Sequence
  Description of Artificial Sequence: Synthetic oligonucleotide
  Sense strand starting at position 3946 of SEQ ID NO: 2480
uggcuuauggcguuuccua

SEQ ID NO: 192421 - RNA, 19 nt, Artificial Sequence
  Description of Artificial Sequence: Synthetic oligonucleotide
  Antisense strand to SEQ ID NO: 192420
uaggaaacgccauaagcca

SEQ ID NO: 192422 - RNA, 19 nt, Artificial Sequence
  Description of Artificial Sequence: Synthetic oligonucleotide
  Sense strand starting at position 3969 of SEQ ID NO: 2481
ggagauaacagcugugaac

SEQ ID NO: 192423 - RNA, 19 nt, Artificial Sequence
  Description of Artificial Sequence: Synthetic oligonucleotide
  Antisense strand to SEQ ID NO: 192422
guucacagcuguuaucucc

SEQ ID NO: 192424 - RNA, 19 nt, Artificial Sequence
  Description of Artificial Sequence: Synthetic oligonucleotide
  Sense strand starting at position 3957 of SEQ ID NO: 2481
auucuagacguuggagaua

SEQ ID NO: 192425 - RNA, 19 nt, Artificial Sequence
  Description of Artificial Sequence: Synthetic oligonucleotide
  Antisense strand to SEQ ID NO: 192424
uaucuccaacgucuagaau

SEQ ID NO: 192426 - RNA, 19 nt, Artificial Sequence
  Description of Artificial Sequence: Synthetic oligonucleotide
  Sense strand starting at position 3956 of SEQ ID NO: 2481
uauucuagacguuggagau

SEQ ID NO: 192427 - RNA, 19 nt, Artificial Sequence
  Description of Artificial Sequence: Synthetic oligonucleotide
  Antisense strand to SEQ ID NO: 192426
aucuccaacgucuagaaua

SEQ ID NO: 192428 - RNA, 19 nt, Artificial Sequence
  Description of Artificial Sequence: Synthetic oligonucleotide
  Sense strand starting at position 3953 of SEQ ID NO: 2481
uaguauucuagacguugga

SEQ ID NO: 192429 - RNA, 19 nt, Artificial Sequence
  Description of Artificial Sequence: Synthetic oligonucleotide
  Antisense strand to SEQ ID NO: 192428
uccaacgucuagaauacua

SEQ ID NO: 192430 - RNA, 19 nt, Artificial Sequence
  Description of Artificial Sequence: Synthetic oligonucleotide
  Sense strand starting at position 3951 of SEQ ID NO: 2481
gguaguauucuagacguug

SEQ ID NO: 192431 - RNA, 19 nt, Artificial Sequence
  Description of Artificial Sequence: Synthetic oligonucleotide
  Antisense strand to SEQ ID NO: 192430
caacgucuagaauacuacc

SEQ ID NO: 192432 - RNA, 19 nt, Artificial Sequence
  Description of Artificial Sequence: Synthetic oligonucleotide
  Sense strand starting at position 3898 of SEQ ID NO: 2481
uaaugugguucuguaaaua

SEQ ID NO: 192433 - RNA, 19 nt, Artificial Sequence
  Description of Artificial Sequence: Synthetic oligonucleotide
  Antisense strand to SEQ ID NO: 192432
uauuuacagaaccacauua

SEQ ID NO: 192434 - RNA, 19 nt, Artificial Sequence
  Description of Artificial Sequence: Synthetic oligonucleotide
  Sense strand starting at position 3807 of SEQ ID NO: 2481
ggaugaaguuauguguaua

SEQ ID NO: 192435 - RNA, 19 nt, Artificial Sequence
  Description of Artificial Sequence: Synthetic oligonucleotide
  Antisense strand to SEQ ID NO: 192434
uauacacauaacuucaucc

SEQ ID NO: 192436 - RNA, 19 nt, Artificial Sequence
  Description of Artificial Sequence: Synthetic oligonucleotide
  Sense strand starting at position 3804 of SEQ ID NO: 2481
caaggaugaaguuaugugu

SEQ ID NO: 192437 - RNA, 19 nt, Artificial Sequence
  Description of Artificial Sequence: Synthetic oligonucleotide
  Antisense strand to SEQ ID NO: 192436
acacauaacuucauccuug

SEQ ID NO: 192438 - RNA, 19 nt, Artificial Sequence
  Description of Artificial Sequence: Synthetic oligonucleotide
  Sense strand starting at position 3762 of SEQ ID NO: 2481
ugauaauuguaacaggaag

SEQ ID NO: 192439 - RNA, 19 nt, Artificial Sequence
  Description of Artificial Sequence: Synthetic oligonucleotide
  Antisense strand to SEQ ID NO: 192438
cuuccuguuacaauuauca

SEQ ID NO: 192440 - RNA, 19 nt, Artificial Sequence
  Description of Artificial Sequence: Synthetic oligonucleotide
  Sense strand starting at position 3723 of SEQ ID NO: 2481
uuagguuuccuauguuaug

SEQ ID NO: 192441 - RNA, 19 nt, Artificial Sequence
  Description of Artificial Sequence: Synthetic oligonucleotide
  Antisense strand to SEQ ID NO: 192440
cauaacauaggaaaccuaa

SEQ ID NO: 192442 - RNA, 19 nt, Artificial Sequence
  Description of Artificial Sequence: Synthetic oligonucleotide
  Sense strand starting at position 3652 of SEQ ID NO: 2481
agaugacuuucuucugugu

SEQ ID NO: 192443 - RNA, 19 nt, Artificial Sequence
  Description of Artificial Sequence: Synthetic oligonucleotide
  Antisense strand to SEQ ID NO: 192442
acacagaagaaagucaucu

SEQ ID NO: 192444 - RNA, 19 nt, Artificial Sequence
  Description of Artificial Sequence: Synthetic oligonucleotide
  Sense strand starting at position 3646 of SEQ ID NO: 2481
uggauuagaugacuuucuu

SEQ ID NO: 192445 - RNA, 19 nt, Artificial Sequence
  Description of Artificial Sequence: Synthetic oligonucleotide
  Antisense strand to SEQ ID NO: 192444
aagaaagucaucuaaucca

SEQ ID NO: 192446 - RNA, 19 nt, Artificial Sequence
  Description of Artificial Sequence: Synthetic oligonucleotide
  Sense strand starting at position 3528 of SEQ ID NO: 2481
ugacuaggguggucacaua

SEQ ID NO: 192447 - RNA, 19 nt, Artificial Sequence
  Description of Artificial Sequence: Synthetic oligonucleotide
  Antisense strand to SEQ ID NO: 192446
uaugugaccacccuaguca

SEQ ID NO: 192448 - RNA, 19 nt, Artificial Sequence
  Description of Artificial Sequence: Synthetic oligonucleotide
  Sense strand starting at position 3451 of SEQ ID NO: 2481
cucauugcucaguacugau

SEQ ID NO: 192449 - RNA, 19 nt, Artificial Sequence
  Description of Artificial Sequence: Synthetic oligonucleotide
  Antisense strand to SEQ ID NO: 192448
aucaguacugagcaaugag

SEQ ID NO: 192450 - RNA, 19 nt, Artificial Sequence
  Description of Artificial Sequence: Synthetic oligonucleotide
  Sense strand starting at position 3450 of SEQ ID NO: 2481
acucauugcucaguacuga

SEQ ID NO: 192451 - RNA, 19 nt, Artificial Sequence
  Description of Artificial Sequence: Synthetic oligonucleotide
  Antisense strand to SEQ ID NO: 192450
ucaguacugagcaaugagu

SEQ ID NO: 192452 - RNA, 19 nt, Artificial Sequence
  Description of Artificial Sequence: Synthetic oligonucleotide
  Sense strand starting at position 3448 of SEQ ID NO: 2481
ggacucauugcucaguacu

SEQ ID NO: 192453 - RNA, 19 nt, Artificial Sequence
  Description of Artificial Sequence: Synthetic oligonucleotide
  Antisense strand to SEQ ID NO: 192452
aguacugagcaaugagucc

SEQ ID NO: 192454 - RNA, 19 nt, Artificial Sequence
  Description of Artificial Sequence: Synthetic oligonucleotide
  Sense strand starting at position 3436 of SEQ ID NO: 2481
uuagacauuucuggacuca

SEQ ID NO: 192455 - RNA, 19 nt, Artificial Sequence
  Description of Artificial Sequence: Synthetic oligonucleotide
  Antisense strand to SEQ ID NO: 192454
ugaguccagaaaugucuaa

SEQ ID NO: 192456 - RNA, 19 nt, Artificial Sequence
  Description of Artificial Sequence: Synthetic oligonucleotide
  Sense strand starting at position 3409 of SEQ ID NO: 2481
gucuuuaagccagagaaau

SEQ ID NO: 192457 - RNA, 19 nt, Artificial Sequence
  Description of Artificial Sequence: Synthetic oligonucleotide
  Antisense strand to SEQ ID NO: 192456
auuucucuggcuuaaagac

SEQ ID NO: 192458 - RNA, 19 nt, Artificial Sequence
  Description of Artificial Sequence: Synthetic oligonucleotide
  Sense strand starting at position 3393 of SEQ ID NO: 2481
ugaggauauuuccagaguc

SEQ ID NO: 192459 - RNA, 19 nt, Artificial Sequence
  Description of Artificial Sequence: Synthetic oligonucleotide
  Antisense strand to SEQ ID NO: 192458
gacucuggaaauauccuca

SEQ ID NO: 192460 - RNA, 19 nt, Artificial Sequence
  Description of Artificial Sequence: Synthetic oligonucleotide
  Sense strand starting at position 3316 of SEQ ID NO: 2481
augcgcuugaaguauauau

SEQ ID NO: 192461 - RNA, 19 nt, Artificial Sequence
  Description of Artificial Sequence: Synthetic oligonucleotide
  Antisense strand to SEQ ID NO: 192460
auauauacuucaagcgcau

SEQ ID NO: 192462 - RNA, 19 nt, Artificial Sequence
  Description of Artificial Sequence: Synthetic oligonucleotide
  Sense strand starting at position 3262 of SEQ ID NO: 2481
uggagugaucagggccuga

SEQ ID NO: 192463 - RNA, 19 nt, Artificial Sequence
  Description of Artificial Sequence: Synthetic oligonucleotide
  Antisense strand to SEQ ID NO: 192462
ucaggcccugaucacucca

SEQ ID NO: 192464 - RNA, 19 nt, Artificial Sequence
  Description of Artificial Sequence: Synthetic oligonucleotide
  Sense strand starting at position 3252 of SEQ ID NO: 2481
gaugcaggucuggagugau

SEQ ID NO: 192465 - RNA, 19 nt, Artificial Sequence
  Description of Artificial Sequence: Synthetic oligonucleotide
  Antisense strand to SEQ ID NO: 192464
aucacuccagaccugcauc

SEQ ID NO: 192466 - RNA, 19 nt, Artificial Sequence
  Description of Artificial Sequence: Synthetic oligonucleotide
  Sense strand starting at position 3166 of SEQ ID NO: 2481
guguuugcugacccgcaua

SEQ ID NO: 192467 - RNA, 19 nt, Artificial Sequence
  Description of Artificial Sequence: Synthetic oligonucleotide
  Antisense strand to SEQ ID NO: 192466
uaugcgggucagcaaacac

SEQ ID NO: 192468 - RNA, 19 nt, Artificial Sequence
  Description of Artificial Sequence: Synthetic oligonucleotide
  Sense strand starting at position 3151 of SEQ ID NO: 2481
acagaugaucaaugagugu

SEQ ID NO: 192469 - RNA, 19 nt, Artificial Sequence
  Description of Artificial Sequence: Synthetic oligonucleotide
  Antisense strand to SEQ ID NO: 192468
acacucauugaucaucugu

SEQ ID NO: 192470 - RNA, 19 nt, Artificial Sequence
  Description of Artificial Sequence: Synthetic oligonucleotide
  Sense strand starting at position 3052 of SEQ ID NO: 2481
uagucagaugaauacuguu

SEQ ID NO: 192471 - RNA, 19 nt, Artificial Sequence
  Description of Artificial Sequence: Synthetic oligonucleotide
  Antisense strand to SEQ ID NO: 192470
aacaguauucaucugacua

SEQ ID NO: 192472 - RNA, 19 nt, Artificial Sequence
  Description of Artificial Sequence: Synthetic oligonucleotide
  Sense strand starting at position 3044 of SEQ ID NO: 2481
uguuguuauagucagauga

SEQ ID NO: 192473 - RNA, 19 nt, Artificial Sequence
  Description of Artificial Sequence: Synthetic oligonucleotide
  Antisense strand to SEQ ID NO: 192472
ucaucugacuauaacaaca

SEQ ID NO: 192474 - RNA, 19 nt, Artificial Sequence
  Description of Artificial Sequence: Synthetic oligonucleotide
  Sense strand starting at position 3001 of SEQ ID NO: 2481
gggacauaucuaugcugca

SEQ ID NO: 192475 - RNA, 19 nt, Artificial Sequence
  Description of Artificial Sequence: Synthetic oligonucleotide
  Antisense strand to SEQ ID NO: 192474
ugcagcauagauauguccc

SEQ ID NO: 192476 - RNA, 19 nt, Artificial Sequence
  Description of Artificial Sequence: Synthetic oligonucleotide
  Sense strand starting at position 2806 of SEQ ID NO: 2481
guaaucuuccuuuggaggu

SEQ ID NO: 192477 - RNA, 19 nt, Artificial Sequence
  Description of Artificial Sequence: Synthetic oligonucleotide
  Antisense strand to SEQ ID NO: 192476
accuccaaaggaagauuac

SEQ ID NO: 192478 - RNA, 19 nt, Artificial Sequence
  Description of Artificial Sequence: Synthetic oligonucleotide
  Sense strand starting at position 2804 of SEQ ID NO: 2481
cuguaaucuuccuuuggag

SEQ ID NO: 192479 - RNA, 19 nt, Artificial Sequence
  Description of Artificial Sequence: Synthetic oligonucleotide
  Antisense strand to SEQ ID NO: 192478
cuccaaaggaagauuacag

SEQ ID NO: 192480 - RNA, 19 nt, Artificial Sequence
  Description of Artificial Sequence: Synthetic oligonucleotide
  Sense strand starting at position 2803 of SEQ ID NO: 2481
gcuguaaucuuccuuugga

SEQ ID NO: 192481 - RNA, 19 nt, Artificial Sequence
  Description of Artificial Sequence: Synthetic oligonucleotide
  Antisense strand to SEQ ID NO: 192480
uccaaaggaagauuacagc

SEQ ID NO: 192482 - RNA, 19 nt, Artificial Sequence
  Description of Artificial Sequence: Synthetic oligonucleotide
  Sense strand starting at position 2750 of SEQ ID NO: 2481
gugccuauaucaucagaac

SEQ ID NO: 192483 - RNA, 19 nt, Artificial Sequence
  Description of Artificial Sequence: Synthetic oligonucleotide
  Antisense strand to SEQ ID NO: 192482
guucugaugauauaggcac

SEQ ID NO: 192484 - RNA, 19 nt, Artificial Sequence
  Description of Artificial Sequence: Synthetic oligonucleotide
  Sense strand starting at position 2701 of SEQ ID NO: 2481
uaguauuccuuuccggaaa

SEQ ID NO: 192485 - RNA, 19 nt, Artificial Sequence
  Description of Artificial Sequence: Synthetic oligonucleotide
  Antisense strand to SEQ ID NO: 192484
uuuccggaaaggaauacua

SEQ ID NO: 192486 - RNA, 19 nt, Artificial Sequence
  Description of Artificial Sequence: Synthetic oligonucleotide
  Sense strand starting at position 2678 of SEQ ID NO: 2481
ugucuucuacuaggaaaug

SEQ ID NO: 192487 - RNA, 19 nt, Artificial Sequence
  Description of Artificial Sequence: Synthetic oligonucleotide
  Antisense strand to SEQ ID NO: 192486
cauuuccuaguagaagaca

SEQ ID NO: 192488 - RNA, 19 nt, Artificial Sequence
  Description of Artificial Sequence: Synthetic oligonucleotide
  Sense strand starting at position 2646 of SEQ ID NO: 2481
gguugaacugccuguccaa

SEQ ID NO: 192489 - RNA, 19 nt, Artificial Sequence
  Description of Artificial Sequence: Synthetic oligonucleotide
  Antisense strand to SEQ ID NO: 192488
uuggacaggcaguucaacc

SEQ ID NO: 192490 - RNA, 19 nt, Artificial Sequence
  Description of Artificial Sequence: Synthetic oligonucleotide
  Sense strand starting at position 2565 of SEQ ID NO: 2481
uaaugauacgcccaaaguc

SEQ ID NO: 192491 - RNA, 19 nt, Artificial Sequence
  Description of Artificial Sequence: Synthetic oligonucleotide
  Antisense strand to SEQ ID NO: 192490
gacuuugggcguaucauua

SEQ ID NO: 192492 - RNA, 19 nt, Artificial Sequence
  Description of Artificial Sequence: Synthetic oligonucleotide
  Sense strand starting at position 2562 of SEQ ID NO: 2481
aguuaaugauacgcccaaa

SEQ ID NO: 192493 - RNA, 19 nt, Artificial Sequence
  Description of Artificial Sequence: Synthetic oligonucleotide
  Antisense strand to SEQ ID NO: 192492
uuugggcguaucauuaacu

SEQ ID NO: 192494 - RNA, 19 nt, Artificial Sequence
  Description of Artificial Sequence: Synthetic oligonucleotide
  Sense strand starting at position 1509 of SEQ ID NO: 2481
gcgacguuugucgugguga

SEQ ID NO: 192495 - RNA, 19 nt, Artificial Sequence
  Description of Artificial Sequence: Synthetic oligonucleotide
  Antisense strand to SEQ ID NO: 192494
ucaccacgacaaacgucgc

SEQ ID NO: 192496 - RNA, 19 nt, Artificial Sequence
  Description of Artificial Sequence: Synthetic oligonucleotide
  Sense strand starting at position 1451 of SEQ ID NO: 2481
cguuuaacgcugccagaac

SEQ ID NO: 192497 - RNA, 19 nt, Artificial Sequence
  Description of Artificial Sequence: Synthetic oligonucleotide
  Antisense strand to SEQ ID NO: 192496
guucuggcagcguuaaacg

SEQ ID NO: 192498 - RNA, 19 nt, Artificial Sequence
  Description of Artificial Sequence: Synthetic oligonucleotide
  Sense strand starting at position 865 of SEQ ID NO: 2481
agacgaggguucucaccau

SEQ ID NO: 192499 - RNA, 19 nt, Artificial Sequence
  Description of Artificial Sequence: Synthetic oligonucleotide
  Antisense strand to SEQ ID NO: 192498
auggugagaacccucgucu

SEQ ID NO: 192500 - RNA, 19 nt, Artificial Sequence
  Description of Artificial Sequence: Synthetic oligonucleotide
  Sense strand starting at position 98 of SEQ ID NO: 2481
ccuguaguauuggcuaacu

SEQ ID NO: 192501 - RNA, 19 nt, Artificial Sequence
  Description of Artificial Sequence: Synthetic oligonucleotide
  Antisense strand to SEQ ID NO: 192500
aguuagccaauacuacagg

SEQ ID NO: 192502 - RNA, 19 nt, Artificial Sequence
  Description of Artificial Sequence: Synthetic oligonucleotide
  Sense strand starting at position 3902 of SEQ ID NO: 2482
aauuaaauucccugggcgu

SEQ ID NO: 192503 - RNA, 19 nt, Artificial Sequence
  Description of Artificial Sequence: Synthetic oligonucleotide
  Antisense strand to SEQ ID NO: 192502
acgcccagggaauuuaauu

SEQ ID NO: 192504 - RNA, 19 nt, Artificial Sequence
  Description of Artificial Sequence: Synthetic oligonucleotide
  Sense strand starting at position 3887 of SEQ ID NO: 2482
ggcgcuggaugagugaauu

SEQ ID NO: 192505 - RNA, 19 nt, Artificial Sequence
  Description of Artificial Sequence: Synthetic oligonucleotide
  Antisense strand to SEQ ID NO: 192504
aauucacucauccagcgcc

SEQ ID NO: 192506 - RNA, 19 nt, Artificial Sequence
  Description of Artificial Sequence: Synthetic oligonucleotide
  Sense strand starting at position 3683 of SEQ ID NO: 2482
ucguguccuccggaaugga

SEQ ID NO: 192507 - RNA, 19 nt, Artificial Sequence
  Description of Artificial Sequence: Synthetic oligonucleotide
  Antisense strand to SEQ ID NO: 192506
uccauuccggaggacacga

SEQ ID NO: 192508 - RNA, 19 nt, Artificial Sequence
  Description of Artificial Sequence: Synthetic oligonucleotide
  Sense strand starting at position 3534 of SEQ ID NO: 2482
uuugguggugcguuucaua

SEQ ID NO: 192509 - RNA, 19 nt, Artificial Sequence
  Description of Artificial Sequence: Synthetic oligonucleotide
  Antisense strand to SEQ ID NO: 192508
uaugaaacgcaccaccaaa

SEQ ID NO: 192510 - RNA, 19 nt, Artificial Sequence
  Description of Artificial Sequence: Synthetic oligonucleotide
  Sense strand starting at position 3389 of SEQ ID NO: 2482
gggaguguucugcuccggu

SEQ ID NO: 192511 - RNA, 19 nt, Artificial Sequence
  Description of Artificial Sequence: Synthetic oligonucleotide
  Antisense strand to SEQ ID NO: 192510
accggagcagaacacuccc

SEQ ID NO: 192512 - RNA, 19 nt, Artificial Sequence
  Description of Artificial Sequence: Synthetic oligonucleotide
  Sense strand starting at position 3273 of SEQ ID NO: 2482
gugagucaggauugagaga

SEQ ID NO: 192513 - RNA, 19 nt, Artificial Sequence
  Description of Artificial Sequence: Synthetic oligonucleotide
  Antisense strand to SEQ ID NO: 192512
ucucucaauccugacucac

SEQ ID NO: 192514 - RNA, 19 nt, Artificial Sequence
  Description of Artificial Sequence: Synthetic oligonucleotide
  Sense strand starting at position 3267 of SEQ ID NO: 2482
ggcagagugagucaggauu

SEQ ID NO: 192515 - RNA, 19 nt, Artificial Sequence
  Description of Artificial Sequence: Synthetic oligonucleotide
  Antisense strand to SEQ ID NO: 192514
aauccugacucacucugcc

SEQ ID NO: 192516 - RNA, 19 nt, Artificial Sequence
  Description of Artificial Sequence: Synthetic oligonucleotide
  Sense strand starting at position 3030 of SEQ ID NO: 2482
ggaagcugauugucacuuu

SEQ ID NO: 192517 - RNA, 19 nt, Artificial Sequence
  Description of Artificial Sequence: Synthetic oligonucleotide
  Antisense strand to SEQ ID NO: 192516
aaagugacaaucagcuucc

SEQ ID NO: 192518 - RNA, 19 nt, Artificial Sequence
  Description of Artificial Sequence: Synthetic oligonucleotide
  Sense strand starting at position 3003 of SEQ ID NO: 2482
ggaauaauggccugucagu

SEQ ID NO: 192519 - RNA, 19 nt, Artificial Sequence
  Description of Artificial Sequence: Synthetic oligonucleotide
  Antisense strand to SEQ ID NO: 192518
acugacaggccauuauucc

SEQ ID NO: 192520 - RNA, 19 nt, Artificial Sequence
  Description of Artificial Sequence: Synthetic oligonucleotide
  Sense strand starting at position 2936 of SEQ ID NO: 2482
cuccauagucaguacacuu

SEQ ID NO: 192521 - RNA, 19 nt, Artificial Sequence
  Description of Artificial Sequence: Synthetic oligonucleotide
  Antisense strand to SEQ ID NO: 192520
aaguguacugacuauggag

SEQ ID NO: 192522 - RNA, 19 nt, Artificial Sequence
  Description of Artificial Sequence: Synthetic oligonucleotide
  Sense strand starting at position 2929 of SEQ ID NO: 2482
uucuuaucuccauagucag

SEQ ID NO: 192523 - RNA, 19 nt, Artificial Sequence
  Description of Artificial Sequence: Synthetic oligonucleotide
  Antisense strand to SEQ ID NO: 192522
cugacuauggagauaagaa

SEQ ID NO: 192524 - RNA, 19 nt, Artificial Sequence
  Description of Artificial Sequence: Synthetic oligonucleotide
  Sense strand starting at position 2781 of SEQ ID NO: 2482
ugagacagcuaguuaggaa

SEQ ID NO: 192525 - RNA, 19 nt, Artificial Sequence
  Description of Artificial Sequence: Synthetic oligonucleotide
  Antisense strand to SEQ ID NO: 192524
uuccuaacuagcugucuca

SEQ ID NO: 192526 - RNA, 19 nt, Artificial Sequence
  Description of Artificial Sequence: Synthetic oligonucleotide
  Sense strand starting at position 2632 of SEQ ID NO: 2482
aguugcccugauuauacau

SEQ ID NO: 192527 - RNA, 19 nt, Artificial Sequence
  Description of Artificial Sequence: Synthetic oligonucleotide
  Antisense strand to SEQ ID NO: 192526
auguauaaucagggcaacu

SEQ ID NO: 192528 - RNA, 19 nt, Artificial Sequence
  Description of Artificial Sequence: Synthetic oligonucleotide
  Sense strand starting at position 2626 of SEQ ID NO: 2482
gacuaaaguugcccugauu

SEQ ID NO: 192529 - RNA, 19 nt, Artificial Sequence
  Description of Artificial Sequence: Synthetic oligonucleotide
  Antisense strand to SEQ ID NO: 192528
aaucagggcaacuuuaguc

SEQ ID NO: 192530 - RNA, 19 nt, Artificial Sequence
  Description of Artificial Sequence: Synthetic oligonucleotide
  Sense strand starting at position 2625 of SEQ ID NO: 2482
agacuaaaguugcccugau

SEQ ID NO: 192531 - RNA, 19 nt, Artificial Sequence
  Description of Artificial Sequence: Synthetic oligonucleotide
  Antisense strand to SEQ ID NO: 192530
aucagggcaacuuuagucu

SEQ ID NO: 192532 - RNA, 19 nt, Artificial Sequence
  Description of Artificial Sequence: Synthetic oligonucleotide
  Sense strand starting at position 2431 of SEQ ID NO: 2482
auguguuucugaccaaagg

SEQ ID NO: 192533 - RNA, 19 nt, Artificial Sequence
  Description of Artificial Sequence: Synthetic oligonucleotide
  Antisense strand to SEQ ID NO: 192532
ccuuuggucagaaacacau

SEQ ID NO: 192534 - RNA, 19 nt, Artificial Sequence
  Description of Artificial Sequence: Synthetic oligonucleotide
  Sense strand starting at position 2380 of SEQ ID NO: 2482
guggaacuguccuugcaag

SEQ ID NO: 192535 - RNA, 19 nt, Artificial Sequence
  Description of Artificial Sequence: Synthetic oligonucleotide
  Antisense strand to SEQ ID NO: 192534
cuugcaaggacaguuccac

SEQ ID NO: 192536 - RNA, 19 nt, Artificial Sequence
  Description of Artificial Sequence: Synthetic oligonucleotide
  Sense strand starting at position 2258 of SEQ ID NO: 2482
ucaucuucuguuggagaaa

SEQ ID NO: 192537 - RNA, 19 nt, Artificial Sequence
  Description of Artificial Sequence: Synthetic oligonucleotide
  Antisense strand to SEQ ID NO: 192536
uuucuccaacagaagauga

SEQ ID NO: 192538 - RNA, 19 nt, Artificial Sequence
  Description of Artificial Sequence: Synthetic oligonucleotide
  Sense strand starting at position 2230 of SEQ ID NO: 2482
guuccugagugucuaaaca

SEQ ID NO: 192539 - RNA, 19 nt, Artificial Sequence
  Description of Artificial Sequence: Synthetic oligonucleotide
  Antisense strand to SEQ ID NO: 192538
uguuuagacacucaggaac

SEQ ID NO: 192540 - RNA, 19 nt, Artificial Sequence
  Description of Artificial Sequence: Synthetic oligonucleotide
  Sense strand starting at position 2227 of SEQ ID NO: 2482
ucuguuccugagugucuaa

SEQ ID NO: 192541 - RNA, 19 nt, Artificial Sequence
  Description of Artificial Sequence: Synthetic oligonucleotide
  Antisense strand to SEQ ID NO: 192540
uuagacacucaggaacaga

SEQ ID NO: 192542 - RNA, 19 nt, Artificial Sequence
  Description of Artificial Sequence: Synthetic oligonucleotide
  Sense strand starting at position 2065 of SEQ ID NO: 2482
gccuccuuugguuaugagu

SEQ ID NO: 192543 - RNA, 19 nt, Artificial Sequence
  Description of Artificial Sequence: Synthetic oligonucleotide
  Antisense strand to SEQ ID NO: 192542
acucauaaccaaaggaggc

SEQ ID NO: 192544 - RNA, 19 nt, Artificial Sequence
  Description of Artificial Sequence: Synthetic oligonucleotide
  Sense strand starting at position 2032 of SEQ ID NO: 2482
caaugucccugauuggaca

SEQ ID NO: 192545 - RNA, 19 nt, Artificial Sequence
  Description of Artificial Sequence: Synthetic oligonucleotide
  Antisense strand to SEQ ID NO: 192544
uguccaaucagggacauug

SEQ ID NO: 192546 - RNA, 19 nt, Artificial Sequence
  Description of Artificial Sequence: Synthetic oligonucleotide
  Sense strand starting at position 2030 of SEQ ID NO: 2482
gucaaugucccugauugga

SEQ ID NO: 192547 - RNA, 19 nt, Artificial Sequence
  Description of Artificial Sequence: Synthetic oligonucleotide
  Antisense strand to SEQ ID NO: 192546
uccaaucagggacauugac

SEQ ID NO: 192548 - RNA, 19 nt, Artificial Sequence
  Description of Artificial Sequence: Synthetic oligonucleotide
  Sense strand starting at position 1276 of SEQ ID NO: 2482
uguaacugucgucaauuau

SEQ ID NO: 192549 - RNA, 19 nt, Artificial Sequence
  Description of Artificial Sequence: Synthetic oligonucleotide
  Antisense strand to SEQ ID NO: 192548
auaauugacgacaguuaca

SEQ ID NO: 192550 - RNA, 19 nt, Artificial Sequence
  Description of Artificial Sequence: Synthetic oligonucleotide
  Sense strand starting at position 1275 of SEQ ID NO: 2482
cuguaacugucgucaauua

SEQ ID NO: 192551 - RNA, 19 nt, Artificial Sequence
  Description of Artificial Sequence: Synthetic oligonucleotide
  Antisense strand to SEQ ID NO: 192550
uaauugacgacaguuacag

SEQ ID NO: 192552 - RNA, 19 nt, Artificial Sequence
  Description of Artificial Sequence: Synthetic oligonucleotide
  Sense strand starting at position 1264 of SEQ ID NO: 2482
aaauaaggugacuguaacu

SEQ ID NO: 192553 - RNA, 19 nt, Artificial Sequence
  Description of Artificial Sequence: Synthetic oligonucleotide
  Antisense strand to SEQ ID NO: 192552
aguuacagucaccuuauuu

SEQ ID NO: 192554 - RNA, 19 nt, Artificial Sequence
  Description of Artificial Sequence: Synthetic oligonucleotide
  Sense strand starting at position 1169 of SEQ ID NO: 2482
cugccuuaaguagaaacaa

SEQ ID NO: 192555 - RNA, 19 nt, Artificial Sequence
  Description of Artificial Sequence: Synthetic oligonucleotide
  Antisense strand to SEQ ID NO: 192554
uuguuucuacuuaaggcag

SEQ ID NO: 192556 - RNA, 19 nt, Artificial Sequence
  Description of Artificial Sequence: Synthetic oligonucleotide
  Sense strand starting at position 1163 of SEQ ID NO: 2482
uaaugacugccuuaaguag

SEQ ID NO: 192557 - RNA, 19 nt, Artificial Sequence
  Description of Artificial Sequence: Synthetic oligonucleotide
  Antisense strand to SEQ ID NO: 192556
cuacuuaaggcagucauua

SEQ ID NO: 192558 - RNA, 19 nt, Artificial Sequence
  Description of Artificial Sequence: Synthetic oligonucleotide
  Sense strand starting at position 1161 of SEQ ID NO: 2482
guuaaugacugccuuaagu

SEQ ID NO: 192559 - RNA, 19 nt, Artificial Sequence
  Description of Artificial Sequence: Synthetic oligonucleotide
  Antisense strand to SEQ ID NO: 192558
acuuaaggcagucauuaac

SEQ ID NO: 192560 - RNA, 19 nt, Artificial Sequence
  Description of Artificial Sequence: Synthetic oligonucleotide
  Sense strand starting at position 1158 of SEQ ID NO: 2482
cuuguuaaugacugccuua

SEQ ID NO: 192561 - RNA, 19 nt, Artificial Sequence
  Description of Artificial Sequence: Synthetic oligonucleotide
  Antisense strand to SEQ ID NO: 192560
uaaggcagucauuaacaag

SEQ ID NO: 192562 - RNA, 19 nt, Artificial Sequence
  Description of Artificial Sequence: Synthetic oligonucleotide
  Sense strand starting at position 1108 of SEQ ID NO: 2482
gugucuugcguuucuacau

SEQ ID NO: 192563 - RNA, 19 nt, Artificial Sequence
  Description of Artificial Sequence: Synthetic oligonucleotide
  Antisense strand to SEQ ID NO: 192562
auguagaaacgcaagacac

SEQ ID NO: 192564 - RNA, 19 nt, Artificial Sequence
  Description of Artificial Sequence: Synthetic oligonucleotide
  Sense strand starting at position 1107 of SEQ ID NO: 2482
agugucuugcguuucuaca

SEQ ID NO: 192565 - RNA, 19 nt, Artificial Sequence
  Description of Artificial Sequence: Synthetic oligonucleotide
  Antisense strand to SEQ ID NO: 192564
uguagaaacgcaagacacu

SEQ ID NO: 192566 - RNA, 19 nt, Artificial Sequence
  Description of Artificial Sequence: Synthetic oligonucleotide
  Sense strand starting at position 1054 of SEQ ID NO: 2482
gucucuugugcaguguuaa

SEQ ID NO: 192567 - RNA, 19 nt, Artificial Sequence
  Description of Artificial Sequence: Synthetic oligonucleotide
  Antisense strand to SEQ ID NO: 192566
uuaacacugcacaagagac

SEQ ID NO: 192568 - RNA, 19 nt, Artificial Sequence
  Description of Artificial Sequence: Synthetic oligonucleotide
  Sense strand starting at position 896 of SEQ ID NO: 2482
aguguugugaacugaagag

SEQ ID NO: 192569 - RNA, 19 nt, Artificial Sequence
  Description of Artificial Sequence: Synthetic oligonucleotide
  Antisense strand to SEQ ID NO: 192568
cucuucaguucacaacacu

SEQ ID NO: 192570 - RNA, 19 nt, Artificial Sequence
  Description of Artificial Sequence: Synthetic oligonucleotide
  Sense strand starting at position 854 of SEQ ID NO: 2482
aauauugugccuggaguac

SEQ ID NO: 192571 - RNA, 19 nt, Artificial Sequence
  Description of Artificial Sequence: Synthetic oligonucleotide
  Antisense strand to SEQ ID NO: 192570
guacuccaggcacaauauu

SEQ ID NO: 192572 - RNA, 19 nt, Artificial Sequence
  Description of Artificial Sequence: Synthetic oligonucleotide
  Sense strand starting at position 853 of SEQ ID NO: 2482
aaauauugugccuggagua

SEQ ID NO: 192573 - RNA, 19 nt, Artificial Sequence
  Description of Artificial Sequence: Synthetic oligonucleotide
  Antisense strand to SEQ ID NO: 192572
uacuccaggcacaauauuu

SEQ ID NO: 192574 - RNA, 19 nt, Artificial Sequence
  Description of Artificial Sequence: Synthetic oligonucleotide
  Sense strand starting at position 813 of SEQ ID NO: 2482
aagagugcccuccaauguu

SEQ ID NO: 192575 - RNA, 19 nt, Artificial Sequence
  Description of Artificial Sequence: Synthetic oligonucleotide
  Antisense strand to SEQ ID NO: 192574
aacauuggagggcacucuu

SEQ ID NO: 192576 - RNA, 19 nt, Artificial Sequence
  Description of Artificial Sequence: Synthetic oligonucleotide
  Sense strand starting at position 757 of SEQ ID NO: 2482
cgagacuccuucuuaaaga

SEQ ID NO: 192577 - RNA, 19 nt, Artificial Sequence
  Description of Artificial Sequence: Synthetic oligonucleotide
  Antisense strand to SEQ ID NO: 192576
ucuuuaagaaggagucucg

SEQ ID NO: 192578 - RNA, 19 nt, Artificial Sequence
  Description of Artificial Sequence: Synthetic oligonucleotide
  Sense strand starting at position 131 of SEQ ID NO: 2482
agagcaagauccucuuaaa

SEQ ID NO: 192579 - RNA, 19 nt, Artificial Sequence
  Description of Artificial Sequence: Synthetic oligonucleotide
  Antisense strand to SEQ ID NO: 192578
uuuaagaggaucuugcucu

SEQ ID NO: 192580 - RNA, 19 nt, Artificial Sequence
  Description of Artificial Sequence: Synthetic oligonucleotide
  Sense strand starting at position 90 of SEQ ID NO: 2482
gagcuaugacaaugucacu

SEQ ID NO: 192581 - RNA, 19 nt, Artificial Sequence
  Description of Artificial Sequence: Synthetic oligonucleotide
  Antisense strand to SEQ ID NO: 192580
agugacauugucauagcuc

SEQ ID NO: 192582 - RNA, 19 nt, Artificial Sequence
  Description of Artificial Sequence: Synthetic oligonucleotide
  Sense strand starting at position 8 of SEQ ID NO: 2483
auuugaaguugccacagau

SEQ ID NO: 192583 - RNA, 19 nt, Artificial Sequence
  Description of Artificial Sequence: Synthetic oligonucleotide
  Antisense strand to SEQ ID NO: 192582
aucuguggcaacuucaaau

SEQ ID NO: 192584 - RNA, 19 nt, Artificial Sequence
  Description of Artificial Sequence: Synthetic oligonucleotide
  Sense strand starting at position 129 of SEQ ID NO: 2483
ugauguggauugcagugaa

SEQ ID NO: 192585 - RNA, 19 nt, Artificial Sequence
  Description of Artificial Sequence: Synthetic oligonucleotide
  Antisense strand to SEQ ID NO: 192584
uucacugcaauccacauca

SEQ ID NO: 192586 - RNA, 19 nt, Artificial Sequence
  Description of Artificial Sequence: Synthetic oligonucleotide
  Sense strand starting at position 132 of SEQ ID NO: 2483
uguggauugcagugaacug

SEQ ID NO: 192587 - RNA, 19 nt, Artificial Sequence
  Description of Artificial Sequence: Synthetic oligonucleotide
  Antisense strand to SEQ ID NO: 192586
caguucacugcaauccaca

SEQ ID NO: 192588 - RNA, 19 nt, Artificial Sequence
  Description of Artificial Sequence: Synthetic oligonucleotide
  Sense strand starting at position 191 of SEQ ID NO: 2483
gcuguuauuucuguucuca

SEQ ID NO: 192589 - RNA, 19 nt, Artificial Sequence
  Description of Artificial Sequence: Synthetic oligonucleotide
  Antisense strand to SEQ ID NO: 192588
ugagaacagaaauaacagc

SEQ ID NO: 192590 - RNA, 19 nt, Artificial Sequence
  Description of Artificial Sequence: Synthetic oligonucleotide
  Sense strand starting at position 761 of SEQ ID NO: 2483
gcugcagugaacuaggaua

SEQ ID NO: 192591 - RNA, 19 nt, Artificial Sequence
  Description of Artificial Sequence: Synthetic oligonucleotide
  Antisense strand to SEQ ID NO: 192590
uauccuaguucacugcagc

SEQ ID NO: 192592 - RNA, 19 nt, Artificial Sequence
  Description of Artificial Sequence: Synthetic oligonucleotide
  Sense strand starting at position 763 of SEQ ID NO: 2483
ugcagugaacuaggauauu

SEQ ID NO: 192593 - RNA, 19 nt, Artificial Sequence
  Description of Artificial Sequence: Synthetic oligonucleotide
  Antisense strand to SEQ ID NO: 192592
aauauccuaguucacugca

SEQ ID NO: 192594 - RNA, 19 nt, Artificial Sequence
  Description of Artificial Sequence: Synthetic oligonucleotide
  Sense strand starting at position 1233 of SEQ ID NO: 2483
uagccugagcaaugucauu

SEQ ID NO: 192595 - RNA, 19 nt, Artificial Sequence
  Description of Artificial Sequence: Synthetic oligonucleotide
  Antisense strand to SEQ ID NO: 192594
aaugacauugcucaggcua

SEQ ID NO: 192596 - RNA, 19 nt, Artificial Sequence
  Description of Artificial Sequence: Synthetic oligonucleotide
  Sense strand starting at position 1238 of SEQ ID NO: 2483
ugagcaaugucauuauucu

SEQ ID NO: 192597 - RNA, 19 nt, Artificial Sequence
  Description of Artificial Sequence: Synthetic oligonucleotide
  Antisense strand to SEQ ID NO: 192596
agaauaaugacauugcuca

SEQ ID NO: 192598 - RNA, 19 nt, Artificial Sequence
  Description of Artificial Sequence: Synthetic oligonucleotide
  Sense strand starting at position 1244 of SEQ ID NO: 2483
augucauuauucuugugag

SEQ ID NO: 192599 - RNA, 19 nt, Artificial Sequence
  Description of Artificial Sequence: Synthetic oligonucleotide
  Antisense strand to SEQ ID NO: 192598
cucacaagaauaaugacau

SEQ ID NO: 192600 - RNA, 19 nt, Artificial Sequence
  Description of Artificial Sequence: Synthetic oligonucleotide
  Sense strand starting at position 1251 of SEQ ID NO: 2483
uauucuugugagcaugaga

SEQ ID NO: 192601 - RNA, 19 nt, Artificial Sequence
  Description of Artificial Sequence: Synthetic oligonucleotide
  Antisense strand to SEQ ID NO: 192600
ucucaugcucacaagaaua

SEQ ID NO: 192602 - RNA, 19 nt, Artificial Sequence
  Description of Artificial Sequence: Synthetic oligonucleotide
  Sense strand starting at position 1374 of SEQ ID NO: 2483
ccuggugucccagaauaua

SEQ ID NO: 192603 - RNA, 19 nt, Artificial Sequence
  Description of Artificial Sequence: Synthetic oligonucleotide
  Antisense strand to SEQ ID NO: 192602
uauauucugggacaccagg

SEQ ID NO: 192604 - RNA, 19 nt, Artificial Sequence
  Description of Artificial Sequence: Synthetic oligonucleotide
  Sense strand starting at position 1465 of SEQ ID NO: 2483
ggcugugacucauccucca

SEQ ID NO: 192605 - RNA, 19 nt, Artificial Sequence
  Description of Artificial Sequence: Synthetic oligonucleotide
  Antisense strand to SEQ ID NO: 192604
uggaggaugagucacagcc

SEQ ID NO: 192606 - RNA, 19 nt, Artificial Sequence
  Description of Artificial Sequence: Synthetic oligonucleotide
  Sense strand starting at position 1468 of SEQ ID NO: 2483
ugugacucauccuccacau

SEQ ID NO: 192607 - RNA, 19 nt, Artificial Sequence
  Description of Artificial Sequence: Synthetic oligonucleotide
  Antisense strand to SEQ ID NO: 192606
auguggaggaugagucaca

SEQ ID NO: 192608 - RNA, 19 nt, Artificial Sequence
  Description of Artificial Sequence: Synthetic oligonucleotide
  Sense strand starting at position 1499 of SEQ ID NO: 2483
cauguuugugagcaucuca

SEQ ID NO: 192609 - RNA, 19 nt, Artificial Sequence
  Description of Artificial Sequence: Synthetic oligonucleotide
  Antisense strand to SEQ ID NO: 192608
ugagaugcucacaaacaug

SEQ ID NO: 192610 - RNA, 19 nt, Artificial Sequence
  Description of Artificial Sequence: Synthetic oligonucleotide
  Sense strand starting at position 1524 of SEQ ID NO: 2483
ggguccucugucuacucau

SEQ ID NO: 192611 - RNA, 19 nt, Artificial Sequence
  Description of Artificial Sequence: Synthetic oligonucleotide
  Antisense strand to SEQ ID NO: 192610
augaguagacagaggaccc

SEQ ID NO: 192612 - RNA, 19 nt, Artificial Sequence
  Description of Artificial Sequence: Synthetic oligonucleotide
  Sense strand starting at position 1606 of SEQ ID NO: 2483
cuacaugagucuugaggga

SEQ ID NO: 192613 - RNA, 19 nt, Artificial Sequence
  Description of Artificial Sequence: Synthetic oligonucleotide
  Antisense strand to SEQ ID NO: 192612
ucccucaagacucauguag

SEQ ID NO: 192614 - RNA, 19 nt, Artificial Sequence
  Description of Artificial Sequence: Synthetic oligonucleotide
  Sense strand starting at position 1830 of SEQ ID NO: 2483
gcacaacuucucuguuaga

SEQ ID NO: 192615 - RNA, 19 nt, Artificial Sequence
  Description of Artificial Sequence: Synthetic oligonucleotide
  Antisense strand to SEQ ID NO: 192614
ucuaacagagaaguugugc

SEQ ID NO: 192616 - RNA, 19 nt, Artificial Sequence
  Description of Artificial Sequence: Synthetic oligonucleotide
  Sense strand starting at position 1948 of SEQ ID NO: 2483
ugcucagguuccucaguua

SEQ ID NO: 192617 - RNA, 19 nt, Artificial Sequence
  Description of Artificial Sequence: Synthetic oligonucleotide
  Antisense strand to SEQ ID NO: 192616
uaacugaggaaccugagca

SEQ ID NO: 192618 - RNA, 19 nt, Artificial Sequence
  Description of Artificial Sequence: Synthetic oligonucleotide
  Sense strand starting at position 1951 of SEQ ID NO: 2483
ucagguuccucaguuagaa

SEQ ID NO: 192619 - RNA, 19 nt, Artificial Sequence
  Description of Artificial Sequence: Synthetic oligonucleotide
  Antisense strand to SEQ ID NO: 192618
uucuaacugaggaaccuga

SEQ ID NO: 192620 - RNA, 19 nt, Artificial Sequence
  Description of Artificial Sequence: Synthetic oligonucleotide
  Sense strand starting at position 2010 of SEQ ID NO: 2483
gggacaaagugacaucaca

SEQ ID NO: 192621 - RNA, 19 nt, Artificial Sequence
  Description of Artificial Sequence: Synthetic oligonucleotide
  Antisense strand to SEQ ID NO: 192620
ugugaugucacuuuguccc

SEQ ID NO: 192622 - RNA, 19 nt, Artificial Sequence
  Description of Artificial Sequence: Synthetic oligonucleotide
  Sense strand starting at position 2067 of SEQ ID NO: 2483
gacagaugaucugggagac

SEQ ID NO: 192623 - RNA, 19 nt, Artificial Sequence
  Description of Artificial Sequence: Synthetic oligonucleotide
  Antisense strand to SEQ ID NO: 192622
gucucccagaucaucuguc

SEQ ID NO: 192624 - RNA, 19 nt, Artificial Sequence
  Description of Artificial Sequence: Synthetic oligonucleotide
  Sense strand starting at position 2183 of SEQ ID NO: 2483
gagucuugugagcaugaga

SEQ ID NO: 192625 - RNA, 19 nt, Artificial Sequence
  Description of Artificial Sequence: Synthetic oligonucleotide
  Antisense strand to SEQ ID NO: 192624
ucucaugcucacaagacuc

SEQ ID NO: 192626 - RNA, 19 nt, Artificial Sequence
  Description of Artificial Sequence: Synthetic oligonucleotide
  Sense strand starting at position 2228 of SEQ ID NO: 2483
caaauucuggugugcguga

SEQ ID NO: 192627 - RNA, 19 nt, Artificial Sequence
  Description of Artificial Sequence: Synthetic oligonucleotide
  Antisense strand to SEQ ID NO: 192626
ucacgcacaccagaauuug

SEQ ID NO: 192628 - RNA, 19 nt, Artificial Sequence
  Description of Artificial Sequence: Synthetic oligonucleotide
  Sense strand starting at position 2560 of SEQ ID NO: 2483
cugagauggcucugcuaca

SEQ ID NO: 192629 - RNA, 19 nt, Artificial Sequence
  Description of Artificial Sequence: Synthetic oligonucleotide
  Antisense strand to SEQ ID NO: 192628
uguagcagagccaucucag

SEQ ID NO: 192630 - RNA, 19 nt, Artificial Sequence
  Description of Artificial Sequence: Synthetic oligonucleotide
  Sense strand starting at position 2654 of SEQ ID NO: 2483
gguggcaggucuguggaaa

SEQ ID NO: 192631 - RNA, 19 nt, Artificial Sequence
  Description of Artificial Sequence: Synthetic oligonucleotide
  Antisense strand to SEQ ID NO: 192630
uuuccacagaccugccacc

SEQ ID NO: 192632 - RNA, 19 nt, Artificial Sequence
  Description of Artificial Sequence: Synthetic oligonucleotide
  Sense strand starting at position 2665 of SEQ ID NO: 2483
uguggaaacuccucucuac

SEQ ID NO: 192633 - RNA, 19 nt, Artificial Sequence
  Description of Artificial Sequence: Synthetic oligonucleotide
  Antisense strand to SEQ ID NO: 192632
guagagaggaguuuccaca

SEQ ID NO: 192634 - RNA, 19 nt, Artificial Sequence
  Description of Artificial Sequence: Synthetic oligonucleotide
  Sense strand starting at position 2778 of SEQ ID NO: 2483
gggugugauauuuggccau

SEQ ID NO: 192635 - RNA, 19 nt, Artificial Sequence
  Description of Artificial Sequence: Synthetic oligonucleotide
  Antisense strand to SEQ ID NO: 192634
auggccaaauaucacaccc

SEQ ID NO: 192636 - RNA, 19 nt, Artificial Sequence
  Description of Artificial Sequence: Synthetic oligonucleotide
  Sense strand starting at position 2781 of SEQ ID NO: 2483
ugugauauuuggccauggu

SEQ ID NO: 192637 - RNA, 19 nt, Artificial Sequence
  Description of Artificial Sequence: Synthetic oligonucleotide
  Antisense strand to SEQ ID NO: 192636
accauggccaaauaucaca

SEQ ID NO: 192638 - RNA, 19 nt, Artificial Sequence
  Description of Artificial Sequence: Synthetic oligonucleotide
  Sense strand starting at position 3171 of SEQ ID NO: 2483
ccaagagcucuuuaguggu

SEQ ID NO: 192639 - RNA, 19 nt, Artificial Sequence
  Description of Artificial Sequence: Synthetic oligonucleotide
  Antisense strand to SEQ ID NO: 192638
accacuaaagagcucuugg

SEQ ID NO: 192640 - RNA, 19 nt, Artificial Sequence
  Description of Artificial Sequence: Synthetic oligonucleotide
  Sense strand starting at position 3173 of SEQ ID NO: 2483
aagagcucuuuagugguaa

SEQ ID NO: 192641 - RNA, 19 nt, Artificial Sequence
  Description of Artificial Sequence: Synthetic oligonucleotide
  Antisense strand to SEQ ID NO: 192640
uuaccacuaaagagcucuu

SEQ ID NO: 192642 - RNA, 19 nt, Artificial Sequence
  Description of Artificial Sequence: Synthetic oligonucleotide
  Sense strand starting at position 3422 of SEQ ID NO: 2483
ccugcugucuugcugggaa

SEQ ID NO: 192643 - RNA, 19 nt, Artificial Sequence
  Description of Artificial Sequence: Synthetic oligonucleotide
  Antisense strand to SEQ ID NO: 192642
uucccagcaagacagcagg

SEQ ID NO: 192644 - RNA, 19 nt, Artificial Sequence
  Description of Artificial Sequence: Synthetic oligonucleotide
  Sense strand starting at position 3425 of SEQ ID NO: 2483
gcugucuugcugggaauca

SEQ ID NO: 192645 - RNA, 19 nt, Artificial Sequence
  Description of Artificial Sequence: Synthetic oligonucleotide
  Antisense strand to SEQ ID NO: 192644
ugauucccagcaagacagc

SEQ ID NO: 192646 - RNA, 19 nt, Artificial Sequence
  Description of Artificial Sequence: Synthetic oligonucleotide
  Sense strand starting at position 3573 of SEQ ID NO: 2483
gcacaaccucucuguuaga

SEQ ID NO: 192647 - RNA, 19 nt, Artificial Sequence
  Description of Artificial Sequence: Synthetic oligonucleotide
  Antisense strand to SEQ ID NO: 192646
ucuaacagagagguugugc

SEQ ID NO: 192648 - RNA, 19 nt, Artificial Sequence
  Description of Artificial Sequence: Synthetic oligonucleotide
  Sense strand starting at position 3604 of SEQ ID NO: 2483
aggaaauggccuuggagau

SEQ ID NO: 192649 - RNA, 19 nt, Artificial Sequence
  Description of Artificial Sequence: Synthetic oligonucleotide
  Antisense strand to SEQ ID NO: 192648
aucuccaaggccauuuccu

SEQ ID NO: 192650 - RNA, 19 nt, Artificial Sequence
  Description of Artificial Sequence: Synthetic oligonucleotide
  Sense strand starting at position 3629 of SEQ ID NO: 2483
gucuccaauccugaaagcu

SEQ ID NO: 192651 - RNA, 19 nt, Artificial Sequence
  Description of Artificial Sequence: Synthetic oligonucleotide
  Antisense strand to SEQ ID NO: 192650
agcuuucaggauuggagac

SEQ ID NO: 192652 - RNA, 19 nt, Artificial Sequence
  Description of Artificial Sequence: Synthetic oligonucleotide
  Sense strand starting at position 3638 of SEQ ID NO: 2483
ccugaaagcucccuggcuu

SEQ ID NO: 192653 - RNA, 19 nt, Artificial Sequence
  Description of Artificial Sequence: Synthetic oligonucleotide
  Antisense strand to SEQ ID NO: 192652
aagccagggagcuuucagg

SEQ ID NO: 192654 - RNA, 19 nt, Artificial Sequence
  Description of Artificial Sequence: Synthetic oligonucleotide
  Sense strand starting at position 3700 of SEQ ID NO: 2483
cagguucccacguggagaa

SEQ ID NO: 192655 - RNA, 19 nt, Artificial Sequence
  Description of Artificial Sequence: Synthetic oligonucleotide
  Antisense strand to SEQ ID NO: 192654
uucuccacgugggaaccug

SEQ ID NO: 192656 - RNA, 19 nt, Artificial Sequence
  Description of Artificial Sequence: Synthetic oligonucleotide
  Sense strand starting at position 3746 of SEQ ID NO: 2483
ugucaucucccagaucauc

SEQ ID NO: 192657 - RNA, 19 nt, Artificial Sequence
  Description of Artificial Sequence: Synthetic oligonucleotide
  Antisense strand to SEQ ID NO: 192656
gaugaucugggagaugaca

SEQ ID NO: 192658 - RNA, 19 nt, Artificial Sequence
  Description of Artificial Sequence: Synthetic oligonucleotide
  Sense strand starting at position 3754 of SEQ ID NO: 2483
cccagaucaucugucuugu

SEQ ID NO: 192659 - RNA, 19 nt, Artificial Sequence
  Description of Artificial Sequence: Synthetic oligonucleotide
  Antisense strand to SEQ ID NO: 192658
acaagacagaugaucuggg

SEQ ID NO: 192660 - RNA, 19 nt, Artificial Sequence
  Description of Artificial Sequence: Synthetic oligonucleotide
  Sense strand starting at position 3786 of SEQ ID NO: 2483
ugugaugucacaggccuaa

SEQ ID NO: 192661 - RNA, 19 nt, Artificial Sequence
  Description of Artificial Sequence: Synthetic oligonucleotide
  Antisense strand to SEQ ID NO: 192660
uuaggccugugacaucaca

SEQ ID NO: 192662 - RNA, 19 nt, Artificial Sequence
  Description of Artificial Sequence: Synthetic oligonucleotide
  Sense strand starting at position 3947 of SEQ ID NO: 2484
auuaguacccacugacuuu

SEQ ID NO: 192663 - RNA, 19 nt, Artificial Sequence
  Description of Artificial Sequence: Synthetic oligonucleotide
  Antisense strand to SEQ ID NO: 192662
aaagucaguggguacuaau

SEQ ID NO: 192664 - RNA, 19 nt, Artificial Sequence
  Description of Artificial Sequence: Synthetic oligonucleotide
  Sense strand starting at position 3943 of SEQ ID NO: 2484
ugauauuaguacccacuga

SEQ ID NO: 192665 - RNA, 19 nt, Artificial Sequence
  Description of Artificial Sequence: Synthetic oligonucleotide
  Antisense strand to SEQ ID NO: 192664
ucaguggguacuaauauca

SEQ ID NO: 192666 - RNA, 19 nt, Artificial Sequence
  Description of Artificial Sequence: Synthetic oligonucleotide
  Sense strand starting at position 3895 of SEQ ID NO: 2484
ugauauuaguagccauuau

SEQ ID NO: 192667 - RNA, 19 nt, Artificial Sequence
  Description of Artificial Sequence: Synthetic oligonucleotide
  Antisense strand to SEQ ID NO: 192666
auaauggcuacuaauauca

SEQ ID NO: 192668 - RNA, 19 nt, Artificial Sequence
  Description of Artificial Sequence: Synthetic oligonucleotide
  Sense strand starting at position 3826 of SEQ ID NO: 2484
uaugaaugugagcaaguga

SEQ ID NO: 192669 - RNA, 19 nt, Artificial Sequence
  Description of Artificial Sequence: Synthetic oligonucleotide
  Antisense strand to SEQ ID NO: 192668
ucacuugcucacauucaua

SEQ ID NO: 192670 - RNA, 19 nt, Artificial Sequence
  Description of Artificial Sequence: Synthetic oligonucleotide
  Sense strand starting at position 3799 of SEQ ID NO: 2484
gcaucugagauucgauaaa

SEQ ID NO: 192671 - RNA, 19 nt, Artificial Sequence
  Description of Artificial Sequence: Synthetic oligonucleotide
  Antisense strand to SEQ ID NO: 192670
uuuaucgaaucucagaugc

SEQ ID NO: 192672 - RNA, 19 nt, Artificial Sequence
  Description of Artificial Sequence: Synthetic oligonucleotide
  Sense strand starting at position 3735 of SEQ ID NO: 2484
uaguuuaaucaggagcauu

SEQ ID NO: 192673 - RNA, 19 nt, Artificial Sequence
  Description of Artificial Sequence: Synthetic oligonucleotide
  Antisense strand to SEQ ID NO: 192672
aaugcuccugauuaaacua

SEQ ID NO: 192674 - RNA, 19 nt, Artificial Sequence
  Description of Artificial Sequence: Synthetic oligonucleotide
  Sense strand starting at position 3723 of SEQ ID NO: 2484
gauggcauuccauaguuua

SEQ ID NO: 192675 - RNA, 19 nt, Artificial Sequence
  Description of Artificial Sequence: Synthetic oligonucleotide
  Antisense strand to SEQ ID NO: 192674
uaaacuauggaaugccauc

SEQ ID NO: 192676 - RNA, 19 nt, Artificial Sequence
  Description of Artificial Sequence: Synthetic oligonucleotide
  Sense strand starting at position 3702 of SEQ ID NO: 2484
ugaaauugcugucuuacaa

SEQ ID NO: 192677 - RNA, 19 nt, Artificial Sequence
  Description of Artificial Sequence: Synthetic oligonucleotide
  Antisense strand to SEQ ID NO: 192676
uuguaagacagcaauuuca

SEQ ID NO: 192678 - RNA, 19 nt, Artificial Sequence
  Description of Artificial Sequence: Synthetic oligonucleotide
  Sense strand starting at position 3530 of SEQ ID NO: 2484
gacaaauauggugguagga

SEQ ID NO: 192679 - RNA, 19 nt, Artificial Sequence
  Description of Artificial Sequence: Synthetic oligonucleotide
  Antisense strand to SEQ ID NO: 192678
uccuaccaccauauuuguc

SEQ ID NO: 192680 - RNA, 19 nt, Artificial Sequence
  Description of Artificial Sequence: Synthetic oligonucleotide
  Sense strand starting at position 3499 of SEQ ID NO: 2484
cagaguuuauaaguacaga

SEQ ID NO: 192681 - RNA, 19 nt, Artificial Sequence
  Description of Artificial Sequence: Synthetic oligonucleotide
  Antisense strand to SEQ ID NO: 192680
ucuguacuuauaaacucug

SEQ ID NO: 192682 - RNA, 19 nt, Artificial Sequence
  Description of Artificial Sequence: Synthetic oligonucleotide
  Sense strand starting at position 3343 of SEQ ID NO: 2484
ccaguagaggcgggaaaua

SEQ ID NO: 192683 - RNA, 19 nt, Artificial Sequence
  Description of Artificial Sequence: Synthetic oligonucleotide
  Antisense strand to SEQ ID NO: 192682
uauuucccgccucuacugg

SEQ ID NO: 192684 - RNA, 19 nt, Artificial Sequence
  Description of Artificial Sequence: Synthetic oligonucleotide
  Sense strand starting at position 2469 of SEQ ID NO: 2484
uuugauaaagucugaugaa
